United States Patent Application Publication US 2022/0267394 A1 - sequence listing, part 6

SEQ ID NO: 63932 - protein, 38 aa, Artificial Sequence; identical to SEQ ID NO: 12169
  GFR-binding peptide
  MOD_RES (1), (35), (36): Xaa is C or S
  MOD_RES (13), (14), (15), (16), (17): Xaa is A or G
  MOD_RES (18), (19), (20), (21): Xaa is A or G or is absent

SEQ ID NO: 63933 - protein, 41 aa, Artificial Sequence; identical to SEQ ID NO: 25821
  GFR-binding peptide
  MOD_RES (2), (36), (37): Xaa is C or S
  MOD_RES (14), (15), (16), (17), (18): Xaa is A or G
  MOD_RES (19), (20), (21), (22): Xaa is A or G or is absent

SEQ ID NO: 63934 - protein, 39 aa, Artificial Sequence; identical to SEQ ID NO: 4744
  GFR-binding peptide
  MOD_RES (2), (34), (35): Xaa is C or S

SEQ ID NO: 63935 - protein, 33 aa, Artificial Sequence
  GFR-binding peptide
  MOD_RES (32), (33): Xaa is C or S
SEVTMNPIKGYVVNKNEDFYLINIPSMKEPVXX

SEQ ID NO: 63936 - protein, 37 aa, Artificial Sequence
  GFR-binding peptide
  MOD_RES (1), (35), (36): Xaa is C or S
  MOD_RES (13), (14), (15), (16), (17): Xaa is A or G
  MOD_RES (18), (19), (20), (21): Xaa is A or G or is absent
XRDVVMGYHYKLXXXXXXXXXKYLMSIPSMKTPTXXP

SEQ ID NO: 63937 - protein, 37 aa, Artificial Sequence
  GFR-binding peptide
  MOD_RES (34), (35): Xaa is C or S
  MOD_RES (12), (13), (14), (15), (16): Xaa is A or G
  MOD_RES (17), (18), (19), (20): Xaa is A or G or is absent
SEVTMNYHYKLXXXXXXXXXKYLISIPSMKEPVXXPE

SEQ ID NO: 63938 - protein, 37 aa, Artificial Sequence
  GFR-binding peptide
  MOD_RES (2), (34), (35): Xaa is C or S
AXSEVTMNEYKFKVVNKNEDLYLISIPEMKEPVXXPE

SEQ ID NO: 63939 - protein, 35 aa, Artificial Sequence; identical to SEQ ID NO: 25824
  GFR-binding peptide
  MOD_RES (2), (4), (35): Xaa is C or S

SEQ ID NO: 63940 - protein, 41 aa, Artificial Sequence; identical to SEQ ID NO: 25825
  GFR-binding peptide
  MOD_RES (2), (36), (37): Xaa is C or S
  MOD_RES (14), (15), (16), (17), (18): Xaa is A or G
  MOD_RES (19), (20), (21), (22): Xaa is A or G or is absent

SEQ ID NO: 63941 - protein, 32 aa, Artificial Sequence; identical to SEQ ID NO: 31816
  GFR-binding peptide
  MOD_RES (32), (32): Xaa is C or S

SEQ ID NO: 63942 - protein, 37 aa, Artificial Sequence; identical to SEQ ID NO: 4747
  GFR-binding peptide
  MOD_RES (2), (36), (37): Xaa is C or S
  MOD_RES (14), (15), (16), (17), (18): Xaa is A or G
  MOD_RES (19), (20), (21), (22): Xaa is A or G or is absent

SEQ ID NO: 63943 - protein, 36 aa, Artificial Sequence; identical to SEQ ID NO: 31824
  GFR-binding peptide
  MOD_RES (34), (35): Xaa is C or S
  MOD_RES (12), (13), (14), (15), (16): Xaa is A or G
  MOD_RES (17), (18), (19), (20): Xaa is A or G or is absent

SEQ ID NO: 63944 - protein, 32 aa, Artificial Sequence; identical to SEQ ID NO: 25830
  GFR-binding peptide
  MOD_RES (11), (12), (13), (14), (15): Xaa is A or G
  MOD_RES (16), (17), (18), (19): Xaa is A or G or is absent

SEQ ID NO: 63945 - protein, 38 aa, Artificial Sequence; identical to SEQ ID NO: 31828
  GFR-binding peptide
  MOD_RES (1), (35), (36): Xaa is C or S
  MOD_RES (13), (14), (15), (16), (17): Xaa is A or G
  MOD_RES (18), (19), (20), (21): Xaa is A or G or is absent

SEQ ID NO: 63946 - protein, 33 aa, Artificial Sequence; identical to SEQ ID NO: 4753
  GFR-binding peptide
  MOD_RES (33), (33): Xaa is C or S
  MOD_RES (11), (12), (13), (14), (15): Xaa is A or G
  MOD_RES (16), (17), (18), (19): Xaa is A or G or is absent

SEQ ID NO: 63947 - protein, 39 aa, Artificial Sequence; identical to SEQ ID NO: 25834
  GFR-binding peptide
  MOD_RES (2), (33), (34): Xaa is C or S

SEQ ID NO: 63948 - protein, 34 aa, Artificial Sequence
  GFR-binding peptide
  MOD_RES (1), (32), (33): Xaa is C or S
XSRVIMPIKGYVKPKRGVFYLINIPSLAQPVXXP

SEQ ID NO: 63949 - protein, 33 aa, Artificial Sequence; identical to SEQ ID NO: 4755
  GFR-binding peptide
  MOD_RES (31), (32): Xaa is C or S

SEQ ID NO: 63950 - protein, 41 aa, Artificial Sequence
  GFR-binding peptide
  MOD_RES (1), (3), (35), (36): Xaa is C or S
XGXSEVVMDEYKFKVVNNASDLYLISIPELRTPVXXTPPTS

SEQ ID NO: 63951 - protein, 34 aa, Artificial Sequence; identical to SEQ ID NO: 4758
  GFR-binding peptide
  MOD_RES (1), (3): Xaa is C or S

SEQ ID NO: 63952 - protein, 30 aa, Artificial Sequence; identical to SEQ ID NO: 31837
  GFR-binding peptide

SEQ ID NO: 63953 - protein, 38 aa, Artificial Sequence
  GFR-binding peptide
  MOD_RES (1), (33), (34): Xaa is C or S
XSEVTMNEYKFKVVNKNEDLYLISIPEMKEPVXXPEPI

SEQ ID NO: 63954 - protein, 38 aa, Artificial Sequence; identical to SEQ ID NO: 25842
  GFR-binding peptide
  MOD_RES (33), (34): Xaa is C or S
  MOD_RES (11), (12), (13), (14), (15): Xaa is A or G
  MOD_RES (16), (17), (18), (19): Xaa is A or G or is absent

SEQ ID NO: 63955 - protein, 43 aa, Artificial Sequence; identical to SEQ ID NO: 25843
  GFR-binding peptide
  MOD_RES (2), (4), (39), (40): Xaa is C or S
  MOD_RES (17), (18), (19), (20), (21): Xaa is A or G
  MOD_RES (22), (23), (24), (25): Xaa is A or G or is absent

SEQ ID NO: 63956 - protein, 34 aa, Artificial Sequence; identical to SEQ ID NO: 4761
  GFR-binding peptide
  MOD_RES (31), (32): Xaa is C or S

SEQ ID NO: 63957 - protein, 37 aa, Artificial Sequence; identical to SEQ ID NO: 4762
  GFR-binding peptide
  MOD_RES (1), (3), (37): Xaa is C or S
  MOD_RES (15), (16), (17), (18), (19): Xaa is A or G
  MOD_RES (20), (21), (22), (23): Xaa is A or G or is absent

SEQ ID NO: 63958 - protein, 36 aa, Artificial Sequence
  GFR-binding peptide
  MOD_RES (33), (34): Xaa is C or S
  MOD_RES (11), (12), (13), (14), (15): Xaa is A or G
  MOD_RES (16), (17), (18), (19): Xaa is A or G or is absent
DVVMGRHKRLXXXXXXXXXYYLMSTASMKTPTXXPG

SEQ ID NO: 63959 - protein, 38 aa, Artificial Sequence; identical to SEQ ID NO: 4763
  GFR-binding peptide
  MOD_RES (1), (3), (35), (36): Xaa is C or S

SEQ ID NO: 63960 - protein, 37 aa, Artificial Sequence; identical to SEQ ID NO: 4764
  GFR-binding peptide
  MOD_RES (34), (35): Xaa is C or S
  MOD_RES (12), (13), (14), (15), (16): Xaa is A or G
  MOD_RES (17), (18), (19), (20): Xaa is A or G or is absent

SEQ ID NO: 63961 - protein, 38 aa, Artificial Sequence; identical to SEQ ID NO: 4767
  GFR-binding peptide
  MOD_RES (32), (33): Xaa is C or S

SEQ ID NO: 63962 - protein, 40 aa, Artificial Sequence; identical to SEQ ID NO: 25853
  GFR-binding peptide
  MOD_RES (2), (35), (36): Xaa is C or S
  MOD_RES (13), (14), (15), (16), (17): Xaa is A or G
  MOD_RES (18), (19), (20), (21): Xaa is A or G or is absent

SEQ ID NO: 63963 - protein, 39 aa, Artificial Sequence; identical to SEQ ID NO: 4769
  GFR-binding peptide
  MOD_RES (34), (35): Xaa is C or S
  MOD_RES (12), (13), (14), (15), (16): Xaa is A or G
  MOD_RES (17), (18), (19), (20): Xaa is A or G or is absent

SEQ ID NO: 63964 - protein, 33 aa, Artificial Sequence; identical to SEQ ID NO: 25855
  GFR-binding peptide
  MOD_RES (2), (2): Xaa is C or S

SEQ ID NO: 63965 - protein, 36 aa, Artificial Sequence
  GFR-binding peptide
  MOD_RES (1), (33), (34): Xaa is C or S
XSEVVMDRHKRLVVNNASDYYLISTASLRTPVXXTP

SEQ ID NO: 63966 - protein, 33 aa, Artificial Sequence; identical to SEQ ID NO: 4775
  GFR-binding peptide
  MOD_RES (1), (3): Xaa is C or S

SEQ ID NO: 63967 - protein, 41 aa, Artificial Sequence; identical to SEQ ID NO: 4776
  GFR-binding peptide
  MOD_RES (1), (3), (35), (36): Xaa is C or S

SEQ ID NO: 63968 - protein, 35 aa, Artificial Sequence
  GFR-binding peptide
  MOD_RES (34), (35): Xaa is C or S
  MOD_RES (12), (13), (14), (15), (16): Xaa is A or G
  MOD_RES (17), (18), (19), (20): Xaa is A or G or is absent
SEVTMNEYKFKXXXXXXXXXLYLISIPEMKEPVXX

SEQ ID NO: 63969 - protein, 41 aa, Artificial Sequence; identical to SEQ ID NO: 25861
  GFR-binding peptide
  MOD_RES (2), (4), (38), (39): Xaa is C or S
  MOD_RES (16), (17), (18), (19), (20): Xaa is A or G
  MOD_RES (21), (22), (23), (24): Xaa is A or G or is absent

SEQ ID NO: 63970 - protein, 40 aa, Artificial Sequence; identical to SEQ ID NO: 4777
  GFR-binding peptide
  MOD_RES (2), (4), (35), (36): Xaa is C or S

SEQ ID NO: 63971 - protein, 41 aa, Artificial Sequence; identical to SEQ ID NO: 4778
  GFR-binding peptide
  MOD_RES (1), (3), (36), (37): Xaa is C or S
  MOD_RES (14), (15), (16), (17), (18): Xaa is A or G
  MOD_RES (19), (20), (21), (22): Xaa is A or G or is absent

SEQ ID NO: 63972 - protein, 35 aa, Artificial Sequence; identical to SEQ ID NO: 25864
  GFR-binding peptide
  MOD_RES (33), (34): Xaa is C or S
  MOD_RES (11), (12), (13), (14), (15): Xaa is A or G
  MOD_RES (16), (17), (18), (19): Xaa is A or G or is absent

SEQ ID NO: 63973 - protein, 41 aa, Artificial Sequence
  GFR-binding peptide
  MOD_RES (1), (3), (35), (36): Xaa is C or S
XAXSEVTMNRHKRLVVNKNEDYYLISTASMKEPVXXPEPIG

SEQ ID NO: 63974 - protein, 39 aa, Artificial Sequence
  GFR-binding peptide
  MOD_RES (1), (35), (36): Xaa is C or S
  MOD_RES (13), (14), (15), (16), (17): Xaa is A or G
  MOD_RES (18), (19), (20), (21): Xaa is A or G or is absent
XSEVVMDYHYKLXXXXXXXXXKYLISIPSLRTPVXXTPP

SEQ ID NO: 63975 - protein, 38 aa, Artificial Sequence; identical to SEQ ID NO: 4785
  GFR-binding peptide
  MOD_RES (1), (33), (34): Xaa is C or S

SEQ ID NO: 63976 - protein, 34 aa, Artificial Sequence; identical to SEQ ID NO: 25867
  GFR-binding peptide
  MOD_RES (1), (3): Xaa is C or S

SEQ ID NO: 63977 - protein, 37 aa, Artificial Sequence; identical to SEQ ID NO: 4786
  GFR-binding peptide
  MOD_RES (1), (36), (37): Xaa is C or S
  MOD_RES (14), (15), (16), (17), (18): Xaa is A or G
  MOD_RES (19), (20), (21), (22): Xaa is A or G or is absent

SEQ ID NO: 63978 - protein, 30 aa, Artificial Sequence; identical to SEQ ID NO: 4787
  GFR-binding peptide

SEQ ID NO: 63979 - protein, 35 aa, Artificial Sequence
  GFR-binding peptide
  MOD_RES (32), (33): Xaa is C or S
SEVTMNPIKGYVVNKNEDFYLINIPSMKEPVXXPE

SEQ ID NO: 63980 - protein, 35 aa, Artificial Sequence; identical to SEQ ID NO: 4790
  GFR-binding peptide
  MOD_RES (1), (34), (35): Xaa is C or S
  MOD_RES (12), (13), (14), (15), (16): Xaa is A or G
  MOD_RES (17), (18), (19), (20): Xaa is A or G or is absent

SEQ ID NO: 63981 - protein, 40 aa, Artificial Sequence
  GFR-binding peptide
  MOD_RES (2), (34), (35): Xaa is C or S
AXSEVTMNYHYKLVVNKNEDKYLISIPSMKEPVXXPEPIG

SEQ ID NO: 63982 - protein, 34 aa, Artificial Sequence
  GFR-binding peptide
  MOD_RES (33), (34): Xaa is C or S
  MOD_RES (11), (12), (13), (14), (15): Xaa is A or G
  MOD_RES (16), (17), (18), (19): Xaa is A or G or is absent
SVAMGRHKRLXXXXXXXXXYYLISTASLKTPVXX

SEQ ID NO: 63983 - protein, 37 aa, Artificial Sequence
  GFR-binding peptide
  MOD_RES (2), (4): Xaa is C or S
  MOD_RES (16), (17), (18), (19), (20): Xaa is A or G
  MOD_RES (21), (22), (23), (24): Xaa is A or G or is absent
RXGXSEVVMDRHKRLXXXXXXXXXYYLISTASLRTPV

SEQ ID NO: 63984 - protein, 38 aa, Artificial Sequence; identical to SEQ ID NO: 25876
  GFR-binding peptide
  MOD_RES (2), (4), (38): Xaa is C or S
  MOD_RES (16), (17), (18), (19), (20): Xaa is A or G
  MOD_RES (21), (22), (23), (24): Xaa is A or G or is absent

SEQ ID NO: 63985 - protein, 36 aa, Artificial Sequence; identical to SEQ ID NO: 31876
  GFR-binding peptide
  MOD_RES (1), (33), (34): Xaa is C or S

SEQ ID NO: 63986 - protein, 39 aa, Artificial Sequence
  GFR-binding peptide
  MOD_RES (1), (3), (36), (37): Xaa is C or S
  MOD_RES (14), (15), (16), (17), (18): Xaa is A or G
  MOD_RES (19), (20), (21), (22): Xaa is A or G or is absent
XGXEEVIMRHKRLXXXXXXXXXYYLMSTASTKVPAXXTS

SEQ ID NO: 63987 - protein, 36 aa, Artificial Sequence; identical to SEQ ID NO: 4802
  GFR-binding peptide
  MOD_RES (1), (3), (35), (36): Xaa is C or S

SEQ ID NO: 63988 - protein, 37 aa, Artificial Sequence; identical to SEQ ID NO: 31877
  GFR-binding peptide
  MOD_RES (2), (35), (36): Xaa is C or S
  MOD_RES (13), (14), (15), (16), (17): Xaa is A or G
  MOD_RES (18), (19), (20), (21): Xaa is A or G or is absent

SEQ ID NO: 63989 - protein, 33 aa, Artificial Sequence; identical to SEQ ID NO: 4803
  GFR-binding peptide
  MOD_RES (1), (3): Xaa is C or S

SEQ ID NO: 63990 - protein, 34 aa, Artificial Sequence; identical to SEQ ID NO: 25882
  GFR-binding peptide
  MOD_RES (1), (34): Xaa is C or S
  MOD_RES (12), (13), (14), (15), (16): Xaa is A or G
  MOD_RES (17), (18), (19), (20): Xaa is A or G or is absent

SEQ ID NO: 63991 - protein, 41 aa, Artificial Sequence; identical to SEQ ID NO: 4808
  GFR-binding peptide
  MOD_RES (1), (3), (36), (37): Xaa is C or S
  MOD_RES (14), (15), (16), (17), (18): Xaa is A or G
  MOD_RES (19), (20), (21), (22): Xaa is A or G or is absent

SEQ ID NO: 63992 - protein, 36 aa, Artificial Sequence
  GFR-binding peptide
  MOD_RES (31), (32): Xaa is C or S
SKVIMPIKGYIKPTKGIFYLINIPSLDQSVXXPSAS

SEQ ID NO: 63993 - protein, 34 aa, Artificial Sequence
  GFR-binding peptide
  MOD_RES (2), (34): Xaa is C or S
GXSEVVMDRHKRLVVNNASDYYLISTASLRTPVX

SEQ ID NO: 63994 - protein, 33 aa, Artificial Sequence
  GFR-binding peptide
  MOD_RES (31), (32): Xaa is C or S
SVAMGRHKRLYTVVGKDYYLISTASLKTPVXXA

SEQ ID NO: 63995 - protein, 38 aa, Artificial Sequence
  GFR-binding peptide
  MOD_RES (2), (36), (37): Xaa is C or S
  MOD_RES (14), (15), (16), (17), (18): Xaa is A or G
  MOD_RES (19), (20), (21), (22): Xaa is A or G or is absent
AXSEVTMNRHKRLXXXXXXXXXYYLISTASMKEPVXXP

SEQ ID NO: 63996 - protein, 37 aa, Artificial Sequence; identical to SEQ ID NO: 25899
  GFR-binding peptide
  MOD_RES (2), (4): Xaa is C or S
  MOD_RES (16), (17), (18), (19), (20): Xaa is A or G
  MOD_RES (21), (22), (23), (24): Xaa is A or G or is absent

SEQ ID NO: 63997 - protein, 37 aa, Artificial Sequence
  GFR-binding peptide
  MOD_RES (2), (4), (35), (36): Xaa is C or S
LXGXEEVIMRHKRLLLVRGNDYYLMSTASTKVPAXXT

SEQ ID NO: 63998 - protein, 40 aa, Artificial Sequence; identical to SEQ ID NO: 4821
  GFR-binding peptide
  MOD_RES (2), (4), (38): Xaa is C or S
  MOD_RES (16), (17), (18), (19), (20): Xaa is A or G
  MOD_RES (21), (22), (23), (24): Xaa is A or G or is absent

SEQ ID NO: 63999 - protein, 36 aa, Artificial Sequence; identical to SEQ ID NO: 4823
  GFR-binding peptide
  MOD_RES (33), (34): Xaa is C or S
  MOD_RES (11), (12), (13), (14), (15): Xaa is A or G
  MOD_RES (16), (17), (18), (19): Xaa is A or G or is absent

SEQ ID NO: 64000 - protein, 40 aa, Artificial Sequence; identical to SEQ ID NO: 4824
  GFR-binding peptide
  MOD_RES (1), (36), (37): Xaa is C or S
  MOD_RES (14), (15), (16), (17), (18): Xaa is A or G
  MOD_RES (19), (20), (21), (22): Xaa is A or G or is absent

SEQ ID NO: 64001 - protein, 33 aa, Artificial Sequence; identical to SEQ ID NO: 4827
  GFR-binding peptide
  MOD_RES (1), (32), (33): Xaa is C or S

SEQ ID NO: 64002 - protein, 37 aa, Artificial Sequence; identical to SEQ ID NO: 31905
  GFR-binding peptide
  MOD_RES (2), (4): Xaa is C or S
  MOD_RES (16), (17), (18), (19), (20): Xaa is A or G
  MOD_RES (21), (22), (23), (24): Xaa is A or G or is absent

SEQ ID NO: 64003 - protein, 39 aa, Artificial Sequence
  GFR-binding peptide
  MOD_RES (2), (33), (34): Xaa is C or S
KXSRVIMPIKGYVKPKRGVFYLINIPSLAQPVXXPAASA

SEQ ID NO: 64004 - protein, 35 aa, Artificial Sequence; identical to SEQ ID NO: 4835
  GFR-binding peptide
  MOD_RES (1), (3), (34), (35): Xaa is C or S

SEQ ID NO: 64005 - protein, 40 aa, Artificial Sequence; identical to SEQ ID NO: 25910
  GFR-binding peptide
  MOD_RES (1), (35), (36): Xaa is C or S
  MOD_RES (13), (14), (15), (16), (17): Xaa is A or G
  MOD_RES (18), (19), (20), (21): Xaa is A or G or is absent

SEQ ID NO: 64006 - protein, 36 aa, Artificial Sequence
  GFR-binding peptide
  MOD_RES (1), (3), (35), (36): Xaa is C or S
XGXRDVVMGYHYKLIIQQKDNKYLMSIPSMKTPTXX

SEQ ID NO: 64007 - protein, 41 aa, Artificial Sequence
  GFR-binding peptide
  MOD_RES (1), (3), (37), (38): Xaa is C or S
  MOD_RES (15), (16), (17), (18), (19): Xaa is A or G
  MOD_RES (20), (21), (22), (23): Xaa is A or G or is absent
XGXRDVVMGEYKFKXXXXXXXXXLYLMSIPEMKTPTXXPGA

SEQ ID NO: 64008 - protein, 38 aa, Artificial Sequence; identical to SEQ ID NO: 25912
  GFR-binding peptide
  MOD_RES (1), (33), (34): Xaa is C or S

SEQ ID NO: 64009 - protein, 38 aa, Artificial Sequence; identical to SEQ ID NO: 4845
  GFR-binding peptide
  MOD_RES (2), (4), (36), (37): Xaa is C or S

SEQ ID NO: 64010 - protein, 35 aa, Artificial Sequence; identical to SEQ ID NO: 25921
  GFR-binding peptide
  MOD_RES (2), (4): Xaa is C or S

SEQ ID NO: 64011 - protein, 32 aa, Artificial Sequence
  GFR-binding peptide
  MOD_RES (2), (2): Xaa is C or S
GXEEVIMRHKRLLLVRGNDYYLMSTASTKVPA

SEQ ID NO: 64012 - protein, 38 aa, Artificial Sequence
  GFR-binding peptide
  MOD_RES (2), (4), (36), (37): Xaa is C or S
SXGXRDVVMGRHKRLIIQQKDNYYLMSTASMKTPTXXP

SEQ ID NO: 64013 - protein, 41 aa, Artificial Sequence; identical to SEQ ID NO: 25922
  GFR-binding peptide
  MOD_RES (1), (3), (37), (38): Xaa is C or S
  MOD_RES (15), (16), (17), (18), (19): Xaa is A or G
  MOD_RES (20), (21), (22), (23): Xaa is A or G or is absent

SEQ ID NO: 64014 - protein, 36 aa, Artificial Sequence; identical to SEQ ID NO: 25923
  GFR-binding peptide
  MOD_RES (1), (3): Xaa is C or S
  MOD_RES (15), (16), (17), (18), (19): Xaa is A or G
  MOD_RES (20), (21), (22), (23): Xaa is A or G or is absent

SEQ ID NO: 64015 - protein, 37 aa, Artificial Sequence
  GFR-binding peptide
  MOD_RES (2), (36), (37): Xaa is C or S
  MOD_RES (14), (15), (16), (17), (18): Xaa is A or G
  MOD_RES (19), (20), (21), (22): Xaa is A or G or is absent
GXSEVVMDRHKRLXXXXXXXXXYYLISTASLRTPVXX

SEQ ID NO: 64016 - protein, 40 aa, Artificial Sequence; identical to SEQ ID NO: 25926
  GFR-binding peptide
  MOD_RES (2), (4), (38), (39): Xaa is C or S
  MOD_RES (16), (17), (18), (19), (20): Xaa is A or G
  MOD_RES (21), (22), (23), (24): Xaa is A or G or is absent

SEQ ID NO: 64017 - protein, 38 aa, Artificial Sequence; identical to SEQ ID NO: 25927
  GFR-binding peptide
  MOD_RES (1), (33), (34): Xaa is C or S

SEQ ID NO: 64018 - protein, 32 aa, Artificial Sequence; identical to SEQ ID NO: 31924
  GFR-binding peptide
  MOD_RES (1), (1): Xaa is C or S

SEQ ID NO: 64019 - protein, 40 aa, Artificial Sequence; identical to SEQ ID NO: 31926
  GFR-binding peptide
  MOD_RES (1), (34), (35): Xaa is C or S
  MOD_RES (12), (13), (14), (15), (16): Xaa is A or G
  MOD_RES (17), (18), (19), (20): Xaa is A or G or is absent

SEQ ID NO: 64020 - protein, 35 aa, Artificial Sequence; identical to SEQ ID NO: 25929
  GFR-binding peptide
  MOD_RES (34), (35): Xaa is C or S
  MOD_RES (12), (13), (14), (15), (16): Xaa is A or G
  MOD_RES (17), (18), (19), (20): Xaa is A or G or is absent

SEQ ID NO: 64021 - protein, 36 aa, Artificial Sequence; identical to SEQ ID NO: 25936
  GFR-binding peptide
  MOD_RES (1), (3), (35): Xaa is C or S

SEQ ID NO: 64022 - protein, 36 aa, Artificial Sequence; identical to SEQ ID NO: 4869
  GFR-binding peptide
  MOD_RES (1), (3), (36): Xaa is C or S

SEQ ID NO: 64023 - protein, 39 aa, Artificial Sequence; identical to SEQ ID NO: 25941
  GFR-binding peptide
  MOD_RES (33), (34): Xaa is C or S
  MOD_RES (11), (12), (13), (14), (15): Xaa is A or G
  MOD_RES (16), (17), (18), (19): Xaa is A or G or is absent

SEQ ID NO: 64024 - protein, 34 aa, Artificial Sequence; identical to SEQ ID NO: 31936
  GFR-binding peptide
  MOD_RES (32), (33): Xaa is C or S

SEQ ID NO: 64025 - protein, 37 aa, Artificial Sequence; identical to SEQ ID NO: 25944
  GFR-binding peptide
  MOD_RES (1), (35), (36): Xaa is C or S
  MOD_RES (13), (14), (15), (16), (17): Xaa is A or G
  MOD_RES (18), (19), (20), (21): Xaa is A or G or is absent

SEQ ID NO: 64026 - protein, 34 aa, Artificial Sequence
  GFR-binding peptide
  MOD_RES (31), (32): Xaa is C or S
EVTMNRYKKLVVNKNEDFYLISIANMKEPVXXPE

SEQ ID NO: 64027 - protein, 41 aa, Artificial Sequence; identical to SEQ ID NO: 25946
  GFR-binding peptide
  MOD_RES (2), (4), (36), (37): Xaa is C or S

SEQ ID NO: 64028 - protein, 38 aa, Artificial Sequence
  GFR-binding peptide
  MOD_RES (2), (36), (37): Xaa is C or S
  MOD_RES (14), (15), (16), (17), (18): Xaa is A or G
  MOD_RES (19), (20), (21), (22): Xaa is A or G or is absent
GXSEVVMDRHKRLXXXXXXXXXYYLISTASLRTPVXXT

SEQ ID NO: 64029 - protein, 36 aa, Artificial Sequence; identical to SEQ ID NO: 25951
  GFR-binding peptide
  MOD_RES (2), (33), (34): Xaa is C or S

SEQ ID NO: 64030 - protein, 37 aa, Artificial Sequence
  GFR-binding peptide
  MOD_RES (1), (3), (37): Xaa is C or S
  MOD_RES (15), (16), (17), (18), (19): Xaa is A or G
  MOD_RES (20), (21), (22), (23): Xaa is A or G or is absent
XGXESVAMGRHKRLXXXXXXXXXYYLISTASLKTPVX

SEQ ID NO: 64031 - protein, 39 aa, Artificial Sequence; identical to SEQ ID NO: 31952
  GFR-binding peptide
  MOD_RES (2), (35), (36): Xaa is C or S

SEQ ID NO: 64032 - protein, 37 aa, Artificial Sequence
  GFR-binding peptide
  MOD_RES (2), (34), (35): Xaa is C or S
GXAEVVMDRHKRLVVNNAADYYLISTASLRAPVXXSA

SEQ ID NO: 64033 - protein, 41 aa, Artificial Sequence; identical to SEQ ID NO: 4876
  GFR-binding peptide
  MOD_RES (1), (3), (35), (36): Xaa is C or S

SEQ ID NO: 64034 - protein, 38 aa, Artificial Sequence
  GFR-binding peptide
  MOD_RES (1), (3), (37), (38): Xaa is C or S
  MOD_RES (15), (16), (17), (18), (19): Xaa is A or G
  MOD_RES (20), (21), (22), (23): Xaa is A or G or is absent
XGXRDVVMGEYKFKXXXXXXXXXLYLMSIPEMKTPTXX

SEQ ID NO: 64035 - protein, 36 aa, Artificial Sequence; identical to SEQ ID NO: 4877
  GFR-binding peptide
  MOD_RES (31), (32): Xaa is C or S

SEQ ID NO: 64036 - protein, 40 aa, Artificial Sequence; identical to SEQ ID NO: 4878
  GFR-binding peptide
  MOD_RES (2), (4), (36), (37): Xaa is C or S

SEQ ID NO: 64037 - protein, 40 aa, Artificial Sequence; identical to SEQ ID NO: 4883
  GFR-binding peptide
  MOD_RES (2), (4), (39), (40): Xaa is C or S
  MOD_RES (17), (18), (19), (20), (21): Xaa is A or G
  MOD_RES (22), (23), (24), (25): Xaa is A or G or is absent

SEQ ID NO: 64038 - protein, 41 aa, Artificial Sequence
  GFR-binding peptide
  MOD_RES (2), (4), (37), (38): Xaa is C or S
  MOD_RES (15), (16), (17), (18), (19): Xaa is A or G
  MOD_RES (20), (21), (22), (23): Xaa is A or G or is absent
LXGXEEVIMEYKFKXXXXXXXXXLYLMSIPETKVPAXXTSP

SEQ ID NO: 64039 - protein, 32 aa, Artificial Sequence
  GFR-binding peptide
  MOD_RES (11), (12), (13), (14), (15): Xaa is A or G
  MOD_RES (16), (17), (18), (19): Xaa is A or G or is absent
EVTMNYHYKLXXXXXXXXXKYLISIPSMKEPV

SEQ ID NO: 64040 - protein, 34 aa, Artificial Sequence; identical to SEQ ID NO: 4887
  GFR-binding peptide
  MOD_RES (32), (33): Xaa is C or S

SEQ ID NO: 64041 - protein, 34 aa, Artificial Sequence; identical to SEQ ID NO: 31969
  GFR-binding peptide
  MOD_RES (1), (3): Xaa is C or S

SEQ ID NO: 64042 - protein, 38 aa, Artificial Sequence; identical to SEQ ID NO: 31970
  GFR-binding peptide
  MOD_RES (1), (33), (34): Xaa is C or S

SEQ ID NO: 64043 - protein, 37 aa, Artificial Sequence; identical to SEQ ID NO: 4889
  GFR-binding peptide
  MOD_RES (1), (3), (37): Xaa is C or S
  MOD_RES (15), (16), (17), (18), (19): Xaa is A or G
  MOD_RES (20), (21), (22), (23): Xaa is A or G or is absent

SEQ ID NO: 64044 - protein, 36 aa, Artificial Sequence
  GFR-binding peptide
  MOD_RES (1), (35), (36): Xaa is C or S
  MOD_RES (13), (14), (15), (16), (17): Xaa is A or G
  MOD_RES (18), (19), (20), (21): Xaa is A or G or is absent
XSEVVMDEYKFKXXXXXXXXXLYLISIPELRTPVXX

SEQ ID NO: 64045 - protein, 38 aa, Artificial Sequence; identical to SEQ ID NO: 25972
  GFR-binding peptide
  MOD_RES (32), (33): Xaa is C or S

SEQ ID NO: 64046 - protein, 34 aa, Artificial Sequence; identical to SEQ ID NO: 25974
  GFR-binding peptide
  MOD_RES (1), (1): Xaa is C or S
  MOD_RES (13), (14), (15), (16), (17): Xaa is A or G
  MOD_RES (18), (19), (20), (21): Xaa is A or G or is absent

SEQ ID NO: 64047 - protein, 31 aa, Artificial Sequence; identical to SEQ ID NO: 4894
  GFR-binding peptide
  MOD_RES (31), (31): Xaa is C or S

SEQ ID NO: 64048 - protein, 41 aa, Artificial Sequence; identical to SEQ ID NO: 31976
  GFR-binding peptide
  MOD_RES (1), (3), (35), (36): Xaa is C or S

SEQ ID NO: 64049 - protein, 39 aa, Artificial Sequence; identical to SEQ ID NO: 31977
  GFR-binding peptide
  MOD_RES (33), (34): Xaa is C or S
  MOD_RES (11), (12), (13), (14), (15): Xaa is A or G
  MOD_RES (16), (17), (18), (19): Xaa is A or G or is absent

SEQ ID NO: 64050 - protein, 37 aa, Artificial Sequence; identical to SEQ ID NO: 4895
  GFR-binding peptide
  MOD_RES (1), (3), (34), (35): Xaa is C or S

SEQ ID NO: 64051 - protein, 41 aa, Artificial Sequence
  GFR-binding peptide
  MOD_RES (1), (35), (36): Xaa is C or S
  MOD_RES (13), (14), (15), (16), (17): Xaa is A or G
  MOD_RES (18), (19), (20), (21): Xaa is A or G or is absent
XSEVTMNRYKKLXXXXXXXXXFYLISIANMKEPVXXPEPIG

SEQ ID NO: 64052 - protein, 41 aa, Artificial Sequence; identical to SEQ ID NO: 25981
  GFR-binding peptide
  MOD_RES (1), (3), (37), (38): Xaa is C or S
  MOD_RES (15), (16), (17), (18), (19): Xaa is A or G
  MOD_RES (20), (21), (22), (23): Xaa is A or G or is absent

SEQ ID NO: 64053 - protein, 34 aa, Artificial Sequence
  GFR-binding peptide
  MOD_RES (2), (34): Xaa is C or S
GXRDVVMGEYKFKIIQQKDNLYLMSIPEMKTPTX

SEQ ID NO: 64054 - protein, 39 aa, Artificial Sequence; identical to SEQ ID NO: 4897
  GFR-binding peptide
  MOD_RES (2), (4), (37), (38): Xaa is C or S
  MOD_RES (15), (16), (17), (18), (19): Xaa is A or G
  MOD_RES (20), (21), (22), (23): Xaa is A or G or is absent

SEQ ID NO: 64055 - protein, 35 aa, Artificial Sequence; identical to SEQ ID NO: 4899
  GFR-binding peptide
  MOD_RES (2), (35): Xaa is C or S
  MOD_RES (13), (14), (15), (16), (17): Xaa is A or G
  MOD_RES (18), (19), (20), (21): Xaa is A or G or is absent

SEQ ID NO: 64056 - protein, 33 aa, Artificial Sequence
  GFR-binding peptide
  MOD_RES (33), (33): Xaa is C or S
  MOD_RES (11), (12), (13), (14), (15): Xaa is A or G
  MOD_RES (16), (17), (18), (19): Xaa is A or G or is absent
EVVMDRHKRLXXXXXXXXXYYLISTASLRTPVX

SEQ ID NO: 64057 - protein, 37 aa, Artificial Sequence; identical to SEQ ID NO: 31984
  GFR-binding peptide
  MOD_RES (2), (36), (37): Xaa is C or S
  MOD_RES (14), (15), (16), (17), (18): Xaa is A or G
  MOD_RES (19), (20), (21), (22): Xaa is A or G or is absent

SEQ ID NO: 64058 - protein, 30 aa, Artificial Sequence
  GFR-binding peptide
EVVMDYHYKLVVNNASDKYLISIPSLRTPV

SEQ ID NO: 64059 - protein, 42 aa, Artificial Sequence; identical to SEQ ID NO: 4904
  GFR-binding peptide
  MOD_RES (2), (36), (37): Xaa is C or S
  MOD_RES (14), (15), (16), (17), (18): Xaa is A or G
  MOD_RES (19), (20), (21), (22): Xaa is A or G or is absent

SEQ ID NO: 64060 - protein, 39 aa, Artificial Sequence
  GFR-binding peptide
  MOD_RES (2), (35), (36): Xaa is C or S
  MOD_RES (13), (14), (15), (16), (17): Xaa is A or G
  MOD_RES (18), (19), (20), (21): Xaa is A or G or is absent
GXEEVIMRHKRLXXXXXXXXXYYLMSTASTKVPAXXTSP

SEQ ID NO: 64061 - protein, 40 aa, Artificial Sequence; identical to SEQ ID NO: 4905
  GFR-binding peptide
  MOD_RES (34), (35): Xaa is C or S
  MOD_RES (12), (13), (14), (15), (16): Xaa is A or G
  MOD_RES (17), (18), (19), (20): Xaa is A or G or is absent

SEQ ID NO: 64062 - protein, 36 aa, Artificial Sequence; identical to SEQ ID NO: 25994
  GFR-binding peptide
  MOD_RES (34), (34): Xaa is C or S
  MOD_RES (12), (13), (14), (15), (16): Xaa is A or G
  MOD_RES (17), (18), (19), (20): Xaa is A or G or is absent

SEQ ID NO: 64063 - protein, 35 aa, Artificial Sequence; identical to SEQ ID NO: 25995
  GFR-binding peptide
  MOD_RES (1), (35): Xaa is C or S
  MOD_RES (13), (14), (15), (16), (17): Xaa is A or G
  MOD_RES (18), (19), (20), (21): Xaa is A or G or is absent

SEQ ID NO: 64064 - protein, 38 aa, Artificial Sequence; identical to SEQ ID NO: 4907
  GFR-binding peptide
  MOD_RES (2), (4), (38): Xaa is C or S
  MOD_RES (16), (17), (18), (19), (20): Xaa is A or G
  MOD_RES (21), (22), (23), (24): Xaa is A or G or is absent

SEQ ID NO: 64065 - protein, 40 aa, Artificial Sequence; identical to SEQ ID NO: 4908
  GFR-binding peptide
  MOD_RES (2), (36), (37): Xaa is C or S
  MOD_RES (14), (15), (16), (17), (18): Xaa is A or G
  MOD_RES (19), (20), (21), (22): Xaa is A or G or is absent

SEQ ID NO: 64066 - protein, 36 aa, Artificial Sequence; identical to SEQ ID NO: 25998
  GFR-binding peptide
  MOD_RES (2), (36): Xaa is C or S
  MOD_RES (14), (15), (16), (17), (18): Xaa is A or G
  MOD_RES (19), (20), (21), (22): Xaa is A or G or is absent

SEQ ID NO: 64067 - protein, 42 aa, Artificial Sequence; identical to SEQ ID NO: 31991
  GFR-binding peptide
  MOD_RES (2), (4), (36), (37): Xaa is C or S

SEQ ID NO: 64068 - protein, 32 aa, Artificial Sequence
  GFR-binding peptide
  MOD_RES (11), (12), (13), (14), (15): Xaa is A or G
  MOD_RES (16), (17), (18), (19): Xaa is A or G or is absent
EEVIMYHYKLXXXXXXXXXKYLMSIPSTKVPA

SEQ ID NO: 64069 - protein, 42 aa, Artificial Sequence; identical to SEQ ID NO: 56948
  GFR-binding peptide
  MOD_RES (1), (3), (37), (38): Xaa is C or S
  MOD_RES (15), (16), (17), (18), (19): Xaa is A or G
  MOD_RES (20), (21), (22), (23): Xaa is A or G or is absent

SEQ ID NO: 64070 - protein, 39 aa, Artificial Sequence; identical to SEQ ID NO: 4915
  GFR-binding peptide
  MOD_RES (2), (33), (34): Xaa is C or S

SEQ ID NO: 64071 - protein, 38 aa, Artificial Sequence; identical to SEQ ID NO: 4918
  GFR-binding peptide
  MOD_RES (2), (35), (36): Xaa is C or S
  MOD_RES (13), (14), (15), (16), (17): Xaa is A or G
  MOD_RES (18), (19), (20), (21): Xaa is A or G or is absent

SEQ ID NO: 64072 - protein, 34 aa, Artificial Sequence; identical to SEQ ID NO: 31999
  GFR-binding peptide
  MOD_RES (34), (34): Xaa is C or S
  MOD_RES (12), (13), (14), (15), (16): Xaa is A or G
  MOD_RES (17), (18), (19), (20): Xaa is A or G or is absent

SEQ ID NO: 64073 - protein, 33 aa, Artificial Sequence
  GFR-binding peptide
  MOD_RES (12), (13), (14), (15), (16): Xaa is A or G
  MOD_RES (17), (18), (19), (20): Xaa is A or G or is absent
SEVTMNRHKRLXXXXXXXXXYYLISTASMKEPV

SEQ ID NO: 64074 - protein, 43 aa, Artificial Sequence; identical to SEQ ID NO: 26010
  GFR-binding peptide
  MOD_RES (2), (4), (38): Xaa is C or S
  MOD_RES (16), (17), (18), (19), (20): Xaa is A or G
  MOD_RES (21), (22), (23), (24): Xaa is A or G or is absent

SEQ ID NO: 64075 - protein, 42 aa, Artificial Sequence
  GFR-binding peptide
  MOD_RES (2), (4), (36), (37): Xaa is C or S
SXGXRDVVMGYHYKLIIQQKDNKYLMSIPSMKTPTXXPGASG

SEQ ID NO: 64076 - protein, 38 aa, Artificial Sequence; identical to SEQ ID NO: 4921
  GFR-binding peptide
  MOD_RES (1), (3), (37): Xaa is C or S
  MOD_RES (15), (16), (17), (18), (19): Xaa is A or G
  MOD_RES (20), (21), (22), (23): Xaa is A or G or is absent

SEQ ID NO: 64077 - protein, 36 aa, Artificial Sequence; identical to SEQ ID NO: 4922
  GFR-binding peptide
  MOD_RES (1), (33), (34): Xaa is C or S

SEQ ID NO: 64078 - protein, 38 aa, Artificial Sequence; identical to SEQ ID NO: 26014
  GFR-binding peptide
  MOD_RES (1), (33), (34): Xaa is C or S

SEQ ID NO: 64079 - protein, 36 aa, Artificial Sequence; identical to SEQ ID NO: 4924
  GFR-binding peptide
  MOD_RES (31), (32): Xaa is C or S

SEQ ID NO: 64080 - protein, 37 aa, Artificial Sequence; identical to SEQ ID NO: 26017
  GFR-binding peptide
  MOD_RES (33), (34): Xaa is C or S
  MOD_RES (11), (12), (13), (14), (15): Xaa is A or G
  MOD_RES (16), (17), (18), (19): Xaa is A or G or is absent

SEQ ID NO: 64081 - protein, 32 aa, Artificial Sequence; identical to SEQ ID NO: 26018
  GFR-binding peptide
  MOD_RES (32), (32): Xaa is C or S

SEQ ID NO: 64082 - protein, 38 aa, Artificial Sequence; identical to SEQ ID NO: 4926
  GFR-binding peptide
  MOD_RES (33), (34): Xaa is C or S
  MOD_RES (11), (12), (13), (14), (15): Xaa is A or G
  MOD_RES (16), (17), (18), (19): Xaa is A or G or is absent

SEQ ID NO: 64083 - protein, 35 aa, Artificial Sequence; identical to SEQ ID NO: 26021
  GFR-binding peptide
  MOD_RES (1), (35): Xaa is C or S
  MOD_RES (13), (14), (15), (16), (17): Xaa is A or G
  MOD_RES (18), (19), (20), (21): Xaa is A or G or is absent

SEQ ID NO: 64084 - protein, 44 aa, Artificial Sequence; identical to SEQ ID NO: 32006
  GFR-binding peptide
  MOD_RES (2), (4), (38), (39): Xaa is C or S
  MOD_RES (16), (17), (18), (19), (20): Xaa is A or G
  MOD_RES (21), (22), (23), (24): Xaa is A or G or is absent

SEQ ID NO: 64085 - protein, 38 aa, Artificial Sequence; identical to SEQ ID NO: 32007
  GFR-binding peptide
  MOD_RES (1), (3), (37), (38): Xaa is C or S
  MOD_RES (15), (16), (17), (18), (19): Xaa is A or G
  MOD_RES (20), (21), (22), (23): Xaa is A or G or is absent

SEQ ID NO: 64086 - protein, 34 aa, Artificial Sequence; identical to SEQ ID NO: 4931
  GFR-binding peptide
  MOD_RES (2), (33), (34): Xaa is C or S

SEQ ID NO: 64087 - protein, 37 aa, Artificial Sequence; identical to SEQ ID NO: 56966
  GFR-binding peptide
  MOD_RES (2), (4), (37): Xaa is C or S
  MOD_RES (15), (16), (17), (18), (19): Xaa is A or G
  MOD_RES (20), (21), (22), (23): Xaa is A or G or is absent

SEQ ID NO: 64088 - protein, 31 aa, Artificial Sequence; identical to SEQ ID NO: 32013
  GFR-binding peptide
  MOD_RES (31), (31): Xaa is C or S

SEQ ID NO: 64089 - protein, 34 aa, Artificial Sequence
  GFR-binding peptide
  MOD_RES (1), (1): Xaa is C or S
  MOD_RES (13), (14), (15), (16), (17): Xaa is A or G
  MOD_RES (18), (19), (20), (21): Xaa is A or G or is absent
XSEVTMNPIKGYXXXXXXXXXFYLINIPSMKEPV

SEQ ID NO: 64090 - protein, 33 aa, Artificial Sequence; identical to SEQ ID NO: 32022
  GFR-binding peptide
  MOD_RES (32), (33): Xaa is C or S

SEQ ID NO: 64091 - protein, 38 aa, Artificial Sequence; identical to SEQ ID NO: 4934
  GFR-binding peptide
  MOD_RES (1), (3), (38): Xaa is C or S
  MOD_RES (16), (17), (18), (19), (20): Xaa is A or G
  MOD_RES (21), (22), (23), (24): Xaa is A or G or is absent

SEQ ID NO: 64092 - protein, 37 aa, Artificial Sequence
  GFR-binding peptide
  MOD_RES (2), (34), (35): Xaa is C or S
AXSEVTMNRYKKLVVNKNEDFYLISIANMKEPVXXPE

SEQ ID NO: 64093 - protein, 36 aa, Artificial Sequence; identical to SEQ ID NO: 4935
  GFR-binding peptide
  MOD_RES (1), (3): Xaa is C or S
  MOD_RES (15), (16), (17), (18), (19): Xaa is A or G
  MOD_RES (20), (21), (22), (23): Xaa is A or G or is absent

SEQ ID NO: 64094 - protein, 38 aa, Artificial Sequence; identical to SEQ ID NO: 4937
  GFR-binding peptide
  MOD_RES (1), (3), (37), (38): Xaa is C or S
  MOD_RES (15), (16), (17), (18), (19): Xaa is A or G
  MOD_RES (20), (21), (22), (23): Xaa is A or G or is absent

SEQ ID NO: 64095 - protein, 37 aa, Artificial Sequence; identical to SEQ ID NO: 4938
  GFR-binding peptide
  MOD_RES (2), (4), (37): Xaa is C or S
  MOD_RES (15), (16), (17), (18), (19): Xaa is A or G
  MOD_RES (20), (21), (22), (23): Xaa is A or G or is absent

SEQ ID NO: 64096 - protein, 39 aa, Artificial Sequence; identical to SEQ ID NO: 32027
  GFR-binding peptide
  MOD_RES (33), (34): Xaa is C or S
  MOD_RES (11), (12), (13), (14), (15): Xaa is A or G
  MOD_RES (16), (17), (18), (19): Xaa is A or G or is absent

SEQ ID NO: 64097 - protein, 36 aa, Artificial Sequence; identical to SEQ ID NO: 26032
  GFR-binding peptide
  MOD_RES (1), (33), (34): Xaa is C or S

SEQ ID NO: 64098 - protein, 40 aa, Artificial Sequence; identical to SEQ ID NO: 4942
  GFR-binding peptide
  MOD_RES (2), (36), (37): Xaa is C or S
  MOD_RES (14), (15), (16), (17), (18): Xaa is A or G
  MOD_RES (19), (20), (21), (22): Xaa is A or G or is absent

SEQ ID NO: 64099 - protein, 36 aa, Artificial Sequence; identical to SEQ ID NO: 32032
  GFR-binding peptide
  MOD_RES (1), (3), (35), (36): Xaa is C or S

SEQ ID NO: 64100 - protein, 36 aa, Artificial Sequence; identical to SEQ ID NO: 32034
  GFR-binding peptide
  MOD_RES (2), (4), (36): Xaa is C or S

SEQ ID NO: 64101 - protein, 35 aa, Artificial Sequence; identical to SEQ ID NO: 4945
  GFR-binding peptide
  MOD_RES (1), (33), (34): Xaa is C or S

SEQ ID NO: 64102 - protein, 41 aa, Artificial Sequence; identical to SEQ ID NO: 4946
  GFR-binding peptide
  MOD_RES (35), (36): Xaa is C or S
  MOD_RES (13), (14), (15), (16), (17): Xaa is A or G
  MOD_RES (18), (19), (20), (21): Xaa is A or G or is absent

SEQ ID NO: 64103 - protein, 37 aa, Artificial Sequence; identical to SEQ ID NO: 4947
  GFR-binding peptide
  MOD_RES (2), (4), (37): Xaa is C or S
  MOD_RES (15), (16), (17), (18), (19): Xaa is A or G
  MOD_RES (20), (21), (22), (23): Xaa is A or G or is absent

SEQ ID NO: 64104 - protein, 36 aa, Artificial Sequence
  GFR-binding peptide
  MOD_RES (1), (33), (34): Xaa is C or S
XSEVTMNYHYKLVVNKNEDKYLISIPSMKEPVXXPE

SEQ ID NO: 64105 - protein, 32 aa, Artificial Sequence; identical to SEQ ID NO: 26036
  GFR-binding peptide
  MOD_RES (2), (2): Xaa is C or S

SEQ ID NO: 64106 - protein, 42 aa, Artificial Sequence
  GFR-binding peptide
  MOD_RES (1), (3), (37), (38): Xaa is C or S
  MOD_RES (15), (16), (17), (18), (19): Xaa is A or G
  MOD_RES (20), (21), (22), (23): Xaa is A or G or is absent
XGXRDVVMGEYKFKXXXXXXXXXLYLMSIPEMKTPTXXPGAS

SEQ ID NO: 64107 - protein, 33 aa, Artificial Sequence; identical to SEQ ID NO: 26039
  GFR-binding peptide
  MOD_RES (1), (32), (33): Xaa is C or S

SEQ ID NO: 64108 - protein, 37 aa, Artificial Sequence; identical to SEQ ID NO: 26042
  GFR-binding peptide
  MOD_RES (2), (4), (37): Xaa is C or S
  MOD_RES (15), (16), (17), (18), (19): Xaa is A or G
  MOD_RES (20), (21), (22), (23): Xaa is A or G or is absent

SEQ ID NO: 64109 - protein, 31 aa, Artificial Sequence; identical to SEQ ID NO: 4949
  GFR-binding peptide

SEQ ID NO: 64110 - protein, 42 aa, Artificial Sequence; identical to SEQ ID NO: 4950
  GFR-binding peptide
  MOD_RES (1), (3), (37), (38): Xaa is C or S
  MOD_RES (15), (16), (17), (18), (19): Xaa is A or G
  MOD_RES (20), (21), (22), (23): Xaa is A or G or is absent

SEQ ID NO: 64111 - protein, 33 aa, Artificial Sequence; identical to SEQ ID NO: 4951
  GFR-binding peptide
  MOD_RES (2), (33): Xaa is C or S

SEQ ID NO: 64112 - protein, 35 aa, Artificial Sequence; identical to SEQ ID NO: 32044
  GFR-binding peptide
  MOD_RES (1), (3), (35): Xaa is C or S

SEQ ID NO: 64113 - protein, 33 aa, Artificial Sequence; identical to SEQ ID NO: 4953
  GFR-binding peptide
  MOD_RES (32), (33): Xaa is C or S

SEQ ID NO: 64114 - protein, 37 aa, Artificial Sequence; identical to SEQ ID NO: 26049
  GFR-binding peptide
  MOD_RES (34), (35): Xaa is C or S
  MOD_RES (12), (13), (14), (15), (16): Xaa is A or G
  MOD_RES (17), (18), (19), (20): Xaa is A or G or is absent

SEQ ID NO: 64115 - protein, 43 aa, Artificial Sequence; identical to SEQ ID NO: 26050
  GFR-binding peptide
  MOD_RES (2), (37), (38): Xaa is C or S
  MOD_RES (15), (16), (17), (18), (19): Xaa is A or G
  MOD_RES (20), (21), (22), (23): Xaa is A or G or is absent

SEQ ID NO: 64116 - protein, 40 aa, Artificial Sequence; identical to SEQ ID NO: 12387
  GFR-binding peptide
  MOD_RES (2), (36), (37): Xaa is C or S
  MOD_RES (14), (15), (16), (17), (18): Xaa is A or G
  MOD_RES (19), (20), (21), (22): Xaa is A or G or is absent

SEQ ID NO: 64117 - protein, 38 aa, Artificial Sequence; identical to SEQ ID NO: 32045
  GFR-binding peptide
  MOD_RES (1), (35), (36): Xaa is C or S
  MOD_RES (13), (14), (15), (16), (17): Xaa is A or G
  MOD_RES (18), (19), (20), (21): Xaa is A or G or is absent

SEQ ID NO: 64118 - protein, 37 aa, Artificial Sequence; identical to SEQ ID NO: 4955
  GFR-binding peptide
  MOD_RES (2), (34), (35): Xaa is C or S

SEQ ID NO: 64119 - protein, 36 aa, Artificial Sequence; identical to SEQ ID NO: 4956
  GFR-binding peptide
  MOD_RES (2), (34), (35): Xaa is C or S

SEQ ID NO: 64120 - protein, 41 aa, Artificial Sequence; identical to SEQ ID NO: 32047
  GFR-binding peptide
  MOD_RES (1), (35), (36): Xaa is C or S
  MOD_RES (13), (14), (15), (16), (17): Xaa is A or G
  MOD_RES (18), (19), (20), (21): Xaa is A or G or is absent

SEQ ID NO: 64121 - protein, 37 aa, Artificial Sequence; identical to SEQ ID NO: 32049
  GFR-binding peptide
  MOD_RES (2), (36), (37): Xaa is C or S
  MOD_RES (14), (15), (16), (17), (18): Xaa is A or G
  MOD_RES (19), (20), (21), (22): Xaa is A or G or is absent

SEQ ID NO: 64122 - protein, 41 aa, Artificial Sequence; identical to SEQ ID NO: 56998
  GFR-binding peptide
  MOD_RES (1), (35), (36): Xaa is C or S
  MOD_RES (13), (14), (15), (16), (17): Xaa is A or G
  MOD_RES (18), (19), (20), (21): Xaa is A or G or is absent

SEQ ID NO: 64123 - protein, 36 aa, Artificial Sequence; identical to SEQ ID NO: 4961
  GFR-binding peptide
  MOD_RES (33), (34): Xaa is C or S
  MOD_RES (11), (12), (13), (14), (15): Xaa is A or G
  MOD_RES (16), (17), (18), (19): Xaa is A or G or is absent

SEQ ID NO: 64124 - protein, 35 aa, Artificial Sequence; identical to SEQ ID NO: 12395
  GFR-binding peptide
  MOD_RES (2), (34), (35): Xaa is C or S

SEQ ID NO: 64125 - protein, 34 aa, Artificial Sequence
  GFR-binding peptide
  MOD_RES (1), (3): Xaa is C or S
XAXSEVTMNRHKRLVVNKNEDYYLISTASMKEPV

SEQ ID NO: 64126 - protein, 32 aa, Artificial Sequence; identical to SEQ ID NO: 4963
  GFR-binding peptide
  MOD_RES (11), (12), (13), (14), (15): Xaa is A or G
  MOD_RES (16), (17), (18), (19): Xaa is A or G or is absent

SEQ ID NO: 64127 - protein, 38 aa, Artificial Sequence; identical to SEQ ID NO: 4965
  GFR-binding peptide
  MOD_RES (1), (32), (33): Xaa is C or S

SEQ ID NO: 64128 - protein, 30 aa, Artificial Sequence; identical to SEQ ID NO: 4966
  GFR-binding peptide

SEQ ID NO: 64129 - protein, 38 aa, Artificial Sequence; identical to SEQ ID NO: 32058
  GFR-binding peptide
  MOD_RES (1), (3), (35), (36): Xaa is C or S

SEQ ID NO: 64130 - protein, 31 aa, Artificial Sequence; identical to SEQ ID NO: 32063
  GFR-binding peptide

SEQ ID NO: 64131 - protein, 36 aa, Artificial Sequence; identical to SEQ ID NO: 4972
  GFR-binding peptide
  MOD_RES (2), (4), (35), (36): Xaa is C or S

SEQ ID NO: 64132 - protein, 37 aa, Artificial Sequence; identical to SEQ ID NO: 26067
  GFR-binding peptide
  MOD_RES (2), (34), (35): Xaa is C or S

SEQ ID NO: 64133 - protein, 36 aa, Artificial Sequence; identical to SEQ ID NO: 26069
  GFR-binding peptide
  MOD_RES (34), (35): Xaa is C or S
  MOD_RES (12), (13), (14), (15), (16): Xaa is A or G
  MOD_RES (17), (18), (19), (20): Xaa is A or G or is absent

SEQ ID NO: 64134 - protein, 43 aa, Artificial Sequence; identical to SEQ ID NO: 4981
  GFR-binding peptide
  MOD_RES (1), (3), (37), (38): Xaa is C or S
  MOD_RES (15), (16), (17), (18), (19): Xaa is A or G
  MOD_RES (20), (21), (22), (23): Xaa is A or G or is absent

SEQ ID NO: 64135 - protein, 35 aa, Artificial Sequence; identical to SEQ ID NO: 57011
  GFR-binding peptide
  MOD_RES (2), (33), (34): Xaa is C or S

SEQ ID NO: 64136 - protein, 38 aa, Artificial Sequence; identical to SEQ ID NO: 4984
  GFR-binding peptide
  MOD_RES (2), (36), (37): Xaa is C or S
  MOD_RES (14), (15), (16), (17), (18): Xaa is A or G
  MOD_RES (19), (20), (21), (22): Xaa is A or G or is absent

SEQ ID NO: 64137 - protein, 38 aa, Artificial Sequence; identical to SEQ ID NO: 4985
  GFR-binding peptide
  MOD_RES (2), (4), (35), (36): Xaa is C or S

SEQ ID NO: 64138 - protein, 37 aa, Artificial Sequence
  GFR-binding peptide
  MOD_RES (2), (4), (36), (37): Xaa is C or S
RXAXSEVTMNRHKRLVVNKNEDYYLISTASMKEPVXX

SEQ ID NO: 64139 - protein, 36 aa, Artificial Sequence; identical to SEQ ID NO: 32077
  GFR-binding peptide
  MOD_RES (32), (33): Xaa is C or S

SEQ ID NO: 64140 - protein, 39 aa, Artificial Sequence; identical to SEQ ID NO: 32081
  GFR-binding peptide
  MOD_RES (1), (3), (37), (38): Xaa is C or S
  MOD_RES (15), (16), (17), (18), (19): Xaa is A or G
  MOD_RES (20), (21), (22), (23): Xaa is A or G or is absent

SEQ ID NO: 64141 - protein, 38 aa, Artificial Sequence
  GFR-binding peptide
  MOD_RES (1), (35), (36): Xaa is C or S
  MOD_RES (13), (14), (15), (16), (17): Xaa is A or G
  MOD_RES (18), (19), (20), (21): Xaa is A or G or is absent
XESVAMGRHKRLXXXXXXXXXYYLISTASLKTPVXXAK

SEQ ID NO: 64142 - protein, 36 aa, Artificial Sequence
  GFR-binding peptide
  MOD_RES (31), (32): Xaa is C or S
SRVIMPIKGYVKPKRGVFYLINIPSLAQPVXXPAAS

SEQ ID NO: 64143 - protein, 38 aa, Artificial Sequence
  GFR-binding peptide
  MOD_RES (1), (3), (36), (37): Xaa is C or S
  MOD_RES (14), (15), (16), (17), (18): Xaa is A or G
  MOD_RES (19), (20), (21), (22): Xaa is A or G or is absent
XGXEEVIMEYKFKXXXXXXXXXLYLMSIPETKVPAXXT

SEQ ID NO: 64144 - protein, 39 aa, Artificial Sequence; identical to SEQ ID NO: 4987
  GFR-binding peptide
  MOD_RES (2), (36), (37): Xaa is C or S
  MOD_RES (14), (15), (16), (17), (18): Xaa is A or G
  MOD_RES (19), (20), (21), (22): Xaa is A or G or is absent

SEQ ID NO: 64145 - protein, 38 aa, Artificial Sequence; identical to SEQ ID NO: 26081
  GFR-binding peptide
  MOD_RES (34), (35): Xaa is C or S
  MOD_RES (12), (13), (14), (15), (16): Xaa is A or G
  MOD_RES (17), (18), (19), (20): Xaa is A or G or is absent

SEQ ID NO: 64146 - protein, 36 aa, Artificial Sequence; identical to SEQ ID NO: 4988
  GFR-binding peptide
  MOD_RES (35), (36): Xaa is C or S
  MOD_RES (13), (14), (15), (16), (17): Xaa is A or G
  MOD_RES (18), (19), (20), (21): Xaa is A or G or is absent

SEQ ID NO: 64147 - protein, 35 aa, Artificial Sequence; identical to SEQ ID NO: 32090
  GFR-binding peptide
  MOD_RES (33), (34): Xaa is C or S
  MOD_RES (11), (12), (13), (14), (15): Xaa is A or G
  MOD_RES (16), (17), (18), (19): Xaa is A or G or is absent

SEQ ID NO: 64148 - protein, 37 aa, Artificial Sequence
  GFR-binding peptide
  MOD_RES (34), (35): Xaa is C or S
  MOD_RES (12), (13), (14), (15), (16): Xaa is A or G
  MOD_RES (17), (18), (19), (20): Xaa is A or G or is absent
SEVTMNRHKRLXXXXXXXXXYYLISTASMKEPVXXPE

SEQ ID NO: 64149 - protein, 40 aa, Artificial Sequence; identical to SEQ ID NO: 32096
  GFR-binding peptide
  MOD_RES (34), (35): Xaa is C or S
  MOD_RES (12), (13), (14), (15), (16): Xaa is A or G
  MOD_RES (17), (18), (19), (20): Xaa is A or G or is absent

SEQ ID NO: 64150 - protein, 39 aa, Artificial Sequence; identical to SEQ ID NO: 12430
  GFR-binding peptide
  MOD_RES (2), (36), (37): Xaa is C or S
  MOD_RES (14), (15), (16), (17), (18): Xaa is A or G
  MOD_RES (19), (20), (21), (22): Xaa is A or G or is absent

SEQ ID NO: 64151 - protein, 42 aa, Artificial Sequence; identical to SEQ ID NO: 26085
  GFR-binding peptide
  MOD_RES (2), (4), (37), (38): Xaa is C or S
  MOD_RES (15), (16), (17), (18), (19): Xaa is A or G
  MOD_RES (20), (21), (22), (23): Xaa is A or G or is absent

SEQ ID NO: 64152 - protein, 39 aa, Artificial Sequence; identical to SEQ ID NO: 12433
  GFR-binding peptide
  MOD_RES (1), (3), (35), (36): Xaa is C or S

SEQ ID NO: 64153 - protein, 34 aa, Artificial Sequence; identical to SEQ ID NO: 4992
  GFR-binding peptide
  MOD_RES (31), (32): Xaa is C or S

SEQ ID NO: 64154 - protein, 36 aa, Artificial Sequence; identical to SEQ ID NO: 4993
  GFR-binding peptide
  MOD_RES (33), (34): Xaa is C or S
  MOD_RES (11), (12), (13), (14), (15): Xaa is A or G
  MOD_RES (16), (17), (18), (19): Xaa is A or G or is absent

SEQ ID NO: 64155 - protein, 42 aa, Artificial Sequence; identical to SEQ ID NO: 4994
  GFR-binding peptide
  MOD_RES (1), (3), (36), (37): Xaa is C or S
  MOD_RES (14), (15), (16), (17), (18): Xaa is A or G
  MOD_RES (19), (20), (21), (22): Xaa is A or G or is absent

SEQ ID NO: 64156 - protein, 38 aa, Artificial Sequence
  GFR-binding peptide
  MOD_RES (1), (3), (36), (37): Xaa is C or S
  MOD_RES (14), (15), (16), (17), (18): Xaa is A or G
  MOD_RES (19), (20), (21), (22): Xaa is A or G or is absent
XKXSKVVMPIKGYXXXXXXXXXFYLINIPSLDQPVXXP

SEQ ID NO: 64157 - protein, 43 aa, Artificial Sequence
  GFR-binding peptide
  MOD_RES (2), (4), (38), (39): Xaa is C or S
  MOD_RES (16), (17), (18), (19), (20): Xaa is A or G
  MOD_RES (21), (22), (23), (24): Xaa is A or G or is absent
SXGXRDVVMGRHKRLXXXXXXXXXYYLMSTASMKTPTXXPGAS

SEQ ID NO: 64158 - protein, 43 aa, Artificial Sequence; identical to SEQ ID NO: 4995
  GFR-binding peptide
  MOD_RES (1), (3), (37), (38): Xaa is C or S
  MOD_RES (15), (16), (17), (18), (19): Xaa is A or G
  MOD_RES (20), (21), (22), (23): Xaa is A or G or is absent

SEQ ID NO: 64159 - protein, 39 aa, Artificial Sequence; identical to SEQ ID NO: 32107
  GFR-binding peptide
  MOD_RES (2), (34), (35): Xaa is C or S

SEQ ID NO: 64160 - protein, 36 aa, Artificial Sequence
  GFR-binding peptide
  MOD_RES (2), (4): Xaa is C or S
  MOD_RES (15), (16), (17), (18), (19): Xaa is A or G
  MOD_RES (20), (21), (22), (23): Xaa is A or G or is absent
LXGXEEVIMYHYKLXXXXXXXXXKYLMSIPSTKVPA

SEQ ID NO: 64161 - protein, 35 aa, Artificial Sequence; identical to SEQ ID NO: 5000
  GFR-binding peptide
  MOD_RES (2), (34), (35): Xaa is C or S

SEQ ID NO: 64162 - protein, 34 aa, Artificial Sequence; identical to SEQ ID NO: 26095
  GFR-binding peptide
  MOD_RES (34), (34): Xaa is C or S
  MOD_RES (12), (13), (14), (15), (16): Xaa is A or G
  MOD_RES (17), (18), (19), (20): Xaa is A or G or is absent

SEQ ID NO: 64163 - protein, 39 aa, Artificial Sequence; identical to SEQ ID NO: 5001
  GFR-binding peptide
  MOD_RES (2), (4), (36), (37): Xaa is C or S

SEQ ID NO: 64164 - protein, 41 aa, Artificial Sequence; identical to SEQ ID NO: 5003
  GFR-binding peptide
  MOD_RES (2), (35), (36): Xaa is C or S

SEQ ID NO: 64165 - protein, 37 aa, Artificial Sequence; identical to SEQ ID NO: 32111
  GFR-binding peptide
  MOD_RES (1), (3): Xaa is C or S
  MOD_RES (16), (17), (18), (19), (20): Xaa is A or G
  MOD_RES (21), (22), (23), (24): Xaa is A or G or is absent

SEQ ID NO: 64166 - protein, 44 aa, Artificial Sequence
  GFR-binding peptide
  MOD_RES (2), (4), (38), (39): Xaa is C or S
  MOD_RES (16), (17), (18), (19), (20): Xaa is A or G
  MOD_RES (21), (22), (23), (24): Xaa is A or G or is absent
RXAXSEVTMNRYKKLXXXXXXXXXFYLISIANMKEPVXXPEPIG

SEQ ID NO: 64167 - protein, 33 aa, Artificial Sequence; identical to SEQ ID NO: 32117
  GFR-binding peptide
  MOD_RES (32), (33): Xaa is C or S

SEQ ID NO: 64168 - protein, 40 aa, Artificial Sequence
  GFR-binding peptide
  MOD_RES (34), (35): Xaa is C or S
  MOD_RES (12), (13), (14), (15), (16): Xaa is A or G
  MOD_RES (17), (18), (19), (20): Xaa is A or G or is absent
SRVVMNEYKFKXXXXXXXXXLYLVSIPELKTPAXXPKPVH

SEQ ID NO: 64169 - protein, 39 aa, Artificial Sequence; identical to SEQ ID NO: 32122
  GFR-binding peptide
  MOD_RES (2), (4), (37), (38): Xaa is C or S
  MOD_RES (15), (16), (17), (18), (19): Xaa is A or G
  MOD_RES (20), (21), (22), (23): Xaa is A or G or is absent

SEQ ID NO: 64170 - protein, 36 aa, Artificial Sequence; identical to SEQ ID NO: 26102
  GFR-binding peptide
  MOD_RES (2), (34): Xaa is C or S

SEQ ID NO: 64171 - protein, 38 aa, Artificial Sequence; identical to SEQ ID NO: 32127
  GFR-binding peptide
  MOD_RES (33), (34): Xaa is C or S
  MOD_RES (11), (12), (13), (14), (15): Xaa is A or G
  MOD_RES (16), (17), (18), (19): Xaa is A or G or is absent

SEQ ID NO: 64172 - protein, 40 aa, Artificial Sequence; identical to SEQ ID NO: 32130
  GFR-binding peptide
  MOD_RES (2), (36), (37): Xaa is C or S
  MOD_RES (14), (15), (16), (17), (18): Xaa is A or G
  MOD_RES (19), (20), (21), (22): Xaa is A or G or is absent

SEQ ID NO: 64173 - protein, 37 aa, Artificial Sequence; identical to SEQ ID NO: 5012
  GFR-binding peptide
  MOD_RES (1), (32), (33): Xaa is C or S

SEQ ID NO: 64174 - protein, 42 aa, Artificial Sequence; identical to SEQ ID NO: 57063
  GFR-binding peptide
  MOD_RES (2), (4), (36), (37): Xaa is C or S

SEQ ID NO: 64175 - protein, 39 aa, Artificial Sequence; identical to SEQ ID NO: 26105
  GFR-binding peptide
  MOD_RES (1), (33): Xaa is C or S

SEQ ID NO: 64176 - protein, 34 aa, Artificial Sequence
  GFR-binding peptide
  MOD_RES (32), (33): Xaa is C or S
SEVVMDYHYKLVVNNASDKYLISIPSLRTPVXXT

SEQ ID NO: 64177 - protein, 37 aa, Artificial Sequence; identical to SEQ ID NO: 26108
  GFR-binding peptide
  MOD_RES (2), (36), (37): Xaa is C or S
  MOD_RES (14), (15), (16), (17), (18): Xaa is A or G
  MOD_RES (19), (20), (21), (22): Xaa is A or G or is absent

SEQ ID NO: 64178 - protein, 35 aa, Artificial Sequence; identical to SEQ ID NO: 32134
  GFR-binding peptide
  MOD_RES (33), (34): Xaa is C or S
  MOD_RES (11), (12), (13), (14), (15): Xaa is A or G
  MOD_RES (16), (17), (18), (19): Xaa is A or G or is absent

SEQ ID NO: 64179 - protein, 43 aa, Artificial Sequence; identical to SEQ ID NO: 26109
  GFR-binding peptide
  MOD_RES (2), (4), (38), (39): Xaa is C or S
  MOD_RES (16), (17), (18), (19), (20): Xaa is A or G
  MOD_RES (21), (22), (23), (24): Xaa is A or G or is absent

SEQ ID NO: 64180 - protein, 37 aa, Artificial Sequence; identical to SEQ ID NO: 26110
  GFR-binding peptide
  MOD_RES (2), (36), (37): Xaa is C or S
  MOD_RES (14), (15), (16), (17), (18): Xaa is A or G
  MOD_RES (19), (20), (21), (22): Xaa is A or G or is absent

SEQ ID NO: 64181 - protein, 35 aa, Artificial Sequence
  GFR-binding peptide
  MOD_RES (1), (3): Xaa is C or S
  MOD_RES (14), (15), (16), (17), (18): Xaa is A or G
  MOD_RES (19), (20), (21), (22): Xaa is A or G or is absent
XKXSKVVMPIKGYXXXXXXXXXFYLINIPSLDQPV

SEQ ID NO: 64182 - protein, 40 aa, Artificial Sequence; identical to SEQ ID NO: 5021
  GFR-binding peptide
  MOD_RES (2), (36), (37): Xaa is C or S
  MOD_RES (14), (15), (16), (17), (18): Xaa is A or G
  MOD_RES (19), (20), (21), (22): Xaa is A or G or is absent

SEQ ID NO: 64183 - protein, 42 aa, Artificial Sequence; identical to SEQ ID NO: 5022
  GFR-binding peptide
  MOD_RES (2), (4), (38), (39): Xaa is C or S
  MOD_RES (16), (17), (18), (19), (20): Xaa is A or G
  MOD_RES (21), (22), (23), (24): Xaa is A or G or is absent

SEQ ID NO: 64184 - protein, 34 aa, Artificial Sequence; identical to SEQ ID NO: 32140
  GFR-binding peptide
  MOD_RES (31), (32): Xaa is C or S

SEQ ID NO: 64185 - protein, 40 aa, Artificial Sequence
  GFR-binding peptide
  MOD_RES (2), (36), (37): Xaa is C or S
  MOD_RES (14), (15), (16), (17), (18): Xaa is A or G
  MOD_RES (19), (20), (21), (22): Xaa is A or G or is absent
AXSEVTMNRHKRLXXXXXXXXXYYLISTASMKEPVXXPEP

SEQ ID NO: 64186 - protein, 34 aa, Artificial Sequence; identical to SEQ ID NO: 5024
  GFR-binding peptide
  MOD_RES (1), (33): Xaa is C or S

SEQ ID NO: 64187 - protein, 38 aa, Artificial Sequence; identical to SEQ ID NO: 32143
  GFR-binding peptide
  MOD_RES (2), (4), (38): Xaa is C or S
  MOD_RES (16), (17), (18), (19), (20): Xaa is A or G
  MOD_RES (21), (22), (23), (24): Xaa is A or G or is absent

SEQ ID NO: 64188 - protein, 36 aa, Artificial Sequence; identical to SEQ ID NO: 5025
  GFR-binding peptide
  MOD_RES (2), (35), (36): Xaa is C or S
  MOD_RES (13), (14), (15), (16), (17): Xaa is A or G
  MOD_RES (18), (19), (20), (21): Xaa is A or G or is absent

SEQ ID NO: 64189 - protein, 32 aa, Artificial Sequence; identical to SEQ ID NO: 26117
  GFR-binding peptide
  MOD_RES (32), (32): Xaa is C or S

SEQ ID NO: 64190 - protein, 33 aa, Artificial Sequence; identical to SEQ ID NO: 5026
  GFR-binding peptide
  MOD_RES (32), (32): Xaa is C or S

SEQ ID NO: 64191 - protein, 33 aa, Artificial Sequence
  GFR-binding peptide
  MOD_RES (33), (33): Xaa is C or S
  MOD_RES (11), (12), (13), (14), (15): Xaa is A or G
  MOD_RES (16), (17), (18), (19): Xaa is A or G or is absent
SRVIMPIKGYXXXXXXXXXFYLINIPSLAQPVX

SEQ ID NO: 64192 - protein, 31 aa, Artificial Sequence
  GFR-binding peptide
SEVVMDRHKRLVVNNASDYYLISTASLRTPV

SEQ ID NO: 64193 - protein, 39 aa, Artificial Sequence
  GFR-binding peptide
  MOD_RES (1), (35), (36): Xaa is C or S
  MOD_RES (13), (14), (15), (16), (17): Xaa is A or G
  MOD_RES (18), (19), (20), (21): Xaa is A or G or is absent
XSEVTMNRYKKLXXXXXXXXXFYLISIANMKEPVXXPEP

SEQ ID NO: 64194 - protein, 36 aa, Artificial Sequence; identical to SEQ ID NO: 5032
  GFR-binding peptide
  MOD_RES (32), (32): Xaa is C or S

SEQ ID NO: 64195 - protein, 34 aa, Artificial Sequence; identical to SEQ ID NO: 5033
  GFR-binding peptide
  MOD_RES (1), (34): Xaa is C or S
  MOD_RES (12), (13), (14), (15), (16): Xaa is A or G
  MOD_RES (17), (18), (19), (20): Xaa is A or G or is absent

SEQ ID NO: 64196 - protein, 35 aa, Artificial Sequence; identical to SEQ ID NO: 5038
  GFR-binding peptide
  MOD_RES (1), (3), (35): Xaa is C or S

SEQ ID NO: 64197 - protein, 36 aa, Artificial Sequence; identical to SEQ ID NO: 26130
  GFR-binding peptide
  MOD_RES (2), (4), (36): Xaa is C or S

SEQ ID NO: 64198 - protein, 34 aa, Artificial Sequence; identical to SEQ ID NO: 32156
  GFR-binding peptide
  MOD_RES (33), (34): Xaa is C or S
  MOD_RES (11), (12), (13), (14), (15): Xaa is A or G
  MOD_RES (16), (17), (18), (19): Xaa is A or G or is absent

SEQ ID NO: 64199 - protein, 39 aa, Artificial Sequence; identical to SEQ ID NO: 32157
  GFR-binding peptide
  MOD_RES (33), (34): Xaa is C or S
  MOD_RES (11), (12), (13), (14), (15): Xaa is A or G
  MOD_RES (16), (17), (18), (19): Xaa is A or G or is absent

SEQ ID NO: 64200 - protein, 39 aa, Artificial Sequence; identical to SEQ ID NO: 5043
  GFR-binding peptide
  MOD_RES (1), (3), (37), (38): Xaa is C or S
  MOD_RES (15), (16), (17), (18), (19): Xaa is A or G
  MOD_RES (20), (21), (22), (23): Xaa is A or G or is absent

SEQ ID NO: 64201 - protein, 41 aa, Artificial Sequence; identical to SEQ ID NO: 32160
  GFR-binding peptide
  MOD_RES (2), (4), (36), (37): Xaa is C or S

SEQ ID NO: 64202 - protein, 39 aa, Artificial Sequence; identical to SEQ ID NO: 26136
  GFR-binding peptide
  MOD_RES (1), (3), (35), (36): Xaa is C or S

SEQ ID NO: 64203 - protein, 36 aa, Artificial Sequence; identical to SEQ ID NO: 32166
  GFR-binding peptide
  MOD_RES (31), (32): Xaa is C or S

SEQ ID NO: 64204 - protein, 42 aa, Artificial Sequence; identical to SEQ ID NO: 26139
  GFR-binding peptide
  MOD_RES (1), (3), (37), (38): Xaa is C or S
  MOD_RES (15), (16), (17), (18), (19): Xaa is A or G
  MOD_RES (20), (21), (22), (23): Xaa is A or G or is absent

SEQ ID NO: 64205 - protein, 39 aa, Artificial Sequence; identical to SEQ ID NO: 5047
  GFR-binding peptide
  MOD_RES (34), (35): Xaa is C or S
  MOD_RES (12), (13), (14), (15), (16): Xaa is A or G
  MOD_RES (17), (18), (19), (20): Xaa is A or G or is absent

SEQ ID NO: 64206 - protein, 34 aa, Artificial Sequence; identical to SEQ ID NO: 26144
  GFR-binding peptide
  MOD_RES (31), (32): Xaa is C or S

SEQ ID NO: 64207 - protein, 42 aa, Artificial Sequence; identical to SEQ ID NO: 5049
  GFR-binding peptide
  MOD_RES (2), (4), (36), (37): Xaa is C or S

SEQ ID NO: 64208 - protein, 41 aa, Artificial Sequence; identical to SEQ ID NO: 5051
  GFR-binding peptide
  MOD_RES (2), (4), (37), (38): Xaa is C or S
  MOD_RES (15), (16), (17), (18), (19): Xaa is A or G
  MOD_RES (20), (21), (22), (23): Xaa is A or G or is absent

SEQ ID NO: 64209 - protein, 35 aa, Artificial Sequence; identical to SEQ ID NO: 26151
  GFR-binding peptide
  MOD_RES (34), (34): Xaa is C or S
  MOD_RES (12), (13), (14), (15), (16): Xaa is A or G
  MOD_RES (17), (18), (19), (20): Xaa is A or G or is absent

SEQ ID NO: 64210 - protein, 33 aa, Artificial Sequence; identical to SEQ ID NO: 32169
  GFR-binding peptide
  MOD_RES (2), (2): Xaa is C or S

SEQ ID NO: 64211 - protein, 39 aa, Artificial Sequence; identical to SEQ ID NO: 5058
  GFR-binding peptide
  MOD_RES (2), (36), (37): Xaa is C or S
  MOD_RES (14), (15), (16), (17), (18): Xaa is A or G
  MOD_RES (19), (20), (21), (22): Xaa is A or G or is absent

SEQ ID NO: 64212 - protein, 36 aa, Artificial Sequence
  GFR-binding peptide
  MOD_RES (2), (36): Xaa is C or S
  MOD_RES (14), (15), (16), (17), (18): Xaa is A or G
  MOD_RES (19), (20), (21), (22): Xaa is A or G or is absent
GXRDVVMGEYKFKXXXXXXXXXLYLMSIPEMKTPTX

SEQ ID NO: 64213 - protein, 40 aa, Artificial Sequence; identical to SEQ ID NO: 12488
  GFR-binding peptide
  MOD_RES (2), (4), (36), (37): Xaa is C or S

SEQ ID NO: 64214 - protein, 43 aa, Artificial Sequence
  GFR-binding peptide
  MOD_RES (2), (4), (37), (38): Xaa is C or S
  MOD_RES (15), (16), (17), (18), (19): Xaa is A or G
  MOD_RES (20), (21), (22), (23): Xaa is A or G or is absent
LXGXEEVIMEYKFKXXXXXXXXXLYLMSIPETKVPAXXTSPVR

SEQ ID NO: 64215 - protein, 36 aa, Artificial Sequence; identical to SEQ ID NO: 5060
  GFR-binding peptide
  MOD_RES (31), (32): Xaa is C or S

SEQ ID NO: 64216 - protein, 40 aa, Artificial Sequence; identical to SEQ ID NO: 5061
  GFR-binding peptide
  MOD_RES (1), (34), (35): Xaa is C or S

SEQ ID NO: 64217 - protein, 43 aa, Artificial Sequence; identical to SEQ ID NO: 26161
  GFR-binding peptide
  MOD_RES (1), (3), (37), (38): Xaa is C or S
  MOD_RES (15), (16), (17), (18), (19): Xaa is A or G
  MOD_RES (20), (21), (22), (23): Xaa is A or G or is absent

SEQ ID NO: 64218 - protein, 36 aa, Artificial Sequence; identical to SEQ ID NO: 5063
  GFR-binding peptide
  MOD_RES (2), (35), (36): Xaa is C or S

SEQ ID NO: 64219 - protein, 41 aa, Artificial Sequence; identical to SEQ ID NO: 5064
  GFR-binding peptide
  MOD_RES (2), (36): Xaa is C or S
  MOD_RES (14), (15), (16), (17), (18): Xaa is A or G
  MOD_RES (19), (20), (21), (22): Xaa is A or G or is absent

SEQ ID NO: 64220 - protein, 37 aa, Artificial Sequence; identical to SEQ ID NO: 5065
  GFR-binding peptide
  MOD_RES (2), (37): Xaa is C or S
  MOD_RES (15), (16), (17), (18), (19): Xaa is A or G
  MOD_RES (20), (21), (22), (23): Xaa is A or G or is absent

SEQ ID NO: 64221 - protein, 35 aa, Artificial Sequence; identical to SEQ ID NO: 26163
  GFR-binding peptide
  MOD_RES (1), (33): Xaa is C or S

SEQ ID NO: 64222 - protein, 32 aa, Artificial Sequence
  GFR-binding peptide
  MOD_RES (11), (12), (13), (14), (15): Xaa is A or G
  MOD_RES (16), (17), (18), (19): Xaa is A or G or is absent
EVTMNPIKGYXXXXXXXXXFYLINIPSMKEPV

SEQ ID NO: 64223 - protein, 39 aa, Artificial Sequence
  GFR-binding peptide
  MOD_RES (2), (33), (34): Xaa is C or S
GXEEVIMEYKFKLLVRGNDLYLMSIPETKVPAXXTSPVR

SEQ ID NO: 64224 - protein, 38 aa, Artificial Sequence
  GFR-binding peptide
  MOD_RES (1), (33), (34): Xaa is C or S
XSEVTMNRHKRLVVNKNEDYYLISTASMKEPVXXPEPI

SEQ ID NO: 64225 - protein, 36 aa, Artificial Sequence; identical to SEQ ID NO: 57111
  GFR-binding peptide
  MOD_RES (2), (4), (36): Xaa is C or S

SEQ ID NO: 64226 - protein, 34 aa, Artificial Sequence; identical to SEQ ID NO: 12502
  GFR-binding peptide
  MOD_RES (1), (33), (34): Xaa is C or S

SEQ ID NO: 64227 - protein, 38 aa, Artificial Sequence
  GFR-binding peptide
  MOD_RES (2), (4), (36), (37): Xaa is C or S
RXAXSEVTMNEYKFKVVNKNEDLYLISIPEMKEPVXXP

SEQ ID NO: 64228 - protein, 38 aa, Artificial Sequence
  GFR-binding peptide
  MOD_RES (2), (4), (37), (38): Xaa is C or S
  MOD_RES (15), (16), (17), (18), (19): Xaa is A or G
  MOD_RES (20), (21), (22), (23): Xaa is A or G or is absent
LXGXEEVIMYHYKLXXXXXXXXXKYLMSIPSTKVPAXX

SEQ ID NO: 64229 - protein, 31 aa, Artificial Sequence; identical to SEQ ID NO: 5073
  GFR-binding peptide
  MOD_RES (31), (31): Xaa is C or S

SEQ ID NO: 64230 - protein, 34 aa, Artificial Sequence; identical to SEQ ID NO: 26178
  GFR-binding peptide
  MOD_RES (33), (34): Xaa is C or S
  MOD_RES (11), (12), (13), (14), (15): Xaa is A or G
  MOD_RES (16), (17), (18), (19): Xaa is A or G or is absent

SEQ ID NO: 64231 - protein, 38 aa, Artificial Sequence; identical to SEQ ID NO: 26185
  GFR-binding peptide
  MOD_RES (1), (34), (35): Xaa is C or S

SEQ ID NO: 64232 - protein, 32 aa, Artificial Sequence
  GFR-binding peptide
  MOD_RES (11), (12), (13), (14), (15): Xaa is A or G
  MOD_RES (16), (17), (18), (19): Xaa is A or G or is absent
EVTMNEYKFKXXXXXXXXXLYLISIPEMKEPV

SEQ ID NO: 64233 - protein, 38 aa, Artificial Sequence; identical to SEQ ID NO: 5081
  GFR-binding peptide
  MOD_RES (32), (33): Xaa is C or S

SEQ ID NO: 64234 - protein, 37 aa, Artificial Sequence; identical to SEQ ID NO: 5083
  GFR-binding peptide
  MOD_RES (31), (32): Xaa is C or S

SEQ ID NO: 64235 - protein, 38 aa, Artificial Sequence; identical to SEQ ID NO: 5084
  GFR-binding peptide
  MOD_RES (2), (36): Xaa is C or S
  MOD_RES (14), (15), (16), (17), (18): Xaa is A or G
  MOD_RES (19), (20), (21), (22): Xaa is A or G or is absent

SEQ ID NO: 64236 - protein, 41 aa, Artificial Sequence; identical to SEQ ID NO: 5087
  GFR-binding peptide
  MOD_RES (1), (35), (36): Xaa is C or S
  MOD_RES (13), (14), (15), (16), (17): Xaa is A or G
  MOD_RES (18), (19), (20), (21): Xaa is A or G or is absent

SEQ ID NO: 64237 - protein, 37 aa, Artificial Sequence
  GFR-binding peptide
  MOD_RES (34), (35): Xaa is C or S
  MOD_RES (12), (13), (14), (15), (16): Xaa is A or G
  MOD_RES (17), (18), (19), (20): Xaa is A or G or is absent
AEVVMDRHKRLXXXXXXXXXYYLISTASLRAPVXXSA

SEQ ID NO: 64238 - protein, 33 aa, Artificial Sequence; identical to SEQ ID NO: 26193
  GFR-binding peptide
  MOD_RES (32), (33): Xaa is C or S

SEQ ID NO: 64239 - protein, 38 aa, Artificial Sequence; identical to SEQ ID NO: 5094
  GFR-binding peptide
  MOD_RES (33), (34): Xaa is C or S
  MOD_RES (11), (12), (13), (14), (15): Xaa is A or G
  MOD_RES (16), (17), (18), (19): Xaa is A or G or is absent

SEQ ID NO: 64240 - protein, 40 aa, Artificial Sequence; identical to SEQ ID NO: 5096
  GFR-binding peptide
  MOD_RES (2), (35), (36): Xaa is C or S
  MOD_RES (13), (14), (15), (16), (17): Xaa is A or G
  MOD_RES (18), (19), (20), (21): Xaa is A or G or is absent

SEQ ID NO: 64241 - protein, 33 aa, Artificial Sequence
  GFR-binding peptide
  MOD_RES (33), (33): Xaa is C or S
  MOD_RES (11), (12), (13), (14), (15): Xaa is A or G
  MOD_RES (16), (17), (18), (19): Xaa is A or G or is absent
SKVVMPIKGYXXXXXXXXXFYLINIPSLDQPVX

SEQ ID NO: 64242 - protein, 36 aa, Artificial Sequence; identical to SEQ ID NO: 5098
  GFR-binding peptide
  MOD_RES (1), (32), (33): Xaa is C or S

SEQ ID NO: 64243 - protein, 38 aa, Artificial Sequence
  GFR-binding peptide
  MOD_RES (2), (34), (35): Xaa is C or S
GXSEVVMDEYKFKVVNNASDLYLISIPELRTPVXXTPP

SEQ ID NO: 64244 - protein, 32 aa, Artificial Sequence; identical to SEQ ID NO: 32204
  GFR-binding peptide
  MOD_RES (31), (32): Xaa is C or S

SEQ ID NO: 64245 - protein, 35 aa, Artificial Sequence; identical to SEQ ID NO: 57129
  GFR-binding peptide
  MOD_RES (1), (3), (35): Xaa is C or S

SEQ ID NO: 64246 - protein, 31 aa, Artificial Sequence; identical to SEQ ID NO: 5099
  GFR-binding peptide

SEQ ID NO: 64247 - protein, 35 aa, Artificial Sequence
  GFR-binding peptide
  MOD_RES (2), (34), (35): Xaa is C or S
AXSEVTMNEYKFKVVNKNEDLYLISIPEMKEPVXX

SEQ ID NO: 64248 - protein, 40 aa, Artificial Sequence; identical to SEQ ID NO: 57136
  GFR-binding peptide
  MOD_RES (1), (3), (34), (35): Xaa is C or S

SEQ ID NO: 64249 - protein, 38 aa, Artificial Sequence; identical to SEQ ID NO: 5102
  GFR-binding peptide
  MOD_RES (1), (35), (36): Xaa is C or S
  MOD_RES (13), (14), (15), (16), (17): Xaa is A or G
  MOD_RES (18), (19), (20), (21): Xaa is A or G or is absent

SEQ ID NO: 64250 - protein, 32 aa, Artificial Sequence
  GFR-binding peptide
  MOD_RES (32), (32): Xaa is C or S
RDVVMGEYKFKIIQQKDNLYLMSIPEMKTPTX

SEQ ID NO: 64251 - protein, 38 aa, Artificial Sequence; identical to SEQ ID NO: 5103
  GFR-binding peptide
  MOD_RES (33), (34): Xaa is C or S
  MOD_RES (11), (12), (13), (14), (15): Xaa is A or G
  MOD_RES (16), (17), (18), (19): Xaa is A or G or is absent

SEQ ID NO: 64252 - protein, 32 aa, Artificial Sequence
  GFR-binding peptide
  MOD_RES (11), (12), (13), (14), (15): Xaa is A or G
  MOD_RES (16), (17), (18), (19): Xaa is A or G or is absent
SKVIMPIKGYXXXXXXXXXFYLINIPSLDQSV

SEQ ID NO: 64253 - protein, 39 aa, Artificial Sequence; identical to SEQ ID NO: 26209
  GFR-binding peptide
  MOD_RES (1), (3), (35), (36): Xaa is C or S

SEQ ID NO: 64254 - protein, 35 aa, Artificial Sequence; identical to SEQ ID NO: 5107
  GFR-binding peptide
  MOD_RES (1), (32), (33): Xaa is C or S

SEQ ID NO: 64255 - protein, 38 aa, Artificial Sequence
  GFR-binding peptide
  MOD_RES (34), (35): Xaa is C or S
  MOD_RES (12), (13), (14), (15), (16): Xaa is A or G
  MOD_RES (17), (18), (19), (20): Xaa is A or G or is absent
RDVVMGEYKFKXXXXXXXXXLYLMSIPEMKTPTXXPGA

SEQ ID NO: 64256 - protein, 36 aa, Artificial Sequence; identical to SEQ ID NO: 26210
  GFR-binding peptide
  MOD_RES (2), (34), (35): Xaa is C or S

SEQ ID NO: 64257 - protein, 41 aa, Artificial Sequence; identical to SEQ ID NO: 5108
  GFR-binding peptide
  MOD_RES (1), (35): Xaa is C or S
  MOD_RES (13), (14), (15), (16), (17): Xaa is A or G
  MOD_RES (18), (19), (20), (21): Xaa is A or G or is absent

SEQ ID NO: 64258 - protein, 35 aa, Artificial Sequence; identical to SEQ ID NO: 5113
  GFR-binding peptide
  MOD_RES (1), (3): Xaa is C or S

SEQ ID NO: 64259 - protein, 31 aa, Artificial Sequence; identical to SEQ ID NO: 26215
  GFR-binding peptide
  MOD_RES (31), (31): Xaa is C or S

SEQ ID NO: 64260 - protein, 38 aa, Artificial Sequence; identical to SEQ ID NO: 26216
  GFR-binding peptide
  MOD_RES (2), (36), (37): Xaa is C or S
  MOD_RES (14), (15), (16), (17), (18): Xaa is A or G
  MOD_RES (19), (20), (21), (22): Xaa is A or G or is absent

SEQ ID NO: 64261 - protein, 41 aa, Artificial Sequence; identical to SEQ ID NO: 5120
  GFR-binding peptide
  MOD_RES (2), (4), (36), (37): Xaa is C or S

SEQ ID NO: 64262 - protein, 36 aa, Artificial Sequence; identical to SEQ ID NO: 5122
  GFR-binding peptide
  MOD_RES (33), (34): Xaa is C or S
  MOD_RES (11), (12), (13), (14), (15): Xaa is A or G
  MOD_RES (16), (17), (18), (19): Xaa is A or G or is absent

SEQ ID NO: 64263 - protein, 39 aa, Artificial Sequence; identical to SEQ ID NO: 26225
  GFR-binding peptide
  MOD_RES (2), (4), (36), (37): Xaa is C or S

SEQ ID NO: 64264 - protein, 37 aa, Artificial Sequence; identical to SEQ ID NO: 5125
  GFR-binding peptide
  MOD_RES (2), (34), (35): Xaa is C or S

SEQ ID NO: 64265 - protein, 34 aa, Artificial Sequence
  GFR-binding peptide
  MOD_RES (1), (32), (33): Xaa is C or S
XSKVIMPIKGYIKPTKGIFYLINIPSLDQSVXXP

SEQ ID NO: 64266 - protein, 34 aa, Artificial Sequence; identical to SEQ ID NO: 5127
  GFR-binding peptide
  MOD_RES (33), (34): Xaa is C or S

SEQ ID NO: 64267 - protein, 36 aa, Artificial Sequence; identical to SEQ ID NO: 26227
  GFR-binding peptide
  MOD_RES (1), (35), (36): Xaa is C or S
  MOD_RES (13), (14), (15), (16), (17): Xaa is A or G
  MOD_RES (18), (19), (20), (21): Xaa is A or G or is absent

SEQ ID NO: 64268 - protein, 38 aa, Artificial Sequence
  GFR-binding peptide
  MOD_RES (32), (33): Xaa is C or S
SEVTMNYHYKLVVNKNEDKYLISIPSMKEPVXXPEPIG

SEQ ID NO: 64269 - protein, 33 aa, Artificial Sequence
  GFR-binding peptide
  MOD_RES (1), (33): Xaa is C or S
XSEVTMNYHYKLVVNKNEDKYLISIPSMKEPVX

SEQ ID NO: 64270 - protein, 42 aa, Artificial Sequence; identical to SEQ ID NO: 5131
  GFR-binding peptide
  MOD_RES (2), (4), (37), (38): Xaa is C or S
  MOD_RES (15), (16), (17), (18), (19): Xaa is A or G
  MOD_RES (20), (21), (22), (23): Xaa is A or G or is absent

SEQ ID NO: 64271 - protein, 37 aa, Artificial Sequence; identical to SEQ ID NO: 5133
  GFR-binding peptide
  MOD_RES (32), (33): Xaa is C or S

SEQ ID NO: 64272 - protein, 40 aa, Artificial Sequence; identical to SEQ ID NO: 5134
  GFR-binding peptide
  MOD_RES (34), (35): Xaa is C or S
  MOD_RES (12), (13), (14), (15), (16): Xaa is A or G
  MOD_RES (17), (18), (19), (20): Xaa is A or G or is absent

SEQ ID NO: 64273 - protein, 33 aa, Artificial Sequence; identical to SEQ ID NO: 5135
  GFR-binding peptide
  MOD_RES (1), (1): Xaa is C or S
  MOD_RES (12), (13), (14), (15), (16): Xaa is A or G
  MOD_RES (17), (18), (19), (20): Xaa is A or G or is absent

SEQ ID NO: 64274 - protein, 38 aa, Artificial Sequence
  GFR-binding peptide
  MOD_RES (2), (35), (36): Xaa is C or S
  MOD_RES (13), (14), (15), (16), (17): Xaa is A or G
  MOD_RES (18), (19), (20), (21): Xaa is A or G or is absent
GXEEVIMEYKFKXXXXXXXXXLYLMSIPETKVPAXXTS

SEQ ID NO: 64275 - protein, 40 aa, Artificial Sequence
  GFR-binding peptide
  MOD_RES (2), (34), (35): Xaa is C or S
GXESVAMGRHKRLYTVVGKDYYLISTASLKTPVXXAKSAK

SEQ ID NO: 64276 - protein, 38 aa, Artificial Sequence; identical to SEQ ID NO: 26245
  GFR-binding peptide
  MOD_RES (1), (3), (35), (36): Xaa is C or S

SEQ ID NO: 64277 - protein, 36 aa, Artificial Sequence
  GFR-binding peptide
  MOD_RES (32), (33): Xaa is C or S
SEVTMNRYKKLVVNKNEDFYLISIANMKEPVXXPEP

SEQ ID NO: 64278 - protein, 31 aa, Artificial Sequence
  GFR-binding peptide
SEVTMNRHKRLVVNKNEDYYLISTASMKEPV

SEQ ID NO: 64279 - protein, 31 aa, Artificial Sequence; identical to SEQ ID NO: 32249
  GFR-binding peptide

SEQ ID NO: 64280 - protein, 33 aa, Artificial Sequence; identical to SEQ ID NO: 32250
  GFR-binding peptide
  MOD_RES (32), (33): Xaa is C or S

SEQ ID NO: 64281 - protein, 41 aa, Artificial Sequence; identical to SEQ ID NO: 26251
  GFR-binding peptide
  MOD_RES (2), (4), (38), (39): Xaa is C or S
  MOD_RES (16), (17), (18), (19), (20): Xaa is A or G
  MOD_RES (21), (22), (23), (24): Xaa is A or G or is absent

SEQ ID NO: 64282 - protein, 33 aa, Artificial Sequence; identical to SEQ ID NO: 26252
  GFR-binding peptide
  MOD_RES (12), (13), (14), (15), (16): Xaa is A or G
  MOD_RES (17), (18), (19), (20): Xaa is A or G or is absent

SEQ ID NO: 64283 - protein, 40 aa, Artificial Sequence; identical to SEQ ID NO: 5146
  GFR-binding peptide
  MOD_RES (1), (3), (35), (36): Xaa is C or S

SEQ ID NO: 64284 - protein, 36 aa, Artificial Sequence; identical to SEQ ID NO: 26256
  GFR-binding peptide
  MOD_RES (2), (4), (36): Xaa is C or S

SEQ ID NO: 64285 - protein, 36 aa, Artificial Sequence; identical to SEQ ID NO: 5148
  GFR-binding peptide
  MOD_RES (2), (4), (35), (36): Xaa is C or S

SEQ ID NO: 64286 - protein, 39 aa, Artificial Sequence
  GFR-binding peptide
  MOD_RES (1), (33), (34): Xaa is C or S
XSRVVMNRHKRLIVNSSDDYYLVSTASLKTPAXXPKPVH

SEQ ID NO: 64287 - protein, 44 aa, Artificial Sequence; identical to SEQ ID NO: 26261
  GFR-binding peptide
  MOD_RES (2), (4), (38), (39): Xaa is C or S
  MOD_RES (16), (17), (18), (19), (20): Xaa is A or G
  MOD_RES (21), (22), (23), (24): Xaa is A or G or is absent

SEQ ID NO: 64288 - protein, 36 aa, Artificial Sequence; identical to SEQ ID NO: 5154
  GFR-binding peptide
  MOD_RES (2), (34), (35): Xaa is C or S

SEQ ID NO: 64289 - protein, 36 aa, Artificial Sequence; identical to SEQ ID NO: 5155
  GFR-binding peptide
  MOD_RES (1), (33), (34): Xaa is C or S

SEQ ID NO: 64290 - protein, 35 aa, Artificial Sequence; identical to SEQ ID NO: 32266
  GFR-binding peptide
  MOD_RES (1), (33): Xaa is C or S

SEQ ID NO: 64291 - protein, 35 aa, Artificial Sequence; identical to SEQ ID NO: 5158
  GFR-binding peptide
  MOD_RES (1), (3), (35): Xaa is C or S

SEQ ID NO: 64292 - protein, 34 aa, Artificial Sequence; identical to SEQ ID NO: 5159
  GFR-binding peptide
  MOD_RES (2), (34): Xaa is C or S

SEQ ID NO: 64293 - protein, 38 aa, Artificial Sequence; identical to SEQ ID NO: 32268
  GFR-binding peptide
  MOD_RES (2), (36), (37): Xaa is C or S
  MOD_RES (14), (15), (16), (17), (18): Xaa is A or G
  MOD_RES (19), (20), (21), (22): Xaa is A or G or is absent

SEQ ID NO: 64294 - protein, 35 aa, Artificial Sequence; identical to SEQ ID NO: 5161
  GFR-binding peptide
  MOD_RES (2), (4): Xaa is C or S

SEQ ID NO: 64295 - protein, 36 aa, Artificial Sequence; identical to SEQ ID NO: 26269
  GFR-binding peptide
  MOD_RES (1), (3), (35), (36): Xaa is C or S

SEQ ID NO: 64296 - protein, 40 aa, Artificial Sequence; identical to SEQ ID NO: 32271
  GFR-binding peptide
  MOD_RES (34), (35): Xaa is C or S
  MOD_RES (12), (13), (14), (15), (16): Xaa is A or G
  MOD_RES (17), (18), (19), (20): Xaa is A or G or is absent

SEQ ID NO: 64297 - protein, 39 aa, Artificial Sequence; identical to SEQ ID NO: 32272
  GFR-binding peptide
  MOD_RES (1), (35), (36): Xaa is C or S
  MOD_RES (13), (14), (15), (16), (17): Xaa is A or G
  MOD_RES (18), (19), (20), (21): Xaa is A or G or is absent

SEQ ID NO: 64298 - protein, 36 aa, Artificial Sequence
  GFR-binding peptide
  MOD_RES (2), (4), (36): Xaa is C or S
RXAXSEVTMNPIKGYVVNKNEDFYLINIPSMKEPVX

SEQ ID NO: 64299 - protein, 39 aa, Artificial Sequence; identical to SEQ ID NO: 26271
  GFR-binding peptide
  MOD_RES (2), (34), (35): Xaa is C or S

SEQ ID NO: 64300 - protein, 37 aa, Artificial Sequence; identical to SEQ ID NO: 26272
  GFR-binding peptide
  MOD_RES (2), (34), (35): Xaa is C or S

SEQ ID NO: 64301 - protein, 39 aa, Artificial Sequence
  GFR-binding peptide
  MOD_RES (1), (3), (35), (36): Xaa is C or S
XGXRDVVMGEYKFKIIQQKDNLYLMSIPEMKTPTXXPGA

SEQ ID NO: 64302 - protein, 37 aa, Artificial Sequence; identical to SEQ ID NO: 5168
  GFR-binding peptide
  MOD_RES (34), (35): Xaa is C or S
  MOD_RES (12), (13), (14), (15), (16): Xaa is A or G
  MOD_RES (17), (18), (19), (20): Xaa is A or G or is absent

SEQ ID NO: 64303 - protein, 39 aa, Artificial Sequence; identical to SEQ ID NO: 32276
  GFR-binding peptide
  MOD_RES (33), (34): Xaa is C or S
  MOD_RES (11), (12), (13), (14), (15): Xaa is A or G
  MOD_RES (16), (17), (18), (19): Xaa is A or G or is absent

SEQ ID NO: 64304 - protein, 38 aa, Artificial Sequence; identical to SEQ ID NO: 57209
  GFR-binding peptide
  MOD_RES (2), (4), (36), (37): Xaa is C or S

SEQ ID NO: 64305 - protein, 37 aa, Artificial Sequence; identical to SEQ ID NO: 5170
  GFR-binding peptide
  MOD_RES (1), (32), (33): Xaa is C or S

SEQ ID NO: 64306 - protein, 32 aa, Artificial Sequence; identical to SEQ ID NO: 5171
  GFR-binding peptide
  MOD_RES (31), (32): Xaa is C or S

SEQ ID NO: 64307 - protein, 35 aa, Artificial Sequence; identical to SEQ ID NO: 5174
  GFR-binding peptide
  MOD_RES (2), (34), (35): Xaa is C or S

SEQ ID NO: 64308 - protein, 38 aa, Artificial Sequence; identical to SEQ ID NO: 5176
  GFR-binding peptide
  MOD_RES (1), (34), (35): Xaa is C or S

SEQ ID NO: 64309 - protein, 37 aa, Artificial Sequence
  GFR-binding peptide
  MOD_RES (33), (34): Xaa is C or S
  MOD_RES (11), (12), (13), (14), (15): Xaa is A or G
  MOD_RES (16), (17), (18), (19): Xaa is A or G or is absent
EVTMNYHYKLXXXXXXXXXKYLISIPSMKEPVXXPEP

SEQ ID NO: 64310 - protein, 38 aa, Artificial Sequence; identical to SEQ ID NO: 26284
  GFR-binding peptide
  MOD_RES (1), (36), (37): Xaa is C or S
  MOD_RES (14), (15), (16), (17), (18): Xaa is A or G
  MOD_RES (19), (20), (21), (22): Xaa is A or G or is absent

SEQ ID NO: 64311 - protein, 34 aa, Artificial Sequence; identical to SEQ ID NO: 5177
  GFR-binding peptide
  MOD_RES (33), (34): Xaa is C or S
  MOD_RES (11), (12), (13), (14), (15): Xaa is A or G
  MOD_RES (16), (17), (18), (19): Xaa is A or G or is absent

SEQ ID NO: 64312 - protein, 33 aa, Artificial Sequence
  GFR-binding peptide
  MOD_RES (33), (33): Xaa is C or S
  MOD_RES (11), (12), (13), (14), (15): Xaa is A or G
  MOD_RES (16), (17), (18), (19): Xaa is A or G or is absent
EVTMNPIKGYXXXXXXXXXFYLINIPSMKEPVX

SEQ ID NO: 64313 - protein, 39 aa, Artificial Sequence; identical to SEQ ID NO: 32287
  GFR-binding peptide
  MOD_RES (33), (34): Xaa is C or S
  MOD_RES (11), (12), (13), (14), (15): Xaa is A or G
  MOD_RES (16), (17), (18), (19): Xaa is A or G or is absent

SEQ ID NO: 64314 - protein, 41 aa, Artificial Sequence; identical to SEQ ID NO: 26289
  GFR-binding peptide
  MOD_RES (2), (36), (37): Xaa is C or S
  MOD_RES (14), (15), (16), (17), (18): Xaa is A or G
  MOD_RES (19), (20), (21), (22): Xaa is A or G or is absent

SEQ ID NO: 64315 - protein, 40 aa, Artificial Sequence
  GFR-binding peptide
  MOD_RES (2), (4), (35), (36): Xaa is C or S
SXKXSRVIMPIKGYVKPKRGVFYLINIPSLAQPVXXPAAS

SEQ ID NO: 64316 - protein, 38 aa, Artificial Sequence; identical to SEQ ID NO: 5182
  GFR-binding peptide
  MOD_RES (1), (32), (33): Xaa is C or S

SEQ ID NO: 64317 - protein, 35 aa, Artificial Sequence; identical to SEQ ID NO: 5184
  GFR-binding peptide
  MOD_RES (1), (34), (35): Xaa is C or S

SEQ ID NO: 64318 - protein, 41 aa, Artificial Sequence; identical to SEQ ID NO: 57228
  GFR-binding peptide
  MOD_RES (2), (4), (38), (39): Xaa is C or S
  MOD_RES (16), (17), (18), (19), (20): Xaa is A or G
  MOD_RES (21), (22), (23), (24): Xaa is A or G or is absent

SEQ ID NO: 64319 - protein, 32 aa, Artificial Sequence; identical to SEQ ID NO: 32292
  GFR-binding peptide
  MOD_RES (32), (32): Xaa is C or S

SEQ ID NO: 64320 - protein, 38 aa, Artificial Sequence; identical to SEQ ID NO: 5186
  GFR-binding peptide
  MOD_RES (1), (35), (36): Xaa is C or S
  MOD_RES (13), (14), (15), (16), (17): Xaa is A or G
  MOD_RES (18), (19), (20), (21): Xaa is A or G or is absent

SEQ ID NO: 64321 - protein, 33 aa, Artificial Sequence; identical to SEQ ID NO: 26301
  GFR-binding peptide
  MOD_RES (33), (33): Xaa is C or S
  MOD_RES (11), (12), (13), (14), (15): Xaa is A or G
  MOD_RES (16), (17), (18), (19): Xaa is A or G or is absent

SEQ ID NO: 64322 - protein, 33 aa, Artificial Sequence; identical to SEQ ID NO: 32294
  GFR-binding peptide
  MOD_RES (12), (13), (14), (15), (16): Xaa is A or G
  MOD_RES (17), (18), (19), (20): Xaa is A or G or is absent

SEQ ID NO: 64323 - protein, 44 aa, Artificial Sequence; identical to SEQ ID NO: 5189
  GFR-binding peptide
  MOD_RES (2), (4), (38), (39): Xaa is C or S
  MOD_RES (16), (17), (18), (19), (20): Xaa is A or G
  MOD_RES (21), (22), (23), (24): Xaa is A or G or is absent

SEQ ID NO: 64324 - protein, 37 aa, Artificial Sequence; identical to SEQ ID NO: 32296
  GFR-binding peptide
  MOD_RES (1), (3), (36), (37): Xaa is C or S

SEQ ID NO: 64325 - protein, 39 aa, Artificial Sequence
  GFR-binding peptide
  MOD_RES (33), (34): Xaa is C or S
  MOD_RES (11), (12), (13), (14), (15): Xaa is A or G
  MOD_RES (16), (17), (18), (19): Xaa is A or G or is absent
RVVMNEYKFKXXXXXXXXXLYLVSIPELKTPAXXPKPVH

SEQ ID NO: 64326 - protein, 37 aa, Artificial Sequence
  GFR-binding peptide
  MOD_RES (1), (3), (34), (35): Xaa is C or S
XKXSKVVMPIKGYVKPTRGVFYLINIPSLDQPVXXPS

SEQ ID NO: 64327 - protein, 36 aa, Artificial Sequence
  GFR-binding peptide
  MOD_RES (31), (32): Xaa is C or S
SVAMGRHKRLYTVVGKDYYLISTASLKTPVXXAKSA

SEQ ID NO: 64328 - protein, 38 aa, Artificial Sequence; identical to SEQ ID NO: 5196
  GFR-binding peptide
  MOD_RES (1), (3), (35), (36): Xaa is C or S

SEQ ID NO: 64329 - protein, 39 aa, Artificial Sequence; identical to SEQ ID NO: 5197
  GFR-binding peptide
  MOD_RES (1), (3), (37), (38): Xaa is C or S
  MOD_RES (15), (16), (17), (18), (19): Xaa is A or G
  MOD_RES (20), (21), (22), (23): Xaa is A or G or is absent

SEQ ID NO: 64330 - protein, 33 aa, Artificial Sequence; identical to SEQ ID NO: 26310
  GFR-binding peptide
  MOD_RES (31), (32): Xaa is C or S

SEQ ID NO: 64331 - protein, 36 aa, Artificial Sequence; identical to SEQ ID NO: 5201
  GFR-binding peptide
  MOD_RES (33), (34): Xaa is C or S

SEQ ID NO: 64332 - protein, 36 aa, Artificial Sequence; identical to SEQ ID NO: 5203
  GFR-binding peptide
  MOD_RES (1), (36): Xaa is C or S
  MOD_RES (14), (15), (16), (17), (18): Xaa is A or G
  MOD_RES (19), (20), (21), (22): Xaa is A or G or is absent

SEQ ID NO: 64333 - protein, 41 aa, Artificial Sequence; identical to SEQ ID NO: 26315
  GFR-binding peptide
  MOD_RES (35), (36): Xaa is C or S
  MOD_RES (13), (14), (15), (16), (17): Xaa is A or G
  MOD_RES (18), (19), (20), (21): Xaa is A or G or is absent

SEQ ID NO: 64334 - protein, 31 aa, Artificial Sequence; identical to SEQ ID NO: 5207
  GFR-binding peptide
  MOD_RES (1), (1): Xaa is C or S

SEQ ID NO: 64335 - protein, 35 aa, Artificial Sequence
  GFR-binding peptide
  MOD_RES (1), (3): Xaa is C or S
  MOD_RES (14), (15), (16), (17), (18): Xaa is A or G
  MOD_RES (19), (20), (21), (22): Xaa is A or G or is absent
XGXEEVIMRHKRLXXXXXXXXXYYLMSTASTKVPA

SEQ ID NO: 64336 - protein, 38 aa, Artificial Sequence
  GFR-binding peptide
  MOD_RES (1), (34), (35): Xaa is C or S
  MOD_RES (12), (13), (14), (15), (16): Xaa is A or G
  MOD_RES (17), (18), (19), (20): Xaa is A or G or is absent
XSKVVMPIKGYXXXXXXXXXFYLINIPSLDQPVXXPSA

SEQ ID NO: 64337 - protein, 36 aa, Artificial Sequence
  GFR-binding peptide
  MOD_RES (32), (33): Xaa is C or S
SEVTMNRHKRLVVNKNEDYYLISTASMKEPVXXPEP

SEQ ID NO: 64338 - protein, 33 aa, Artificial Sequence; identical to SEQ ID NO: 26322
  GFR-binding peptide
  MOD_RES (33), (33): Xaa is C or S
  MOD_RES (11), (12), (13), (14), (15): Xaa is A or G
  MOD_RES (16), (17), (18), (19): Xaa is A or G or is absent

SEQ ID NO: 64339 - protein, 36 aa, Artificial Sequence
  GFR-binding peptide
  MOD_RES (34), (35): Xaa is C or S
  MOD_RES (12), (13), (14), (15), (16): Xaa is A or G
  MOD_RES (17), (18), (19), (20): Xaa is A or G or is absent
SEVVMDEYKFKXXXXXXXXXLYLISIPELRTPVXXT

SEQ ID NO: 64340 - protein, 36 aa, Artificial Sequence; identical to SEQ ID NO: 31223
  GFR-binding peptide
  MOD_RES (31), (32): Xaa is C or S

SEQ ID NO: 64341 - protein, 34 aa, Artificial Sequence
  GFR-binding peptide
  MOD_RES (1), (3): Xaa is C or S
XGXSEVVMDYHYKLVVNNASDKYLISIPSLRTPV

SEQ ID NO: 64342 - protein, 35 aa, Artificial Sequence
  GFR-binding peptide
  MOD_RES (1), (35): Xaa is C or S
  MOD_RES (13), (14), (15), (16), (17): Xaa is A or G
  MOD_RES (18), (19), (20), (21): Xaa is A or G or is absent
XSEVTMNPIKGYXXXXXXXXXFYLINIPSMKEPVX

SEQ ID NO: 64343 - protein, 33 aa, Artificial Sequence; identical to SEQ ID NO: 26324
  GFR-binding peptide
  MOD_RES (33), (33): Xaa is C or S
  MOD_RES (11), (12), (13), (14), (15): Xaa is A or G
  MOD_RES (16), (17), (18), (19): Xaa is A or G or is absent

SEQ ID NO: 64344 - protein, 39 aa, Artificial Sequence; identical to SEQ ID NO: 31227
  GFR-binding peptide
  MOD_RES (1), (3), (37): Xaa is C or S
  MOD_RES (15), (16), (17), (18), (19): Xaa is A or G
  MOD_RES (20), (21), (22), (23): Xaa is A or G or is absent

SEQ ID NO: 64345 - protein, 42 aa, Artificial Sequence; identical to SEQ ID NO: 26330
  GFR-binding peptide
  MOD_RES (1), (3), (37): Xaa is C or S
  MOD_RES (15), (16), (17), (18), (19): Xaa is A or G
  MOD_RES (20), (21), (22), (23): Xaa is A or G or is absent

SEQ ID NO: 64346 - protein, 36 aa, Artificial Sequence; identical to SEQ ID NO: 31230
  GFR-binding peptide
  MOD_RES (2), (34), (35): Xaa is C or S

SEQ ID NO: 64347 - protein, 37 aa, Artificial Sequence; identical to SEQ ID NO: 5223
  GFR-binding peptide
  MOD_RES (31), (32): Xaa is C or S

SEQ ID NO: 64348 - protein, 36 aa, Artificial Sequence; identical to SEQ ID NO: 26337
  GFR-binding peptide
  MOD_RES (2), (34), (35): Xaa is C or S

SEQ ID NO: 64349 - protein, 41 aa, Artificial Sequence; identical to SEQ ID NO: 5227
  GFR-binding peptide
  MOD_RES (1), (36), (37): Xaa is C or S
  MOD_RES (14), (15), (16), (17), (18): Xaa is A or G
  MOD_RES (19), (20), (21), (22): Xaa is A or G or is absent

SEQ ID NO: 64350 - protein, 34 aa, Artificial Sequence; identical to SEQ ID NO: 5231
  GFR-binding peptide
  MOD_RES (1), (1): Xaa is C or S
  MOD_RES (13), (14), (15), (16), (17): Xaa is A or G
  MOD_RES (18), (19), (20), (21): Xaa is A or G or is absent

SEQ ID NO: 64351 - protein, 36 aa, Artificial Sequence
  GFR-binding peptide
  MOD_RES (1), (32), (33): Xaa is C or S
XSKVVMPIKGYVKPTRGVFYLINIPSLDQPVXXPSA

SEQ ID NO: 64352 - protein, 44 aa, Artificial Sequence; identical to SEQ ID NO: 31242
  GFR-binding peptide
  MOD_RES (2), (4), (38), (39): Xaa is C or S
  MOD_RES (16), (17), (18), (19), (20): Xaa is A or G
  MOD_RES (21), (22), (23), (24): Xaa is A or G or is absent

SEQ ID NO: 64353 - protein, 38 aa, Artificial Sequence
  GFR-binding peptide
  MOD_RES (33), (34): Xaa is C or S
  MOD_RES (11), (12), (13), (14), (15): Xaa is A or G
  MOD_RES (16), (17), (18), (19): Xaa is A or G or is absent
EEVIMRHKRLXXXXXXXXXYYLMSTASTKVPAXXTSPV

SEQ ID NO: 64354 - protein, 34 aa, Artificial Sequence; identical to SEQ ID NO: 31245
  GFR-binding peptide
  MOD_RES (32), (33): Xaa is C or S

SEQ ID NO: 64355 - protein, 36 aa, Artificial Sequence
  GFR-binding peptide
  MOD_RES (1), (3), (35), (36): Xaa is C or S
XAXSEVTMNRYKKLVVNKNEDFYLISIANMKEPVXX

SEQ ID NO: 64356 - protein, 36 aa, Artificial Sequence; identical to SEQ ID NO: 26351
  GFR-binding peptide
  MOD_RES (31), (32): Xaa is C or S

SEQ ID NO: 64357 - protein, 37 aa, Artificial Sequence
  GFR-binding peptide
  MOD_RES (31), (32): Xaa is C or S
RVVMNYHYKLIVNSSDDKYLVSIPSLKTPAXXPKPVH

SEQ ID NO: 64358 - protein, 34 aa, Artificial Sequence
  GFR-binding peptide
  MOD_RES (1), (3): Xaa is C or S
XGXSEVVMDEYKFKVVNNASDLYLISIPELRTPV

SEQ ID NO: 64359 - protein, 39 aa, Artificial Sequence; identical to SEQ ID NO: 31248
  GFR-binding peptide
  MOD_RES (2), (4), (36), (37): Xaa is C or S

SEQ ID NO: 64360 - protein, 37 aa, Artificial Sequence
  GFR-binding peptide
  MOD_RES (2), (4): Xaa is C or S
  MOD_RES (16), (17), (18), (19), (20): Xaa is A or G
  MOD_RES (21), (22), (23), (24): Xaa is A or G or is absent
RXGXESVAMGRHKRLXXXXXXXXXYYLISTASLKTPV

SEQ ID NO: 64361 - protein, 35 aa, Artificial Sequence; identical to SEQ ID NO: 26353
  GFR-binding peptide
  MOD_RES (1), (3), (35): Xaa is C or S

SEQ ID NO: 64362 - protein, 40 aa, Artificial Sequence; identical to SEQ ID NO: 31255
  GFR-binding peptide
  MOD_RES (1), (3), (37), (38): Xaa is C or S
  MOD_RES (15), (16), (17), (18), (19): Xaa is A or G
  MOD_RES (20), (21), (22), (23): Xaa is A or G or is absent

SEQ ID NO: 64363 - protein, 36 aa, Artificial Sequence; identical to SEQ ID NO: 26357
  GFR-binding peptide
  MOD_RES (2), (4), (36): Xaa is C or S

SEQ ID NO: 64364 - protein, 43 aa, Artificial Sequence; identical to SEQ ID NO: 26358
  GFR-binding peptide
  MOD_RES (1), (3), (37), (38): Xaa is C or S
  MOD_RES (15), (16), (17), (18), (19): Xaa is A or G
  MOD_RES (20), (21), (22), (23): Xaa is A or G or is absent

SEQ ID NO: 64365 - protein, 34 aa, Artificial Sequence; identical to SEQ ID NO: 5240
  GFR-binding peptide
  MOD_RES (1), (3), (34): Xaa is C or S

SEQ ID NO: 64366 - protein, 36 aa, Artificial Sequence; identical to SEQ ID NO: 26361
  GFR-binding peptide
  MOD_RES (33), (34): Xaa is C or S
  MOD_RES (11), (12), (13), (14), (15): Xaa is A or G
  MOD_RES (16), (17), (18), (19): Xaa is A or G or is absent

SEQ ID NO: 64367 - protein, 30 aa, Artificial Sequence
  GFR-binding peptide
EVTMNRYKKLVVNKNEDFYLISIANMKEPV

SEQ ID NO: 64368 - protein, 36 aa, Artificial Sequence
  GFR-binding peptide
  MOD_RES (1), (34), (35): Xaa is C or S
  MOD_RES (12), (13), (14), (15), (16): Xaa is A or G
  MOD_RES (17), (18), (19), (20): Xaa is A or G or is absent
XEEVIMEYKFKXXXXXXXXXLYLMSIPETKVPAXXT

SEQ ID NO: 64369 - protein, 36 aa, Artificial Sequence; identical to SEQ ID NO: 12680
  GFR-binding peptide
  MOD_RES (1), (3): Xaa is C or S
  MOD_RES (15), (16), (17), (18), (19): Xaa is A or G
  MOD_RES (20), (21), (22), (23): Xaa is A or G or is absent

SEQ ID NO: 64370 - protein, 36 aa, Artificial Sequence; identical to SEQ ID NO: 5246
  GFR-binding peptide
  MOD_RES (2), (33), (34): Xaa is C or S

SEQ ID NO: 64371 - protein, 35 aa, Artificial Sequence; identical to SEQ ID NO: 31260
  GFR-binding peptide
  MOD_RES (1), (3), (35): Xaa is C or S

SEQ ID NO: 64372 - protein, 33 aa, Artificial Sequence; identical to SEQ ID NO: 12682
  GFR-binding peptide
  MOD_RES (2), (2): Xaa is C or S

SEQ ID NO: 64373 - protein, 38 aa, Artificial Sequence; identical to SEQ ID NO: 26368
  GFR-binding peptide
  MOD_RES (1), (33), (34): Xaa is C or S

SEQ ID NO: 64374 - protein, 39 aa, Artificial Sequence; identical to SEQ ID NO: 5249
  GFR-binding peptide
  MOD_RES (2), (4), (37), (38): Xaa is C or S

SEQ ID NO: 64375 - protein, 38 aa, Artificial Sequence; identical to SEQ ID NO: 5250
  GFR-binding peptide
  MOD_RES (1), (3), (35), (36): Xaa is C or S

SEQ ID NO: 64376 - protein, 35 aa, Artificial Sequence
  GFR-binding peptide
  MOD_RES (2), (33), (34): Xaa is C or S
KXSKVIMPIKGYIKPTKGIFYLINIPSLDQSVXXP

SEQ ID NO: 64377 - protein, 35 aa, Artificial Sequence; identical to SEQ ID NO: 5251
  GFR-binding peptide
  MOD_RES (1), (34), (35): Xaa is C or S
  MOD_RES (12), (13), (14), (15), (16): Xaa is A or G
  MOD_RES (17), (18), (19), (20): Xaa is A or G or is absent

SEQ ID NO: 64378 - protein, 36 aa, Artificial Sequence; identical to SEQ ID NO: 31267
  GFR-binding peptide
  MOD_RES (32), (33): Xaa is C or S

SEQ ID NO: 64379 - protein, 45 aa, Artificial Sequence; identical to SEQ ID NO: 5252
  GFR-binding peptide
  MOD_RES (2), (4), (39), (40): Xaa is C or S
  MOD_RES (17), (18), (19), (20), (21): Xaa is A or G
  MOD_RES (22), (23), (24), (25): Xaa is A or G or is absent

SEQ ID NO: 64380 - protein, 42 aa, Artificial Sequence
  GFR-binding peptide
  MOD_RES (2), (36), (37): Xaa is C or S
  MOD_RES (14), (15), (16), (17), (18): Xaa is A or G
  MOD_RES (19), (20), (21), (22): Xaa is A or G or is absent
GXESVAMGRHKRLXXXXXXXXXYYLISTASLKTPVXXAKSAK

SEQ ID NO: 64381 - protein, 36 aa, Artificial Sequence; identical to SEQ ID NO: 5254
  GFR-binding peptide
  MOD_RES (2), (4), (36): Xaa is C or S

SEQ ID NO: 64382 - protein, 40 aa, Artificial Sequence; identical to SEQ ID NO: 5256
  GFR-binding peptide
  MOD_RES (1), (3), (35), (36): Xaa is C or S

SEQ ID NO: 64383 - protein, 38 aa, Artificial Sequence; identical to SEQ ID NO: 31272
  GFR-binding peptide
  MOD_RES (1), (35), (36): Xaa is C or S
  MOD_RES (13), (14), (15), (16), (17): Xaa is A or G
  MOD_RES (18), (19), (20), (21): Xaa is A or G or is absent

SEQ ID NO: 64384 - protein, 34 aa, Artificial Sequence; identical to SEQ ID NO: 31273
  GFR-binding peptide
  MOD_RES (13), (14), (15), (16), (17): Xaa is A or G
  MOD_RES (18), (19), (20), (21): Xaa is A or G or is absent

SEQ ID NO: 64385 - protein, 34 aa, Artificial Sequence; identical to SEQ ID NO: 26379
  GFR-binding peptide
  MOD_RES (33), (34): Xaa is C or S
  MOD_RES (11), (12), (13), (14), (15): Xaa is A or G
  MOD_RES (16), (17), (18), (19): Xaa is A or G or is absent

SEQ ID NO: 64386 - protein, 41 aa, Artificial Sequence; identical to SEQ ID NO: 31277
  GFR-binding peptide
  MOD_RES (1), (3), (37), (38): Xaa is C or S
  MOD_RES (15), (16), (17), (18), (19): Xaa is A or G
  MOD_RES (20), (21), (22), (23): Xaa is A or G or is absent

SEQ ID NO: 64387 - protein, 43 aa, Artificial Sequence; identical to SEQ ID NO: 5259
  GFR-binding peptide
  MOD_RES (1), (3), (37), (38): Xaa is C or S
  MOD_RES (15), (16), (17), (18), (19): Xaa is A or G
  MOD_RES (20), (21), (22), (23): Xaa is A or G or is absent

SEQ ID NO: 64388 - protein, 42 aa, Artificial Sequence; identical to SEQ ID NO: 5260
  GFR-binding peptide
  MOD_RES (2), (4), (38), (39): Xaa is C or S
  MOD_RES (16), (17), (18), (19), (20): Xaa is A or G
  MOD_RES (21), (22), (23), (24): Xaa is A or G or is absent

SEQ ID NO: 64389 - protein, 39 aa, Artificial Sequence; identical to SEQ ID NO: 26382
  GFR-binding peptide
  MOD_RES (1), (33), (34): Xaa is C or S

SEQ ID NO: 64390 - protein, 34 aa, Artificial Sequence; identical to SEQ ID NO: 31280
  GFR-binding peptide
  MOD_RES (2), (34): Xaa is C or S

SEQ ID NO: 64391 - protein, 32 aa, Artificial Sequence; identical to SEQ ID NO: 5263
  GFR-binding peptide
  MOD_RES (11), (12), (13), (14), (15): Xaa is A or G
  MOD_RES (16), (17), (18), (19): Xaa is A or G or is absent

SEQ ID NO: 64392 - protein, 31 aa, Artificial Sequence
  GFR-binding peptide
  MOD_RES (31), (31): Xaa is C or S
SKVIMPIKGYIKPTKGIFYLINIPSLDQSVX

SEQ ID NO: 64393 - protein, 39 aa, Artificial Sequence; identical to SEQ ID NO: 5265
  GFR-binding peptide
  MOD_RES (1), (3), (36), (37): Xaa is C or S
  MOD_RES (14), (15), (16), (17), (18): Xaa is A or G
  MOD_RES (19), (20), (21), (22): Xaa is A or G or is absent

SEQ ID NO: 64394 - protein, 41 aa, Artificial Sequence; identical to SEQ ID NO: 31285
  GFR-binding peptide
  MOD_RES (1), (3), (35): Xaa is C or S

SEQ ID NO: 64395 - protein, 33 aa, Artificial Sequence
  GFR-binding peptide
  MOD_RES (2), (2): Xaa is C or S
GXSEVVMDEYKFKVVNNASDLYLISIPELRTPV

SEQ ID NO: 64396 - protein, 38 aa, Artificial Sequence; identical to SEQ ID NO: 5270
  GFR-binding peptide
  MOD_RES (32), (33): Xaa is C or S

SEQ ID NO: 64397 - protein, 37 aa, Artificial Sequence; identical to SEQ ID NO: 5272
  GFR-binding peptide
  MOD_RES (1), (35), (36): Xaa is C or S
  MOD_RES (13), (14), (15), (16), (17): Xaa is A or G
  MOD_RES (18), (19), (20), (21): Xaa is A or G or is absent

SEQ ID NO: 64398 - protein, 34 aa, Artificial Sequence
  GFR-binding peptide
  MOD_RES (1), (33), (34): Xaa is C or S
XESVAMGRHKRLYTVVGKDYYLISTASLKTPVXX

SEQ ID NO: 64399 - protein, 39 aa, Artificial Sequence; identical to SEQ ID NO: 5274
  GFR-binding peptide
  MOD_RES (2), (4), (38), (39): Xaa is C or S
  MOD_RES (16), (17), (18), (19), (20): Xaa is A or G
  MOD_RES (21), (22), (23), (24): Xaa is A or G or is absent

SEQ ID NO: 64400 - protein, 37 aa, Artificial Sequence; identical to SEQ ID NO: 26393
  GFR-binding peptide
  MOD_RES (1), (32), (33): Xaa is C or S

SEQ ID NO: 64401 - protein, 38 aa, Artificial Sequence; identical to SEQ ID NO: 5276
  GFR-binding peptide
  MOD_RES (32), (33): Xaa is C or S

SEQ ID NO: 64402 - protein, 38 aa, Artificial Sequence; identical to SEQ ID NO: 31300
  GFR-binding peptide
  MOD_RES (1), (3), (35), (36): Xaa is C or S

SEQ ID NO: 64403 - protein, 32 aa, Artificial Sequence; identical to SEQ ID NO: 31301
  GFR-binding peptide
  MOD_RES (11), (12), (13), (14), (15): Xaa is A or G
  MOD_RES (16), (17), (18), (19): Xaa is A or G or is absent

SEQ ID NO: 64404 - protein, 33 aa, Artificial Sequence
  GFR-binding peptide
  MOD_RES (12), (13), (14), (15), (16): Xaa is A or G
  MOD_RES (17), (18), (19), (20): Xaa is A or G or is absent
SEVTMNPIKGYXXXXXXXXXFYLINIPSMKEPV

SEQ ID NO: 64405 - protein, 38 aa, Artificial Sequence
  GFR-binding peptide
  MOD_RES (1), (33), (34): Xaa is C or S
XSEVVMDRHKRLVVNNASDYYLISTASLRTPVXXTPPT

SEQ ID NO: 64406 - protein, 35 aa, Artificial Sequence
  GFR-binding peptide
  MOD_RES (2), (4): Xaa is C or S
SXGXRDVVMGEYKFKIIQQKDNLYLMSIPEMKTPT

SEQ ID NO: 64407 - protein, 41 aa, Artificial Sequence; identical to SEQ ID NO: 5281
  GFR-binding peptide
  MOD_RES (2), (4), (36), (37): Xaa is C or S

SEQ ID NO: 64408 - protein, 36 aa, Artificial Sequence; identical to SEQ ID NO: 26402
  GFR-binding peptide
  MOD_RES (31), (32): Xaa is C or S

SEQ ID NO: 64409 - protein, 39 aa, Artificial Sequence; identical to SEQ ID NO: 5284
  GFR-binding peptide
  MOD_RES (2), (34), (35): Xaa is C or S

SEQ ID NO: 64410 - protein, 31 aa, Artificial Sequence; identical to SEQ ID NO: 5289
  GFR-binding peptide
  MOD_RES (31), (31): Xaa is C or S

SEQ ID NO: 64411 - protein, 34 aa, Artificial Sequence; identical to SEQ ID NO: 26410
  GFR-binding peptide
  MOD_RES (32), (33): Xaa is C or S

SEQ ID NO: 64412 - protein, 40 aa, Artificial Sequence
  GFR-binding peptide
  MOD_RES (1), (35), (36): Xaa is C or S
  MOD_RES (13), (14), (15), (16), (17): Xaa is A or G
  MOD_RES (18), (19), (20), (21): Xaa is A or G or is absent
XAEVVMDRHKRLXXXXXXXXXYYLISTASLRAPVXXSAPA

SEQ ID NO: 64413 - protein, 37 aa, Artificial Sequence; identical to SEQ ID NO: 5298
  GFR-binding peptide
  MOD_RES (32), (33): Xaa is C or S

SEQ ID NO: 64414 - protein, 35 aa, Artificial Sequence; identical to SEQ ID NO: 26421
  GFR-binding peptide
  MOD_RES (2), (2): Xaa is C or S
  MOD_RES (14), (15), (16), (17), (18): Xaa is A or G
  MOD_RES (19), (20), (21), (22): Xaa is A or G or is absent

SEQ ID NO: 64415 - protein, 40 aa, Artificial Sequence
  GFR-binding peptide
  MOD_RES (2), (36), (37): Xaa is C or S
  MOD_RES (14), (15), (16), (17), (18): Xaa is A or G
  MOD_RES (19), (20), (21), (22): Xaa is A or G or is absent
AXSEVTMNYHYKLXXXXXXXXXKYLISIPSMKEPVXXPEP

SEQ ID NO: 64416 - protein, 39 aa, Artificial Sequence; identical to SEQ ID NO: 5302
  GFR-binding peptide
  MOD_RES (2), (4), (37), (38): Xaa is C or S
  MOD_RES (15), (16), (17), (18), (19): Xaa is A or G
  MOD_RES (20), (21), (22), (23): Xaa is A or G or is absent

SEQ ID NO: 64417 - protein, 41 aa, Artificial Sequence
  GFR-binding peptide
  MOD_RES (2), (4), (36), (37): Xaa is C or S
RXGXSEVVMDRHKRLVVNNASDYYLISTASLRTPVXXTPPT

SEQ ID NO: 64418 - protein, 41 aa, Artificial Sequence; identical to SEQ ID NO: 5305
  GFR-binding peptide
  MOD_RES (2), (4), (37), (38): Xaa is C or S
  MOD_RES (15), (16), (17), (18), (19): Xaa is A or G
  MOD_RES (20), (21), (22), (23): Xaa is A or G or is absent

SEQ ID NO: 64419 - protein, 35 aa, Artificial Sequence
  GFR-binding peptide
  MOD_RES (2), (4): Xaa is C or S
SXGXRDVVMGYHYKLIIQQKDNKYLMSIPSMKTPT

SEQ ID NO: 64420 - protein, 39 aa, Artificial Sequence
  GFR-binding peptide
  MOD_RES (1), (3), (36), (37): Xaa is C or S
  MOD_RES (14), (15), (16), (17), (18): Xaa is A or G
  MOD_RES (19), (20), (21), (22): Xaa is A or G or is absent
XKXSRVIMPIKGYXXXXXXXXXFYLINIPSLAQPVXXPA

SEQ ID NO: 64421 - protein, 37 aa, Artificial Sequence; identical to SEQ ID NO: 56251
  GFR-binding peptide
  MOD_RES (1), (3), (37): Xaa is C or S
  MOD_RES (15), (16), (17), (18), (19): Xaa is A or G
  MOD_RES (20), (21), (22), (23): Xaa is A or G or is absent

SEQ ID NO: 64422 - protein, 39 aa, Artificial Sequence; identical to SEQ ID NO: 31332
  GFR-binding peptide
  MOD_RES (33), (34): Xaa is C or S
  MOD_RES (11), (12), (13), (14), (15): Xaa is A or G
  MOD_RES (16), (17), (18), (19): Xaa is A or G or is absent

SEQ ID NO: 64423 - protein, 31 aa, Artificial Sequence; identical to SEQ ID NO: 5308
  GFR-binding peptide
  MOD_RES (31), (31): Xaa is C or S

SEQ ID NO: 64424 - protein, 35 aa, Artificial Sequence; identical to SEQ ID NO: 26431
  GFR-binding peptide
  MOD_RES (1), (3), (35): Xaa is C or S

SEQ ID NO: 64425 - protein, 44 aa, Artificial Sequence; identical to SEQ ID NO: 5309
  GFR-binding peptide
  MOD_RES (2), (4), (39), (40): Xaa is C or S
  MOD_RES (17), (18), (19), (20), (21): Xaa is A or G
  MOD_RES (22), (23), (24), (25): Xaa is A or G or is absent

SEQ ID NO: 64426 - protein, 34 aa, Artificial Sequence; identical to SEQ ID NO: 26434
  GFR-binding peptide
  MOD_RES (31), (32): Xaa is C or S

SEQ ID NO: 64427 - protein, 44 aa, Artificial Sequence; identical to SEQ ID NO: 5311
  GFR-binding peptide
  MOD_RES (2), (4), (38), (39): Xaa is C or S
  MOD_RES (16), (17), (18), (19), (20): Xaa is A or G
  MOD_RES (21), (22), (23), (24): Xaa is A or G or is absent

SEQ ID NO: 64428 - protein, 39 aa, Artificial Sequence
  GFR-binding peptide
  MOD_RES (1), (3), (34), (35): Xaa is C or S
XGXEEVIMYHYKLLLVRGNDKYLMSIPSTKVPAXXTSPV

SEQ ID NO: 64429 - protein, 31 aa, Artificial Sequence
  GFR-binding peptide
  MOD_RES (31), (31): Xaa is C or S
EVVMDRHKRLVVNNAADYYLISTASLRAPVX

SEQ ID NO: 64430 - protein, 37 aa, Artificial Sequence; identical to SEQ ID NO: 31339
  GFR-binding peptide
  MOD_RES (2), (34), (35): Xaa is C or S

SEQ ID NO: 64431 - protein, 36 aa, Artificial Sequence; identical to SEQ ID NO: 26438
  GFR-binding peptide
  MOD_RES (2), (4), (35), (36): Xaa is C or S

SEQ ID NO: 64432 - protein, 39 aa, Artificial Sequence; identical to SEQ ID NO: 56260
  GFR-binding peptide
  MOD_RES (1), (3), (37), (38): Xaa is C or S
  MOD_RES (15), (16), (17), (18), (19): Xaa is A or G
  MOD_RES (20), (21), (22), (23): Xaa is A or G or is absent

SEQ ID NO: 64433 - protein, 42 aa, Artificial Sequence; identical to SEQ ID NO: 5317
  GFR-binding peptide
  MOD_RES (2), (4), (38), (39): Xaa is C or S
  MOD_RES (16), (17), (18), (19), (20): Xaa is A or G
  MOD_RES (21), (22), (23), (24): Xaa is A or G or is absent

SEQ ID NO: 64434 - protein, 42 aa, Artificial Sequence
  GFR-binding peptide
  MOD_RES (2), (4), (38), (39): Xaa is C or S
  MOD_RES (16), (17), (18), (19), (20): Xaa is A or G
  MOD_RES (21), (22), (23), (24): Xaa is A or G or is absent
RXGXSEVVMDEYKFKXXXXXXXXXLYLISIPELRTPVXXTPP

SEQ ID NO: 64435 - protein, 36 aa, Artificial Sequence; identical to SEQ ID NO: 12744
  GFR-binding peptide
  MOD_RES (33), (34): Xaa is C or S
  MOD_RES (11), (12), (13), (14), (15): Xaa is A or G
  MOD_RES (16), (17), (18), (19): Xaa is A or G or is absent

SEQ ID NO: 64436 - protein, 38 aa, Artificial Sequence
  GFR-binding peptide
  MOD_RES (1), (3), (35), (36): Xaa is C or S
XGXSEVVMDEYKFKVVNNASDLYLISIPELRTPVXXTP

SEQ ID NO: 64437 - protein, 36 aa, Artificial Sequence; identical to SEQ ID NO: 31352
  GFR-binding peptide
  MOD_RES (31), (32): Xaa is C or S

SEQ ID NO: 64438 - protein, 37 aa, Artificial Sequence; identical to SEQ ID NO: 31354
  GFR-binding peptide
  MOD_RES (33), (34): Xaa is C or S
  MOD_RES (11), (12), (13), (14), (15): Xaa is A or G
  MOD_RES (16), (17), (18), (19): Xaa is A or G or is absent

SEQ ID NO: 64439 - protein, 38 aa, Artificial Sequence; identical to SEQ ID NO: 5322
  GFR-binding peptide
  MOD_RES (33), (34): Xaa is C or S
  MOD_RES (11), (12), (13), (14), (15): Xaa is A or G
  MOD_RES (16), (17), (18), (19): Xaa is A or G or is absent

SEQ ID NO: 64440 - protein, 39 aa, Artificial Sequence; identical to SEQ ID NO: 5323
  GFR-binding peptide
  MOD_RES (2), (4), (39): Xaa is C or S
  MOD_RES (17), (18), (19), (20), (21): Xaa is A or G
  MOD_RES (22), (23), (24), (25): Xaa is A or G or is absent

SEQ ID NO: 64441 - protein, 33 aa, Artificial Sequence; identical to SEQ ID NO: 5330
  GFR-binding peptide
  MOD_RES (1), (33): Xaa is C or S

SEQ ID NO: 64442 - protein, 36 aa, Artificial Sequence
  GFR-binding peptide
  MOD_RES (1), (3), (36): Xaa is C or S
  MOD_RES (14), (15), (16), (17), (18): Xaa is A or G
  MOD_RES (19), (20), (21), (22): Xaa is A or G or is absent
XKXSKVVMPIKGYXXXXXXXXXFYLINIPSLDQPVX

SEQ ID NO: 64443 - protein, 32 aa, Artificial Sequence; identical to SEQ ID NO: 26457
  GFR-binding peptide
  MOD_RES (1), (32): Xaa is C or S

SEQ ID NO: 64444 - protein, 40 aa, Artificial Sequence; identical to SEQ ID NO: 5332
  GFR-binding peptide
  MOD_RES (1), (3), (34), (35): Xaa is C or S

SEQ ID NO: 64445 - protein, 39 aa, Artificial Sequence; identical to SEQ ID NO: 5333
  GFR-binding peptide
  MOD_RES (1), (33): Xaa is C or S

SEQ ID NO: 64446 - protein, 35 aa, Artificial Sequence
  GFR-binding peptide
  MOD_RES (1), (33), (34): Xaa is C or S
XESVAMGRHKRLYTVVGKDYYLISTASLKTPVXXA

SEQ ID NO: 64447 - protein, 39 aa, Artificial Sequence; identical to SEQ ID NO: 26459
  GFR-binding peptide
  MOD_RES (2), (37), (38): Xaa is C or S
  MOD_RES (15), (16), (17), (18), (19): Xaa is A or G
  MOD_RES (20), (21), (22), (23): Xaa is A or G or is absent

SEQ ID NO: 64448 - protein, 42 aa, Artificial Sequence
  GFR-binding peptide
  MOD_RES (1), (3), (37), (38): Xaa is C or S
  MOD_RES (15), (16), (17), (18), (19): Xaa is A or G
  MOD_RES (20), (21), (22), (23): Xaa is A or G or is absent
XGXRDVVMGRHKRLXXXXXXXXXYYLMSTASMKTPTXXPGAS

SEQ ID NO: 64449 - protein, 41 aa, Artificial Sequence; identical to SEQ ID NO: 31374
  GFR-binding peptide
  MOD_RES (1), (3), (35), (36): Xaa is C or S

SEQ ID NO: 64450 - protein, 38 aa, Artificial Sequence
  GFR-binding peptide
  MOD_RES (34), (35): Xaa is C or S
  MOD_RES (12), (13), (14), (15), (16): Xaa is A or G
  MOD_RES (17), (18), (19), (20): Xaa is A or G or is absent
ESVAMGRHKRLXXXXXXXXXYYLISTASLKTPVXXAKS

SEQ ID NO: 64451 - protein, 31 aa, Artificial Sequence; identical to SEQ ID NO: 5336
  GFR-binding peptide
  MOD_RES (31), (31): Xaa is C or S

SEQ ID NO: 64452 - protein, 37 aa, Artificial Sequence
  GFR-binding peptide
  MOD_RES (2), (4), (35), (36): Xaa is C or S
SXKXSRVIMPIKGYVKPKRGVFYLINIPSLAQPVXXP

SEQ ID NO: 64453 - protein, 42 aa, Artificial Sequence; identical to SEQ ID NO: 12770
  GFR-binding peptide
  MOD_RES (2), (4), (38), (39): Xaa is C or S
  MOD_RES (16), (17), (18), (19), (20): Xaa is A or G
  MOD_RES (21), (22), (23), (24): Xaa is A or G or is absent

SEQ ID NO: 64454 - protein, 32 aa, Artificial Sequence; identical to SEQ ID NO: 5345
  GFR-binding peptide
  MOD_RES (31), (32): Xaa is C or S

SEQ ID NO: 64455 - protein, 39 aa, Artificial Sequence; identical to SEQ ID NO: 26471
  GFR-binding peptide
  MOD_RES (1), (35), (36): Xaa is C or S
  MOD_RES (13), (14), (15), (16), (17): Xaa is A or G
  MOD_RES (18), (19), (20), (21): Xaa is A or G or is absent

SEQ ID NO: 64456 - protein, 31 aa, Artificial Sequence; identical to SEQ ID NO: 12773
  GFR-binding peptide

SEQ ID NO: 64457 - protein, 34 aa, Artificial Sequence
  GFR-binding peptide
  MOD_RES (2), (4): Xaa is C or S
LXGXEEVIMYHYKLLLVRGNDKYLMSIPSTKVPA

SEQ ID NO: 64458 - protein, 33 aa, Artificial Sequence; identical to SEQ ID NO: 5346
  GFR-binding peptide
  MOD_RES (32), (33): Xaa is C or S

SEQ ID NO: 64459 - protein, 32 aa, Artificial Sequence; identical to SEQ ID NO: 5347
  GFR-binding peptide
  MOD_RES (31), (32): Xaa is C or S

SEQ ID NO: 64460 - protein, 32 aa, Artificial Sequence; identical to SEQ ID NO: 26477
  GFR-binding peptide
  MOD_RES (31), (32): Xaa is C or S

SEQ ID NO: 64461 - protein, 39 aa, Artificial Sequence
  GFR-binding peptide
  MOD_RES (1), (3), (35), (36): Xaa is C or S
XAXSEVTMNPIKGYVVNKNEDFYLINIPSMKEPVXXPEP

SEQ ID NO: 64462 - protein, 41 aa, Artificial Sequence; identical to SEQ ID NO: 31399
  GFR-binding peptide
  MOD_RES (2), (4), (38), (39): Xaa is C or S
  MOD_RES (16), (17), (18), (19), (20): Xaa is A or G
  MOD_RES (21), (22), (23), (24): Xaa is A or G or is absent

SEQ ID NO: 64463 - protein, 41 aa, Artificial Sequence; identical to SEQ ID NO: 5356
  GFR-binding peptide
  MOD_RES (2), (4), (38), (39): Xaa is C or S
  MOD_RES (16), (17), (18), (19), (20): Xaa is A or G
  MOD_RES (21), (22), (23), (24): Xaa is A or G or is absent

SEQ ID NO: 64464 - protein, 40 aa, Artificial Sequence; identical to SEQ ID NO: 26483
  GFR-binding peptide
  MOD_RES (34), (34): Xaa is C or S
  MOD_RES (12), (13), (14), (15), (16): Xaa is A or G
  MOD_RES (17), (18), (19), (20): Xaa is A or G or is absent

SEQ ID NO: 64465 - protein, 38 aa, Artificial Sequence
  GFR-binding peptide
  MOD_RES (1), (3), (35), (36): Xaa is C or S
XAXSEVTMNRHKRLVVNKNEDYYLISTASMKEPVXXPE

SEQ ID NO: 64466 - protein, 34 aa, Artificial Sequence; identical to SEQ ID NO: 5358
  GFR-binding peptide
  MOD_RES (33), (34): Xaa is C or S
  MOD_RES (11), (12), (13), (14), (15): Xaa is A or G
  MOD_RES (16), (17), (18), (19): Xaa is A or G or is absent

SEQ ID NO: 64467 - protein, 36 aa, Artificial Sequence; identical to SEQ ID NO: 5359
  GFR-binding peptide
  MOD_RES (33), (34): Xaa is C or S
  MOD_RES (11), (12), (13), (14), (15): Xaa is A or G
  MOD_RES (16), (17), (18), (19): Xaa is A or G or is absent

SEQ ID NO: 64468 - protein, 41 aa, Artificial Sequence; identical to SEQ ID NO: 26487
  GFR-binding peptide
  MOD_RES (1), (3), (37), (38): Xaa is C or S
  MOD_RES (15), (16), (17), (18), (19): Xaa is A or G
  MOD_RES (20), (21), (22), (23): Xaa is A or G or is absent

SEQ ID NO: 64469 - protein, 41 aa, Artificial Sequence
  GFR-binding peptide
  MOD_RES (2), (36), (37): Xaa is C or S
  MOD_RES (14), (15), (16), (17), (18): Xaa is A or G
  MOD_RES (19), (20), (21), (22): Xaa is A or G or is absent
GXESVAMGRHKRLXXXXXXXXXYYLISTASLKTPVXXAKSA

SEQ ID NO: 64470 - protein, 37 aa, Artificial Sequence
  GFR-binding peptide
  MOD_RES (31), (32): Xaa is C or S
EEVIMYHYKLLLVRGNDKYLMSIPSTKVPAXXTSPVR

SEQ ID NO: 64471 - protein, 38 aa, Artificial Sequence; identical to SEQ ID NO: 26491
  GFR-binding peptide
  MOD_RES (1), (3), (34), (35): Xaa is C or S

SEQ ID NO: 64472 - protein, 37 aa, Artificial Sequence; identical to SEQ ID NO: 5363
  GFR-binding peptide
  MOD_RES (1), (3), (35), (36): Xaa is C or S

SEQ ID NO: 64473 - protein, 35 aa, Artificial Sequence; identical to SEQ ID NO: 5364
  GFR-binding peptide
  MOD_RES (2), (35): Xaa is C or S

SEQ ID NO: 64474 - protein, 37 aa, Artificial Sequence; identical to SEQ ID NO: 31414
  GFR-binding peptide
  MOD_RES (2), (36), (37): Xaa is C or S
  MOD_RES (14), (15), (16), (17), (18): Xaa is A or G
  MOD_RES (19), (20), (21), (22): Xaa is A or G or is absent

SEQ ID NO: 64475 - protein, 33 aa, Artificial Sequence
  GFR-binding peptide
  MOD_RES (1), (33): Xaa is C or S
XRDVVMGEYKFKIIQQKDNLYLMSIPEMKTPTX

SEQ ID NO: 64476 - protein, 33 aa, Artificial Sequence; identical to SEQ ID NO: 31416
  GFR-binding peptide
  MOD_RES (2), (2): Xaa is C or S

SEQ ID NO: 64477 - protein, 37 aa, Artificial Sequence; identical to SEQ ID NO: 5366
  GFR-binding peptide
  MOD_RES (1), (35): Xaa is C or S
  MOD_RES (13), (14), (15), (16), (17): Xaa is A or G
  MOD_RES (18), (19), (20), (21): Xaa is A or G or is absent

SEQ ID NO: 64478 - protein, 37 aa, Artificial Sequence; identical to SEQ ID NO: 26499
  GFR-binding peptide
  MOD_RES (2), (36), (37): Xaa is C or S
  MOD_RES (14), (15), (16), (17), (18): Xaa is A or G
  MOD_RES (19), (20), (21), (22): Xaa is A or G or is absent

SEQ ID NO: 64479 - protein, 40 aa, Artificial Sequence; identical to SEQ ID NO: 5371
  GFR-binding peptide
  MOD_RES (34), (35): Xaa is C or S
  MOD_RES (12), (13), (14), (15), (16): Xaa is A or G
  MOD_RES (17), (18), (19), (20): Xaa is A or G or is absent

SEQ ID NO: 64480 - protein, 37 aa, Artificial Sequence; identical to SEQ ID NO: 5372
  GFR-binding peptide
  MOD_RES (34), (35): Xaa is C or S
  MOD_RES (12), (13), (14), (15), (16): Xaa is A or G
  MOD_RES (17), (18), (19), (20): Xaa is A or G or is absent

SEQ ID NO: 64481 - protein, 32 aa, Artificial Sequence
  GFR-binding peptide
  MOD_RES (1), (1): Xaa is C or S
XSEVTMNYHYKLVVNKNEDKYLISIPSMKEPV

SEQ ID NO: 64482 - protein, 33 aa, Artificial Sequence; identical to SEQ ID NO: 26504
  GFR-binding peptide
  MOD_RES (1), (33): Xaa is C or S

SEQ ID NO: 64483 - protein, 42 aa, Artificial Sequence; identical to SEQ ID NO: 26505
  GFR-binding peptide
  MOD_RES (2), (36), (37): Xaa is C or S
  MOD_RES (14), (15), (16), (17), (18): Xaa is A or G
  MOD_RES (19), (20), (21), (22): Xaa is A or G or is absent

SEQ ID NO: 64484 - protein, 35 aa, Artificial Sequence
  GFR-binding peptide
  MOD_RES (31), (32): Xaa is C or S
EVVMDEYKFKVVNNASDLYLISIPELRTPVXXTPP

SEQ ID NO: 64485 - protein, 37 aa, Artificial Sequence
  GFR-binding peptide
  MOD_RES (33), (34): Xaa is C or S
  MOD_RES (11), (12), (13), (14), (15): Xaa is A or G
  MOD_RES (16), (17), (18), (19): Xaa is A or G or is absent
EVVMDRHKRLXXXXXXXXXYYLISTASLRTPVXXTPP

SEQ ID NO: 64486 - protein, 36 aa, Artificial Sequence; identical to SEQ ID NO: 5375
  GFR-binding peptide
  MOD_RES (1), (3): Xaa is C or S
  MOD_RES (15), (16), (17), (18), (19): Xaa is A or G
  MOD_RES (20), (21), (22), (23): Xaa is A or G or is absent

SEQ ID NO: 64487 - protein, 36 aa, Artificial Sequence; identical to SEQ ID NO: 5376
  GFR-binding peptide
  MOD_RES (1), (3), (36): Xaa is C or S
  MOD_RES (14), (15), (16), (17), (18): Xaa is A or G
  MOD_RES (19), (20), (21), (22): Xaa is A or G or is absent

SEQ ID NO: 64488 - protein, 36 aa, Artificial Sequence; identical to SEQ ID NO: 5378
  GFR-binding peptide
  MOD_RES (2), (4): Xaa is C or S
  MOD_RES (15), (16), (17), (18), (19): Xaa is A or G
  MOD_RES (20), (21), (22), (23): Xaa is A or G or is absent

SEQ ID NO: 64489 - protein, 43 aa, Artificial Sequence
  GFR-binding peptide
  MOD_RES (2), (4), (38), (39): Xaa is C or S
  MOD_RES (16), (17), (18), (19), (20): Xaa is A or G
  MOD_RES (21), (22), (23), (24): Xaa is A or G or is absent
RXGXESVAMGRHKRLXXXXXXXXXYYLISTASLKTPVXXAKSA

SEQ ID NO: 64490 - protein, 36 aa, Artificial Sequence
  GFR-binding peptide
  MOD_RES (1), (3): Xaa is C or S
  MOD_RES (15), (16), (17), (18), (19): Xaa is A or G
  MOD_RES (20), (21), (22), (23): Xaa is A or G or is absent
XGXESVAMGRHKRLXXXXXXXXXYYLISTASLKTPV

SEQ ID NO: 64491 - protein, 39 aa, Artificial Sequence; identical to SEQ ID NO: 5379
  GFR-binding peptide
  MOD_RES (1), (3), (36), (37): Xaa is C or S
  MOD_RES (14), (15), (16), (17), (18): Xaa is A or G
  MOD_RES (19), (20), (21), (22): Xaa is A or G or is absent

SEQ ID NO: 64492 - protein, 32 aa, Artificial Sequence; identical to SEQ ID NO: 5380
  GFR-binding peptide

SEQ ID NO: 64493 - protein, 41 aa, Artificial Sequence
  GFR-binding peptide
  MOD_RES (2), (4), (36), (37): Xaa is C or S
RXAXSEVTMNRHKRLVVNKNEDYYLISTASMKEPVXXPEPI

SEQ ID NO: 64494 - protein, 39 aa, Artificial Sequence
  GFR-binding peptide
  MOD_RES (1), (35), (36): Xaa is C or S
  MOD_RES (13), (14), (15), (16), (17): Xaa is A or G
  MOD_RES (18), (19), (20), (21): Xaa is A or G or is absent
XRDVVMGEYKFKXXXXXXXXXLYLMSIPEMKTPTXXPGA

SEQ ID NO: 64495 - protein, 38 aa, Artificial Sequence
  GFR-binding peptide
  MOD_RES (32), (33): Xaa is C or S
AEVVMDRHKRLVVNNAADYYLISTASLRAPVXXSAPAA

SEQ ID NO: 64496 - protein, 34 aa, Artificial Sequence; identical to SEQ ID NO: 26518
  GFR-binding peptide
  MOD_RES (1), (1): Xaa is C or S
  MOD_RES (13), (14), (15), (16), (17): Xaa is A or G
  MOD_RES (18), (19), (20), (21): Xaa is A or G or is absent

SEQ ID NO: 64497 - protein, 43 aa, Artificial Sequence; identical to SEQ ID NO: 5393
  GFR-binding peptide
  MOD_RES (2), (4), (38), (39): Xaa is C or S
  MOD_RES (16), (17), (18), (19), (20): Xaa is A or G
  MOD_RES (21), (22), (23), (24): Xaa is A or G or is absent

SEQ ID NO: 64498 - protein, 42 aa, Artificial Sequence; identical to SEQ ID NO: 5396
  GFR-binding peptide
  MOD_RES (2), (36), (37): Xaa is C or S
  MOD_RES (14), (15), (16), (17), (18): Xaa is A or G
  MOD_RES (19), (20), (21), (22): Xaa is A or G or is absent

SEQ ID NO: 64499 - protein, 43 aa, Artificial Sequence; identical to SEQ ID NO: 5397
  GFR-binding peptide
  MOD_RES (1), (3), (37): Xaa is C or S
  MOD_RES (15), (16), (17), (18), (19): Xaa is A or G
  MOD_RES (20), (21), (22), (23): Xaa is A or G or is absent

SEQ ID NO: 64500 - protein, 36 aa, Artificial Sequence; identical to SEQ ID NO: 5398
  GFR-binding peptide
  MOD_RES (31), (32): Xaa is C or S

SEQ ID NO: 64501 - protein, 37 aa, Artificial Sequence
  GFR-binding peptide
  MOD_RES (1), (35), (36): Xaa is C or S
  MOD_RES (13), (14), (15), (16), (17): Xaa is A or G
  MOD_RES (18), (19), (20), (21): Xaa is A or G or is absent
XSEVVMDRHKRLXXXXXXXXXYYLISTASLRTPVXXT

SEQ ID NO: 64502 - protein, 36 aa, Artificial Sequence
  GFR-binding peptide
  MOD_RES (1), (3), (36): Xaa is C or S
  MOD_RES (14), (15), (16), (17), (18): Xaa is A or G
  MOD_RES (19), (20), (21), (22): Xaa is A or G or is absent
XGXEEVIMRHKRLXXXXXXXXXYYLMSTASTKVPAX

SEQ ID NO: 64503 - protein, 35 aa, Artificial Sequence; identical to SEQ ID NO: 56362
  GFR-binding peptide
  MOD_RES (2), (4): Xaa is C or S

SEQ ID NO: 64504 - protein, 44 aa, Artificial Sequence; identical to SEQ ID NO: 31445
  GFR-binding peptide
  MOD_RES (1), (3), (38), (39): Xaa is C or S
  MOD_RES (16), (17), (18), (19), (20): Xaa is A or G
  MOD_RES (21), (22), (23), (24): Xaa is A or G or is absent

SEQ ID NO: 64505 - protein, 40 aa, Artificial Sequence; identical to SEQ ID NO: 26527
  GFR-binding peptide
  MOD_RES (1), (3), (37), (38): Xaa is C or S
  MOD_RES (15), (16), (17), (18), (19): Xaa is A or G
  MOD_RES (20), (21), (22), (23): Xaa is A or G or is absent

SEQ ID NO: 64506 - protein, 43 aa, Artificial Sequence; identical to SEQ ID NO: 5405
  GFR-binding peptide
  MOD_RES (2), (4), (38), (39): Xaa is C or S
  MOD_RES (16), (17), (18), (19), (20): Xaa is A or G
  MOD_RES (21), (22), (23), (24): Xaa is A or G or is absent

SEQ ID NO: 64507 - protein, 38 aa, Artificial Sequence
  GFR-binding peptide
  MOD_RES (34), (35): Xaa is C or S
  MOD_RES (12), (13), (14), (15), (16): Xaa is A or G
  MOD_RES (17), (18), (19), (20): Xaa is A or G or is absent
SEVVMDYHYKLXXXXXXXXXKYLISIPSLRTPVXXTPP

SEQ ID NO: 64508 - protein, 32 aa, Artificial Sequence; identical to SEQ ID NO: 31456
  GFR-binding peptide
  MOD_RES (32), (32): Xaa is C or S

SEQ ID NO: 64509 - protein, 41 aa, Artificial Sequence; identical to SEQ ID NO: 5406
  GFR-binding peptide
  MOD_RES (2), (4), (38), (39): Xaa is C or S
  MOD_RES (16), (17), (18), (19), (20): Xaa is A or G
  MOD_RES (21), (22), (23), (24): Xaa is A or G or is absent

SEQ ID NO: 64510 - protein, 39 aa, Artificial Sequence; identical to SEQ ID NO: 5407
  GFR-binding peptide
  MOD_RES (2), (4), (38), (39): Xaa is C or S
  MOD_RES (16), (17), (18), (19), (20): Xaa is A or G
  MOD_RES (21), (22), (23), (24): Xaa is A or G or is absent

SEQ ID NO: 64511 - protein, 30 aa, Artificial Sequence; identical to SEQ ID NO: 56384
  GFR-binding peptide

SEQ ID NO: 64512 - protein, 41 aa, Artificial Sequence; identical to SEQ ID NO: 5408
  GFR-binding peptide
  MOD_RES (2), (36), (37): Xaa is C or S
  MOD_RES (14), (15), (16), (17), (18): Xaa is A or G
  MOD_RES (19), (20), (21), (22): Xaa is A or G or is absent

SEQ ID NO: 64513 - protein, 35 aa, Artificial Sequence; identical to SEQ ID NO: 5409
  GFR-binding peptide
  MOD_RES (32), (33): Xaa is C or S

SEQ ID NO: 64514 - protein, 39 aa, Artificial Sequence
  GFR-binding peptide
  MOD_RES (1), (3), (36), (37): Xaa is C or S
  MOD_RES (14), (15), (16), (17), (18): Xaa is A or G
  MOD_RES (19), (20), (21), (22): Xaa is A or G or is absent
XKXSKVVMPIKGYXXXXXXXXXFYLINIPSLDQPVXXPS

SEQ ID NO: 64515 - protein, 35 aa, Artificial Sequence; identical to SEQ ID NO: 5413
  GFR-binding peptide
  MOD_RES (1), (35): Xaa is C or S
  MOD_RES (13), (14), (15), (16), (17): Xaa is A or G
  MOD_RES (18), (19), (20), (21): Xaa is A or G or is absent

SEQ ID NO: 64516 - protein, 39 aa, Artificial Sequence
  GFR-binding peptide
  MOD_RES (2), (35), (36): Xaa is C or S
  MOD_RES (13), (14), (15), (16), (17): Xaa is A or G
  MOD_RES (18), (19), (20), (21): Xaa is A or G or is absent
KXSKVIMPIKGYXXXXXXXXXFYLINIPSLDQSVXXPSA

SEQ ID NO: 64517 - protein, 36 aa, Artificial Sequence
  GFR-binding peptide
  MOD_RES (1), (34), (35): Xaa is C or S
  MOD_RES (12), (13), (14), (15), (16): Xaa is A or G
  MOD_RES (17), (18), (19), (20): Xaa is A or G or is absent
XSKVVMPIKGYXXXXXXXXXFYLINIPSLDQPVXXP

SEQ ID NO: 64518 - protein, 40 aa, Artificial Sequence; identical to SEQ ID NO: 56390
  GFR-binding peptide
  MOD_RES (2), (35), (36): Xaa is C or S
  MOD_RES (13), (14), (15), (16), (17): Xaa is A or G
  MOD_RES (18), (19), (20), (21): Xaa is A or G or is absent

SEQ ID NO: 64519 - protein, 37 aa, Artificial Sequence; identical to SEQ ID NO: 31468
  GFR-binding peptide
  MOD_RES (2), (36), (37): Xaa is C or S
  MOD_RES (14), (15), (16), (17), (18): Xaa is A or G
  MOD_RES (19), (20), (21), (22): Xaa is A or G or is absent

SEQ ID NO: 64520 - protein, 36 aa, Artificial Sequence; identical to SEQ ID NO: 31469
  GFR-binding peptide
  MOD_RES (32), (33): Xaa is C or S

SEQ ID NO: 64521 - protein, 39 aa, Artificial Sequence; identical to SEQ ID NO: 5415
  GFR-binding peptide
  MOD_RES (2), (4), (35), (36): Xaa is C or S

SEQ ID NO: 64522 - protein, 39 aa, Artificial Sequence
  GFR-binding peptide
  MOD_RES (1), (33), (34): Xaa is C or S
XESVAMGRHKRLYTVVGKDYYLISTASLKTPVXXAKSAK

SEQ ID NO: 64523 - protein, 35 aa, Artificial Sequence; identical to SEQ ID NO: 26548
  GFR-binding peptide
  MOD_RES (34), (35): Xaa is C or S
  MOD_RES (12), (13), (14), (15), (16): Xaa is A or G
  MOD_RES (17), (18), (19), (20): Xaa is A or G or is absent

SEQ ID NO: 64524 - protein, 31 aa, Artificial Sequence; identical to SEQ ID NO: 5422
  GFR-binding peptide
  MOD_RES (31), (31): Xaa is C or S

SEQ ID NO: 64525 - protein, 34 aa, Artificial Sequence; identical to SEQ ID NO: 5426
  GFR-binding peptide
  MOD_RES (2), (4): Xaa is C or S

SEQ ID NO: 64526 - protein, 35 aa, Artificial Sequence; identical to SEQ ID NO: 31475
  GFR-binding peptide
  MOD_RES (33), (34): Xaa is C or S
  MOD_RES (11), (12), (13), (14), (15): Xaa is A or G
  MOD_RES (16), (17), (18), (19): Xaa is A or G or is absent

SEQ ID NO: 64527 - protein, 40 aa, Artificial Sequence
  GFR-binding peptide
  MOD_RES (2), (4), (38), (39): Xaa is C or S
  MOD_RES (16), (17), (18), (19), (20): Xaa is A or G
  MOD_RES (21), (22), (23), (24): Xaa is A or G or is absent
RXAXSEVTMNPIKGYXXXXXXXXXFYLINIPSMKEPVXXP

SEQ ID NO: 64528 - protein, 39 aa, Artificial Sequence; identical to SEQ ID NO: 5430
  GFR-binding peptide
  MOD_RES (1), (3), (35), (36): Xaa is C or S

SEQ ID NO: 64529 - protein, 42 aa, Artificial Sequence; identical to SEQ ID NO: 31476
  GFR-binding peptide
  MOD_RES (2), (4), (36), (37): Xaa is C or S

SEQ ID NO: 64530 - protein, 36 aa, Artificial Sequence; identical to SEQ ID NO: 5432
  GFR-binding peptide
  MOD_RES (2), (2): Xaa is C or S
  MOD_RES (15), (16), (17), (18), (19): Xaa is A or G
  MOD_RES (20), (21), (22), (23): Xaa is A or G or is absent

SEQ ID NO: 64531 - protein, 33 aa, Artificial Sequence; identical to SEQ ID NO: 5433
  GFR-binding peptide
  MOD_RES (33), (33): Xaa is C or S
  MOD_RES (11), (12), (13), (14), (15): Xaa is A or G
  MOD_RES (16), (17), (18), (19): Xaa is A or G or is absent

SEQ ID NO: 64532 - protein, 39 aa, Artificial Sequence
  GFR-binding peptide
  MOD_RES (2), (4), (35), (36): Xaa is C or S
LXGXEEVIMEYKFKLLVRGNDLYLMSIPETKVPAXXTSP

SEQ ID NO: 64533 - protein, 35 aa, Artificial Sequence; identical to SEQ ID NO: 56412
  GFR-binding peptide
  MOD_RES (33), (34): Xaa is C or S
  MOD_RES (11), (12), (13), (14), (15): Xaa is A or G
  MOD_RES (16), (17), (18), (19): Xaa is A or G or is absent

SEQ ID NO: 64534 - protein, 33 aa, Artificial Sequence; identical to SEQ ID NO: 5437
  GFR-binding peptide
  MOD_RES (33), (33): Xaa is C or S
  MOD_RES (11), (12), (13), (14), (15): Xaa is A or G
  MOD_RES (16), (17), (18), (19): Xaa is A or G or is absent

SEQ ID NO: 64535 - protein, 40 aa, Artificial Sequence
  GFR-binding peptide
  MOD_RES (2), (4), (36), (37): Xaa is C or S
RXGXSEVVMDEYKFKVVNNASDLYLISIPELRTPVXXTPP

SEQ ID NO: 64536 - protein, 32 aa, Artificial Sequence
  GFR-binding peptide
  MOD_RES (1), (1): Xaa is C or S
XSEVTMNRYKKLVVNKNEDFYLISIANMKEPV

SEQ ID NO: 64537 - protein, 41 aa, Artificial Sequence; identical to SEQ ID NO: 26560
  GFR-binding peptide
  MOD_RES (1), (3), (37), (38): Xaa is C or S
  MOD_RES (15), (16), (17), (18), (19): Xaa is A or G
  MOD_RES (20), (21), (22), (23): Xaa is A or G or is absent

SEQ ID NO: 64538 - protein, 33 aa, Artificial Sequence; identical to SEQ ID NO: 12868
  GFR-binding peptide
  MOD_RES (12), (13), (14), (15), (16): Xaa is A or G
  MOD_RES (17), (18), (19), (20): Xaa is A or G or is absent

SEQ ID NO: 64539 - protein, 39 aa, Artificial Sequence; identical to SEQ ID NO: 26565
  GFR-binding peptide
  MOD_RES (33), (34): Xaa is C or S
  MOD_RES (11), (12), (13), (14), (15): Xaa is A or G
  MOD_RES (16), (17), (18), (19): Xaa is A or G or is absent

SEQ ID NO: 64540 - protein, 33 aa, Artificial Sequence; identical to SEQ ID NO: 5451
  GFR-binding peptide
  MOD_RES (12), (13), (14), (15), (16): Xaa is A or G
  MOD_RES (17), (18), (19), (20): Xaa is A or G or is absent

SEQ ID NO: 64541 - protein, 34 aa, Artificial Sequence
  GFR-binding peptide
  MOD_RES (1), (3), (34): Xaa is C or S
XKXSKVVMPIKGYVKPTRGVFYLINIPSLDQPVX

SEQ ID NO: 64542 - protein, 31 aa, Artificial Sequence; identical to SEQ ID NO: 5457
  GFR-binding peptide
  MOD_RES (1), (1): Xaa is C or S

SEQ ID NO: 64543 - protein, 35 aa, Artificial Sequence; identical to SEQ ID NO: 31503
  GFR-binding peptide
  MOD_RES (32), (33): Xaa is C or S

SEQ ID NO: 64544 - protein, 37 aa, Artificial Sequence; identical to SEQ ID NO: 26570
  GFR-binding peptide
  MOD_RES (2), (4), (36): Xaa is C or S

SEQ ID NO: 64545 - protein, 39 aa, Artificial Sequence
  GFR-binding peptide
  MOD_RES (2), (33), (34): Xaa is C or S
KXSKVIMPIKGYIKPTKGIFYLINIPSLDQSVXXPSASA

SEQ ID NO: 64546 - protein, 42 aa, Artificial Sequence; identical to SEQ ID NO: 31505
  GFR-binding peptide
  MOD_RES (1), (3), (37), (38): Xaa is C or S
  MOD_RES (15), (16), (17), (18), (19): Xaa is A or G
  MOD_RES (20), (21), (22), (23): Xaa is A or G or is absent

SEQ ID NO: 64547 - protein, 36 aa, Artificial Sequence; identical to SEQ ID NO: 26571
  GFR-binding peptide
  MOD_RES (2), (36): Xaa is C or S
  MOD_RES (14), (15), (16), (17), (18): Xaa is A or G
  MOD_RES (19), (20), (21), (22): Xaa is A or G or is absent

SEQ ID NO: 64548 - protein, 43 aa, Artificial Sequence; identical to SEQ ID NO: 31508
  GFR-binding peptide
  MOD_RES (2), (4), (38), (39): Xaa is C or S
  MOD_RES (16), (17), (18), (19), (20): Xaa is A or G
  MOD_RES (21), (22), (23), (24): Xaa is A or G or is absent

SEQ ID NO: 64549 - protein, 35 aa, Artificial Sequence; identical to SEQ ID NO: 26574
  GFR-binding peptide
  MOD_RES (32), (33): Xaa is C or S

SEQ ID NO: 64550 - protein, 38 aa, Artificial Sequence; identical to SEQ ID NO: 56437
  GFR-binding peptide
  MOD_RES (2), (4), (35), (36): Xaa is C or S

SEQ ID NO: 64551 - protein, 33 aa, Artificial Sequence; identical to SEQ ID NO: 31512
  GFR-binding peptide
  MOD_RES (33), (33): Xaa is C or S
  MOD_RES (11), (12), (13), (14), (15): Xaa is A or G
  MOD_RES (16), (17), (18), (19): Xaa is A or G or is absent

SEQ ID NO: 64552 - protein, 35 aa, Artificial Sequence; identical to SEQ ID NO: 26575
  GFR-binding peptide
  MOD_RES (31), (32): Xaa is C or S

SEQ ID NO: 64553 - protein, 41 aa, Artificial Sequence; identical to SEQ ID NO: 31514
  GFR-binding peptide
  MOD_RES (2), (36): Xaa is C or S
  MOD_RES (14), (15), (16), (17), (18): Xaa is A or G
  MOD_RES (19), (20), (21), (22): Xaa is A or G or is absent

SEQ ID NO: 64554 - protein, 34 aa, Artificial Sequence; identical to SEQ ID NO: 26578
  GFR-binding peptide
  MOD_RES (1), (33), (34): Xaa is C or S

SEQ ID NO: 64555 - protein, 38 aa, Artificial Sequence; identical to SEQ ID NO: 5465
  GFR-binding peptide
  MOD_RES (1), (3), (38): Xaa is C or S
  MOD_RES (16), (17), (18), (19), (20): Xaa is A or G
  MOD_RES (21), (22), (23), (24): Xaa is A or G or is absent

SEQ ID NO: 64556 - protein, 40 aa, Artificial Sequence; identical to SEQ ID NO: 31516
  GFR-binding peptide
  MOD_RES (1), (3), (37), (38): Xaa is C or S
  MOD_RES (15), (16), (17), (18), (19): Xaa is A or G
  MOD_RES (20), (21), (22), (23): Xaa is A or G or is absent

SEQ ID NO: 64557 - protein, 37 aa, Artificial Sequence; identical to SEQ ID NO: 5469
  GFR-binding peptide
  MOD_RES (31), (32): Xaa is C or S

SEQ ID NO: 64558 - protein, 37 aa, Artificial Sequence
  GFR-binding peptide
  MOD_RES (2), (4), (36), (37): Xaa is C or S
RXGXSEVVMDRHKRLVVNNASDYYLISTASLRTPVXX

SEQ ID NO: 64559 - protein, 36 aa, Artificial Sequence; identical to SEQ ID NO: 26582
  GFR-binding peptide
  MOD_RES (1), (35), (36): Xaa is C or S
  MOD_RES (13), (14), (15), (16), (17): Xaa is A or G
  MOD_RES (18), (19), (20), (21): Xaa is A or G or is absent

SEQ ID NO: 64560 - protein, 42 aa, Artificial Sequence
  GFR-binding peptide
  MOD_RES (2), (4), (38), (39): Xaa is C or S
  MOD_RES (16), (17), (18), (19), (20): Xaa is A or G
  MOD_RES (21), (22), (23), (24): Xaa is A or G or is absent
SXGXRDVVMGRHKRLXXXXXXXXXYYLMSTASMKTPTXXPGA

SEQ ID NO: 64561 - protein, 40 aa, Artificial Sequence; identical to SEQ ID NO: 12885
  GFR-binding peptide
  MOD_RES (34), (35): Xaa is C or S
  MOD_RES (12), (13), (14), (15), (16): Xaa is A or G
  MOD_RES (17), (18), (19), (20): Xaa is A or G or is absent

SEQ ID NO: 64562 - protein, 37 aa, Artificial Sequence; identical to SEQ ID NO: 26583
  GFR-binding peptide
  MOD_RES (32), (32): Xaa is C or S

SEQ ID NO: 64563 - protein, 33 aa, Artificial Sequence; identical to SEQ ID NO: 31518
  GFR-binding peptide
  MOD_RES (31), (32): Xaa is C or S

SEQ ID NO: 64564 - protein, 39 aa, Artificial Sequence; identical to SEQ ID NO: 5471
  GFR-binding peptide
  MOD_RES (1), (36), (37): Xaa is C or S
  MOD_RES (14), (15), (16), (17), (18): Xaa is A or G
  MOD_RES (19), (20), (21), (22): Xaa is A or G or is absent

SEQ ID NO: 64565 - protein, 38 aa, Artificial Sequence
  GFR-binding peptide
  MOD_RES (2), (4), (36), (37): Xaa is C or S
RXAXSEVTMNYHYKLVVNKNEDKYLISIPSMKEPVXXP

SEQ ID NO: 64566 - protein, 38 aa, Artificial Sequence; identical to SEQ ID NO: 31521
  GFR-binding peptide
  MOD_RES (1), (35): Xaa is C or S
  MOD_RES (13), (14), (15), (16), (17): Xaa is A or G
  MOD_RES (18), (19), (20), (21): Xaa is A or G or is absent

SEQ ID NO: 64567 - protein, 35 aa, Artificial Sequence; identical to SEQ ID NO: 26587
  GFR-binding peptide
  MOD_RES (32), (33): Xaa is C or S

SEQ ID NO: 64568 - protein, 38 aa, Artificial Sequence; identical to SEQ ID NO: 31522
  GFR-binding peptide
  MOD_RES (2), (4), (36): Xaa is C or S

SEQ ID NO: 64569 - protein, 32 aa, Artificial Sequence; identical to SEQ ID NO: 5476
  GFR-binding peptide
  MOD_RES (31), (32): Xaa is C or S

SEQ ID NO: 64570 - protein, 42 aa, Artificial Sequence; identical to SEQ ID NO: 31523
  GFR-binding peptide
  MOD_RES (2), (36), (37): Xaa is C or S
  MOD_RES (14), (15), (16), (17), (18): Xaa is A or G
  MOD_RES (19), (20), (21), (22): Xaa is A or G or is absent

SEQ ID NO: 64571 - protein, 39 aa, Artificial Sequence
  GFR-binding peptide
  MOD_RES (1), (3), (37), (38): Xaa is C or S
  MOD_RES (15), (16), (17), (18), (19): Xaa is A or G
  MOD_RES (20), (21), (22), (23): Xaa is A or G or is absent
XAXSEVTMNRYKKLXXXXXXXXXFYLISIANMKEPVXXP

SEQ ID NO: 64572 - protein, 39 aa, Artificial Sequence; identical to SEQ ID NO: 5484
  GFR-binding peptide
  MOD_RES (2), (35), (36): Xaa is C or S
  MOD_RES (13), (14), (15), (16), (17): Xaa is A or G
  MOD_RES (18), (19), (20), (21): Xaa is A or G or is absent

SEQ ID NO: 64573 - protein, 38 aa, Artificial Sequence; identical to SEQ ID NO: 5488
  GFR-binding peptide
  MOD_RES (2), (34), (35): Xaa is C or S

SEQ ID NO: 64574 - protein, 36 aa, Artificial Sequence; identical to SEQ ID NO: 5489
  GFR-binding peptide
  MOD_RES (31), (32): Xaa is C or S

SEQ ID NO: 64575 - protein, 33 aa, Artificial Sequence
  GFR-binding peptide
  MOD_RES (2), (2): Xaa is C or S
AXSEVTMNPIKGYVVNKNEDFYLINIPSMKEPV

SEQ ID NO: 64576 - protein, 36 aa, Artificial Sequence; identical to SEQ ID NO: 5490
  GFR-binding peptide
  MOD_RES (32), (33): Xaa is C or S

SEQ ID NO: 64577 - protein, 37 aa, Artificial Sequence
  GFR-binding peptide
  MOD_RES (1), (32), (33): Xaa is C or S
XEEVIMEYKFKLLVRGNDLYLMSIPETKVPAXXTSPV

SEQ ID NO: 64578 - protein, 40 aa, Artificial Sequence
  GFR-binding peptide
  MOD_RES (1), (3), (36), (37): Xaa is C or S
  MOD_RES (14), (15), (16), (17), (18): Xaa is A or G
  MOD_RES (19), (20), (21), (22): Xaa is A or G or is absent
XKXSKVVMPIKGYXXXXXXXXXFYLINIPSLDQPVXXPSA

SEQ ID NO: 64579 - protein, 34 aa, Artificial Sequence; identical to SEQ ID NO: 5496
  GFR-binding peptide
  MOD_RES (31), (32): Xaa is C or S

SEQ ID NO: 64580 - protein, 39 aa, Artificial Sequence; identical to SEQ ID NO: 5501
  GFR-binding peptide
  MOD_RES (1), (35), (36): Xaa is C or S
  MOD_RES (13), (14), (15), (16), (17): Xaa is A or G
  MOD_RES (18), (19), (20), (21): Xaa is A or G or is absent

SEQ ID NO: 64581 - protein, 34 aa, Artificial Sequence; identical to SEQ ID NO: 26605
  GFR-binding peptide
  MOD_RES (2), (34): Xaa is C or S

SEQ ID NO: 64582 - protein, 33 aa, Artificial Sequence; identical to SEQ ID NO: 31551
  GFR-binding peptide
  MOD_RES (1), (33): Xaa is C or S

SEQ ID NO: 64583 - protein, 40 aa, Artificial Sequence; identical to SEQ ID NO: 5502
  GFR-binding peptide
  MOD_RES (1), (3), (38), (39): Xaa is C or S
  MOD_RES (16), (17), (18), (19), (20): Xaa is A or G
  MOD_RES (21), (22), (23), (24): Xaa is A or G or is absent

SEQ ID NO: 64584 - protein, 35 aa, Artificial Sequence; identical to SEQ ID NO: 31553
  GFR-binding peptide
  MOD_RES (1), (33), (34): Xaa is C or S

SEQ ID NO: 64585 - protein, 35 aa, Artificial Sequence; identical to SEQ ID NO: 5503
  GFR-binding peptide
  MOD_RES (2), (2): Xaa is C or S
  MOD_RES (14), (15), (16), (17), (18): Xaa is A or G
  MOD_RES (19), (20), (21), (22): Xaa is A or G or is absent

SEQ ID NO: 64586 - protein, 34 aa, Artificial Sequence; identical to SEQ ID NO: 26609
  GFR-binding peptide
  MOD_RES (1), (32), (33): Xaa is C or S

SEQ ID NO: 64587 - protein, 36 aa, Artificial Sequence
  GFR-binding peptide
  MOD_RES (1), (3), (36): Xaa is C or S
  MOD_RES (14), (15), (16), (17), (18): Xaa is A or G
  MOD_RES (19), (20), (21), (22): Xaa is A or G or is absent
XGXEEVIMEYKFKXXXXXXXXXLYLMSIPETKVPAX

SEQ ID NO: 64588 - protein, 38 aa, Artificial Sequence; identical to SEQ ID NO: 26610
  GFR-binding peptide
  MOD_RES (2), (4), (37), (38): Xaa is C or S
  MOD_RES (15), (16), (17), (18), (19): Xaa is A or G
  MOD_RES (20), (21), (22), (23): Xaa is A or G or is absent

SEQ ID NO: 64589 - protein, 43 aa, Artificial Sequence; identical to SEQ ID NO: 5506
  GFR-binding peptide
  MOD_RES (1), (3), (38), (39): Xaa is C or S
  MOD_RES (16), (17), (18), (19), (20): Xaa is A or G
  MOD_RES (21), (22), (23), (24): Xaa is A or G or is absent

SEQ ID NO: 64590 - protein, 40 aa, Artificial Sequence; identical to SEQ ID NO: 5507
  GFR-binding peptide
  MOD_RES (1), (3), (36), (37): Xaa is C or S
  MOD_RES (14), (15), (16), (17), (18): Xaa is A or G
  MOD_RES (19), (20), (21), (22): Xaa is A or G or is absent

SEQ ID NO: 64591 - protein, 40 aa, Artificial Sequence
  GFR-binding peptide
  MOD_RES (2), (36), (37): Xaa is C or S
  MOD_RES (14), (15), (16), (17), (18): Xaa is A or G
  MOD_RES (19), (20), (21), (22): Xaa is A or G or is absent
GXESVAMGRHKRLXXXXXXXXXYYLISTASLKTPVXXAKS

SEQ ID NO: 64592 - protein, 41 aa, Artificial Sequence; identical to SEQ ID NO: 5509
  GFR-binding peptide
  MOD_RES (1), (35), (36): Xaa is C or S
  MOD_RES (13), (14), (15), (16), (17): Xaa is A or G
  MOD_RES (18), (19), (20), (21): Xaa is A or G or is absent

SEQ ID NO: 64593 - protein, 34 aa, Artificial Sequence; identical to SEQ ID NO: 5510
  GFR-binding peptide
  MOD_RES (32), (33): Xaa is C or S

SEQ ID NO: 64594 - protein, 38 aa, Artificial Sequence; identical to SEQ ID NO: 26619
  GFR-binding peptide
  MOD_RES (1), (35): Xaa is C or S
  MOD_RES (13), (14), (15), (16), (17): Xaa is A or G
  MOD_RES (18), (19), (20), (21): Xaa is A or G or is absent

SEQ ID NO: 64595 - protein, 33 aa, Artificial Sequence; identical to SEQ ID NO: 26621
  GFR-binding peptide
  MOD_RES (31), (32): Xaa is C or S

SEQ ID NO: 64596 - protein, 39 aa, Artificial Sequence; identical to SEQ ID NO: 31564
  GFR-binding peptide
  MOD_RES (2), (4), (38), (39): Xaa is C or S
  MOD_RES (16), (17), (18), (19), (20): Xaa is A or G
  MOD_RES (21), (22), (23), (24): Xaa is A or G or is absent

SEQ ID NO: 64597 - protein, 34 aa, Artificial Sequence
  GFR-binding peptide
  MOD_RES (1), (34): Xaa is C or S
  MOD_RES (12), (13), (14), (15), (16): Xaa is A or G
  MOD_RES (17), (18), (19), (20): Xaa is A or G or is absent
XSKVIMPIKGYXXXXXXXXXFYLINIPSLDQSVX

SEQ ID NO: 64598 - protein, 32 aa, Artificial Sequence
  GFR-binding peptide
  MOD_RES (31), (32): Xaa is C or S
EVVMDRHKRLVVNNAADYYLISTASLRAPVXX

SEQ ID NO: 64599 - protein, 31 aa, Artificial Sequence
  GFR-binding peptide
  MOD_RES (31), (31): Xaa is C or S
EEVIMYHYKLLLVRGNDKYLMSIPSTKVPAX

SEQ ID NO: 64600 - protein, 32 aa, Artificial Sequence; identical to SEQ ID NO: 56493
  GFR-binding peptide
  MOD_RES (31), (32): Xaa is C or S

SEQ ID NO: 64601 - protein, 35 aa, Artificial Sequence; identical to SEQ ID NO: 5519
  GFR-binding peptide
  MOD_RES (31), (32): Xaa is C or S

SEQ ID NO: 64602 - protein, 39 aa, Artificial Sequence; identical to SEQ ID NO: 56496
  GFR-binding peptide
  MOD_RES (1), (3), (35), (36): Xaa is C or S

SEQ ID NO: 64603 - protein, 37 aa, Artificial Sequence
  GFR-binding peptide
  MOD_RES (2), (34), (35): Xaa is C or S
AXSEVTMNPIKGYVVNKNEDFYLINIPSMKEPVXXPE

SEQ ID NO: 64604 - protein, 41 aa, Artificial Sequence; identical to SEQ ID NO: 5521
  GFR-binding peptide
  MOD_RES (2), (4), (36), (37): Xaa is C or S

SEQ ID NO: 64605 - protein, 41 aa, Artificial Sequence
  GFR-binding peptide
  MOD_RES (1), (3), (37), (38): Xaa is C or S
  MOD_RES (15), (16), (17), (18), (19): Xaa is A or G
  MOD_RES (20), (21), (22), (23): Xaa is A or G or is absent
XGXRDVVMGYHYKLXXXXXXXXXKYLMSIPSMKTPTXXPGA

SEQ ID NO: 64606 - protein, 32 aa, Artificial Sequence; identical to SEQ ID NO: 26629
  GFR-binding peptide
  MOD_RES (11), (12), (13), (14), (15): Xaa is A or G
  MOD_RES (16), (17), (18), (19): Xaa is A or G or is absent

SEQ ID NO: 64607 - protein, 36 aa, Artificial Sequence
  GFR-binding peptide
  MOD_RES (33), (34): Xaa is C or S
  MOD_RES (11), (12), (13), (14), (15): Xaa is A or G
  MOD_RES (16), (17), (18), (19): Xaa is A or G or is absent
SKVIMPIKGYXXXXXXXXXFYLINIPSLDQSVXXPS

SEQ ID NO: 64608 - protein, 35 aa, Artificial Sequence; identical to SEQ ID NO: 5523
  GFR-binding peptide
  MOD_RES (2), (35): Xaa is C or S
  MOD_RES (13), (14), (15), (16), (17): Xaa is A or G
  MOD_RES (18), (19), (20), (21): Xaa is A or G or is absent

SEQ ID NO: 64609 - protein, 41 aa, Artificial Sequence; identical to SEQ ID NO: 31570
  GFR-binding peptide
  MOD_RES (1), (3), (36), (37): Xaa is C or S

SEQ ID NO: 64610 - protein, 41 aa, Artificial Sequence; identical to SEQ ID NO: 31573
  GFR-binding peptide
  MOD_RES (2), (36), (37): Xaa is C or S
  MOD_RES (14), (15), (16), (17), (18): Xaa is A or G
  MOD_RES (19), (20), (21), (22): Xaa is A or G or is absent

SEQ ID NO: 64611 - protein, 34 aa, Artificial Sequence; identical to SEQ ID NO: 31575
  GFR-binding peptide
  MOD_RES (33), (34): Xaa is C or S
  MOD_RES (11), (12), (13), (14), (15): Xaa is A or G
  MOD_RES (16), (17), (18), (19): Xaa is A or G or is absent

SEQ ID NO: 64612 - protein, 32 aa, Artificial Sequence; identical to SEQ ID NO: 26632
  GFR-binding peptide
  MOD_RES (11), (12), (13), (14), (15): Xaa is A or G
  MOD_RES (16), (17), (18), (19): Xaa is A or G or is absent

SEQ ID NO: 64613 - protein, 36 aa, Artificial Sequence; identical to SEQ ID NO: 26635
  GFR-binding peptide
  MOD_RES (1), (3), (34), (35): Xaa is C or S

SEQ ID NO: 64614 - protein, 37 aa, Artificial Sequence
  GFR-binding peptide
  MOD_RES (33), (34): Xaa is C or S
  MOD_RES (11), (12), (13), (14), (15): Xaa is A or G
  MOD_RES (16), (17), (18), (19): Xaa is A or G or is absent
EVTMNPIKGYXXXXXXXXXFYLINIPSMKEPVXXPEP

SEQ ID NO: 64615 - protein, 38 aa, Artificial Sequence
  GFR-binding peptide
  MOD_RES (1), (3), (37), (38): Xaa is C or S
  MOD_RES (15), (16), (17), (18), (19): Xaa is A or G
  MOD_RES (20), (21), (22), (23): Xaa is A or G or is absent
XGXESVAMGRHKRLXXXXXXXXXYYLISTASLKTPVXX

SEQ ID NO: 64616 - protein, 38 aa, Artificial Sequence; identical to SEQ ID NO: 12943
  GFR-binding peptide
  MOD_RES (2), (34), (35): Xaa is C or S

SEQ ID NO: 64617 - protein, 42 aa, Artificial Sequence; identical to SEQ ID NO: 26637
  GFR-binding peptide
  MOD_RES (2), (36): Xaa is C or S
  MOD_RES (14), (15), (16), (17), (18): Xaa is A or G
  MOD_RES (19), (20), (21), (22): Xaa is A or G or is absent

SEQ ID NO: 64618 - protein, 31 aa, Artificial Sequence; identical to SEQ ID NO: 26638
  GFR-binding peptide
  MOD_RES (1), (1): Xaa is C or S

SEQ ID NO: 64619 - protein, 32 aa, Artificial Sequence; identical to SEQ ID NO: 5528
  GFR-binding peptide
  MOD_RES (31), (32): Xaa is C or S

SEQ ID NO: 64620 - protein, 33 aa, Artificial Sequence; identical to SEQ ID NO: 26640
  GFR-binding peptide
  MOD_RES (1), (32), (33): Xaa is C or S

SEQ ID NO: 64621 - protein, 35 aa, Artificial Sequence; identical to SEQ ID NO: 5529
  GFR-binding peptide
  MOD_RES (33), (34): Xaa is C or S
  MOD_RES (11), (12), (13), (14), (15): Xaa is A or G
  MOD_RES (16), (17), (18), (19): Xaa is A or G or is absent

SEQ ID NO: 64622 - protein, 34 aa, Artificial Sequence; identical to SEQ ID NO: 31584
  GFR-binding peptide
  MOD_RES (33), (34): Xaa is C or S
  MOD_RES (11), (12), (13), (14), (15): Xaa is A or G
  MOD_RES (16), (17), (18), (19): Xaa is A or G or is absent

SEQ ID NO: 64623 - protein, 32 aa, Artificial Sequence; identical to SEQ ID NO: 5533
  GFR-binding peptide
  MOD_RES (1), (32): Xaa is C or S

SEQ ID NO: 64624 - protein, 38 aa, Artificial Sequence
  GFR-binding peptide
  MOD_RES (1), (3), (35), (36): Xaa is C or S
XGXSEVVMDYHYKLVVNNASDKYLISIPSLRTPVXXTP

SEQ ID NO: 64625 - protein, 32 aa, Artificial Sequence; identical to SEQ ID NO: 31588
  GFR-binding peptide
  MOD_RES (32), (32): Xaa is C or S

SEQ ID NO: 64626 - protein, 41 aa, Artificial Sequence; identical to SEQ ID NO: 26647
  GFR-binding peptide
  MOD_RES (2), (4), (37), (38): Xaa is C or S
  MOD_RES (15), (16), (17), (18), (19): Xaa is A or G
  MOD_RES (20), (21), (22), (23): Xaa is A or G or is absent

SEQ ID NO: 64627 - protein, 38 aa, Artificial Sequence; identical to SEQ ID NO: 26648
  GFR-binding peptide
  MOD_RES (34), (35): Xaa is C or S
  MOD_RES (12), (13), (14), (15), (16): Xaa is A or G
  MOD_RES (17), (18), (19), (20): Xaa is A or G or is absent

SEQ ID NO: 64628 - protein, 36 aa, Artificial Sequence; identical to SEQ ID NO: 31598
  GFR-binding peptide
  MOD_RES (2), (2): Xaa is C or S
  MOD_RES (15), (16), (17), (18), (19): Xaa is A or G
  MOD_RES (20), (21), (22), (23): Xaa is A or G or is absent

SEQ ID NO: 64629 - protein, 42 aa, Artificial Sequence; identical to SEQ ID NO: 5539
  GFR-binding peptide
  MOD_RES (1), (3), (37), (38): Xaa is C or S
  MOD_RES (15), (16), (17), (18), (19): Xaa is A or G
  MOD_RES (20), (21), (22), (23): Xaa is A or G or is absent

SEQ ID NO: 64630 - protein, 35 aa, Artificial Sequence
  GFR-binding peptide
  MOD_RES (34), (35): Xaa is C or S
  MOD_RES (12), (13), (14), (15), (16): Xaa is A or G
  MOD_RES (17), (18), (19), (20): Xaa is A or G or is absent
SEVTMNPIKGYXXXXXXXXXFYLINIPSMKEPVXX

SEQ ID NO: 64631 - protein, 35 aa, Artificial Sequence; identical to SEQ ID NO: 5540
  GFR-binding peptide
  MOD_RES (2), (2): Xaa is C or S
  MOD_RES (14), (15), (16), (17), (18): Xaa is A or G
  MOD_RES (19), (20), (21), (22): Xaa is A or G or is absent

SEQ ID NO: 64632 - protein, 35 aa, Artificial Sequence; identical to SEQ ID NO: 5542
  GFR-binding peptide
  MOD_RES (31), (32): Xaa is C or S

SEQ ID NO: 64633 - protein, 39 aa, Artificial Sequence; identical to SEQ ID NO: 31605
  GFR-binding peptide
  MOD_RES (33), (34): Xaa is C or S
  MOD_RES (11), (12), (13), (14), (15): Xaa is A or G
  MOD_RES (16), (17), (18), (19): Xaa is A or G or is absent

SEQ ID NO: 64634 - protein, 39 aa, Artificial Sequence; identical to SEQ ID NO: 5549
  GFR-binding peptide
  MOD_RES (33), (34): Xaa is C or S
  MOD_RES (11), (12), (13), (14), (15): Xaa is A or G
  MOD_RES (16), (17), (18), (19): Xaa is A or G or is absent

SEQ ID NO: 64635 - protein, 41 aa, Artificial Sequence; identical to SEQ ID NO: 5552
  GFR-binding peptide
  MOD_RES (2), (4), (38): Xaa is C or S
  MOD_RES (16), (17), (18), (19), (20): Xaa is A or G
  MOD_RES (21), (22), (23), (24): Xaa is A or G or is absent

SEQ ID NO: 64636 - protein, 37 aa, Artificial Sequence; identical to SEQ ID NO: 26666
  GFR-binding peptide
  MOD_RES (2), (4): Xaa is C or S
  MOD_RES (16), (17), (18), (19), (20): Xaa is A or G
  MOD_RES (21), (22), (23), (24): Xaa is A or G or is absent

SEQ ID NO: 64637 - protein, 38 aa, Artificial Sequence
  GFR-binding peptide
  MOD_RES (1), (35), (36): Xaa is C or S
  MOD_RES (13), (14), (15), (16), (17): Xaa is A or G
  MOD_RES (18), (19), (20), (21): Xaa is A or G or is absent
XRDVVMGRHKRLXXXXXXXXXYYLMSTASMKTPTXXPG

SEQ ID NO: 64638 - protein, 34 aa, Artificial Sequence; identical to SEQ ID NO: 31613
  GFR-binding peptide
  MOD_RES (1), (33), (34): Xaa is C or S

SEQ ID NO: 64639 - protein, 39 aa, Artificial Sequence
  GFR-binding peptide
  MOD_RES (1), (3), (37), (38): Xaa is C or S
  MOD_RES (15), (16), (17), (18), (19): Xaa is A or G
  MOD_RES (20), (21), (22), (23): Xaa is A or G or is absent
XGXRDVVMGRHKRLXXXXXXXXXYYLMSTASMKTPTXXP

SEQ ID NO: 64640 - protein, 37 aa, Artificial Sequence; identical to SEQ ID NO: 5555
  GFR-binding peptide
  MOD_RES (1), (33), (34): Xaa is C or S

SEQ ID NO: 64641 - protein, 36 aa, Artificial Sequence; identical to SEQ ID NO: 26671
  GFR-binding peptide
  MOD_RES (2), (33), (34): Xaa is C or S

SEQ ID NO: 64642 - protein, 37 aa, Artificial Sequence; identical to SEQ ID NO: 26672
  GFR-binding peptide
  MOD_RES (1), (33), (34): Xaa is C or S

SEQ ID NO: 64643 - protein, 35 aa, Artificial Sequence; identical to SEQ ID NO: 5557
  GFR-binding peptide
  MOD_RES (1), (35): Xaa is C or S
  MOD_RES (13), (14), (15), (16), (17): Xaa is A or G
  MOD_RES (18), (19), (20), (21): Xaa is A or G or is absent

SEQ ID NO: 64644 - protein, 37 aa, Artificial Sequence; identical to SEQ ID NO: 5558
  GFR-binding peptide
  MOD_RES (1), (3): Xaa is C or S
  MOD_RES (16), (17), (18), (19), (20): Xaa is A or G
  MOD_RES (21), (22), (23), (24): Xaa is A or G or is absent

SEQ ID NO: 64645 - protein, 42 aa, Artificial Sequence; identical to SEQ ID NO: 5559
  GFR-binding peptide
  MOD_RES (2), (4), (39), (40): Xaa is C or S
  MOD_RES (17), (18), (19), (20), (21): Xaa is A or G
  MOD_RES (22), (23), (24), (25): Xaa is A or G or is absent

SEQ ID NO: 64646 - protein, 40 aa, Artificial Sequence; identical to SEQ ID NO: 5561
  GFR-binding peptide
  MOD_RES (1), (3), (35), (36): Xaa is C or S

SEQ ID NO: 64647 - protein, 33 aa, Artificial Sequence; identical to SEQ ID NO: 31617
  GFR-binding peptide
  MOD_RES (2), (2): Xaa is C or S

SEQ ID NO: 64648 - protein, 39 aa, Artificial Sequence; identical to SEQ ID NO: 31618
  GFR-binding peptide
  MOD_RES (1), (35), (36): Xaa is C or S
  MOD_RES (13), (14), (15), (16), (17): Xaa is A or G
  MOD_RES (18), (19), (20), (21): Xaa is A or G or is absent

SEQ ID NO: 64649 - protein, 37 aa, Artificial Sequence; identical to SEQ ID NO: 31619
  GFR-binding peptide
  MOD_RES (2), (4), (36), (37): Xaa is C or S

SEQ ID NO: 64650 - protein, 35 aa, Artificial Sequence
  GFR-binding peptide
  MOD_RES (1), (34), (35): Xaa is C or S
  MOD_RES (12), (13), (14), (15), (16): Xaa is A or G
  MOD_RES (17), (18), (19), (20): Xaa is A or G or is absent
XEEVIMRHKRLXXXXXXXXXYYLMSTASTKVPAXX

SEQ ID NO: 64651 - protein, 32 aa, Artificial Sequence
  GFR-binding peptide
  MOD_RES (31), (32): Xaa is C or S
SKVIMPIKGYIKPTKGIFYLINIPSLDQSVXX

SEQ ID NO: 64652 - protein, 38 aa, Artificial Sequence; identical to SEQ ID NO: 5567
  GFR-binding peptide
  MOD_RES (34), (35): Xaa is C or S
  MOD_RES (12), (13), (14), (15), (16): Xaa is A or G
  MOD_RES (17), (18), (19), (20): Xaa is A or G or is absent

SEQ ID NO: 64653 - protein, 38 aa, Artificial Sequence; identical to SEQ ID NO: 31631
  GFR-binding peptide
  MOD_RES (32), (32): Xaa is C or S

SEQ ID NO: 64654 - protein, 34 aa, Artificial Sequence; identical to SEQ ID NO: 31633
  GFR-binding peptide
  MOD_RES (1), (3): Xaa is C or S

SEQ ID NO: 64655 - protein, 39 aa, Artificial Sequence; identical to SEQ ID NO: 5569
  GFR-binding peptide
  MOD_RES (1), (3), (37), (38): Xaa is C or S
  MOD_RES (15), (16), (17), (18), (19): Xaa is A or G
  MOD_RES (20), (21), (22), (23): Xaa is A or G or is absent

SEQ ID NO: 64656 - protein, 34 aa, Artificial Sequence
  GFR-binding peptide
  MOD_RES (31), (32): Xaa is C or S
SKVIMPIKGYIKPTKGIFYLINIPSLDQSVXXPS

SEQ ID NO: 64657 - protein, 32 aa, Artificial Sequence
  GFR-binding peptide
  MOD_RES (1), (1): Xaa is C or S
XESVAMGRHKRLYTVVGKDYYLISTASLKTPV

SEQ ID NO: 64658 - protein, 30 aa, Artificial Sequence
  GFR-binding peptide
DVVMGYHYKLIIQQKDNKYLMSIPSMKTPT

SEQ ID NO: 64659 - protein, 36 aa, Artificial Sequence; identical to SEQ ID NO: 5574
  GFR-binding peptide
  MOD_RES (35), (36): Xaa is C or S
  MOD_RES (13), (14), (15), (16), (17): Xaa is A or G
  MOD_RES (18), (19), (20), (21): Xaa is A or G or is absent

SEQ ID NO: 64660 - protein, 42 aa, Artificial Sequence; identical to SEQ ID NO: 5575
  GFR-binding peptide
  MOD_RES (1), (3), (37), (38): Xaa is C or S
  MOD_RES (15), (16), (17), (18), (19): Xaa is A or G
  MOD_RES (20), (21), (22), (23): Xaa is A or G or is absent

SEQ ID NO: 64661 - protein, 38 aa, Artificial Sequence; identical to SEQ ID NO: 5578
  GFR-binding peptide
  MOD_RES (1), (3), (37), (38): Xaa is C or S
  MOD_RES (15), (16), (17), (18), (19): Xaa is A or G
  MOD_RES (20), (21), (22), (23): Xaa is A or G or is absent

SEQ ID NO: 64662 - protein, 34 aa, Artificial Sequence; identical to SEQ ID NO: 5579
  GFR-binding peptide
  MOD_RES (1), (32), (33): Xaa is C or S

SEQ ID NO: 64663 - protein, 39 aa, Artificial Sequence; identical to SEQ ID NO: 5581
  GFR-binding peptide
  MOD_RES (2), (4), (38), (39): Xaa is C or S
  MOD_RES (16), (17), (18), (19), (20): Xaa is A or G
  MOD_RES (21), (22), (23), (24): Xaa is A or G or is absent

SEQ ID NO: 64664 - protein, 39 aa, Artificial Sequence
  GFR-binding peptide
  MOD_RES (2), (4), (38), (39): Xaa is C or S
  MOD_RES (16), (17), (18), (19), (20): Xaa is A or G
  MOD_RES (21), (22), (23), (24): Xaa is A or G or is absent
SXGXRDVVMGRHKRLXXXXXXXXXYYLMSTASMKTPTXX

SEQ ID NO: 64665 - protein, 37 aa, Artificial Sequence; identical to SEQ ID NO: 5586
  GFR-binding peptide
  MOD_RES (2), (35), (36): Xaa is C or S
  MOD_RES (13), (14), (15), (16), (17): Xaa is A or G
  MOD_RES (18), (19), (20), (21): Xaa is A or G or is absent

SEQ ID NO: 64666 - protein, 33 aa, Artificial Sequence; identical to SEQ ID NO: 31645
  GFR-binding peptide
  MOD_RES (33), (33): Xaa is C or S
  MOD_RES (11), (12), (13), (14), (15): Xaa is A or G
  MOD_RES (16), (17), (18), (19): Xaa is A or G or is absent

SEQ ID NO: 64667 - protein, 35 aa, Artificial Sequence
  GFR-binding peptide
  MOD_RES (32), (33): Xaa is C or S
SEVVMDEYKFKVVNNASDLYLISIPELRTPVXXTP

SEQ ID NO: 64668 - protein, 37 aa, Artificial Sequence; identical to SEQ ID NO: 5589
  GFR-binding peptide
  MOD_RES (1), (3), (36), (37): Xaa is C or S
  MOD_RES (14), (15), (16), (17), (18): Xaa is A or G
  MOD_RES (19), (20), (21), (22): Xaa is A or G or is absent

SEQ ID NO: 64669 - protein, 33 aa, Artificial Sequence; identical to SEQ ID NO: 5590
  GFR-binding peptide
  MOD_RES (1), (33): Xaa is C or S

SEQ ID NO: 64670 - protein, 34 aa, Artificial Sequence; identical to SEQ ID NO: 56582
  GFR-binding peptide
  MOD_RES (2), (34): Xaa is C or S

SEQ ID NO: 64671 - protein, 34 aa, Artificial Sequence; identical to SEQ ID NO: 31647
  GFR-binding peptide
  MOD_RES (1), (3): Xaa is C or S

SEQ ID NO: 64672 - protein, 36 aa, Artificial Sequence
  GFR-binding peptide
  MOD_RES (2), (36): Xaa is C or S
  MOD_RES (14), (15), (16), (17), (18): Xaa is A or G
  MOD_RES (19), (20), (21), (22): Xaa is A or G or is absent
AXSEVTMNYHYKLXXXXXXXXXKYLISIPSMKEPVX

SEQ ID NO: 64673 - protein, 37 aa, Artificial Sequence; identical to SEQ ID NO: 31651
  GFR-binding peptide
  MOD_RES (1), (3), (37): Xaa is C or S
  MOD_RES (15), (16), (17), (18), (19): Xaa is A or G
  MOD_RES (20), (21), (22), (23): Xaa is A or G or is absent

SEQ ID NO: 64674 - protein, 33 aa, Artificial Sequence
  GFR-binding peptide
  MOD_RES (2), (2): Xaa is C or S
GXRDVVMGEYKFKIIQQKDNLYLMSIPEMKTPT

SEQ ID NO: 64675 - protein, 42 aa, Artificial Sequence; identical to SEQ ID NO: 26704
  GFR-binding peptide
  MOD_RES (2), (4), (36): Xaa is C or S

SEQ ID NO: 64676 - protein, 34 aa, Artificial Sequence; identical to SEQ ID NO: 13009
  GFR-binding peptide
  MOD_RES (2), (34): Xaa is C or S

SEQ ID NO: 64677 - protein, 41 aa, Artificial Sequence; identical to SEQ ID NO: 5597
  GFR-binding peptide
  MOD_RES (1), (3), (38), (39): Xaa is C or S
  MOD_RES (16), (17), (18), (19), (20): Xaa is A or G
  MOD_RES (21), (22), (23), (24): Xaa is A or G or is absent

SEQ ID NO: 64678 - protein, 40 aa, Artificial Sequence; identical to SEQ ID NO: 5598
  GFR-binding peptide
  MOD_RES (2), (4), (36), (37): Xaa is C or S

SEQ ID NO: 64679 - protein, 33 aa, Artificial Sequence; identical to SEQ ID NO: 5599
  GFR-binding peptide
  MOD_RES (33), (33): Xaa is C or S
  MOD_RES (11), (12), (13), (14), (15): Xaa is A or G
  MOD_RES (16), (17), (18), (19): Xaa is A or G or is absent

SEQ ID NO: 64680 - protein, 39 aa, Artificial Sequence; identical to SEQ ID NO: 5600
  GFR-binding peptide
  MOD_RES (2), (4), (36), (37): Xaa is C or S

SEQ ID NO: 64681 - protein, 37 aa, Artificial Sequence
  GFR-binding peptide
  MOD_RES (2), (35), (36): Xaa is C or S
  MOD_RES (13), (14), (15), (16), (17): Xaa is A or G
  MOD_RES (18), (19), (20), (21): Xaa is A or G or is absent
GXEEVIMRHKRLXXXXXXXXXYYLMSTASTKVPAXXT

SEQ ID NO: 64682 - protein, 37 aa, Artificial Sequence; identical to SEQ ID NO: 31665
  GFR-binding peptide
  MOD_RES (33), (34): Xaa is C or S
  MOD_RES (11), (12), (13), (14), (15): Xaa is A or G
  MOD_RES (16), (17), (18), (19): Xaa is A or G or is absent

SEQ ID NO: 64683 - protein, 43 aa, Artificial Sequence; identical to SEQ ID NO: 5602
  GFR-binding peptide
  MOD_RES (1), (3), (37), (38): Xaa is C or S
  MOD_RES (15), (16), (17), (18), (19): Xaa is A or G
  MOD_RES (20), (21), (22), (23): Xaa is A or G or is absent

SEQ ID NO: 64684 - protein, 42 aa, Artificial Sequence; identical to SEQ ID NO: 26714
  GFR-binding peptide
  MOD_RES (2), (36), (37): Xaa is C or S
  MOD_RES (14), (15), (16), (17), (18): Xaa is A or G
  MOD_RES (19), (20), (21), (22): Xaa is A or G or is absent

SEQ ID NO: 64685 - protein, 35 aa, Artificial Sequence; identical to SEQ ID NO: 31667
  GFR-binding peptide
  MOD_RES (1), (35): Xaa is C or S
  MOD_RES (13), (14), (15), (16), (17): Xaa is A or G
  MOD_RES (18), (19), (20), (21): Xaa is A or G or is absent

SEQ ID NO: 64686 - protein, 36 aa, Artificial Sequence; identical to SEQ ID NO: 5606
  GFR-binding peptide
  MOD_RES (34), (35): Xaa is C or S
  MOD_RES (12), (13), (14), (15), (16): Xaa is A or G
  MOD_RES (17), (18), (19), (20): Xaa is A or G or is absent

SEQ ID NO: 64687 - protein, 39 aa, Artificial Sequence; identical to SEQ ID NO: 26718
  GFR-binding peptide
  MOD_RES (2), (4), (35), (36): Xaa is C or S

SEQ ID NO: 64688 - protein, 38 aa, Artificial Sequence; identical to SEQ ID NO: 26721
  GFR-binding peptide
  MOD_RES (33), (34): Xaa is C or S

SEQ ID NO: 64689 - protein, 36 aa, Artificial Sequence; identical to SEQ ID NO: 5609
  GFR-binding peptide
  MOD_RES (2), (4), (36): Xaa is C or S

SEQ ID NO: 64690 - protein, 36 aa, Artificial Sequence; identical to SEQ ID NO: 5611
  GFR-binding peptide
  MOD_RES (31), (31): Xaa is C or S

SEQ ID NO: 64691 - protein, 41 aa, Artificial Sequence; identical to SEQ ID NO: 5612
  GFR-binding peptide
  MOD_RES (1), (35), (36): Xaa is C or S
  MOD_RES (13), (14), (15), (16), (17): Xaa is A or G
  MOD_RES (18), (19), (20), (21): Xaa is A or G or is absent

SEQ ID NO: 64692 - protein, 44 aa, Artificial Sequence; identical to SEQ ID NO: 31674
  GFR-binding peptide
  MOD_RES (2), (4), (38), (39): Xaa is C or S
  MOD_RES (16), (17), (18), (19), (20): Xaa is A or G
  MOD_RES (21), (22), (23), (24): Xaa is A or G or is absent

SEQ ID NO: 64693 - protein, 35 aa, Artificial Sequence
  GFR-binding peptide
  MOD_RES (33), (34): Xaa is C or S
  MOD_RES (11), (12), (13), (14), (15): Xaa is A or G
  MOD_RES (16), (17), (18), (19): Xaa is A or G or is absent
SVAMGRHKRLXXXXXXXXXYYLISTASLKTPVXXA

SEQ ID NO: 64694 - protein, 44 aa, Artificial Sequence; identical to SEQ ID NO: 26731
  GFR-binding peptide
  MOD_RES (2), (4), (38), (39): Xaa is C or S
  MOD_RES (16), (17), (18), (19), (20): Xaa is A or G
  MOD_RES (21), (22), (23), (24): Xaa is A or G or is absent

SEQ ID NO: 64695 - protein, 37 aa, Artificial Sequence; identical to SEQ ID NO: 5618
  GFR-binding peptide
  MOD_RES (33), (34): Xaa is C or S
  MOD_RES (11), (12), (13), (14), (15): Xaa is A or G
  MOD_RES (16), (17), (18), (19): Xaa is A or G or is absent

SEQ ID NO: 64696 - protein, 36 aa, Artificial Sequence; identical to SEQ ID NO: 26733
  GFR-binding peptide
  MOD_RES (2), (4): Xaa is C or S
  MOD_RES (15), (16), (17), (18), (19): Xaa is A or G
  MOD_RES (20), (21), (22), (23): Xaa is A or G or is absent

SEQ ID NO: 64697 - protein, 41 aa, Artificial Sequence; identical to SEQ ID NO: 5621
  GFR-binding peptide
  MOD_RES (2), (35), (36): Xaa is C or S
  MOD_RES (13), (14), (15), (16), (17): Xaa is A or G
  MOD_RES (18), (19), (20), (21): Xaa is A or G or is absent

SEQ ID NO: 64698 - protein, 41 aa, Artificial Sequence
  GFR-binding peptide
  MOD_RES (2), (4), (36), (37): Xaa is C or S
SXGXRDVVMGEYKFKIIQQKDNLYLMSIPEMKTPTXXPGAS

SEQ ID NO: 64699 - protein, 37 aa, Artificial Sequence; identical to SEQ ID NO: 31681
  GFR-binding peptide
  MOD_RES (33), (34): Xaa is C or S
  MOD_RES (11), (12), (13), (14), (15): Xaa is A or G
  MOD_RES (16), (17), (18), (19): Xaa is A or G or is absent

SEQ ID NO: 64700 - protein, 36 aa, Artificial Sequence; identical to SEQ ID NO: 26739
  GFR-binding peptide
  MOD_RES (1), (32), (33): Xaa is C or S

SEQ ID NO: 64701 - protein, 34 aa, Artificial Sequence; identical to SEQ ID NO: 26741
  GFR-binding peptide
  MOD_RES (33), (34): Xaa is C or S
  MOD_RES (11), (12), (13), (14), (15): Xaa is A or G
  MOD_RES (16), (17), (18), (19): Xaa is A or G or is absent

SEQ ID NO: 64702 - protein, 41 aa, Artificial Sequence; identical to SEQ ID NO: 5622
  GFR-binding peptide
  MOD_RES (1), (3), (36), (37): Xaa is C or S
  MOD_RES (14), (15), (16), (17), (18): Xaa is A or G
  MOD_RES (19), (20), (21), (22): Xaa is A or G or is absent

SEQ ID NO: 64703 - protein, 37 aa, Artificial Sequence; identical to SEQ ID NO: 31683
  GFR-binding peptide
  MOD_RES (1), (3), (35), (36): Xaa is C or S

SEQ ID NO: 64704 - protein, 35 aa, Artificial Sequence
  GFR-binding peptide
  MOD_RES (2), (33), (34): Xaa is C or S
KXSKVVMPIKGYVKPTRGVFYLINIPSLDQPVXXP

SEQ ID NO: 64705 - protein, 33 aa, Artificial Sequence
  GFR-binding peptide
  MOD_RES (2), (2): Xaa is C or S
GXRDVVMGRHKRLIIQQKDNYYLMSTASMKTPT

SEQ ID NO: 64706 - protein, 37 aa, Artificial Sequence
  GFR-binding peptide
  MOD_RES (2), (36), (37): Xaa is C or S
  MOD_RES (14), (15), (16), (17), (18): Xaa is A or G
  MOD_RES (19), (20), (21), (22): Xaa is A or G or is absent
GXSEVVMDEYKFKXXXXXXXXXLYLISIPELRTPVXX

SEQ ID NO: 64707 - protein, 37 aa, Artificial Sequence
  GFR-binding peptide
  MOD_RES (1), (3), (36), (37): Xaa is C or S
  MOD_RES (14), (15), (16), (17), (18): Xaa is A or G
  MOD_RES (19), (20), (21), (22): Xaa is A or G or is absent
XKXSKVIMPIKGYXXXXXXXXXFYLINIPSLDQSVXX

SEQ ID NO: 64708 - protein, 34 aa, Artificial Sequence; identical to SEQ ID NO: 26748
  GFR-binding peptide
  MOD_RES (33), (34): Xaa is C or S
  MOD_RES (11), (12), (13), (14), (15): Xaa is A or G
  MOD_RES (16), (17), (18), (19): Xaa is A or G or is absent

SEQ ID NO: 64709 - protein, 35 aa, Artificial Sequence; identical to SEQ ID NO: 5630
  GFR-binding peptide
  MOD_RES (33), (34): Xaa is C or S
  MOD_RES (11), (12), (13), (14), (15): Xaa is A or G
  MOD_RES (16), (17), (18), (19): Xaa is A or G or is absent

SEQ ID NO: 64710 - protein, 38 aa, Artificial Sequence; identical to SEQ ID NO: 26751
  GFR-binding peptide
  MOD_RES (1), (32), (33): Xaa is C or S

SEQ ID NO: 64711 - protein, 38 aa, Artificial Sequence
  GFR-binding peptide
  MOD_RES (34), (35): Xaa is C or S
  MOD_RES (12), (13), (14), (15), (16): Xaa is A or G
  MOD_RES (17), (18), (19), (20): Xaa is A or G or is absent
SEVTMNYHYKLXXXXXXXXXKYLISIPSMKEPVXXPEP

SEQ ID NO: 64712 - protein, 36 aa, Artificial Sequence; identical to SEQ ID NO: 26754
  GFR-binding peptide
  MOD_RES (2), (4), (36): Xaa is C or S

SEQ ID NO: 64713 - protein, 42 aa, Artificial Sequence; identical to SEQ ID NO: 5634
  GFR-binding peptide
  MOD_RES (2), (36), (37): Xaa is C or S
  MOD_RES (14), (15), (16), (17), (18): Xaa is A or G
  MOD_RES (19), (20), (21), (22): Xaa is A or G or is absent

SEQ ID NO: 64714 - protein, 34 aa, Artificial Sequence; identical to SEQ ID NO: 26755
  GFR-binding peptide
  MOD_RES (32), (33): Xaa is C or S

SEQ ID NO: 64715 - protein, 36 aa, Artificial Sequence; identical to SEQ ID NO: 31692
  GFR-binding peptide
  MOD_RES (34), (34): Xaa is C or S
  MOD_RES (12), (13), (14), (15), (16): Xaa is A or G
  MOD_RES (17), (18), (19), (20): Xaa is A or G or is absent

SEQ ID NO: 64716 - protein, 40 aa, Artificial Sequence
  GFR-binding peptide
  MOD_RES (2), (4), (36), (37): Xaa is C or S
RXGXSEVVMDYHYKLVVNNASDKYLISIPSLRTPVXXTPP

SEQ ID NO: 64717 - protein, 42 aa, Artificial Sequence
  GFR-binding peptide
  MOD_RES (1), (3), (36), (37): Xaa is C or S
  MOD_RES (14), (15), (16), (17), (18): Xaa is A or G
  MOD_RES (19), (20), (21), (22): Xaa is A or G or is absent
XKXSKVVMPIKGYXXXXXXXXXFYLINIPSLDQPVXXPSASA

SEQ ID NO: 64718 - protein, 37 aa, Artificial Sequence; identical to SEQ ID NO: 31694
  GFR-binding peptide
  MOD_RES (2), (4): Xaa is C or S
  MOD_RES (16), (17), (18), (19), (20): Xaa is A or G
  MOD_RES (21), (22), (23), (24): Xaa is A or G or is absent

SEQ ID NO: 64719 - protein, 37 aa, Artificial Sequence
  GFR-binding peptide
  MOD_RES (31), (32): Xaa is C or S
RVVMNRHKRLIVNSSDDYYLVSTASLKTPAXXPKPVH

SEQ ID NO: 64720 - protein, 37 aa, Artificial Sequence; identical to SEQ ID NO: 56638
  GFR-binding peptide
  MOD_RES (31), (32): Xaa is C or S

SEQ ID NO: 64721 - protein, 36 aa, Artificial Sequence; identical to SEQ ID NO: 26761
  GFR-binding peptide
  MOD_RES (33), (34): Xaa is C or S
  MOD_RES (11), (12), (13), (14), (15): Xaa is A or G
  MOD_RES (16), (17), (18), (19): Xaa is A or G or is absent

SEQ ID NO: 64722 - protein, 41 aa, Artificial Sequence; identical to SEQ ID NO: 26763
  GFR-binding peptide
  MOD_RES (1), (3), (38), (39): Xaa is C or S
  MOD_RES (16), (17), (18), (19), (20): Xaa is A or G
  MOD_RES (21), (22), (23), (24): Xaa is A or G or is absent

SEQ ID NO: 64723 - protein, 37 aa, Artificial Sequence; identical to SEQ ID NO: 26764
  GFR-binding peptide
  MOD_RES (1), (3), (37): Xaa is C or S
  MOD_RES (15), (16), (17), (18), (19): Xaa is A or G
  MOD_RES (20), (21), (22), (23): Xaa is A or G or is absent

SEQ ID NO: 64724 - protein, 35 aa, Artificial Sequence; identical to SEQ ID NO: 31713
  GFR-binding peptide
  MOD_RES (2), (2): Xaa is C or S
  MOD_RES (14), (15), (16), (17), (18): Xaa is A or G
  MOD_RES (19), (20), (21), (22): Xaa is A or G or is absent

SEQ ID NO: 64725 - protein, 38 aa, Artificial Sequence
  GFR-binding peptide
  MOD_RES (33), (34): Xaa is C or S
  MOD_RES (11), (12), (13), (14), (15): Xaa is A or G
  MOD_RES (16), (17), (18), (19): Xaa is A or G or is absent
EVTMNEYKFKXXXXXXXXXLYLISIPEMKEPVXXPEPI

SEQ ID NO: 64726 - protein, 38 aa, Artificial Sequence; identical to SEQ ID NO: 26767
  GFR-binding peptide
  MOD_RES (1), (35), (36): Xaa is C or S
  MOD_RES (13), (14), (15), (16), (17): Xaa is A or G
  MOD_RES (18), (19), (20), (21): Xaa is A or G or is absent

SEQ ID NO: 64727 - protein, 34 aa, Artificial Sequence; identical to SEQ ID NO: 13069
  GFR-binding peptide
  MOD_RES (1), (1): Xaa is C or S
  MOD_RES (13), (14), (15), (16), (17): Xaa is A or G
  MOD_RES (18), (19), (20), (21): Xaa is A or G or is absent

SEQ ID NO: 64728 - protein, 39 aa, Artificial Sequence
  GFR-binding peptide
  MOD_RES (2), (4), (35), (36): Xaa is C or S
LXGXEEVIMYHYKLLLVRGNDKYLMSIPSTKVPAXXTSP

SEQ ID NO: 64729 - protein, 40 aa, Artificial Sequence; identical to SEQ ID NO: 31718
  GFR-binding peptide
  MOD_RES (1), (3), (35): Xaa is C or S

SEQ ID NO: 64730 - protein, 39 aa, Artificial Sequence; identical to SEQ ID NO: 5645
  GFR-binding peptide
  MOD_RES (33), (34): Xaa is C or S
  MOD_RES (11), (12), (13), (14), (15): Xaa is A or G
  MOD_RES (16), (17), (18), (19): Xaa is A or G or is absent

SEQ ID NO: 64731 - protein, 44 aa, Artificial Sequence; identical to SEQ ID NO: 5647
  GFR-binding peptide
  MOD_RES (2), (4), (38), (39): Xaa is C or S
  MOD_RES (16), (17), (18), (19), (20): Xaa is A or G
  MOD_RES (21), (22), (23), (24): Xaa is A or G or is absent

SEQ ID NO: 64732 - protein, 42 aa, Artificial Sequence; identical to SEQ ID NO: 26776
  GFR-binding peptide
  MOD_RES (1), (3), (37), (38): Xaa is C or S
  MOD_RES (15), (16), (17), (18), (19): Xaa is A or G
  MOD_RES (20), (21), (22), (23): Xaa is A or G or is absent

SEQ ID NO: 64733 - protein, 35 aa, Artificial Sequence; identical to SEQ ID NO: 26777
  GFR-binding peptide
  MOD_RES (1), (32), (33): Xaa is C or S

SEQ ID NO: 64734 - protein, 39 aa, Artificial Sequence; identical to SEQ ID NO: 5651
  GFR-binding peptide
  MOD_RES (1), (3), (38), (39): Xaa is C or S
  MOD_RES (16), (17), (18), (19), (20): Xaa is A or G
  MOD_RES (21), (22), (23), (24): Xaa is A or G or is absent

SEQ ID NO: 64735 - protein, 39 aa, Artificial Sequence; identical to SEQ ID NO: 5654
  GFR-binding peptide
  MOD_RES (2), (37), (38): Xaa is C or S
  MOD_RES (15), (16), (17), (18), (19): Xaa is A or G
  MOD_RES (20), (21), (22), (23): Xaa is A or G or is absent

SEQ ID NO: 64736 - protein, 42 aa, Artificial Sequence; identical to SEQ ID NO: 5655
  GFR-binding peptide
  MOD_RES (1), (3), (36), (37): Xaa is C or S
  MOD_RES (14), (15), (16), (17), (18): Xaa is A or G
  MOD_RES (19), (20), (21), (22): Xaa is A or G or is absent

SEQ ID NO: 64737 - protein, 40 aa, Artificial Sequence
  GFR-binding peptide
  MOD_RES (2), (36), (37): Xaa is C or S
  MOD_RES (14), (15), (16), (17), (18): Xaa is A or G
  MOD_RES (19), (20), (21), (22): Xaa is A or G or is absent
GXRDVVMGEYKFKXXXXXXXXXLYLMSIPEMKTPTXXPGA

SEQ ID NO: 64738 - protein, 37 aa, Artificial Sequence; identical to SEQ ID NO: 31725
  GFR-binding peptide
  MOD_RES (1), (33), (34): Xaa is C or S

SEQ ID NO: 64739 - protein, 32 aa, Artificial Sequence; identical to SEQ ID NO: 31727
  GFR-binding peptide
  MOD_RES (11), (12), (13), (14), (15): Xaa is A or G
  MOD_RES (16), (17), (18), (19): Xaa is A or G or is absent

SEQ ID NO: 64740 - protein, 40 aa, Artificial Sequence; identical to SEQ ID NO: 26784
  GFR-binding peptide
  MOD_RES (1), (3), (35), (36): Xaa is C or S

SEQ ID NO: 64741 - protein, 34 aa, Artificial Sequence
  GFR-binding peptide
  MOD_RES (2), (4): Xaa is C or S
LXGXEEVIMEYKFKLLVRGNDLYLMSIPETKVPA

SEQ ID NO: 64742 - protein, 43 aa, Artificial Sequence; identical to SEQ ID NO: 5656
  GFR-binding peptide
  MOD_RES (2), (4), (37), (38): Xaa is C or S
  MOD_RES (15), (16), (17), (18), (19): Xaa is A or G
  MOD_RES (20), (21), (22), (23): Xaa is A or G or is absent

SEQ ID NO: 64743 - protein, 39 aa, Artificial Sequence; identical to SEQ ID NO: 26789
  GFR-binding peptide
  MOD_RES (2), (4), (36), (37): Xaa is C or S

SEQ ID NO: 64744 - protein, 36 aa, Artificial Sequence; identical to SEQ ID NO: 26793
  GFR-binding peptide
  MOD_RES (1), (33), (34): Xaa is C or S

SEQ ID NO: 64745 - protein, 38 aa, Artificial Sequence; identical to SEQ ID NO: 26796
  GFR-binding peptide
  MOD_RES (1), (3), (35), (36): Xaa is C or S

SEQ ID NO: 64746 - protein, 37 aa, Artificial Sequence; identical to SEQ ID NO: 26797
  GFR-binding peptide
  MOD_RES (1), (3), (35), (36): Xaa is C or S

SEQ ID NO: 64747 - protein, 41 aa, Artificial Sequence; identical to SEQ ID NO: 5664
  GFR-binding peptide
  MOD_RES (2), (4), (38), (39): Xaa is C or S
  MOD_RES (16), (17), (18), (19), (20): Xaa is A or G
  MOD_RES (21), (22), (23), (24): Xaa is A or G or is absent

SEQ ID NO: 64748 - protein, 39 aa, Artificial Sequence; identical to SEQ ID NO: 31745
  GFR-binding peptide
  MOD_RES (1), (3), (37), (38): Xaa is C or S
  MOD_RES (15), (16), (17), (18), (19): Xaa is A or G
  MOD_RES (20), (21), (22), (23): Xaa is A or G or is absent

SEQ ID NO: 64749 - protein, 35 aa, Artificial Sequence
  GFR-binding peptide
  MOD_RES (2), (4), (35): Xaa is C or S
SXKXSKVVMPIKGYVKPTRGVFYLINIPSLDQPVX

SEQ ID NO: 64750 - protein, 39 aa, Artificial Sequence; identical to SEQ ID NO: 5668
  GFR-binding peptide
  MOD_RES (2), (4), (37), (38): Xaa is C or S
  MOD_RES (15), (16), (17), (18), (19): Xaa is A or G
  MOD_RES (20), (21), (22), (23): Xaa is A or G or is absent

SEQ ID NO: 64751 - protein, 36 aa, Artificial Sequence; identical to SEQ ID NO: 5670
  GFR-binding peptide
  MOD_RES (33), (34): Xaa is C or S
  MOD_RES (11), (12), (13), (14), (15): Xaa is A or G
  MOD_RES (16), (17), (18), (19): Xaa is A or G or is absent

SEQ ID NO: 64752 - protein, 40 aa, Artificial Sequence
  GFR-binding peptide
  MOD_RES (1), (34), (35): Xaa is C or S
  MOD_RES (12), (13), (14), (15), (16): Xaa is A or G
  MOD_RES (17), (18), (19), (20): Xaa is A or G or is absent
XSKVIMPIKGYXXXXXXXXXFYLINIPSLDQSVXXPSASA

SEQ ID NO: 64753 - protein, 37 aa, Artificial Sequence; identical to SEQ ID NO: 5671
  GFR-binding peptide
  MOD_RES (1), (34), (35): Xaa is C or S
  MOD_RES (12), (13), (14), (15), (16): Xaa is A or G
  MOD_RES (17), (18), (19), (20): Xaa is A or G or is absent

SEQ ID NO: 64754 - protein, 37 aa, Artificial Sequence
  GFR-binding peptide
  MOD_RES (2), (4), (36), (37): Xaa is C or S
RXGXAEVVMDRHKRLVVNNAADYYLISTASLRAPVXX

SEQ ID NO: 64755 - protein, 38 aa, Artificial Sequence
  GFR-binding peptide
  MOD_RES (1), (3), (36), (37): Xaa is C or S
  MOD_RES (14), (15), (16), (17), (18): Xaa is A or G
  MOD_RES (19), (20), (21), (22): Xaa is A or G or is absent
XGXEEVIMRHKRLXXXXXXXXXYYLMSTASTKVPAXXT

SEQ ID NO: 64756 - protein, 38 aa, Artificial Sequence; identical to SEQ ID NO: 5673
  GFR-binding peptide
  MOD_RES (1), (33), (34): Xaa is C or S

SEQ ID NO: 64757 - protein, 40 aa, Artificial Sequence; identical to SEQ ID NO: 26806
  GFR-binding peptide
  MOD_RES (34), (35): Xaa is C or S
  MOD_RES (12), (13), (14), (15), (16): Xaa is A or G
  MOD_RES (17), (18), (19), (20): Xaa is A or G or is absent

SEQ ID NO: 64758 - protein, 34 aa, Artificial Sequence; identical to SEQ ID NO: 31754
  GFR-binding peptide
  MOD_RES (1), (1): Xaa is C or S
  MOD_RES (13), (14), (15), (16), (17): Xaa is A or G
  MOD_RES (18), (19), (20), (21): Xaa is A or G or is absent

SEQ ID NO: 64759 - protein, 42 aa, Artificial Sequence; identical to SEQ ID NO: 5676
  GFR-binding peptide
  MOD_RES (1), (3), (37): Xaa is C or S
  MOD_RES (15), (16), (17), (18), (19): Xaa is A or G
  MOD_RES (20), (21), (22), (23): Xaa is A or G or is absent

SEQ ID NO: 64760 - protein, 41 aa, Artificial Sequence
  GFR-binding peptide
  MOD_RES (1), (35), (36): Xaa is C or S
  MOD_RES (13), (14), (15), (16), (17): Xaa is A or G
  MOD_RES (18), (19), (20), (21): Xaa is A or G or is absent
XAEVVMDRHKRLXXXXXXXXXYYLISTASLRAPVXXSAPAA

SEQ ID NO: 64761 - protein, 35 aa, Artificial Sequence; identical to SEQ ID NO: 5679
  GFR-binding peptide
  MOD_RES (1), (3), (35): Xaa is C or S

SEQ ID NO: 64762 - protein, 34 aa, Artificial Sequence
  GFR-binding peptide
  MOD_RES (31), (32): Xaa is C or S
EVVMDYHYKLVVNNASDKYLISIPSLRTPVXXTP

SEQ ID NO: 64763 - protein, 37 aa, Artificial Sequence; identical to SEQ ID NO: 26809
  GFR-binding peptide
  MOD_RES (32), (33): Xaa is C or S

SEQ ID NO: 64764 - protein, 37 aa, Artificial Sequence; identical to SEQ ID NO: 5682
  GFR-binding peptide
  MOD_RES (1), (3), (36), (37): Xaa is C or S
  MOD_RES (14), (15), (16), (17), (18): Xaa is A or G
  MOD_RES (19), (20), (21), (22): Xaa is A or G or is absent

SEQ ID NO: 64765 - protein, 37 aa, Artificial Sequence; identical to SEQ ID NO: 5684
  GFR-binding peptide
  MOD_RES (1), (35), (36): Xaa is C or S
  MOD_RES (13), (14), (15), (16), (17): Xaa is A or G
  MOD_RES (18), (19), (20), (21): Xaa is A or G or is absent

SEQ ID NO: 64766 - protein, 36 aa, Artificial Sequence
  GFR-binding peptide
  MOD_RES (33), (34): Xaa is C or S
  MOD_RES (11), (12), (13), (14), (15): Xaa is A or G
  MOD_RES (16), (17), (18), (19): Xaa is A or G or is absent
EVVMDEYKFKXXXXXXXXXLYLISIPELRTPVXXTP

SEQ ID NO: 64767 - protein, 37 aa, Artificial Sequence; identical to SEQ ID NO: 31769
  GFR-binding peptide
  MOD_RES (1), (33): Xaa is C or S

SEQ ID NO: 64768 - protein, 35 aa, Artificial Sequence; identical to SEQ ID NO: 5688
  GFR-binding peptide
  MOD_RES (1), (32), (33): Xaa is C or S

SEQ ID NO: 64769 - protein, 35 aa, Artificial Sequence; identical to SEQ ID NO: 5691
  GFR-binding peptide
  MOD_RES (2), (33), (34): Xaa is C or S

SEQ ID NO: 64770 - protein, 34 aa, Artificial Sequence; identical to SEQ ID NO: 26819
  GFR-binding peptide
  MOD_RES (34), (34): Xaa is C or S
  MOD_RES (12), (13), (14), (15), (16): Xaa is A or G
  MOD_RES (17), (18), (19), (20): Xaa is A or G or is absent

SEQ ID NO: 64771 - protein, 37 aa, Artificial Sequence; identical to SEQ ID NO: 13132
  GFR-binding peptide
  MOD_RES (31), (32): Xaa is C or S

SEQ ID NO: 64772 - protein, 35 aa, Artificial Sequence; identical to SEQ ID NO: 5694
  GFR-binding peptide
  MOD_RES (31), (32): Xaa is C or S

SEQ ID NO: 64773 - protein, 31 aa, Artificial Sequence; identical to SEQ ID NO: 26821
  GFR-binding peptide

SEQ ID NO: 64774 - protein, 40 aa, Artificial Sequence
  GFR-binding peptide
  MOD_RES (1), (35), (36): Xaa is C or S
  MOD_RES (13), (14), (15), (16), (17): Xaa is A or G
  MOD_RES (18), (19), (20), (21): Xaa is A or G or is absent
XRDVVMGEYKFKXXXXXXXXXLYLMSIPEMKTPTXXPGAS

SEQ ID NO: 64775 - protein, 38 aa, Artificial Sequence; identical to SEQ ID NO: 5698
  GFR-binding peptide
  MOD_RES (1), (3), (37), (38): Xaa is C or S
  MOD_RES (15), (16), (17), (18), (19): Xaa is A or G
  MOD_RES (20), (21), (22), (23): Xaa is A or G or is absent

SEQ ID NO: 64776 - protein, 31 aa, Artificial Sequence; identical to SEQ ID NO: 5701
  GFR-binding peptide

SEQ ID NO: 64777 - protein, 39 aa, Artificial Sequence; identical to SEQ ID NO: 56732
  GFR-binding peptide
  MOD_RES (2), (4), (37), (38): Xaa is C or S
  MOD_RES (15), (16), (17), (18), (19): Xaa is A or G
  MOD_RES (20), (21), (22), (23): Xaa is A or G or is absent

SEQ ID NO: 64778 - protein, 41 aa, Artificial Sequence; identical to SEQ ID NO: 26827
  GFR-binding peptide
  MOD_RES (1), (35), (36): Xaa is C or S
  MOD_RES (13), (14), (15), (16), (17): Xaa is A or G
  MOD_RES (18), (19), (20), (21): Xaa is A or G or is absent

SEQ ID NO: 64779 - protein, 40 aa, Artificial Sequence; identical to SEQ ID NO: 26828
  GFR-binding peptide
  MOD_RES (34), (35): Xaa is C or S
  MOD_RES (12), (13), (14), (15), (16): Xaa is A or G
  MOD_RES (17), (18), (19), (20): Xaa is A or G or is absent

SEQ ID NO: 64780 - protein, 35 aa, Artificial Sequence; identical to SEQ ID NO: 26829
  GFR-binding peptide
  MOD_RES (2), (4): Xaa is C or S

SEQ ID NO: 64781 - protein, 36 aa, Artificial Sequence; identical to SEQ ID NO: 31788
  GFR-binding peptide
  MOD_RES (33), (34): Xaa is C or S
  MOD_RES (11), (12), (13), (14), (15): Xaa is A or G
  MOD_RES (16), (17), (18), (19): Xaa is A or G or is absent

SEQ ID NO: 64782 - protein, 38 aa, Artificial Sequence; identical to SEQ ID NO: 5707
  GFR-binding peptide
  MOD_RES (2), (4), (35), (36): Xaa is C or S

SEQ ID NO: 64783 - protein, 34 aa, Artificial Sequence; identical to SEQ ID NO: 26833
  GFR-binding peptide
  MOD_RES (2), (34): Xaa is C or S

SEQ ID NO: 64784 - protein, 37 aa, Artificial Sequence; identical to SEQ ID NO: 5711
  GFR-binding peptide
  MOD_RES (32), (33): Xaa is C or S

SEQ ID NO: 64785 - protein, 35 aa, Artificial Sequence; identical to SEQ ID NO: 31793
  GFR-binding peptide
  MOD_RES (1), (3): Xaa is C or S
  MOD_RES (14), (15), (16), (17), (18): Xaa is A or G
  MOD_RES (19), (20), (21), (22): Xaa is A or G or is absent

SEQ ID NO: 64786 - protein, 39 aa, Artificial Sequence; identical to SEQ ID NO: 5712
  GFR-binding peptide
  MOD_RES (2), (34), (35): Xaa is C or S

SEQ ID NO: 64787 - protein, 36 aa, Artificial Sequence; identical to SEQ ID NO: 5713
  GFR-binding peptide
  MOD_RES (2), (4): Xaa is C or S
  MOD_RES (15), (16), (17), (18), (19): Xaa is A or G
  MOD_RES (20), (21), (22), (23): Xaa is A or G or is absent

SEQ ID NO: 64788 - protein, 38 aa, Artificial Sequence
  GFR-binding peptide
  MOD_RES (2), (4), (36), (37): Xaa is C or S
RXAXSEVTMNRYKKLVVNKNEDFYLISIANMKEPVXXP

SEQ ID NO: 64789 - protein, 33 aa, Artificial Sequence
  GFR-binding peptide
  MOD_RES (1), (33): Xaa is C or S
XESVAMGRHKRLYTVVGKDYYLISTASLKTPVX

SEQ ID NO: 64790 - protein, 41 aa, Artificial Sequence; identical to SEQ ID NO: 5717
  GFR-binding peptide
  MOD_RES (2), (4), (39), (40): Xaa is C or S
  MOD_RES (17), (18), (19), (20), (21): Xaa is A or G
  MOD_RES (22), (23), (24), (25): Xaa is A or G or is absent

SEQ ID NO: 64791 - protein, 38 aa, Artificial Sequence; identical to SEQ ID NO: 26843
  GFR-binding peptide
  MOD_RES (1), (32), (33): Xaa is C or S

SEQ ID NO: 64792 - protein, 33 aa, Artificial Sequence; identical to SEQ ID NO: 5718
  GFR-binding peptide
  MOD_RES (33), (33): Xaa is C or S

SEQ ID NO: 64793 - protein, 35 aa, Artificial Sequence; identical to SEQ ID NO: 5719
  GFR-binding peptide
  MOD_RES (31), (32): Xaa is C or S

SEQ ID NO: 64794 - protein, 36 aa, Artificial Sequence; identical to SEQ ID NO: 5720
  GFR-binding peptide
  MOD_RES (2), (4), (36): Xaa is C or S

SEQ ID NO: 64795 - protein, 41 aa, Artificial Sequence
  GFR-binding peptide
  MOD_RES (2), (4), (36), (37): Xaa is C or S
SXGXRDVVMGYHYKLIIQQKDNKYLMSIPSMKTPTXXPGAS

SEQ ID NO: 64796 - protein, 43 aa, Artificial Sequence
  GFR-binding peptide
  MOD_RES (2), (4), (37), (38): Xaa is C or S
  MOD_RES (15), (16), (17), (18), (19): Xaa is A or G
  MOD_RES (20), (21), (22), (23): Xaa is A or G or is absent
SXKXSKVVMPIKGYXXXXXXXXXFYLINIPSLDQPVXXPSASA

SEQ ID NO: 64797 - protein, 37 aa, Artificial Sequence; identical to SEQ ID NO: 26850
  GFR-binding peptide
  MOD_RES (1), (35), (36): Xaa is C or S
  MOD_RES (13), (14), (15), (16), (17): Xaa is A or G
  MOD_RES (18), (19), (20), (21): Xaa is A or G or is absent

SEQ ID NO: 64798 - protein, 35 aa, Artificial Sequence; identical to SEQ ID NO: 31806
  GFR-binding peptide
  MOD_RES (33), (34): Xaa is C or S
  MOD_RES (11), (12), (13), (14), (15): Xaa is A or G
  MOD_RES (16), (17), (18), (19): Xaa is A or G or is absent

SEQ ID NO: 64799 - protein, 35 aa, Artificial Sequence
  GFR-binding peptide
  MOD_RES (31), (32): Xaa is C or S
SVAMGRHKRLYTVVGKDYYLISTASLKTPVXXAKS

SEQ ID NO: 64800 - protein, 32 aa, Artificial Sequence; identical to SEQ ID NO: 26851
  GFR-binding peptide
  MOD_RES (31), (31): Xaa is C or S

SEQ ID NO: 64801 - protein, 31 aa, Artificial Sequence; identical to SEQ ID NO: 5727
  GFR-binding peptide
  MOD_RES (31), (31): Xaa is C or S

SEQ ID NO: 64802 - protein, 35 aa, Artificial Sequence; identical to SEQ ID NO: 5728
  GFR-binding peptide
  MOD_RES (34), (35): Xaa is C or S
  MOD_RES (12), (13), (14), (15), (16): Xaa is A or G
  MOD_RES (17), (18), (19), (20): Xaa is A or G or is absent

SEQ ID NO: 64803 - protein, 40 aa, Artificial Sequence
  GFR-binding peptide
  MOD_RES (34), (35): Xaa is C or S
  MOD_RES (12), (13), (14), (15), (16): Xaa is A or G
  MOD_RES (17), (18), (19), (20): Xaa is A or G or is absent
RDVVMGYHYKLXXXXXXXXXKYLMSIPSMKTPTXXPGASG

SEQ ID NO: 64804 - protein, 40 aa, Artificial Sequence; identical to SEQ ID NO: 26856
  GFR-binding peptide
  MOD_RES (1), (3), (37), (38): Xaa is C or S
  MOD_RES (15), (16), (17), (18), (19): Xaa is A or G
  MOD_RES (20), (21), (22), (23): Xaa is A or G or is absent

SEQ ID NO: 64805 - protein, 41 aa, Artificial Sequence; identical to SEQ ID NO: 31812
  GFR-binding peptide
  MOD_RES (2), (36), (37): Xaa is C or S
  MOD_RES (14), (15), (16), (17), (18): Xaa is A or G
  MOD_RES (19), (20), (21), (22): Xaa is A or G or is absent

SEQ ID NO: 64806 - protein, 34 aa, Artificial Sequence; identical to SEQ ID NO: 5729
  GFR-binding peptide
  MOD_RES (1), (33), (34): Xaa is C or S

SEQ ID NO: 64807 - protein, 31 aa, Artificial Sequence; identical to SEQ ID NO: 26860
  GFR-binding peptide
  MOD_RES (31), (31): Xaa is C or S

SEQ ID NO: 64808 - protein, 35 aa, Artificial Sequence; identical to SEQ ID NO: 56776
  GFR-binding peptide
  MOD_RES (1), (3): Xaa is C or S
  MOD_RES (14), (15), (16), (17), (18): Xaa is A or G
  MOD_RES (19), (20), (21), (22): Xaa is A or G or is absent

SEQ ID NO: 64809 - protein, 38 aa, Artificial Sequence
  GFR-binding peptide
  MOD_RES (32), (33): Xaa is C or S
SEVTMNRYKKLVVNKNEDFYLISIANMKEPVXXPEPIG

SEQ ID NO: 64810 - protein, 37 aa, Artificial Sequence; identical to SEQ ID NO: 5732
  GFR-binding peptide
  MOD_RES (1), (34), (35): Xaa is C or S
  MOD_RES (12), (13), (14), (15), (16): Xaa is A or G
  MOD_RES (17), (18), (19), (20): Xaa is A or G or is absent

SEQ ID NO: 64811 - protein, 36 aa, Artificial Sequence; identical to SEQ ID NO: 31825
  GFR-binding peptide
  MOD_RES (1), (3): Xaa is C or S
  MOD_RES (15), (16), (17), (18), (19): Xaa is A or G
  MOD_RES (20), (21), (22), (23): Xaa is A or G or is absent

SEQ ID NO: 64812 - protein, 36 aa, Artificial Sequence; identical to SEQ ID NO: 26864
  GFR-binding peptide
  MOD_RES (2), (35), (36): Xaa is C or S
  MOD_RES (13), (14), (15), (16), (17): Xaa is A or G
  MOD_RES (18), (19), (20), (21): Xaa is A or G or is absent

SEQ ID NO: 64813 - protein, 39 aa, Artificial Sequence; identical to SEQ ID NO: 26865
  GFR-binding peptide
  MOD_RES (2), (4), (39): Xaa is C or S
  MOD_RES (17), (18), (19), (20), (21): Xaa is A or G
  MOD_RES (22), (23), (24), (25): Xaa is A or G or is absent

SEQ ID NO: 64814 - protein, 37 aa, Artificial Sequence; identical to SEQ ID NO: 31826
  GFR-binding peptide
  MOD_RES (2), (4): Xaa is C or S
  MOD_RES (16), (17), (18), (19), (20): Xaa is A or G
  MOD_RES (21), (22), (23), (24): Xaa is A or G or is absent

SEQ ID NO: 64815 - protein, 38 aa, Artificial Sequence
  GFR-binding peptide
  MOD_RES (1), (33), (34): Xaa is C or S
XESVAMGRHKRLYTVVGKDYYLISTASLKTPVXXAKSA

SEQ ID NO: 64816 - protein, 38 aa, Artificial Sequence; identical to SEQ ID NO: 31829
  GFR-binding peptide
  MOD_RES (2), (36), (37): Xaa is C or S
  MOD_RES (14), (15), (16), (17), (18): Xaa is A or G
  MOD_RES (19), (20), (21), (22): Xaa is A or G or is absent

SEQ ID NO: 64817 - protein, 38 aa, Artificial Sequence
  GFR-binding peptide
  MOD_RES (1), (34), (35): Xaa is C or S
  MOD_RES (12), (13), (14), (15), (16): Xaa is A or G
  MOD_RES (17), (18), (19), (20): Xaa is A or G or is absent
XEEVIMYHYKLXXXXXXXXXKYLMSIPSTKVPAXXTSP

SEQ ID NO: 64818 - protein, 42 aa, Artificial Sequence; identical to SEQ ID NO: 5737
  GFR-binding peptide
  MOD_RES (1), (3), (36), (37): Xaa is C or S

SEQ ID NO: 64819 - protein, 35 aa, Artificial Sequence; identical to SEQ ID NO: 26873
  GFR-binding peptide
  MOD_RES (1), (3): Xaa is C or S
  MOD_RES (14), (15), (16), (17), (18): Xaa is A or G
  MOD_RES (19), (20), (21), (22): Xaa is A or G or is absent

SEQ ID NO: 64820 - protein, 36 aa, Artificial Sequence; identical to SEQ ID NO: 5740
  GFR-binding peptide
  MOD_RES (33), (33): Xaa is C or S
  MOD_RES (11), (12), (13), (14), (15): Xaa is A or G
  MOD_RES (16), (17), (18), (19): Xaa is A or G or is absent

SEQ ID NO: 64821 - protein, 38 aa, Artificial Sequence; identical to SEQ ID NO: 26875
  GFR-binding peptide
  MOD_RES (2), (4), (38): Xaa is C or S
  MOD_RES (16), (17), (18), (19), (20): Xaa is A or G
  MOD_RES (21), (22), (23), (24): Xaa is A or G or is absent

SEQ ID NO: 64822 - protein, 36 aa, Artificial Sequence; identical to SEQ ID NO: 5741
  GFR-binding peptide
  MOD_RES (31), (32): Xaa is C or S

SEQ ID NO: 64823 - protein, 36 aa, Artificial Sequence; identical to SEQ ID NO: 26878
  GFR-binding peptide
  MOD_RES (1), (34), (35): Xaa is C or S

SEQ ID NO: 64824 - protein, 43 aa, Artificial Sequence; identical to SEQ ID NO: 5747
  GFR-binding peptide
  MOD_RES (2), (37), (38): Xaa is C or S
  MOD_RES (15), (16), (17), (18), (19): Xaa is A or G
  MOD_RES (20), (21), (22), (23): Xaa is A or G or is absent

SEQ ID NO: 64825 - protein, 36 aa, Artificial Sequence
  GFR-binding peptide
  MOD_RES (2), (4): Xaa is C or S
  MOD_RES (15), (16), (17), (18), (19): Xaa is A or G
  MOD_RES (20), (21), (22), (23): Xaa is A or G or is absent
LXGXEEVIMEYKFKXXXXXXXXXLYLMSIPETKVPA

SEQ ID NO: 64826 - protein, 42 aa, Artificial Sequence; identical to SEQ ID NO: 56793
  GFR-binding peptide
  MOD_RES (2), (4), (36), (37): Xaa is C or S

SEQ ID NO: 64827 - protein, 34 aa, Artificial Sequence; identical to SEQ ID NO: 5754
  GFR-binding peptide
  MOD_RES (31), (32): Xaa is C or S

SEQ ID NO: 64828 - protein, 38 aa, Artificial Sequence
  GFR-binding peptide
  MOD_RES (32), (33): Xaa is C or S
SEVVMDEYKFKVVNNASDLYLISIPELRTPVXXTPPTS

SEQ ID NO: 64829 - protein, 31 aa, Artificial Sequence
  GFR-binding peptide
  MOD_RES (1), (1): Xaa is C or S
XSKVIMPIKGYIKPTKGIFYLINIPSLDQSV

SEQ ID NO: 64830 - protein, 35 aa, Artificial Sequence; identical to SEQ ID NO: 5756
  GFR-binding peptide
  MOD_RES (2), (4): Xaa is C or S

SEQ ID NO: 64831 - protein, 36 aa, Artificial Sequence; identical to SEQ ID NO: 26888
  GFR-binding peptide
  MOD_RES (35), (36): Xaa is C or S
  MOD_RES (13), (14), (15), (16), (17): Xaa is A or G
  MOD_RES (18), (19), (20), (21): Xaa is A or G or is absent

SEQ ID NO: 64832 - protein, 38 aa, Artificial Sequence; identical to SEQ ID NO: 5759
  GFR-binding peptide
  MOD_RES (1), (35), (36): Xaa is C or S
  MOD_RES (13), (14), (15), (16), (17): Xaa is A or G
  MOD_RES (18), (19), (20), (21): Xaa is A or G or is absent

SEQ ID NO: 64833 - protein, 38 aa, Artificial Sequence; identical to SEQ ID NO: 5764
  GFR-binding peptide
  MOD_RES (1), (34), (35): Xaa is C or S
  MOD_RES (12), (13), (14), (15), (16): Xaa is A or G
  MOD_RES (17), (18), (19), (20): Xaa is A or G or is absent

SEQ ID NO: 64834 - protein, 43 aa, Artificial Sequence; identical to SEQ ID NO: 26895
  GFR-binding peptide
  MOD_RES (1), (3), (37), (38): Xaa is C or S
  MOD_RES (15), (16), (17), (18), (19): Xaa is A or G
  MOD_RES (20), (21), (22), (23): Xaa is A or G or is absent

SEQ ID NO: 64835 - protein, 39 aa, Artificial Sequence
  GFR-binding peptide
  MOD_RES (2), (4), (38), (39): Xaa is C or S
  MOD_RES (16), (17), (18), (19), (20): Xaa is A or G
  MOD_RES (21), (22), (23), (24): Xaa is A or G or is absent
RXAXSEVTMNEYKFKXXXXXXXXXLYLISIPEMKEPVXX

SEQ ID NO: 64836 - protein, 39 aa, Artificial Sequence; identical to SEQ ID NO: 26901
  GFR-binding peptide
  MOD_RES (2), (34), (35): Xaa is C or S

SEQ ID NO: 64837 - protein, 40 aa, Artificial Sequence
  GFR-binding peptide
  MOD_RES (1), (34), (35): Xaa is C or S
  MOD_RES (12), (13), (14), (15), (16): Xaa is A or G
  MOD_RES (17), (18), (19), (20): Xaa is A or G or is absent
XEEVIMYHYKLXXXXXXXXXKYLMSIPSTKVPAXXTSPVR

SEQ ID NO: 64838 - protein, 35 aa, Artificial Sequence; identical to SEQ ID NO: 26902
  GFR-binding peptide
  MOD_RES (1), (33), (34): Xaa is C or S

SEQ ID NO: 64839 - protein, 30 aa, Artificial Sequence; identical to SEQ ID NO: 26905
  GFR-binding peptide

SEQ ID NO: 64840 - protein, 36 aa, Artificial Sequence; identical to SEQ ID NO: 26906
  GFR-binding peptide
  MOD_RES (2), (33), (34): Xaa is C or S

SEQ ID NO: 64841 - protein, 42 aa, Artificial Sequence
  GFR-binding peptide
  MOD_RES (2), (36), (37): Xaa is C or S
  MOD_RES (14), (15), (16), (17), (18): Xaa is A or G
  MOD_RES (19), (20), (21), (22): Xaa is A or G or is absent
AXSEVTMNRHKRLXXXXXXXXXYYLISTASMKEPVXXPEPIG

SEQ ID NO: 64842 - protein, 32 aa, Artificial Sequence; identical to SEQ ID NO: 31871
  GFR-binding peptide
  MOD_RES (11), (12), (13), (14), (15): Xaa is A or G
  MOD_RES (16), (17), (18), (19): Xaa is A or G or is absent

SEQ ID NO: 64843 - protein, 36 aa, Artificial Sequence; identical to SEQ ID NO: 5768
  GFR-binding peptide
  MOD_RES (1), (32), (33): Xaa is C or S

SEQ ID NO: 64844 - protein, 34 aa, Artificial Sequence; identical to SEQ ID NO: 5769
  GFR-binding peptide
  MOD_RES (1), (33), (34): Xaa is C or S

SEQ ID NO: 64845 - protein, 38 aa, Artificial Sequence
  GFR-binding peptide
  MOD_RES (1), (3), (37), (38): Xaa is C or S
  MOD_RES (15), (16), (17), (18), (19): Xaa is A or G
  MOD_RES (20), (21), (22), (23): Xaa is A or G or is absent
XAXSEVTMNPIKGYXXXXXXXXXFYLINIPSMKEPVXX

SEQ ID NO: 64846 - protein, 37 aa, Artificial Sequence
  GFR-binding peptide
  MOD_RES (1), (3), (36), (37): Xaa is C or S
  MOD_RES (14), (15), (16), (17), (18): Xaa is A or G
  MOD_RES (19), (20), (21), (22): Xaa is A or G or is absent
XKXSRVIMPIKGYXXXXXXXXXFYLINIPSLAQPVXX

SEQ ID NO: 64847 - protein, 44 aa, Artificial Sequence; identical to SEQ ID NO: 31873
  GFR-binding peptide
  MOD_RES (2), (4), (38), (39): Xaa is C or S
  MOD_RES (16), (17), (18), (19), (20): Xaa is A or G
  MOD_RES (21), (22), (23), (24): Xaa is A or G or is absent

SEQ ID NO: 64848 - protein, 36 aa, Artificial Sequence; identical to SEQ ID NO: 5774
  GFR-binding peptide
  MOD_RES (2), (35), (36): Xaa is C or S

SEQ ID NO: 64849 - protein, 34 aa, Artificial Sequence; identical to SEQ ID NO: 5775
  GFR-binding peptide
  MOD_RES (2), (2): Xaa is C or S
  MOD_RES (13), (14), (15), (16), (17): Xaa is A or G
  MOD_RES (18), (19), (20), (21): Xaa is A or G or is absent

SEQ ID NO: 64850 - protein, 41 aa, Artificial Sequence; identical to SEQ ID NO: 5777
  GFR-binding peptide
  MOD_RES (2), (4), (37), (38): Xaa is C or S

SEQ ID NO: 64851 - protein, 42 aa, Artificial Sequence
  GFR-binding peptide
  MOD_RES (1), (3), (37), (38): Xaa is C or S
  MOD_RES (15), (16), (17), (18), (19): Xaa is A or G
  MOD_RES (20), (21), (22), (23): Xaa is A or G or is absent
XGXAEVVMDRHKRLXXXXXXXXXYYLISTASLRAPVXXSAPA

SEQ ID NO: 64852 - protein, 36 aa, Artificial Sequence; identical to SEQ ID NO: 26916
  GFR-binding peptide
  MOD_RES (1), (34), (35): Xaa is C or S
  MOD_RES (12), (13), (14), (15), (16): Xaa is A or G
  MOD_RES (17), (18), (19), (20): Xaa is A or G or is absent

SEQ ID NO: 64853 - protein, 33 aa, Artificial Sequence
  GFR-binding peptide
  MOD_RES (2), (2): Xaa is C or S
GXSEVVMDRHKRLVVNNASDYYLISTASLRTPV

SEQ ID NO: 64854 - protein, 38 aa, Artificial Sequence; identical to SEQ ID NO: 31882
  GFR-binding peptide
  MOD_RES (2), (4), (38): Xaa is C or S
  MOD_RES (16), (17), (18), (19), (20): Xaa is A or G
  MOD_RES (21), (22), (23), (24): Xaa is A or G or is absent

SEQ ID NO: 64855 - protein, 35 aa, Artificial Sequence; identical to SEQ ID NO: 5780
  GFR-binding peptide
  MOD_RES (2), (33), (34): Xaa is C or S

SEQ ID NO: 64856 - protein, 35 aa, Artificial Sequence; identical to SEQ ID NO: 31886
  GFR-binding peptide
  MOD_RES (2), (4): Xaa is C or S

SEQ ID NO: 64857 - protein, 32 aa, Artificial Sequence; identical to SEQ ID NO: 5783
  GFR-binding peptide
  MOD_RES (1), (32): Xaa is C or S

SEQ ID NO: 64858 - protein, 30 aa, Artificial Sequence
  GFR-binding peptide
SKVVMPIKGYVKPTRGVFYLINIPSLDQPV

SEQ ID NO: 64859 - protein, 36 aa, Artificial Sequence; identical to SEQ ID NO: 56828
  GFR-binding peptide
  MOD_RES (1), (3), (35), (36): Xaa is C or S

SEQ ID NO: 64860 - protein, 36 aa, Artificial Sequence; identical to SEQ ID NO: 26921
  GFR-binding peptide
  MOD_RES (1), (3), (35), (36): Xaa is C or S

SEQ ID NO: 64861 - protein, 36 aa, Artificial Sequence; identical to SEQ ID NO: 5786
  GFR-binding peptide
  MOD_RES (2), (34), (35): Xaa is C or S

SEQ ID NO: 64862 - protein, 36 aa, Artificial Sequence; identical to SEQ ID NO: 5788
  GFR-binding peptide
  MOD_RES (34), (35): Xaa is C or S
  MOD_RES (12), (13), (14), (15), (16): Xaa is A or G
  MOD_RES (17), (18), (19), (20): Xaa is A or G or is absent

SEQ ID NO: 64863 - protein, 33 aa, Artificial Sequence; identical to SEQ ID NO: 26927
  GFR-binding peptide
  MOD_RES (1), (1): Xaa is C or S
  MOD_RES (12), (13), (14), (15), (16): Xaa is A or G
  MOD_RES (17), (18), (19), (20): Xaa is A or G or is absent

SEQ ID NO: 64864 - protein, 33 aa, Artificial Sequence; identical to SEQ ID NO: 5789
  GFR-binding peptide
  MOD_RES (1), (1): Xaa is C or S
  MOD_RES (12), (13), (14), (15), (16): Xaa is A or G
  MOD_RES (17), (18), (19), (20): Xaa is A or G or is absent

SEQ ID NO: 64865 - protein, 38 aa, Artificial Sequence; identical to SEQ ID NO: 26928
  GFR-binding peptide
  MOD_RES (2), (4), (35), (36): Xaa is C or S

SEQ ID NO: 64866 - protein, 39 aa, Artificial Sequence; identical to SEQ ID NO: 5793
  GFR-binding peptide
  MOD_RES (1), (33), (34): Xaa is C or S

SEQ ID NO: 64867 - protein, 39 aa, Artificial Sequence
  GFR-binding peptide
  MOD_RES (33), (34): Xaa is C or S
  MOD_RES (11), (12), (13), (14), (15): Xaa is A or G
  MOD_RES (16), (17), (18), (19): Xaa is A or G or is absent
EVVMDYHYKLXXXXXXXXXKYLISIPSLRTPVXXTPPTS

SEQ ID NO: 64868 - protein, 39 aa, Artificial Sequence
  GFR-binding peptide
  MOD_RES (2), (4), (36), (37): Xaa is C or S
RXAXSEVTMNPIKGYVVNKNEDFYLINIPSMKEPVXXPE

SEQ ID NO: 64869 - protein, 38 aa, Artificial Sequence
  GFR-binding peptide
  MOD_RES (33), (34): Xaa is C or S
  MOD_RES (11), (12), (13), (14), (15): Xaa is A or G
  MOD_RES (16), (17), (18), (19): Xaa is A or G or is absent
EVTMNYHYKLXXXXXXXXXKYLISIPSMKEPVXXPEPI

SEQ ID NO: 64870 - protein, 34 aa, Artificial Sequence; identical to SEQ ID NO: 5796
  GFR-binding peptide
  MOD_RES (33), (34): Xaa is C or S
  MOD_RES (11), (12), (13), (14), (15): Xaa is A or G
  MOD_RES (16), (17), (18), (19): Xaa is A or G or is absent

SEQ ID NO: 64871 - protein, 36 aa, Artificial Sequence; identical to SEQ ID NO: 31901
  GFR-binding peptide
  MOD_RES (1), (36): Xaa is C or S
  MOD_RES (14), (15), (16), (17), (18): Xaa is A or G
  MOD_RES (19), (20), (21), (22): Xaa is A or G or is absent

SEQ ID NO: 64872 - protein, 42 aa, Artificial Sequence; identical to SEQ ID NO: 26934
  GFR-binding peptide
  MOD_RES (2), (4), (38), (39): Xaa is C or S
  MOD_RES (16), (17), (18), (19), (20): Xaa is A or G
  MOD_RES (21), (22), (23), (24): Xaa is A or G or is absent

SEQ ID NO: 64873 - protein, 34 aa, Artificial Sequence; identical to SEQ ID NO: 31913
  GFR-binding peptide
  MOD_RES (1), (3): Xaa is C or S

SEQ ID NO: 64874 - protein, 41 aa, Artificial Sequence; identical to SEQ ID NO: 13238
  GFR-binding peptide
  MOD_RES (1), (3), (35), (36): Xaa is C or S

SEQ ID NO: 64875 - protein, 34 aa, Artificial Sequence; identical to SEQ ID NO: 5806
  GFR-binding peptide
  MOD_RES (1), (3): Xaa is C or S

SEQ ID NO: 64876 - protein, 39 aa, Artificial Sequence
  GFR-binding peptide
  MOD_RES (1), (33), (34): Xaa is C or S
XAEVVMDRHKRLVVNNAADYYLISTASLRAPVXXSAPAA

SEQ ID NO: 64877 - protein, 39 aa, Artificial Sequence
  GFR-binding peptide
  MOD_RES (2), (4), (38), (39): Xaa is C or S
  MOD_RES (16), (17), (18), (19), (20): Xaa is A or G
  MOD_RES (21), (22), (23), (24): Xaa is A or G or is absent
RXAXSEVTMNRHKRLXXXXXXXXXYYLISTASMKEPVXX

SEQ ID NO: 64878 - protein, 30 aa, Artificial Sequence
  GFR-binding peptide
EVVMDRHKRLVVNNASDYYLISTASLRTPV

SEQ ID NO: 64879 - protein, 38 aa, Artificial Sequence; identical to SEQ ID NO: 5808
  GFR-binding peptide
  MOD_RES (1), (3), (36), (37): Xaa is C or S
  MOD_RES (14), (15), (16), (17), (18): Xaa is A or G
  MOD_RES (19), (20), (21), (22): Xaa is A or G or is absent

SEQ ID NO: 64880 - protein, 37 aa, Artificial Sequence; identical to SEQ ID NO: 5809
  GFR-binding peptide
  MOD_RES (34), (34): Xaa is C or S
  MOD_RES (12), (13), (14), (15), (16): Xaa is A or G
  MOD_RES (17), (18), (19), (20): Xaa is A or G or is absent

SEQ ID NO: 64881 - protein, 40 aa, Artificial Sequence; identical to SEQ ID NO: 31918
  GFR-binding peptide
  MOD_RES (2), (36): Xaa is C or S
  MOD_RES (14), (15), (16), (17), (18): Xaa is A or G
  MOD_RES (19), (20), (21), (22): Xaa is A or G or is absent

SEQ ID NO: 64882 - protein, 39 aa, Artificial Sequence; identical to SEQ ID NO: 5812
  GFR-binding peptide
  MOD_RES (1), (33), (34): Xaa is C or S

SEQ ID NO: 64883 - protein, 39 aa, Artificial Sequence
  GFR-binding peptide
  MOD_RES (1), (3), (36), (37): Xaa is C or S
  MOD_RES (14), (15), (16), (17), (18): Xaa is A or G
  MOD_RES (19), (20), (21), (22): Xaa is A or G or is absent
XGXEEVIMYHYKLXXXXXXXXXKYLMSIPSTKVPAXXTS

SEQ ID NO: 64884 - protein, 39 aa, Artificial Sequence
  GFR-binding peptide
  MOD_RES (1), (33), (34): Xaa is C or S
XRDVVMGRHKRLIIQQKDNYYLMSTASMKTPTXXPGASG

SEQ ID NO: 64885 - protein, 39 aa, Artificial Sequence; identical to SEQ ID NO: 5820
  GFR-binding peptide
  MOD_RES (2), (36), (37): Xaa is C or S
  MOD_RES (14), (15), (16), (17), (18): Xaa is A or G
  MOD_RES (19), (20), (21), (22): Xaa is A or G or is absent

SEQ ID NO: 64886 - protein, 42 aa, Artificial Sequence
  GFR-binding peptide
  MOD_RES (2), (4), (36), (37): Xaa is C or S
RXAXSEVTMNRYKKLVVNKNEDFYLISIANMKEPVXXPEPIG

SEQ ID NO: 64887 - protein, 34 aa, Artificial Sequence
  GFR-binding peptide
  MOD_RES (31), (32): Xaa is C or S
EVVMDEYKFKVVNNASDLYLISIPELRTPVXXTP

SEQ ID NO: 64888 - protein, 40 aa, Artificial Sequence; identical to SEQ ID NO: 5825
  GFR-binding peptide
  MOD_RES (2), (4), (36), (37): Xaa is C or S

SEQ ID NO: 64889 - protein, 33 aa, Artificial Sequence; identical to SEQ ID NO: 56875
  GFR-binding peptide
  MOD_RES (31), (32): Xaa is C or S

SEQ ID NO: 64890 - protein, 35 aa, Artificial Sequence; identical to SEQ ID NO: 26955
  GFR-binding peptide
  MOD_RES (1), (35): Xaa is C or S
  MOD_RES (13), (14), (15), (16), (17): Xaa is A or G
  MOD_RES (18), (19), (20), (21): Xaa is A or G or is absent

SEQ ID NO: 64891 - protein, 32 aa, Artificial Sequence
  GFR-binding peptide
  MOD_RES (31), (32): Xaa is C or S
EVTMNYHYKLVVNKNEDKYLISIPSMKEPVXX

SEQ ID NO: 64892 - protein, 38 aa, Artificial Sequence
  GFR-binding peptide
  MOD_RES (2), (34), (35): Xaa is C or S
GXRDVVMGYHYKLIIQQKDNKYLMSIPSMKTPTXXPGA

SEQ ID NO: 64893 - protein, 43 aa, Artificial Sequence; identical to SEQ ID NO: 56884
  GFR-binding peptide
  MOD_RES (2), (4), (38), (39): Xaa is C or S
  MOD_RES (16), (17), (18), (19), (20): Xaa is A or G
  MOD_RES (21), (22), (23), (24): Xaa is A or G or is absent

SEQ ID NO: 64894 - protein, 42 aa, Artificial Sequence
  GFR-binding peptide
  MOD_RES (2), (36), (37): Xaa is C or S
  MOD_RES (14), (15), (16), (17), (18): Xaa is A or G
  MOD_RES (19), (20), (21), (22): Xaa is A or G or is absent
GXSRVVMNRHKRLXXXXXXXXXYYLVSTASLKTPAXXPKPVH

SEQ ID NO: 64895 - protein, 36 aa, Artificial Sequence; identical to SEQ ID NO: 5831
  GFR-binding peptide
  MOD_RES (2), (2): Xaa is C or S
  MOD_RES (15), (16), (17), (18), (19): Xaa is A or G
  MOD_RES (20), (21), (22), (23): Xaa is A or G or is absent

SEQ ID NO: 64896 - protein, 36 aa, Artificial Sequence; identical to SEQ ID NO: 31932
  GFR-binding peptide
  MOD_RES (1), (3), (34), (35): Xaa is C or S

SEQ ID NO: 64897 - protein, 34 aa, Artificial Sequence; identical to SEQ ID NO: 5832
  GFR-binding peptide
  MOD_RES (2), (34): Xaa is C or S

SEQ ID NO: 64898 - protein, 33 aa, Artificial Sequence; identical to SEQ ID NO: 31934
  GFR-binding peptide
  MOD_RES (31), (32): Xaa is C or S

SEQ ID NO: 64899 - protein, 35 aa, Artificial Sequence; identical to SEQ ID NO: 26960
  GFR-binding peptide
  MOD_RES (32), (33): Xaa is C or S

SEQ ID NO: 64900 - protein, 30 aa, Artificial Sequence; identical to SEQ ID NO: 31940
  GFR-binding peptide

SEQ ID NO: 64901 - protein, 34 aa, Artificial Sequence; identical to SEQ ID NO: 13270
  GFR-binding peptide
  MOD_RES (34), (34): Xaa is C or S
  MOD_RES (12), (13), (14), (15), (16): Xaa is A or G
  MOD_RES (17), (18), (19), (20): Xaa is A or G or is absent

SEQ ID NO: 64902 - protein, 43 aa, Artificial Sequence; identical to SEQ ID NO: 26965
  GFR-binding peptide
  MOD_RES (1), (3), (37): Xaa is C or S
  MOD_RES (15), (16), (17), (18), (19): Xaa is A or G
  MOD_RES (20), (21), (22), (23): Xaa is A or G or is absent

SEQ ID NO: 64903 - protein, 37 aa, Artificial Sequence; identical to SEQ ID NO: 5842
  GFR-binding peptide
  MOD_RES (2), (4), (36), (37): Xaa is C or S

SEQ ID NO: 64904 - protein, 39 aa, Artificial Sequence; identical to SEQ ID NO: 13275
  GFR-binding peptide
  MOD_RES (1), (33), (34): Xaa is C or S

SEQ ID NO: 64905 - protein, 40 aa, Artificial Sequence; identical to SEQ ID NO: 31949
  GFR-binding peptide
  MOD_RES (1), (34), (35): Xaa is C or S

SEQ ID NO: 64906 - protein, 36 aa, Artificial Sequence; identical to SEQ ID NO: 26969
  GFR-binding peptide
  MOD_RES (1), (3), (35), (36): Xaa is C or S

SEQ ID NO: 64907 - protein, 36 aa, Artificial Sequence; identical to SEQ ID NO: 5844
  GFR-binding peptide
  MOD_RES (1), (3), (35), (36): Xaa is C or S

SEQ ID NO: 64908 - protein, 31 aa, Artificial Sequence
  GFR-binding peptide
  MOD_RES (31), (31): Xaa is C or S
EVTMNYHYKLVVNKNEDKYLISIPSMKEPVX

SEQ ID NO: 64909 - protein, 40 aa, Artificial Sequence; identical to SEQ ID NO: 26972
  GFR-binding peptide
  MOD_RES (34), (35): Xaa is C or S
  MOD_RES (12), (13), (14), (15), (16): Xaa is A or G
  MOD_RES (17), (18), (19), (20): Xaa is A or G or is absent

SEQ ID NO: 64910 - protein, 35 aa, Artificial Sequence; identical to SEQ ID NO: 5848
  GFR-binding peptide
  MOD_RES (2), (33), (34): Xaa is C or S

SEQ ID NO: 64911 - protein, 39 aa, Artificial Sequence; identical to SEQ ID NO: 5849
  GFR-binding peptide
  MOD_RES (2), (34), (35): Xaa is C or S

SEQ ID NO: 64912 - protein, 34 aa, Artificial Sequence
  GFR-binding peptide
  MOD_RES (33), (34): Xaa is C or S
  MOD_RES (11), (12), (13), (14), (15): Xaa is A or G
  MOD_RES (16), (17), (18), (19): Xaa is A or G or is absent
SKVVMPIKGYXXXXXXXXXFYLINIPSLDQPVXX

SEQ ID NO: 64913 - protein, 34 aa, Artificial Sequence; identical to SEQ ID NO: 5851
  GFR-binding peptide
  MOD_RES (34), (34): Xaa is C or S
  MOD_RES (12), (13), (14), (15), (16): Xaa is A or G
  MOD_RES (17), (18), (19), (20): Xaa is A or G or is absent

SEQ ID NO: 64914 - protein, 42 aa, Artificial Sequence; identical to SEQ ID NO: 26977
  GFR-binding peptide
  MOD_RES (1), (3), (37), (38): Xaa is C or S
  MOD_RES (15), (16), (17), (18), (19): Xaa is A or G
  MOD_RES (20), (21), (22), (23): Xaa is A or G or is absent

SEQ ID NO: 64915 - protein, 35 aa, Artificial Sequence
  GFR-binding peptide
  MOD_RES (2), (4): Xaa is C or S
RXAXSEVTMNRYKKLVVNKNEDFYLISIANMKEPV

SEQ ID NO: 64916 - protein, 41 aa, Artificial Sequence
  GFR-binding peptide
  MOD_RES (2), (4), (36), (37): Xaa is C or S
RXAXSEVTMNEYKFKVVNKNEDLYLISIPEMKEPVXXPEPI

SEQ ID NO: 64917 - protein, 39 aa, Artificial Sequence; identical to SEQ ID NO: 31957
  GFR-binding peptide
  MOD_RES (2), (36), (37): Xaa is C or S
  MOD_RES (14), (15), (16), (17), (18): Xaa is A or G
  MOD_RES (19), (20), (21), (22): Xaa is A or G or is absent

SEQ ID NO: 64918 - protein, 33 aa, Artificial Sequence
  GFR-binding peptide
  MOD_RES (1), (3): Xaa is C or S
XKXSKVVMPIKGYVKPTRGVFYLINIPSLDQPV

SEQ ID NO: 64919 - protein, 37 aa, Artificial Sequence; identical to SEQ ID NO: 5853
  GFR-binding peptide
  MOD_RES (32), (33): Xaa is C or S

SEQ ID NO: 64920 - protein, 38 aa, Artificial Sequence; identical to SEQ ID NO: 5854
  GFR-binding peptide
  MOD_RES (33), (34): Xaa is C or S
  MOD_RES (11), (12), (13), (14), (15): Xaa is A or G
  MOD_RES (16), (17), (18), (19): Xaa is A or G or is absent

SEQ ID NO: 64921 - protein, 36 aa, Artificial Sequence; identical to SEQ ID NO: 5855
  GFR-binding peptide
  MOD_RES (2), (4): Xaa is C or S
  MOD_RES (15), (16), (17), (18), (19): Xaa is A or G
  MOD_RES (20), (21), (22), (23): Xaa is A or G or is absent

SEQ ID NO: 64922 - protein, 39 aa, Artificial Sequence; identical to SEQ ID NO: 5856
  GFR-binding peptide
  MOD_RES (2), (33), (34): Xaa is C or S

SEQ ID NO: 64923 - protein, 33 aa, Artificial Sequence; identical to SEQ ID NO: 5857
  GFR-binding peptide
  MOD_RES (33), (33): Xaa is C or S

SEQ ID NO: 64924 - protein, 37 aa, Artificial Sequence; identical to SEQ ID NO: 26986
  GFR-binding peptide
  MOD_RES (32), (33): Xaa is C or S

SEQ ID NO: 64925 - protein, 39 aa, Artificial Sequence; identical to SEQ ID NO: 31965
  GFR-binding peptide
  MOD_RES (33), (34): Xaa is C or S
  MOD_RES (11), (12), (13), (14), (15): Xaa is A or G
  MOD_RES (16), (17), (18), (19): Xaa is A or G or is absent

SEQ ID NO: 64926 - protein, 34 aa, Artificial Sequence
  GFR-binding peptide
  MOD_RES (1), (32), (33): Xaa is C or S
XEEVIMYHYKLLLVRGNDKYLMSIPSTKVPAXXT

SEQ ID NO: 64927 - protein, 37 aa, Artificial Sequence; identical to SEQ ID NO: 5861
  GFR-binding peptide
  MOD_RES (31), (32): Xaa is C or S

SEQ ID NO: 64928 - protein, 41 aa, Artificial Sequence; identical to SEQ ID NO: 5862
  GFR-binding peptide
  MOD_RES (1), (3), (37), (38): Xaa is C or S
  MOD_RES (15), (16), (17), (18), (19): Xaa is A or G
  MOD_RES (20), (21), (22), (23): Xaa is A or G or is absent

SEQ ID NO: 64929 - protein, 34 aa, Artificial Sequence; identical to SEQ ID NO: 31968
  GFR-binding peptide
  MOD_RES (33), (33): Xaa is C or S
  MOD_RES (11), (12), (13), (14), (15): Xaa is A or G
  MOD_RES (16), (17), (18), (19): Xaa is A or G or is absent

SEQ ID NO: 64930 - protein, 37 aa, Artificial Sequence; identical to SEQ ID NO: 5864
  GFR-binding peptide
  MOD_RES (2), (4), (35), (36): Xaa is C or S

SEQ ID NO: 64931 - protein, 37 aa, Artificial Sequence; identical to SEQ ID NO: 26993
  GFR-binding peptide
  MOD_RES (33), (34): Xaa is C or S
  MOD_RES (11), (12), (13), (14), (15): Xaa is A or G
  MOD_RES (16), (17), (18), (19): Xaa is A or G or is absent

SEQ ID NO: 64932 - protein, 40 aa, Artificial Sequence; identical to SEQ ID NO: 5868
  GFR-binding peptide
  MOD_RES (2), (4), (38), (39): Xaa is C or S
  MOD_RES (16), (17), (18), (19), (20): Xaa is A or G
  MOD_RES (21), (22), (23), (24): Xaa is A or G or is absent

SEQ ID NO: 64933 - protein, 37 aa, Artificial Sequence
  GFR-binding peptide
  MOD_RES (2), (4), (37): Xaa is C or S
  MOD_RES (15), (16), (17), (18), (19): Xaa is A or G
  MOD_RES (20), (21), (22), (23): Xaa is A or G or is absent
LXGXEEVIMRHKRLXXXXXXXXXYYLMSTASTKVPAX

SEQ ID NO: 64934 - protein, 43 aa, Artificial Sequence
  GFR-binding peptide
  MOD_RES (2), (4), (38), (39): Xaa is C or S
  MOD_RES (16), (17), (18), (19), (20): Xaa is A or G
  MOD_RES (21), (22), (23), (24): Xaa is A or G or is absent
RXAXSEVTMNYHYKLXXXXXXXXXKYLISIPSMKEPVXXPEPI

SEQ ID NO: 64935 - protein, 33 aa, Artificial Sequence; identical to SEQ ID NO: 56924
  GFR-binding peptide
  MOD_RES (2), (2): Xaa is C or S

SEQ ID NO: 64936 - protein, 37 aa, Artificial Sequence; identical to SEQ ID NO: 26996
  GFR-binding peptide
  MOD_RES (2), (37): Xaa is C or S
  MOD_RES (15), (16), (17), (18), (19): Xaa is A or G
  MOD_RES (20), (21), (22), (23): Xaa is A or G or is absent

SEQ ID NO: 64937 - protein, 33 aa, Artificial Sequence; identical to SEQ ID NO: 26997
  GFR-binding peptide
  MOD_RES (31), (32): Xaa is C or S

SEQ ID NO: 64938 - protein, 37 aa, Artificial Sequence
  GFR-binding peptide
  MOD_RES (32), (33): Xaa is C or S
AEVVMDRHKRLVVNNAADYYLISTASLRAPVXXSAPA

SEQ ID NO: 64939 - protein, 33 aa, Artificial Sequence; identical to SEQ ID NO: 31975
  GFR-binding peptide
  MOD_RES (12), (13), (14), (15), (16): Xaa is A or G
  MOD_RES (17), (18), (19), (20): Xaa is A or G or is absent

SEQ ID NO: 64940 - protein, 32 aa, Artificial Sequence; identical to SEQ ID NO: 5873
  GFR-binding peptide
  MOD_RES (31), (32): Xaa is C or S

SEQ ID NO: 64941 - protein, 40 aa, Artificial Sequence
  GFR-binding peptide
  MOD_RES (1), (3), (37), (38): Xaa is C or S
  MOD_RES (15), (16), (17), (18), (19): Xaa is A or G
  MOD_RES (20), (21), (22), (23): Xaa is A or G or is absent
XGXSEVVMDYHYKLXXXXXXXXXKYLISIPSLRTPVXXTP

SEQ ID NO: 64942 - protein, 41 aa, Artificial Sequence; identical to SEQ ID NO: 31978
  GFR-binding peptide
  MOD_RES (2), (36), (37): Xaa is C or S
  MOD_RES (14), (15), (16), (17), (18): Xaa is A or G
  MOD_RES (19), (20), (21), (22): Xaa is A or G or is absent

SEQ ID NO: 64943 - protein, 38 aa, Artificial Sequence; identical to SEQ ID NO: 5876
  GFR-binding peptide
  MOD_RES (1), (33), (34): Xaa is C or S

SEQ ID NO: 64944 - protein, 40 aa, Artificial Sequence
  GFR-binding peptide
  MOD_RES (1), (35), (36): Xaa is C or S
  MOD_RES (13), (14), (15), (16), (17): Xaa is A or G
  MOD_RES (18), (19), (20), (21): Xaa is A or G or is absent
XSEVTMNEYKFKXXXXXXXXXLYLISIPEMKEPVXXPEPI

SEQ ID NO: 64945 - protein, 32 aa, Artificial Sequence; identical to SEQ ID NO: 27005
  GFR-binding peptide
  MOD_RES (32), (32): Xaa is C or S

SEQ ID NO: 64946 - protein, 34 aa, Artificial Sequence; identical to SEQ ID NO: 5878
  GFR-binding peptide
  MOD_RES (1), (1): Xaa is C or S
  MOD_RES (13), (14), (15), (16), (17): Xaa is A or G
  MOD_RES (18), (19), (20), (21): Xaa is A or G or is absent

SEQ ID NO: 64947 - protein, 39 aa, Artificial Sequence; identical to SEQ ID NO: 5881
  GFR-binding peptide
  MOD_RES (1), (34), (35): Xaa is C or S
  MOD_RES (12), (13), (14), (15), (16): Xaa is A or G
  MOD_RES (17), (18), (19), (20): Xaa is A or G or is absent

SEQ ID NO: 64948 - protein, 38 aa, Artificial Sequence; identical to SEQ ID NO: 31985
  GFR-binding peptide
  MOD_RES (2), (35), (36): Xaa is C or S
  MOD_RES (13), (14), (15), (16), (17): Xaa is A or G
  MOD_RES (18), (19), (20), (21): Xaa is A or G or is absent

SEQ ID NO: 64949 - protein, 36 aa, Artificial Sequence; identical to SEQ ID NO: 5886
  GFR-binding peptide
  MOD_RES (2), (4), (36): Xaa is C or S

SEQ ID NO: 64950 - protein, 41 aa, Artificial Sequence; identical to SEQ ID NO: 13317
  GFR-binding peptide
  MOD_RES (1), (3), (37), (38): Xaa is C or S
  MOD_RES (15), (16), (17), (18), (19): Xaa is A or G
  MOD_RES (20), (21), (22), (23): Xaa is A or G or is absent

SEQ ID NO: 64951 - protein, 37 aa, Artificial Sequence; identical to SEQ ID NO: 5892
  GFR-binding peptide
  MOD_RES (2), (33), (34): Xaa is C or S

SEQ ID NO: 64952 - protein, 40 aa, Artificial Sequence; identical to SEQ ID NO: 56949
  GFR-binding peptide
  MOD_RES (1), (34), (35): Xaa is C or S
  MOD_RES (12), (13), (14), (15), (16): Xaa is A or G
  MOD_RES (17), (18), (19), (20): Xaa is A or G or is absent

SEQ ID NO: 64953 - protein, 33 aa, Artificial Sequence; identical to SEQ ID NO: 5893
  GFR-binding peptide
  MOD_RES (1), (32), (33): Xaa is C or S

SEQ ID NO: 64954 - protein, 36 aa, Artificial Sequence; identical to SEQ ID NO: 27015
  GFR-binding peptide
  MOD_RES (1), (35), (36): Xaa is C or S
  MOD_RES (13), (14), (15), (16), (17): Xaa is A or G
  MOD_RES (18), (19), (20), (21): Xaa is A or G or is absent

SEQ ID NO: 64955 - protein, 44 aa, Artificial Sequence; identical to SEQ ID NO: 5895
  GFR-binding peptide
  MOD_RES (2), (4), (38), (39): Xaa is C or S
  MOD_RES (16), (17), (18), (19), (20): Xaa is A or G
  MOD_RES (21), (22), (23), (24): Xaa is A or G or is absent

SEQ ID NO: 64956 - protein, 38 aa, Artificial Sequence; identical to SEQ ID NO: 5896
  GFR-binding peptide
  MOD_RES (2), (4), (38): Xaa is C or S
  MOD_RES (16), (17), (18), (19), (20): Xaa is A or G
  MOD_RES (21), (22), (23), (24): Xaa is A or G or is absent

SEQ ID NO: 64957 - protein, 33 aa, Artificial Sequence
  GFR-binding peptide
  MOD_RES (1), (33): Xaa is C or S
XSEVTMNPIKGYVVNKNEDFYLINIPSMKEPVX

SEQ ID NO: 64958 - protein, 40 aa, Artificial Sequence; identical to SEQ ID NO: 31998
  GFR-binding peptide
  MOD_RES (1), (3), (37), (38): Xaa is C or S
  MOD_RES (15), (16), (17), (18), (19): Xaa is A or G
  MOD_RES (20), (21), (22), (23): Xaa is A or G or is absent

SEQ ID NO: 64959 - protein, 32 aa, Artificial Sequence; identical to SEQ ID NO: 27020
  GFR-binding peptide
  MOD_RES (31), (32): Xaa is C or S

SEQ ID NO: 64960 - protein, 39 aa, Artificial Sequence; identical to SEQ ID NO: 5903
  GFR-binding peptide
  MOD_RES (2), (4), (37), (38): Xaa is C or S
  MOD_RES (15), (16), (17), (18), (19): Xaa is A or G
  MOD_RES (20), (21), (22), (23): Xaa is A or G or is absent

SEQ ID NO: 64961 - protein, 36 aa, Artificial Sequence
  GFR-binding peptide
  MOD_RES (1), (33), (34): Xaa is C or S
XAEVVMDRHKRLVVNNAADYYLISTASLRAPVXXSA

SEQ ID NO: 64962 - protein, 38 aa, Artificial Sequence
  GFR-binding peptide
  MOD_RES (32), (33): Xaa is C or S
SRVVMNRHKRLIVNSSDDYYLVSTASLKTPAXXPKPVH

SEQ ID NO: 64963 - protein, 36 aa, Artificial Sequence; identical to SEQ ID NO: 32005
  GFR-binding peptide
  MOD_RES (1), (35), (36): Xaa is C or S
  MOD_RES (13), (14), (15), (16), (17): Xaa is A or G
  MOD_RES (18), (19), (20), (21): Xaa is A or G or is absent

SEQ ID NO: 64964 - protein, 33 aa, Artificial Sequence; identical to SEQ ID NO: 5906
  GFR-binding peptide
  MOD_RES (1), (1): Xaa is C or S
  MOD_RES (12), (13), (14), (15), (16): Xaa is A or G
  MOD_RES (17), (18), (19), (20): Xaa is A or G or is absent

SEQ ID NO: 64965 - protein, 37 aa, Artificial Sequence; identical to SEQ ID NO: 27026
  GFR-binding peptide
  MOD_RES (2), (4), (36), (37): Xaa is C or S

SEQ ID NO: 64966 - protein, 36 aa, Artificial Sequence; identical to SEQ ID NO: 27028
  GFR-binding peptide
  MOD_RES (31), (31): Xaa is C or S

SEQ ID NO: 64967 - protein, 39 aa, Artificial Sequence; identical to SEQ ID NO: 27034
  GFR-binding peptide
  MOD_RES (2), (34), (35): Xaa is C or S

SEQ ID NO: 64968 - protein, 38 aa, Artificial Sequence; identical to SEQ ID NO: 5916
  GFR-binding peptide
  MOD_RES (32), (33): Xaa is C or S

SEQ ID NO: 64969 - protein, 39 aa, Artificial Sequence; identical to SEQ ID NO: 5917
  GFR-binding peptide
  MOD_RES (34), (35): Xaa is C or S
  MOD_RES (12), (13), (14), (15), (16): Xaa is A or G
  MOD_RES (17), (18), (19), (20): Xaa is A or G or is absent

SEQ ID NO: 64970 - protein, 34 aa, Artificial Sequence
  GFR-binding peptide
  MOD_RES (1), (33), (34): Xaa is C or S
XRDVVMGEYKFKIIQQKDNLYLMSIPEMKTPTXX

SEQ ID NO: 64971 - protein, 40 aa, Artificial Sequence; identical to SEQ ID NO: 5918
  GFR-binding peptide
  MOD_RES (2), (4), (35), (36): Xaa is C or S

SEQ ID NO: 64972 - protein, 39 aa, Artificial Sequence; identical to SEQ ID NO: 32028
  GFR-binding peptide
  MOD_RES (2), (34), (35): Xaa is C or S

SEQ ID NO: 64973 - protein, 40 aa, Artificial Sequence; identical to SEQ ID NO: 5921
  GFR-binding peptide
  MOD_RES (2), (36), (37): Xaa is C or S
  MOD_RES (14), (15), (16), (17), (18): Xaa is A or G
  MOD_RES (19), (20), (21), (22): Xaa is A or G or is absent

SEQ ID NO: 64974 - protein, 36 aa, Artificial Sequence; identical to SEQ ID NO: 5922
  GFR-binding peptide
  MOD_RES (1), (3), (36): Xaa is C or S
  MOD_RES (14), (15), (16), (17), (18): Xaa is A or G
  MOD_RES (19), (20), (21), (22): Xaa is A or G or is absent

SEQ ID NO: 64975 - protein, 38 aa, Artificial Sequence; identical to SEQ ID NO: 27039
  GFR-binding peptide
  MOD_RES (1), (3), (38): Xaa is C or S
  MOD_RES (16), (17), (18), (19), (20): Xaa is A or G
  MOD_RES (21), (22), (23), (24): Xaa is A or G or is absent

SEQ ID NO: 64976 - protein, 38 aa, Artificial Sequence
  GFR-binding peptide
  MOD_RES (1), (3), (35), (36): Xaa is C or S
XGXRDVVMGRHKRLIIQQKDNYYLMSTASMKTPTXXPG

SEQ ID NO: 64977 - protein, 37 aa, Artificial Sequence; identical to SEQ ID NO: 32035
  GFR-binding peptide
  MOD_RES (32), (33): Xaa is C or S

SEQ ID NO: 64978 - protein, 34 aa, Artificial Sequence; identical to SEQ ID NO: 5925
  GFR-binding peptide
  MOD_RES (2), (34): Xaa is C or S

SEQ ID NO: 64979 - protein, 39 aa, Artificial Sequence; identical to SEQ ID NO: 5926
  GFR-binding peptide
  MOD_RES (2), (33), (34): Xaa is C or S

SEQ ID NO: 64980 - protein, 37 aa, Artificial Sequence; identical to SEQ ID NO: 32036
  GFR-binding peptide
  MOD_RES (2), (34), (35): Xaa is C or S

SEQ ID NO: 64981 - protein, 37 aa, Artificial Sequence; identical to SEQ ID NO: 27045
  GFR-binding peptide
  MOD_RES (1), (3), (37): Xaa is C or S
  MOD_RES (15), (16), (17), (18), (19): Xaa is A or G
  MOD_RES (20), (21), (22), (23): Xaa is A or G or is absent

SEQ ID NO: 64982 - protein, 34 aa, Artificial Sequence
  GFR-binding peptide
  MOD_RES (33), (34): Xaa is C or S
  MOD_RES (11), (12), (13), (14), (15): Xaa is A or G
  MOD_RES (16), (17), (18), (19): Xaa is A or G or is absent
EVTMNPIKGYXXXXXXXXXFYLINIPSMKEPVXX

SEQ ID NO: 64983 - protein, 35 aa, Artificial Sequence
  GFR-binding peptide
  MOD_RES (2), (34), (35): Xaa is C or S
GXSEVVMDRHKRLVVNNASDYYLISTASLRTPVXX

SEQ ID NO: 64984 - protein, 35 aa, Artificial Sequence; identical to SEQ ID NO: 32042
  GFR-binding peptide
  MOD_RES (34), (35): Xaa is C or S
  MOD_RES (12), (13), (14), (15), (16): Xaa is A or G
  MOD_RES (17), (18), (19), (20): Xaa is A or G or is absent

SEQ ID NO: 64985 - protein, 34 aa, Artificial Sequence; identical to SEQ ID NO: 5930
  GFR-binding peptide
  MOD_RES (1), (1): Xaa is C or S
  MOD_RES (13), (14), (15), (16), (17): Xaa is A or G
  MOD_RES (18), (19), (20), (21): Xaa is A or G or is absent

SEQ ID NO: 64986 - protein, 37 aa, Artificial Sequence; identical to SEQ ID NO: 5931
  GFR-binding peptide
  MOD_RES (2), (37): Xaa is C or S
  MOD_RES (15), (16), (17), (18), (19): Xaa is A or G
  MOD_RES (20), (21), (22), (23): Xaa is A or G or is absent

SEQ ID NO: 64987 - protein, 40 aa, Artificial Sequence; identical to SEQ ID NO: 5934
  GFR-binding peptide
  MOD_RES (1), (34), (35): Xaa is C or S

SEQ ID NO: 64988 - protein, 32 aa, Artificial Sequence; identical to SEQ ID NO: 5937
  GFR-binding peptide
  MOD_RES (32), (32): Xaa is C or S

SEQ ID NO: 64989 - protein, 39 aa, Artificial Sequence; identical to SEQ ID NO: 5938
  GFR-binding peptide
  MOD_RES (33), (34): Xaa is C or S
  MOD_RES (11), (12), (13), (14), (15): Xaa is A or G
  MOD_RES (16), (17), (18), (19): Xaa is A or G or is absent

SEQ ID NO: 64990 - protein, 43 aa, Artificial Sequence; identical to SEQ ID NO: 32046
  GFR-binding peptide
  MOD_RES (2), (4), (38), (39): Xaa is C or S
  MOD_RES (16), (17), (18), (19), (20): Xaa is A or G
  MOD_RES (21), (22), (23), (24): Xaa is A or G or is absent

SEQ ID NO: 64991 - protein, 39 aa, Artificial Sequence; identical to SEQ ID NO: 32048
  GFR-binding peptide
  MOD_RES (2), (34), (35): Xaa is C or S

SEQ ID NO: 64992 - protein, 37 aa, Artificial Sequence
  GFR-binding peptide
  MOD_RES (1), (3), (34), (35): Xaa is C or S
XGXEEVIMRHKRLLLVRGNDYYLMSTASTKVPAXXTS

SEQ ID NO: 64993 - protein, 34 aa, Artificial Sequence; identical to SEQ ID NO: 5940
  GFR-binding peptide
  MOD_RES (1), (3), (34): Xaa is C or S

SEQ ID NO: 64994 - protein, 40 aa, Artificial Sequence; identical to SEQ ID NO: 5943
  GFR-binding peptide
  MOD_RES (2), (35), (36): Xaa is C or S
  MOD_RES (13), (14), (15), (16), (17): Xaa is A or G
  MOD_RES (18), (19), (20), (21): Xaa is A or G or is absent

SEQ ID NO: 64995 - protein, 32 aa, Artificial Sequence; identical to SEQ ID NO: 5944
  GFR-binding peptide
  MOD_RES (31), (31): Xaa is C or S

SEQ ID NO: 64996 - protein, 37 aa, Artificial Sequence; identical to SEQ ID NO: 5945
  GFR-binding peptide
  MOD_RES (2), (34), (35): Xaa is C or S

SEQ ID NO: 64997 - protein, 36 aa, Artificial Sequence; identical to SEQ ID NO: 5946
  GFR-binding peptide
  MOD_RES (2), (4), (36): Xaa is C or S

SEQ ID NO: 64998 - protein, 32 aa, Artificial Sequence; identical to SEQ ID NO: 5947
  GFR-binding peptide
  MOD_RES (1), (1): Xaa is C or S

SEQ ID NO: 64999 - protein, 36 aa, Artificial Sequence; identical to SEQ ID NO: 32057
  GFR-binding peptide
  MOD_RES (1), (35), (36): Xaa is C or S
  MOD_RES (13), (14), (15), (16), (17): Xaa is A or G
  MOD_RES (18), (19), (20), (21): Xaa is A or G or is absent

SEQ ID NO: 65000 - protein, 37 aa, Artificial Sequence; identical to SEQ ID NO: 5950
  GFR-binding peptide
  MOD_RES (2), (34), (35): Xaa is C or S

SEQ ID NO: 65001 - protein, 37 aa, Artificial Sequence; identical to SEQ ID NO: 32059
  GFR-binding peptide
  MOD_RES (2), (36), (37): Xaa is C or S
  MOD_RES (14), (15), (16), (17), (18): Xaa is A or G
  MOD_RES (19), (20), (21), (22): Xaa is A or G or is absent

SEQ ID NO: 65002 - protein, 36 aa, Artificial Sequence; identical to SEQ ID NO: 5951
  GFR-binding peptide
  MOD_RES (1), (32), (33): Xaa is C or S

SEQ ID NO: 65003 - protein, 33 aa, Artificial Sequence
  GFR-binding peptide
  MOD_RES (1), (1): Xaa is C or S
  MOD_RES (12), (13), (14), (15), (16): Xaa is A or G
  MOD_RES (17), (18), (19), (20): Xaa is A or G or is absent
XSKVIMPIKGYXXXXXXXXXFYLINIPSLDQSV

SEQ ID NO: 65004 - protein, 34 aa, Artificial Sequence; identical to SEQ ID NO: 32062
  GFR-binding peptide
  MOD_RES (31), (32): Xaa is C or S

SEQ ID NO: 65005 - protein, 35 aa, Artificial Sequence
  GFR-binding peptide
  MOD_RES (33), (34): Xaa is C or S
  MOD_RES (11), (12), (13), (14), (15): Xaa is A or G
  MOD_RES (16), (17), (18), (19): Xaa is A or G or is absent
EVTMNPIKGYXXXXXXXXXFYLINIPSMKEPVXXP

SEQ ID NO: 65006 - protein, 35 aa, Artificial Sequence
  GFR-binding peptide
  MOD_RES (31), (32): Xaa is C or S
DVVMGYHYKLIIQQKDNKYLMSIPSMKTPTXXPGA

SEQ ID NO: 65007 - protein, 34 aa, Artificial Sequence; identical to SEQ ID NO: 32068
  GFR-binding peptide
  MOD_RES (2), (34): Xaa is C or S

SEQ ID NO: 65008 - protein, 33 aa, Artificial Sequence; identical to SEQ ID NO: 5954
  GFR-binding peptide
  MOD_RES (12), (13), (14), (15), (16): Xaa is A or G
  MOD_RES (17), (18), (19), (20): Xaa is A or G or is absent

SEQ ID NO: 65009 - protein, 38 aa, Artificial Sequence; identical to SEQ ID NO: 27070
  GFR-binding peptide
  MOD_RES (1), (33), (34): Xaa is C or S

SEQ ID NO: 65010 - protein, 35 aa, Artificial Sequence; identical to SEQ ID NO: 32070
  GFR-binding peptide
  MOD_RES (32), (32): Xaa is C or S

SEQ ID NO: 65011 - protein, 41 aa, Artificial Sequence; identical to SEQ ID NO: 27072
  GFR-binding peptide
  MOD_RES (1), (3), (37), (38): Xaa is C or S
  MOD_RES (15), (16), (17), (18), (19): Xaa is A or G
  MOD_RES (20), (21), (22), (23): Xaa is A or G or is absent

SEQ ID NO: 65012 - protein, 41 aa, Artificial Sequence; identical to SEQ ID NO: 27077
  GFR-binding peptide
  MOD_RES (1), (35), (36): Xaa is C or S
  MOD_RES (13), (14), (15), (16), (17): Xaa is A or G
  MOD_RES (18), (19), (20), (21): Xaa is A or G or is absent

SEQ ID NO: 65013 - protein, 30 aa, Artificial Sequence
  GFR-binding peptide
DVVMGRHKRLIIQQKDNYYLMSTASMKTPT

SEQ ID NO: 65014 - protein, 35 aa, Artificial Sequence
  GFR-binding peptide
  MOD_RES (34), (35): Xaa is C or S
  MOD_RES (12), (13), (14), (15), (16): Xaa is A or G
  MOD_RES (17), (18), (19), (20): Xaa is A or G or is absent
SEVTMNRYKKLXXXXXXXXXFYLISIANMKEPVXX

SEQ ID NO: 65015 - protein, 38 aa, Artificial Sequence
  GFR-binding peptide
  MOD_RES (33), (34): Xaa is C or S
  MOD_RES (11), (12), (13), (14), (15): Xaa is A or G
  MOD_RES (16), (17), (18), (19): Xaa is A or G or is absent
DVVMGYHYKLXXXXXXXXXKYLMSIPSMKTPTXXPGAS

SEQ ID NO: 65016 - protein, 38 aa, Artificial Sequence; identical to SEQ ID NO: 5964
  GFR-binding peptide
  MOD_RES (2), (34), (35): Xaa is C or S

SEQ ID NO: 65017 - protein, 38 aa, Artificial Sequence; identical to SEQ ID NO: 5965
  GFR-binding peptide
  MOD_RES (1), (34), (35): Xaa is C or S
  MOD_RES (12), (13), (14), (15), (16): Xaa is A or G
  MOD_RES (17), (18), (19), (20): Xaa is A or G or is absent

SEQ ID NO: 65018 - protein, 41 aa, Artificial Sequence; identical to SEQ ID NO: 32078
  GFR-binding peptide
  MOD_RES (2), (4), (39), (40): Xaa is C or S
  MOD_RES (17), (18), (19), (20), (21): Xaa is A or G
  MOD_RES (22), (23), (24), (25): Xaa is A or G or is absent

SEQ ID NO: 65019 - protein, 39 aa, Artificial Sequence
  GFR-binding peptide
  MOD_RES (2), (36), (37): Xaa is C or S
  MOD_RES (14), (15), (16), (17), (18): Xaa is A or G
  MOD_RES (19), (20), (21), (22): Xaa is A or G or is absent
GXESVAMGRHKRLXXXXXXXXXYYLISTASLKTPVXXAK

SEQ ID NO: 65020 - protein, 40 aa, Artificial Sequence; identical to SEQ ID NO: 5970
  GFR-binding peptide
  MOD_RES (1), (34), (35): Xaa is C or S
  MOD_RES (12), (13), (14), (15), (16): Xaa is A or G
  MOD_RES (17), (18), (19), (20): Xaa is A or G or is absent

SEQ ID NO: 65021 - protein, 38 aa, Artificial Sequence; identical to SEQ ID NO: 5971
  GFR-binding peptide
  MOD_RES (32), (33): Xaa is C or S

SEQ ID NO: 65022 - protein, 36 aa, Artificial Sequence; identical to SEQ ID NO: 57025
  GFR-binding peptide
  MOD_RES (2), (36): Xaa is C or S
  MOD_RES (14), (15), (16), (17), (18): Xaa is A or G
  MOD_RES (19), (20), (21), (22): Xaa is A or G or is absent

SEQ ID NO: 65023 - protein, 39 aa, Artificial Sequence; identical to SEQ ID NO: 27089
  GFR-binding peptide
  MOD_RES (1), (35): Xaa is C or S
  MOD_RES (13), (14), (15), (16), (17): Xaa is A or G
  MOD_RES (18), (19), (20), (21): Xaa is A or G or is absent

SEQ ID NO: 65024 - protein, 36 aa, Artificial Sequence; identical to SEQ ID NO: 32087
  GFR-binding peptide
  MOD_RES (1), (34), (35): Xaa is C or S
  MOD_RES (12), (13), (14), (15), (16): Xaa is A or G
  MOD_RES (17), (18), (19), (20): Xaa is A or G or is absent

SEQ ID NO: 65025 - protein, 40 aa, Artificial Sequence; identical to SEQ ID NO: 27090
  GFR-binding peptide
  MOD_RES (2), (4), (38), (39): Xaa is C or S
  MOD_RES (16), (17), (18), (19), (20): Xaa is A or G
  MOD_RES (21), (22), (23), (24): Xaa is A or G or is absent

SEQ ID NO: 65026 - protein, 42 aa, Artificial Sequence
  GFR-binding peptide
  MOD_RES (2), (4), (36), (37): Xaa is C or S
RXGXAEVVMDRHKRLVVNNAADYYLISTASLRAPVXXSAPAA

SEQ ID NO: 65027 - protein, 30 aa, Artificial Sequence; identical to SEQ ID NO: 5976
  GFR-binding peptide

SEQ ID NO: 65028 - protein, 39 aa, Artificial Sequence; identical to SEQ ID NO: 5977
  GFR-binding peptide
  MOD_RES (2), (4), (38), (39): Xaa is C or S
  MOD_RES (16), (17), (18), (19), (20): Xaa is A or G
  MOD_RES (21), (22), (23), (24): Xaa is A or G or is absent

SEQ ID NO: 65029 - protein, 37 aa, Artificial Sequence; identical to SEQ ID NO: 5978
  GFR-binding peptide
  MOD_RES (1), (3), (35), (36): Xaa is C or S

SEQ ID NO: 65030 - protein, 35 aa, Artificial Sequence
  GFR-binding peptide
  MOD_RES (2), (34), (35): Xaa is C or S
GXSEVVMDEYKFKVVNNASDLYLISIPELRTPVXX

SEQ ID NO: 65031 - protein, 37 aa, Artificial Sequence
  GFR-binding peptide
  MOD_RES (2), (4), (37): Xaa is C or S
  MOD_RES (15), (16), (17), (18), (19): Xaa is A or G
  MOD_RES (20), (21), (22), (23): Xaa is A or G or is absent
SXKXSKVIMPIKGYXXXXXXXXXFYLINIPSLDQSVX

SEQ ID NO: 65032 - protein, 41 aa, Artificial Sequence
  GFR-binding peptide
  MOD_RES (2), (4), (37), (38): Xaa is C or S
  MOD_RES (15), (16), (17), (18), (19): Xaa is A or G
  MOD_RES (20), (21), (22), (23): Xaa is A or G or is absent
SXKXSRVIMPIKGYXXXXXXXXXFYLINIPSLAQPVXXPAA

SEQ ID NO: 65033 - protein, 37 aa, Artificial Sequence
  GFR-binding peptide
  MOD_RES (31), (32): Xaa is C or S
EEVIMEYKFKLLVRGNDLYLMSIPETKVPAXXTSPVR

SEQ ID NO: 65034 - protein, 37 aa, Artificial Sequence; identical to SEQ ID NO: 5991
  GFR-binding peptide
  MOD_RES (1), (33), (34): Xaa is C or S

SEQ ID NO: 65035 - protein, 40 aa, Artificial Sequence; identical to SEQ ID NO: 5995
  GFR-binding peptide
  MOD_RES (2), (36): Xaa is C or S
  MOD_RES (14), (15), (16), (17), (18): Xaa is A or G
  MOD_RES (19), (20), (21), (22): Xaa is A or G or is absent

SEQ ID NO: 65036 - protein, 35 aa, Artificial Sequence
  GFR-binding peptide
  MOD_RES (31), (32): Xaa is C or S
DVVMGEYKFKIIQQKDNLYLMSIPEMKTPTXXPGA

SEQ ID NO: 65037 - protein, 37 aa, Artificial Sequence; identical to SEQ ID NO: 32108
  GFR-binding peptide
  MOD_RES (1), (3), (37): Xaa is C or S
  MOD_RES (15), (16), (17), (18), (19): Xaa is A or G
  MOD_RES (20), (21), (22), (23): Xaa is A or G or is absent

SEQ ID NO: 65038 - protein, 36 aa, Artificial Sequence; identical to SEQ ID NO: 5997
  GFR-binding peptide
  MOD_RES (1), (33), (34): Xaa is C or S

SEQ ID NO: 65039 - protein, 35 aa, Artificial Sequence; identical to SEQ ID NO: 27110
  GFR-binding peptide
  MOD_RES (1), (3): Xaa is C or S

SEQ ID NO: 65040 - protein, 35 aa, Artificial Sequence; identical to SEQ ID NO: 5998
  GFR-binding peptide
  MOD_RES (2), (4): Xaa is C or S

SEQ ID NO: 65041 - protein, 37 aa, Artificial Sequence; identical to SEQ ID NO: 32112
  GFR-binding peptide
  MOD_RES (33), (34): Xaa is C or S
  MOD_RES (11), (12), (13), (14), (15): Xaa is A or G
  MOD_RES (16), (17), (18), (19): Xaa is A or G or is absent

SEQ ID NO: 65042 - protein, 39 aa, Artificial Sequence
  GFR-binding peptide
  MOD_RES (1), (33), (34): Xaa is C or S
XSEVTMNRHKRLVVNKNEDYYLISTASMKEPVXXPEPIG

SEQ ID NO: 65043 - protein, 34 aa, Artificial Sequence
  GFR-binding peptide
  MOD_RES (34), (34): Xaa is C or S
  MOD_RES (12), (13), (14), (15), (16): Xaa is A or G
  MOD_RES (17), (18), (19), (20): Xaa is A or G or is absent
SEVTMNRYKKLXXXXXXXXXFYLISIANMKEPVX

SEQ ID NO: 65044 - protein, 41 aa, Artificial Sequence; identical to SEQ ID NO: 6000
  GFR-binding peptide
  MOD_RES (2), (36), (37): Xaa is C or S
  MOD_RES (14), (15), (16), (17), (18): Xaa is A or G
  MOD_RES (19), (20), (21), (22): Xaa is A or G or is absent

SEQ ID NO: 65045 - protein, 35 aa, Artificial Sequence; identical to SEQ ID NO: 6001
  GFR-binding peptide
  MOD_RES (31), (32): Xaa is C or S

SEQ ID NO: 65046 - protein, 42 aa, Artificial Sequence
  GFR-binding peptide
  MOD_RES (2), (4), (36), (37): Xaa is C or S
RXGXESVAMGRHKRLYTVVGKDYYLISTASLKTPVXXAKSAK

SEQ ID NO: 65047 - protein, 34 aa, Artificial Sequence
  GFR-binding peptide
  MOD_RES (2), (4): Xaa is C or S
SXKXSRVIMPIKGYVKPKRGVFYLINIPSLAQPV

SEQ ID NO: 65048 - protein, 38 aa, Artificial Sequence; identical to SEQ ID NO: 27117
  GFR-binding peptide
  MOD_RES (2), (36), (37): Xaa is C or S
  MOD_RES (14), (15), (16), (17), (18): Xaa is A or G
  MOD_RES (19), (20), (21), (22): Xaa is A or G or is absent

SEQ ID NO: 65049 - protein, 37 aa, Artificial Sequence; identical to SEQ ID NO: 32129
  GFR-binding peptide
  MOD_RES (2), (34), (35): Xaa is C or S

SEQ ID NO: 65050 - protein, 39 aa, Artificial Sequence; identical to SEQ ID NO: 27121
  GFR-binding peptide
  MOD_RES (1), (3), (34), (35): Xaa is C or S

SEQ ID NO: 65051 - protein, 38 aa, Artificial Sequence
  GFR-binding peptide
  MOD_RES (33), (34): Xaa is C or S
  MOD_RES (11), (12), (13), (14), (15): Xaa is A or G
  MOD_RES (16), (17), (18), (19): Xaa is A or G or is absent
SVAMGRHKRLXXXXXXXXXYYLISTASLKTPVXXAKSA

SEQ ID NO: 65052 - protein, 42 aa, Artificial Sequence
  GFR-binding peptide
  MOD_RES (1), (3), (36), (37): Xaa is C or S
  MOD_RES (14), (15), (16), (17), (18): Xaa is A or G
  MOD_RES (19), (20), (21), (22): Xaa is A or G or is absent
XKXSRVIMPIKGYXXXXXXXXXFYLINIPSLAQPVXXPAASA

SEQ ID NO: 65053 - protein, 38 aa, Artificial Sequence
  GFR-binding peptide
  MOD_RES (2), (4), (36), (37): Xaa is C or S
SXGXRDVVMGEYKFKIIQQKDNLYLMSIPEMKTPTXXP

SEQ ID NO: 65054 - protein, 32 aa, Artificial Sequence; identical to SEQ ID NO: 27125
  GFR-binding peptide
  MOD_RES (1), (1): Xaa is C or S

SEQ ID NO: 65055 - protein, 35 aa, Artificial Sequence; identical to SEQ ID NO: 27128
  GFR-binding peptide
  MOD_RES (31), (32): Xaa is C or S

SEQ ID NO: 65056 - protein, 38 aa, Artificial Sequence; identical to SEQ ID NO: 6007
  GFR-binding peptide
  MOD_RES (2), (4), (37), (38): Xaa is C or S
  MOD_RES (15), (16), (17), (18), (19): Xaa is A or G
  MOD_RES (20), (21), (22), (23): Xaa is A or G or is absent

SEQ ID NO: 65057 - protein, 35 aa, Artificial Sequence; identical to SEQ ID NO: 13417
  GFR-binding peptide
  MOD_RES (34), (35): Xaa is C or S
  MOD_RES (12), (13), (14), (15), (16): Xaa is A or G
  MOD_RES (17), (18), (19), (20): Xaa is A or G or is absent

SEQ ID NO: 65058 - protein, 35 aa, Artificial Sequence; identical to SEQ ID NO: 6008
  GFR-binding peptide
  MOD_RES (1), (3), (35): Xaa is C or S

SEQ ID NO: 65059 - protein, 37 aa, Artificial Sequence; identical to SEQ ID NO: 27129
  GFR-binding peptide
  MOD_RES (2), (34), (35): Xaa is C or S

SEQ ID NO: 65060 - protein, 35 aa, Artificial Sequence; identical to SEQ ID NO: 6009
  GFR-binding peptide
  MOD_RES (1), (35): Xaa is C or S
  MOD_RES (13), (14), (15), (16), (17): Xaa is A or G
  MOD_RES (18), (19), (20), (21): Xaa is A or G or is absent

SEQ ID NO: 65061 - protein, 35 aa, Artificial Sequence
  GFR-binding peptide
  MOD_RES (33), (34): Xaa is C or S
  MOD_RES (11), (12), (13), (14), (15): Xaa is A or G
  MOD_RES (16), (17), (18), (19): Xaa is A or G or is absent
SKVVMPIKGYXXXXXXXXXFYLINIPSLDQPVXXP

SEQ ID NO: 65062 - protein, 42 aa, Artificial Sequence; identical to SEQ ID NO: 6011
  GFR-binding peptide
  MOD_RES (2), (36), (37): Xaa is C or S
  MOD_RES (14), (15), (16), (17), (18): Xaa is A or G
  MOD_RES (19), (20), (21), (22): Xaa is A or G or is absent

SEQ ID NO: 65063 - protein, 36 aa, Artificial Sequence
  GFR-binding peptide
  MOD_RES (33), (34): Xaa is C or S
  MOD_RES (11), (12), (13), (14), (15): Xaa is A or G
  MOD_RES (16), (17), (18), (19): Xaa is A or G or is absent
EEVIMRHKRLXXXXXXXXXYYLMSTASTKVPAXXTS

SEQ ID NO: 65064 - protein, 37 aa, Artificial Sequence; identical to SEQ ID NO: 32138
  GFR-binding peptide
  MOD_RES (1), (35), (36): Xaa is C or S
  MOD_RES (13), (14), (15), (16), (17): Xaa is A or G
  MOD_RES (18), (19), (20), (21): Xaa is A or G or is absent

SEQ ID NO: 65065 - protein, 43 aa, Artificial Sequence
  GFR-binding peptide
  MOD_RES (1), (3), (37), (38): Xaa is C or S
  MOD_RES (15), (16), (17), (18), (19): Xaa is A or G
  MOD_RES (20), (21), (22), (23): Xaa is A or G or is absent
XGXRDVVMGYHYKLXXXXXXXXXKYLMSIPSMKTPTXXPGASG

SEQ ID NO: 65066 - protein, 33 aa, Artificial Sequence; identical to SEQ ID NO: 32139
  GFR-binding peptide
  MOD_RES (33), (33): Xaa is C or S
  MOD_RES (11), (12), (13), (14), (15): Xaa is A or G
  MOD_RES (16), (17), (18), (19): Xaa is A or G or is absent

SEQ ID NO: 65067 - protein, 36 aa, Artificial Sequence; identical to SEQ ID NO: 27134
  GFR-binding peptide
  MOD_RES (1), (3), (34), (35): Xaa is C or S

SEQ ID NO: 65068 - protein, 36 aa, Artificial Sequence; identical to SEQ ID NO: 6017
  GFR-binding peptide
  MOD_RES (2), (4), (35), (36): Xaa is C or S

SEQ ID NO: 65069 - protein, 31 aa, Artificial Sequence
  GFR-binding peptide
  MOD_RES (31), (31): Xaa is C or S
EVTMNRHKRLVVNKNEDYYLISTASMKEPVX

SEQ ID NO: 65070 - protein, 40 aa, Artificial Sequence; identical to SEQ ID NO: 32142
  GFR-binding peptide
  MOD_RES (34), (35): Xaa is C or S
  MOD_RES (12), (13), (14), (15), (16): Xaa is A or G
  MOD_RES (17), (18), (19), (20): Xaa is A or G or is absent

SEQ ID NO: 65071 - protein, 41 aa, Artificial Sequence; identical to SEQ ID NO: 6020
  GFR-binding peptide
  MOD_RES (1), (35), (36): Xaa is C or S
  MOD_RES (13), (14), (15), (16), (17): Xaa is A or G
  MOD_RES (18), (19), (20), (21): Xaa is A or G or is absent

SEQ ID NO: 65072 - protein, 35 aa, Artificial Sequence; identical to SEQ ID NO: 32144
  GFR-binding peptide
  MOD_RES (34), (34): Xaa is C or S
  MOD_RES (12), (13), (14), (15), (16): Xaa is A or G
  MOD_RES (17), (18), (19), (20): Xaa is A or G or is absent

SEQ ID NO: 65073 - protein, 35 aa, Artificial Sequence; identical to SEQ ID NO: 6021
  GFR-binding peptide
  MOD_RES (1), (34), (35): Xaa is C or S
  MOD_RES (12), (13), (14), (15), (16): Xaa is A or G
  MOD_RES (17), (18), (19), (20): Xaa is A or G or is absent

SEQ ID NO: 65074 - protein, 39 aa, Artificial Sequence; identical to SEQ ID NO: 27140
  GFR-binding peptide
  MOD_RES (2), (4), (38), (39): Xaa is C or S
  MOD_RES (16), (17), (18), (19), (20): Xaa is A or G
  MOD_RES (21), (22), (23), (24): Xaa is A or G or is absent

SEQ ID NO: 65075 - protein, 37 aa, Artificial Sequence
  GFR-binding peptide
  MOD_RES (2), (35), (36): Xaa is C or S
  MOD_RES (13), (14), (15), (16), (17): Xaa is A or G
  MOD_RES (18), (19), (20), (21): Xaa is A or G or is absent
GXEEVIMYHYKLXXXXXXXXXKYLMSIPSTKVPAXXT

SEQ ID NO: 65076 - protein, 37 aa, Artificial Sequence; identical to SEQ ID NO: 27142
  GFR-binding peptide
  MOD_RES (2), (4): Xaa is C or S
  MOD_RES (16), (17), (18), (19), (20): Xaa is A or G
  MOD_RES (21), (22), (23), (24): Xaa is A or G or is absent

SEQ ID NO: 65077 - protein, 34 aa, Artificial Sequence; identical to SEQ ID NO: 6023
  GFR-binding peptide
  MOD_RES (1), (33), (34): Xaa is C or S

SEQ ID NO: 65078 - protein, 32 aa, Artificial Sequence; identical to SEQ ID NO: 32147
  GFR-binding peptide
  MOD_RES (11), (12), (13), (14), (15): Xaa is A or G
  MOD_RES (16), (17), (18), (19): Xaa is A or G or is absent

SEQ ID NO: 65079 - protein, 32 aa, Artificial Sequence; identical to SEQ ID NO: 27145
  GFR-binding peptide
  MOD_RES (1), (1): Xaa is C or S

SEQ ID NO: 65080 - protein, 41 aa, Artificial Sequence
  GFR-binding peptide
  MOD_RES (2), (36), (37): Xaa is C or S
  MOD_RES (14), (15), (16), (17), (18): Xaa is A or G
  MOD_RES (19), (20), (21), (22): Xaa is A or G or is absent
AXSEVTMNRYKKLXXXXXXXXXFYLISIANMKEPVXXPEPI

SEQ ID NO: 65081 - protein, 42 aa, Artificial Sequence; identical to SEQ ID NO: 6024
  GFR-binding peptide
  MOD_RES (2), (4), (37), (38): Xaa is C or S
  MOD_RES (15), (16), (17), (18), (19): Xaa is A or G
  MOD_RES (20), (21), (22), (23): Xaa is A or G or is absent

SEQ ID NO: 65082 - protein, 36 aa, Artificial Sequence; identical to SEQ ID NO: 32150
  GFR-binding peptide
  MOD_RES (34), (35): Xaa is C or S
  MOD_RES (12), (13), (14), (15), (16): Xaa is A or G
  MOD_RES (17), (18), (19), (20): Xaa is A or G or is absent

SEQ ID NO: 65083 - protein, 40 aa, Artificial Sequence; identical to SEQ ID NO: 32151
  GFR-binding peptide
  MOD_RES (34), (35): Xaa is C or S
  MOD_RES (12), (13), (14), (15), (16): Xaa is A or G
  MOD_RES (17), (18), (19), (20): Xaa is A or G or is absent

SEQ ID NO: 65084 - protein, 36 aa, Artificial Sequence; identical to SEQ ID NO: 27150
  GFR-binding peptide
  MOD_RES (32), (33): Xaa is C or S

SEQ ID NO: 65085 - protein, 39 aa, Artificial Sequence
  GFR-binding peptide
  MOD_RES (1), (33), (34): Xaa is C or S
XSEVVMDYHYKLVVNNASDKYLISIPSLRTPVXXTPPTS

SEQ ID NO: 65086 - protein, 43 aa, Artificial Sequence; identical to SEQ ID NO: 6032
  GFR-binding peptide
  MOD_RES (1), (3), (37), (38): Xaa is C or S
  MOD_RES (15), (16), (17), (18), (19): Xaa is A or G
  MOD_RES (20), (21), (22), (23): Xaa is A or G or is absent

SEQ ID NO: 65087 - protein, 39 aa, Artificial Sequence; identical to SEQ ID NO: 32161
  GFR-binding peptide
  MOD_RES (1), (35), (36): Xaa is C or S
  MOD_RES (13), (14), (15), (16), (17): Xaa is A or G
  MOD_RES (18), (19), (20), (21): Xaa is A or G or is absent

SEQ ID NO: 65088 - protein, 37 aa, Artificial Sequence
  GFR-binding peptide
  MOD_RES (34), (35): Xaa is C or S
  MOD_RES (12), (13), (14), (15), (16): Xaa is A or G
  MOD_RES (17), (18), (19), (20): Xaa is A or G or is absent
SEVVMDYHYKLXXXXXXXXXKYLISIPSLRTPVXXTP

SEQ ID NO: 65089 - protein, 41 aa, Artificial Sequence; identical to SEQ ID NO: 6041
  GFR-binding peptide
  MOD_RES (2), (4), (36), (37): Xaa is C or S

SEQ ID NO: 65090 - protein, 37 aa, Artificial Sequence
  GFR-binding peptide
  MOD_RES (1), (33), (34): Xaa is C or S
XAEVVMDRHKRLVVNNAADYYLISTASLRAPVXXSAP

SEQ ID NO: 65091 - protein, 40 aa, Artificial Sequence; identical to SEQ ID NO: 32165
  GFR-binding peptide
  MOD_RES (2), (4), (38), (39): Xaa is C or S
  MOD_RES (16), (17), (18), (19), (20): Xaa is A or G
  MOD_RES (21), (22), (23), (24): Xaa is A or G or is absent

SEQ ID NO: 65092 - protein, 35 aa, Artificial Sequence
  GFR-binding peptide
  MOD_RES (2), (2): Xaa is C or S
  MOD_RES (14), (15), (16), (17), (18): Xaa is A or G
  MOD_RES (19), (20), (21), (22): Xaa is A or G or is absent
AXSEVTMNRHKRLXXXXXXXXXYYLISTASMKEPV

SEQ ID NO: 65093 - protein, 34 aa, Artificial Sequence; identical to SEQ ID NO: 6042
  GFR-binding peptide
  MOD_RES (1), (1): Xaa is C or S
  MOD_RES (13), (14), (15), (16), (17): Xaa is A or G
  MOD_RES (18), (19), (20), (21): Xaa is A or G or is absent

SEQ ID NO: 65094 - protein, 37 aa, Artificial Sequence; identical to SEQ ID NO: 6045
  GFR-binding peptide
  MOD_RES (2), (4), (37): Xaa is C or S
  MOD_RES (15), (16), (17), (18), (19): Xaa is A or G
  MOD_RES (20), (21), (22), (23): Xaa is A or G or is absent

SEQ ID NO: 65095 - protein, 42 aa, Artificial Sequence; identical to SEQ ID NO: 6046
  GFR-binding peptide
  MOD_RES (1), (3), (36), (37): Xaa is C or S
  MOD_RES (14), (15), (16), (17), (18): Xaa is A or G
  MOD_RES (19), (20), (21), (22): Xaa is A or G or is absent

SEQ ID NO: 65096 - protein, 34 aa, Artificial Sequence
  GFR-binding peptide
  MOD_RES (1), (32), (33): Xaa is C or S
XEEVIMRHKRLLLVRGNDYYLMSTASTKVPAXXT

SEQ ID NO: 65097 - protein, 32 aa, Artificial Sequence
  GFR-binding peptide
  MOD_RES (1), (32): Xaa is C or S
XSKVIMPIKGYIKPTKGIFYLINIPSLDQSVX

SEQ ID NO: 65098 - protein, 39 aa, Artificial Sequence
  GFR-binding peptide
  MOD_RES (34), (35): Xaa is C or S
  MOD_RES (12), (13), (14), (15), (16): Xaa is A or G
  MOD_RES (17), (18), (19), (20): Xaa is A or G or is absent
SEVVMDYHYKLXXXXXXXXXKYLISIPSLRTPVXXTPPT

SEQ ID NO: 65099 - protein, 38 aa, Artificial Sequence; identical to SEQ ID NO: 6052
  GFR-binding peptide
  MOD_RES (33), (34): Xaa is C or S
  MOD_RES (11), (12), (13), (14), (15): Xaa is A or G
  MOD_RES (16), (17), (18), (19): Xaa is A or G or is absent

SEQ ID NO: 65100 - protein, 35 aa, Artificial Sequence; identical to SEQ ID NO: 6054
  GFR-binding peptide
  MOD_RES (31), (32): Xaa is C or S

SEQ ID NO: 65101 - protein, 39 aa, Artificial Sequence; identical to SEQ ID NO: 27174
  GFR-binding peptide
  MOD_RES (2), (34), (35): Xaa is C or S

SEQ ID NO: 65102 - protein, 36 aa, Artificial Sequence; identical to SEQ ID NO: 6055
  GFR-binding peptide
  MOD_RES (1), (33), (34): Xaa is C or S

SEQ ID NO: 65103 - protein, 33 aa, Artificial Sequence
  GFR-binding peptide
  MOD_RES (31), (32): Xaa is C or S
EVVMDRHKRLVVNNAADYYLISTASLRAPVXXS

SEQ ID NO: 65104 - protein, 43 aa, Artificial Sequence; identical to SEQ ID NO: 6056
  GFR-binding peptide
  MOD_RES (2), (4), (38), (39): Xaa is C or S
  MOD_RES (16), (17), (18), (19), (20): Xaa is A or G
  MOD_RES (21), (22), (23), (24): Xaa is A or G or is absent

SEQ ID NO: 65105 - protein, 38 aa, Artificial Sequence; identical to SEQ ID NO: 27178
  GFR-binding peptide
  MOD_RES (33), (33): Xaa is C or S
  MOD_RES (11), (12), (13), (14), (15): Xaa is A or G
  MOD_RES (16), (17), (18), (19): Xaa is A or G or is absent

SEQ ID NO: 65106 - protein, 37 aa, Artificial Sequence; identical to SEQ ID NO: 27179
  GFR-binding peptide
  MOD_RES (2), (4), (36), (37): Xaa is C or S

SEQ ID NO: 65107 - protein, 37 aa, Artificial Sequence; identical to SEQ ID NO: 6058
  GFR-binding peptide
  MOD_RES (1), (35), (36): Xaa is C or S
  MOD_RES (13), (14), (15), (16), (17): Xaa is A or G
  MOD_RES (18), (19), (20), (21): Xaa is A or G or is absent

SEQ ID NO: 65108 - protein, 43 aa, Artificial Sequence
  GFR-binding peptide
  MOD_RES (1), (3), (37), (38): Xaa is C or S
  MOD_RES (15), (16), (17), (18), (19): Xaa is A or G
  MOD_RES (20), (21), (22), (23): Xaa is A or G or is absent
XAXSEVTMNPIKGYXXXXXXXXXFYLINIPSMKEPVXXPEPIG

SEQ ID NO: 65109 - protein, 44 aa, Artificial Sequence
  GFR-binding peptide
  MOD_RES (2), (4), (38), (39): Xaa is C or S
  MOD_RES (16), (17), (18), (19), (20): Xaa is A or G
  MOD_RES (21), (22), (23), (24): Xaa is A or G or is absent
RXAXSEVTMNRHKRLXXXXXXXXXYYLISTASMKEPVXXPEPIG

SEQ ID NO: 65110 - protein, 38 aa, Artificial Sequence; identical to SEQ ID NO: 27184
  GFR-binding peptide
  MOD_RES (33), (34): Xaa is C or S
  MOD_RES (11), (12), (13), (14), (15): Xaa is A or G
  MOD_RES (16), (17), (18), (19): Xaa is A or G or is absent

SEQ ID NO: 65111 - protein, 35 aa, Artificial Sequence; identical to SEQ ID NO: 6060
  GFR-binding peptide
  MOD_RES (2), (33), (34): Xaa is C or S

SEQ ID NO: 65112 - protein, 34 aa, Artificial Sequence; identical to SEQ ID NO: 27188
  GFR-binding peptide
  MOD_RES (1), (33), (34): Xaa is C or S

SEQ ID NO: 65113 - protein, 37 aa, Artificial Sequence; identical to SEQ ID NO: 6062
  GFR-binding peptide
  MOD_RES (2), (35), (36): Xaa is C or S

SEQ ID NO: 65114 - protein, 40 aa, Artificial Sequence; identical to SEQ ID NO: 32182
  GFR-binding peptide
  MOD_RES (2), (36), (37): Xaa is C or S
  MOD_RES (14), (15), (16), (17), (18): Xaa is A or G
  MOD_RES (19), (20), (21), (22): Xaa is A or G or is absent

SEQ ID NO: 65115 - protein, 40 aa, Artificial Sequence; identical to SEQ ID NO: 6067
  GFR-binding peptide
  MOD_RES (2), (34), (35): Xaa is C or S

SEQ ID NO: 65116 - protein, 31 aa, Artificial Sequence; identical to SEQ ID NO: 27194
  GFR-binding peptide
  MOD_RES (31), (31): Xaa is C or S

SEQ ID NO: 65117 - protein, 33 aa, Artificial Sequence; identical to SEQ ID NO: 6069
  GFR-binding peptide
  MOD_RES (1), (32), (33): Xaa is C or S

SEQ ID NO: 65118 - protein, 31 aa, Artificial Sequence; identical to SEQ ID NO: 6070
  GFR-binding peptide
  MOD_RES (31), (31): Xaa is C or S

SEQ ID NO: 65119 - protein, 38 aa, Artificial Sequence; identical to SEQ ID NO: 32184
  GFR-binding peptide
  MOD_RES (2), (34), (35): Xaa is C or S

SEQ ID NO: 65120 - protein, 36 aa, Artificial Sequence; identical to SEQ ID NO: 6077
  GFR-binding peptide
  MOD_RES (1), (3), (35), (36): Xaa is C or S

SEQ ID NO: 65121 - protein, 42 aa, Artificial Sequence
  GFR-binding peptide
  MOD_RES (2), (4), (36), (37): Xaa is C or S
RXAXSEVTMNYHYKLVVNKNEDKYLISIPSMKEPVXXPEPIG

SEQ ID NO: 65122 - protein, 38 aa, Artificial Sequence; identical to SEQ ID NO: 13487
  GFR-binding peptide
  MOD_RES (1), (3), (37), (38): Xaa is C or S
  MOD_RES (15), (16), (17), (18), (19): Xaa is A or G
  MOD_RES (20), (21), (22), (23): Xaa is A or G or is absent

SEQ ID NO: 65123 - protein, 35 aa, Artificial Sequence
  GFR-binding peptide
  MOD_RES (1), (3), (35): Xaa is C or S
XAXSEVTMNPIKGYVVNKNEDFYLINIPSMKEPVX

SEQ ID NO: 65124 - protein, 38 aa, Artificial Sequence; identical to SEQ ID NO: 6081
  GFR-binding peptide
  MOD_RES (1), (35), (36): Xaa is C or S
  MOD_RES (13), (14), (15), (16), (17): Xaa is A or G
  MOD_RES (18), (19), (20), (21): Xaa is A or G or is absent

SEQ ID NO: 65125 - protein, 39 aa, Artificial Sequence; identical to SEQ ID NO: 32195
  GFR-binding peptide
  MOD_RES (2), (4), (38), (39): Xaa is C or S
  MOD_RES (16), (17), (18), (19), (20): Xaa is A or G
  MOD_RES (21), (22), (23), (24): Xaa is A or G or is absent

SEQ ID NO: 65126 - protein, 40 aa, Artificial Sequence; identical to SEQ ID NO: 27205
  GFR-binding peptide
  MOD_RES (1), (3), (35), (36): Xaa is C or S

SEQ ID NO: 65127 - protein, 34 aa, Artificial Sequence; identical to SEQ ID NO: 27206
  GFR-binding peptide
  MOD_RES (33), (34): Xaa is C or S
  MOD_RES (11), (12), (13), (14), (15): Xaa is A or G
  MOD_RES (16), (17), (18), (19): Xaa is A or G or is absent

SEQ ID NO: 65128 - protein, 43 aa, Artificial Sequence
  GFR-binding peptide
  MOD_RES (2), (4), (37), (38): Xaa is C or S
  MOD_RES (15), (16), (17), (18), (19): Xaa is A or G
  MOD_RES (20), (21), (22), (23): Xaa is A or G or is absent
LXGXEEVIMRHKRLXXXXXXXXXYYLMSTASTKVPAXXTSPVR

SEQ ID NO: 65129 - protein, 33 aa, Artificial Sequence; identical to SEQ ID NO: 32199
  GFR-binding peptide
  MOD_RES (33), (33): Xaa is C or S
  MOD_RES (11), (12), (13), (14), (15): Xaa is A or G
  MOD_RES (16), (17), (18), (19): Xaa is A or G or is absent

SEQ ID NO: 65130 - protein, 41 aa, Artificial Sequence; identical to SEQ ID NO: 6085
  GFR-binding peptide
  MOD_RES (2), (35), (36): Xaa is C or S
  MOD_RES (13), (14), (15), (16), (17): Xaa is A or G
  MOD_RES (18), (19), (20), (21): Xaa is A or G or is absent

SEQ ID NO: 65131 - protein, 36 aa, Artificial Sequence; identical to SEQ ID NO: 32203
  GFR-binding peptide
  MOD_RES (31), (32): Xaa is C or S

SEQ ID NO: 65132 - protein, 44 aa, Artificial Sequence
  GFR-binding peptide
  MOD_RES (2), (4), (38), (39): Xaa is C or S
  MOD_RES (16), (17), (18), (19), (20): Xaa is A or G
  MOD_RES (21), (22), (23), (24): Xaa is A or G or is absent
RXAXSEVTMNEYKFKXXXXXXXXXLYLISIPEMKEPVXXPEPIG

SEQ ID NO: 65133 - protein, 37 aa, Artificial Sequence
  GFR-binding peptide
  MOD_RES (32), (33): Xaa is C or S
SEVTMNYHYKLVVNKNEDKYLISIPSMKEPVXXPEPI

SEQ ID NO: 65134 - protein, 42 aa, Artificial Sequence; identical to SEQ ID NO: 6088
  GFR-binding peptide
  MOD_RES (1), (3), (36), (37): Xaa is C or S

SEQ ID NO: 65135 - protein, 39 aa, Artificial Sequence
  GFR-binding peptide
  MOD_RES (1), (3), (35), (36): Xaa is C or S
XAXSEVTMNRHKRLVVNKNEDYYLISTASMKEPVXXPEP

SEQ ID NO: 65136 - protein, 40 aa, Artificial Sequence; identical to SEQ ID NO: 27215
  GFR-binding peptide
  MOD_RES (1), (36), (37): Xaa is C or S
  MOD_RES (14), (15), (16), (17), (18): Xaa is A or G
  MOD_RES (19), (20), (21), (22): Xaa is A or G or is absent

SEQ ID NO: 65137 - protein, 30 aa, Artificial Sequence; identical to SEQ ID NO: 6091
  GFR-binding peptide

SEQ ID NO: 65138 - protein, 38 aa, Artificial Sequence; identical to SEQ ID NO: 32217
  GFR-binding peptide
  MOD_RES (1), (3), (37), (38): Xaa is C or S
  MOD_RES (15), (16), (17), (18), (19): Xaa is A or G
  MOD_RES (20), (21), (22), (23): Xaa is A or G or is absent

SEQ ID NO: 65139 - protein, 37 aa, Artificial Sequence; identical to SEQ ID NO: 13509
  GFR-binding peptide
  MOD_RES (32), (33): Xaa is C or S

SEQ ID NO: 65140 - protein, 34 aa, Artificial Sequence; identical to SEQ ID NO: 6095
  GFR-binding peptide
  MOD_RES (13), (14), (15), (16), (17): Xaa is A or G
  MOD_RES (18), (19), (20), (21): Xaa is A or G or is absent

SEQ ID NO: 65141 - protein, 32 aa, Artificial Sequence; identical to SEQ ID NO: 27220
  GFR-binding peptide
  MOD_RES (31), (32): Xaa is C or S

SEQ ID NO: 65142 - protein, 42 aa, Artificial Sequence; identical to SEQ ID NO: 6100
  GFR-binding peptide
  MOD_RES (2), (4), (36), (37): Xaa is C or S

SEQ ID NO: 65143 - protein, 38 aa, Artificial Sequence; identical to SEQ ID NO: 27227
  GFR-binding peptide
  MOD_RES (1), (3), (36), (37): Xaa is C or S
  MOD_RES (14), (15), (16), (17), (18): Xaa is A or G
  MOD_RES (19), (20), (21), (22): Xaa is A or G or is absent

SEQ ID NO: 65144 - protein, 33 aa, Artificial Sequence; identical to SEQ ID NO: 27228
  GFR-binding peptide
  MOD_RES (12), (13), (14), (15), (16): Xaa is A or G
  MOD_RES (17), (18), (19), (20): Xaa is A or G or is absent

SEQ ID NO: 65145 - protein, 36 aa, Artificial Sequence; identical to SEQ ID NO: 27229
  GFR-binding peptide
  MOD_RES (33), (34): Xaa is C or S
  MOD_RES (11), (12), (13), (14), (15): Xaa is A or G
  MOD_RES (16), (17), (18), (19): Xaa is A or G or is absent

SEQ ID NO: 65146 - protein, 39 aa, Artificial Sequence; identical to SEQ ID NO: 27232
  GFR-binding peptide
  MOD_RES (2), (4), (36), (37): Xaa is C or S

SEQ ID NO: 65147 - protein, 38 aa, Artificial Sequence; identical to SEQ ID NO: 6102
  GFR-binding peptide
  MOD_RES (1), (36), (37): Xaa is C or S
  MOD_RES (14), (15), (16), (17), (18): Xaa is A or G
  MOD_RES (19), (20), (21), (22): Xaa is A or G or is absent

SEQ ID NO: 65148 - protein, 35 aa, Artificial Sequence; identical to SEQ ID NO: 27235
  GFR-binding peptide
  MOD_RES (2), (2): Xaa is C or S
  MOD_RES (14), (15), (16), (17), (18): Xaa is A or G
  MOD_RES (19), (20), (21), (22): Xaa is A or G or is absent

SEQ ID NO: 65149 - protein, 33 aa, Artificial Sequence; identical to SEQ ID NO: 6105
  GFR-binding peptide
  MOD_RES (1), (3): Xaa is C or S

SEQ ID NO: 65150 - protein, 39 aa, Artificial Sequence; identical to SEQ ID NO: 27239
  GFR-binding peptide
  MOD_RES (1), (33), (34): Xaa is C or S

SEQ ID NO: 65151 - protein, 39 aa, Artificial Sequence; identical to SEQ ID NO: 32226
  GFR-binding peptide
  MOD_RES (2), (4), (36): Xaa is C or S

SEQ ID NO: 65152 - protein, 45 aa, Artificial Sequence; identical to SEQ ID NO: 27244
  GFR-binding peptide
  MOD_RES (2), (4), (39), (40): Xaa is C or S
  MOD_RES (17), (18), (19), (20), (21): Xaa is A or G
  MOD_RES (22), (23), (24), (25): Xaa is A or G or is absent

SEQ ID NO: 65153 - protein, 42 aa, Artificial Sequence; identical to SEQ ID NO: 32233
  GFR-binding peptide
  MOD_RES (2), (36), (37): Xaa is C or S
  MOD_RES (14), (15), (16), (17), (18): Xaa is A or G
  MOD_RES (19), (20), (21), (22): Xaa is A or G or is absent

SEQ ID NO: 65154 - protein, 35 aa, Artificial Sequence; identical to SEQ ID NO: 6112
  GFR-binding peptide
  MOD_RES (1), (35): Xaa is C or S
  MOD_RES (13), (14), (15), (16), (17): Xaa is A or G
  MOD_RES (18), (19), (20), (21): Xaa is A or G or is absent

SEQ ID NO: 65155 - protein, 35 aa, Artificial Sequence; identical to SEQ ID NO: 6114
  GFR-binding peptide
  MOD_RES (33), (34): Xaa is C or S
  MOD_RES (11), (12), (13), (14), (15): Xaa is A or G
  MOD_RES (16), (17), (18), (19): Xaa is A or G or is absent

SEQ ID NO: 65156 - protein, 35 aa, Artificial Sequence; identical to SEQ ID NO: 6117
  GFR-binding peptide
  MOD_RES (1), (3), (35): Xaa is C or S

SEQ ID NO: 65157 - protein, 40 aa, Artificial Sequence; identical to SEQ ID NO: 6118
  GFR-binding peptide
  MOD_RES (2), (4), (38), (39): Xaa is C or S
  MOD_RES (16), (17), (18), (19), (20): Xaa is A or G
  MOD_RES (21), (22), (23), (24): Xaa is A or G or is absent

SEQ ID NO: 65158 - protein, 33 aa, Artificial Sequence; identical to SEQ ID NO: 6119
  GFR-binding peptide
  MOD_RES (1), (33): Xaa is C or S

SEQ ID NO: 65159 - protein, 40 aa, Artificial Sequence; identical to SEQ ID NO: 32238
  GFR-binding peptide
  MOD_RES (1), (35), (36): Xaa is C or S
  MOD_RES (13), (14), (15), (16), (17): Xaa is A or G
  MOD_RES (18), (19), (20), (21): Xaa is A or G or is absent

SEQ ID NO: 65160 - protein, 34 aa, Artificial Sequence; identical to SEQ ID NO: 6120
  GFR-binding peptide
  MOD_RES (32), (33): Xaa is C or S

SEQ ID NO: 65161 - protein, 34 aa, Artificial Sequence; identical to SEQ ID NO: 6121
  GFR-binding peptide
  MOD_RES (33), (34): Xaa is C or S
  MOD_RES (11), (12), (13), (14), (15): Xaa is A or G
  MOD_RES (16), (17), (18), (19): Xaa is A or G or is absent

SEQ ID NO: 65162 - protein, 37 aa, Artificial Sequence; identical to SEQ ID NO: 6123
  GFR-binding peptide
  MOD_RES (1), (33), (34): Xaa is C or S

SEQ ID NO: 65163 - protein, 37 aa, Artificial Sequence; identical to SEQ ID NO: 6124
  GFR-binding peptide
  MOD_RES (2), (36), (37): Xaa is C or S
  MOD_RES (14), (15), (16), (17), (18): Xaa is A or G
  MOD_RES (19), (20), (21), (22): Xaa is A or G or is absent

SEQ ID NO: 65164 - protein, 38 aa, Artificial Sequence; identical to SEQ ID NO: 6128
  GFR-binding peptide
  MOD_RES (2), (34): Xaa is C or S

SEQ ID NO: 65165 - protein, 32 aa, Artificial Sequence
  GFR-binding peptide
  MOD_RES (1), (1): Xaa is C or S
XSEVTMNPIKGYVVNKNEDFYLINIPSMKEPV

SEQ ID NO: 65166 - protein, 44 aa, Artificial Sequence; identical to SEQ ID NO: 6130
  GFR-binding peptide
  MOD_RES (2), (4), (38): Xaa is C or S
  MOD_RES (16), (17), (18), (19), (20): Xaa is A or G
  MOD_RES (21), (22), (23), (24): Xaa is A or G or is absent

SEQ ID NO: 65167 - protein, 37 aa, Artificial Sequence; identical to SEQ ID NO: 6131
  GFR-binding peptide
  MOD_RES (2), (4): Xaa is C or S
  MOD_RES (16), (17), (18), (19), (20): Xaa is A or G
  MOD_RES (21), (22), (23), (24): Xaa is A or G or is absent

SEQ ID NO: 65168 - protein, 33 aa, Artificial Sequence; identical to SEQ ID NO: 6135
  GFR-binding peptide
  MOD_RES (12), (13), (14), (15), (16): Xaa is A or G
  MOD_RES (17), (18), (19), (20): Xaa is A or G or is absent

SEQ ID NO: 65169 - protein, 37 aa, Artificial Sequence; identical to SEQ ID NO: 32251
  GFR-binding peptide
  MOD_RES (2), (4), (36), (37): Xaa is C or S

SEQ ID NO: 65170 - protein, 36 aa, Artificial Sequence; identical to SEQ ID NO: 27266
  GFR-binding peptide
  MOD_RES (1), (3), (35), (36): Xaa is C or S

SEQ ID NO: 65171 - protein, 35 aa, Artificial Sequence
  GFR-binding peptide
  MOD_RES (2), (34), (35): Xaa is C or S
GXRDVVMGRHKRLIIQQKDNYYLMSTASMKTPTXX

SEQ ID NO: 65172 - protein, 39 aa, Artificial Sequence
  GFR-binding peptide
  MOD_RES (1), (3), (37), (38): Xaa is C or S
  MOD_RES (15), (16), (17), (18), (19): Xaa is A or G
  MOD_RES (20), (21), (22), (23): Xaa is A or G or is absent
XAXSEVTMNPIKGYXXXXXXXXXFYLINIPSMKEPVXXP

SEQ ID NO: 65173 - protein, 32 aa, Artificial Sequence; identical to SEQ ID NO: 6142
  GFR-binding peptide
  MOD_RES (31), (32): Xaa is C or S

SEQ ID NO: 65174 - protein, 40 aa, Artificial Sequence; identical to SEQ ID NO: 6144
  GFR-binding peptide
  MOD_RES (1), (3), (36), (37): Xaa is C or S
  MOD_RES (14), (15), (16), (17), (18): Xaa is A or G
  MOD_RES (19), (20), (21), (22): Xaa is A or G or is absent

SEQ ID NO: 65175 - protein, 38 aa, Artificial Sequence; identical to SEQ ID NO: 6145
  GFR-binding peptide
  MOD_RES (2), (4), (36), (37): Xaa is C or S

SEQ ID NO: 65176 - protein, 38 aa, Artificial Sequence; identical to SEQ ID NO: 6147
  GFR-binding peptide
  MOD_RES (33), (34): Xaa is C or S
  MOD_RES (11), (12), (13), (14), (15): Xaa is A or G
  MOD_RES (16), (17), (18), (19): Xaa is A or G or is absent

SEQ ID NO: 65177 - protein, 42 aa, Artificial Sequence; identical to SEQ ID NO: 27277
  GFR-binding peptide
  MOD_RES (2), (4), (38), (39): Xaa is C or S
  MOD_RES (16), (17), (18), (19), (20): Xaa is A or G
  MOD_RES (21), (22), (23), (24): Xaa is A or G or is absent

SEQ ID NO: 65178 - protein, 34 aa, Artificial Sequence; identical to SEQ ID NO: 6150
  GFR-binding peptide
  MOD_RES (33), (34): Xaa is C or S
  MOD_RES (11), (12), (13), (14), (15): Xaa is A or G
  MOD_RES (16), (17), (18), (19): Xaa is A or G or is absent

SEQ ID NO: 65179 - protein, 39 aa, Artificial Sequence; identical to SEQ ID NO: 27282
  GFR-binding peptide
  MOD_RES (1), (33), (34): Xaa is C or S

SEQ ID NO: 65180 - protein, 40 aa, Artificial Sequence; identical to SEQ ID NO: 27285
  GFR-binding peptide
  MOD_RES (1), (35), (36): Xaa is C or S
  MOD_RES (13), (14), (15), (16), (17): Xaa is A or G
  MOD_RES (18), (19), (20), (21): Xaa is A or G or is absent

SEQ ID NO: 65181 - protein, 37 aa, Artificial Sequence
  GFR-binding peptide
  MOD_RES (34), (35): Xaa is C or S
  MOD_RES (12), (13), (14), (15), (16): Xaa is A or G
  MOD_RES (17), (18), (19), (20): Xaa is A or G or is absent
RDVVMGEYKFKXXXXXXXXXLYLMSIPEMKTPTXXPG

SEQ ID NO: 65182 - protein, 34 aa, Artificial Sequence; identical to SEQ ID NO: 32269
  GFR-binding peptide
  MOD_RES (34), (34): Xaa is C or S
  MOD_RES (12), (13), (14), (15), (16): Xaa is A or G
  MOD_RES (17), (18), (19), (20): Xaa is A or G or is absent

SEQ ID NO: 65183 - protein, 39 aa, Artificial Sequence; identical to SEQ ID NO: 27287
  GFR-binding peptide
  MOD_RES (33), (33): Xaa is C or S
  MOD_RES (11), (12), (13), (14), (15): Xaa is A or G
  MOD_RES (16), (17), (18), (19): Xaa is A or G or is absent

SEQ ID NO: 65184 - protein, 33 aa, Artificial Sequence; identical to SEQ ID NO: 27291
  GFR-binding peptide
  MOD_RES (32), (33): Xaa is C or S

SEQ ID NO: 65185 - protein, 40 aa, Artificial Sequence
  GFR-binding peptide
  MOD_RES (1), (3), (36), (37): Xaa is C or S
  MOD_RES (14), (15), (16), (17), (18): Xaa is A or G
  MOD_RES (19), (20), (21), (22): Xaa is A or G or is absent
XKXSRVIMPIKGYXXXXXXXXXFYLINIPSLAQPVXXPAA

SEQ ID NO: 65186 - protein, 38 aa, Artificial Sequence; identical to SEQ ID NO: 27292
  GFR-binding peptide
  MOD_RES (2), (4), (36), (37): Xaa is C or S

SEQ ID NO: 65187 - protein, 36 aa, Artificial Sequence
  GFR-binding peptide
  MOD_RES (1), (3): Xaa is C or S
  MOD_RES (15), (16), (17), (18), (19): Xaa is A or G
  MOD_RES (20), (21), (22), (23): Xaa is A or G or is absent
XAXSEVTMNPIKGYXXXXXXXXXFYLINIPSMKEPV

SEQ ID NO: 65188 - protein, 39 aa, Artificial Sequence
  GFR-binding peptide
  MOD_RES (33), (34): Xaa is C or S
  MOD_RES (11), (12), (13), (14), (15): Xaa is A or G
  MOD_RES (16), (17), (18), (19): Xaa is A or G or is absent
EVVMDEYKFKXXXXXXXXXLYLISIPELRTPVXXTPPTS

SEQ ID NO: 65189 - protein, 42 aa, Artificial Sequence; identical to SEQ ID NO: 32277
  GFR-binding peptide
  MOD_RES (1), (3), (37), (38): Xaa is C or S
  MOD_RES (15), (16), (17), (18), (19): Xaa is A or G
  MOD_RES (20), (21), (22), (23): Xaa is A or G or is absent

SEQ ID NO: 65190 - protein, 34 aa, Artificial Sequence; identical to SEQ ID NO: 27299
  GFR-binding peptide
  MOD_RES (1), (3): Xaa is C or S

SEQ ID NO: 65191 - protein, 41 aa, Artificial Sequence; identical to SEQ ID NO: 13560
  GFR-binding peptide
  MOD_RES (2), (36), (37): Xaa is C or S
  MOD_RES (14), (15), (16), (17), (18): Xaa is A or G
  MOD_RES (19), (20), (21), (22): Xaa is A or G or is absent

SEQ ID NO: 65192 - protein, 40 aa, Artificial Sequence; identical to SEQ ID NO: 27302
  GFR-binding peptide
  MOD_RES (2), (34), (35): Xaa is C or S

SEQ ID NO: 65193 - protein, 36 aa, Artificial Sequence; identical to SEQ ID NO: 6163
  GFR-binding peptide
  MOD_RES (31), (31): Xaa is C or S

SEQ ID NO: 65194 - protein, 34 aa, Artificial Sequence; identical to SEQ ID NO: 27305
  GFR-binding peptide
  MOD_RES (32), (32): Xaa is C or S

SEQ ID NO: 65195 - protein, 39 aa, Artificial Sequence; identical to SEQ ID NO: 6165
  GFR-binding peptide
  MOD_RES (1), (3), (37), (38): Xaa is C or S
  MOD_RES (15), (16), (17), (18), (19): Xaa is A or G
  MOD_RES (20), (21), (22), (23): Xaa is A or G or is absent

SEQ ID NO: 65196 - protein, 41 aa, Artificial Sequence; identical to SEQ ID NO: 6166
  GFR-binding peptide
  MOD_RES (1), (3), (36), (37): Xaa is C or S
  MOD_RES (14), (15), (16), (17), (18): Xaa is A or G
  MOD_RES (19), (20), (21), (22): Xaa is A or G or is absent

SEQ ID NO: 65197 - protein, 39 aa, Artificial Sequence
  GFR-binding peptide
  MOD_RES (2), (33), (34): Xaa is C or S
KXSKVVMPIKGYVKPTRGVFYLINIPSLDQPVXXPSASA

SEQ ID NO: 65198 - protein, 36 aa, Artificial Sequence; identical to SEQ ID NO: 6172
  GFR-binding peptide
  MOD_RES (2), (34), (35): Xaa is C or S

SEQ ID NO: 65199 - protein, 35 aa, Artificial Sequence; identical to SEQ ID NO: 6174
  GFR-binding peptide
  MOD_RES (2), (4), (35): Xaa is C or S

SEQ ID NO: 65200 - protein, 36 aa, Artificial Sequence; identical to SEQ ID NO: 6176
  GFR-binding peptide
  MOD_RES (1), (35), (36): Xaa is C or S
  MOD_RES (13), (14), (15), (16), (17): Xaa is A or G
  MOD_RES (18), (19), (20), (21): Xaa is A or G or is absent

SEQ ID NO: 65201 - protein, 35 aa, Artificial Sequence
  GFR-binding peptide
  MOD_RES (2), (34), (35): Xaa is C or S
GXRDVVMGEYKFKIIQQKDNLYLMSIPEMKTPTXX

SEQ ID NO: 65202 - protein, 36 aa, Artificial Sequence; identical to SEQ ID NO: 32293
  GFR-binding peptide
  MOD_RES (2), (34): Xaa is C or S

SEQ ID NO: 65203 - protein, 36 aa, Artificial Sequence; identical to SEQ ID NO: 27313
  GFR-binding peptide
  MOD_RES (2), (36): Xaa is C or S
  MOD_RES (14), (15), (16), (17), (18): Xaa is A or G
  MOD_RES (19), (20), (21), (22): Xaa is A or G or is absent

SEQ ID NO: 65204 - protein, 36 aa, Artificial Sequence
  GFR-binding peptide
  MOD_RES (31), (32): Xaa is C or S
EVTMNYHYKLVVNKNEDKYLISIPSMKEPVXXPEPI

SEQ ID NO: 65205 - protein, 37 aa, Artificial Sequence; identical to SEQ ID NO: 27316
  GFR-binding peptide
  MOD_RES (2), (34), (35): Xaa is C or S

SEQ ID NO: 65206 - protein, 33 aa, Artificial Sequence; identical to SEQ ID NO: 6179
  GFR-binding peptide
  MOD_RES (31), (32): Xaa is C or S

SEQ ID NO: 65207 - protein, 38 aa, Artificial Sequence
  GFR-binding peptide
  MOD_RES (2), (35), (36): Xaa is C or S
  MOD_RES (13), (14), (15), (16), (17): Xaa is A or G
  MOD_RES (18), (19), (20), (21): Xaa is A or G or is absent
KXSRVIMPIKGYXXXXXXXXXFYLINIPSLAQPVXXPA

SEQ ID NO: 65208 - protein, 40 aa, Artificial Sequence; identical to SEQ ID NO: 32303
  GFR-binding peptide
  MOD_RES (6), (7): Xaa is C or S
  MOD_RES (21), (22), (23), (24), (25): Xaa is A or G
  MOD_RES (26), (27), (28), (29): Xaa is A or G or is absent

SEQ ID NO: 65209 - protein, 34 aa, Artificial Sequence; identical to SEQ ID NO: 6184
  GFR-binding peptide
  MOD_RES (14), (15), (16), (17), (18): Xaa is A or G
  MOD_RES (19), (20), (21), (22): Xaa is A or G or is absent

SEQ ID NO: 65210 - protein, 31 aa, Artificial Sequence
  GFR-binding peptide
  MOD_RES (1), (1): Xaa is C or S
XVPQALSPINILYFVGRKPKVYGKIPMIVRS

SEQ ID NO: 65211 - protein, 36 aa, Artificial Sequence
  GFR-binding peptide
  MOD_RES (5), (6): Xaa is C or S
IPEPXXVPEKMEPISILYLDENKNVVKFKYENMTVE

SEQ ID NO: 65212 - protein, 32 aa, Artificial Sequence
  GFR-binding peptide
  MOD_RES (1), (2): Xaa is C or S
XXVPEKMSATSILYYDENKNVVLRKHRNMTVE

SEQ ID NO: 65213 - protein, 42 aa, Artificial Sequence; identical to SEQ ID NO: 32308
  GFR-binding peptide
  MOD_RES (5), (6), (40), (42): Xaa is C or S
  MOD_RES (20), (21), (22), (23), (24): Xaa is A or G
  MOD_RES (25), (26), (27), (28): Xaa is A or G or is absent

SEQ ID NO: 65214 - protein, 38 aa, Artificial Sequence; identical to SEQ ID NO: 6190
  GFR-binding peptide
  MOD_RES (2), (3), (36), (38): Xaa is C or S
  MOD_RES (17), (18), (19), (20), (21): Xaa is A or G
  MOD_RES (22), (23), (24), (25): Xaa is A or G or is absent

SEQ ID NO: 65215 - protein, 40 aa, Artificial Sequence; identical to SEQ ID NO: 27328
  GFR-binding peptide
  MOD_RES (4), (5), (37), (39): Xaa is C or S

SEQ ID NO: 65216 - protein, 38 aa, Artificial Sequence
  GFR-binding peptide
  MOD_RES (5), (6): Xaa is C or S
  MOD_RES (20), (21), (22), (23), (24): Xaa is A or G
  MOD_RES (25), (26), (27), (28): Xaa is A or G or is absent
SASPXXVPQDLSPINILYFXXXXXXXXXYGKIPMVVKS

SEQ ID NO: 65217 - protein, 39 aa, Artificial Sequence
  GFR-binding peptide
  MOD_RES (6), (7), (39): Xaa is C or S
GIPEPXXVPEKMNAISILYFDENKNVVLKKYRNMTVESX

SEQ ID NO: 65218 - protein, 36 aa, Artificial Sequence; identical to SEQ ID NO: 6192
  GFR-binding peptide
  MOD_RES (3), (4), (36): Xaa is C or S

SEQ ID NO: 65219 - protein, 32 aa, Artificial Sequence; identical to SEQ ID NO: 6193
  GFR-binding peptide
  MOD_RES (1), (32): Xaa is C or S

SEQ ID NO: 65220 - protein, 37 aa, Artificial Sequence; identical to SEQ ID NO: 6194
  GFR-binding peptide
  MOD_RES (4), (5): Xaa is C or S
  MOD_RES (19), (20), (21), (22), (23): Xaa is A or G
  MOD_RES (24), (25), (26), (27): Xaa is A or G or is absent

SEQ ID NO: 65221 - protein, 35 aa, Artificial Sequence; identical to SEQ ID NO: 6196
  GFR-binding peptide
  MOD_RES (1), (35): Xaa is C or S
  MOD_RES (15), (16), (17), (18), (19): Xaa is A or G
  MOD_RES (20), (21), (22), (23): Xaa is A or G or is absent

SEQ ID NO: 65222 - protein, 39 aa, Artificial Sequence; identical to SEQ ID NO: 6197
  GFR-binding peptide
  MOD_RES (5), (6), (39): Xaa is C or S
  MOD_RES (20), (21), (22), (23), (24): Xaa is A or G
  MOD_RES (25), (26), (27), (28): Xaa is A or G or is absent

SEQ ID NO: 65223 - protein, 33 aa, Artificial Sequence
  GFR-binding peptide
  MOD_RES (1), (33): Xaa is C or S
XVPTRLSPISILYKDSANNVVLKYHYDMVVESX

SEQ ID NO: 65224 - protein, 32 aa, Artificial Sequence
  GFR-binding peptide
  MOD_RES (1), (1): Xaa is C or S
XVPTRLEPISILYLDSANNVVKFKYEDMVVES

SEQ ID NO: 65225 - protein, 35 aa, Artificial Sequence; identical to SEQ ID NO: 6199
  GFR-binding peptide
  MOD_RES (4), (5): Xaa is C or S

SEQ ID NO: 65226 - protein, 35 aa, Artificial Sequence; identical to SEQ ID NO: 32323
  GFR-binding peptide
  MOD_RES (2), (3): Xaa is C or S
  MOD_RES (17), (18), (19), (20), (21): Xaa is A or G
  MOD_RES (22), (23), (24), (25): Xaa is A or G or is absent

SEQ ID NO: 65227 - protein, 36 aa, Artificial Sequence; identical to SEQ ID NO: 32326
  GFR-binding peptide
  MOD_RES (4), (5): Xaa is C or S

SEQ ID NO: 65228 - protein, 37 aa, Artificial Sequence; identical to SEQ ID NO: 27341
  GFR-binding peptide
  MOD_RES (4), (5), (36): Xaa is C or S

SEQ ID NO: 65229 - protein, 33 aa, Artificial Sequence; identical to SEQ ID NO: 6205
  GFR-binding peptide
  MOD_RES (14), (15), (16), (17), (18): Xaa is A or G
  MOD_RES (19), (20), (21), (22): Xaa is A or G or is absent

SEQ ID NO: 65230 - protein, 38 aa, Artificial Sequence; identical to SEQ ID NO: 6207
  GFR-binding peptide
  MOD_RES (3), (4), (38): Xaa is C or S
  MOD_RES (18), (19), (20), (21), (22): Xaa is A or G
  MOD_RES (23), (24), (25), (26): Xaa is A or G or is absent

SEQ ID NO: 65231 - protein, 33 aa, Artificial Sequence
  GFR-binding peptide
  MOD_RES (1), (2), (33): Xaa is C or S
XXVPQALSPINILYFVGRKPKVYGKIPMIVRSX

SEQ ID NO: 65232 - protein, 39 aa, Artificial Sequence; identical to SEQ ID NO: 6208
  GFR-binding peptide
  MOD_RES (4), (5), (37), (39): Xaa is C or S

SEQ ID NO: 65233 - protein, 34 aa, Artificial Sequence; identical to SEQ ID NO: 27348
  GFR-binding peptide
  MOD_RES (1), (2), (34): Xaa is C or S

SEQ ID NO: 65234 - protein, 32 aa, Artificial Sequence; identical to SEQ ID NO: 6210
  GFR-binding peptide
  MOD_RES (1), (2): Xaa is C or S

SEQ ID NO: 65235 - protein, 41 aa, Artificial Sequence; identical to SEQ ID NO: 6212
  GFR-binding peptide
  MOD_RES (6), (7), (41): Xaa is C or S
  MOD_RES (21), (22), (23), (24), (25): Xaa is A or G
  MOD_RES (26), (27), (28), (29): Xaa is A or G or is absent

SEQ ID NO: 65236 - protein, 43 aa, Artificial Sequence
  GFR-binding peptide
  MOD_RES (6), (7), (41), (43): Xaa is C or S
  MOD_RES (21), (22), (23), (24), (25): Xaa is A or G
  MOD_RES (26), (27), (28), (29): Xaa is A or G or is absent
GSAGPXXTPTKMSATSMLYYXXXXXXXXXLRKHRGMVVDRXGX

SEQ ID NO: 65237 - protein, 43 aa, Artificial Sequence; identical to SEQ ID NO: 32336
  GFR-binding peptide
  MOD_RES (6), (7), (41), (43): Xaa is C or S
  MOD_RES (21), (22), (23), (24), (25): Xaa is A or G
  MOD_RES (26), (27), (28), (29): Xaa is A or G or is absent

SEQ ID NO: 65238 - protein, 39 aa, Artificial Sequence
  GFR-binding peptide
  MOD_RES (5), (6): Xaa is C or S
  MOD_RES (20), (21), (22), (23), (24): Xaa is A or G
  MOD_RES (25), (26), (27), (28): Xaa is A or G or is absent
ASKAXXVPTKLSATSILYYXXXXXXXXXLRKHRGMAVSE

SEQ ID NO: 65239 - protein, 35 aa, Artificial Sequence; identical to SEQ ID NO: 27354
  GFR-binding peptide
  MOD_RES (1), (33), (35): Xaa is C or S

SEQ ID NO: 65240 - protein, 44 aa, Artificial Sequence
  GFR-binding peptide
  MOD_RES (6), (7), (41), (43): Xaa is C or S
  MOD_RES (21), (22), (23), (24), (25): Xaa is A or G
  MOD_RES (26), (27), (28), (29): Xaa is A or G or is absent
GSAGPXXTPTKMEPISMLYLXXXXXXXXXKFKYEGMVVDRXGXS

SEQ ID NO: 65241 - protein, 36 aa, Artificial Sequence; identical to SEQ ID NO: 13601
  GFR-binding peptide
  MOD_RES (1), (35): Xaa is C or S
  MOD_RES (15), (16), (17), (18), (19): Xaa is A or G
  MOD_RES (20), (21), (22), (23): Xaa is A or G or is absent

SEQ ID NO: 65242 - protein, 40 aa, Artificial Sequence; identical to SEQ ID NO: 32338
  GFR-binding peptide
  MOD_RES (4), (38), (40): Xaa is C or S
  MOD_RES (18), (19), (20), (21), (22): Xaa is A or G
  MOD_RES (23), (24), (25), (26): Xaa is A or G or is absent

SEQ ID NO: 65243 - protein, 43 aa, Artificial Sequence; identical to SEQ ID NO: 6217
  GFR-binding peptide
  MOD_RES (5), (6), (40), (42): Xaa is C or S
  MOD_RES (20), (21), (22), (23), (24): Xaa is A or G
  MOD_RES (25), (26), (27), (28): Xaa is A or G or is absent

SEQ ID NO: 65244 - protein, 38 aa, Artificial Sequence
  GFR-binding peptide
  MOD_RES (1), (2), (36), (38): Xaa is C or S
  MOD_RES (16), (17), (18), (19), (20): Xaa is A or G
  MOD_RES (21), (22), (23), (24): Xaa is A or G or is absent
XXVPTRLEPISILYLXXXXXXXXXKFKYEDMVVESXGX

SEQ ID NO: 65245 - protein, 35 aa, Artificial Sequence; identical to SEQ ID NO: 6221
  GFR-binding peptide
  MOD_RES (2), (3), (35): Xaa is C or S

SEQ ID NO: 65246 - protein, 34 aa, Artificial Sequence
  GFR-binding peptide
  MOD_RES (2), (3), (34): Xaa is C or S
PXXVPQDLSPINILYFVGRTPKVYGKIPMVVKSX

SEQ ID NO: 65247 - protein, 37 aa, Artificial Sequence
  GFR-binding peptide
  MOD_RES (5), (6): Xaa is C or S
IPEPXXVPEKMNAISILYFDENKNVVLKKYRNMTVES

SEQ ID NO: 65248 - protein, 31 aa, Artificial Sequence; identical to SEQ ID NO: 27359
  GFR-binding peptide
  MOD_RES (1), (1): Xaa is C or S

SEQ ID NO: 65249 - protein, 35 aa, Artificial Sequence
  GFR-binding peptide
  MOD_RES (3), (4): Xaa is C or S
EPXXVPEKMSATSILYYDENKNVVLRKHRNMTVES

SEQ ID NO: 65250 - protein, 32 aa, Artificial Sequence; identical to SEQ ID NO: 6225
  GFR-binding peptide
  MOD_RES (32), (32): Xaa is C or S

SEQ ID NO: 65251 - protein, 39 aa, Artificial Sequence; identical to SEQ ID NO: 6229
  GFR-binding peptide
  MOD_RES (1), (2), (36), (38): Xaa is C or S
  MOD_RES (16), (17), (18), (19), (20): Xaa is A or G
  MOD_RES (21), (22), (23), (24): Xaa is A or G or is absent

SEQ ID NO: 65252 - protein, 37 aa, Artificial Sequence; identical to SEQ ID NO: 6230
  GFR-binding peptide
  MOD_RES (34), (36): Xaa is C or S
  MOD_RES (14), (15), (16), (17), (18): Xaa is A or G
  MOD_RES (19), (20), (21), (22): Xaa is A or G or is absent

SEQ ID NO: 65253 - protein, 42 aa, Artificial Sequence; identical to SEQ ID NO: 32350
  GFR-binding peptide
  MOD_RES (4), (5), (39), (41): Xaa is C or S
  MOD_RES (19), (20), (21), (22), (23): Xaa is A or G
  MOD_RES (24), (25), (26), (27): Xaa is A or G or is absent

SEQ ID NO: 65254 - protein, 38 aa, Artificial Sequence; identical to SEQ ID NO: 6232
  GFR-binding peptide
  MOD_RES (4), (5), (37): Xaa is C or S

SEQ ID NO: 65255 - protein, 37 aa, Artificial Sequence; identical to SEQ ID NO: 32352
  GFR-binding peptide
  MOD_RES (6), (7): Xaa is C or S

SEQ ID NO: 65256 - protein, 37 aa, Artificial Sequence
  GFR-binding peptide
  MOD_RES (6), (7): Xaa is C or S
GSAGPXXTPTKMSPISMLYKNDKQQIILKYHYGMVVD

SEQ ID NO: 65257 - protein, 35 aa, Artificial Sequence; identical to SEQ ID NO: 27368
  GFR-binding peptide
  MOD_RES (1), (2): Xaa is C or S
  MOD_RES (16), (17), (18), (19), (20): Xaa is A or G
  MOD_RES (21), (22), (23), (24): Xaa is A or G or is absent

SEQ ID NO: 65258 - protein, 37 aa, Artificial Sequence
  GFR-binding peptide
  MOD_RES (4), (5): Xaa is C or S
  MOD_RES (19), (20), (21), (22), (23): Xaa is A or G
  MOD_RES (24), (25), (26), (27): Xaa is A or G or is absent
PASXXVPARLSATSILYYXXXXXXXXXLRKHRDMVVE

SEQ ID NO: 65259 - protein, 36 aa, Artificial Sequence; identical to SEQ ID NO: 6235
  GFR-binding peptide
  MOD_RES (1), (2), (36): Xaa is C or S
  MOD_RES (16), (17), (18), (19), (20): Xaa is A or G
  MOD_RES (21), (22), (23), (24): Xaa is A or G or is absent

SEQ ID NO: 65260 - protein, 39 aa, Artificial Sequence; identical to SEQ ID NO: 32357
  GFR-binding peptide
  MOD_RES (5), (6): Xaa is C or S
  MOD_RES (20), (21), (22), (23), (24): Xaa is A or G
  MOD_RES (25), (26), (27), (28): Xaa is A or G or is absent

SEQ ID NO: 65261 - protein, 34 aa, Artificial Sequence; identical to SEQ ID NO: 57288
  GFR-binding peptide
  MOD_RES (2), (3), (34): Xaa is C or S

SEQ ID NO: 65262 - protein, 40 aa, Artificial Sequence; identical to SEQ ID NO: 27377
  GFR-binding peptide
  MOD_RES (5), (6), (38), (40): Xaa is C or S

SEQ ID NO: 65263 - protein, 40 aa, Artificial Sequence; identical to SEQ ID NO: 6239
  GFR-binding peptide
  MOD_RES (4), (5), (38), (40): Xaa is C or S

SEQ ID NO: 65264 - protein, 36 aa, Artificial Sequence; identical to SEQ ID NO: 6240
  GFR-binding peptide
  MOD_RES (34), (36): Xaa is C or S
  MOD_RES (14), (15), (16), (17), (18): Xaa is A or G
  MOD_RES (19), (20), (21), (22): Xaa is A or G or is absent

SEQ ID NO: 65265 - protein, 43 aa, Artificial Sequence; identical to SEQ ID NO: 27381
  GFR-binding peptide
  MOD_RES (5), (6), (40), (42): Xaa is C or S
  MOD_RES (20), (21), (22), (23), (24): Xaa is A or G
  MOD_RES (25), (26), (27), (28): Xaa is A or G or is absent

SEQ ID NO: 65266 - protein, 37 aa, Artificial Sequence; identical to SEQ ID NO: 27383
  GFR-binding peptide
  MOD_RES (2), (3), (36): Xaa is C or S
  MOD_RES (17), (18), (19), (20), (21): Xaa is A or G
  MOD_RES (22), (23), (24), (25): Xaa is A or G or is absent

SEQ ID NO: 65267 - protein, 38 aa, Artificial Sequence
  GFR-binding peptide
  MOD_RES (3), (4), (37): Xaa is C or S
  MOD_RES (18), (19), (20), (21), (22): Xaa is A or G
  MOD_RES (23), (24), (25), (26): Xaa is A or G or is absent
STXXAPVKTSATSMLYYXXXXXXXXXLRKHRMIVEEXG

SEQ ID NO: 65268 - protein, 37 aa, Artificial Sequence; identical to SEQ ID NO: 32371
  GFR-binding peptide
  MOD_RES (3), (4), (36): Xaa is C or S

SEQ ID NO: 65269 - protein, 36 aa, Artificial Sequence; identical to SEQ ID NO: 32372
  GFR-binding peptide
  MOD_RES (3), (4): Xaa is C or S
  MOD_RES (18), (19), (20), (21), (22): Xaa is A or G
  MOD_RES (23), (24), (25), (26): Xaa is A or G or is absent

SEQ ID NO: 65270 - protein, 37 aa, Artificial Sequence; identical to SEQ ID NO: 27386
  GFR-binding peptide
  MOD_RES (3), (4), (36): Xaa is C or S

SEQ ID NO: 65271 - protein, 30 aa, Artificial Sequence
  GFR-binding peptide
VSQDLSPINILYFIGKTPKIYGKIPMIVKS

SEQ ID NO: 65272 - protein, 30 aa, Artificial Sequence; identical to SEQ ID NO: 6247
  GFR-binding peptide

SEQ ID NO: 65273 - protein, 34 aa, Artificial Sequence
  GFR-binding peptide
  MOD_RES (3), (4): Xaa is C or S
SPXXVPQDLSPINILYFVGRTPKVYGKIPMVVKS

SEQ ID NO: 65274 - protein, 37 aa, Artificial Sequence
  GFR-binding peptide
  MOD_RES (5), (6): Xaa is C or S
IPEPXXVPEKMEPISILYLDENKNVVKFKYENMTVES

SEQ ID NO: 65275 - protein, 43 aa, Artificial Sequence; identical to SEQ ID NO: 6253
  GFR-binding peptide
  MOD_RES (5), (6), (40), (42): Xaa is C or S
  MOD_RES (20), (21), (22), (23), (24): Xaa is A or G
  MOD_RES (25), (26), (27), (28): Xaa is A or G or is absent

SEQ ID NO: 65276 - protein, 36 aa, Artificial Sequence; identical to SEQ ID NO: 27393
  GFR-binding peptide
  MOD_RES (2), (3): Xaa is C or S
  MOD_RES (17), (18), (19), (20), (21): Xaa is A or G
  MOD_RES (22), (23), (24), (25): Xaa is A or G or is absent

SEQ ID NO: 65277 - protein, 34 aa, Artificial Sequence
  GFR-binding peptide
  MOD_RES (1), (34): Xaa is C or S
  MOD_RES (15), (16), (17), (18), (19): Xaa is A or G
  MOD_RES (20), (21), (22), (23): Xaa is A or G or is absent
XAPVKTSATSMLYYXXXXXXXXXLRKHRMIVEEX

SEQ ID NO: 65278 - protein, 41 aa, Artificial Sequence
  GFR-binding peptide
  MOD_RES (5), (6), (40): Xaa is C or S
  MOD_RES (20), (21), (22), (23), (24): Xaa is A or G
  MOD_RES (25), (26), (27), (28): Xaa is A or G or is absent
IPEPXXVPEKMSPISILYKXXXXXXXXXLKYHYNMTVESXA

SEQ ID NO: 65279 - protein, 33 aa, Artificial Sequence; identical to SEQ ID NO: 6261
  GFR-binding peptide
  MOD_RES (1), (1): Xaa is C or S
  MOD_RES (15), (16), (17), (18), (19): Xaa is A or G
  MOD_RES (20), (21), (22), (23): Xaa is A or G or is absent

SEQ ID NO: 65280 - protein, 38 aa, Artificial Sequence; identical to SEQ ID NO: 6262
  GFR-binding peptide
  MOD_RES (4), (5), (38): Xaa is C or S
  MOD_RES (19), (20), (21), (22), (23): Xaa is A or G
  MOD_RES (24), (25), (26), (27): Xaa is A or G or is absent

SEQ ID NO: 65281 - protein, 37 aa, Artificial Sequence; identical to SEQ ID NO: 6263
  GFR-binding peptide
  MOD_RES (1), (35), (37): Xaa is C or S
  MOD_RES (15), (16), (17), (18), (19): Xaa is A or G
  MOD_RES (20), (21), (22), (23): Xaa is A or G or is absent

SEQ ID NO: 65282 - protein, 34 aa, Artificial Sequence; identical to SEQ ID NO: 32399
  GFR-binding peptide
  MOD_RES (1), (33): Xaa is C or S

SEQ ID NO: 65283 - protein, 39 aa, Artificial Sequence
  GFR-binding peptide
  MOD_RES (6), (7): Xaa is C or S
  MOD_RES (21), (22), (23), (24), (25): Xaa is A or G
  MOD_RES (26), (27), (28), (29): Xaa is A or G or is absent
AAPASXXVPARLSATSILYYXXXXXXXXXLRKHRDMVVE

SEQ ID NO: 65284 - protein, 39 aa, Artificial Sequence; identical to SEQ ID NO: 6264
  GFR-binding peptide
  MOD_RES (3), (4), (38): Xaa is C or S
  MOD_RES (18), (19), (20), (21), (22): Xaa is A or G
  MOD_RES (23), (24), (25), (26): Xaa is A or G or is absent

SEQ ID NO: 65285 - protein, 34 aa, Artificial Sequence; identical to SEQ ID NO: 57320
  GFR-binding peptide
  MOD_RES (31), (33): Xaa is C or S

SEQ ID NO: 65286 - protein, 40 aa, Artificial Sequence; identical to SEQ ID NO: 32403
  GFR-binding peptide
  MOD_RES (4), (5), (37), (39): Xaa is C or S

SEQ ID NO: 65287 - protein, 39 aa, Artificial Sequence; identical to SEQ ID NO: 6266
  GFR-binding peptide
  MOD_RES (6), (7): Xaa is C or S
  MOD_RES (21), (22), (23), (24), (25): Xaa is A or G
  MOD_RES (26), (27), (28), (29): Xaa is A or G or is absent

SEQ ID NO: 65288 - protein, 39 aa, Artificial Sequence; identical to SEQ ID NO: 27405
  GFR-binding peptide
  MOD_RES (6), (7): Xaa is C or S
  MOD_RES (21), (22), (23), (24), (25): Xaa is A or G
  MOD_RES (26), (27), (28), (29): Xaa is A or G or is absent

SEQ ID NO: 65289 - protein, 33 aa, Artificial Sequence; identical to SEQ ID NO: 27406
  GFR-binding peptide
  MOD_RES (1), (33): Xaa is C or S

SEQ ID NO: 65290 - protein, 39 aa, Artificial Sequence; identical to SEQ ID NO: 57326
  GFR-binding peptide
  MOD_RES (3), (4), (38): Xaa is C or S
  MOD_RES (18), (19), (20), (21), (22): Xaa is A or G
  MOD_RES (23), (24), (25), (26): Xaa is A or G or is absent

SEQ ID NO: 65291 - protein, 36 aa, Artificial Sequence
  GFR-binding peptide
  MOD_RES (3), (4): Xaa is C or S
  MOD_RES (18), (19), (20), (21), (22): Xaa is A or G
  MOD_RES (23), (24), (25), (26): Xaa is A or G or is absent
EPXXVPEKMSPISILYKXXXXXXXXXLKYHYNMTVE

SEQ ID NO: 65292 - protein, 32 aa, Artificial Sequence; identical to SEQ ID NO: 32410
  GFR-binding peptide
  MOD_RES (1), (1): Xaa is C or S

SEQ ID NO: 65293 - protein, 33 aa, Artificial Sequence
  GFR-binding peptide
  MOD_RES (1), (2): Xaa is C or S
XXVPEKMSATSILYYDENKNVVLRKHRNMTVES

SEQ ID NO: 65294 - protein, 36 aa, Artificial Sequence; identical to SEQ ID NO: 27407
  GFR-binding peptide
  MOD_RES (1), (2), (33), (35): Xaa is C or S

SEQ ID NO: 65295 - protein, 37 aa, Artificial Sequence; identical to SEQ ID NO: 6272
  GFR-binding peptide
  MOD_RES (5), (6): Xaa is C or S

SEQ ID NO: 65296 - protein, 41 aa, Artificial Sequence
  GFR-binding peptide
  MOD_RES (3), (4), (38), (40): Xaa is C or S
  MOD_RES (18), (19), (20), (21), (22): Xaa is A or G
  MOD_RES (23), (24), (25), (26): Xaa is A or G or is absent
EPXXVPEKMNAISILYFXXXXXXXXXLKKYRNMTVESXAXR

SEQ ID NO: 65297 - protein, 38 aa, Artificial Sequence; identical to SEQ ID NO: 6276
  GFR-binding peptide
  MOD_RES (5), (6), (38): Xaa is C or S

SEQ ID NO: 65298 - protein, 39 aa, Artificial Sequence; identical to SEQ ID NO: 6278
  GFR-binding peptide
  MOD_RES (5), (6), (38): Xaa is C or S

SEQ ID NO: 65299 - protein, 42 aa, Artificial Sequence
  GFR-binding peptide
  MOD_RES (6), (7), (41): Xaa is C or S
  MOD_RES (21), (22), (23), (24), (25): Xaa is A or G
  MOD_RES (26), (27), (28), (29): Xaa is A or G or is absent
GIPEPXXVPEKMSPINILYFXXXXXXXXXYGKIPNMTVESXA

SEQ ID NO: 65300 - protein, 37 aa, Artificial Sequence; identical to SEQ ID NO: 6279
  GFR-binding peptide
  MOD_RES (1), (34), (36): Xaa is C or S

SEQ ID NO: 65301 - protein, 40 aa, Artificial Sequence
  GFR-binding peptide
  MOD_RES (2), (3), (37), (39): Xaa is C or S
  MOD_RES (17), (18), (19), (20), (21): Xaa is A or G
  MOD_RES (22), (23), (24), (25): Xaa is A or G or is absent
PXXVPEKMNAISILYFXXXXXXXXXLKKYRNMTVESXAXR

SEQ ID NO: 65302 - protein, 33 aa, Artificial Sequence
  GFR-binding peptide
  MOD_RES (14), (15), (16), (17), (18): Xaa is A or G
  MOD_RES (19), (20), (21), (22): Xaa is A or G or is absent
VPTRLSPISILYKXXXXXXXXXLKYHYDMVVES

SEQ ID NO: 65303 - protein, 37 aa, Artificial Sequence; identical to SEQ ID NO: 6285
  GFR-binding peptide
  MOD_RES (6), (7): Xaa is C or S

SEQ ID NO: 65304 - protein, 44 aa, Artificial Sequence; identical to SEQ ID NO: 6288
  GFR-binding peptide
  MOD_RES (6), (7), (42), (44): Xaa is C or S
  MOD_RES (21), (22), (23), (24), (25): Xaa is A or G
  MOD_RES (26), (27), (28), (29): Xaa is A or G or is absent

SEQ ID NO: 65305 - protein, 37 aa, Artificial Sequence
  GFR-binding peptide
  MOD_RES (4), (5), (36): Xaa is C or S
ASPXXVPQDLSPINILYFVGRTPKVYGKIPMVVKSXK

SEQ ID NO: 65306 - protein, 39 aa, Artificial Sequence; identical to SEQ ID NO: 6289
  GFR-binding peptide
  MOD_RES (2), (3), (37), (39): Xaa is C or S
  MOD_RES (17), (18), (19), (20), (21): Xaa is A or G
  MOD_RES (22), (23), (24), (25): Xaa is A or G or is absent

SEQ ID NO: 65307 - protein, 40 aa, Artificial Sequence; identical to SEQ ID NO: 6291
  GFR-binding peptide
  MOD_RES (2), (3), (38), (40): Xaa is C or S
  MOD_RES (17), (18), (19), (20), (21): Xaa is A or G
  MOD_RES (22), (23), (24), (25): Xaa is A or G or is absent

SEQ ID NO: 65308 - protein, 35 aa, Artificial Sequence; identical to SEQ ID NO: 6293
  GFR-binding peptide
  MOD_RES (1), (33), (35): Xaa is C or S

SEQ ID NO: 65309 - protein, 41 aa, Artificial Sequence; identical to SEQ ID NO: 6294
  GFR-binding peptide
  MOD_RES (5), (6), (40): Xaa is C or S
  MOD_RES (20), (21), (22), (23), (24): Xaa is A or G
  MOD_RES (25), (26), (27), (28): Xaa is A or G or is absent

SEQ ID NO: 65310 - protein, 41 aa, Artificial Sequence; identical to SEQ ID NO: 27425
  GFR-binding peptide
  MOD_RES (6), (7), (39), (41): Xaa is C or S

SEQ ID NO: 65311 - protein, 44 aa, Artificial Sequence; identical to SEQ ID NO: 27426
  GFR-binding peptide
  MOD_RES (6), (7), (42), (44): Xaa is C or S
  MOD_RES (21), (22), (23), (24), (25): Xaa is A or G
  MOD_RES (26), (27), (28), (29): Xaa is A or G or is absent

SEQ ID NO: 65312 - protein, 39 aa, Artificial Sequence; identical to SEQ ID NO: 6295
  GFR-binding peptide
  MOD_RES (2), (3), (37), (39): Xaa is C or S
  MOD_RES (17), (18), (19), (20), (21): Xaa is A or G
  MOD_RES (22), (23), (24), (25): Xaa is A or G or is absent

SEQ ID NO: 65313 - protein, 35 aa, Artificial Sequence; identical to SEQ ID NO: 6297
  GFR-binding peptide
  MOD_RES (2), (3): Xaa is C or S
  MOD_RES (17), (18), (19), (20), (21): Xaa is A or G
  MOD_RES (22), (23), (24), (25): Xaa is A or G or is absent

SEQ ID NO: 65314 - protein, 39 aa, Artificial Sequence; identical to SEQ ID NO: 32436
  GFR-binding peptide
  MOD_RES (5), (6), (37), (39): Xaa is C or S

SEQ ID NO: 65315 - protein, 36 aa, Artificial Sequence; identical to SEQ ID NO: 6298
  GFR-binding peptide
  MOD_RES (2), (3), (36): Xaa is C or S
  MOD_RES (17), (18), (19), (20), (21): Xaa is A or G
  MOD_RES (22), (23), (24), (25): Xaa is A or G or is absent

SEQ ID NO: 65316 - protein, 42 aa, Artificial Sequence; identical to SEQ ID NO: 32439
  GFR-binding peptide
  MOD_RES (6), (7), (39), (41): Xaa is C or S

SEQ ID NO: 65317 - protein, 37 aa, Artificial Sequence; identical to SEQ ID NO: 6299
  GFR-binding peptide
  MOD_RES (1), (35), (37): Xaa is C or S
  MOD_RES (15), (16), (17), (18), (19): Xaa is A or G
  MOD_RES (20), (21), (22), (23): Xaa is A or G or is absent

SEQ ID NO: 65318 - protein, 34 aa, Artificial Sequence; identical to SEQ ID NO: 6300
  GFR-binding peptide
  MOD_RES (2), (3), (34): Xaa is C or S

SEQ ID NO: 65319 - protein, 38 aa, Artificial Sequence; identical to SEQ ID NO: 32443
  GFR-binding peptide
  MOD_RES (1), (2), (36), (38): Xaa is C or S
  MOD_RES (16), (17), (18), (19), (20): Xaa is A or G
  MOD_RES (21), (22), (23), (24): Xaa is A or G or is absent

SEQ ID NO: 65320 - protein, 36 aa, Artificial Sequence; identical to SEQ ID NO: 27431
  GFR-binding peptide
  MOD_RES (2), (3): Xaa is C or S
  MOD_RES (17), (18), (19), (20), (21): Xaa is A or G
  MOD_RES (22), (23), (24), (25): Xaa is A or G or is absent

SEQ ID NO: 65321 - protein, 37 aa, Artificial Sequence; identical to SEQ ID NO: 32452
  GFR-binding peptide
  MOD_RES (4), (5), (37): Xaa is C or S

SEQ ID NO: 65322 - protein, 34 aa, Artificial Sequence
  GFR-binding peptide
  MOD_RES (1), (2), (34): Xaa is C or S
XXVPEKMSPINILYFDENKNVVYGKIPNMTVESX

SEQ ID NO: 65323 - protein, 40 aa, Artificial Sequence; identical to SEQ ID NO: 6305
  GFR-binding peptide
  MOD_RES (4), (5), (37), (39): Xaa is C or S

SEQ ID NO: 65324 - protein, 37 aa, Artificial Sequence; identical to SEQ ID NO: 32458
  GFR-binding peptide
  MOD_RES (2), (3): Xaa is C or S
  MOD_RES (17), (18), (19), (20), (21): Xaa is A or G
  MOD_RES (22), (23), (24), (25): Xaa is A or G or is absent

SEQ ID NO: 65325 - protein, 38 aa, Artificial Sequence; identical to SEQ ID NO: 6307
  GFR-binding peptide
  MOD_RES (5), (6): Xaa is C or S
  MOD_RES (20), (21), (22), (23), (24): Xaa is A or G
  MOD_RES (25), (26), (27), (28): Xaa is A or G or is absent

SEQ ID NO: 65326 - protein, 31 aa, Artificial Sequence
  GFR-binding peptide
  MOD_RES (1), (1): Xaa is C or S
XTPTKMSPISMLYKNDKQQIILKYHYGMVVD

SEQ ID NO: 65327 - protein, 42 aa, Artificial Sequence
  GFR-binding peptide
  MOD_RES (6), (7), (39), (41): Xaa is C or S
STPPTXXVPTRLSATSILYYDSANNVVLRKHRDMVVESXGXR

SEQ ID NO: 65328 - protein, 42 aa, Artificial Sequence; identical to SEQ ID NO: 27448
  GFR-binding peptide
  MOD_RES (5), (6), (40), (42): Xaa is C or S
  MOD_RES (20), (21), (22), (23), (24): Xaa is A or G
  MOD_RES (25), (26), (27), (28): Xaa is A or G or is absent

SEQ ID NO: 65329 - protein, 34 aa, Artificial Sequence
  GFR-binding peptide
  MOD_RES (1), (32), (34): Xaa is C or S
XVPQALSPINILYFVGRKPKVYGKIPMIVRSXKX

SEQ ID NO: 65330 - protein, 40 aa, Artificial Sequence; identical to SEQ ID NO: 27450
  GFR-binding peptide
  MOD_RES (5), (6), (38), (40): Xaa is C or S

SEQ ID NO: 65331 - protein, 38 aa, Artificial Sequence
  GFR-binding peptide
  MOD_RES (3), (4), (36), (38): Xaa is C or S
PTXXVPTRLSATSILYYDSANNVVLRKHRDMVVESXGX

SEQ ID NO: 65332 - protein, 38 aa, Artificial Sequence; identical to SEQ ID NO: 27452
  GFR-binding peptide
  MOD_RES (1), (2), (35), (37): Xaa is C or S
  MOD_RES (16), (17), (18), (19), (20): Xaa is A or G
  MOD_RES (21), (22), (23), (24): Xaa is A or G or is absent

SEQ ID NO: 65333 - protein, 40 aa, Artificial Sequence
  GFR-binding peptide
  MOD_RES (6), (7), (39): Xaa is C or S
GSAGPXXTPTKMSPISMLYKNDKQQIILKYHYGMVVDRXG

SEQ ID NO: 65334 - protein, 40 aa, Artificial Sequence
  GFR-binding peptide
  MOD_RES (2), (3), (37), (39): Xaa is C or S
  MOD_RES (17), (18), (19), (20), (21): Xaa is A or G
  MOD_RES (22), (23), (24), (25): Xaa is A or G or is absent
PXXVPEKMEPISILYLXXXXXXXXXKFKYENMTVESXAXR

SEQ ID NO: 65335 - protein, 43 aa, Artificial Sequence; identical to SEQ ID NO: 32465
  GFR-binding peptide
  MOD_RES (5), (6), (40), (42): Xaa is C or S
  MOD_RES (20), (21), (22), (23), (24): Xaa is A or G
  MOD_RES (25), (26), (27), (28): Xaa is A or G or is absent

SEQ ID NO: 65336 - protein, 37 aa, Artificial Sequence; identical to SEQ ID NO: 27454
  GFR-binding peptide
  MOD_RES (3), (4), (36): Xaa is C or S

SEQ ID NO: 65337 - protein, 38 aa, Artificial Sequence; identical to SEQ ID NO: 6316
  GFR-binding peptide
  MOD_RES (5), (6), (38): Xaa is C or S

SEQ ID NO: 65338 - protein, 37 aa, Artificial Sequence
  GFR-binding peptide
  MOD_RES (1), (2), (34), (36): Xaa is C or S
XXVPEKMEPISILYLDENKNVVKFKYENMTVESXAXR

SEQ ID NO: 65339 - protein, 37 aa, Artificial Sequence; identical to SEQ ID NO: 6318
  GFR-binding peptide
  MOD_RES (3), (4), (35), (37): Xaa is C or S

SEQ ID NO: 65340 - protein, 37 aa, Artificial Sequence
  GFR-binding peptide
  MOD_RES (2), (3), (35), (37): Xaa is C or S
TXXVPTRLEPISILYLDSANNVVKFKYEDMVVESXGX

SEQ ID NO: 65341 - protein, 38 aa, Artificial Sequence; identical to SEQ ID NO: 27459
  GFR-binding peptide
  MOD_RES (4), (5), (37): Xaa is C or S

SEQ ID NO: 65342 - protein, 34 aa, Artificial Sequence
  GFR-binding peptide
  MOD_RES (1), (32), (34): Xaa is C or S
XAPVKTSPISMLYKDNGRVLLLKYHYMIVEEXGX

SEQ ID NO: 65343 - protein, 35 aa, Artificial Sequence; identical to SEQ ID NO: 6325
  GFR-binding peptide
  MOD_RES (34), (34): Xaa is C or S
  MOD_RES (14), (15), (16), (17), (18): Xaa is A or G
  MOD_RES (19), (20), (21), (22): Xaa is A or G or is absent

SEQ ID NO: 65344 - protein, 38 aa, Artificial Sequence; identical to SEQ ID NO: 57374
  GFR-binding peptide
  MOD_RES (4), (5), (37): Xaa is C or S

SEQ ID NO: 65345 - protein, 36 aa, Artificial Sequence; identical to SEQ ID NO: 6326
  GFR-binding peptide
  MOD_RES (3), (4), (36): Xaa is C or S

SEQ ID NO: 65346 - protein, 32 aa, Artificial Sequence; identical to SEQ ID NO: 6327
  GFR-binding peptide
  MOD_RES (1), (1): Xaa is C or S

SEQ ID NO: 65347 - protein, 41 aa, Artificial Sequence; identical to SEQ ID NO: 57381
  GFR-binding peptide
  MOD_RES (5), (6), (39), (41): Xaa is C or S
  MOD_RES (20), (21), (22), (23), (24): Xaa is A or G
  MOD_RES (25), (26), (27), (28): Xaa is A or G or is absent

SEQ ID NO: 65348 - protein, 35 aa, Artificial Sequence; identical to SEQ ID NO: 6331
  GFR-binding peptide
  MOD_RES (2), (3), (35): Xaa is C or S

SEQ ID NO: 65349 - protein, 36 aa, Artificial Sequence
  GFR-binding peptide
  MOD_RES (4), (5), (36): Xaa is C or S
AAPXXVPQALSPINILYFVGRKPKVYGKIPMIVRSX

SEQ ID NO: 65350 - protein, 37 aa, Artificial Sequence; identical to SEQ ID NO: 6332
  GFR-binding peptide
  MOD_RES (1), (2), (36): Xaa is C or S
  MOD_RES (16), (17), (18), (19), (20): Xaa is A or G
  MOD_RES (21), (22), (23), (24): Xaa is A or G or is absent

SEQ ID NO: 65351 - protein, 38 aa, Artificial Sequence
  GFR-binding peptide
  MOD_RES (6), (7): Xaa is C or S
HVPKPXXAPTKLSPISVLYKDDSSNVILKYHYNMVVRS

SEQ ID NO: 65352 - protein, 40 aa, Artificial Sequence
  GFR-binding peptide
  MOD_RES (6), (7), (39): Xaa is C or S
GIPEPXXVPEKMNAISILYFDENKNVVLKKYRNMTVESXA

SEQ ID NO: 65353 - protein, 42 aa, Artificial Sequence; identical to SEQ ID NO: 6334
  GFR-binding peptide
  MOD_RES (5), (6), (40), (42): Xaa is C or S
  MOD_RES (20), (21), (22), (23), (24): Xaa is A or G
  MOD_RES (25), (26), (27), (28): Xaa is A or G or is absent

SEQ ID NO: 65354 - protein, 34 aa, Artificial Sequence
  GFR-binding peptide
  MOD_RES (2), (3): Xaa is C or S
TXXVPTRLEPISILYLDSANNVVKFKYEDMVVES

SEQ ID NO: 65355 - protein, 33 aa, Artificial Sequence; identical to SEQ ID NO: 6338
  GFR-binding peptide
  MOD_RES (2), (3): Xaa is C or S

SEQ ID NO: 65356 - protein, 38 aa, Artificial Sequence; identical to SEQ ID NO: 27476
  GFR-binding peptide
  MOD_RES (3), (4), (38): Xaa is C or S
  MOD_RES (18), (19), (20), (21), (22): Xaa is A or G
  MOD_RES (23), (24), (25), (26): Xaa is A or G or is absent

SEQ ID NO: 65357 - protein, 36 aa, Artificial Sequence
  GFR-binding peptide
  MOD_RES (1), (33), (35): Xaa is C or S
XVPEKMSPISILYKDENKNVVLKYHYNMTVESXAXR

SEQ ID NO: 65358 - protein, 37 aa, Artificial Sequence; identical to SEQ ID NO: 27477
  GFR-binding peptide
  MOD_RES (4), (5): Xaa is C or S
  MOD_RES (19), (20), (21), (22), (23): Xaa is A or G
  MOD_RES (24), (25), (26), (27): Xaa is A or G or is absent

SEQ ID NO: 65359 - protein, 41 aa, Artificial Sequence
  GFR-binding peptide
  MOD_RES (5), (6), (40): Xaa is C or S
  MOD_RES (20), (21), (22), (23), (24): Xaa is A or G
  MOD_RES (25), (26), (27), (28): Xaa is A or G or is absent
IPEPXXVPEKMEPISILYLXXXXXXXXXKFKYENMTVESXA

SEQ ID NO: 65360 - protein, 36 aa, Artificial Sequence; identical to SEQ ID NO: 27478
  GFR-binding peptide
  MOD_RES (1), (35): Xaa is C or S
  MOD_RES (15), (16), (17), (18), (19): Xaa is A or G
  MOD_RES (20), (21), (22), (23): Xaa is A or G or is absent

SEQ ID NO: 65361 - protein, 36 aa, Artificial Sequence; identical to SEQ ID NO: 32499
  GFR-binding peptide
  MOD_RES (1), (2), (36): Xaa is C or S
  MOD_RES (16), (17), (18), (19), (20): Xaa is A or G
  MOD_RES (21), (22), (23), (24): Xaa is A or G or is absent

SEQ ID NO: 65362 - protein, 38 aa, Artificial Sequence; identical to SEQ ID NO: 13721
  GFR-binding peptide
  MOD_RES (5), (6): Xaa is C or S
  MOD_RES (20), (21), (22), (23), (24): Xaa is A or G
  MOD_RES (25), (26), (27), (28): Xaa is A or G or is absent

SEQ ID NO: 65363 - protein, 43 aa, Artificial Sequence; identical to SEQ ID NO: 6342
  GFR-binding peptide
  MOD_RES (6), (7), (40), (42): Xaa is C or S
  MOD_RES (21), (22), (23), (24), (25): Xaa is A or G
  MOD_RES (26), (27), (28), (29): Xaa is A or G or is absent

SEQ ID NO: 65364 - protein, 34 aa, Artificial Sequence
  GFR-binding peptide
  MOD_RES (31), (33): Xaa is C or S
VSQDLSPINILYFIGKTPKIYGKIPMIVKSXKXS

SEQ ID NO: 65365 - protein, 35 aa, Artificial Sequence; identical to SEQ ID NO: 27479
  GFR-binding peptide
  MOD_RES (1), (2), (34): Xaa is C or S

SEQ ID NO: 65366 - protein, 37 aa, Artificial Sequence; identical to SEQ ID NO: 6344
  GFR-binding peptide
  MOD_RES (2), (36): Xaa is C or S
  MOD_RES (16), (17), (18), (19), (20): Xaa is A or G
  MOD_RES (21), (22), (23), (24): Xaa is A or G or is absent

SEQ ID NO: 65367 - protein, 39 aa, Artificial Sequence; identical to SEQ ID NO: 27481
  GFR-binding peptide
  MOD_RES (4), (5), (39): Xaa is C or S
  MOD_RES (19), (20), (21), (22), (23): Xaa is A or G
  MOD_RES (24), (25), (26), (27): Xaa is A or G or is absent

SEQ ID NO: 65368 - protein, 37 aa, Artificial Sequence
  GFR-binding peptide
  MOD_RES (1), (2), (36): Xaa is C or S
  MOD_RES (16), (17), (18), (19), (20): Xaa is A or G
  MOD_RES (21), (22), (23), (24): Xaa is A or G or is absent
XXVPEKMEPISILYLXXXXXXXXXKFKYENMTVESXA

SEQ ID NO: 65369 - protein, 37 aa, Artificial Sequence; identical to SEQ ID NO: 27482
  GFR-binding peptide
  MOD_RES (2), (36): Xaa is C or S
  MOD_RES (16), (17), (18), (19), (20): Xaa is A or G
  MOD_RES (21), (22), (23), (24): Xaa is A or G or is absent

SEQ ID NO: 65370 - protein, 34 aa, Artificial Sequence; identical to SEQ ID NO: 13732
  GFR-binding peptide
  MOD_RES (2), (3): Xaa is C or S

SEQ ID NO: 65371 - protein, 37 aa, Artificial Sequence; identical to SEQ ID NO: 27488
  GFR-binding peptide
  MOD_RES (3), (35), (37): Xaa is C or S

SEQ ID NO: 65372 - protein, 34 aa, Artificial Sequence
  GFR-binding peptide
  MOD_RES (32), (34): Xaa is C or S
TPTKMSATSMLYYNDKQQIILRKHRGMVVDRXGX

SEQ ID NO: 65373 - protein, 33 aa, Artificial Sequence; identical to SEQ ID NO: 6348
  GFR-binding peptide
  MOD_RES (2), (2): Xaa is C or S

SEQ ID NO: 65374 - protein, 41 aa, Artificial Sequence; identical to SEQ ID NO: 6349
  GFR-binding peptide
  MOD_RES (4), (5), (39), (41): Xaa is C or S
  MOD_RES (19), (20), (21), (22), (23): Xaa is A or G
  MOD_RES (24), (25), (26), (27): Xaa is A or G or is absent

SEQ ID NO: 65375 - protein, 44 aa, Artificial Sequence; identical to SEQ ID NO: 57413
  GFR-binding peptide
  MOD_RES (6), (7), (41), (43): Xaa is C or S
  MOD_RES (21), (22), (23), (24), (25): Xaa is A or G
  MOD_RES (26), (27), (28), (29): Xaa is A or G or is absent

SEQ ID NO: 65376 - protein, 35 aa, Artificial Sequence; identical to SEQ ID NO: 6350
  GFR-binding peptide
  MOD_RES (34), (34): Xaa is C or S
  MOD_RES (14), (15), (16), (17), (18): Xaa is A or G
  MOD_RES (19), (20), (21), (22): Xaa is A or G or is absent

SEQ ID NO: 65377 - protein, 37 aa, Artificial Sequence
  GFR-binding peptide
  MOD_RES (3), (4), (36): Xaa is C or S
PTXXVPTRLSATSILYYDSANNVVLRKHRDMVVESXG

SEQ ID NO: 65378 - protein, 40 aa, Artificial Sequence; identical to SEQ ID NO: 6352
  GFR-binding peptide
  MOD_RES (4), (5), (37), (39): Xaa is C or S

SEQ ID NO: 65379 - protein, 37 aa, Artificial Sequence
  GFR-binding peptide
  MOD_RES (1), (2), (34), (36): Xaa is C or S
XXTPTKMSATSMLYYNDKQQIILRKHRGMVVDRXGXS

SEQ ID NO: 65380 - protein, 33 aa, Artificial Sequence; identical to SEQ ID NO: 6355
  GFR-binding peptide
  MOD_RES (1), (1): Xaa is C or S
  MOD_RES (15), (16), (17), (18), (19): Xaa is A or G
  MOD_RES (20), (21), (22), (23): Xaa is A or G or is absent

SEQ ID NO: 65381 - protein, 41 aa, Artificial Sequence; identical to SEQ ID NO: 27494
  GFR-binding peptide
  MOD_RES (4), (5), (39), (41): Xaa is C or S
  MOD_RES (19), (20), (21), (22), (23): Xaa is A or G
  MOD_RES (24), (25), (26), (27): Xaa is A or G or is absent

SEQ ID NO: 65382 - protein, 35 aa, Artificial Sequence; identical to SEQ ID NO: 6358
  GFR-binding peptide
  MOD_RES (1), (1): Xaa is C or S
  MOD_RES (15), (16), (17), (18), (19): Xaa is A or G
  MOD_RES (20), (21), (22), (23): Xaa is A or G or is absent

SEQ ID NO: 65383 - protein, 37 aa, Artificial Sequence
  GFR-binding peptide
  MOD_RES (3), (4), (35), (37): Xaa is C or S
STXXAPVKTEPISMLYLDNGRVLLKFKYEMIVEEXGX

SEQ ID NO: 65384 - protein, 36 aa, Artificial Sequence; identical to SEQ ID NO: 6360
  GFR-binding peptide
  MOD_RES (1), (35): Xaa is C or S
  MOD_RES (15), (16), (17), (18), (19): Xaa is A or G
  MOD_RES (20), (21), (22), (23): Xaa is A or G or is absent

SEQ ID NO: 65385 - protein, 39 aa, Artificial Sequence; identical to SEQ ID NO: 27498
  GFR-binding peptide
  MOD_RES (6), (7): Xaa is C or S
  MOD_RES (21), (22), (23), (24), (25): Xaa is A or G
  MOD_RES (26), (27), (28), (29): Xaa is A or G or is absent

SEQ ID NO: 65386 - protein, 44 aa, Artificial Sequence; identical to SEQ ID NO: 32522
  GFR-binding peptide
  MOD_RES (6), (7), (41), (43): Xaa is C or S
  MOD_RES (21), (22), (23), (24), (25): Xaa is A or G
  MOD_RES (26), (27), (28), (29): Xaa is A or G or is absent

SEQ ID NO: 65387 - protein, 41 aa, Artificial Sequence; identical to SEQ ID NO: 32525
  GFR-binding peptide
  MOD_RES (6), (7), (39), (41): Xaa is C or S

SEQ ID NO: 65388 - protein, 33 aa, Artificial Sequence; identical to SEQ ID NO: 32526
  GFR-binding peptide
  MOD_RES (1), (1): Xaa is C or S
  MOD_RES (15), (16), (17), (18), (19): Xaa is A or G
  MOD_RES (20), (21), (22), (23): Xaa is A or G or is absent

SEQ ID NO: 65389 - protein, 38 aa, Artificial Sequence
  GFR-binding peptide
  MOD_RES (3), (4), (36), (38): Xaa is C or S
KAXXVPTKLSATSILYYDKGVVTYLRKHRGMAVSEXGX

SEQ ID NO: 65390 - protein, 38 aa, Artificial Sequence
  GFR-binding peptide
  MOD_RES (1), (2), (35), (37): Xaa is C or S
  MOD_RES (16), (17), (18), (19), (20): Xaa is A or G
  MOD_RES (21), (22), (23), (24): Xaa is A or G or is absent
XXAPVKTEPISMLYLXXXXXXXXXKFKYEMIVEEXGXL

SEQ ID NO: 65391 - protein, 40 aa, Artificial Sequence; identical to SEQ ID NO: 27502
  GFR-binding peptide
  MOD_RES (3), (4), (38), (40): Xaa is C or S
  MOD_RES (18), (19), (20), (21), (22): Xaa is A or G
  MOD_RES (23), (24), (25), (26): Xaa is A or G or is absent

SEQ ID NO: 65392 - protein, 39 aa, Artificial Sequence; identical to SEQ ID NO: 6365
  GFR-binding peptide
  MOD_RES (6), (7): Xaa is C or S
  MOD_RES (21), (22), (23), (24), (25): Xaa is A or G
  MOD_RES (26), (27), (28), (29): Xaa is A or G or is absent

SEQ ID NO: 65393 - protein, 37 aa, Artificial Sequence; identical to SEQ ID NO: 6369
  GFR-binding peptide
  MOD_RES (5), (6): Xaa is C or S

SEQ ID NO: 65394 - protein, 40 aa, Artificial Sequence; identical to SEQ ID NO: 6372
  GFR-binding peptide
  MOD_RES (6), (7), (38), (40): Xaa is C or S

SEQ ID NO: 65395 - protein, 33 aa, Artificial Sequence
  GFR-binding peptide
  MOD_RES (33), (33): Xaa is C or S
  MOD_RES (14), (15), (16), (17), (18): Xaa is A or G
  MOD_RES (19), (20), (21), (22): Xaa is A or G or is absent
APVKTEPISMLYLXXXXXXXXXKFKYEMIVEEX

SEQ ID NO: 65396 - protein, 38 aa, Artificial Sequence; identical to SEQ ID NO: 6374
  GFR-binding peptide
  MOD_RES (35), (37): Xaa is C or S
  MOD_RES (14), (15), (16), (17), (18): Xaa is A or G
  MOD_RES (19), (20), (21), (22): Xaa is A or G or is absent

SEQ ID NO: 65397 - protein, 37 aa, Artificial Sequence; identical to SEQ ID NO: 6377
  GFR-binding peptide
  MOD_RES (2), (3), (35), (37): Xaa is C or S

SEQ ID NO: 65398 - protein, 35 aa, Artificial Sequence; identical to SEQ ID NO: 6378
  GFR-binding peptide
  MOD_RES (35), (35): Xaa is C or S
  MOD_RES (14), (15), (16), (17), (18): Xaa is A or G
  MOD_RES (19), (20), (21), (22): Xaa is A or G or is absent

SEQ ID NO: 65399 - protein, 33 aa, Artificial Sequence
  GFR-binding peptide
  MOD_RES (14), (15), (16), (17), (18): Xaa is A or G
  MOD_RES (19), (20), (21), (22): Xaa is A or G or is absent
VPTRLEPISILYLXXXXXXXXXKFKYEDMVVES

SEQ ID NO: 65400 - protein, 39 aa, Artificial Sequence; identical to SEQ ID NO: 27518
  GFR-binding peptide
  MOD_RES (2), (3), (37), (39): Xaa is C or S
  MOD_RES (17), (18), (19), (20), (21): Xaa is A or G
  MOD_RES (22), (23), (24), (25): Xaa is A or G or is absent

SEQ ID NO: 65401 - protein, 37 aa, Artificial Sequence
  GFR-binding peptide
  MOD_RES (3), (4), (35), (37): Xaa is C or S
APXXVPQALSPINILYFVGRKPKVYGKIPMIVRSXKX

SEQ ID NO: 65402 - protein, 36 aa, Artificial Sequence
  GFR-binding peptide
  MOD_RES (5), (6): Xaa is C or S
VPSTXXAPVKTEPISMLYLDNGRVLLKFKYEMIVEE

SEQ ID NO: 65403 - protein, 39 aa, Artificial Sequence; identical to SEQ ID NO: 6381
  GFR-binding peptide
  MOD_RES (4), (5), (36), (38): Xaa is C or S

SEQ ID NO: 65404 - protein, 39 aa, Artificial Sequence; identical to SEQ ID NO: 6383
  GFR-binding peptide
  MOD_RES (5), (6): Xaa is C or S
  MOD_RES (20), (21), (22), (23), (24): Xaa is A or G
  MOD_RES (25), (26), (27), (28): Xaa is A or G or is absent

SEQ ID NO: 65405 - protein, 35 aa, Artificial Sequence; identical to SEQ ID NO: 57454
  GFR-binding peptide
  MOD_RES (1), (34): Xaa is C or S
  MOD_RES (15), (16), (17), (18), (19): Xaa is A or G
  MOD_RES (20), (21), (22), (23): Xaa is A or G or is absent

SEQ ID NO: 65406 - protein, 35 aa, Artificial Sequence
  GFR-binding peptide
  MOD_RES (2), (3), (35): Xaa is C or S
TXXVPTRLSATSILYYDSANNVVLRKHRDMVVESX

SEQ ID NO: 65407 - protein, 40 aa, Artificial Sequence; identical to SEQ ID NO: 6385
  GFR-binding peptide
  MOD_RES (5), (6), (37), (39): Xaa is C or S

SEQ ID NO: 65408 - protein, 36 aa, Artificial Sequence
  GFR-binding peptide
  MOD_RES (2), (3), (35): Xaa is C or S
TXXVPTRLEPISILYLDSANNVVKFKYEDMVVESXG

SEQ ID NO: 65409 - protein, 43 aa, Artificial Sequence; identical to SEQ ID NO: 6386
  GFR-binding peptide
  MOD_RES (5), (6), (40), (42): Xaa is C or S
  MOD_RES (20), (21), (22), (23), (24): Xaa is A or G
  MOD_RES (25), (26), (27), (28): Xaa is A or G or is absent

SEQ ID NO: 65410 - protein, 39 aa, Artificial Sequence; identical to SEQ ID NO: 27526
  GFR-binding peptide
  MOD_RES (1), (2), (36), (38): Xaa is C or S
  MOD_RES (16), (17), (18), (19), (20): Xaa is A or G
  MOD_RES (21), (22), (23), (24): Xaa is A or G or is absent

SEQ ID NO: 65411 - protein, 41 aa, Artificial Sequence; identical to SEQ ID NO: 32552
  GFR-binding peptide
  MOD_RES (5), (6), (40): Xaa is C or S
  MOD_RES (20), (21), (22), (23), (24): Xaa is A or G
  MOD_RES (25), (26), (27), (28): Xaa is A or G or is absent

SEQ ID NO: 65412 - protein, 36 aa, Artificial Sequence; identical to SEQ ID NO: 32555
  GFR-binding peptide
  MOD_RES (1), (35): Xaa is C or S
  MOD_RES (15), (16), (17), (18), (19): Xaa is A or G
  MOD_RES (20), (21), (22), (23): Xaa is A or G or is absent

SEQ ID NO: 65413 - protein, 38 aa, Artificial Sequence; identical to SEQ ID NO: 6390
  GFR-binding peptide
  MOD_RES (4), (5): Xaa is C or S
  MOD_RES (19), (20), (21), (22), (23): Xaa is A or G
  MOD_RES (24), (25), (26), (27): Xaa is A or G or is absent

SEQ ID NO: 65414 - protein, 38 aa, Artificial Sequence; identical to SEQ ID NO: 6391
  GFR-binding peptide
  MOD_RES (4), (5), (37): Xaa is C or S

SEQ ID NO: 65415 - protein, 37 aa, Artificial Sequence; identical to SEQ ID NO: 32556
  GFR-binding peptide
  MOD_RES (4), (5): Xaa is C or S
  MOD_RES (19), (20), (21), (22), (23): Xaa is A or G
  MOD_RES (24), (25), (26), (27): Xaa is A or G or is absent

SEQ ID NO: 65416 - protein, 31 aa, Artificial Sequence
  GFR-binding peptide
  MOD_RES (1), (1): Xaa is C or S
XTPTKMSATSMLYYNDKQQIILRKHRGMVVD

SEQ ID NO: 65417 - protein, 37 aa, Artificial Sequence; identical to SEQ ID NO: 6395
  GFR-binding peptide
  MOD_RES (4), (5): Xaa is C or S
  MOD_RES (19), (20), (21), (22), (23): Xaa is A or G
  MOD_RES (24), (25), (26), (27): Xaa is A or G or is absent

SEQ ID NO: 65418 - protein, 37 aa, Artificial Sequence; identical to SEQ ID NO: 27536
  GFR-binding peptide
  MOD_RES (1), (2), (36): Xaa is C or S
  MOD_RES (16), (17), (18), (19), (20): Xaa is A or G
  MOD_RES (21), (22), (23), (24): Xaa is A or G or is absent

SEQ ID NO: 65419 - protein, 31 aa, Artificial Sequence; identical to SEQ ID NO: 32561
  GFR-binding peptide
  MOD_RES (31), (31): Xaa is C or S

SEQ ID NO: 65420 - protein, 38 aa, Artificial Sequence; identical to SEQ ID NO: 6398
  GFR-binding peptide
  MOD_RES (1), (35), (37): Xaa is C or S
  MOD_RES (15), (16), (17), (18), (19): Xaa is A or G
  MOD_RES (20), (21), (22), (23): Xaa is A or G or is absent

SEQ ID NO: 65421 - protein, 38 aa, Artificial Sequence; identical to SEQ ID NO: 6399
  GFR-binding peptide
  MOD_RES (3), (4), (37): Xaa is C or S
  MOD_RES (18), (19), (20), (21), (22): Xaa is A or G
  MOD_RES (23), (24), (25), (26): Xaa is A or G or is absent

SEQ ID NO: 65422 - protein, 32 aa, Artificial Sequence; identical to SEQ ID NO: 6400
  GFR-binding peptide
  MOD_RES (2), (2): Xaa is C or S

SEQ ID NO: 65423 - protein, 35 aa, Artificial Sequence; identical to SEQ ID NO: 6402
  GFR-binding peptide
  MOD_RES (3), (3): Xaa is C or S
  MOD_RES (17), (18), (19), (20), (21): Xaa is A or G
  MOD_RES (22), (23), (24), (25): Xaa is A or G or is absent

SEQ ID NO: 65424 - protein, 34 aa, Artificial Sequence; identical to SEQ ID NO: 27546
  GFR-binding peptide
  MOD_RES (34), (34): Xaa is C or S
  MOD_RES (14), (15), (16), (17), (18): Xaa is A or G
  MOD_RES (19), (20), (21), (22): Xaa is A or G or is absent

SEQ ID NO: 65425 - protein, 41 aa, Artificial Sequence
  GFR-binding peptide
  MOD_RES (5), (6), (40): Xaa is C or S
  MOD_RES (20), (21), (22), (23), (24): Xaa is A or G
  MOD_RES (25), (26), (27), (28): Xaa is A or G or is absent
SAGPXXTPTKMSATSMLYYXXXXXXXXXLRKHRGMVVDRXG

SEQ ID NO: 65426 - protein, 35 aa, Artificial Sequence; identical to SEQ ID NO: 27548
  GFR-binding peptide
  MOD_RES (1), (2), (35): Xaa is C or S

SEQ ID NO: 65427 - protein, 39 aa, Artificial Sequence; identical to SEQ ID NO: 6406
  GFR-binding peptide
  MOD_RES (6), (7), (39): Xaa is C or S

SEQ ID NO: 65428 - protein, 34 aa, Artificial Sequence; identical to SEQ ID NO: 57471
  GFR-binding peptide
  MOD_RES (2), (3): Xaa is C or S

SEQ ID NO: 65429 - protein, 38 aa, Artificial Sequence; identical to SEQ ID NO: 6407
  GFR-binding peptide
  MOD_RES (3), (4), (36), (38): Xaa is C or S

SEQ ID NO: 65430 - protein, 39 aa, Artificial Sequence; identical to SEQ ID NO: 6408
  GFR-binding peptide
  MOD_RES (4), (5): Xaa is C or S
  MOD_RES (19), (20), (21), (22), (23): Xaa is A or G
  MOD_RES (24), (25), (26), (27): Xaa is A or G or is absent

SEQ ID NO: 65431 - protein, 37 aa, Artificial Sequence; identical to SEQ ID NO: 32570
  GFR-binding peptide
  MOD_RES (1), (2), (36): Xaa is C or S
  MOD_RES (16), (17), (18), (19), (20): Xaa is A or G
  MOD_RES (21), (22), (23), (24): Xaa is A or G or is absent

SEQ ID NO: 65432 - protein, 37 aa, Artificial Sequence; identical to SEQ ID NO: 32572
  GFR-binding peptide
  MOD_RES (4), (5), (37): Xaa is C or S

SEQ ID NO: 65433 - protein, 41 aa, Artificial Sequence; identical to SEQ ID NO: 32573
  GFR-binding peptide
  MOD_RES (5), (6), (38), (40): Xaa is C or S

SEQ ID NO: 65434 - protein, 39 aa, Artificial Sequence; identical to SEQ ID NO: 32574
  GFR-binding peptide
  MOD_RES (5), (6): Xaa is C or S
  MOD_RES (20), (21), (22), (23), (24): Xaa is A or G
  MOD_RES (25), (26), (27), (28): Xaa is A or G or is absent

SEQ ID NO: 65435 - protein, 42 aa, Artificial Sequence; identical to SEQ ID NO: 6410
  GFR-binding peptide
  MOD_RES (6), (40), (42): Xaa is C or S
  MOD_RES (20), (21), (22), (23), (24): Xaa is A or G
  MOD_RES (25), (26), (27), (28): Xaa is A or G or is absent

SEQ ID NO: 65436 - protein, 36 aa, Artificial Sequence; identical to SEQ ID NO: 32575
  GFR-binding peptide
  MOD_RES (34), (36): Xaa is C or S
  MOD_RES (14), (15), (16), (17), (18): Xaa is A or G
  MOD_RES (19), (20), (21), (22): Xaa is A or G or is absent

SEQ ID NO: 65437 - protein, 38 aa, Artificial Sequence; identical to SEQ ID NO: 57479
  GFR-binding peptide
  MOD_RES (4), (5): Xaa is C or S
  MOD_RES (19), (20), (21), (22), (23): Xaa is A or G
  MOD_RES (24), (25), (26), (27): Xaa is A or G or is absent

SEQ ID NO: 65438 - protein, 41 aa, Artificial Sequence; identical to SEQ ID NO: 27554
  GFR-binding peptide
  MOD_RES (5), (6), (39), (41): Xaa is C or S
  MOD_RES (20), (21), (22), (23), (24): Xaa is A or G
  MOD_RES (25), (26), (27), (28): Xaa is A or G or is absent

SEQ ID NO: 65439 - protein, 33 aa, Artificial Sequence; identical to SEQ ID NO: 32577
  GFR-binding peptide
  MOD_RES (1), (32): Xaa is C or S

SEQ ID NO: 65440 - protein, 37 aa, Artificial Sequence
  GFR-binding peptide
  MOD_RES (4), (5), (37): Xaa is C or S
PPTXXVPTRLSATSILYYDSANNVVLRKHRDMVVESX

SEQ ID NO: 65441 - protein, 34 aa, Artificial Sequence; identical to SEQ ID NO: 32579
  GFR-binding peptide
  MOD_RES (34), (34): Xaa is C or S
  MOD_RES (14), (15), (16), (17), (18): Xaa is A or G
  MOD_RES (19), (20), (21), (22): Xaa is A or G or is absent

SEQ ID NO: 65442 - protein, 32 aa, Artificial Sequence; identical to SEQ ID NO: 6413
  GFR-binding peptide
  MOD_RES (31), (31): Xaa is C or S

SEQ ID NO: 65443 - protein, 38 aa, Artificial Sequence
  GFR-binding peptide
  MOD_RES (5), (6), (38): Xaa is C or S
IPEPXXVPEKMSPISILYKDENKNVVLKYHYNMTVESX

SEQ ID NO: 65444 - protein, 34 aa, Artificial Sequence; identical to SEQ ID NO: 6414
  GFR-binding peptide
  MOD_RES (1), (1): Xaa is C or S
  MOD_RES (15), (16), (17), (18), (19): Xaa is A or G
  MOD_RES (20), (21), (22), (23): Xaa is A or G or is absent

SEQ ID NO: 65445 - protein, 40 aa, Artificial Sequence; identical to SEQ ID NO: 27558
  GFR-binding peptide
  MOD_RES (6), (7): Xaa is C or S
  MOD_RES (21), (22), (23), (24), (25): Xaa is A or G
  MOD_RES (26), (27), (28), (29): Xaa is A or G or is absent

SEQ ID NO: 65446 - protein, 36 aa, Artificial Sequence
  GFR-binding peptide
  MOD_RES (3), (4): Xaa is C or S
  MOD_RES (18), (19), (20), (21), (22): Xaa is A or G
  MOD_RES (23), (24), (25), (26): Xaa is A or G or is absent
EPXXVPEKMSATSILYYXXXXXXXXXLRKHRNMTVE

SEQ ID NO: 65447 - protein, 35 aa, Artificial Sequence; identical to SEQ ID NO: 32584
  GFR-binding peptide
  MOD_RES (2), (3): Xaa is C or S
  MOD_RES (17), (18), (19), (20), (21): Xaa is A or G
  MOD_RES (22), (23), (24), (25): Xaa is A or G or is absent

SEQ ID NO: 65448 - protein, 35 aa, Artificial Sequence; identical to SEQ ID NO: 32586
  GFR-binding peptide
  MOD_RES (1), (2), (35): Xaa is C or S
  MOD_RES (16), (17), (18), (19), (20): Xaa is A or G
  MOD_RES (21), (22), (23), (24): Xaa is A or G or is absent

SEQ ID NO: 65449 - protein, 37 aa, Artificial Sequence
  GFR-binding peptide
  MOD_RES (1), (35), (37): Xaa is C or S
  MOD_RES (15), (16), (17), (18), (19): Xaa is A or G
  MOD_RES (20), (21), (22), (23): Xaa is A or G or is absent
XVPTRLSPISILYKXXXXXXXXXLKYHYDMVVESXGX

SEQ ID NO: 65450 - protein, 38 aa, Artificial Sequence
  GFR-binding peptide
  MOD_RES (2), (3), (37): Xaa is C or S
  MOD_RES (17), (18), (19), (20), (21): Xaa is A or G
  MOD_RES (22), (23), (24), (25): Xaa is A or G or is absent
PXXTPTKMSPISMLYKXXXXXXXXXLKYHYGMVVDRXG

SEQ ID NO: 65451 - protein, 39 aa, Artificial Sequence
  GFR-binding peptide
  MOD_RES (2), (3), (36), (38): Xaa is C or S
  MOD_RES (17), (18), (19), (20), (21): Xaa is A or G
  MOD_RES (22), (23), (24), (25): Xaa is A or G or is absent
PXXVSQDLSPINILYFXXXXXXXXXYGKIPMIVKSXKXS

SEQ ID NO: 65452 - protein, 35 aa, Artificial Sequence; identical to SEQ ID NO: 6421
  GFR-binding peptide
  MOD_RES (2), (34): Xaa is C or S

SEQ ID NO: 65453 - protein, 35 aa, Artificial Sequence; identical to SEQ ID NO: 13800
  GFR-binding peptide
  MOD_RES (2), (3), (35): Xaa is C or S

SEQ ID NO: 65454 - protein, 37 aa, Artificial Sequence; identical to SEQ ID NO: 27564
  GFR-binding peptide
  MOD_RES (1), (2), (34), (36): Xaa is C or S

SEQ ID NO: 65455 - protein, 36 aa, Artificial Sequence; identical to SEQ ID NO: 6422
  GFR-binding peptide
  MOD_RES (3), (4), (36): Xaa is C or S

SEQ ID NO: 65456 - protein, 36 aa, Artificial Sequence; identical to SEQ ID NO: 6425
  GFR-binding peptide
  MOD_RES (2), (3): Xaa is C or S
  MOD_RES (17), (18), (19), (20), (21): Xaa is A or G
  MOD_RES (22), (23), (24), (25): Xaa is A or G or is absent

SEQ ID NO: 65457 - protein, 35 aa, Artificial Sequence; identical to SEQ ID NO: 27569
  GFR-binding peptide
  MOD_RES (1), (2), (33), (35): Xaa is C or S

SEQ ID NO: 65458 - protein, 34 aa, Artificial Sequence; identical to SEQ ID NO: 6426
  GFR-binding peptide
  MOD_RES (2), (3): Xaa is C or S

SEQ ID NO: 65459 - protein, 34 aa, Artificial Sequence
  GFR-binding peptide
  MOD_RES (1), (2), (34): Xaa is C or S
XXTPTKMSPISMLYKNDKQQIILKYHYGMVVDRX

SEQ ID NO: 65460 - protein, 33 aa, Artificial Sequence; identical to SEQ ID NO: 6430
  GFR-binding peptide
  MOD_RES (32), (32): Xaa is C or S

SEQ ID NO: 65461 - protein, 36 aa, Artificial Sequence; identical to SEQ ID NO: 6431
  GFR-binding peptide
  MOD_RES (1), (2), (34), (36): Xaa is C or S

SEQ ID NO: 65462 - protein, 34 aa, Artificial Sequence; identical to SEQ ID NO: 57508
  GFR-binding peptide
  MOD_RES (34), (34): Xaa is C or S
  MOD_RES (14), (15), (16), (17), (18): Xaa is A or G
  MOD_RES (19), (20), (21), (22): Xaa is A or G or is absent

SEQ ID NO: 65463 - protein, 37 aa, Artificial Sequence; identical to SEQ ID NO: 6432
  GFR-binding peptide
  MOD_RES (4), (5), (36): Xaa is C or S

SEQ ID NO: 65464 - protein, 38 aa, Artificial Sequence; identical to SEQ ID NO: 6438
  GFR-binding peptide
  MOD_RES (3), (4), (38): Xaa is C or S
  MOD_RES (18), (19), (20), (21), (22): Xaa is A or G
  MOD_RES (23), (24), (25), (26): Xaa is A or G or is absent

SEQ ID NO: 65465 - protein, 36 aa, Artificial Sequence; identical to SEQ ID NO: 27584
  GFR-binding peptide
  MOD_RES (1), (33), (35): Xaa is C or S

SEQ ID NO: 65466 - protein, 41 aa, Artificial Sequence; identical to SEQ ID NO: 6443
  GFR-binding peptide
  MOD_RES (3), (4), (38), (40): Xaa is C or S
  MOD_RES (18), (19), (20), (21), (22): Xaa is A or G
  MOD_RES (23), (24), (25), (26): Xaa is A or G or is absent

SEQ ID NO: 65467 - protein, 33 aa, Artificial Sequence; identical to SEQ ID NO: 57523
  GFR-binding peptide
  MOD_RES (31), (33): Xaa is C or S

SEQ ID NO: 65468 - protein, 35 aa, Artificial Sequence; identical to SEQ ID NO: 6444
  GFR-binding peptide
  MOD_RES (1), (2), (34): Xaa is C or S

SEQ ID NO: 65469 - protein, 38 aa, Artificial Sequence
  GFR-binding peptide
  MOD_RES (2), (3), (37): Xaa is C or S
  MOD_RES (17), (18), (19), (20), (21): Xaa is A or G
  MOD_RES (22), (23), (24), (25): Xaa is A or G or is absent
PXXVPEKMSPISILYKXXXXXXXXXLKYHYNMTVESXA

SEQ ID NO: 65470 - protein, 33 aa, Artificial Sequence; identical to SEQ ID NO: 57524
  GFR-binding peptide
  MOD_RES (2), (3): Xaa is C or S

SEQ ID NO: 65471 - protein, 36 aa, Artificial Sequence; identical to SEQ ID NO: 6445
  GFR-binding peptide
  MOD_RES (4), (5): Xaa is C or S

SEQ ID NO: 65472 - protein, 33 aa, Artificial Sequence; identical to SEQ ID NO: 6446
  GFR-binding peptide
  MOD_RES (2), (3): Xaa is C or S

SEQ ID NO: 65473 - protein, 39 aa, Artificial Sequence
  GFR-binding peptide
  MOD_RES (6), (7), (39): Xaa is C or S
GIPEPXXVPEKMEPISILYLDENKNVVKFKYENMTVESX

SEQ ID NO: 65474 - protein, 43 aa, Artificial Sequence; identical to SEQ ID NO: 27593
  GFR-binding peptide
  MOD_RES (5), (6), (41), (43): Xaa is C or S
  MOD_RES (20), (21), (22), (23), (24): Xaa is A or G
  MOD_RES (25), (26), (27), (28): Xaa is A or G or is absent

SEQ ID NO: 65475 - protein, 36 aa, Artificial Sequence; identical to SEQ ID NO: 27594
  GFR-binding peptide
  MOD_RES (33), (35): Xaa is C or S
  MOD_RES (14), (15), (16), (17), (18): Xaa is A or G
  MOD_RES (19), (20), (21), (22): Xaa is A or G or is absent

SEQ ID NO: 65476 - protein, 36 aa, Artificial Sequence; identical to SEQ ID NO: 6453
  GFR-binding peptide
  MOD_RES (1), (33), (35): Xaa is C or S

SEQ ID NO: 65477 - protein, 38 aa, Artificial Sequence; identical to SEQ ID NO: 32621
  GFR-binding peptide
  MOD_RES (3), (37): Xaa is C or S
  MOD_RES (17), (18), (19), (20), (21): Xaa is A or G
  MOD_RES (22), (23), (24), (25): Xaa is A or G or is absent

SEQ ID NO: 65478 - protein, 32 aa, Artificial Sequence
  GFR-binding peptide
  MOD_RES (1), (2): Xaa is C or S
XXVPEKMEPISILYLDENKNVVKFKYENMTVE

SEQ ID NO: 65479 - protein, 36 aa, Artificial Sequence; identical to SEQ ID NO: 27602
  GFR-binding peptide
  MOD_RES (2), (3): Xaa is C or S
  MOD_RES (17), (18), (19), (20), (21): Xaa is A or G
  MOD_RES (22), (23), (24), (25): Xaa is A or G or is absent

SEQ ID NO: 65480 - protein, 38 aa, Artificial Sequence
  GFR-binding peptide
  MOD_RES (5), (6): Xaa is C or S
  MOD_RES (20), (21), (22), (23), (24): Xaa is A or G
  MOD_RES (25), (26), (27), (28): Xaa is A or G or is absent
SAGPXXTPTKMEPISMLYLXXXXXXXXXKFKYEGMVVD

SEQ ID NO: 65481 - protein, 40 aa, Artificial Sequence; identical to SEQ ID NO: 6454
  GFR-binding peptide
  MOD_RES (5), (6), (38), (40): Xaa is C or S

SEQ ID NO: 65482 - protein, 34 aa, Artificial Sequence; identical to SEQ ID NO: 6456
  GFR-binding peptide
  MOD_RES (2), (3): Xaa is C or S

SEQ ID NO: 65483 - protein, 39 aa, Artificial Sequence; identical to SEQ ID NO: 6457
  GFR-binding peptide
  MOD_RES (4), (5), (38): Xaa is C or S

SEQ ID NO: 65484 - protein, 35 aa, Artificial Sequence; identical to SEQ ID NO: 6458
  GFR-binding peptide
  MOD_RES (2), (3), (35): Xaa is C or S

SEQ ID NO: 65485 - protein, 39 aa, Artificial Sequence; identical to SEQ ID NO: 6460
  GFR-binding peptide
  MOD_RES (6), (7): Xaa is C or S
  MOD_RES (21), (22), (23), (24), (25): Xaa is A or G
  MOD_RES (26), (27), (28), (29): Xaa is A or G or is absent

SEQ ID NO: 65486 - protein, 37 aa, Artificial Sequence; identical to SEQ ID NO: 32638
  GFR-binding peptide
  MOD_RES (5), (5): Xaa is C or S
  MOD_RES (19), (20), (21), (22), (23): Xaa is A or G
  MOD_RES (24), (25), (26), (27): Xaa is A or G or is absent

SEQ ID NO: 65487 - protein, 37 aa, Artificial Sequence; identical to SEQ ID NO: 57545
  GFR-binding peptide
  MOD_RES (2), (3), (35), (37): Xaa is C or S

SEQ ID NO: 65488 - protein, 40 aa, Artificial Sequence; identical to SEQ ID NO: 27616
  GFR-binding peptide
  MOD_RES (6), (7), (40): Xaa is C or S
  MOD_RES (21), (22), (23), (24), (25): Xaa is A or G
  MOD_RES (26), (27), (28), (29): Xaa is A or G or is absent

SEQ ID NO: 65489 - protein, 42 aa, Artificial Sequence; identical to SEQ ID NO: 6463
  GFR-binding peptide
  MOD_RES (6), (7), (41): Xaa is C or S
  MOD_RES (21), (22), (23), (24), (25): Xaa is A or G
  MOD_RES (26), (27), (28), (29): Xaa is A or G or is absent

SEQ ID NO: 65490 - protein, 39 aa, Artificial Sequence; identical to SEQ ID NO: 6464
  GFR-binding peptide
  MOD_RES (4), (5), (39): Xaa is C or S
  MOD_RES (19), (20), (21), (22), (23): Xaa is A or G
  MOD_RES (24), (25), (26), (27): Xaa is A or G or is absent

SEQ ID NO: 65491 - protein, 36 aa, Artificial Sequence; identical to SEQ ID NO: 6465
  GFR-binding peptide
  MOD_RES (33), (35): Xaa is C or S
  MOD_RES (14), (15), (16), (17), (18): Xaa is A or G
  MOD_RES (19), (20), (21), (22): Xaa is A or G or is absent

SEQ ID NO: 65492 - protein, 36 aa, Artificial Sequence
  GFR-binding peptide
  MOD_RES (5), (6): Xaa is C or S
IPEPXXVPEKMSATSILYYDENKNVVLRKHRNMTVE

SEQ ID NO: 65493 - protein, 42 aa, Artificial Sequence; identical to SEQ ID NO: 6469
  GFR-binding peptide
  MOD_RES (5), (6), (40), (42): Xaa is C or S
  MOD_RES (20), (21), (22), (23), (24): Xaa is A or G
  MOD_RES (25), (26), (27), (28): Xaa is A or G or is absent

SEQ ID NO: 65494 - protein, 35 aa, Artificial Sequence; identical to SEQ ID NO: 27624
  GFR-binding peptide
  MOD_RES (1), (35): Xaa is C or S
  MOD_RES (15), (16), (17), (18), (19): Xaa is A or G
  MOD_RES (20), (21), (22), (23): Xaa is A or G or is absent

SEQ ID NO: 65495 - protein, 36 aa, Artificial Sequence; identical to SEQ ID NO: 6470
  GFR-binding peptide
  MOD_RES (34), (36): Xaa is C or S
  MOD_RES (14), (15), (16), (17), (18): Xaa is A or G
  MOD_RES (19), (20), (21), (22): Xaa is A or G or is absent

SEQ ID NO: 65496 - protein, 39 aa, Artificial Sequence; identical to SEQ ID NO: 27626
  GFR-binding peptide
  MOD_RES (2), (3), (37), (39): Xaa is C or S
  MOD_RES (17), (18), (19), (20), (21): Xaa is A or G
  MOD_RES (22), (23), (24), (25): Xaa is A or G or is absent

SEQ ID NO: 65497 - protein, 42 aa, Artificial Sequence; identical to SEQ ID NO: 27627
  GFR-binding peptide
  MOD_RES (6), (7), (41): Xaa is C or S
  MOD_RES (21), (22), (23), (24), (25): Xaa is A or G
  MOD_RES (26), (27), (28), (29): Xaa is A or G or is absent

SEQ ID NO: 65498 - protein, 37 aa, Artificial Sequence; identical to SEQ ID NO: 27630
  GFR-binding peptide
  MOD_RES (2), (3), (37): Xaa is C or S
  MOD_RES (17), (18), (19), (20), (21): Xaa is A or G
  MOD_RES (22), (23), (24), (25): Xaa is A or G or is absent

SEQ ID NO: 65499 - protein, 38 aa, Artificial Sequence; identical to SEQ ID NO: 6475
  GFR-binding peptide
  MOD_RES (3), (4), (35), (37): Xaa is C or S

SEQ ID NO: 65500 - protein, 42 aa, Artificial Sequence; identical to SEQ ID NO: 27632
  GFR-binding peptide
  MOD_RES (6), (7), (41): Xaa is C or S
  MOD_RES (21), (22), (23), (24), (25): Xaa is A or G
  MOD_RES (26), (27), (28), (29): Xaa is A or G or is absent

SEQ ID NO: 65501 - protein, 39 aa, Artificial Sequence
  GFR-binding peptide
  MOD_RES (4), (5), (39): Xaa is C or S
  MOD_RES (19), (20), (21), (22), (23): Xaa is A or G
  MOD_RES (24), (25), (26), (27): Xaa is A or G or is absent
AGPXXTPTKMSATSMLYYXXXXXXXXXLRKHRGMVVDRX

SEQ ID NO: 65502 - protein, 33 aa, Artificial Sequence; identical to SEQ ID NO: 32651
  GFR-binding peptide
  MOD_RES (2), (3): Xaa is C or S

SEQ ID NO: 65503 - protein, 41 aa, Artificial Sequence; identical to SEQ ID NO: 27633
  GFR-binding peptide
  MOD_RES (5), (6), (38), (40): Xaa is C or S

SEQ ID NO: 65504 - protein, 41 aa, Artificial Sequence; identical to SEQ ID NO: 27634
  GFR-binding peptide
  MOD_RES (3), (4), (38), (40): Xaa is C or S
  MOD_RES (18), (19), (20), (21), (22): Xaa is A or G
  MOD_RES (23), (24), (25), (26): Xaa is A or G or is absent

SEQ ID NO: 65505 - protein, 38 aa, Artificial Sequence; identical to SEQ ID NO: 27636
  GFR-binding peptide
  MOD_RES (6), (7): Xaa is C or S

SEQ ID NO: 65506 - protein, 43 aa, Artificial Sequence; identical to SEQ ID NO: 6479
  GFR-binding peptide
  MOD_RES (4), (5), (40), (42): Xaa is C or S
  MOD_RES (19), (20), (21), (22), (23): Xaa is A or G
  MOD_RES (24), (25), (26), (27): Xaa is A or G or is absent

SEQ ID NO: 65507 - protein, 35 aa, Artificial Sequence; identical to SEQ ID NO: 27641
  GFR-binding peptide
  MOD_RES (1), (2), (35): Xaa is C or S
  MOD_RES (16), (17), (18), (19), (20): Xaa is A or G
  MOD_RES (21), (22), (23), (24): Xaa is A or G or is absent

SEQ ID NO: 65508 - protein, 41 aa, Artificial Sequence
  GFR-binding peptide
  MOD_RES (3), (4), (38), (40): Xaa is C or S
  MOD_RES (18), (19), (20), (21), (22): Xaa is A or G
  MOD_RES (23), (24), (25), (26): Xaa is A or G or is absent
EPXXVPEKMEPISILYLXXXXXXXXXKFKYENMTVESXAXR

SEQ ID NO: 65509 - protein, 38 aa, Artificial Sequence; identical to SEQ ID NO: 32659
  GFR-binding peptide
  MOD_RES (3), (4), (36), (38): Xaa is C or S

SEQ ID NO: 65510 - protein, 34 aa, Artificial Sequence; identical to SEQ ID NO: 6486
  GFR-binding peptide
  MOD_RES (31), (33): Xaa is C or S

SEQ ID NO: 65511 - protein, 37 aa, Artificial Sequence; identical to SEQ ID NO: 27644
  GFR-binding peptide
  MOD_RES (4), (5): Xaa is C or S
  MOD_RES (19), (20), (21), (22), (23): Xaa is A or G
  MOD_RES (24), (25), (26), (27): Xaa is A or G or is absent

SEQ ID NO: 65512 - protein, 35 aa, Artificial Sequence
  GFR-binding peptide
  MOD_RES (2), (3): Xaa is C or S
  MOD_RES (17), (18), (19), (20), (21): Xaa is A or G
  MOD_RES (22), (23), (24), (25): Xaa is A or G or is absent
SXXVPARLSATSILYYXXXXXXXXXLRKHRDMVVE

SEQ ID NO: 65513 - protein, 40 aa, Artificial Sequence
  GFR-binding peptide
  MOD_RES (6), (7), (39): Xaa is C or S
GIPEPXXVPEKMEPISILYLDENKNVVKFKYENMTVESXA

SEQ ID NO: 65514 - protein, 36 aa, Artificial Sequence; identical to SEQ ID NO: 27648
  GFR-binding peptide
  MOD_RES (2), (3), (35): Xaa is C or S

SEQ ID NO: 65515 - protein, 37 aa, Artificial Sequence; identical to SEQ ID NO: 57569
  GFR-binding peptide
  MOD_RES (6), (7): Xaa is C or S

SEQ ID NO: 65516 - protein, 37 aa, Artificial Sequence; identical to SEQ ID NO: 27649
  GFR-binding peptide
  MOD_RES (2), (3), (34), (36): Xaa is C or S

SEQ ID NO: 65517 - protein, 41 aa, Artificial Sequence
  GFR-binding peptide
  MOD_RES (6), (7), (39), (41): Xaa is C or S
GIPEPXXVPEKMEPISILYLDENKNVVKFKYENMTVESXAX

SEQ ID NO: 65518 - protein, 35 aa, Artificial Sequence
  GFR-binding peptide
  MOD_RES (3), (4), (35): Xaa is C or S
APXXVPQALSPINILYFVGRKPKVYGKIPMIVRSX

SEQ ID NO: 65519 - protein, 36 aa, Artificial Sequence; identical to SEQ ID NO: 6489
  GFR-binding peptide
  MOD_RES (2), (3), (36): Xaa is C or S
  MOD_RES (17), (18), (19), (20), (21): Xaa is A or G
  MOD_RES (22), (23), (24), (25): Xaa is A or G or is absent

SEQ ID NO: 65520 - protein, 37 aa, Artificial Sequence
  GFR-binding peptide
  MOD_RES (3), (4): Xaa is C or S
  MOD_RES (18), (19), (20), (21), (22): Xaa is A or G
  MOD_RES (23), (24), (25), (26): Xaa is A or G or is absent
EPXXVPEKMNAISILYFXXXXXXXXXLKKYRNMTVES

SEQ ID NO: 65521 - protein, 33 aa, Artificial Sequence; identical to SEQ ID NO: 27656
  GFR-binding peptide
  MOD_RES (1), (1): Xaa is C or S
  MOD_RES (15), (16), (17), (18), (19): Xaa is A or G
  MOD_RES (20), (21), (22), (23): Xaa is A or G or is absent

SEQ ID NO: 65522 - protein, 43 aa, Artificial Sequence; identical to SEQ ID NO: 6493
  GFR-binding peptide
  MOD_RES (6), (7), (41), (43): Xaa is C or S
  MOD_RES (21), (22), (23), (24), (25): Xaa is A or G
  MOD_RES (26), (27), (28), (29): Xaa is A or G or is absent

SEQ ID NO: 65523 - protein, 39 aa, Artificial Sequence
  GFR-binding peptide
  MOD_RES (5), (6), (38): Xaa is C or S
TPPTXXVPTRLSATSILYYDSANNVVLRKHRDMVVESXG

SEQ ID NO: 65524 - protein, 33 aa, Artificial Sequence; identical to SEQ ID NO: 6498
  GFR-binding peptide
  MOD_RES (33), (33): Xaa is C or S
  MOD_RES (14), (15), (16), (17), (18): Xaa is A or G
  MOD_RES (19), (20), (21), (22): Xaa is A or G or is absent

SEQ ID NO: 65525 - protein, 38 aa, Artificial Sequence; identical to SEQ ID NO: 32684
  GFR-binding peptide
  MOD_RES (4), (5), (37): Xaa is C or S

SEQ ID NO: 65526 - protein, 36 aa, Artificial Sequence; identical to SEQ ID NO: 32685
  GFR-binding peptide
  MOD_RES (1), (35): Xaa is C or S
  MOD_RES (15), (16), (17), (18), (19): Xaa is A or G
  MOD_RES (20), (21), (22), (23): Xaa is A or G or is absent

SEQ ID NO: 65527 - protein, 35 aa, Artificial Sequence; identical to SEQ ID NO: 27665
  GFR-binding peptide
  MOD_RES (2), (3): Xaa is C or S
  MOD_RES (17), (18), (19), (20), (21): Xaa is A or G
  MOD_RES (22), (23), (24), (25): Xaa is A or G or is absent

SEQ ID NO: 65528 - protein, 39 aa, Artificial Sequence; identical to SEQ ID NO: 6505
  GFR-binding peptide
  MOD_RES (4), (5), (37), (39): Xaa is C or S

SEQ ID NO: 65529 - protein, 37 aa, Artificial Sequence
  GFR-binding peptide
  MOD_RES (3), (4), (37): Xaa is C or S
  MOD_RES (18), (19), (20), (21), (22): Xaa is A or G
  MOD_RES (23), (24), (25), (26): Xaa is A or G or is absent
STXXAPVKTSPISMLYKXXXXXXXXXLKYHYMIVEEX

SEQ ID NO: 65530 - protein, 41 aa, Artificial Sequence; identical to SEQ ID NO: 57584
  GFR-binding peptide
  MOD_RES (6), (7), (38), (40): Xaa is C or S

SEQ ID NO: 65531 - protein, 36 aa, Artificial Sequence; identical to SEQ ID NO: 32687
  GFR-binding peptide
  MOD_RES (1), (2): Xaa is C or S
  MOD_RES (16), (17), (18), (19), (20): Xaa is A or G
  MOD_RES (21), (22), (23), (24): Xaa is A or G or is absent

SEQ ID NO: 65532 - protein, 40 aa, Artificial Sequence; identical to SEQ ID NO: 32689
  GFR-binding peptide
  MOD_RES (2), (3), (37), (39): Xaa is C or S
  MOD_RES (17), (18), (19), (20), (21): Xaa is A or G
  MOD_RES (22), (23), (24), (25): Xaa is A or G or is absent

SEQ ID NO: 65533 - protein, 34 aa, Artificial Sequence
  GFR-binding peptide
  MOD_RES (2), (3): Xaa is C or S
PXXTPTKMEPISMLYLNDKQQIIKFKYEGMVVDR

SEQ ID NO: 65534 - protein, 39 aa, Artificial Sequence
  GFR-binding peptide
  MOD_RES (4), (5), (39): Xaa is C or S
  MOD_RES (19), (20), (21), (22), (23): Xaa is A or G
  MOD_RES (24), (25), (26), (27): Xaa is A or G or is absent
PEPXXVPEKMEPISILYLXXXXXXXXXKFKYENMTVESX

SEQ ID NO: 65535 - protein, 37 aa, Artificial Sequence; identical to SEQ ID NO: 27670
  GFR-binding peptide
  MOD_RES (2), (3), (37): Xaa is C or S
  MOD_RES (17), (18), (19), (20), (21): Xaa is A or G
  MOD_RES (22), (23), (24), (25): Xaa is A or G or is absent

SEQ ID NO: 65536 - protein, 35 aa, Artificial Sequence; identical to SEQ ID NO: 6511
  GFR-binding peptide
  MOD_RES (1), (2): Xaa is C or S
  MOD_RES (16), (17), (18), (19), (20): Xaa is A or G
  MOD_RES (21), (22), (23), (24): Xaa is A or G or is absent

SEQ ID NO: 65537 - protein, 40 aa, Artificial Sequence
  GFR-binding peptide
  MOD_RES (5), (6), (37), (39): Xaa is C or S
SASPXXVSQDLSPINILYFIGKTPKIYGKIPMIVKSXKXS

SEQ ID NO: 65538 - protein, 41 aa, Artificial Sequence; identical to SEQ ID NO: 6512
  GFR-binding peptide
  MOD_RES (6), (7), (38), (40): Xaa is C or S

SEQ ID NO: 65539 - protein, 31 aa, Artificial Sequence; identical to SEQ ID NO: 6513
  GFR-binding peptide
  MOD_RES (1), (1): Xaa is C or S

SEQ ID NO: 65540 - protein, 38 aa, Artificial Sequence
  GFR-binding peptide
  MOD_RES (5), (6), (37): Xaa is C or S
VPSTXXAPVKTSPISMLYKDNGRVLLLKYHYMIVEEXG

SEQ ID NO: 65541 - protein, 38 aa, Artificial Sequence; identical to SEQ ID NO: 32693
  GFR-binding peptide
  MOD_RES (3), (4), (35), (37): Xaa is C or S

SEQ ID NO: 65542 - protein, 34 aa, Artificial Sequence; identical to SEQ ID NO: 57594
  GFR-binding peptide
  MOD_RES (1), (32), (34): Xaa is C or S

SEQ ID NO: 65543 - protein, 36 aa, Artificial Sequence; identical to SEQ ID NO: 32694
  GFR-binding peptide
  MOD_RES (3), (4): Xaa is C or S
  MOD_RES (18), (19), (20), (21), (22): Xaa is A or G
  MOD_RES (23), (24), (25), (26): Xaa is A or G or is absent

SEQ ID NO: 65544 - protein, 39 aa, Artificial Sequence
  GFR-binding peptide
  MOD_RES (6), (7), (39): Xaa is C or S
GSAGPXXTPTKMEPISMLYLNDKQQIIKFKYEGMVVDRX

SEQ ID NO: 65545 - protein, 40 aa, Artificial Sequence
  GFR-binding peptide
  MOD_RES (6), (7): Xaa is C or S
  MOD_RES (21), (22), (23), (24), (25): Xaa is A or G
  MOD_RES (26), (27), (28), (29): Xaa is A or G or is absent
GIPEPXXVPEKMSPINILYFXXXXXXXXXYGKIPNMTVES

SEQ ID NO: 65546 - protein, 39 aa, Artificial Sequence; identical to SEQ ID NO: 6520
  GFR-binding peptide
  MOD_RES (2), (3), (38): Xaa is C or S
  MOD_RES (17), (18), (19), (20), (21): Xaa is A or G
  MOD_RES (22), (23), (24), (25): Xaa is A or G or is absent

SEQ ID NO: 65547 - protein, 32 aa, Artificial Sequence
  GFR-binding peptide
  MOD_RES (1), (1): Xaa is C or S
XVPTKLSATSILYYDKGVVTYLRKHRGMAVSE

SEQ ID NO: 65548 - protein, 31 aa, Artificial Sequence; identical to SEQ ID NO: 27678
  GFR-binding peptide

SEQ ID NO: 65549 - protein, 33 aa, Artificial Sequence; identical to SEQ ID NO: 27686
  GFR-binding peptide
  MOD_RES (1), (33): Xaa is C or S

SEQ ID NO: 65550 - protein, 31 aa, Artificial Sequence; identical to SEQ ID NO: 27687
  GFR-binding peptide

SEQ ID NO: 65551 - protein, 35 aa, Artificial Sequence; identical to SEQ ID NO: 57609
  GFR-binding peptide
  MOD_RES (1), (2), (33), (35): Xaa is C or S

SEQ ID NO: 65552 - protein, 39 aa, Artificial Sequence; identical to SEQ ID NO: 32704
  GFR-binding peptide
  MOD_RES (5), (6): Xaa is C or S
  MOD_RES (20), (21), (22), (23), (24): Xaa is A or G
  MOD_RES (25), (26), (27), (28): Xaa is A or G or is absent

SEQ ID NO: 65553 - protein, 43 aa, Artificial Sequence; identical to SEQ ID NO: 6527
  GFR-binding peptide
  MOD_RES (6), (7), (40), (42): Xaa is C or S
  MOD_RES (21), (22), (23), (24), (25): Xaa is A or G
  MOD_RES (26), (27), (28), (29): Xaa is A or G or is absent

SEQ ID NO: 65554 - protein, 40 aa, Artificial Sequence
  GFR-binding peptide
  MOD_RES (4), (5), (38), (40): Xaa is C or S
  MOD_RES (19), (20), (21), (22), (23): Xaa is A or G
  MOD_RES (24), (25), (26), (27): Xaa is A or G or is absent
PSTXXAPVKTEPISMLYLXXXXXXXXXKFKYEMIVEEXGX

SEQ ID NO: 65555 - protein, 38 aa, Artificial Sequence; identical to SEQ ID NO: 32708
  GFR-binding peptide
  MOD_RES (3), (4), (36), (38): Xaa is C or S

SEQ ID NO: 65556 - protein, 39 aa, Artificial Sequence; identical to SEQ ID NO: 27695
  GFR-binding peptide
  MOD_RES (3), (4), (38): Xaa is C or S
  MOD_RES (18), (19), (20), (21), (22): Xaa is A or G
  MOD_RES (23), (24), (25), (26): Xaa is A or G or is absent

SEQ ID NO: 65557 - protein, 41 aa, Artificial Sequence; identical to SEQ ID NO: 32712
  GFR-binding peptide
  MOD_RES (3), (4), (38), (40): Xaa is C or S
  MOD_RES (18), (19), (20), (21), (22): Xaa is A or G
  MOD_RES (23), (24), (25), (26): Xaa is A or G or is absent

SEQ ID NO: 65558 - protein, 37 aa, Artificial Sequence; identical to SEQ ID NO: 6534
  GFR-binding peptide
  MOD_RES (1), (2), (37): Xaa is C or S
  MOD_RES (16), (17), (18), (19), (20): Xaa is A or G
  MOD_RES (21), (22), (23), (24): Xaa is A or G or is absent

SEQ ID NO: 65559 - protein, 39 aa, Artificial Sequence; identical to SEQ ID NO: 6536
  GFR-binding peptide
  MOD_RES (6), (6): Xaa is C or S
  MOD_RES (20), (21), (22), (23), (24): Xaa is A or G
  MOD_RES (25), (26), (27), (28): Xaa is A or G or is absent

SEQ ID NO: 65560 - protein, 36 aa, Artificial Sequence; identical to SEQ ID NO: 13902
  GFR-binding peptide
  MOD_RES (2), (3), (35): Xaa is C or S

SEQ ID NO: 65561 - protein, 37 aa, Artificial Sequence; identical to SEQ ID NO: 6539
  GFR-binding peptide
  MOD_RES (1), (2), (35), (37): Xaa is C or S
  MOD_RES (16), (17), (18), (19), (20): Xaa is A or G
  MOD_RES (21), (22), (23), (24): Xaa is A or G or is absent

SEQ ID NO: 65562 - protein, 36 aa, Artificial Sequence; identical to SEQ ID NO: 57623
  GFR-binding peptide
  MOD_RES (1), (2), (35): Xaa is C or S
  MOD_RES (16), (17), (18), (19), (20): Xaa is A or G
  MOD_RES (21), (22), (23), (24): Xaa is A or G or is absent

SEQ ID NO: 65563 - protein, 35 aa, Artificial Sequence; identical to SEQ ID NO: 32722
  GFR-binding peptide
  MOD_RES (1), (35): Xaa is C or S
  MOD_RES (15), (16), (17), (18), (19): Xaa is A or G
  MOD_RES (20), (21), (22), (23): Xaa is A or G or is absent

SEQ ID NO: 65564 - protein, 35 aa, Artificial Sequence; identical to SEQ ID NO: 6542
  GFR-binding peptide
  MOD_RES (1), (32), (34): Xaa is C or S

SEQ ID NO: 65565 - protein, 38 aa, Artificial Sequence; identical to SEQ ID NO: 6545
  GFR-binding peptide
  MOD_RES (1), (2), (36), (38): Xaa is C or S
  MOD_RES (16), (17), (18), (19), (20): Xaa is A or G
  MOD_RES (21), (22), (23), (24): Xaa is A or G or is absent

SEQ ID NO: 65566 - protein, 30 aa, Artificial Sequence
  GFR-binding peptide
VPEKMSPINILYFDENKNVVYGKIPNMTVE

SEQ ID NO: 65567 - protein, 36 aa, Artificial Sequence; identical to SEQ ID NO: 6547
  GFR-binding peptide
  MOD_RES (1), (35): Xaa is C or S
  MOD_RES (15), (16), (17), (18), (19): Xaa is A or G
  MOD_RES (20), (21), (22), (23): Xaa is A or G or is absent

SEQ ID NO: 65568 - protein, 38 aa, Artificial Sequence; identical to SEQ ID NO: 6549
  GFR-binding peptide
  MOD_RES (3), (4), (38): Xaa is C or S
  MOD_RES (18), (19), (20), (21), (22): Xaa is A or G
  MOD_RES (23), (24), (25), (26): Xaa is A or G or is absent

SEQ ID NO: 65569 - protein, 37 aa, Artificial Sequence; identical to SEQ ID NO: 27708
  GFR-binding peptide
  MOD_RES (1), (2), (36): Xaa is C or S
  MOD_RES (16), (17), (18), (19), (20): Xaa is A or G
  MOD_RES (21), (22), (23), (24): Xaa is A or G or is absent

SEQ ID NO: 65570 - protein, 38 aa, Artificial Sequence
  GFR-binding peptide
  MOD_RES (5), (6), (38): Xaa is C or S
SAGPXXTPTKMSPISMLYKNDKQQIILKYHYGMVVDRX

SEQ ID NO: 65571 - protein, 40 aa, Artificial Sequence; identical to SEQ ID NO: 6552
  GFR-binding peptide
  MOD_RES (2), (3), (37), (39): Xaa is C or S
  MOD_RES (17), (18), (19), (20), (21): Xaa is A or G
  MOD_RES (22), (23), (24), (25): Xaa is A or G or is absent

SEQ ID NO: 65572 - protein, 38 aa, Artificial Sequence; identical to SEQ ID NO: 6554
  GFR-binding peptide
  MOD_RES (3), (4): Xaa is C or S
  MOD_RES (18), (19), (20), (21), (22): Xaa is A or G
  MOD_RES (23), (24), (25), (26): Xaa is A or G or is absent

SEQ ID NO: 65573 - protein, 40 aa, Artificial Sequence; identical to SEQ ID NO: 32730
  GFR-binding peptide
  MOD_RES (4), (5), (38), (40): Xaa is C or S

SEQ ID NO: 65574 - protein, 37 aa, Artificial Sequence; identical to SEQ ID NO: 6557
  GFR-binding peptide
  MOD_RES (6), (7): Xaa is C or S

SEQ ID NO: 65575 - protein, 38 aa, Artificial Sequence; identical to SEQ ID NO: 6559
  GFR-binding peptide
  MOD_RES (4), (5): Xaa is C or S
  MOD_RES (19), (20), (21), (22), (23): Xaa is A or G
  MOD_RES (24), (25), (26), (27): Xaa is A or G or is absent

SEQ ID NO: 65576 - protein, 36 aa, Artificial Sequence; identical to SEQ ID NO: 32738
  GFR-binding peptide
  MOD_RES (2), (34), (36): Xaa is C or S

SEQ ID NO: 65577 - protein, 39 aa, Artificial Sequence
  GFR-binding peptide
  MOD_RES (4), (5), (37), (39): Xaa is C or S
PPTXXVPTRLEPISILYLDSANNVVKFKYEDMVVESXGX

SEQ ID NO: 65578 - protein, 37 aa, Artificial Sequence; identical to SEQ ID NO: 27719
  GFR-binding peptide
  MOD_RES (34), (36): Xaa is C or S
  MOD_RES (14), (15), (16), (17), (18): Xaa is A or G
  MOD_RES (19), (20), (21), (22): Xaa is A or G or is absent

SEQ ID NO: 65579 - protein, 37 aa, Artificial Sequence; identical to SEQ ID NO: 32742
  GFR-binding peptide
  MOD_RES (2), (3), (37): Xaa is C or S
  MOD_RES (17), (18), (19), (20), (21): Xaa is A or G
  MOD_RES (22), (23), (24), (25): Xaa is A or G or is absent

SEQ ID NO: 65580 - protein, 39 aa, Artificial Sequence; identical to SEQ ID NO: 32744
  GFR-binding peptide
  MOD_RES (5), (6): Xaa is C or S
  MOD_RES (20), (21), (22), (23), (24): Xaa is A or G
  MOD_RES (25), (26), (27), (28): Xaa is A or G or is absent

SEQ ID NO: 65581 - protein, 35 aa, Artificial Sequence; identical to SEQ ID NO: 6561
  GFR-binding peptide
  MOD_RES (2), (3), (35): Xaa is C or S

SEQ ID NO: 65582 - protein, 38 aa, Artificial Sequence
  GFR-binding peptide
  MOD_RES (2), (3), (35), (37): Xaa is C or S
TXXVPTRLSPISILYKDSANNVVLKYHYDMVVESXGXR

SEQ ID NO: 65583 - protein, 39 aa, Artificial Sequence; identical to SEQ ID NO: 32747
  GFR-binding peptide
  MOD_RES (5), (6), (39): Xaa is C or S

SEQ ID NO: 65584 - protein, 37 aa, Artificial Sequence; identical to SEQ ID NO: 27721
  GFR-binding peptide
  MOD_RES (4), (5): Xaa is C or S
  MOD_RES (19), (20), (21), (22), (23): Xaa is A or G
  MOD_RES (24), (25), (26), (27): Xaa is A or G or is absent

SEQ ID NO: 65585 - protein, 38 aa, Artificial Sequence
  GFR-binding peptide
  MOD_RES (3), (4), (38): Xaa is C or S
  MOD_RES (18), (19), (20), (21), (22): Xaa is A or G
  MOD_RES (23), (24), (25), (26): Xaa is A or G or is absent
PTXXVPTRLSPISILYKXXXXXXXXXLKYHYDMVVESX

SEQ ID NO: 65586 - protein, 38 aa, Artificial Sequence; identical to SEQ ID NO: 6567
  GFR-binding peptide
  MOD_RES (5), (6), (38): Xaa is C or S

SEQ ID NO: 65587 - protein, 36 aa, Artificial Sequence; identical to SEQ ID NO: 6569
  GFR-binding peptide
  MOD_RES (33), (35): Xaa is C or S
  MOD_RES (14), (15), (16), (17), (18): Xaa is A or G
  MOD_RES (19), (20), (21), (22): Xaa is A or G or is absent

SEQ ID NO: 65588 - protein, 40 aa, Artificial Sequence; identical to SEQ ID NO: 27728
  GFR-binding peptide
  MOD_RES (3), (4), (39): Xaa is C or S
  MOD_RES (18), (19), (20), (21), (22): Xaa is A or G
  MOD_RES (23), (24), (25), (26): Xaa is A or G or is absent

SEQ ID NO: 65589 - protein, 38 aa, Artificial Sequence; identical to SEQ ID NO: 27729
  GFR-binding peptide
  MOD_RES (4), (5), (37): Xaa is C or S

SEQ ID NO: 65590 - protein, 32 aa, Artificial Sequence; identical to SEQ ID NO: 6571
  GFR-binding peptide
  MOD_RES (1), (2): Xaa is C or S

SEQ ID NO: 65591 - protein, 32 aa, Artificial Sequence; identical to SEQ ID NO: 27731
  GFR-binding peptide
  MOD_RES (1), (2): Xaa is C or S

SEQ ID NO: 65592 - protein, 35 aa, Artificial Sequence
  GFR-binding peptide
  MOD_RES (1), (2), (33), (35): Xaa is C or S
XXVPQALSPINILYFVGRKPKVYGKIPMIVRSXKX

SEQ ID NO: 65593 - protein, 43 aa, Artificial Sequence; identical to SEQ ID NO: 6573
  GFR-binding peptide
  MOD_RES (5), (6), (41), (43): Xaa is C or S
  MOD_RES (20), (21), (22), (23), (24): Xaa is A or G
  MOD_RES (25), (26), (27), (28): Xaa is A or G or is absent

SEQ ID NO: 65594 - protein, 38 aa, Artificial Sequence; identical to SEQ ID NO: 32752
  GFR-binding peptide
  MOD_RES (5), (6): Xaa is C or S
  MOD_RES (20), (21), (22), (23), (24): Xaa is A or G
  MOD_RES (25), (26), (27), (28): Xaa is A or G or is absent

SEQ ID NO: 65595 - protein, 35 aa, Artificial Sequence
  GFR-binding peptide
  MOD_RES (32), (34): Xaa is C or S
VPEKMSPISILYKDENKNVVLKYHYNMTVESXAXR

SEQ ID NO: 65596 - protein, 43 aa, Artificial Sequence; identical to SEQ ID NO: 27739
  GFR-binding peptide
  MOD_RES (6), (7), (41), (43): Xaa is C or S
  MOD_RES (21), (22), (23), (24), (25): Xaa is A or G
  MOD_RES (26), (27), (28), (29): Xaa is A or G or is absent

SEQ ID NO: 65597 - protein, 35 aa, Artificial Sequence; identical to SEQ ID NO: 6577
  GFR-binding peptide
  MOD_RES (2), (3): Xaa is C or S
  MOD_RES (17), (18), (19), (20), (21): Xaa is A or G
  MOD_RES (22), (23), (24), (25): Xaa is A or G or is absent

SEQ ID NO: 65598 - protein, 30 aa, Artificial Sequence; identical to SEQ ID NO: 6580
  GFR-binding peptide

SEQ ID NO: 65599 - protein, 39 aa, Artificial Sequence
  GFR-binding peptide
  MOD_RES (3), (4), (37), (39): Xaa is C or S
  MOD_RES (18), (19), (20), (21), (22): Xaa is A or G
  MOD_RES (23), (24), (25), (26): Xaa is A or G or is absent
STXXAPVKTEPISMLYLXXXXXXXXXKFKYEMIVEEXGX

SEQ ID NO: 65600 - protein, 35 aa, Artificial Sequence; identical to SEQ ID NO: 6581
  GFR-binding peptide
  MOD_RES (3), (3): Xaa is C or S
  MOD_RES (17), (18), (19), (20), (21): Xaa is A or G
  MOD_RES (22), (23), (24), (25): Xaa is A or G or is absent

SEQ ID NO: 65601 - protein, 37 aa, Artificial Sequence; identical to SEQ ID NO: 27744
  GFR-binding peptide
  MOD_RES (1), (2), (35), (37): Xaa is C or S
  MOD_RES (16), (17), (18), (19), (20): Xaa is A or G
  MOD_RES (21), (22), (23), (24): Xaa is A or G or is absent

SEQ ID NO: 65602 - protein, 36 aa, Artificial Sequence
  GFR-binding peptide
  MOD_RES (1), (2), (34), (36): Xaa is C or S
XXVPTRLSATSILYYDSANNVVLRKHRDMVVESXGX

SEQ ID NO: 65603 - protein, 35 aa, Artificial Sequence; identical to SEQ ID NO: 27745
  GFR-binding peptide
  MOD_RES (34), (34): Xaa is C or S
  MOD_RES (14), (15), (16), (17), (18): Xaa is A or G
  MOD_RES (19), (20), (21), (22): Xaa is A or G or is absent

SEQ ID NO: 65604 - protein, 37 aa, Artificial Sequence; identical to SEQ ID NO: 6582
  GFR-binding peptide
  MOD_RES (3), (4): Xaa is C or S
  MOD_RES (18), (19), (20), (21), (22): Xaa is A or G
  MOD_RES (23), (24), (25), (26): Xaa is A or G or is absent

SEQ ID NO: 65605 - protein, 36 aa, Artificial Sequence
  GFR-binding peptide
  MOD_RES (1), (33), (35): Xaa is C or S
XVPTRLEPISILYLDSANNVVKFKYEDMVVESXGXR

SEQ ID NO: 65606 - protein, 37 aa, Artificial Sequence; identical to SEQ ID NO: 6584
  GFR-binding peptide
  MOD_RES (1), (2), (35), (37): Xaa is C or S
  MOD_RES (16), (17), (18), (19), (20): Xaa is A or G
  MOD_RES (21), (22), (23), (24): Xaa is A or G or is absent

SEQ ID NO: 65607 - protein, 37 aa, Artificial Sequence; identical to SEQ ID NO: 6591
  GFR-binding peptide
  MOD_RES (4), (5): Xaa is C or S
  MOD_RES (19), (20), (21), (22), (23): Xaa is A or G
  MOD_RES (24), (25), (26), (27): Xaa is A or G or is absent

SEQ ID NO: 65608 - protein, 34 aa, Artificial Sequence; identical to SEQ ID NO: 6592
  GFR-binding peptide
  MOD_RES (4), (4): Xaa is C or S

SEQ ID NO: 65609 - protein, 32 aa, Artificial Sequence; identical to SEQ ID NO: 13962
  GFR-binding peptide
  MOD_RES (1), (1): Xaa is C or S

SEQ ID NO: 65610 - protein, 40 aa, Artificial Sequence; identical to SEQ ID NO: 6595
  GFR-binding peptide
  MOD_RES (2), (3), (37), (39): Xaa is C or S
  MOD_RES (17), (18), (19), (20), (21): Xaa is A or G
  MOD_RES (22), (23), (24), (25): Xaa is A or G or is absent

SEQ ID NO: 65611 - protein, 38 aa, Artificial Sequence; identical to SEQ ID NO: 32775
  GFR-binding peptide
  MOD_RES (4), (5), (37): Xaa is C or S

SEQ ID NO: 65612 - protein, 39 aa, Artificial Sequence
  GFR-binding peptide
  MOD_RES (3), (4), (38): Xaa is C or S
  MOD_RES (18), (19), (20), (21), (22): Xaa is A or G
  MOD_RES (23), (24), (25), (26): Xaa is A or G or is absent
EPXXVPEKMSPINILYFXXXXXXXXXYGKIPNMTVESXA

SEQ ID NO: 65613 - protein, 37 aa, Artificial Sequence; identical to SEQ ID NO: 27754
  GFR-binding peptide
  MOD_RES (5), (6), (37): Xaa is C or S

SEQ ID NO: 65614 - protein, 34 aa, Artificial Sequence; identical to SEQ ID NO: 27755
  GFR-binding peptide
  MOD_RES (32), (34): Xaa is C or S

SEQ ID NO: 65615 - protein, 36 aa, Artificial Sequence
  GFR-binding peptide
  MOD_RES (1), (2), (34), (36): Xaa is C or S
XXVPEKMSPINILYFDENKNVVYGKIPNMTVESXAX

SEQ ID NO: 65616 - protein, 38 aa, Artificial Sequence
  GFR-binding peptide
  MOD_RES (4), (5), (37): Xaa is C or S
AGPXXTPTKMEPISMLYLNDKQQIIKFKYEGMVVDRXG

SEQ ID NO: 65617 - protein, 35 aa, Artificial Sequence
  GFR-binding peptide
  MOD_RES (3), (4): Xaa is C or S
PTXXVPTRLSPISILYKDSANNVVLKYHYDMVVES

SEQ ID NO: 65618 - protein, 39 aa, Artificial Sequence; identical to SEQ ID NO: 6599
  GFR-binding peptide
  MOD_RES (2), (3), (36), (38): Xaa is C or S
  MOD_RES (17), (18), (19), (20), (21): Xaa is A or G
  MOD_RES (22), (23), (24), (25): Xaa is A or G or is absent

SEQ ID NO: 65619 - protein, 42 aa, Artificial Sequence; identical to SEQ ID NO: 6600
  GFR-binding peptide
  MOD_RES (4), (5), (39), (41): Xaa is C or S
  MOD_RES (19), (20), (21), (22), (23): Xaa is A or G
  MOD_RES (24), (25), (26), (27): Xaa is A or G or is absent

SEQ ID NO: 65620 - protein, 39 aa, Artificial Sequence; identical to SEQ ID NO: 57695
  GFR-binding peptide
  MOD_RES (6), (7), (39): Xaa is C or S

SEQ ID NO: 65621 - protein, 36 aa, Artificial Sequence; identical to SEQ ID NO: 6605
  GFR-binding peptide
  MOD_RES (1), (2), (34), (36): Xaa is C or S

SEQ ID NO: 65622 - protein, 30 aa, Artificial Sequence; identical to SEQ ID NO: 27763
  GFR-binding peptide

SEQ ID NO: 65623 - protein, 35 aa, Artificial Sequence; identical to SEQ ID NO: 27764
  GFR-binding peptide
  MOD_RES (2), (3): Xaa is C or S

SEQ ID NO: 65624 - protein, 37 aa, Artificial Sequence; identical to SEQ ID NO: 32798
  GFR-binding peptide
  MOD_RES (5), (6): Xaa is C or S

SEQ ID NO: 65625 - protein, 39 aa, Artificial Sequence; identical to SEQ ID NO: 6609
  GFR-binding peptide
  MOD_RES (4), (5), (36), (38): Xaa is C or S

SEQ ID NO: 65626 - protein, 35 aa, Artificial Sequence; identical to SEQ ID NO: 32800
  GFR-binding peptide
  MOD_RES (3), (4): Xaa is C or S

SEQ ID NO: 65627 - protein, 38 aa, Artificial Sequence
  GFR-binding peptide
  MOD_RES (1), (35), (37): Xaa is C or S
  MOD_RES (15), (16), (17), (18), (19): Xaa is A or G
  MOD_RES (20), (21), (22), (23): Xaa is A or G or is absent
XVPEKMSATSILYYXXXXXXXXXLRKHRNMTVESXAXR

SEQ ID NO: 65628 - protein, 36 aa, Artificial Sequence
  GFR-binding peptide
  MOD_RES (4), (5), (36): Xaa is C or S
PSTXXAPVKTSPISMLYKDNGRVLLLKYHYMIVEEX

SEQ ID NO: 65629 - protein, 35 aa, Artificial Sequence
  GFR-binding peptide
  MOD_RES (2), (3): Xaa is C or S
  MOD_RES (17), (18), (19), (20), (21): Xaa is A or G
  MOD_RES (22), (23), (24), (25): Xaa is A or G or is absent
TXXAPVKTSATSMLYYXXXXXXXXXLRKHRMIVEE

SEQ ID NO: 65630 - protein, 37 aa, Artificial Sequence
  GFR-binding peptide
  MOD_RES (1), (35), (37): Xaa is C or S
  MOD_RES (15), (16), (17), (18), (19): Xaa is A or G
  MOD_RES (20), (21), (22), (23): Xaa is A or G or is absent
XVPEKMSPINILYFXXXXXXXXXYGKIPNMTVESXAX

SEQ ID NO: 65631 - protein, 38 aa, Artificial Sequence; identical to SEQ ID NO: 6612
  GFR-binding peptide
  MOD_RES (5), (6), (38): Xaa is C or S

SEQ ID NO: 65632 - protein, 41 aa, Artificial Sequence; identical to SEQ ID NO: 6614
  GFR-binding peptide
  MOD_RES (5), (6), (39), (41): Xaa is C or S

SEQ ID NO: 65633 - protein, 35 aa, Artificial Sequence; identical to SEQ ID NO: 6615
  GFR-binding peptide
  MOD_RES (2), (3), (35): Xaa is C or S

SEQ ID NO: 65634 - protein, 36 aa, Artificial Sequence; identical to SEQ ID NO: 27770
  GFR-binding peptide
  MOD_RES (1), (2), (34), (36): Xaa is C or S

SEQ ID NO: 65635 - protein, 40 aa, Artificial Sequence; identical to SEQ ID NO: 27771
  GFR-binding peptide
  MOD_RES (3), (4), (38), (40): Xaa is C or S
  MOD_RES (18), (19), (20), (21), (22): Xaa is A or G
  MOD_RES (23), (24), (25), (26): Xaa is A or G or is absent

SEQ ID NO: 65636 - protein, 41 aa, Artificial Sequence
  GFR-binding peptide
  MOD_RES (3), (4), (38), (40): Xaa is C or S
  MOD_RES (18), (19), (20), (21), (22): Xaa is A or G
  MOD_RES (23), (24), (25), (26): Xaa is A or G or is absent
PTXXVPTRLSPISILYKXXXXXXXXXLKYHYDMVVESXGXR

SEQ ID NO: 65637 - protein, 37 aa, Artificial Sequence
  GFR-binding peptide
  MOD_RES (1), (34), (36): Xaa is C or S
  MOD_RES (15), (16), (17), (18), (19): Xaa is A or G
  MOD_RES (20), (21), (22), (23): Xaa is A or G or is absent
XAPVKTSPISMLYKXXXXXXXXXLKYHYMIVEEXGXL

SEQ ID NO: 65638 - protein, 40 aa, Artificial Sequence; identical to SEQ ID NO: 57722
  GFR-binding peptide
  MOD_RES (3), (4), (38), (40): Xaa is C or S
  MOD_RES (18), (19), (20), (21), (22): Xaa is A or G
  MOD_RES (23), (24), (25), (26): Xaa is A or G or is absent

SEQ ID NO: 65639 - protein, 39 aa, Artificial Sequence; identical to SEQ ID NO: 6620
  GFR-binding peptide
  MOD_RES (6), (7): Xaa is C or S

SEQ ID NO: 65640 - protein, 39 aa, Artificial Sequence; identical to SEQ ID NO: 6622
  GFR-binding peptide
  MOD_RES (4), (5), (36), (38): Xaa is C or S

SEQ ID NO: 65641 - protein, 33 aa, Artificial Sequence; identical to SEQ ID NO: 27775
  GFR-binding peptide
  MOD_RES (31), (33): Xaa is C or S

SEQ ID NO: 65642 - protein, 31 aa, Artificial Sequence
  GFR-binding peptide
  MOD_RES (31), (31): Xaa is C or S
VPQALSPINILYFVGRKPKVYGKIPMIVRSX

SEQ ID NO: 65643 - protein, 34 aa, Artificial Sequence; identical to SEQ ID NO: 32819
  GFR-binding peptide
  MOD_RES (34), (34): Xaa is C or S
  MOD_RES (14), (15), (16), (17), (18): Xaa is A or G
  MOD_RES (19), (20), (21), (22): Xaa is A or G or is absent

SEQ ID NO: 65644 - protein, 40 aa, Artificial Sequence; identical to SEQ ID NO: 27778
  GFR-binding peptide
  MOD_RES (3), (4), (38), (40): Xaa is C or S
  MOD_RES (18), (19), (20), (21), (22): Xaa is A or G
  MOD_RES (23), (24), (25), (26): Xaa is A or G or is absent

SEQ ID NO: 65645 - protein, 33 aa, Artificial Sequence; identical to SEQ ID NO: 27779
  GFR-binding peptide
  MOD_RES (1), (33): Xaa is C or S

SEQ ID NO: 65646 - protein, 44 aa, Artificial Sequence; identical to SEQ ID NO: 27783
  GFR-binding peptide
  MOD_RES (5), (6), (41), (43): Xaa is C or S
  MOD_RES (20), (21), (22), (23), (24): Xaa is A or G
  MOD_RES (25), (26), (27), (28): Xaa is A or G or is absent

SEQ ID NO: 65647 - protein, 37 aa, Artificial Sequence
  GFR-binding peptide
  MOD_RES (34), (36): Xaa is C or S
  MOD_RES (14), (15), (16), (17), (18): Xaa is A or G
  MOD_RES (19), (20), (21), (22): Xaa is A or G or is absent
VPEKMSPISILYKXXXXXXXXXLKYHYNMTVESXAXR

SEQ ID NO: 65648 - protein, 36 aa, Artificial Sequence; identical to SEQ ID NO: 32826
  GFR-binding peptide
  MOD_RES (2), (3): Xaa is C or S
  MOD_RES (17), (18), (19), (20), (21): Xaa is A or G
  MOD_RES (22), (23), (24), (25): Xaa is A or G or is absent

SEQ ID NO: 65649 - protein, 37 aa, Artificial Sequence; identical to SEQ ID NO: 32827
  GFR-binding peptide
  MOD_RES (3), (4): Xaa is C or S
  MOD_RES (18), (19), (20), (21), (22): Xaa is A or G
  MOD_RES (23), (24), (25), (26): Xaa is A or G or is absent

SEQ ID NO: 65650 - protein, 37 aa, Artificial Sequence
  GFR-binding peptide
  MOD_RES (3), (4), (36): Xaa is C or S
GPXXTPTKMSATSMLYYNDKQQIILRKHRGMVVDRXG

SEQ ID NO: 65651 - protein, 40 aa, Artificial Sequence; identical to SEQ ID NO: 6630
  GFR-binding peptide
  MOD_RES (4), (38), (40): Xaa is C or S
  MOD_RES (18), (19), (20), (21), (22): Xaa is A or G
  MOD_RES (23), (24), (25), (26): Xaa is A or G or is absent

SEQ ID NO: 65652 - protein, 37 aa, Artificial Sequence; identical to SEQ ID NO: 32835
  GFR-binding peptide
  MOD_RES (4), (5), (37): Xaa is C or S

SEQ ID NO: 65653 - protein, 36 aa, Artificial Sequence
  GFR-binding peptide
  MOD_RES (1), (2), (36): Xaa is C or S
  MOD_RES (16), (17), (18), (19), (20): Xaa is A or G
  MOD_RES (21), (22), (23), (24): Xaa is A or G or is absent
XXTPTKMEPISMLYLXXXXXXXXXKFKYEGMVVDRX

SEQ ID NO: 65654 - protein, 37 aa, Artificial Sequence; identical to SEQ ID NO: 27795
  GFR-binding peptide
  MOD_RES (4), (5): Xaa is C or S
  MOD_RES (19), (20), (21), (22), (23): Xaa is A or G
  MOD_RES (24), (25), (26), (27): Xaa is A or G or is absent

SEQ ID NO: 65655 - protein, 38 aa, Artificial Sequence
  GFR-binding peptide
  MOD_RES (3), (4), (36), (38): Xaa is C or S
EPXXVPEKMEPISILYLDENKNVVKFKYENMTVESXAX

SEQ ID NO: 65656 - protein, 39 aa, Artificial Sequence
  GFR-binding peptide
  MOD_RES (1), (2), (36), (38): Xaa is C or S
  MOD_RES (16), (17), (18), (19), (20): Xaa is A or G
  MOD_RES (21), (22), (23), (24): Xaa is A or G or is absent
XXVPEKMNAISILYFXXXXXXXXXLKKYRNMTVESXAXR

SEQ ID NO: 65657 - protein, 34 aa, Artificial Sequence; identical to SEQ ID NO: 27797
  GFR-binding peptide
  MOD_RES (1), (1): Xaa is C or S
  MOD_RES (15), (16), (17), (18), (19): Xaa is A or G
  MOD_RES (20), (21), (22), (23): Xaa is A or G or is absent

SEQ ID NO: 65658 - protein, 35 aa, Artificial Sequence; identical to SEQ ID NO: 27799
  GFR-binding peptide
  MOD_RES (1), (2), (34): Xaa is C or S

SEQ ID NO: 65659 - protein, 38 aa, Artificial Sequence; identical to SEQ ID NO: 27801
  GFR-binding peptide
  MOD_RES (4), (5), (36), (38): Xaa is C or S

SEQ ID NO: 65660 - protein, 40 aa, Artificial Sequence; identical to SEQ ID NO: 6635
  GFR-binding peptide
  MOD_RES (6), (7), (40): Xaa is C or S
  MOD_RES (21), (22), (23), (24), (25): Xaa is A or G
  MOD_RES (26), (27), (28), (29): Xaa is A or G or is absent

SEQ ID NO: 65661 - protein, 40 aa, Artificial Sequence
  GFR-binding peptide
  MOD_RES (5), (6), (40): Xaa is C or S
  MOD_RES (20), (21), (22), (23), (24): Xaa is A or G
  MOD_RES (25), (26), (27), (28): Xaa is A or G or is absent
TPPTXXVPTRLEPISILYLXXXXXXXXXKFKYEDMVVESX

SEQ ID NO: 65662 - protein, 40 aa, Artificial Sequence; identical to SEQ ID NO: 6641
  GFR-binding peptide
  MOD_RES (5), (6), (37), (39): Xaa is C or S

SEQ ID NO: 65663 - protein, 35 aa, Artificial Sequence; identical to SEQ ID NO: 6642
  GFR-binding peptide
  MOD_RES (1), (34): Xaa is C or S
  MOD_RES (15), (16), (17), (18), (19): Xaa is A or G
  MOD_RES (20), (21), (22), (23): Xaa is A or G or is absent

SEQ ID NO: 65664 - protein, 37 aa, Artificial Sequence
  GFR-binding peptide
  MOD_RES (2), (3), (37): Xaa is C or S
  MOD_RES (17), (18), (19), (20), (21): Xaa is A or G
  MOD_RES (22), (23), (24), (25): Xaa is A or G or is absent
PXXVPEKMEPISILYLXXXXXXXXXKFKYENMTVESX

SEQ ID NO: 65665 - protein, 37 aa, Artificial Sequence; identical to SEQ ID NO: 32850
  GFR-binding peptide
  MOD_RES (34), (36): Xaa is C or S
  MOD_RES (14), (15), (16), (17), (18): Xaa is A or G
  MOD_RES (19), (20), (21), (22): Xaa is A or G or is absent

SEQ ID NO: 65666 - protein, 41 aa, Artificial Sequence; identical to SEQ ID NO: 6644
  GFR-binding peptide
  MOD_RES (6), (7), (41): Xaa is C or S
  MOD_RES (21), (22), (23), (24), (25): Xaa is A or G
  MOD_RES (26), (27), (28), (29): Xaa is A or G or is absent

SEQ ID NO: 65667 - protein, 32 aa, Artificial Sequence
  GFR-binding peptide
  MOD_RES (14), (15), (16), (17), (18): Xaa is A or G
  MOD_RES (19), (20), (21), (22): Xaa is A or G or is absent
VPTRLSPISILYKXXXXXXXXXLKYHYDMVVE

SEQ ID NO: 65668 - protein, 34 aa, Artificial Sequence; identical to SEQ ID NO: 6646
  GFR-binding peptide
  MOD_RES (1), (2), (33): Xaa is C or S

SEQ ID NO: 65669 - protein, 32 aa, Artificial Sequence
  GFR-binding peptide
  MOD_RES (14), (15), (16), (17), (18): Xaa is A or G
  MOD_RES (19), (20), (21), (22): Xaa is A or G or is absent
VPTRLEPISILYLXXXXXXXXXKFKYEDMVVE

SEQ ID NO: 65670 - protein, 39 aa, Artificial Sequence; identical to SEQ ID NO: 32858
  GFR-binding peptide
  MOD_RES (3), (4), (36), (38): Xaa is C or S

SEQ ID NO: 65671 - protein, 37 aa, Artificial Sequence; identical to SEQ ID NO: 32861
  GFR-binding peptide
  MOD_RES (3), (4), (35), (37): Xaa is C or S

SEQ ID NO: 65672 - protein, 38 aa, Artificial Sequence
  GFR-binding peptide
  MOD_RES (3), (4), (38): Xaa is C or S
  MOD_RES (18), (19), (20), (21), (22): Xaa is A or G
  MOD_RES (23), (24), (25), (26): Xaa is A or G or is absent
EPXXVPEKMSPINILYFXXXXXXXXXYGKIPNMTVESX

SEQ ID NO: 65673 - protein, 35 aa, Artificial Sequence; identical to SEQ ID NO: 6652
  GFR-binding peptide
  MOD_RES (2), (3): Xaa is C or S
  MOD_RES (17), (18), (19), (20), (21): Xaa is A or G
  MOD_RES (22), (23), (24), (25): Xaa is A or G or is absent

SEQ ID NO: 65674 - protein, 35 aa, Artificial Sequence
  GFR-binding peptide
  MOD_RES (2), (3), (35): Xaa is C or S
TXXVPTRLEPISILYLDSANNVVKFKYEDMVVESX

SEQ ID NO: 65675 - protein, 35 aa, Artificial Sequence; identical to SEQ ID NO: 6653
  GFR-binding peptide
  MOD_RES (1), (32), (34): Xaa is C or S

SEQ ID NO: 65676 - protein, 36 aa, Artificial Sequence; identical to SEQ ID NO: 32863
  GFR-binding peptide
  MOD_RES (2), (3): Xaa is C or S
  MOD_RES (17), (18), (19), (20), (21): Xaa is A or G
  MOD_RES (22), (23), (24), (25): Xaa is A or G or is absent

SEQ ID NO: 65677 - protein, 43 aa, Artificial Sequence; identical to SEQ ID NO: 6658
  GFR-binding peptide
  MOD_RES (5), (6), (40), (42): Xaa is C or S
  MOD_RES (20), (21), (22), (23), (24): Xaa is A or G
  MOD_RES (25), (26), (27), (28): Xaa is A or G or is absent

SEQ ID NO: 65678 - protein, 36 aa, Artificial Sequence; identical to SEQ ID NO: 27820
  GFR-binding peptide
  MOD_RES (1), (2), (34), (36): Xaa is C or S

SEQ ID NO: 65679 - protein, 36 aa, Artificial Sequence
  GFR-binding peptide
  MOD_RES (1), (2), (35): Xaa is C or S
  MOD_RES (16), (17), (18), (19), (20): Xaa is A or G
  MOD_RES (21), (22), (23), (24): Xaa is A or G or is absent
XXVPQDLSPINILYFXXXXXXXXXYGKIPMVVKSXK

SEQ ID NO: 65680 - protein, 33 aa, Artificial Sequence; identical to SEQ ID NO: 6660
  GFR-binding peptide
  MOD_RES (1), (33): Xaa is C or S

SEQ ID NO: 65681 - protein, 39 aa, Artificial Sequence; identical to SEQ ID NO: 32868
  GFR-binding peptide
  MOD_RES (5), (6), (38): Xaa is C or S

SEQ ID NO: 65682 - protein, 40 aa, Artificial Sequence; identical to SEQ ID NO: 27825
  GFR-binding peptide
  MOD_RES (6), (7), (39): Xaa is C or S

SEQ ID NO: 65683 - protein, 37 aa, Artificial Sequence; identical to SEQ ID NO: 32873
  GFR-binding peptide
  MOD_RES (1), (34), (36): Xaa is C or S
  MOD_RES (15), (16), (17), (18), (19): Xaa is A or G
  MOD_RES (20), (21), (22), (23): Xaa is A or G or is absent

SEQ ID NO: 65684 - protein, 37 aa, Artificial Sequence
  GFR-binding peptide
  MOD_RES (1), (2), (36): Xaa is C or S
  MOD_RES (16), (17), (18), (19), (20): Xaa is A or G
  MOD_RES (21), (22), (23), (24): Xaa is A or G or is absent
XXTPTKMSPISMLYKXXXXXXXXXLKYHYGMVVDRXG

SEQ ID NO: 65685 - protein, 35 aa, Artificial Sequence; identical to SEQ ID NO: 27833
  GFR-binding peptide
  MOD_RES (2), (3): Xaa is C or S
  MOD_RES (17), (18), (19), (20), (21): Xaa is A or G
  MOD_RES (22), (23), (24), (25): Xaa is A or G or is absent

SEQ ID NO: 65686 - protein, 37 aa, Artificial Sequence
  GFR-binding peptide
  MOD_RES (6), (7): Xaa is C or S
HVPKPXXAPTKLEPISVLYLDDSSNVIKFKYENMVVR

SEQ ID NO: 65687 - protein, 40 aa, Artificial Sequence
  GFR-binding peptide
  MOD_RES (6), (7), (39): Xaa is C or S
HVPKPXXAPTKLSPISVLYKDDSSNVILKYHYNMVVRSXG

SEQ ID NO: 65688 - protein, 39 aa, Artificial Sequence; identical to SEQ ID NO: 6675
  GFR-binding peptide
  MOD_RES (2), (36), (38): Xaa is C or S
  MOD_RES (16), (17), (18), (19), (20): Xaa is A or G
  MOD_RES (21), (22), (23), (24): Xaa is A or G or is absent

SEQ ID NO: 65689 - protein, 33 aa, Artificial Sequence
  GFR-binding peptide
  MOD_RES (31), (33): Xaa is C or S
APVKTSPISMLYKDNGRVLLLKYHYMIVEEXGX

SEQ ID NO: 65690 - protein, 39 aa, Artificial Sequence
  GFR-binding peptide
  MOD_RES (5), (6): Xaa is C or S
  MOD_RES (20), (21), (22), (23), (24): Xaa is A or G
  MOD_RES (25), (26), (27), (28): Xaa is A or G or is absent
IPEPXXVPEKMSATSILYYXXXXXXXXXLRKHRNMTVES

SEQ ID NO: 65691 - protein, 35 aa, Artificial Sequence
  GFR-binding peptide
  MOD_RES (1), (34): Xaa is C or S
  MOD_RES (15), (16), (17), (18), (19): Xaa is A or G
  MOD_RES (20), (21), (22), (23): Xaa is A or G or is absent
XVPQDLSPINILYFXXXXXXXXXYGKIPMVVKSXK

SEQ ID NO: 65692 - protein, 38 aa, Artificial Sequence
  GFR-binding peptide
  MOD_RES (1), (35), (37): Xaa is C or S
  MOD_RES (15), (16), (17), (18), (19): Xaa is A or G
  MOD_RES (20), (21), (22), (23): Xaa is A or G or is absent
XTPTKMSPISMLYKXXXXXXXXXLKYHYGMVVDRXGXS

SEQ ID NO: 65693 - protein, 36 aa, Artificial Sequence; identical to SEQ ID NO: 6678
  GFR-binding peptide
  MOD_RES (1), (33), (35): Xaa is C or S

SEQ ID NO: 65694 - protein, 34 aa, Artificial Sequence; identical to SEQ ID NO: 32889
  GFR-binding peptide
  MOD_RES (2), (3): Xaa is C or S

SEQ ID NO: 65695 - protein, 32 aa, Artificial Sequence; identical to SEQ ID NO: 6681
  GFR-binding peptide
  MOD_RES (14), (15), (16), (17), (18): Xaa is A or G
  MOD_RES (19), (20), (21), (22): Xaa is A or G or is absent

SEQ ID NO: 65696 - protein, 40 aa, Artificial Sequence; identical to SEQ ID NO: 32894
  GFR-binding peptide
  MOD_RES (3), (37), (39): Xaa is C or S
  MOD_RES (17), (18), (19), (20), (21): Xaa is A or G
  MOD_RES (22), (23), (24), (25): Xaa is A or G or is absent

SEQ ID NO: 65697 - protein, 39 aa, Artificial Sequence; identical to SEQ ID NO: 6683
  GFR-binding peptide
  MOD_RES (6), (7): Xaa is C or S
  MOD_RES (21), (22), (23), (24), (25): Xaa is A or G
  MOD_RES (26), (27), (28), (29): Xaa is A or G or is absent

SEQ ID NO: 65698 - protein, 34 aa, Artificial Sequence; identical to SEQ ID NO: 27850
  GFR-binding peptide
  MOD_RES (2), (3), (34): Xaa is C or S

SEQ ID NO: 65699 - protein, 40 aa, Artificial Sequence; identical to SEQ ID NO: 6685
  GFR-binding peptide
  MOD_RES (5), (6), (40): Xaa is C or S
  MOD_RES (20), (21), (22), (23), (24): Xaa is A or G
  MOD_RES (25), (26), (27), (28): Xaa is A or G or is absent

SEQ ID NO: 65700 - protein, 33 aa, Artificial Sequence; identical to SEQ ID NO: 32897
  GFR-binding peptide
  MOD_RES (14), (15), (16), (17), (18): Xaa is A or G
  MOD_RES (19), (20), (21), (22): Xaa is A or G or is absent

SEQ ID NO: 65701 - protein, 32 aa, Artificial Sequence; identical to SEQ ID NO: 6686
  GFR-binding peptide
  MOD_RES (14), (15), (16), (17), (18): Xaa is A or G
  MOD_RES (19), (20), (21), (22): Xaa is A or G or is absent

SEQ ID NO: 65702 - protein, 39 aa, Artificial Sequence; identical to SEQ ID NO: 6691
  GFR-binding peptide
  MOD_RES (5), (6), (37), (39): Xaa is C or S

SEQ ID NO: 65703 - protein, 38 aa, Artificial Sequence; identical to SEQ ID NO: 6692
  GFR-binding peptide
  MOD_RES (3), (4), (38): Xaa is C or S
  MOD_RES (18), (19), (20), (21), (22): Xaa is A or G
  MOD_RES (23), (24), (25), (26): Xaa is A or G or is absent

SEQ ID NO: 65704 - protein, 35 aa, Artificial Sequence; identical to SEQ ID NO: 27857
  GFR-binding peptide
  MOD_RES (2), (3), (35): Xaa is C or S

SEQ ID NO: 65705 - protein, 39 aa, Artificial Sequence; identical to SEQ ID NO: 6694
  GFR-binding peptide
  MOD_RES (3), (4), (36), (38): Xaa is C or S

SEQ ID NO: 65706 - protein, 34 aa, Artificial Sequence; identical to SEQ ID NO: 32905
  GFR-binding peptide
  MOD_RES (2), (34): Xaa is C or S

SEQ ID NO: 65707 - protein, 37 aa, Artificial Sequence
  GFR-binding peptide
  MOD_RES (5), (6): Xaa is C or S
SAGPXXTPTKMSATSMLYYNDKQQIILRKHRGMVVDR

SEQ ID NO: 65708 - protein, 37 aa, Artificial Sequence
  GFR-binding peptide
  MOD_RES (3), (4): Xaa is C or S
  MOD_RES (18), (19), (20), (21), (22): Xaa is A or G
  MOD_RES (23), (24), (25), (26): Xaa is A or G or is absent
GPXXTPTKMSATSMLYYXXXXXXXXXLRKHRGMVVDR

SEQ ID NO: 65709 - protein, 36 aa, Artificial Sequence; identical to SEQ ID NO: 6697
  GFR-binding peptide
  MOD_RES (3), (4): Xaa is C or S
  MOD_RES (18), (19), (20), (21), (22): Xaa is A or G
  MOD_RES (23), (24), (25), (26): Xaa is A or G or is absent

SEQ ID NO: 65710 - protein, 38 aa, Artificial Sequence; identical to SEQ ID NO: 32906
  GFR-binding peptide
  MOD_RES (3), (4), (38): Xaa is C or S
  MOD_RES (18), (19), (20), (21), (22): Xaa is A or G
  MOD_RES (23), (24), (25), (26): Xaa is A or G or is absent

SEQ ID NO: 65711 - protein, 33 aa, Artificial Sequence; identical to SEQ ID NO: 32907
  GFR-binding peptide
  MOD_RES (14), (15), (16), (17), (18): Xaa is A or G
  MOD_RES (19), (20), (21), (22): Xaa is A or G or is absent

SEQ ID NO: 65712 - protein, 40 aa, Artificial Sequence; identical to SEQ ID NO: 32909
  GFR-binding peptide
  MOD_RES (5), (6), (38), (40): Xaa is C or S

SEQ ID NO: 65713 - protein, 36 aa, Artificial Sequence; identical to SEQ ID NO: 32910
  GFR-binding peptide
  MOD_RES (1), (2), (34), (36): Xaa is C or S

SEQ ID NO: 65714 - protein, 39 aa, Artificial Sequence; identical to SEQ ID NO: 6699
  GFR-binding peptide
  MOD_RES (5), (6), (37), (39): Xaa is C or S

SEQ ID NO: 65715 - protein, 34 aa, Artificial Sequence; identical to SEQ ID NO: 6702
  GFR-binding peptide
  MOD_RES (1), (1): Xaa is C or S
  MOD_RES (15), (16), (17), (18), (19): Xaa is A or G
  MOD_RES (20), (21), (22), (23): Xaa is A or G or is absent

SEQ ID NO: 65716 - protein, 38 aa, Artificial Sequence; identical to SEQ ID NO: 6703
  GFR-binding peptide
  MOD_RES (3), (35), (37): Xaa is C or S

SEQ ID NO: 65717 - protein, 37 aa, Artificial Sequence; identical to SEQ ID NO: 6704
  GFR-binding peptide
  MOD_RES (5), (6), (37): Xaa is C or S

SEQ ID NO: 65718 - protein, 33 aa, Artificial Sequence; identical to SEQ ID NO: 32919
  GFR-binding peptide
  MOD_RES (14), (15), (16), (17), (18): Xaa is A or G
  MOD_RES (19), (20), (21), (22): Xaa is A or G or is absent

SEQ ID NO: 65719 - protein, 33 aa, Artificial Sequence
  GFR-binding peptide
  MOD_RES (1), (1): Xaa is C or S
  MOD_RES (15), (16), (17), (18), (19): Xaa is A or G
  MOD_RES (20), (21), (22), (23): Xaa is A or G or is absent
XVSQDLSPINILYFXXXXXXXXXYGKIPMIVKS

SEQ ID NO: 65720 - protein, 37 aa, Artificial Sequence; identical to SEQ ID NO: 32920
  GFR-binding peptide
  MOD_RES (1), (2), (34), (36): Xaa is C or S

SEQ ID NO: 65721 - protein, 39 aa, Artificial Sequence; identical to SEQ ID NO: 6709
  GFR-binding peptide
  MOD_RES (4), (5), (39): Xaa is C or S
  MOD_RES (19), (20), (21), (22), (23): Xaa is A or G
  MOD_RES (24), (25), (26), (27): Xaa is A or G or is absent

SEQ ID NO: 65722 - protein, 34 aa, Artificial Sequence
  GFR-binding peptide
  MOD_RES (1), (34): Xaa is C or S
  MOD_RES (15), (16), (17), (18), (19): Xaa is A or G
  MOD_RES (20), (21), (22), (23): Xaa is A or G or is absent
XVPQALSPINILYFXXXXXXXXXYGKIPMIVRSX

SEQ ID NO: 65723 - protein, 39 aa, Artificial Sequence; identical to SEQ ID NO: 27873
  GFR-binding peptide
  MOD_RES (6), (7): Xaa is C or S
  MOD_RES (21), (22), (23), (24), (25): Xaa is A or G
  MOD_RES (26), (27), (28), (29): Xaa is A or G or is absent

SEQ ID NO: 65724 - protein, 37 aa, Artificial Sequence
  GFR-binding peptide
  MOD_RES (1), (2), (36): Xaa is C or S
  MOD_RES (16), (17), (18), (19), (20): Xaa is A or G
  MOD_RES (21), (22), (23), (24): Xaa is A or G or is absent
XXTPTKMEPISMLYLXXXXXXXXXKFKYEGMVVDRXG

SEQ ID NO: 65725 - protein, 38 aa, Artificial Sequence; identical to SEQ ID NO: 6710
  GFR-binding peptide
  MOD_RES (6), (7): Xaa is C or S

SEQ ID NO: 65726 - protein, 43 aa, Artificial Sequence; identical to SEQ ID NO: 6711
  GFR-binding peptide
  MOD_RES (6), (7), (41), (43): Xaa is C or S
  MOD_RES (21), (22), (23), (24), (25): Xaa is A or G
  MOD_RES (26), (27), (28), (29): Xaa is A or G or is absent

SEQ ID NO: 65727 - protein, 40 aa, Artificial Sequence; identical to SEQ ID NO: 32926
  GFR-binding peptide
  MOD_RES (2), (3), (37), (39): Xaa is C or S
  MOD_RES (17), (18), (19), (20), (21): Xaa is A or G
  MOD_RES (22), (23), (24), (25): Xaa is A or G or is absent

SEQ ID NO: 65728 - protein, 36 aa, Artificial Sequence
  GFR-binding peptide
  MOD_RES (2), (3), (34), (36): Xaa is C or S
TXXAPVKTSATSMLYYDNGRVLLLRKHRMIVEEXGX

SEQ ID NO: 65729 - protein, 38 aa, Artificial Sequence; identical to SEQ ID NO: 14066
  GFR-binding peptide
  MOD_RES (1), (35), (37): Xaa is C or S
  MOD_RES (15), (16), (17), (18), (19): Xaa is A or G
  MOD_RES (20), (21), (22), (23): Xaa is A or G or is absent

SEQ ID NO: 65730 - protein, 37 aa, Artificial Sequence
  GFR-binding peptide
  MOD_RES (5), (6): Xaa is C or S
IPEPXXVPEKMSPINILYFDENKNVVYGKIPNMTVES

SEQ ID NO: 65731 - protein, 35 aa, Artificial Sequence; identical to SEQ ID NO: 6714
  GFR-binding peptide
  MOD_RES (1), (33), (35): Xaa is C or S

SEQ ID NO: 65732 - protein, 41 aa, Artificial Sequence; identical to SEQ ID NO: 32928
  GFR-binding peptide
  MOD_RES (4), (5), (39), (41): Xaa is C or S
  MOD_RES (19), (20), (21), (22), (23): Xaa is A or G
  MOD_RES (24), (25), (26), (27): Xaa is A or G or is absent

SEQ ID NO: 65733 - protein, 35 aa, Artificial Sequence; identical to SEQ ID NO: 32929
  GFR-binding peptide
  MOD_RES (1), (2), (34): Xaa is C or S

SEQ ID NO: 65734 - protein, 31 aa, Artificial Sequence; identical to SEQ ID NO: 32930
  GFR-binding peptide

SEQ ID NO: 65735 - protein, 35 aa, Artificial Sequence; identical to SEQ ID NO: 32931
  GFR-binding peptide
  MOD_RES (4), (5): Xaa is C or S

SEQ ID NO: 65736 - protein, 41 aa, Artificial Sequence; identical to SEQ ID NO: 27878
  GFR-binding peptide
  MOD_RES (5), (6), (38), (40): Xaa is C or S

SEQ ID NO: 65737 - protein, 36 aa, Artificial Sequence; identical to SEQ ID NO: 32934
  GFR-binding peptide
  MOD_RES (1), (2), (34), (36): Xaa is C or S

SEQ ID NO: 65738 - protein, 35 aa, Artificial Sequence; identical to SEQ ID NO: 57835
  GFR-binding peptide
  MOD_RES (34), (34): Xaa is C or S
  MOD_RES (14), (15), (16), (17), (18): Xaa is A or G
  MOD_RES (19), (20), (21), (22): Xaa is A or G or is absent

SEQ ID NO: 65739 - protein, 40 aa, Artificial Sequence; identical to SEQ ID NO: 6715
  GFR-binding peptide
  MOD_RES (5), (6), (39): Xaa is C or S
  MOD_RES (20), (21), (22), (23), (24): Xaa is A or G
  MOD_RES (25), (26), (27), (28): Xaa is A or G or is absent

SEQ ID NO: 65740 - protein, 33 aa, Artificial Sequence; identical to SEQ ID NO: 32935
  GFR-binding peptide
  MOD_RES (2), (3): Xaa is C or S

SEQ ID NO: 65741 - protein, 35 aa, Artificial Sequence; identical to SEQ ID NO: 27882
  GFR-binding peptide
  MOD_RES (2), (3), (35): Xaa is C or S

SEQ ID NO: 65742 - protein, 33 aa, Artificial Sequence; identical to SEQ ID NO: 57838
  GFR-binding peptide
  MOD_RES (1), (1): Xaa is C or S
  MOD_RES (15), (16), (17), (18), (19): Xaa is A or G
  MOD_RES (20), (21), (22), (23): Xaa is A or G or is absent

SEQ ID NO: 65743 - protein, 40 aa, Artificial Sequence; identical to SEQ ID NO: 6718
  GFR-binding peptide
  MOD_RES (3), (4), (38), (40): Xaa is C or S
  MOD_RES (18), (19), (20), (21), (22): Xaa is A or G
  MOD_RES (23), (24), (25), (26): Xaa is A or G or is absent

SEQ ID NO: 65744 - protein, 34 aa, Artificial Sequence
  GFR-binding peptide
  MOD_RES (32), (34): Xaa is C or S
TPTKMSPISMLYKNDKQQIILKYHYGMVVDRXGX

SEQ ID NO: 65745 - protein, 41 aa, Artificial Sequence
  GFR-binding peptide
  MOD_RES (5), (6), (40): Xaa is C or S
  MOD_RES (20), (21), (22), (23), (24): Xaa is A or G
  MOD_RES (25), (26), (27), (28): Xaa is A or G or is absent
TPPTXXVPTRLSPISILYKXXXXXXXXXLKYHYDMVVESXG

SEQ ID NO: 65746 - protein, 41 aa, Artificial Sequence
  GFR-binding peptide
  MOD_RES (6), (7), (39), (41): Xaa is C or S
KASKAXXVPTKLSATSILYYDKGVVTYLRKHRGMAVSEXGX

SEQ ID NO: 65747 - protein, 44 aa, Artificial Sequence; identical to SEQ ID NO: 6720
  GFR-binding peptide
  MOD_RES (7), (41), (43): Xaa is C or S
  MOD_RES (21), (22), (23), (24), (25): Xaa is A or G
  MOD_RES (26), (27), (28), (29): Xaa is A or G or is absent

SEQ ID NO: 65748 - protein, 36 aa, Artificial Sequence; identical to SEQ ID NO: 6721
  GFR-binding peptide
  MOD_RES (1), (2), (35): Xaa is C or S
  MOD_RES (16), (17), (18), (19), (20): Xaa is A or G
  MOD_RES (21), (22), (23), (24): Xaa is A or G or is absent

SEQ ID NO: 65749 - protein, 38 aa, Artificial Sequence
  GFR-binding peptide
  MOD_RES (3), (4), (38): Xaa is C or S
  MOD_RES (18), (19), (20), (21), (22): Xaa is A or G
  MOD_RES (23), (24), (25), (26): Xaa is A or G or is absent
GPXXTPTKMEPISMLYLXXXXXXXXXKFKYEGMVVDRX

SEQ ID NO: 65750 - protein, 41 aa, Artificial Sequence
  GFR-binding peptide
  MOD_RES (6), (7), (39), (41): Xaa is C or S
STPPTXXVPTRLSPISILYKDSANNVVLKYHYDMVVESXGX

SEQ ID NO: 65751 - protein, 39 aa, Artificial Sequence
  GFR-binding peptide
  MOD_RES (2), (3), (37), (39): Xaa is C or S
  MOD_RES (17), (18), (19), (20), (21): Xaa is A or G
  MOD_RES (22), (23), (24), (25): Xaa is A or G or is absent
PXXTPTKMEPISMLYLXXXXXXXXXKFKYEGMVVDRXGX

SEQ ID NO: 65752 - protein, 42 aa, Artificial Sequence; identical to SEQ ID NO: 6723
  GFR-binding peptide
  MOD_RES (6), (7), (42): Xaa is C or S
  MOD_RES (21), (22), (23), (24), (25): Xaa is A or G
  MOD_RES (26), (27), (28), (29): Xaa is A or G or is absent

SEQ ID NO: 65753 - protein, 35 aa, Artificial Sequence; identical to SEQ ID NO: 6727
  GFR-binding peptide
  MOD_RES (1), (2), (35): Xaa is C or S
  MOD_RES (16), (17), (18), (19), (20): Xaa is A or G
  MOD_RES (21), (22), (23), (24): Xaa is A or G or is absent

SEQ ID NO: 65754 - protein, 37 aa, Artificial Sequence
  GFR-binding peptide
  MOD_RES (5), (6): Xaa is C or S
SAGPXXTPTKMEPISMLYLNDKQQIIKFKYEGMVVDR

SEQ ID NO: 65755 - protein, 41 aa, Artificial Sequence; identical to SEQ ID NO: 32947
  GFR-binding peptide
  MOD_RES (6), (7), (41): Xaa is C or S
  MOD_RES (21), (22), (23), (24), (25): Xaa is A or G
  MOD_RES (26), (27), (28), (29): Xaa is A or G or is absent

SEQ ID NO: 65756 - protein, 37 aa, Artificial Sequence; identical to SEQ ID NO: 27894
  GFR-binding peptide
  MOD_RES (6), (7): Xaa is C or S

SEQ ID NO: 65757 - protein, 36 aa, Artificial Sequence
  GFR-binding peptide
  MOD_RES (3), (4): Xaa is C or S
  MOD_RES (18), (19), (20), (21), (22): Xaa is A or G
  MOD_RES (23), (24), (25), (26): Xaa is A or G or is absent
STXXAPVKTEPISMLYLXXXXXXXXXKFKYEMIVEE

SEQ ID NO: 65758 - protein, 39 aa, Artificial Sequence; identical to SEQ ID NO: 27895
  GFR-binding peptide
  MOD_RES (6), (7), (39): Xaa is C or S

SEQ ID NO: 65759 - protein, 38 aa, Artificial Sequence
  GFR-binding peptide
  MOD_RES (5), (6), (38): Xaa is C or S
TPPTXXVPTRLEPISILYLDSANNVVKFKYEDMVVESX

SEQ ID NO: 65760 - protein, 42 aa, Artificial Sequence; identical to SEQ ID NO: 27897
  GFR-binding peptide
  MOD_RES (4), (5), (39), (41): Xaa is C or S
  MOD_RES (19), (20), (21), (22), (23): Xaa is A or G
  MOD_RES (24), (25), (26), (27): Xaa is A or G or is absent

SEQ ID NO: 65761 - protein, 38 aa, Artificial Sequence
  GFR-binding peptide
  MOD_RES (3), (4), (38): Xaa is C or S
  MOD_RES (18), (19), (20), (21), (22): Xaa is A or G
  MOD_RES (23), (24), (25), (26): Xaa is A or G or is absent
ASXXVPARLSATSILYYXXXXXXXXXLRKHRDMVVEAX

SEQ ID NO: 65762 - protein, 35 aa, Artificial Sequence
  GFR-binding peptide
  MOD_RES (1), (2), (35): Xaa is C or S
  MOD_RES (16), (17), (18), (19), (20): Xaa is A or G
  MOD_RES (21), (22), (23), (24): Xaa is A or G or is absent
XXVSQDLSPINILYFXXXXXXXXXYGKIPMIVKSX

SEQ ID NO: 65763 - protein, 31 aa, Artificial Sequence; identical to SEQ ID NO: 6737
  GFR-binding peptide

SEQ ID NO: 65764 - protein, 40 aa, Artificial Sequence; identical to SEQ ID NO: 6739
  GFR-binding peptide
  MOD_RES (2), (3), (37), (39): Xaa is C or S
  MOD_RES (17), (18), (19), (20), (21): Xaa is A or G
  MOD_RES (22), (23), (24), (25): Xaa is A or G or is absent

SEQ ID NO: 65765 - protein, 33 aa, Artificial Sequence; identical to SEQ ID NO: 27906
  GFR-binding peptide
  MOD_RES (1), (33): Xaa is C or S

SEQ ID NO: 65766 - protein, 40 aa, Artificial Sequence; identical to SEQ ID NO: 32963
  GFR-binding peptide
  MOD_RES (5), (6), (40): Xaa is C or S
  MOD_RES (20), (21), (22), (23), (24): Xaa is A or G
  MOD_RES (25), (26), (27), (28): Xaa is A or G or is absent

SEQ ID NO: 65767 - protein, 38 aa, Artificial Sequence; identical to SEQ ID NO: 32964
  GFR-binding peptide
  MOD_RES (35), (37): Xaa is C or S
  MOD_RES (14), (15), (16), (17), (18): Xaa is A or G
  MOD_RES (19), (20), (21), (22): Xaa is A or G or is absent

SEQ ID NO: 65768 - protein, 36 aa, Artificial Sequence
  GFR-binding peptide
  MOD_RES (5), (6): Xaa is C or S
VPSTXXAPVKTSATSMLYYDNGRVLLLRKHRMIVEE

SEQ ID NO: 65769 - protein, 30 aa, Artificial Sequence
  GFR-binding peptide
TPTKMEPISMLYLNDKQQIIKFKYEGMVVD

SEQ ID NO: 65770 - protein, 41 aa, Artificial Sequence; identical to SEQ ID NO: 6744
  GFR-binding peptide
  MOD_RES (3), (4), (38), (40): Xaa is C or S
  MOD_RES (18), (19), (20), (21), (22): Xaa is A or G
  MOD_RES (23), (24), (25), (26): Xaa is A or G or is absent

SEQ ID NO: 65771 - protein, 37 aa, Artificial Sequence; identical to SEQ ID NO: 27916
  GFR-binding peptide
  MOD_RES (3), (4), (35), (37): Xaa is C or S

SEQ ID NO: 65772 - protein, 36 aa, Artificial Sequence
  GFR-binding peptide
  MOD_RES (4), (5): Xaa is C or S
PPTXXVPTRLEPISILYLDSANNVVKFKYEDMVVES

SEQ ID NO: 65773 - protein, 40 aa, Artificial Sequence; identical to SEQ ID NO: 27917
  GFR-binding peptide
  MOD_RES (6), (7): Xaa is C or S
  MOD_RES (21), (22), (23), (24), (25): Xaa is A or G
  MOD_RES (26), (27), (28), (29): Xaa is A or G or is absent

SEQ ID NO: 65774 - protein, 31 aa, Artificial Sequence
  GFR-binding peptide
  MOD_RES (1), (1): Xaa is C or S
XVPEKMSPINILYFDENKNVVYGKIPNMTVE

SEQ ID NO: 65775 - protein, 37 aa, Artificial Sequence
  GFR-binding peptide
  MOD_RES (2), (3), (37): Xaa is C or S
  MOD_RES (17), (18), (19), (20), (21): Xaa is A or G
  MOD_RES (22), (23), (24), (25): Xaa is A or G or is absent
TXXVPTRLSPISILYKXXXXXXXXXLKYHYDMVVESX

SEQ ID NO: 65776 - protein, 33 aa, Artificial Sequence; identical to SEQ ID NO: 32973
  GFR-binding peptide
  MOD_RES (1), (2): Xaa is C or S

SEQ ID NO: 65777 - protein, 32 aa, Artificial Sequence
  GFR-binding peptide
  MOD_RES (14), (15), (16), (17), (18): Xaa is A or G
  MOD_RES (19), (20), (21), (22): Xaa is A or G or is absent
VPTRLSATSILYYXXXXXXXXXLRKHRDMVVE

SEQ ID NO: 65778 - protein, 37 aa, Artificial Sequence; identical to SEQ ID NO: 32977
  GFR-binding peptide
  MOD_RES (2), (3), (35), (37): Xaa is C or S

SEQ ID NO: 65779 - protein, 37 aa, Artificial Sequence; identical to SEQ ID NO: 6750
  GFR-binding peptide
  MOD_RES (2), (3), (34), (36): Xaa is C or S

SEQ ID NO: 65780 - protein, 38 aa, Artificial Sequence; identical to SEQ ID NO: 14102
  GFR-binding peptide
  MOD_RES (6), (7): Xaa is C or S

SEQ ID NO: 65781 - protein, 37 aa, Artificial Sequence; identical to SEQ ID NO: 32980
  GFR-binding peptide
  MOD_RES (1), (35), (37): Xaa is C or S
  MOD_RES (15), (16), (17), (18), (19): Xaa is A or G
  MOD_RES (20), (21), (22), (23): Xaa is A or G or is absent

SEQ ID NO: 65782 - protein, 36 aa, Artificial Sequence
  GFR-binding peptide
  MOD_RES (4), (5), (36): Xaa is C or S
PSTXXAPVKTEPISMLYLDNGRVLLKFKYEMIVEEX

SEQ ID NO: 65783 - protein, 35 aa, Artificial Sequence; identical to SEQ ID NO: 6754
  GFR-binding peptide
  MOD_RES (1), (35): Xaa is C or S
  MOD_RES (15), (16), (17), (18), (19): Xaa is A or G
  MOD_RES (20), (21), (22), (23): Xaa is A or G or is absent

SEQ ID NO: 65784 - protein, 32 aa, Artificial Sequence; identical to SEQ ID NO: 32984
  GFR-binding peptide
  MOD_RES (1), (1): Xaa is C or S

SEQ ID NO: 65785 - protein, 38 aa, Artificial Sequence; identical to SEQ ID NO: 57874
  GFR-binding peptide
  MOD_RES (5), (6): Xaa is C or S
  MOD_RES (20), (21), (22), (23), (24): Xaa is A or G
  MOD_RES (25), (26), (27), (28): Xaa is A or G or is absent

SEQ ID NO: 65786 - protein, 36 aa, Artificial Sequence; identical to SEQ ID NO: 27930
  GFR-binding peptide
  MOD_RES (1), (35): Xaa is C or S
  MOD_RES (15), (16), (17), (18), (19): Xaa is A or G
  MOD_RES (20), (21), (22), (23): Xaa is A or G or is absent

SEQ ID NO: 65787 - protein, 41 aa, Artificial Sequence; identical to SEQ ID NO: 27931
  GFR-binding peptide
  MOD_RES (6), (7), (39), (41): Xaa is C or S

SEQ ID NO: 65788 - protein, 44 aa, Artificial Sequence; identical to SEQ ID NO: 6758
  GFR-binding peptide
  MOD_RES (6), (7), (41), (43): Xaa is C or S
  MOD_RES (21), (22), (23), (24), (25): Xaa is A or G
  MOD_RES (26), (27), (28), (29): Xaa is A or G or is absent

SEQ ID NO: 65789 - protein, 39 aa, Artificial Sequence; identical to SEQ ID NO: 27932
  GFR-binding peptide
  MOD_RES (4), (5), (36), (38): Xaa is C or S

SEQ ID NO: 65790 - protein, 38 aa, Artificial Sequence; identical to SEQ ID NO: 6760
  GFR-binding peptide
  MOD_RES (2), (3), (35), (37): Xaa is C or S

SEQ ID NO: 65791 - protein, 38 aa, Artificial Sequence; identical to SEQ ID NO: 6761
  GFR-binding peptide
  MOD_RES (1), (2), (35), (37): Xaa is C or S
  MOD_RES (16), (17), (18), (19), (20): Xaa is A or G
  MOD_RES (21), (22), (23), (24): Xaa is A or G or is absent

SEQ ID NO: 65792 - protein, 35 aa, Artificial Sequence; identical to SEQ ID NO: 27940
  GFR-binding peptide
  MOD_RES (3), (4): Xaa is C or S

SEQ ID NO: 65793 - protein, 36 aa, Artificial Sequence; identical to SEQ ID NO: 14116
  GFR-binding peptide
  MOD_RES (5), (6): Xaa is C or S

SEQ ID NO: 65794 - protein, 42 aa, Artificial Sequence; identical to SEQ ID NO: 6765
  GFR-binding peptide
  MOD_RES (5), (6), (39), (41): Xaa is C or S
  MOD_RES (20), (21), (22), (23), (24): Xaa is A or G
  MOD_RES (25), (26), (27), (28): Xaa is A or G or is absent

SEQ ID NO: 65795 - protein, 38 aa, Artificial Sequence; identical to SEQ ID NO: 27942
  GFR-binding peptide
  MOD_RES (5), (6), (38): Xaa is C or S

SEQ ID NO: 65796 - protein, 38 aa, Artificial Sequence
  GFR-binding peptide
  MOD_RES (4), (5): Xaa is C or S
  MOD_RES (19), (20), (21), (22), (23): Xaa is A or G
  MOD_RES (24), (25), (26), (27): Xaa is A or G or is absent
PASXXVPARLSATSILYYXXXXXXXXXLRKHRDMVVEA

SEQ ID NO: 65797 - protein, 33 aa, Artificial Sequence; identical to SEQ ID NO: 6769
  GFR-binding peptide
  MOD_RES (1), (1): Xaa is C or S

SEQ ID NO: 65798 - protein, 40 aa, Artificial Sequence; identical to SEQ ID NO: 6771
  GFR-binding peptide
  MOD_RES (5), (6), (40): Xaa is C or S
  MOD_RES (20), (21), (22), (23), (24): Xaa is A or G
  MOD_RES (25), (26), (27), (28): Xaa is A or G or is absent

SEQ ID NO: 65799 - protein, 35 aa, Artificial Sequence
  GFR-binding peptide
  MOD_RES (1), (33), (35): Xaa is C or S
XVPARLSATSILYYDAANNVVLRKHRDMVVEAXGX

SEQ ID NO: 65800 - protein, 40 aa, Artificial Sequence; identical to SEQ ID NO: 6775
  GFR-binding peptide
  MOD_RES (3), (4), (37), (39): Xaa is C or S
  MOD_RES (18), (19), (20), (21), (22): Xaa is A or G
  MOD_RES (23), (24), (25), (26): Xaa is A or G or is absent

SEQ ID NO: 65801 - protein, 37 aa, Artificial Sequence; identical to SEQ ID NO: 6776
  GFR-binding peptide
  MOD_RES (35), (37): Xaa is C or S
  MOD_RES (14), (15), (16), (17), (18): Xaa is A or G
  MOD_RES (19), (20), (21), (22): Xaa is A or G or is absent

SEQ ID NO: 65802 - protein, 35 aa, Artificial Sequence; identical to SEQ ID NO: 57901
  GFR-binding peptide
  MOD_RES (1), (35): Xaa is C or S
  MOD_RES (15), (16), (17), (18), (19): Xaa is A or G
  MOD_RES (20), (21), (22), (23): Xaa is A or G or is absent

SEQ ID NO: 65803 - protein, 41 aa, Artificial Sequence; identical to SEQ ID NO: 33012
  GFR-binding peptide
  MOD_RES (6), (7), (39), (41): Xaa is C or S

SEQ ID NO: 65804 - protein, 36 aa, Artificial Sequence; identical to SEQ ID NO: 33014
  GFR-binding peptide
  MOD_RES (5), (5): Xaa is C or S

SEQ ID NO: 65805 - protein, 37 aa, Artificial Sequence; identical to SEQ ID NO: 33017
  GFR-binding peptide
  MOD_RES (3), (4): Xaa is C or S
  MOD_RES (18), (19), (20), (21), (22): Xaa is A or G
  MOD_RES (23), (24), (25), (26): Xaa is A or G or is absent

SEQ ID NO: 65806 - protein, 35 aa, Artificial Sequence
  GFR-binding peptide
  MOD_RES (1), (33), (35): Xaa is C or S
XVPEKMEPISILYLDENKNVVKFKYENMTVESXAX

SEQ ID NO: 65807 - protein, 41 aa, Artificial Sequence; identical to SEQ ID NO: 33024
  GFR-binding peptide
  MOD_RES (3), (4), (38), (40): Xaa is C or S
  MOD_RES (18), (19), (20), (21), (22): Xaa is A or G
  MOD_RES (23), (24), (25), (26): Xaa is A or G or is absent

SEQ ID NO: 65808 - protein, 38 aa, Artificial Sequence; identical to SEQ ID NO: 6795
  GFR-binding peptide
  MOD_RES (4), (5): Xaa is C or S
  MOD_RES (19), (20), (21), (22), (23): Xaa is A or G
  MOD_RES (24), (25), (26), (27): Xaa is A or G or is absent

SEQ ID NO: 65809 - protein, 39 aa, Artificial Sequence; identical to SEQ ID NO: 33026
  GFR-binding peptide
  MOD_RES (5), (6): Xaa is C or S
  MOD_RES (20), (21), (22), (23), (24): Xaa is A or G
  MOD_RES (25), (26), (27), (28): Xaa is A or G or is absent

SEQ ID NO: 65810 - protein, 34 aa, Artificial Sequence; identical to SEQ ID NO: 57917
  GFR-binding peptide
  MOD_RES (33), (33): Xaa is C or S
  MOD_RES (14), (15), (16), (17), (18): Xaa is A or G
  MOD_RES (19), (20), (21), (22): Xaa is A or G or is absent

SEQ ID NO: 65811 - protein, 39 aa, Artificial Sequence; identical to SEQ ID NO: 33029
  GFR-binding peptide
  MOD_RES (6), (7), (39): Xaa is C or S

SEQ ID NO: 65812 - protein, 34 aa, Artificial Sequence; identical to SEQ ID NO: 6798
  GFR-binding peptide
  MOD_RES (31), (33): Xaa is C or S

SEQ ID NO: 65813 - protein, 31 aa, Artificial Sequence; identical to SEQ ID NO: 33037
  GFR-binding peptide

SEQ ID NO: 65814 - protein, 32 aa, Artificial Sequence; identical to SEQ ID NO: 6802
  GFR-binding peptide
  MOD_RES (14), (15), (16), (17), (18): Xaa is A or G
  MOD_RES (19), (20), (21), (22): Xaa is A or G or is absent

SEQ ID NO: 65815 - protein, 40 aa, Artificial Sequence; identical to SEQ ID NO: 6804
  GFR-binding peptide
  MOD_RES (6), (7), (40): Xaa is C or S
  MOD_RES (21), (22), (23), (24), (25): Xaa is A or G
  MOD_RES (26), (27), (28), (29): Xaa is A or G or is absent

SEQ ID NO: 65816 - protein, 37 aa, Artificial Sequence; identical to SEQ ID NO: 27986
  GFR-binding peptide
  MOD_RES (4), (5), (37): Xaa is C or S

SEQ ID NO: 65817 - protein, 35 aa, Artificial Sequence
  GFR-binding peptide
  MOD_RES (2), (3): Xaa is C or S
  MOD_RES (17), (18), (19), (20), (21): Xaa is A or G
  MOD_RES (22), (23), (24), (25): Xaa is A or G or is absent
TXXAPVKTEPISMLYLXXXXXXXXXKFKYEMIVEE

SEQ ID NO: 65818 - protein, 41 aa, Artificial Sequence; identical to SEQ ID NO: 57931
  GFR-binding peptide
  MOD_RES (5), (6), (38), (40): Xaa is C or S

SEQ ID NO: 65819 - protein, 39 aa, Artificial Sequence; identical to SEQ ID NO: 6807
  GFR-binding peptide
  MOD_RES (6), (38): Xaa is C or S

SEQ ID NO: 65820 - protein, 37 aa, Artificial Sequence; identical to SEQ ID NO: 57933
  GFR-binding peptide
  MOD_RES (5), (6): Xaa is C or S

SEQ ID NO: 65821 - protein, 39 aa, Artificial Sequence; identical to SEQ ID NO: 6811
  GFR-binding peptide
  MOD_RES (3), (4), (37), (39): Xaa is C or S
  MOD_RES (18), (19), (20), (21), (22): Xaa is A or G
  MOD_RES (23), (24), (25), (26): Xaa is A or G or is absent

SEQ ID NO: 65822 - protein, 35 aa, Artificial Sequence; identical to SEQ ID NO: 6813
  GFR-binding peptide
  MOD_RES (32), (34): Xaa is C or S

SEQ ID NO: 65823 - protein, 37 aa, Artificial Sequence; identical to SEQ ID NO: 33049
  GFR-binding peptide
  MOD_RES (4), (5), (36): Xaa is C or S

SEQ ID NO: 65824 - protein, 35 aa, Artificial Sequence
  GFR-binding peptide
  MOD_RES (1), (35): Xaa is C or S
  MOD_RES (15), (16), (17), (18), (19): Xaa is A or G
  MOD_RES (20), (21), (22), (23): Xaa is A or G or is absent
XTPTKMEPISMLYLXXXXXXXXXKFKYEGMVVDRX

SEQ ID NO: 65825 - protein, 32 aa, Artificial Sequence; identical to SEQ ID NO: 6818
  GFR-binding peptide
  MOD_RES (14), (15), (16), (17), (18): Xaa is A or G
  MOD_RES (19), (20), (21), (22): Xaa is A or G or is absent

SEQ ID NO: 65826 - protein, 33 aa, Artificial Sequence; identical to SEQ ID NO: 27995
  GFR-binding peptide
  MOD_RES (32), (32): Xaa is C or S

SEQ ID NO: 65827 - protein, 41 aa, Artificial Sequence
  GFR-binding peptide
  MOD_RES (6), (7), (41): Xaa is C or S
  MOD_RES (21), (22), (23), (24), (25): Xaa is A or G
  MOD_RES (26), (27), (28), (29): Xaa is A or G or is absent
GIPEPXXVPEKMSPISILYKXXXXXXXXXLKYHYNMTVESX

SEQ ID NO: 65828 - protein, 37 aa, Artificial Sequence; identical to SEQ ID NO: 6819
  GFR-binding peptide
  MOD_RES (1), (2), (36): Xaa is C or S
  MOD_RES (16), (17), (18), (19), (20): Xaa is A or G
  MOD_RES (21), (22), (23), (24): Xaa is A or G or is absent

SEQ ID NO: 65829 - protein, 37 aa, Artificial Sequence; identical to SEQ ID NO: 33051
  GFR-binding peptide
  MOD_RES (5), (6), (37): Xaa is C or S

SEQ ID NO: 65830 - protein, 37 aa, Artificial Sequence; identical to SEQ ID NO: 33052
  GFR-binding peptide
  MOD_RES (3), (4): Xaa is C or S
  MOD_RES (18), (19), (20), (21), (22): Xaa is A or G
  MOD_RES (23), (24), (25), (26): Xaa is A or G or is absent

SEQ ID NO: 65831 - protein, 37 aa, Artificial Sequence; identical to SEQ ID NO: 6820
  GFR-binding peptide
  MOD_RES (3), (4), (37): Xaa is C or S

SEQ ID NO: 65832 - protein, 36 aa, Artificial Sequence
  GFR-binding peptide
  MOD_RES (34), (36): Xaa is C or S
  MOD_RES (14), (15), (16), (17), (18): Xaa is A or G
  MOD_RES (19), (20), (21), (22): Xaa is A or G or is absent
VPEKMEPISILYLXXXXXXXXXKFKYENMTVESXAX

SEQ ID NO: 65833 - protein, 41 aa, Artificial Sequence
  GFR-binding peptide
  MOD_RES (4), (5), (39), (41): Xaa is C or S
  MOD_RES (19), (20), (21), (22), (23): Xaa is A or G
  MOD_RES (24), (25), (26), (27): Xaa is A or G or is absent
PPTXXVPTRLSATSILYYXXXXXXXXXLRKHRDMVVESXGX

SEQ ID NO: 65834 - protein, 32 aa, Artificial Sequence; identical to SEQ ID NO: 33056
  GFR-binding peptide
  MOD_RES (32), (32): Xaa is C or S

SEQ ID NO: 65835 - protein, 40 aa, Artificial Sequence; identical to SEQ ID NO: 6823
  GFR-binding peptide
  MOD_RES (6), (7), (39): Xaa is C or S

SEQ ID NO: 65836 - protein, 37 aa, Artificial Sequence; identical to SEQ ID NO: 28003
  GFR-binding peptide
  MOD_RES (1), (2), (35), (37): Xaa is C or S
  MOD_RES (16), (17), (18), (19), (20): Xaa is A or G
  MOD_RES (21), (22), (23), (24): Xaa is A or G or is absent

SEQ ID NO: 65837 - protein, 36 aa, Artificial Sequence; identical to SEQ ID NO: 6826
  GFR-binding peptide
  MOD_RES (3), (4): Xaa is C or S
  MOD_RES (18), (19), (20), (21), (22): Xaa is A or G
  MOD_RES (23), (24), (25), (26): Xaa is A or G or is absent

SEQ ID NO: 65838 - protein, 36 aa, Artificial Sequence; identical to SEQ ID NO: 14167
  GFR-binding peptide
  MOD_RES (4), (5): Xaa is C or S

SEQ ID NO: 65839 - protein, 39 aa, Artificial Sequence; identical to SEQ ID NO: 28006
  GFR-binding peptide
  MOD_RES (2), (3), (37), (39): Xaa is C or S
  MOD_RES (17), (18), (19), (20), (21): Xaa is A or G
  MOD_RES (22), (23), (24), (25): Xaa is A or G or is absent

SEQ ID NO: 65840 - protein, 35 aa, Artificial Sequence
  GFR-binding peptide
  MOD_RES (33), (35): Xaa is C or S
  MOD_RES (14), (15), (16), (17), (18): Xaa is A or G
  MOD_RES (19), (20), (21), (22): Xaa is A or G or is absent
VPQALSPINILYFXXXXXXXXXYGKIPMIVRSXKX

SEQ ID NO: 65841 - protein, 40 aa, Artificial Sequence; identical to SEQ ID NO: 6828
  GFR-binding peptide
  MOD_RES (6), (7): Xaa is C or S
  MOD_RES (21), (22), (23), (24), (25): Xaa is A or G
  MOD_RES (26), (27), (28), (29): Xaa is A or G or is absent

SEQ ID NO: 65842 - protein, 37 aa, Artificial Sequence; identical to SEQ ID NO: 28009
  GFR-binding peptide
  MOD_RES (5), (6): Xaa is C or S

SEQ ID NO: 65843 - protein, 40 aa, Artificial Sequence; identical to SEQ ID NO: 6831
  GFR-binding peptide
  MOD_RES (6), (7), (38), (40): Xaa is C or S

SEQ ID NO: 65844 - protein, 37 aa, Artificial Sequence; identical to SEQ ID NO: 33064
  GFR-binding peptide
  MOD_RES (3), (4), (36): Xaa is C or S

SEQ ID NO: 65845 - protein, 40 aa, Artificial Sequence
  GFR-binding peptide
  MOD_RES (4), (5), (37), (39): Xaa is C or S
PEPXXVPEKMSPISILYKDENKNVVLKYHYNMTVESXAXR

SEQ ID NO: 65846 - protein, 36 aa, Artificial Sequence
  GFR-binding peptide
  MOD_RES (1), (35): Xaa is C or S
  MOD_RES (15), (16), (17), (18), (19): Xaa is A or G
  MOD_RES (20), (21), (22), (23): Xaa is A or G or is absent
XTPTKMSATSMLYYXXXXXXXXXLRKHRGMVVDRXG

SEQ ID NO: 65847 - protein, 37 aa, Artificial Sequence; identical to SEQ ID NO: 33065
  GFR-binding peptide
  MOD_RES (6), (7): Xaa is C or S

SEQ ID NO: 65848 - protein, 42 aa, Artificial Sequence
  GFR-binding peptide
  MOD_RES (5), (6), (40), (42): Xaa is C or S
  MOD_RES (20), (21), (22), (23), (24): Xaa is A or G
  MOD_RES (25), (26), (27), (28): Xaa is A or G or is absent
IPEPXXVPEKMEPISILYLXXXXXXXXXKFKYENMTVESXAX

SEQ ID NO: 65849 - protein, 37 aa, Artificial Sequence; identical to SEQ ID NO: 6835
  GFR-binding peptide
  MOD_RES (34), (36): Xaa is C or S
  MOD_RES (14), (15), (16), (17), (18): Xaa is A or G
  MOD_RES (19), (20), (21), (22): Xaa is A or G or is absent

SEQ ID NO: 65850 - protein, 32 aa, Artificial Sequence; identical to SEQ ID NO: 33068
  GFR-binding peptide
  MOD_RES (1), (2): Xaa is C or S

SEQ ID NO: 65851 - protein, 37 aa, Artificial Sequence
  GFR-binding peptide
  MOD_RES (34), (36): Xaa is C or S
  MOD_RES (14), (15), (16), (17), (18): Xaa is A or G
  MOD_RES (19), (20), (21), (22): Xaa is A or G or is absent
TPTKMSATSMLYYXXXXXXXXXLRKHRGMVVDRXGXS

SEQ ID NO: 65852 - protein, 40 aa, Artificial Sequence; identical to SEQ ID NO: 6836
  GFR-binding peptide
  MOD_RES (3), (4), (38), (40): Xaa is C or S
  MOD_RES (18), (19), (20), (21), (22): Xaa is A or G
  MOD_RES (23), (24), (25), (26): Xaa is A or G or is absent

SEQ ID NO: 65853 - protein, 39 aa, Artificial Sequence
  GFR-binding peptide
  MOD_RES (2), (3), (36), (38): Xaa is C or S
  MOD_RES (17), (18), (19), (20), (21): Xaa is A or G
  MOD_RES (22), (23), (24), (25): Xaa is A or G or is absent
TXXAPVKTSATSMLYYXXXXXXXXXLRKHRMIVEEXGXL

SEQ ID NO: 65854 - protein, 39 aa, Artificial Sequence
  GFR-binding peptide
  MOD_RES (4), (5), (39): Xaa is C or S
  MOD_RES (19), (20), (21), (22), (23): Xaa is A or G
  MOD_RES (24), (25), (26), (27): Xaa is A or G or is absent
AGPXXTPTKMSPISMLYKXXXXXXXXXLKYHYGMVVDRX

SEQ ID NO: 65855 - protein, 37 aa, Artificial Sequence
  GFR-binding peptide
  MOD_RES (34), (36): Xaa is C or S
  MOD_RES (14), (15), (16), (17), (18): Xaa is A or G
  MOD_RES (19), (20), (21), (22): Xaa is A or G or is absent
VPARLSATSILYYXXXXXXXXXLRKHRDMVVEAXGXR

SEQ ID NO: 65856 - protein, 32 aa, Artificial Sequence; identical to SEQ ID NO: 6839
  GFR-binding peptide
  MOD_RES (1), (1): Xaa is C or S

SEQ ID NO: 65857 - protein, 35 aa, Artificial Sequence; identical to SEQ ID NO: 28021
  GFR-binding peptide
  MOD_RES (2), (3): Xaa is C or S
  MOD_RES (17), (18), (19), (20), (21): Xaa is A or G
  MOD_RES (22), (23), (24), (25): Xaa is A or G or is absent

SEQ ID NO: 65858 - protein, 37 aa, Artificial Sequence; identical to SEQ ID NO: 28022
  GFR-binding peptide
  MOD_RES (3), (4), (36): Xaa is C or S

SEQ ID NO: 65859 - protein, 34 aa, Artificial Sequence
  GFR-binding peptide
  MOD_RES (1), (2): Xaa is C or S
  MOD_RES (16), (17), (18), (19), (20): Xaa is A or G
  MOD_RES (21), (22), (23), (24): Xaa is A or G or is absent
XXTPTKMEPISMLYLXXXXXXXXXKFKYEGMVVD

SEQ ID NO: 65860 - protein, 37 aa, Artificial Sequence; identical to SEQ ID NO: 6846
  GFR-binding peptide
  MOD_RES (2), (3), (34), (36): Xaa is C or S

SEQ ID NO: 65861 - protein, 37 aa, Artificial Sequence; identical to SEQ ID NO: 33084
  GFR-binding peptide
  MOD_RES (3), (4): Xaa is C or S
  MOD_RES (18), (19), (20), (21), (22): Xaa is A or G
  MOD_RES (23), (24), (25), (26): Xaa is A or G or is absent

SEQ ID NO: 65862 - protein, 33 aa, Artificial Sequence; identical to SEQ ID NO: 33085
  GFR-binding peptide
  MOD_RES (2), (3): Xaa is C or S

SEQ ID NO: 65863 - protein, 41 aa, Artificial Sequence; identical to SEQ ID NO: 28023
  GFR-binding peptide
  MOD_RES (5), (6), (38), (40): Xaa is C or S

SEQ ID NO: 65864 - protein, 40 aa, Artificial Sequence; identical to SEQ ID NO: 57974
  GFR-binding peptide
  MOD_RES (5), (6), (37), (39): Xaa is C or S

SEQ ID NO: 65865 - protein, 38 aa, Artificial Sequence; identical to SEQ ID NO: 33087
  GFR-binding peptide
  MOD_RES (1), (2), (37): Xaa is C or S
  MOD_RES (16), (17), (18), (19), (20): Xaa is A or G
  MOD_RES (21), (22), (23), (24): Xaa is A or G or is absent

SEQ ID NO: 65866 - protein, 35 aa, Artificial Sequence
  GFR-binding peptide
  MOD_RES (1), (2), (34): Xaa is C or S
XXTPTKMSPISMLYKNDKQQIILKYHYGMVVDRXG

SEQ ID NO: 65867 - protein, 43 aa, Artificial Sequence
  GFR-binding peptide
  MOD_RES (6), (7), (41), (43): Xaa is C or S
  MOD_RES (21), (22), (23), (24), (25): Xaa is A or G
  MOD_RES (26), (27), (28), (29): Xaa is A or G or is absent
HVPKPXXAPTKLSATSVLYYXXXXXXXXXLRKHRNMVVRSXGX

SEQ ID NO: 65868 - protein, 36 aa, Artificial Sequence; identical to SEQ ID NO: 33099
  GFR-binding peptide
  MOD_RES (1), (35): Xaa is C or S
  MOD_RES (15), (16), (17), (18), (19): Xaa is A or G
  MOD_RES (20), (21), (22), (23): Xaa is A or G or is absent

SEQ ID NO: 65869 - protein, 39 aa, Artificial Sequence; identical to SEQ ID NO: 6856
  GFR-binding peptide
  MOD_RES (3), (4), (38): Xaa is C or S
  MOD_RES (18), (19), (20), (21), (22): Xaa is A or G
  MOD_RES (23), (24), (25), (26): Xaa is A or G or is absent

SEQ ID NO: 65870 - protein, 33 aa, Artificial Sequence; identical to SEQ ID NO: 6857
  GFR-binding peptide
  MOD_RES (32), (32): Xaa is C or S

SEQ ID NO: 65871 - protein, 38 aa, Artificial Sequence; identical to SEQ ID NO: 6866
  GFR-binding peptide
  MOD_RES (5), (37): Xaa is C or S

SEQ ID NO: 65872 - protein, 33 aa, Artificial Sequence; identical to SEQ ID NO: 6867
  GFR-binding peptide
  MOD_RES (2), (3): Xaa is C or S

SEQ ID NO: 65873 - protein, 39 aa, Artificial Sequence; identical to SEQ ID NO: 57995
  GFR-binding peptide
  MOD_RES (5), (6), (37), (39): Xaa is C or S

SEQ ID NO: 65874 - protein, 35 aa, Artificial Sequence; identical to SEQ ID NO: 28048
  GFR-binding peptide
  MOD_RES (1), (2), (33), (35): Xaa is C or S

SEQ ID NO: 65875 - protein, 36 aa, Artificial Sequence; identical to SEQ ID NO: 28049
  GFR-binding peptide
  MOD_RES (1), (2), (36): Xaa is C or S
  MOD_RES (16), (17), (18), (19), (20): Xaa is A or G
  MOD_RES (21), (22), (23), (24): Xaa is A or G or is absent

SEQ ID NO: 65876 - protein, 37 aa, Artificial Sequence; identical to SEQ ID NO: 28051
  GFR-binding peptide
  MOD_RES (6), (7): Xaa is C or S

SEQ ID NO: 65877 - protein, 38 aa, Artificial Sequence; identical to SEQ ID NO: 33127
  GFR-binding peptide
  MOD_RES (5), (5): Xaa is C or S
  MOD_RES (19), (20), (21), (22), (23): Xaa is A or G
  MOD_RES (24), (25), (26), (27): Xaa is A or G or is absent

SEQ ID NO: 65878 - protein, 43 aa, Artificial Sequence; identical to SEQ ID NO: 33128
  GFR-binding peptide
  MOD_RES (5), (6), (40), (42): Xaa is C or S
  MOD_RES (20), (21), (22), (23), (24): Xaa is A or G
  MOD_RES (25), (26), (27), (28): Xaa is A or G or is absent

SEQ ID NO: 65879 - protein, 40 aa, Artificial Sequence; identical to SEQ ID NO: 6876
  GFR-binding peptide
  MOD_RES (5), (6), (37), (39): Xaa is C or S

SEQ ID NO: 65880 - protein, 37 aa, Artificial Sequence; identical to SEQ ID NO: 33132
  GFR-binding peptide
  MOD_RES (3), (4): Xaa is C or S
  MOD_RES (18), (19), (20), (21), (22): Xaa is A or G
  MOD_RES (23), (24), (25), (26): Xaa is A or G or is absent

SEQ ID NO: 65881 - protein, 39 aa, Artificial Sequence; identical to SEQ ID NO: 28053
  GFR-binding peptide
  MOD_RES (6), (38): Xaa is C or S

SEQ ID NO: 65882 - protein, 36 aa, Artificial Sequence; identical to SEQ ID NO: 28054
  GFR-binding peptide
  MOD_RES (2), (3), (36): Xaa is C or S
  MOD_RES (17), (18), (19), (20), (21): Xaa is A or G
  MOD_RES (22), (23), (24), (25): Xaa is A or G or is absent

SEQ ID NO: 65883 - protein, 42 aa, Artificial Sequence; identical to SEQ ID NO: 33137
  GFR-binding peptide
  MOD_RES (6), (7), (40), (42): Xaa is C or S
  MOD_RES (21), (22), (23), (24), (25): Xaa is A or G
  MOD_RES (26), (27), (28), (29): Xaa is A or G or is absent

SEQ ID NO: 65884 - protein, 34 aa, Artificial Sequence
  GFR-binding peptide
  MOD_RES (34), (34): Xaa is C or S
  MOD_RES (14), (15), (16), (17), (18): Xaa is A or G
  MOD_RES (19), (20), (21), (22): Xaa is A or G or is absent
TPTKMEPISMLYLXXXXXXXXXKFKYEGMVVDRX

SEQ ID NO: 65885 - protein, 37 aa, Artificial Sequence; identical to SEQ ID NO: 33140
  GFR-binding peptide
  MOD_RES (4), (5): Xaa is C or S
  MOD_RES (19), (20), (21), (22), (23): Xaa is A or G
  MOD_RES (24), (25), (26), (27): Xaa is A or G or is absent

SEQ ID NO: 65886 - protein, 41 aa, Artificial Sequence; identical to SEQ ID NO: 6880
  GFR-binding peptide
  MOD_RES (5), (6), (38), (40): Xaa is C or S

SEQ ID NO: 65887 - protein, 37 aa, Artificial Sequence; identical to SEQ ID NO: 28059
  GFR-binding peptide
  MOD_RES (2), (3), (35), (37): Xaa is C or S

SEQ ID NO: 65888 - protein, 38 aa, Artificial Sequence; identical to SEQ ID NO: 28064
  GFR-binding peptide
  MOD_RES (2), (3), (35), (37): Xaa is C or S

SEQ ID NO: 65889 - protein, 35 aa, Artificial Sequence; identical to SEQ ID NO: 6886
  GFR-binding peptide
  MOD_RES (3), (4): Xaa is C or S

SEQ ID NO: 65890 - protein, 35 aa, Artificial Sequence; identical to SEQ ID NO: 28066
  GFR-binding peptide
  MOD_RES (32), (34): Xaa is C or S

SEQ ID NO: 65891 - protein, 35 aa, Artificial Sequence
  GFR-binding peptide
  MOD_RES (2), (3), (34): Xaa is C or S
TXXAPVKTSPISMLYKDNGRVLLLKYHYMIVEEXG

SEQ ID NO: 65892 - protein, 39 aa, Artificial Sequence; identical to SEQ ID NO: 28072
  GFR-binding peptide
  MOD_RES (6), (7): Xaa is C or S

SEQ ID NO: 65893 - protein, 35 aa, Artificial Sequence; identical to SEQ ID NO: 6892
  GFR-binding peptide
  MOD_RES (1), (2): Xaa is C or S
  MOD_RES (16), (17), (18), (19), (20): Xaa is A or G
  MOD_RES (21), (22), (23), (24): Xaa is A or G or is absent

SEQ ID NO: 65894 - protein, 38 aa, Artificial Sequence; identical to SEQ ID NO: 28075
  GFR-binding peptide
  MOD_RES (4), (5): Xaa is C or S
  MOD_RES (19), (20), (21), (22), (23): Xaa is A or G
  MOD_RES (24), (25), (26), (27): Xaa is A or G or is absent

SEQ ID NO: 65895 - protein, 40 aa, Artificial Sequence; identical to SEQ ID NO: 33155
  GFR-binding peptide
  MOD_RES (4), (5), (39): Xaa is C or S
  MOD_RES (19), (20), (21), (22), (23): Xaa is A or G
  MOD_RES (24), (25), (26), (27): Xaa is A or G or is absent

SEQ ID NO: 65896 - protein, 37 aa, Artificial Sequence; identical to SEQ ID NO: 28080
  GFR-binding peptide
  MOD_RES (3), (37): Xaa is C or S
  MOD_RES (17), (18), (19), (20), (21): Xaa is A or G
  MOD_RES (22), (23), (24), (25): Xaa is A or G or is absent

SEQ ID NO: 65897 - protein, 39 aa, Artificial Sequence; identical to SEQ ID NO: 33156
  GFR-binding peptide
  MOD_RES (3), (4), (38): Xaa is C or S
  MOD_RES (18), (19), (20), (21), (22): Xaa is A or G
  MOD_RES (23), (24), (25), (26): Xaa is A or G or is absent

SEQ ID NO: 65898 - protein, 37 aa, Artificial Sequence; identical to SEQ ID NO: 33157
  GFR-binding peptide
  MOD_RES (4), (5), (37): Xaa is C or S

SEQ ID NO: 65899 - protein, 37 aa, Artificial Sequence; identical to SEQ ID NO: 33158
  GFR-binding peptide
  MOD_RES (4), (5), (37): Xaa is C or S

SEQ ID NO: 65900 - protein, 38 aa, Artificial Sequence; identical to SEQ ID NO: 6900
  GFR-binding peptide
  MOD_RES (1), (2), (36), (38): Xaa is C or S
  MOD_RES (16), (17), (18), (19), (20): Xaa is A or G
  MOD_RES (21), (22), (23), (24): Xaa is A or G or is absent

SEQ ID NO: 65901 - protein, 33 aa, Artificial Sequence; identical to SEQ ID NO: 28088
  GFR-binding peptide
  MOD_RES (1), (2): Xaa is C or S

SEQ ID NO: 65902 - protein, 44 aa, Artificial Sequence; identical to SEQ ID NO: 33168
  GFR-binding peptide
  MOD_RES (6), (7), (41), (43): Xaa is C or S
  MOD_RES (21), (22), (23), (24), (25): Xaa is A or G
  MOD_RES (26), (27), (28), (29): Xaa is A or G or is absent

SEQ ID NO: 65903 - protein, 36 aa, Artificial Sequence; identical to SEQ ID NO: 6904
  GFR-binding peptide
  MOD_RES (3), (35): Xaa is C or S

SEQ ID NO: 65904 - protein, 37 aa, Artificial Sequence; identical to SEQ ID NO: 6906
  GFR-binding peptide
  MOD_RES (4), (5): Xaa is C or S
  MOD_RES (19), (20), (21), (22), (23): Xaa is A or G
  MOD_RES (24), (25), (26), (27): Xaa is A or G or is absent

SEQ ID NO: 65905 - protein, 39 aa, Artificial Sequence; identical to SEQ ID NO: 6909
  GFR-binding peptide
  MOD_RES (6), (7), (38): Xaa is C or S

SEQ ID NO: 65906 - protein, 34 aa, Artificial Sequence
  GFR-binding peptide
  MOD_RES (2), (3): Xaa is C or S
PXXTPTKMSATSMLYYNDKQQIILRKHRGMVVDR

SEQ ID NO: 65907 - protein, 42 aa, Artificial Sequence; identical to SEQ ID NO: 28099
  GFR-binding peptide
  MOD_RES (6), (7), (39), (41): Xaa is C or S

SEQ ID NO: 65908 - protein, 38 aa, Artificial Sequence; identical to SEQ ID NO: 6913
  GFR-binding peptide
  MOD_RES (5), (5): Xaa is C or S
  MOD_RES (19), (20), (21), (22), (23): Xaa is A or G
  MOD_RES (24), (25), (26), (27): Xaa is A or G or is absent

SEQ ID NO: 65909 - protein, 36 aa, Artificial Sequence
  GFR-binding peptide
  MOD_RES (5), (6): Xaa is C or S
VPSTXXAPVKTSPISMLYKDNGRVLLLKYHYMIVEE

SEQ ID NO: 65910 - protein, 41 aa, Artificial Sequence; identical to SEQ ID NO: 6917
  GFR-binding peptide
  MOD_RES (4), (5), (40): Xaa is C or S
  MOD_RES (19), (20), (21), (22), (23): Xaa is A or G
  MOD_RES (24), (25), (26), (27): Xaa is A or G or is absent

SEQ ID NO: 65911 - protein, 39 aa, Artificial Sequence; identical to SEQ ID NO: 33184
  GFR-binding peptide
  MOD_RES (4), (5), (37), (39): Xaa is C or S

SEQ ID NO: 65912 - protein, 39 aa, Artificial Sequence
  GFR-binding peptide
  MOD_RES (3), (4), (38): Xaa is C or S
  MOD_RES (18), (19), (20), (21), (22): Xaa is A or G
  MOD_RES (23), (24), (25), (26): Xaa is A or G or is absent
EPXXVPEKMSATSILYYXXXXXXXXXLRKHRNMTVESXA

SEQ ID NO: 65913 - protein, 41 aa, Artificial Sequence
  GFR-binding peptide
  MOD_RES (6), (7), (41): Xaa is C or S
  MOD_RES (21), (22), (23), (24), (25): Xaa is A or G
  MOD_RES (26), (27), (28), (29): Xaa is A or G or is absent
HVPKPXXAPTKLSATSVLYYXXXXXXXXXLRKHRNMVVRSX

SEQ ID NO: 65914 - protein, 32 aa, Artificial Sequence; identical to SEQ ID NO: 6919
  GFR-binding peptide
  MOD_RES (1), (2): Xaa is C or S

SEQ ID NO: 65915 - protein, 34 aa, Artificial Sequence; identical to SEQ ID NO: 6920
  GFR-binding peptide
  MOD_RES (1), (2): Xaa is C or S
  MOD_RES (16), (17), (18), (19), (20): Xaa is A or G
  MOD_RES (21), (22), (23), (24): Xaa is A or G or is absent

SEQ ID NO: 65916 - protein, 41 aa, Artificial Sequence; identical to SEQ ID NO: 6921
  GFR-binding peptide
  MOD_RES (5), (6), (40): Xaa is C or S
  MOD_RES (20), (21), (22), (23), (24): Xaa is A or G
  MOD_RES (25), (26), (27), (28): Xaa is A or G or is absent

SEQ ID NO: 65917 - protein, 35 aa, Artificial Sequence; identical to SEQ ID NO: 58052
  GFR-binding peptide
  MOD_RES (4), (5): Xaa is C or S

SEQ ID NO: 65918 - protein, 35 aa, Artificial Sequence; identical to SEQ ID NO: 6927
  GFR-binding peptide
  MOD_RES (4), (5): Xaa is C or S

SEQ ID NO: 65919 - protein, 43 aa, Artificial Sequence; identical to SEQ ID NO: 28110
  GFR-binding peptide
  MOD_RES (5), (6), (40), (42): Xaa is C or S
  MOD_RES (20), (21), (22), (23), (24): Xaa is A or G
  MOD_RES (25), (26), (27), (28): Xaa is A or G or is absent

SEQ ID NO: 65920 - protein, 38 aa, Artificial Sequence; identical to SEQ ID NO: 33198
  GFR-binding peptide
  MOD_RES (1), (2), (36), (38): Xaa is C or S
  MOD_RES (16), (17), (18), (19), (20): Xaa is A or G
  MOD_RES (21), (22), (23), (24): Xaa is A or G or is absent

SEQ ID NO: 65921 - protein, 34 aa, Artificial Sequence; identical to SEQ ID NO: 28111
  GFR-binding peptide
  MOD_RES (1), (2), (34): Xaa is C or S

SEQ ID NO: 65922 - protein, 34 aa, Artificial Sequence; identical to SEQ ID NO: 6928
  GFR-binding peptide
  MOD_RES (32), (34): Xaa is C or S

SEQ ID NO: 65923 - protein, 40 aa, Artificial Sequence; identical to SEQ ID NO: 28113
  GFR-binding peptide
  MOD_RES (4), (5), (37), (39): Xaa is C or S

SEQ ID NO: 65924 - protein, 34 aa, Artificial Sequence; identical to SEQ ID NO: 6929
  GFR-binding peptide
  MOD_RES (2), (3), (34): Xaa is C or S

SEQ ID NO: 65925 - protein, 34 aa, Artificial Sequence
  GFR-binding peptide
  MOD_RES (1), (33): Xaa is C or S
XVPEKMSPINILYFDENKNVVYGKIPNMTVESXA

SEQ ID NO: 65926 - protein, 34 aa, Artificial Sequence; identical to SEQ ID NO: 33204
  GFR-binding peptide
  MOD_RES (4), (4): Xaa is C or S

SEQ ID NO: 65927 - protein, 40 aa, Artificial Sequence; identical to SEQ ID NO: 6933
  GFR-binding peptide
  MOD_RES (4), (5), (38), (40): Xaa is C or S
  MOD_RES (19), (20), (21), (22), (23): Xaa is A or G
  MOD_RES (24), (25), (26), (27): Xaa is A or G or is absent

SEQ ID NO: 65928 - protein, 40 aa, Artificial Sequence; identical to SEQ ID NO: 6937
  GFR-binding peptide
  MOD_RES (4), (5), (39): Xaa is C or S
  MOD_RES (19), (20), (21), (22), (23): Xaa is A or G
  MOD_RES (24), (25), (26), (27): Xaa is A or G or is absent

SEQ ID NO: 65929 - protein, 32 aa, Artificial Sequence
  GFR-binding peptide
  MOD_RES (14), (15), (16), (17), (18): Xaa is A or G
  MOD_RES (19), (20), (21), (22): Xaa is A or G or is absent
VPQDLSPINILYFXXXXXXXXXYGKIPMVVKS

SEQ ID NO: 65930 - protein, 38 aa, Artificial Sequence
  GFR-binding peptide
  MOD_RES (3), (4), (35), (37): Xaa is C or S
SPXXVPQDLSPINILYFVGRTPKVYGKIPMVVKSXKXS

SEQ ID NO: 65931 - protein, 32 aa, Artificial Sequence; identical to SEQ ID NO: 28127
  GFR-binding peptide
  MOD_RES (1), (1): Xaa is C or S

SEQ ID NO: 65932 - protein, 37 aa, Artificial Sequence
  GFR-binding peptide
  MOD_RES (3), (4), (37): Xaa is C or S
  MOD_RES (18), (19), (20), (21), (22): Xaa is A or G
  MOD_RES (23), (24), (25), (26): Xaa is A or G or is absent
SPXXVPQDLSPINILYFXXXXXXXXXYGKIPMVVKSX

SEQ ID NO: 65933 - protein, 43 aa, Artificial Sequence; identical to SEQ ID NO: 58066
  GFR-binding peptide
  MOD_RES (6), (7), (40), (42): Xaa is C or S
  MOD_RES (21), (22), (23), (24), (25): Xaa is A or G
  MOD_RES (26), (27), (28), (29): Xaa is A or G or is absent

SEQ ID NO: 65934 - protein, 40 aa, Artificial Sequence
  GFR-binding peptide
  MOD_RES (6), (7), (40): Xaa is C or S
  MOD_RES (21), (22), (23), (24), (25): Xaa is A or G
  MOD_RES (26), (27), (28), (29): Xaa is A or G or is absent
RVPSTXXAPVKTSATSMLYYXXXXXXXXXLRKHRMIVEEX

SEQ ID NO: 65935 - protein, 37 aa, Artificial Sequence; identical to SEQ ID NO: 6944
  GFR-binding peptide
  MOD_RES (4), (5): Xaa is C or S
  MOD_RES (19), (20), (21), (22), (23): Xaa is A or G
  MOD_RES (24), (25), (26), (27): Xaa is A or G or is absent

SEQ ID NO: 65936 - protein, 36 aa, Artificial Sequence; identical to SEQ ID NO: 6945
  GFR-binding peptide
  MOD_RES (1), (2), (34), (36): Xaa is C or S

SEQ ID NO: 65937 - protein, 36 aa, Artificial Sequence; identical to SEQ ID NO: 28129
  GFR-binding peptide
  MOD_RES (2), (3), (35): Xaa is C or S

SEQ ID NO: 65938 - protein, 37 aa, Artificial Sequence; identical to SEQ ID NO: 28131
  GFR-binding peptide
  MOD_RES (4), (5): Xaa is C or S
  MOD_RES (19), (20), (21), (22), (23): Xaa is A or G
  MOD_RES (24), (25), (26), (27): Xaa is A or G or is absent

SEQ ID NO: 65939 - protein, 38 aa, Artificial Sequence; identical to SEQ ID NO: 28133
  GFR-binding peptide
  MOD_RES (4), (5), (38): Xaa is C or S
  MOD_RES (19), (20), (21), (22), (23): Xaa is A or G
  MOD_RES (24), (25), (26), (27): Xaa is A or G or is absent

SEQ ID NO: 65940 - protein, 36 aa, Artificial Sequence; identical to SEQ ID NO: 6949
  GFR-binding peptide
  MOD_RES (4), (5): Xaa is C or S

SEQ ID NO: 65941 - protein, 38 aa, Artificial Sequence; identical to SEQ ID NO: 33221
  GFR-binding peptide
  MOD_RES (2), (3), (35), (37): Xaa is C or S

SEQ ID NO: 65942 - protein, 34 aa, Artificial Sequence; identical to SEQ ID NO: 28136
  GFR-binding peptide
  MOD_RES (14), (15), (16), (17), (18): Xaa is A or G
  MOD_RES (19), (20), (21), (22): Xaa is A or G or is absent

SEQ ID NO: 65943 - protein, 38 aa, Artificial Sequence; identical to SEQ ID NO: 6951
  GFR-binding peptide
  MOD_RES (3), (37): Xaa is C or S
  MOD_RES (17), (18), (19), (20), (21): Xaa is A or G
  MOD_RES (22), (23), (24), (25): Xaa is A or G or is absent

SEQ ID NO: 65944 - protein, 35 aa, Artificial Sequence; identical to SEQ ID NO: 6952
  GFR-binding peptide
  MOD_RES (2), (3): Xaa is C or S

SEQ ID NO: 65945 - protein, 41 aa, Artificial Sequence; identical to SEQ ID NO: 33225
  GFR-binding peptide
  MOD_RES (6), (7), (41): Xaa is C or S
  MOD_RES (21), (22), (23), (24), (25): Xaa is A or G
  MOD_RES (26), (27), (28), (29): Xaa is A or G or is absent

SEQ ID NO: 65946 - protein, 37 aa, Artificial Sequence; identical to SEQ ID NO: 6957
  GFR-binding peptide
  MOD_RES (4), (5): Xaa is C or S
  MOD_RES (19), (20), (21), (22), (23): Xaa is A or G
  MOD_RES (24), (25), (26), (27): Xaa is A or G or is absent

SEQ ID NO: 65947 - protein, 36 aa, Artificial Sequence; identical to SEQ ID NO: 28143
  GFR-binding peptide
  MOD_RES (5), (6): Xaa is C or S

SEQ ID NO: 65948 - protein, 38 aa, Artificial Sequence; identical to SEQ ID NO: 6963
  GFR-binding peptide
  MOD_RES (4), (5), (38): Xaa is C or S
  MOD_RES (19), (20), (21), (22), (23): Xaa is A or G
  MOD_RES (24), (25), (26), (27): Xaa is A or G or is absent

SEQ ID NO: 65949 - protein, 38 aa, Artificial Sequence
  GFR-binding peptide
  MOD_RES (4), (5), (37): Xaa is C or S
PEPXXVPEKMSATSILYYDENKNVVLRKHRNMTVESXA

SEQ ID NO: 65950 - protein, 35 aa, Artificial Sequence; identical to SEQ ID NO: 6966
  GFR-binding peptide
  MOD_RES (2), (3): Xaa is C or S
  MOD_RES (17), (18), (19), (20), (21): Xaa is A or G
  MOD_RES (22), (23), (24), (25): Xaa is A or G or is absent

SEQ ID NO: 65951 - protein, 35 aa, Artificial Sequence
  GFR-binding peptide
  MOD_RES (2), (3): Xaa is C or S
  MOD_RES (17), (18), (19), (20), (21): Xaa is A or G
  MOD_RES (22), (23), (24), (25): Xaa is A or G or is absent
TXXAPVKTSPISMLYKXXXXXXXXXLKYHYMIVEE

SEQ ID NO: 65952 - protein, 32 aa, Artificial Sequence; identical to SEQ ID NO: 6972
  GFR-binding peptide
  MOD_RES (1), (2): Xaa is C or S

SEQ ID NO: 65953 - protein, 38 aa, Artificial Sequence
  GFR-binding peptide
  MOD_RES (2), (3), (37): Xaa is C or S
  MOD_RES (17), (18), (19), (20), (21): Xaa is A or G
  MOD_RES (22), (23), (24), (25): Xaa is A or G or is absent
PXXTPTKMEPISMLYLXXXXXXXXXKFKYEGMVVDRXG

SEQ ID NO: 65954 - protein, 38 aa, Artificial Sequence; identical to SEQ ID NO: 33233
  GFR-binding peptide
  MOD_RES (4), (5), (38): Xaa is C or S
  MOD_RES (19), (20), (21), (22), (23): Xaa is A or G
  MOD_RES (24), (25), (26), (27): Xaa is A or G or is absent

SEQ ID NO: 65955 - protein, 38 aa, Artificial Sequence; identical to SEQ ID NO: 6975
  GFR-binding peptide
  MOD_RES (4), (5): Xaa is C or S
  MOD_RES (19), (20), (21), (22), (23): Xaa is A or G
  MOD_RES (24), (25), (26), (27): Xaa is A or G or is absent

SEQ ID NO: 65956 - protein, 37 aa, Artificial Sequence
  GFR-binding peptide
  MOD_RES (34), (36): Xaa is C or S
  MOD_RES (14), (15), (16), (17), (18): Xaa is A or G
  MOD_RES (19), (20), (21), (22): Xaa is A or G or is absent
TPTKMEPISMLYLXXXXXXXXXKFKYEGMVVDRXGXS

SEQ ID NO: 65957 - protein, 40 aa, Artificial Sequence
  GFR-binding peptide
  MOD_RES (4), (5), (37), (39): Xaa is C or S
SKAXXVPTKLSATSILYYDKGVVTYLRKHRGMAVSEXGXR

SEQ ID NO: 65958 - protein, 37 aa, Artificial Sequence; identical to SEQ ID NO: 28160
  GFR-binding peptide
  MOD_RES (4), (5): Xaa is C or S
  MOD_RES (19), (20), (21), (22), (23): Xaa is A or G
  MOD_RES (24), (25), (26), (27): Xaa is A or G or is absent

SEQ ID NO: 65959 - protein, 41 aa, Artificial Sequence; identical to SEQ ID NO: 33235
  GFR-binding peptide
  MOD_RES (3), (4), (38), (40): Xaa is C or S
  MOD_RES (18), (19), (20), (21), (22): Xaa is A or G
  MOD_RES (23), (24), (25), (26): Xaa is A or G or is absent

SEQ ID NO: 65960 - protein, 39 aa, Artificial Sequence; identical to SEQ ID NO: 33236
  GFR-binding peptide
  MOD_RES (6), (7): Xaa is C or S
  MOD_RES (21), (22), (23), (24), (25): Xaa is A or G
  MOD_RES (26), (27), (28), (29): Xaa is A or G or is absent

SEQ ID NO: 65961 - protein, 37 aa, Artificial Sequence
  GFR-binding peptide
  MOD_RES (1), (35), (37): Xaa is C or S
  MOD_RES (15), (16), (17), (18), (19): Xaa is A or G
  MOD_RES (20), (21), (22), (23): Xaa is A or G or is absent
XTPTKMEPISMLYLXXXXXXXXXKFKYEGMVVDRXGX

SEQ ID NO: 65962 - protein, 35 aa, Artificial Sequence
  GFR-binding peptide
  MOD_RES (1), (33), (35): Xaa is C or S
XVPTRLSPISILYKDSANNVVLKYHYDMVVESXGX

SEQ ID NO: 65963 - protein, 32 aa, Artificial Sequence; identical to SEQ ID NO: 6982
  GFR-binding peptide
  MOD_RES (1), (32): Xaa is C or S

SEQ ID NO: 65964 - protein, 32 aa, Artificial Sequence; identical to SEQ ID NO: 6983
  GFR-binding peptide
  MOD_RES (1), (2): Xaa is C or S

SEQ ID NO: 65965 - protein, 40 aa, Artificial Sequence; identical to SEQ ID NO: 28163
  GFR-binding peptide
  MOD_RES (6), (7): Xaa is C or S
  MOD_RES (21), (22), (23), (24), (25): Xaa is A or G
  MOD_RES (26), (27), (28), (29): Xaa is A or G or is absent

SEQ ID NO: 65966 - protein, 38 aa, Artificial Sequence; identical to SEQ ID NO: 28164
  GFR-binding peptide
  MOD_RES (4), (5), (36), (38): Xaa is C or S

SEQ ID NO: 65967 - protein, 31 aa, Artificial Sequence; identical to SEQ ID NO: 33246
  GFR-binding peptide

SEQ ID NO: 65968 - protein, 36 aa, Artificial Sequence; identical to SEQ ID NO: 6987
  GFR-binding peptide
  MOD_RES (1), (2), (33), (35): Xaa is C or S

SEQ ID NO: 65969 - protein, 38 aa, Artificial Sequence; identical to SEQ ID NO: 6988
  GFR-binding peptide
  MOD_RES (1), (35), (37): Xaa is C or S
  MOD_RES (15), (16), (17), (18), (19): Xaa is A or G
  MOD_RES (20), (21), (22), (23): Xaa is A or G or is absent

SEQ ID NO: 65970 - protein, 38 aa, Artificial Sequence; identical to SEQ ID NO: 33248
  GFR-binding peptide
  MOD_RES (1), (35), (37): Xaa is C or S
  MOD_RES (15), (16), (17), (18), (19): Xaa is A or G
  MOD_RES (20), (21), (22), (23): Xaa is A or G or is absent

SEQ ID NO: 65971 - protein, 39 aa, Artificial Sequence; identical to SEQ ID NO: 33249
  GFR-binding peptide
  MOD_RES (3), (4), (36), (38): Xaa is C or S

SEQ ID NO: 65972 - protein, 38 aa, Artificial Sequence; identical to SEQ ID NO: 6990
  GFR-binding peptide
  MOD_RES (1), (2), (36), (38): Xaa is C or S
  MOD_RES (16), (17), (18), (19), (20): Xaa is A or G
  MOD_RES (21), (22), (23), (24): Xaa is A or G or is absent

SEQ ID NO: 65973 - protein, 34 aa, Artificial Sequence; identical to SEQ ID NO: 6991
  GFR-binding peptide
  MOD_RES (3), (4): Xaa is C or S

SEQ ID NO: 65974 - protein, 38 aa, Artificial Sequence; identical to SEQ ID NO: 6992
  GFR-binding peptide
  MOD_RES (6), (7), (38): Xaa is C or S

SEQ ID NO: 65975 - protein, 38 aa, Artificial Sequence; identical to SEQ ID NO: 6994
  GFR-binding peptide
  MOD_RES (3), (4), (37): Xaa is C or S
  MOD_RES (18), (19), (20), (21), (22): Xaa is A or G
  MOD_RES (23), (24), (25), (26): Xaa is A or G or is absent

SEQ ID NO: 65976 - protein, 37 aa, Artificial Sequence; identical to SEQ ID NO: 28173
  GFR-binding peptide
  MOD_RES (2), (3), (37): Xaa is C or S
  MOD_RES (17), (18), (19), (20), (21): Xaa is A or G
  MOD_RES (22), (23), (24), (25): Xaa is A or G or is absent

SEQ ID NO: 65977 - protein, 37 aa, Artificial Sequence
  GFR-binding peptide
  MOD_RES (6), (7): Xaa is C or S
GSAGPXXTPTKMEPISMLYLNDKQQIIKFKYEGMVVD

SEQ ID NO: 65978 - protein, 36 aa, Artificial Sequence; identical to SEQ ID NO: 6996
  GFR-binding peptide
  MOD_RES (34), (36): Xaa is C or S
  MOD_RES (14), (15), (16), (17), (18): Xaa is A or G
  MOD_RES (19), (20), (21), (22): Xaa is A or G or is absent

SEQ ID NO: 65979 - protein, 37 aa, Artificial Sequence; identical to SEQ ID NO: 6999
  GFR-binding peptide
  MOD_RES (4), (5): Xaa is C or S
  MOD_RES (19), (20), (21), (22), (23): Xaa is A or G
  MOD_RES (24), (25), (26), (27): Xaa is A or G or is absent

SEQ ID NO: 65980 - protein, 38 aa, Artificial Sequence; identical to SEQ ID NO: 7000
  GFR-binding peptide
  MOD_RES (2), (3), (35), (37): Xaa is C or S

SEQ ID NO: 65981 - protein, 37 aa, Artificial Sequence; identical to SEQ ID NO: 28177
  GFR-binding peptide
  MOD_RES (1), (2), (35), (37): Xaa is C or S

SEQ ID NO: 65982 - protein, 40 aa, Artificial Sequence; identical to SEQ ID NO: 7002
  GFR-binding peptide
  MOD_RES (4), (5), (39): Xaa is C or S
  MOD_RES (19), (20), (21), (22), (23): Xaa is A or G
  MOD_RES (24), (25), (26), (27): Xaa is A or G or is absent

SEQ ID NO: 65983 - protein, 37 aa, Artificial Sequence; identical to SEQ ID NO: 7005
  GFR-binding peptide
  MOD_RES (2), (34), (36): Xaa is C or S

SEQ ID NO: 65984 - protein, 35 aa, Artificial Sequence; identical to SEQ ID NO: 7006
  GFR-binding peptide
  MOD_RES (33), (35): Xaa is C or S
  MOD_RES (14), (15), (16), (17), (18): Xaa is A or G
  MOD_RES (19), (20), (21), (22): Xaa is A or G or is absent

SEQ ID NO: 65985 - protein, 36 aa, Artificial Sequence; identical to SEQ ID NO: 7007
  GFR-binding peptide
  MOD_RES (1), (2), (33), (35): Xaa is C or S

SEQ ID NO: 65986 - protein, 32 aa, Artificial Sequence; identical to SEQ ID NO: 28187
  GFR-binding peptide
  MOD_RES (1), (1): Xaa is C or S

SEQ ID NO: 65987 - protein, 40 aa, Artificial Sequence; identical to SEQ ID NO: 7008
  GFR-binding peptide
  MOD_RES (3), (4), (37), (39): Xaa is C or S

SEQ ID NO: 65988 - protein, 33 aa, Artificial Sequence; identical to SEQ ID NO: 7009
  GFR-binding peptide
  MOD_RES (1), (32): Xaa is C or S

SEQ ID NO: 65989 - protein, 34 aa, Artificial Sequence; identical to SEQ ID NO: 33273
  GFR-binding peptide
  MOD_RES (3), (4): Xaa is C or S

SEQ ID NO: 65990 - protein, 34 aa, Artificial Sequence; identical to SEQ ID NO: 7013
  GFR-binding peptide
  MOD_RES (1), (33): Xaa is C or S

SEQ ID NO: 65991 - protein, 42 aa, Artificial Sequence; identical to SEQ ID NO: 33274
  GFR-binding peptide
  MOD_RES (6), (7), (41): Xaa is C or S
  MOD_RES (21), (22), (23), (24), (25): Xaa is A or G
  MOD_RES (26), (27), (28), (29): Xaa is A or G or is absent

SEQ ID NO: 65992 - protein, 30 aa, Artificial Sequence
  GFR-binding peptide
VPEKMSPISILYKDENKNVVLKYHYNMTVE

SEQ ID NO: 65993 - protein, 37 aa, Artificial Sequence; identical to SEQ ID NO: 7017
  GFR-binding peptide
  MOD_RES (1), (2), (34), (36): Xaa is C or S

SEQ ID NO: 65994 - protein, 36 aa, Artificial Sequence; identical to SEQ ID NO: 7018
  GFR-binding peptide
  MOD_RES (2), (3), (36): Xaa is C or S

SEQ ID NO: 65995 - protein, 35 aa, Artificial Sequence
  GFR-binding peptide
  MOD_RES (1), (2), (33), (35): Xaa is C or S
XXAPVKTSPISMLYKDNGRVLLLKYHYMIVEEXGX

SEQ ID NO: 65996 - protein, 38 aa, Artificial Sequence
  GFR-binding peptide
  MOD_RES (2), (3), (37): Xaa is C or S
  MOD_RES (17), (18), (19), (20), (21): Xaa is A or G
  MOD_RES (22), (23), (24), (25): Xaa is A or G or is absent
SXXVPARLSATSILYYXXXXXXXXXLRKHRDMVVEAXG

SEQ ID NO: 65997 - protein, 38 aa, Artificial Sequence; identical to SEQ ID NO: 33279
  GFR-binding peptide
  MOD_RES (3), (4), (36), (38): Xaa is C or S

SEQ ID NO: 65998 - protein, 37 aa, Artificial Sequence; identical to SEQ ID NO: 33280
  GFR-binding peptide
  MOD_RES (6), (7): Xaa is C or S

SEQ ID NO: 65999 - protein, 36 aa, Artificial Sequence; identical to SEQ ID NO: 7022
  GFR-binding peptide
  MOD_RES (34), (36): Xaa is C or S
  MOD_RES (14), (15), (16), (17), (18): Xaa is A or G
  MOD_RES (19), (20), (21), (22): Xaa is A or G or is absent

SEQ ID NO: 66000 - protein, 34 aa, Artificial Sequence
  GFR-binding peptide
  MOD_RES (1), (2), (34): Xaa is C or S
XXVPTRLSPISILYKDSANNVVLKYHYDMVVESX

SEQ ID NO: 66001 - protein, 35 aa, Artificial Sequence
  GFR-binding peptide
  MOD_RES (34), (34): Xaa is C or S
  MOD_RES (14), (15), (16), (17), (18): Xaa is A or G
  MOD_RES (19), (20), (21), (22): Xaa is A or G or is absent
VPEKMNAISILYFXXXXXXXXXLKKYRNMTVESXA

SEQ ID NO: 66002 - protein, 38 aa, Artificial Sequence; identical to SEQ ID NO: 7030
  GFR-binding peptide
  MOD_RES (4), (5): Xaa is C or S
  MOD_RES (19), (20), (21), (22), (23): Xaa is A or G
  MOD_RES (24), (25), (26), (27): Xaa is A or G or is absent

SEQ ID NO: 66003 - protein, 33 aa, Artificial Sequence
  GFR-binding peptide
  MOD_RES (14), (15), (16), (17), (18): Xaa is A or G
  MOD_RES (19), (20), (21), (22): Xaa is A or G or is absent
TPTKMSATSMLYYXXXXXXXXXLRKHRGMVVDR

SEQ ID NO: 66004 - protein, 34 aa, Artificial Sequence; identical to SEQ ID NO: 7036
  GFR-binding peptide
  MOD_RES (33), (33): Xaa is C or S
  MOD_RES (14), (15), (16), (17), (18): Xaa is A or G
  MOD_RES (19), (20), (21), (22): Xaa is A or G or is absent

SEQ ID NO: 66005 - protein, 36 aa, Artificial Sequence; identical to SEQ ID NO: 7038
  GFR-binding peptide
  MOD_RES (3), (4), (35): Xaa is C or S

SEQ ID NO: 66006 - protein, 38 aa, Artificial Sequence; identical to SEQ ID NO: 7039
  GFR-binding peptide
  MOD_RES (5), (6): Xaa is C or S

SEQ ID NO: 66007 - protein, 39 aa, Artificial Sequence; identical to SEQ ID NO: 33291
  GFR-binding peptide
  MOD_RES (5), (6), (38): Xaa is C or S

SEQ ID NO: 66008 - protein, 39 aa, Artificial Sequence; identical to SEQ ID NO: 33292
  GFR-binding peptide
  MOD_RES (5), (6): Xaa is C or S
  MOD_RES (20), (21), (22), (23), (24): Xaa is A or G
  MOD_RES (25), (26), (27), (28): Xaa is A or G or is absent

SEQ ID NO: 66009 - protein, 39 aa, Artificial Sequence; identical to SEQ ID NO: 28219
  GFR-binding peptide
  MOD_RES (4), (5), (38): Xaa is C or S
  MOD_RES (19), (20), (21), (22), (23): Xaa is A or G
  MOD_RES (24), (25), (26), (27): Xaa is A or G or is absent

SEQ ID NO: 66010 - protein, 37 aa, Artificial Sequence
  GFR-binding peptide
  MOD_RES (1), (2), (36): Xaa is C or S
  MOD_RES (16), (17), (18), (19), (20): Xaa is A or G
  MOD_RES (21), (22), (23), (24): Xaa is A or G or is absent
XXVPEKMSPISILYKXXXXXXXXXLKYHYNMTVESXA

SEQ ID NO: 66011 - protein, 39 aa, Artificial Sequence
  GFR-binding peptide
  MOD_RES (2), (3), (37), (39): Xaa is C or S
  MOD_RES (17), (18), (19), (20), (21): Xaa is A or G
  MOD_RES (22), (23), (24), (25): Xaa is A or G or is absent
TXXVPTRLSATSILYYXXXXXXXXXLRKHRDMVVESXGX

SEQ ID NO: 66012 - protein, 38 aa, Artificial Sequence; identical to SEQ ID NO: 28225
  GFR-binding peptide
  MOD_RES (2), (3), (36), (38): Xaa is C or S
  MOD_RES (17), (18), (19), (20), (21): Xaa is A or G
  MOD_RES (22), (23), (24), (25): Xaa is A or G or is absent

SEQ ID NO: 66013 - protein, 34 aa, Artificial Sequence; identical to SEQ ID NO: 28226
  GFR-binding peptide
  MOD_RES (31), (33): Xaa is C or S

SEQ ID NO: 66014 - protein, 43 aa, Artificial Sequence; identical to SEQ ID NO: 7048
  GFR-binding peptide
  MOD_RES (6), (7), (42): Xaa is C or S
  MOD_RES (21), (22), (23), (24), (25): Xaa is A or G
  MOD_RES (26), (27), (28), (29): Xaa is A or G or is absent

SEQ ID NO: 66015 - protein, 34 aa, Artificial Sequence; identical to SEQ ID NO: 7050
  GFR-binding peptide
  MOD_RES (1), (1): Xaa is C or S
  MOD_RES (15), (16), (17), (18), (19): Xaa is A or G
  MOD_RES (20), (21), (22), (23): Xaa is A or G or is absent

SEQ ID NO: 66016 - protein, 41 aa, Artificial Sequence; identical to SEQ ID NO: 7051
  GFR-binding peptide
  MOD_RES (6), (7), (40): Xaa is C or S
  MOD_RES (21), (22), (23), (24), (25): Xaa is A or G
  MOD_RES (26), (27), (28), (29): Xaa is A or G or is absent

SEQ ID NO: 66017 - protein, 32 aa, Artificial Sequence; identical to SEQ ID NO: 28230
  GFR-binding peptide
  MOD_RES (1), (1): Xaa is C or S

SEQ ID NO: 66018 - protein, 38 aa, Artificial Sequence
  GFR-binding peptide
  MOD_RES (2), (3), (35), (37): Xaa is C or S
PXXVPEKMSPINILYFDENKNVVYGKIPNMTVESXAXR

SEQ ID NO: 66019 - protein, 36 aa, Artificial Sequence; identical to SEQ ID NO: 58158
  GFR-binding peptide
  MOD_RES (1), (2), (36): Xaa is C or S
  MOD_RES (16), (17), (18), (19), (20): Xaa is A or G
  MOD_RES (21), (22), (23), (24): Xaa is A or G or is absent

SEQ ID NO: 66020 - protein, 35 aa, Artificial Sequence; identical to SEQ ID NO: 7052
  GFR-binding peptide
  MOD_RES (1), (2), (35): Xaa is C or S

SEQ ID NO: 66021 - protein, 40 aa, Artificial Sequence; identical to SEQ ID NO: 7053
  GFR-binding peptide
  MOD_RES (5), (6), (38), (40): Xaa is C or S

SEQ ID NO: 66022 - protein, 38 aa, Artificial Sequence
  GFR-binding peptide
  MOD_RES (4), (5), (37): Xaa is C or S
PPTXXVPTRLSATSILYYDSANNVVLRKHRDMVVESXG

SEQ ID NO: 66023 - protein, 41 aa, Artificial Sequence
  GFR-binding peptide
  MOD_RES (5), (6), (40): Xaa is C or S
  MOD_RES (20), (21), (22), (23), (24): Xaa is A or G
  MOD_RES (25), (26), (27), (28): Xaa is A or G or is absent
TPPTXXVPTRLEPISILYLXXXXXXXXXKFKYEDMVVESXG

SEQ ID NO: 66024 - protein, 35 aa, Artificial Sequence; identical to SEQ ID NO: 33309
  GFR-binding peptide
  MOD_RES (1), (32), (34): Xaa is C or S

SEQ ID NO: 66025 - protein, 40 aa, Artificial Sequence; identical to SEQ ID NO: 28241
  GFR-binding peptide
  MOD_RES (3), (4), (37), (39): Xaa is C or S
  MOD_RES (18), (19), (20), (21), (22): Xaa is A or G
  MOD_RES (23), (24), (25), (26): Xaa is A or G or is absent

SEQ ID NO: 66026 - protein, 40 aa, Artificial Sequence
  GFR-binding peptide
  MOD_RES (5), (6), (40): Xaa is C or S
  MOD_RES (20), (21), (22), (23), (24): Xaa is A or G
  MOD_RES (25), (26), (27), (28): Xaa is A or G or is absent
IPEPXXVPEKMSPINILYFXXXXXXXXXYGKIPNMTVESX

SEQ ID NO: 66027 - protein, 39 aa, Artificial Sequence; identical to SEQ ID NO: 33316
  GFR-binding peptide
  MOD_RES (5), (6), (38): Xaa is C or S

SEQ ID NO: 66028 - protein, 31 aa, Artificial Sequence
  GFR-binding peptide
TPTKMSATSMLYYNDKQQIILRKHRGMVVDR

SEQ ID NO: 66029 - protein, 36 aa, Artificial Sequence; identical to SEQ ID NO: 7062
  GFR-binding peptide
  MOD_RES (5), (6): Xaa is C or S

SEQ ID NO: 66030 - protein, 42 aa, Artificial Sequence; identical to SEQ ID NO: 7063
  GFR-binding peptide
  MOD_RES (6), (7), (39), (41): Xaa is C or S

SEQ ID NO: 66031 - protein, 38 aa, Artificial Sequence
  GFR-binding peptide
  MOD_RES (2), (3), (37): Xaa is C or S
  MOD_RES (17), (18), (19), (20), (21): Xaa is A or G
  MOD_RES (22), (23), (24), (25): Xaa is A or G or is absent
PXXVPEKMEPISILYLXXXXXXXXXKFKYENMTVESXA

SEQ ID NO: 66032 - protein, 35 aa, Artificial Sequence; identical to SEQ ID NO: 7072
  GFR-binding peptide
  MOD_RES (1), (2): Xaa is C or S
  MOD_RES (16), (17), (18), (19), (20): Xaa is A or G
  MOD_RES (21), (22), (23), (24): Xaa is A or G or is absent

SEQ ID NO: 66033 - protein, 36 aa, Artificial Sequence; identical to SEQ ID NO: 33320
  GFR-binding peptide
  MOD_RES (34), (36): Xaa is C or S
  MOD_RES (14), (15), (16), (17), (18): Xaa is A or G
  MOD_RES (19), (20), (21), (22): Xaa is A or G or is absent

SEQ ID NO: 66034 - protein, 38 aa, Artificial Sequence; identical to SEQ ID NO: 7075
  GFR-binding peptide
  MOD_RES (6), (7), (38): Xaa is C or S

SEQ ID NO: 66035 - protein, 33 aa, Artificial Sequence; identical to SEQ ID NO: 58172
  GFR-binding peptide
  MOD_RES (1), (1): Xaa is C or S
  MOD_RES (15), (16), (17), (18), (19): Xaa is A or G
  MOD_RES (20), (21), (22), (23): Xaa is A or G or is absent

SEQ ID NO: 66036 - protein, 38 aa, Artificial Sequence
  GFR-binding peptide
  MOD_RES (3), (4), (37): Xaa is C or S
  MOD_RES (18), (19), (20), (21), (22): Xaa is A or G
  MOD_RES (23), (24), (25), (26): Xaa is A or G or is absent
STXXAPVKTSPISMLYKXXXXXXXXXLKYHYMIVEEXG

SEQ ID NO: 66037 - protein, 35 aa, Artificial Sequence; identical to SEQ ID NO: 33328
  GFR-binding peptide
  MOD_RES (2), (3): Xaa is C or S
  MOD_RES (17), (18), (19), (20), (21): Xaa is A or G
  MOD_RES (22), (23), (24), (25): Xaa is A or G or is absent

SEQ ID NO: 66038 - protein, 39 aa, Artificial Sequence; identical to SEQ ID NO: 28254
  GFR-binding peptide
  MOD_RES (4), (5), (38): Xaa is C or S
  MOD_RES (19), (20), (21), (22), (23): Xaa is A or G
  MOD_RES (24), (25), (26), (27): Xaa is A or G or is absent

SEQ ID NO: 66039 - protein, 37 aa, Artificial Sequence; identical to SEQ ID NO: 58174
  GFR-binding peptide
  MOD_RES (1), (2), (35), (37): Xaa is C or S
  MOD_RES (16), (17), (18), (19), (20): Xaa is A or G
  MOD_RES (21), (22), (23), (24): Xaa is A or G or is absent

SEQ ID NO: 66040 - protein, 41 aa, Artificial Sequence; identical to SEQ ID NO: 7078
  GFR-binding peptide
  MOD_RES (6), (7), (40): Xaa is C or S
  MOD_RES (21), (22), (23), (24), (25): Xaa is A or G
  MOD_RES (26), (27), (28), (29): Xaa is A or G or is absent

SEQ ID NO: 66041 - protein, 40 aa, Artificial Sequence; identical to SEQ ID NO: 7079
  GFR-binding peptide
  MOD_RES (2), (3), (37), (39): Xaa is C or S
  MOD_RES (17), (18), (19), (20), (21): Xaa is A or G
  MOD_RES (22), (23), (24), (25): Xaa is A or G or is absent

SEQ ID NO: 66042 - protein, 31 aa, Artificial Sequence; identical to SEQ ID NO: 33329
  GFR-binding peptide

SEQ ID NO: 66043 - protein, 33 aa, Artificial Sequence; identical to SEQ ID NO: 7082
  GFR-binding peptide
  MOD_RES (2), (3): Xaa is C or S

SEQ ID NO: 66044 - protein, 36 aa, Artificial Sequence; identical to SEQ ID NO: 33333
  GFR-binding peptide
  MOD_RES (34), (36): Xaa is C or S
  MOD_RES (14), (15), (16), (17), (18): Xaa is A or G
  MOD_RES (19), (20), (21), (22): Xaa is A or G or is absent

SEQ ID NO: 66045 - protein, 32 aa, Artificial Sequence; identical to SEQ ID NO: 7085
  GFR-binding peptide
  MOD_RES (32), (32): Xaa is C or S

SEQ ID NO: 66046 - protein, 41 aa, Artificial Sequence; identical to SEQ ID NO: 7086
  GFR-binding peptide
  MOD_RES (4), (5), (39), (41): Xaa is C or S
  MOD_RES (19), (20), (21), (22), (23): Xaa is A or G
  MOD_RES (24), (25), (26), (27): Xaa is A or G or is absent

SEQ ID NO: 66047 - protein, 38 aa, Artificial Sequence; identical to SEQ ID NO: 33339
  GFR-binding peptide
  MOD_RES (6), (7), (38): Xaa is C or S

SEQ ID NO: 66048 - protein, 42 aa, Artificial Sequence; identical to SEQ ID NO: 28267
  GFR-binding peptide
  MOD_RES (3), (4), (39), (41): Xaa is C or S
  MOD_RES (18), (19), (20), (21), (22): Xaa is A or G
  MOD_RES (23), (24), (25), (26): Xaa is A or G or is absent

SEQ ID NO: 66049 - protein, 32 aa, Artificial Sequence; identical to SEQ ID NO: 7092
  GFR-binding peptide
  MOD_RES (31), (31): Xaa is C or S

SEQ ID NO: 66050 - protein, 36 aa, Artificial Sequence; identical to SEQ ID NO: 7093
  GFR-binding peptide
  MOD_RES (3), (4), (36): Xaa is C or S

SEQ ID NO: 66051 - protein, 37 aa, Artificial Sequence; identical to SEQ ID NO: 7095
  GFR-binding peptide
  MOD_RES (1), (35), (37): Xaa is C or S
  MOD_RES (15), (16), (17), (18), (19): Xaa is A or G
  MOD_RES (20), (21), (22), (23): Xaa is A or G or is absent

SEQ ID NO: 66052 - protein, 35 aa, Artificial Sequence; identical to SEQ ID NO: 33344
  GFR-binding peptide
  MOD_RES (34), (34): Xaa is C or S
  MOD_RES (14), (15), (16), (17), (18): Xaa is A or G
  MOD_RES (19), (20), (21), (22): Xaa is A or G or is absent

SEQ ID NO: 66053 - protein, 32 aa, Artificial Sequence; identical to SEQ ID NO: 28274
  GFR-binding peptide
  MOD_RES (31), (31): Xaa is C or S

SEQ ID NO: 66054 - protein, 40 aa, Artificial Sequence; identical to SEQ ID NO: 7097
  GFR-binding peptide
  MOD_RES (5), (6), (40): Xaa is C or S
  MOD_RES (20), (21), (22), (23), (24): Xaa is A or G
  MOD_RES (25), (26), (27), (28): Xaa is A or G or is absent

SEQ ID NO: 66055 - protein, 37 aa, Artificial Sequence
  GFR-binding peptide
  MOD_RES (4), (5), (37): Xaa is C or S
PPTXXVPTRLEPISILYLDSANNVVKFKYEDMVVESX

SEQ ID NO: 66056 - protein, 37 aa, Artificial Sequence; identical to SEQ ID NO: 28276
  GFR-binding peptide
  MOD_RES (1), (2), (37): Xaa is C or S
  MOD_RES (16), (17), (18), (19), (20): Xaa is A or G
  MOD_RES (21), (22), (23), (24): Xaa is A or G or is absent

SEQ ID NO: 66057 - protein, 36 aa, Artificial Sequence
  GFR-binding peptide
  MOD_RES (1), (2), (35): Xaa is C or S
  MOD_RES (16), (17), (18), (19), (20): Xaa is A or G
  MOD_RES (21), (22), (23), (24): Xaa is A or G or is absent
XXVSQDLSPINILYFXXXXXXXXXYGKIPMIVKSXK

SEQ ID NO: 66058 - protein, 38 aa, Artificial Sequence; identical to SEQ ID NO: 33353
  GFR-binding peptide
  MOD_RES (5), (6): Xaa is C or S
  MOD_RES (20), (21), (22), (23), (24): Xaa is A or G
  MOD_RES (25), (26), (27), (28): Xaa is A or G or is absent

SEQ ID NO: 66059 - protein, 31 aa, Artificial Sequence; identical to SEQ ID NO: 58197
  GFR-binding peptide
  MOD_RES (1), (1): Xaa is C or S

SEQ ID NO: 66060 - protein, 36 aa, Artificial Sequence; identical to SEQ ID NO: 28281
  GFR-binding peptide
  MOD_RES (2), (3), (35): Xaa is C or S

SEQ ID NO: 66061 - protein, 38 aa, Artificial Sequence; identical to SEQ ID NO: 7104
  GFR-binding peptide
  MOD_RES (1), (2), (36), (38): Xaa is C or S
  MOD_RES (16), (17), (18), (19), (20): Xaa is A or G
  MOD_RES (21), (22), (23), (24): Xaa is A or G or is absent

SEQ ID NO: 66062 - protein, 32 aa, Artificial Sequence
  GFR-binding peptide
  MOD_RES (1), (1): Xaa is C or S
XVPTRLSATSILYYDSANNVVLRKHRDMVVES

SEQ ID NO: 66063 - protein, 33 aa, Artificial Sequence; identical to SEQ ID NO: 7105
  GFR-binding peptide
  MOD_RES (14), (15), (16), (17), (18): Xaa is A or G
  MOD_RES (19), (20), (21), (22): Xaa is A or G or is absent

SEQ ID NO: 66064 - protein, 39 aa, Artificial Sequence; identical to SEQ ID NO: 7107
  GFR-binding peptide
  MOD_RES (6), (7), (39): Xaa is C or S

SEQ ID NO: 66065 - protein, 40 aa, Artificial Sequence; identical to SEQ ID NO: 32305
  GFR-binding peptide
  MOD_RES (3), (4), (38), (40): Xaa is C or S
  MOD_RES (18), (19), (20), (21), (22): Xaa is A or G
  MOD_RES (23), (24), (25), (26): Xaa is A or G or is absent

SEQ ID NO: 66066 - protein, 39 aa, Artificial Sequence
  GFR-binding peptide
  MOD_RES (3), (4), (36), (38): Xaa is C or S
ASXXVPARLSATSILYYDAANNVVLRKHRDMVVEAXGXR

SEQ ID NO: 66067 - protein, 35 aa, Artificial Sequence; identical to SEQ ID NO: 32307
  GFR-binding peptide
  MOD_RES (3), (4): Xaa is C or S

SEQ ID NO: 66068 - protein, 39 aa, Artificial Sequence; identical to SEQ ID NO: 32309
  GFR-binding peptide
  MOD_RES (3), (4), (36), (38): Xaa is C or S

SEQ ID NO: 66069 - protein, 41 aa, Artificial Sequence; identical to SEQ ID NO: 7111
  GFR-binding peptide
  MOD_RES (6), (7), (40): Xaa is C or S
  MOD_RES (21), (22), (23), (24), (25): Xaa is A or G
  MOD_RES (26), (27), (28), (29): Xaa is A or G or is absent

SEQ ID NO: 66070 - protein, 30 aa, Artificial Sequence
  GFR-binding peptide
VPQALSPINILYFVGRKPKVYGKIPMIVRS

SEQ ID NO: 66071 - protein, 34 aa, Artificial Sequence; identical to SEQ ID NO: 7113
  GFR-binding peptide
  MOD_RES (3), (4): Xaa is C or S

SEQ ID NO: 66072 - protein, 37 aa, Artificial Sequence; identical to SEQ ID NO: 7114
  GFR-binding peptide
  MOD_RES (1), (2), (35), (37): Xaa is C or S
  MOD_RES (16), (17), (18), (19), (20): Xaa is A or G
  MOD_RES (21), (22), (23), (24): Xaa is A or G or is absent

SEQ ID NO: 66073 - protein, 40 aa, Artificial Sequence; identical to SEQ ID NO: 32315
  GFR-binding peptide
  MOD_RES (7), (7): Xaa is C or S
  MOD_RES (21), (22), (23), (24), (25): Xaa is A or G
  MOD_RES (26), (27), (28), (29): Xaa is A or G or is absent

SEQ ID NO: 66074 - protein, 35 aa, Artificial Sequence; identical to SEQ ID NO: 7115
  GFR-binding peptide
  MOD_RES (1), (2), (33), (35): Xaa is C or S

SEQ ID NO: 66075 - protein, 39 aa, Artificial Sequence; identical to SEQ ID NO: 7116
  GFR-binding peptide
  MOD_RES (4), (5), (39): Xaa is C or S
  MOD_RES (19), (20), (21), (22), (23): Xaa is A or G
  MOD_RES (24), (25), (26), (27): Xaa is A or G or is absent

SEQ ID NO: 66076 - protein, 34 aa, Artificial Sequence; identical to SEQ ID NO: 32317
  GFR-binding peptide
  MOD_RES (1), (33): Xaa is C or S

SEQ ID NO: 66077 - protein, 41 aa, Artificial Sequence; identical to SEQ ID NO: 32318
  GFR-binding peptide
  MOD_RES (4), (5), (39), (41): Xaa is C or S
  MOD_RES (19), (20), (21), (22), (23): Xaa is A or G
  MOD_RES (24), (25), (26), (27): Xaa is A or G or is absent

SEQ ID NO: 66078 - protein, 32 aa, Artificial Sequence; identical to SEQ ID NO: 7120
  GFR-binding peptide
  MOD_RES (32), (32): Xaa is C or S

SEQ ID NO: 66079 - protein, 42 aa, Artificial Sequence; identical to SEQ ID NO: 7122
  GFR-binding peptide
  MOD_RES (4), (5), (39), (41): Xaa is C or S
  MOD_RES (19), (20), (21), (22), (23): Xaa is A or G
  MOD_RES (24), (25), (26), (27): Xaa is A or G or is absent

SEQ ID NO: 66080 - protein, 36 aa, Artificial Sequence; identical to SEQ ID NO: 7125
  GFR-binding peptide
  MOD_RES (1), (2), (36): Xaa is C or S
  MOD_RES (16), (17), (18), (19), (20): Xaa is A or G
  MOD_RES (21), (22), (23), (24): Xaa is A or G or is absent

SEQ ID NO: 66081 - protein, 39 aa, Artificial Sequence; identical to SEQ ID NO: 28304
  GFR-binding peptide
  MOD_RES (1), (2), (36), (38): Xaa is C or S
  MOD_RES (16), (17), (18), (19), (20): Xaa is A or G
  MOD_RES (21), (22), (23), (24): Xaa is A or G or is absent

SEQ ID NO: 66082 - protein, 37 aa, Artificial Sequence; identical to SEQ ID NO: 32327
  GFR-binding peptide
  MOD_RES (4), (5): Xaa is C or S
  MOD_RES (19), (20), (21), (22), (23): Xaa is A or G
  MOD_RES (24), (25), (26), (27): Xaa is A or G or is absent

SEQ ID NO: 66083 - protein, 39 aa, Artificial Sequence
  GFR-binding peptide
  MOD_RES (1), (2), (36), (38): Xaa is C or S
  MOD_RES (16), (17), (18), (19), (20): Xaa is A or G
  MOD_RES (21), (22), (23), (24): Xaa is A or G or is absent
XXTPTKMSPISMLYKXXXXXXXXXLKYHYGMVVDRXGXS

SEQ ID NO: 66084 - protein, 35 aa, Artificial Sequence; identical to SEQ ID NO: 7128
  GFR-binding peptide
  MOD_RES (34), (34): Xaa is C or S
  MOD_RES (14), (15), (16), (17), (18): Xaa is A or G
  MOD_RES (19), (20), (21), (22): Xaa is A or G or is absent

SEQ ID NO: 66085 - protein, 41 aa, Artificial Sequence; identical to SEQ ID NO: 7129
  GFR-binding peptide
  MOD_RES (4), (5), (39), (41): Xaa is C or S
  MOD_RES (19), (20), (21), (22), (23): Xaa is A or G
  MOD_RES (24), (25), (26), (27): Xaa is A or G or is absent

SEQ ID NO: 66086 - protein, 34 aa, Artificial Sequence; identical to SEQ ID NO: 28308
  GFR-binding peptide
  MOD_RES (4), (4): Xaa is C or S

SEQ ID NO: 66087 - protein, 37 aa, Artificial Sequence
  GFR-binding peptide
  MOD_RES (3), (4), (36): Xaa is C or S
GPXXTPTKMEPISMLYLNDKQQIIKFKYEGMVVDRXG

SEQ ID NO: 66088 - protein, 32 aa, Artificial Sequence; identical to SEQ ID NO: 7133
  GFR-binding peptide
  MOD_RES (14), (15), (16), (17), (18): Xaa is A or G
  MOD_RES (19), (20), (21), (22): Xaa is A or G or is absent

SEQ ID NO: 66089 - protein, 37 aa, Artificial Sequence; identical to SEQ ID NO: 57267
  GFR-binding peptide
  MOD_RES (3), (4), (36): Xaa is C or S

SEQ ID NO: 66090 - protein, 30 aa, Artificial Sequence; identical to SEQ ID NO: 28317
  GFR-binding peptide

SEQ ID NO: 66091 - protein, 41 aa, Artificial Sequence; identical to SEQ ID NO: 7137
  GFR-binding peptide
  MOD_RES (3), (4), (38), (40): Xaa is C or S
  MOD_RES (18), (19), (20), (21), (22): Xaa is A or G
  MOD_RES (23), (24), (25), (26): Xaa is A or G or is absent

SEQ ID NO: 66092 - protein, 33 aa, Artificial Sequence; identical to SEQ ID NO: 28319
  GFR-binding peptide
  MOD_RES (1), (2), (33): Xaa is C or S

SEQ ID NO: 66093 - protein, 39 aa, Artificial Sequence
  GFR-binding peptide
  MOD_RES (6), (7): Xaa is C or S
  MOD_RES (21), (22), (23), (24), (25): Xaa is A or G
  MOD_RES (26), (27), (28), (29): Xaa is A or G or is absent
GIPEPXXVPEKMSPISILYKXXXXXXXXXLKYHYNMTVE

SEQ ID NO: 66094 - protein, 44 aa, Artificial Sequence; identical to SEQ ID NO: 32339
  GFR-binding peptide
  MOD_RES (6), (7), (41), (43): Xaa is C or S
  MOD_RES (21), (22), (23), (24), (25): Xaa is A or G
  MOD_RES (26), (27), (28), (29): Xaa is A or G or is absent

SEQ ID NO: 66095 - protein, 43 aa, Artificial Sequence; identical to SEQ ID NO: 7143
  GFR-binding peptide
  MOD_RES (6), (7), (41), (43): Xaa is C or S
  MOD_RES (21), (22), (23), (24), (25): Xaa is A or G
  MOD_RES (26), (27), (28), (29): Xaa is A or G or is absent

SEQ ID NO: 66096 - protein, 37 aa, Artificial Sequence; identical to SEQ ID NO: 7144
  GFR-binding peptide
  MOD_RES (5), (6): Xaa is C or S

SEQ ID NO: 66097 - protein, 33 aa, Artificial Sequence
  GFR-binding peptide
  MOD_RES (14), (15), (16), (17), (18): Xaa is A or G
  MOD_RES (19), (20), (21), (22): Xaa is A or G or is absent
VPEKMEPISILYLXXXXXXXXXKFKYENMTVES

SEQ ID NO: 66098 - protein, 35 aa, Artificial Sequence; identical to SEQ ID NO: 28325
  GFR-binding peptide
  MOD_RES (2), (3): Xaa is C or S
  MOD_RES (17), (18), (19), (20), (21): Xaa is A or G
  MOD_RES (22), (23), (24), (25): Xaa is A or G or is absent

SEQ ID NO: 66099 - protein, 34 aa, Artificial Sequence; identical to SEQ ID NO: 32349
  GFR-binding peptide
  MOD_RES (1), (32), (34): Xaa is C or S

SEQ ID NO: 66100 - protein, 30 aa, Artificial Sequence; identical to SEQ ID NO: 7149
  GFR-binding peptide

SEQ ID NO: 66101 - protein, 38 aa, Artificial Sequence
  GFR-binding peptide
  MOD_RES (6), (7), (38): Xaa is C or S
ASASPXXVPQDLSPINILYFVGRTPKVYGKIPMVVKSX

SEQ ID NO: 66102 - protein, 37 aa, Artificial Sequence
  GFR-binding peptide
  MOD_RES (3), (4), (36): Xaa is C or S
EPXXVPEKMSATSILYYDENKNVVLRKHRNMTVESXA

SEQ ID NO: 66103 - protein, 38 aa, Artificial Sequence; identical to SEQ ID NO: 28332
  GFR-binding peptide
  MOD_RES (2), (3), (37): Xaa is C or S
  MOD_RES (17), (18), (19), (20), (21): Xaa is A or G
  MOD_RES (22), (23), (24), (25): Xaa is A or G or is absent

SEQ ID NO: 66104 - protein, 38 aa, Artificial Sequence; identical to SEQ ID NO: 7153
  GFR-binding peptide
  MOD_RES (2), (3), (37): Xaa is C or S
  MOD_RES (17), (18), (19), (20), (21): Xaa is A or G
  MOD_RES (22), (23), (24), (25): Xaa is A or G or is absent

SEQ ID NO: 66105 - protein, 38 aa, Artificial Sequence; identical to SEQ ID NO: 28334
  GFR-binding peptide
  MOD_RES (5), (6), (37): Xaa is C or S

SEQ ID NO: 66106 - protein, 40 aa, Artificial Sequence; identical to SEQ ID NO: 7156
  GFR-binding peptide
  MOD_RES (4), (5), (38), (40): Xaa is C or S
  MOD_RES (19), (20), (21), (22), (23): Xaa is A or G
  MOD_RES (24), (25), (26), (27): Xaa is A or G or is absent

SEQ ID NO: 66107 - protein, 33 aa, Artificial Sequence
  GFR-binding peptide
  MOD_RES (1), (2): Xaa is C or S
XXTPTKMEPISMLYLNDKQQIIKFKYEGMVVDR

SEQ ID NO: 66108 - protein, 40 aa, Artificial Sequence; identical to SEQ ID NO: 7160
  GFR-binding peptide
  MOD_RES (3), (4), (37), (39): Xaa is C or S
  MOD_RES (18), (19), (20), (21), (22): Xaa is A or G
  MOD_RES (23), (24), (25), (26): Xaa is A or G or is absent

SEQ ID NO: 66109 - protein, 35 aa, Artificial Sequence; identical to SEQ ID NO: 28340
  GFR-binding peptide
  MOD_RES (1), (2): Xaa is C or S
  MOD_RES (16), (17), (18), (19), (20): Xaa is A or G
  MOD_RES (21), (22), (23), (24): Xaa is A or G or is absent

SEQ ID NO: 66110 - protein, 35 aa, Artificial Sequence
  GFR-binding peptide
  MOD_RES (1), (35): Xaa is C or S
  MOD_RES (15), (16), (17), (18), (19): Xaa is A or G
  MOD_RES (20), (21), (22), (23): Xaa is A or G or is absent
XVPEKMEPISILYLXXXXXXXXXKFKYENMTVESX

SEQ ID NO: 66111 - protein, 40 aa, Artificial Sequence
  GFR-binding peptide
  MOD_RES (4), (5), (39): Xaa is C or S
  MOD_RES (19), (20), (21), (22), (23): Xaa is A or G
  MOD_RES (24), (25), (26), (27): Xaa is A or G or is absent
AGPXXTPTKMSATSMLYYXXXXXXXXXLRKHRGMVVDRXG

SEQ ID NO: 66112 - protein, 41 aa, Artificial Sequence; identical to SEQ ID NO: 7162
  GFR-binding peptide
  MOD_RES (6), (7), (38), (40): Xaa is C or S

SEQ ID NO: 66113 - protein, 42 aa, Artificial Sequence; identical to SEQ ID NO: 32362
  GFR-binding peptide
  MOD_RES (4), (5), (39), (41): Xaa is C or S
  MOD_RES (19), (20), (21), (22), (23): Xaa is A or G
  MOD_RES (24), (25), (26), (27): Xaa is A or G or is absent

SEQ ID NO: 66114 - protein, 41 aa, Artificial Sequence; identical to SEQ ID NO: 7165
  GFR-binding peptide
  MOD_RES (6), (7): Xaa is C or S
  MOD_RES (21), (22), (23), (24), (25): Xaa is A or G
  MOD_RES (26), (27), (28), (29): Xaa is A or G or is absent

SEQ ID NO: 66115 - protein, 36 aa, Artificial Sequence; identical to SEQ ID NO: 7166
  GFR-binding peptide
  MOD_RES (1), (35): Xaa is C or S
  MOD_RES (15), (16), (17), (18), (19): Xaa is A or G
  MOD_RES (20), (21), (22), (23): Xaa is A or G or is absent

SEQ ID NO: 66116 - protein, 41 aa, Artificial Sequence; identical to SEQ ID NO: 7167
  GFR-binding peptide
  MOD_RES (4), (38), (40): Xaa is C or S
  MOD_RES (18), (19), (20), (21), (22): Xaa is A or G
  MOD_RES (23), (24), (25), (26): Xaa is A or G or is absent

SEQ ID NO: 66117 - protein, 35 aa, Artificial Sequence; identical to SEQ ID NO: 57296
  GFR-binding peptide
  MOD_RES (1), (2), (35): Xaa is C or S
  MOD_RES (16), (17), (18), (19), (20): Xaa is A or G
  MOD_RES (21), (22), (23), (24): Xaa is A or G or is absent

SEQ ID NO: 66118 - protein, 39 aa, Artificial Sequence
  GFR-binding peptide
  MOD_RES (6), (7): Xaa is C or S
  MOD_RES (21), (22), (23), (24), (25): Xaa is A or G
  MOD_RES (26), (27), (28), (29): Xaa is A or G or is absent
GIPEPXXVPEKMEPISILYLXXXXXXXXXKFKYENMTVE

SEQ ID NO: 66119 - protein, 37 aa, Artificial Sequence; identical to SEQ ID NO: 7170
  GFR-binding peptide
  MOD_RES (2), (3), (36): Xaa is C or S
  MOD_RES (17), (18), (19), (20), (21): Xaa is A or G
  MOD_RES (22), (23), (24), (25): Xaa is A or G or is absent

SEQ ID NO: 66120 - protein, 32 aa, Artificial Sequence; identical to SEQ ID NO: 32370
  GFR-binding peptide
  MOD_RES (1), (1): Xaa is C or S

SEQ ID NO: 66121 - protein, 41 aa, Artificial Sequence
  GFR-binding peptide
  MOD_RES (6), (7), (39), (41): Xaa is C or S
HVPKPXXAPTKLEPISVLYLDDSSNVIKFKYENMVVRSXGX

SEQ ID NO: 66122 - protein, 41 aa, Artificial Sequence
  GFR-binding peptide
  MOD_RES (5), (6), (39), (41): Xaa is C or S
  MOD_RES (20), (21), (22), (23), (24): Xaa is A or G
  MOD_RES (25), (26), (27), (28): Xaa is A or G or is absent
SASPXXVPQDLSPINILYFXXXXXXXXXYGKIPMVVKSXKX

SEQ ID NO: 66123 - protein, 37 aa, Artificial Sequence; identical to SEQ ID NO: 7171
  GFR-binding peptide
  MOD_RES (5), (6), (37): Xaa is C or S

SEQ ID NO: 66124 - protein, 35 aa, Artificial Sequence; identical to SEQ ID NO: 28344
  GFR-binding peptide
  MOD_RES (2), (3), (35): Xaa is C or S

SEQ ID NO: 66125 - protein, 35 aa, Artificial Sequence; identical to SEQ ID NO: 32378
  GFR-binding peptide
  MOD_RES (32), (34): Xaa is C or S

SEQ ID NO: 66126 - protein, 34 aa, Artificial Sequence
  GFR-binding peptide
  MOD_RES (3), (4): Xaa is C or S
GPXXTPTKMEPISMLYLNDKQQIIKFKYEGMVVD

SEQ ID NO: 66127 - protein, 35 aa, Artificial Sequence; identical to SEQ ID NO: 28346
  GFR-binding peptide
  MOD_RES (1), (2): Xaa is C or S
  MOD_RES (16), (17), (18), (19), (20): Xaa is A or G
  MOD_RES (21), (22), (23), (24): Xaa is A or G or is absent

SEQ ID NO: 66128 - protein, 35 aa, Artificial Sequence
  GFR-binding peptide
  MOD_RES (2), (3), (35): Xaa is C or S
SXXVPARLSATSILYYDAANNVVLRKHRDMVVEAX

SEQ ID NO: 66129 - protein, 36 aa, Artificial Sequence
  GFR-binding peptide
  MOD_RES (2), (3), (36): Xaa is C or S
  MOD_RES (17), (18), (19), (20), (21): Xaa is A or G
  MOD_RES (22), (23), (24), (25): Xaa is A or G or is absent
TXXAPVKTSATSMLYYXXXXXXXXXLRKHRMIVEEX

SEQ ID NO: 66130 - protein, 42 aa, Artificial Sequence; identical to SEQ ID NO: 7177
  GFR-binding peptide
  MOD_RES (4), (5), (39), (41): Xaa is C or S
  MOD_RES (19), (20), (21), (22), (23): Xaa is A or G
  MOD_RES (24), (25), (26), (27): Xaa is A or G or is absent

SEQ ID NO: 66131 - protein, 41 aa, Artificial Sequence; identical to SEQ ID NO: 32383
  GFR-binding peptide
  MOD_RES (6), (7), (39), (41): Xaa is C or S

SEQ ID NO: 66132 - protein, 38 aa, Artificial Sequence; identical to SEQ ID NO: 32385
  GFR-binding peptide
  MOD_RES (1), (2), (36), (38): Xaa is C or S
  MOD_RES (16), (17), (18), (19), (20): Xaa is A or G
  MOD_RES (21), (22), (23), (24): Xaa is A or G or is absent

SEQ ID NO: 66133 - protein, 36 aa, Artificial Sequence; identical to SEQ ID NO: 7182
  GFR-binding peptide
  MOD_RES (2), (3), (35): Xaa is C or S

SEQ ID NO: 66134 - protein, 36 aa, Artificial Sequence
  GFR-binding peptide
  MOD_RES (1), (2), (34), (36): Xaa is C or S
XXVPTRLSPISILYKDSANNVVLKYHYDMVVESXGX

SEQ ID NO: 66135 - protein, 38 aa, Artificial Sequence; identical to SEQ ID NO: 7184
  GFR-binding peptide
  MOD_RES (1), (2), (35), (37): Xaa is C or S
  MOD_RES (16), (17), (18), (19), (20): Xaa is A or G
  MOD_RES (21), (22), (23), (24): Xaa is A or G or is absent

SEQ ID NO: 66136 - protein, 37 aa, Artificial Sequence; identical to SEQ ID NO: 32387
  GFR-binding peptide
  MOD_RES (3), (4), (37): Xaa is C or S
  MOD_RES (18), (19), (20), (21), (22): Xaa is A or G
  MOD_RES (23), (24), (25), (26): Xaa is A or G or is absent

SEQ ID NO: 66137 - protein, 31 aa, Artificial Sequence; identical to SEQ ID NO: 7186
  GFR-binding peptide
  MOD_RES (1), (1): Xaa is C or S

SEQ ID NO: 66138 - protein, 35 aa, Artificial Sequence; identical to SEQ ID NO: 28352
  GFR-binding peptide
  MOD_RES (4), (5): Xaa is C or S

SEQ ID NO: 66139 - protein, 41 aa, Artificial Sequence; identical to SEQ ID NO: 32389
  GFR-binding peptide
  MOD_RES (4), (38), (40): Xaa is C or S
  MOD_RES (18), (19), (20), (21), (22): Xaa is A or G
  MOD_RES (23), (24), (25), (26): Xaa is A or G or is absent

SEQ ID NO: 66140 - protein, 37 aa, Artificial Sequence; identical to SEQ ID NO: 57314
  GFR-binding peptide
  MOD_RES (3), (4): Xaa is C or S
  MOD_RES (18), (19), (20), (21), (22): Xaa is A or G
  MOD_RES (23), (24), (25), (26): Xaa is A or G or is absent

SEQ ID NO: 66141 - protein, 39 aa, Artificial Sequence; identical to SEQ ID NO: 7188
  GFR-binding peptide
  MOD_RES (5), (6): Xaa is C or S
  MOD_RES (20), (21), (22), (23), (24): Xaa is A or G
  MOD_RES (25), (26), (27), (28): Xaa is A or G or is absent

SEQ ID NO: 66142 - protein, 42 aa, Artificial Sequence; identical to SEQ ID NO: 7191
  GFR-binding peptide
  MOD_RES (5), (6), (39), (41): Xaa is C or S
  MOD_RES (20), (21), (22), (23), (24): Xaa is A or G
  MOD_RES (25), (26), (27), (28): Xaa is A or G or is absent

SEQ ID NO: 66143 - protein, 31 aa, Artificial Sequence; identical to SEQ ID NO: 7192
  GFR-binding peptide

SEQ ID NO: 66144 - protein, 38 aa, Artificial Sequence
  GFR-binding peptide
  MOD_RES (4), (5), (36), (38): Xaa is C or S
ASPXXVSQDLSPINILYFIGKTPKIYGKIPMIVKSXKX

SEQ ID NO: 66145 - protein, 39 aa, Artificial Sequence
  GFR-binding peptide
  MOD_RES (5), (6): Xaa is C or S
  MOD_RES (20), (21), (22), (23), (24): Xaa is A or G
  MOD_RES (25), (26), (27), (28): Xaa is A or G or is absent
IPEPXXVPEKMNAISILYFXXXXXXXXXLKKYRNMTVES

SEQ ID NO: 66146 - protein, 32 aa, Artificial Sequence
  GFR-binding peptide
  MOD_RES (14), (15), (16), (17), (18): Xaa is A or G
  MOD_RES (19), (20), (21), (22): Xaa is A or G or is absent
TPTKMSPISMLYKXXXXXXXXXLKYHYGMVVD

SEQ ID NO: 66147 - protein, 38 aa, Artificial Sequence
  GFR-binding peptide
  MOD_RES (1), (35), (37): Xaa is C or S
  MOD_RES (15), (16), (17), (18), (19): Xaa is A or G
  MOD_RES (20), (21), (22), (23): Xaa is A or G or is absent
XVPEKMNAISILYFXXXXXXXXXLKKYRNMTVESXAXR

SEQ ID NO: 66148 - protein, 37 aa, Artificial Sequence; identical to SEQ ID NO: 7195
  GFR-binding peptide
  MOD_RES (1), (2), (34), (36): Xaa is C or S

SEQ ID NO: 66149 - protein, 40 aa, Artificial Sequence; identical to SEQ ID NO: 32405
  GFR-binding peptide
  MOD_RES (6), (7), (39): Xaa is C or S

SEQ ID NO: 66150 - protein, 36 aa, Artificial Sequence; identical to SEQ ID NO: 32406
  GFR-binding peptide
  MOD_RES (2), (3), (35): Xaa is C or S

SEQ ID NO: 66151 - protein, 36 aa, Artificial Sequence
  GFR-binding peptide
  MOD_RES (1), (33), (35): Xaa is C or S
XTPTKMSPISMLYKNDKQQIILKYHYGMVVDRXGXS

SEQ ID NO: 66152 - protein, 41 aa, Artificial Sequence; identical to SEQ ID NO: 28366
  GFR-binding peptide
  MOD_RES (6), (7), (39), (41): Xaa is C or S

SEQ ID NO: 66153 - protein, 33 aa, Artificial Sequence
  GFR-binding peptide
  MOD_RES (2), (3): Xaa is C or S
PXXVPEKMSATSILYYDENKNVVLRKHRNMTVE

SEQ ID NO: 66154 - protein, 34 aa, Artificial Sequence; identical to SEQ ID NO: 32407
  GFR-binding peptide
  MOD_RES (32), (34): Xaa is C or S

SEQ ID NO: 66155 - protein, 39 aa, Artificial Sequence; identical to SEQ ID NO: 32409
  GFR-binding peptide
  MOD_RES (5), (6), (38): Xaa is C or S

SEQ ID NO: 66156 - protein, 37 aa, Artificial Sequence; identical to SEQ ID NO: 7200
  GFR-binding peptide
  MOD_RES (3), (4), (35), (37): Xaa is C or S

SEQ ID NO: 66157 - protein, 37 aa, Artificial Sequence; identical to SEQ ID NO: 7201
  GFR-binding peptide
  MOD_RES (1), (35), (37): Xaa is C or S
  MOD_RES (15), (16), (17), (18), (19): Xaa is A or G
  MOD_RES (20), (21), (22), (23): Xaa is A or G or is absent

SEQ ID NO: 66158 - protein, 40 aa, Artificial Sequence; identical to SEQ ID NO: 7205
  GFR-binding peptide
  MOD_RES (6), (7), (39): Xaa is C or S

SEQ ID NO: 66159 - protein, 34 aa, Artificial Sequence; identical to SEQ ID NO: 28373
  GFR-binding peptide
  MOD_RES (34), (34): Xaa is C or S
  MOD_RES (14), (15), (16), (17), (18): Xaa is A or G
  MOD_RES (19), (20), (21), (22): Xaa is A or G or is absent

SEQ ID NO: 66160 - protein, 37 aa, Artificial Sequence; identical to SEQ ID NO: 28374
  GFR-binding peptide
  MOD_RES (6), (7): Xaa is C or S

SEQ ID NO: 66161 - protein, 34 aa, Artificial Sequence
  GFR-binding peptide
  MOD_RES (1), (33): Xaa is C or S
XVPEKMSATSILYYDENKNVVLRKHRNMTVESXA

SEQ ID NO: 66162 - protein, 32 aa, Artificial Sequence; identical to SEQ ID NO: 32423
  GFR-binding peptide
  MOD_RES (1), (2): Xaa is C or S

SEQ ID NO: 66163 - protein, 40 aa, Artificial Sequence; identical to SEQ ID NO: 14516
  GFR-binding peptide
  MOD_RES (5), (6), (38), (40): Xaa is C or S

SEQ ID NO: 66164 - protein, 37 aa, Artificial Sequence; identical to SEQ ID NO: 7213
  GFR-binding peptide
  MOD_RES (6), (7): Xaa is C or S

SEQ ID NO: 66165 - protein, 36 aa, Artificial Sequence; identical to SEQ ID NO: 7214
  GFR-binding peptide
  MOD_RES (1), (33), (35): Xaa is C or S

SEQ ID NO: 66166 - protein, 38 aa, Artificial Sequence; identical to SEQ ID NO: 28381
  GFR-binding peptide
  MOD_RES (5), (6): Xaa is C or S
  MOD_RES (20), (21), (22), (23), (24): Xaa is A or G
  MOD_RES (25), (26), (27), (28): Xaa is A or G or is absent

SEQ ID NO: 66167 - protein, 34 aa, Artificial Sequence; identical to SEQ ID NO: 32427
  GFR-binding peptide
  MOD_RES (34), (34): Xaa is C or S
  MOD_RES (14), (15), (16), (17), (18): Xaa is A or G
  MOD_RES (19), (20), (21), (22): Xaa is A or G or is absent

SEQ ID NO: 66168 - protein, 39 aa, Artificial Sequence; identical to SEQ ID NO: 14518
  GFR-binding peptide
  MOD_RES (1), (2), (36), (38): Xaa is C or S
  MOD_RES (16), (17), (18), (19), (20): Xaa is A or G
  MOD_RES (21), (22), (23), (24): Xaa is A or G or is absent

SEQ ID NO: 66169 - protein, 32 aa, Artificial Sequence; identical to SEQ ID NO: 28383
  GFR-binding peptide
  MOD_RES (1), (1): Xaa is C or S

SEQ ID NO: 66170 - protein, 37 aa, Artificial Sequence
  GFR-binding peptide
  MOD_RES (5), (6): Xaa is C or S
IPEPXXVPEKMSATSILYYDENKNVVLRKHRNMTVES

SEQ ID NO: 66171 - protein, 35 aa, Artificial Sequence
  GFR-binding peptide
  MOD_RES (3), (4): Xaa is C or S
EPXXVPEKMEPISILYLDENKNVVKFKYENMTVES

SEQ ID NO: 66172 - protein, 34 aa, Artificial Sequence; identical to SEQ ID NO: 32437
  GFR-binding peptide
  MOD_RES (3), (4): Xaa is C or S

SEQ ID NO: 66173 - protein, 43 aa, Artificial Sequence; identical to SEQ ID NO: 28384
  GFR-binding peptide
  MOD_RES (5), (6), (40), (42): Xaa is C or S
  MOD_RES (20), (21), (22), (23), (24): Xaa is A or G
  MOD_RES (25), (26), (27), (28): Xaa is A or G or is absent

SEQ ID NO: 66174 - protein, 36 aa, Artificial Sequence
  GFR-binding peptide
  MOD_RES (3), (4), (36): Xaa is C or S
PTXXVPTRLEPISILYLDSANNVVKFKYEDMVVESX

SEQ ID NO: 66175 - protein, 41 aa, Artificial Sequence; identical to SEQ ID NO: 7219
  GFR-binding peptide
  MOD_RES (4), (5), (38), (40): Xaa is C or S
  MOD_RES (19), (20), (21), (22), (23): Xaa is A or G
  MOD_RES (24), (25), (26), (27): Xaa is A or G or is absent

SEQ ID NO: 66176 - protein, 34 aa, Artificial Sequence; identical to SEQ ID NO: 7221
  GFR-binding peptide
  MOD_RES (1), (2), (34): Xaa is C or S

SEQ ID NO: 66177 - protein, 37 aa, Artificial Sequence; identical to SEQ ID NO: 7224
  GFR-binding peptide
  MOD_RES (3), (4), (37): Xaa is C or S
  MOD_RES (18), (19), (20), (21), (22): Xaa is A or G
  MOD_RES (23), (24), (25), (26): Xaa is A or G or is absent

SEQ ID NO: 66178 - protein, 34 aa, Artificial Sequence
  GFR-binding peptide
  MOD_RES (1), (2), (33): Xaa is C or S
XXVPQALSPINILYFVGRKPKVYGKIPMIVRSXK

SEQ ID NO: 66179 - protein, 40 aa, Artificial Sequence; identical to SEQ ID NO: 7226
  GFR-binding peptide
  MOD_RES (5), (6), (39): Xaa is C or S
  MOD_RES (20), (21), (22), (23), (24): Xaa is A or G
  MOD_RES (25), (26), (27), (28): Xaa is A or G or is absent

SEQ ID NO: 66180 - protein, 36 aa, Artificial Sequence
  GFR-binding peptide
  MOD_RES (1), (35): Xaa is C or S
  MOD_RES (15), (16), (17), (18), (19): Xaa is A or G
  MOD_RES (20), (21), (22), (23): Xaa is A or G or is absent
XVPEKMSATSILYYXXXXXXXXXLRKHRNMTVESXA

SEQ ID NO: 66181 - protein, 36 aa, Artificial Sequence; identical to SEQ ID NO: 32455
  GFR-binding peptide
  MOD_RES (2), (3): Xaa is C or S
  MOD_RES (17), (18), (19), (20), (21): Xaa is A or G
  MOD_RES (22), (23), (24), (25): Xaa is A or G or is absent

SEQ ID NO: 66182 - protein, 38 aa, Artificial Sequence
  GFR-binding peptide
  MOD_RES (1), (35), (37): Xaa is C or S
  MOD_RES (15), (16), (17), (18), (19): Xaa is A or G
  MOD_RES (20), (21), (22), (23): Xaa is A or G or is absent
XVPTKLSATSILYYXXXXXXXXXLRKHRGMAVSEXGXR

SEQ ID NO: 66183 - protein, 36 aa, Artificial Sequence; identical to SEQ ID NO: 28396
  GFR-binding peptide
  MOD_RES (1), (2), (35): Xaa is C or S

SEQ ID NO: 66184 - protein, 34 aa, Artificial Sequence; identical to SEQ ID NO: 28397
  GFR-binding peptide
  MOD_RES (34), (34): Xaa is C or S
  MOD_RES (14), (15), (16), (17), (18): Xaa is A or G
  MOD_RES (19), (20), (21), (22): Xaa is A or G or is absent

SEQ ID NO: 66185 - protein, 37 aa, Artificial Sequence; identical to SEQ ID NO: 32459
  GFR-binding peptide
  MOD_RES (1), (2), (36): Xaa is C or S
  MOD_RES (16), (17), (18), (19), (20): Xaa is A or G
  MOD_RES (21), (22), (23), (24): Xaa is A or G or is absent

SEQ ID NO: 66186 - protein, 39 aa, Artificial Sequence; identical to SEQ ID NO: 7229
  GFR-binding peptide
  MOD_RES (5), (6), (38): Xaa is C or S

SEQ ID NO: 66187 - protein, 32 aa, Artificial Sequence; identical to SEQ ID NO: 32460
  GFR-binding peptide
  MOD_RES (1), (2): Xaa is C or S

SEQ ID NO: 66188 - protein, 38 aa, Artificial Sequence; identical to SEQ ID NO: 28400
  GFR-binding peptide
  MOD_RES (3), (4), (36), (38): Xaa is C or S

SEQ ID NO: 66189 - protein, 37 aa, Artificial Sequence; identical to SEQ ID NO: 7231
  GFR-binding peptide
  MOD_RES (6), (7): Xaa is C or S

SEQ ID NO: 66190 - protein, 34 aa, Artificial Sequence; identical to SEQ ID NO: 7232
  GFR-binding peptide
  MOD_RES (2), (34): Xaa is C or S

SEQ ID NO: 66191 - protein, 39 aa, Artificial Sequence; identical to SEQ ID NO: 28404
  GFR-binding peptide
  MOD_RES (2), (3), (36), (38): Xaa is C or S
  MOD_RES (17), (18), (19), (20), (21): Xaa is A or G
  MOD_RES (22), (23), (24), (25): Xaa is A or G or is absent

SEQ ID NO: 66192 - protein, 35 aa, Artificial Sequence; identical to SEQ ID NO: 7233
  GFR-binding peptide
  MOD_RES (34), (34): Xaa is C or S
  MOD_RES (14), (15), (16), (17), (18): Xaa is A or G
  MOD_RES (19), (20), (21), (22): Xaa is A or G or is absent

SEQ ID NO: 66193 - protein, 33 aa, Artificial Sequence
  GFR-binding peptide
  MOD_RES (1), (2): Xaa is C or S
XXVPEKMEPISILYLDENKNVVKFKYENMTVES

SEQ ID NO: 66194 - protein, 37 aa, Artificial Sequence; identical to SEQ ID NO: 28407
  GFR-binding peptide
  MOD_RES (4), (5), (36): Xaa is C or S

SEQ ID NO: 66195 - protein, 38 aa, Artificial Sequence; identical to SEQ ID NO: 28410
  GFR-binding peptide
  MOD_RES (5), (6), (38): Xaa is C or S

SEQ ID NO: 66196 - protein, 38 aa, Artificial Sequence; identical to SEQ ID NO: 32469
  GFR-binding peptide
  MOD_RES (5), (6), (38): Xaa is C or S

SEQ ID NO: 66197 - protein, 35 aa, Artificial Sequence; identical to SEQ ID NO: 7241
  GFR-binding peptide
  MOD_RES (3), (4): Xaa is C or S

SEQ ID NO: 66198 - protein, 34 aa, Artificial Sequence
  GFR-binding peptide
  MOD_RES (1), (33): Xaa is C or S
XVPTRLEPISILYLDSANNVVKFKYEDMVVESXG

SEQ ID NO: 66199 - protein, 42 aa, Artificial Sequence; identical to SEQ ID NO: 32479
  GFR-binding peptide
  MOD_RES (4), (5), (40), (42): Xaa is C or S
  MOD_RES (19), (20), (21), (22), (23): Xaa is A or G
  MOD_RES (24), (25), (26), (27): Xaa is A or G or is absent

SEQ ID NO: 66200 - protein, 34 aa, Artificial Sequence
  GFR-binding peptide
  MOD_RES (1), (2): Xaa is C or S
  MOD_RES (16), (17), (18), (19), (20): Xaa is A or G
  MOD_RES (21), (22), (23), (24): Xaa is A or G or is absent
XXVPTRLSPISILYKXXXXXXXXXLKYHYDMVVE

SEQ ID NO: 66201 - protein, 35 aa, Artificial Sequence; identical to SEQ ID NO: 28419
  GFR-binding peptide
  MOD_RES (4), (4): Xaa is C or S

SEQ ID NO: 66202 - protein, 37 aa, Artificial Sequence; identical to SEQ ID NO: 28420
  GFR-binding peptide
  MOD_RES (34), (36): Xaa is C or S
  MOD_RES (14), (15), (16), (17), (18): Xaa is A or G
  MOD_RES (19), (20), (21), (22): Xaa is A or G or is absent

SEQ ID NO: 66203 - protein, 33 aa, Artificial Sequence; identical to SEQ ID NO: 32485
  GFR-binding peptide
  MOD_RES (2), (3): Xaa is C or S

SEQ ID NO: 66204 - protein, 35 aa, Artificial Sequence; identical to SEQ ID NO: 28421
  GFR-binding peptide
  MOD_RES (1), (2): Xaa is C or S
  MOD_RES (16), (17), (18), (19), (20): Xaa is A or G
  MOD_RES (21), (22), (23), (24): Xaa is A or G or is absent

SEQ ID NO: 66205 - protein, 38 aa, Artificial Sequence; identical to SEQ ID NO: 28424
  GFR-binding peptide
  MOD_RES (5), (6): Xaa is C or S
  MOD_RES (20), (21), (22), (23), (24): Xaa is A or G
  MOD_RES (25), (26), (27), (28): Xaa is A or G or is absent

SEQ ID NO: 66206 - protein, 36 aa, Artificial Sequence; identical to SEQ ID NO: 7244
  GFR-binding peptide
  MOD_RES (2), (3), (36): Xaa is C or S
  MOD_RES (17), (18), (19), (20), (21): Xaa is A or G
  MOD_RES (22), (23), (24), (25): Xaa is A or G or is absent

SEQ ID NO: 66207 - protein, 35 aa, Artificial Sequence; identical to SEQ ID NO: 28428
  GFR-binding peptide
  MOD_RES (32), (34): Xaa is C or S

SEQ ID NO: 66208 - protein, 38 aa, Artificial Sequence; identical to SEQ ID NO: 32486
  GFR-binding peptide
  MOD_RES (1), (35), (37): Xaa is C or S
  MOD_RES (15), (16), (17), (18), (19): Xaa is A or G
  MOD_RES (20), (21), (22), (23): Xaa is A or G or is absent

SEQ ID NO: 66209 - protein, 35 aa, Artificial Sequence
  GFR-binding peptide
  MOD_RES (32), (34): Xaa is C or S
VPTRLSATSILYYDSANNVVLRKHRDMVVESXGXR

SEQ ID NO: 66210 - protein, 40 aa, Artificial Sequence; identical to SEQ ID NO: 7247
  GFR-binding peptide
  MOD_RES (5), (37), (39): Xaa is C or S

SEQ ID NO: 66211 - protein, 43 aa, Artificial Sequence; identical to SEQ ID NO: 7248
  GFR-binding peptide
  MOD_RES (5), (6), (40), (42): Xaa is C or S
  MOD_RES (20), (21), (22), (23), (24): Xaa is A or G
  MOD_RES (25), (26), (27), (28): Xaa is A or G or is absent

SEQ ID NO: 66212 - protein, 35 aa, Artificial Sequence; identical to SEQ ID NO: 32494
  GFR-binding peptide
  MOD_RES (34), (34): Xaa is C or S
  MOD_RES (14), (15), (16), (17), (18): Xaa is A or G
  MOD_RES (19), (20), (21), (22): Xaa is A or G or is absent

SEQ ID NO: 66213 - protein, 37 aa, Artificial Sequence; identical to SEQ ID NO: 7250
  GFR-binding peptide
  MOD_RES (5), (37): Xaa is C or S

SEQ ID NO: 66214 - protein, 34 aa, Artificial Sequence
  GFR-binding peptide
  MOD_RES (1), (33): Xaa is C or S
XTPTKMSATSMLYYNDKQQIILRKHRGMVVDRXG

SEQ ID NO: 66215 - protein, 38 aa, Artificial Sequence; identical to SEQ ID NO: 7251
  GFR-binding peptide
  MOD_RES (3), (4), (37): Xaa is C or S
  MOD_RES (18), (19), (20), (21), (22): Xaa is A or G
  MOD_RES (23), (24), (25), (26): Xaa is A or G or is absent

SEQ ID NO: 66216 - protein, 37 aa, Artificial Sequence; identical to SEQ ID NO: 32497
  GFR-binding peptide
  MOD_RES (2), (3), (37): Xaa is C or S
  MOD_RES (17), (18), (19), (20), (21): Xaa is A or G
  MOD_RES (22), (23), (24), (25): Xaa is A or G or is absent

SEQ ID NO: 66217 - protein, 37 aa, Artificial Sequence; identical to SEQ ID NO: 28437
  GFR-binding peptide
  MOD_RES (1), (34), (36): Xaa is C or S
  MOD_RES (15), (16), (17), (18), (19): Xaa is A or G
  MOD_RES (20), (21), (22), (23): Xaa is A or G or is absent

SEQ ID NO: 66218 - protein, 40 aa, Artificial Sequence; identical to SEQ ID NO: 28438
  GFR-binding peptide
  MOD_RES (5), (6), (38), (40): Xaa is C or S

SEQ ID NO: 66219 - protein, 37 aa, Artificial Sequence
  GFR-binding peptide
  MOD_RES (1), (34), (36): Xaa is C or S
  MOD_RES (15), (16), (17), (18), (19): Xaa is A or G
  MOD_RES (20), (21), (22), (23): Xaa is A or G or is absent
XAPVKTEPISMLYLXXXXXXXXXKFKYEMIVEEXGXL

SEQ ID NO: 66220 - protein, 39 aa, Artificial Sequence
  GFR-binding peptide
  MOD_RES (4), (5), (37), (39): Xaa is C or S
PPTXXVPTRLSATSILYYDSANNVVLRKHRDMVVESXGX

SEQ ID NO: 66221 - protein, 40 aa, Artificial Sequence; identical to SEQ ID NO: 7256
  GFR-binding peptide
  MOD_RES (5), (6), (37), (39): Xaa is C or S

SEQ ID NO: 66222 - protein, 32 aa, Artificial Sequence
  GFR-binding peptide
  MOD_RES (1), (2): Xaa is C or S
XXVPEKMSPINILYFDENKNVVYGKIPNMTVE

SEQ ID NO: 66223 - protein, 38 aa, Artificial Sequence; identical to SEQ ID NO: 32506
  GFR-binding peptide
  MOD_RES (4), (5): Xaa is C or S
  MOD_RES (19), (20), (21), (22), (23): Xaa is A or G
  MOD_RES (24), (25), (26), (27): Xaa is A or G or is absent

SEQ ID NO: 66224 - protein, 42 aa, Artificial Sequence
  GFR-binding peptide
  MOD_RES (4), (5), (39), (41): Xaa is C or S
  MOD_RES (19), (20), (21), (22), (23): Xaa is A or G
  MOD_RES (24), (25), (26), (27): Xaa is A or G or is absent
AGPXXTPTKMSPISMLYKXXXXXXXXXLKYHYGMVVDRXGXS

SEQ ID NO: 66225 - protein, 42 aa, Artificial Sequence; identical to SEQ ID NO: 32510
  GFR-binding peptide
  MOD_RES (6), (7), (39), (41): Xaa is C or S

SEQ ID NO: 66226 - protein, 32 aa, Artificial Sequence; identical to SEQ ID NO: 7261
  GFR-binding peptide
  MOD_RES (14), (15), (16), (17), (18): Xaa is A or G
  MOD_RES (19), (20), (21), (22): Xaa is A or G or is absent

SEQ ID NO: 66227 - protein, 40 aa, Artificial Sequence; identical to SEQ ID NO: 7263
  GFR-binding peptide
  MOD_RES (4), (5), (39): Xaa is C or S
  MOD_RES (19), (20), (21), (22), (23): Xaa is A or G
  MOD_RES (24), (25), (26), (27): Xaa is A or G or is absent

SEQ ID NO: 66228 - protein, 38 aa, Artificial Sequence; identical to SEQ ID NO: 7268
  GFR-binding peptide
  MOD_RES (2), (3), (36), (38): Xaa is C or S
  MOD_RES (17), (18), (19), (20), (21): Xaa is A or G
  MOD_RES (22), (23), (24), (25): Xaa is A or G or is absent

SEQ ID NO: 66229 - protein, 38 aa, Artificial Sequence
  GFR-binding peptide
  MOD_RES (2), (3), (35), (37): Xaa is C or S
AXXVPTKLSATSILYYDKGVVTYLRKHRGMAVSEXGXR

SEQ ID NO: 66230 - protein, 37 aa, Artificial Sequence
  GFR-binding peptide
  MOD_RES (1), (2), (34), (36): Xaa is C or S
XXTPTKMEPISMLYLNDKQQIIKFKYEGMVVDRXGXS

SEQ ID NO: 66231 - protein, 33 aa, Artificial Sequence; identical to SEQ ID NO: 7271
  GFR-binding peptide
  MOD_RES (14), (15), (16), (17), (18): Xaa is A or G
  MOD_RES (19), (20), (21), (22): Xaa is A or G or is absent

SEQ ID NO: 66232 - protein, 32 aa, Artificial Sequence
  GFR-binding peptide
  MOD_RES (1), (32): Xaa is C or S
XAPVKTSATSMLYYDNGRVLLLRKHRMIVEEX

SEQ ID NO: 66233 - protein, 32 aa, Artificial Sequence; identical to SEQ ID NO: 28449
  GFR-binding peptide
  MOD_RES (32), (32): Xaa is C or S

SEQ ID NO: 66234 - protein, 38 aa, Artificial Sequence; identical to SEQ ID NO: 7275
  GFR-binding peptide
  MOD_RES (3), (4), (37): Xaa is C or S
  MOD_RES (18), (19), (20), (21), (22): Xaa is A or G
  MOD_RES (23), (24), (25), (26): Xaa is A or G or is absent

SEQ ID NO: 66235 - protein, 36 aa, Artificial Sequence; identical to SEQ ID NO: 28453
  GFR-binding peptide
  MOD_RES (2), (3), (35): Xaa is C or S

SEQ ID NO: 66236 - protein, 42 aa, Artificial Sequence
  GFR-binding peptide
  MOD_RES (5), (6), (39), (41): Xaa is C or S
  MOD_RES (20), (21), (22), (23), (24): Xaa is A or G
  MOD_RES (25), (26), (27), (28): Xaa is A or G or is absent
SAAPXXVPQALSPINILYFXXXXXXXXXYGKIPMIVRSXKXS

SEQ ID NO: 66237 - protein, 35 aa, Artificial Sequence
  GFR-binding peptide
  MOD_RES (1), (2): Xaa is C or S
  MOD_RES (16), (17), (18), (19), (20): Xaa is A or G
  MOD_RES (21), (22), (23), (24): Xaa is A or G or is absent
XXTPTKMSPISMLYKXXXXXXXXXLKYHYGMVVDR

SEQ ID NO: 66238 - protein, 44 aa, Artificial Sequence; identical to SEQ ID NO: 7277
  GFR-binding peptide
  MOD_RES (6), (7), (41), (43): Xaa is C or S
  MOD_RES (21), (22), (23), (24), (25): Xaa is A or G
  MOD_RES (26), (27), (28), (29): Xaa is A or G or is absent

SEQ ID NO: 66239 - protein, 32 aa, Artificial Sequence
  GFR-binding peptide
  MOD_RES (14), (15), (16), (17), (18): Xaa is A or G
  MOD_RES (19), (20), (21), (22): Xaa is A or G or is absent
TPTKMSATSMLYYXXXXXXXXXLRKHRGMVVD

SEQ ID NO: 66240 - protein, 43 aa, Artificial Sequence
  GFR-binding peptide
  MOD_RES (6), (7), (41), (43): Xaa is C or S
  MOD_RES (21), (22), (23), (24), (25): Xaa is A or G
  MOD_RES (26), (27), (28), (29): Xaa is A or G or is absent
KASKAXXVPTKLSATSILYYXXXXXXXXXLRKHRGMAVSEXGX

SEQ ID NO: 66241 - protein, 36 aa, Artificial Sequence; identical to SEQ ID NO: 7280
  GFR-binding peptide
  MOD_RES (1), (33), (35): Xaa is C or S

SEQ ID NO: 66242 - protein, 32 aa, Artificial Sequence; identical to SEQ ID NO: 28459
  GFR-binding peptide
  MOD_RES (14), (15), (16), (17), (18): Xaa is A or G
  MOD_RES (19), (20), (21), (22): Xaa is A or G or is absent

SEQ ID NO: 66243 - protein, 33 aa, Artificial Sequence; identical to SEQ ID NO: 7284
  GFR-binding peptide
  MOD_RES (32), (32): Xaa is C or S

SEQ ID NO: 66244 - protein, 42 aa, Artificial Sequence; identical to SEQ ID NO: 14584
  GFR-binding peptide
  MOD_RES (5), (6), (40), (42): Xaa is C or S
  MOD_RES (20), (21), (22), (23), (24): Xaa is A or G
  MOD_RES (25), (26), (27), (28): Xaa is A or G or is absent

SEQ ID NO: 66245 - protein, 38 aa, Artificial Sequence; identical to SEQ ID NO: 32535
  GFR-binding peptide
  MOD_RES (6), (6): Xaa is C or S
  MOD_RES (20), (21), (22), (23), (24): Xaa is A or G
  MOD_RES (25), (26), (27), (28): Xaa is A or G or is absent

SEQ ID NO: 66246 - protein, 32 aa, Artificial Sequence; identical to SEQ ID NO: 28463
  GFR-binding peptide
  MOD_RES (32), (32): Xaa is C or S

SEQ ID NO: 66247 - protein, 38 aa, Artificial Sequence; identical to SEQ ID NO: 32537
  GFR-binding peptide
  MOD_RES (4), (5), (37): Xaa is C or S

SEQ ID NO: 66248 - protein, 38 aa, Artificial Sequence; identical to SEQ ID NO: 7285
  GFR-binding peptide
  MOD_RES (3), (4), (36), (38): Xaa is C or S

SEQ ID NO: 66249 - protein, 39 aa, Artificial Sequence; identical to SEQ ID NO: 32538
  GFR-binding peptide
  MOD_RES (4), (5): Xaa is C or S
  MOD_RES (19), (20), (21), (22), (23): Xaa is A or G
  MOD_RES (24), (25), (26), (27): Xaa is A or G or is absent

SEQ ID NO: 66250 - protein, 34 aa, Artificial Sequence; identical to SEQ ID NO: 7286
  GFR-binding peptide
  MOD_RES (1), (2), (33): Xaa is C or S

SEQ ID NO: 66251 - protein, 37 aa, Artificial Sequence; identical to SEQ ID NO: 7287
  GFR-binding peptide
  MOD_RES (3), (4): Xaa is C or S
  MOD_RES (18), (19), (20), (21), (22): Xaa is A or G
  MOD_RES (23), (24), (25), (26): Xaa is A or G or is absent

SEQ ID NO: 66252 - protein, 33 aa, Artificial Sequence; identical to SEQ ID NO: 28466
  GFR-binding peptide
  MOD_RES (14), (15), (16), (17), (18): Xaa is A or G
  MOD_RES (19), (20), (21), (22): Xaa is A or G or is absent

SEQ ID NO: 66253 - protein, 35 aa, Artificial Sequence; identical to SEQ ID NO: 57446
  GFR-binding peptide
  MOD_RES (3), (4): Xaa is C or S

SEQ ID NO: 66254 - protein, 34 aa, Artificial Sequence; identical to SEQ ID NO: 32542
  GFR-binding peptide
  MOD_RES (34), (34): Xaa is C or S
  MOD_RES (14), (15), (16), (17), (18): Xaa is A or G
  MOD_RES (19), (20), (21), (22): Xaa is A or G or is absent

SEQ ID NO: 66255 - protein, 37 aa, Artificial Sequence; identical to SEQ ID NO: 7291
  GFR-binding peptide
  MOD_RES (6), (7): Xaa is C or S

SEQ ID NO: 66256 - protein, 42 aa, Artificial Sequence; identical to SEQ ID NO: 14591
  GFR-binding peptide
  MOD_RES (6), (7), (41): Xaa is C or S
  MOD_RES (21), (22), (23), (24), (25): Xaa is A or G
  MOD_RES (26), (27), (28), (29): Xaa is A or G or is absent

SEQ ID NO: 66257 - protein, 36 aa, Artificial Sequence; identical to SEQ ID NO: 28473
  GFR-binding peptide
  MOD_RES (1), (2), (35): Xaa is C or S
  MOD_RES (16), (17), (18), (19), (20): Xaa is A or G
  MOD_RES (21), (22), (23), (24): Xaa is A or G or is absent

SEQ ID NO: 66258 - protein, 34 aa, Artificial Sequence; identical to SEQ ID NO: 28475
  GFR-binding peptide
  MOD_RES (33), (33): Xaa is C or S
  MOD_RES (14), (15), (16), (17), (18): Xaa is A or G
  MOD_RES (19), (20), (21), (22): Xaa is A or G or is absent

SEQ ID NO: 66259 - protein, 38 aa, Artificial Sequence; identical to SEQ ID NO: 32549
  GFR-binding peptide
  MOD_RES (5), (6): Xaa is C or S
  MOD_RES (20), (21), (22), (23), (24): Xaa is A or G
  MOD_RES (25), (26), (27), (28): Xaa is A or G or is absent

SEQ ID NO: 66260 - protein, 31 aa, Artificial Sequence; identical to SEQ ID NO: 28477
  GFR-binding peptide
  MOD_RES (1), (1): Xaa is C or S

SEQ ID NO: 66261 - protein, 40 aa, Artificial Sequence
  GFR-binding peptide
  MOD_RES (6), (7), (40): Xaa is C or S
  MOD_RES (21), (22), (23), (24), (25): Xaa is A or G
  MOD_RES (26), (27), (28), (29): Xaa is A or G or is absent
RVPSTXXAPVKTEPISMLYLXXXXXXXXXKFKYEMIVEEX

SEQ ID NO: 66262 - protein, 40 aa, Artificial Sequence; identical to SEQ ID NO: 7299
  GFR-binding peptide
  MOD_RES (5), (6), (40): Xaa is C or S
  MOD_RES (20), (21), (22), (23), (24): Xaa is A or G
  MOD_RES (25), (26), (27), (28): Xaa is A or G or is absent

SEQ ID NO: 66263 - protein, 34 aa, Artificial Sequence
  GFR-binding peptide
  MOD_RES (3), (4): Xaa is C or S
GPXXTPTKMSATSMLYYNDKQQIILRKHRGMVVD

SEQ ID NO: 66264 - protein, 38 aa, Artificial Sequence; identical to SEQ ID NO: 7300
  GFR-binding peptide
  MOD_RES (1), (2), (35), (37): Xaa is C or S
  MOD_RES (16), (17), (18), (19), (20): Xaa is A or G
  MOD_RES (21), (22), (23), (24): Xaa is A or G or is absent

SEQ ID NO: 66265 - protein, 41 aa, Artificial Sequence; identical to SEQ ID NO: 7302
  GFR-binding peptide
  MOD_RES (5), (6), (39), (41): Xaa is C or S
  MOD_RES (20), (21), (22), (23), (24): Xaa is A or G
  MOD_RES (25), (26), (27), (28): Xaa is A or G or is absent

SEQ ID NO: 66266 - protein, 34 aa, Artificial Sequence; identical to SEQ ID NO: 7305
  GFR-binding peptide
  MOD_RES (1), (2): Xaa is C or S
  MOD_RES (16), (17), (18), (19), (20): Xaa is A or G
  MOD_RES (21), (22), (23), (24): Xaa is A or G or is absent

SEQ ID NO: 66267 - protein, 35 aa, Artificial Sequence; identical to SEQ ID NO: 28490
  GFR-binding peptide
  MOD_RES (2), (3), (35): Xaa is C or S

SEQ ID NO: 66268 - protein, 44 aa, Artificial Sequence
  GFR-binding peptide
  MOD_RES (6), (7), (41), (43): Xaa is C or S
  MOD_RES (21), (22), (23), (24), (25): Xaa is A or G
  MOD_RES (26), (27), (28), (29): Xaa is A or G or is absent
GIPEPXXVPEKMSPISILYKXXXXXXXXXLKYHYNMTVESXAXR

SEQ ID NO: 66269 - protein, 35 aa, Artificial Sequence
  GFR-binding peptide
  MOD_RES (2), (3): Xaa is C or S
  MOD_RES (17), (18), (19), (20), (21): Xaa is A or G
  MOD_RES (22), (23), (24), (25): Xaa is A or G or is absent
PXXTPTKMSPISMLYKXXXXXXXXXLKYHYGMVVD

SEQ ID NO: 66270 - protein, 37 aa, Artificial Sequence; identical to SEQ ID NO: 57469
  GFR-binding peptide
  MOD_RES (4), (5), (37): Xaa is C or S

SEQ ID NO: 66271 - protein, 40 aa, Artificial Sequence
  GFR-binding peptide
  MOD_RES (6), (7), (39): Xaa is C or S
AAPASXXVPARLSATSILYYDAANNVVLRKHRDMVVEAXG

SEQ ID NO: 66272 - protein, 36 aa, Artificial Sequence; identical to SEQ ID NO: 7309
  GFR-binding peptide
  MOD_RES (2), (3): Xaa is C or S
  MOD_RES (17), (18), (19), (20), (21): Xaa is A or G
  MOD_RES (22), (23), (24), (25): Xaa is A or G or is absent

SEQ ID NO: 66273 - protein, 37 aa, Artificial Sequence; identical to SEQ ID NO: 7310
  GFR-binding peptide
  MOD_RES (3), (4), (35), (37): Xaa is C or S

SEQ ID NO: 66274 - protein, 37 aa, Artificial Sequence; identical to SEQ ID NO: 28495
  GFR-binding peptide
  MOD_RES (1), (35), (37): Xaa is C or S
  MOD_RES (15), (16), (17), (18), (19): Xaa is A or G
  MOD_RES (20), (21), (22), (23): Xaa is A or G or is absent

SEQ ID NO: 66275 - protein, 35 aa, Artificial Sequence; identical to SEQ ID NO: 28497
  GFR-binding peptide
  MOD_RES (32), (34): Xaa is C or S

SEQ ID NO: 66276 - protein, 34 aa, Artificial Sequence
  GFR-binding peptide
  MOD_RES (1), (1): Xaa is C or S
  MOD_RES (15), (16), (17), (18), (19): Xaa is A or G
  MOD_RES (20), (21), (22), (23): Xaa is A or G or is absent
XTPTKMEPISMLYLXXXXXXXXXKFKYEGMVVDR

SEQ ID NO: 66277 - protein, 35 aa, Artificial Sequence; identical to SEQ ID NO: 14610
  GFR-binding peptide
  MOD_RES (4), (5): Xaa is C or S

SEQ ID NO: 66278 - protein, 40 aa, Artificial Sequence; identical to SEQ ID NO: 7313
  GFR-binding peptide
  MOD_RES (4), (5), (37), (39): Xaa is C or S

SEQ ID NO: 66279 - protein, 33 aa, Artificial Sequence
  GFR-binding peptide
  MOD_RES (14), (15), (16), (17), (18): Xaa is A or G
  MOD_RES (19), (20), (21), (22): Xaa is A or G or is absent
VPEKMSPISILYKXXXXXXXXXLKYHYNMTVES

SEQ ID NO: 66280 - protein, 37 aa, Artificial Sequence; identical to SEQ ID NO: 32576
  GFR-binding peptide
  MOD_RES (2), (3), (35), (37): Xaa is C or S

SEQ ID NO: 66281 - protein, 42 aa, Artificial Sequence; identical to SEQ ID NO: 7314
  GFR-binding peptide
  MOD_RES (4), (5), (39), (41): Xaa is C or S
  MOD_RES (19), (20), (21), (22), (23): Xaa is A or G
  MOD_RES (24), (25), (26), (27): Xaa is A or G or is absent

SEQ ID NO: 66282 - protein, 34 aa, Artificial Sequence
  GFR-binding peptide
  MOD_RES (1), (2): Xaa is C or S
  MOD_RES (16), (17), (18), (19), (20): Xaa is A or G
  MOD_RES (21), (22), (23), (24): Xaa is A or G or is absent
XXVPTRLEPISILYLXXXXXXXXXKFKYEDMVVE

SEQ ID NO: 66283 - protein, 39 aa, Artificial Sequence; identical to SEQ ID NO: 28507
  GFR-binding peptide
  MOD_RES (4), (5), (39): Xaa is C or S
  MOD_RES (19), (20), (21), (22), (23): Xaa is A or G
  MOD_RES (24), (25), (26), (27): Xaa is A or G or is absent

SEQ ID NO: 66284 - protein, 40 aa, Artificial Sequence
  GFR-binding peptide
  MOD_RES (5), (6), (37), (39): Xaa is C or S
VPSTXXAPVKTSATSMLYYDNGRVLLLRKHRMIVEEXGXL

SEQ ID NO: 66285 - protein, 40 aa, Artificial Sequence
  GFR-binding peptide
  MOD_RES (6), (7): Xaa is C or S
  MOD_RES (21), (22), (23), (24), (25): Xaa is A or G
  MOD_RES (26), (27), (28), (29): Xaa is A or G or is absent
STPPTXXVPTRLSATSILYYXXXXXXXXXLRKHRDMVVES

SEQ ID NO: 66286 - protein, 41 aa, Artificial Sequence
  GFR-binding peptide
  MOD_RES (5), (6), (39), (41): Xaa is C or S
  MOD_RES (20), (21), (22), (23), (24): Xaa is A or G
  MOD_RES (25), (26), (27), (28): Xaa is A or G or is absent
SAAPXXVPQALSPINILYFXXXXXXXXXYGKIPMIVRSXKX

SEQ ID NO: 66287 - protein, 34 aa, Artificial Sequence
  GFR-binding peptide
  MOD_RES (33), (33): Xaa is C or S
  MOD_RES (14), (15), (16), (17), (18): Xaa is A or G
  MOD_RES (19), (20), (21), (22): Xaa is A or G or is absent
APVKTSATSMLYYXXXXXXXXXLRKHRMIVEEXG

SEQ ID NO: 66288 - protein, 38 aa, Artificial Sequence
  GFR-binding peptide
  MOD_RES (4), (5), (37): Xaa is C or S
SKAXXVPTKLSATSILYYDKGVVTYLRKHRGMAVSEXG

SEQ ID NO: 66289 - protein, 41 aa, Artificial Sequence; identical to SEQ ID NO: 7327
  GFR-binding peptide
  MOD_RES (4), (5), (38), (40): Xaa is C or S
  MOD_RES (19), (20), (21), (22), (23): Xaa is A or G
  MOD_RES (24), (25), (26), (27): Xaa is A or G or is absent

SEQ ID NO: 66290 - protein, 42 aa, Artificial Sequence; identical to SEQ ID NO: 28516
  GFR-binding peptide
  MOD_RES (6), (7), (41): Xaa is C or S
  MOD_RES (21), (22), (23), (24), (25): Xaa is A or G
  MOD_RES (26), (27), (28), (29): Xaa is A or G or is absent

SEQ ID NO: 66291 - protein, 42 aa, Artificial Sequence
  GFR-binding peptide
  MOD_RES (4), (5), (39), (41): Xaa is C or S
  MOD_RES (19), (20), (21), (22), (23): Xaa is A or G
  MOD_RES (24), (25), (26), (27): Xaa is A or G or is absent
SKAXXVPTKLSATSILYYXXXXXXXXXLRKHRGMAVSEXGXR

SEQ ID NO: 66292 - protein, 34 aa, Artificial Sequence
  GFR-binding peptide
  MOD_RES (1), (2): Xaa is C or S
  MOD_RES (16), (17), (18), (19), (20): Xaa is A or G
  MOD_RES (21), (22), (23), (24): Xaa is A or G or is absent
XXVPARLSATSILYYXXXXXXXXXLRKHRDMVVE

SEQ ID NO: 66293 - protein, 36 aa, Artificial Sequence; identical to SEQ ID NO: 28518
  GFR-binding peptide
  MOD_RES (2), (3), (35): Xaa is C or S

SEQ ID NO: 66294 - protein, 34 aa, Artificial Sequence
  GFR-binding peptide
  MOD_RES (1), (2): Xaa is C or S
  MOD_RES (16), (17), (18), (19), (20): Xaa is A or G
  MOD_RES (21), (22), (23), (24): Xaa is A or G or is absent
XXVPTRLSATSILYYXXXXXXXXXLRKHRDMVVE

SEQ ID NO: 66295 - protein, 32 aa, Artificial Sequence; identical to SEQ ID NO: 7331
  GFR-binding peptide
  MOD_RES (32), (32): Xaa is C or S

SEQ ID NO: 66296 - protein, 38 aa, Artificial Sequence; identical to SEQ ID NO: 28520
  GFR-binding peptide
  MOD_RES (2), (3), (35), (37): Xaa is C or S

SEQ ID NO: 66297 - protein, 41 aa, Artificial Sequence; identical to SEQ ID NO: 28522
  GFR-binding peptide
  MOD_RES (7), (41): Xaa is C or S
  MOD_RES (21), (22), (23), (24), (25): Xaa is A or G
  MOD_RES (26), (27), (28), (29): Xaa is A or G or is absent

SEQ ID NO: 66298 - protein, 35 aa, Artificial Sequence; identical to SEQ ID NO: 28524
  GFR-binding peptide
  MOD_RES (2), (3), (35): Xaa is C or S

SEQ ID NO: 66299 - protein, 32 aa, Artificial Sequence; identical to SEQ ID NO: 57500
  GFR-binding peptide
  MOD_RES (14), (15), (16), (17), (18): Xaa is A or G
  MOD_RES (19), (20), (21), (22): Xaa is A or G or is absent

SEQ ID NO: 66300 - protein, 35 aa, Artificial Sequence; identical to SEQ ID NO: 28526
  GFR-binding peptide
  MOD_RES (3), (4): Xaa is C or S

SEQ ID NO: 66301 - protein, 38 aa, Artificial Sequence; identical to SEQ ID NO: 7336
  GFR-binding peptide
  MOD_RES (4), (5): Xaa is C or S
  MOD_RES (19), (20), (21), (22), (23): Xaa is A or G
  MOD_RES (24), (25), (26), (27): Xaa is A or G or is absent

SEQ ID NO: 66302 - protein, 37 aa, Artificial Sequence; identical to SEQ ID NO: 32599
  GFR-binding peptide
  MOD_RES (1), (35), (37): Xaa is C or S
  MOD_RES (15), (16), (17), (18), (19): Xaa is A or G
  MOD_RES (20), (21), (22), (23): Xaa is A or G or is absent

SEQ ID NO: 66303 - protein, 34 aa, Artificial Sequence; identical to SEQ ID NO: 7340
  GFR-binding peptide
  MOD_RES (1), (34): Xaa is C or S
  MOD_RES (15), (16), (17), (18), (19): Xaa is A or G
  MOD_RES (20), (21), (22), (23): Xaa is A or G or is absent

SEQ ID NO: 66304 - protein, 36 aa, Artificial Sequence
  GFR-binding peptide
  MOD_RES (3), (4), (35): Xaa is C or S
STXXAPVKTSATSMLYYDNGRVLLLRKHRMIVEEXG

SEQ ID NO: 66305 - protein, 39 aa, Artificial Sequence
  GFR-binding peptide
  MOD_RES (4), (5), (38): Xaa is C or S
  MOD_RES (19), (20), (21), (22), (23): Xaa is A or G
  MOD_RES (24), (25), (26), (27): Xaa is A or G or is absent
ASPXXVPQDLSPINILYFXXXXXXXXXYGKIPMVVKSXK

SEQ ID NO: 66306 - protein, 31 aa, Artificial Sequence; identical to SEQ ID NO: 57511
  GFR-binding peptide

SEQ ID NO: 66307 - protein, 38 aa, Artificial Sequence
  GFR-binding peptide
  MOD_RES (5), (6): Xaa is C or S
  MOD_RES (20), (21), (22), (23), (24): Xaa is A or G
  MOD_RES (25), (26), (27), (28): Xaa is A or G or is absent
APASXXVPARLSATSILYYXXXXXXXXXLRKHRDMVVE

SEQ ID NO: 66308 - protein, 36 aa, Artificial Sequence
  GFR-binding peptide
  MOD_RES (1), (34), (36): Xaa is C or S
  MOD_RES (15), (16), (17), (18), (19): Xaa is A or G
  MOD_RES (20), (21), (22), (23): Xaa is A or G or is absent
XVSQDLSPINILYFXXXXXXXXXYGKIPMIVKSXKX

SEQ ID NO: 66309 - protein, 36 aa, Artificial Sequence; identical to SEQ ID NO: 32607
  GFR-binding peptide
  MOD_RES (3), (4): Xaa is C or S
  MOD_RES (18), (19), (20), (21), (22): Xaa is A or G
  MOD_RES (23), (24), (25), (26): Xaa is A or G or is absent

SEQ ID NO: 66310 - protein, 41 aa, Artificial Sequence; identical to SEQ ID NO: 7344
  GFR-binding peptide
  MOD_RES (5), (39), (41): Xaa is C or S
  MOD_RES (19), (20), (21), (22), (23): Xaa is A or G
  MOD_RES (24), (25), (26), (27): Xaa is A or G or is absent

SEQ ID NO: 66311 - protein, 34 aa, Artificial Sequence; identical to SEQ ID NO: 28540
  GFR-binding peptide
  MOD_RES (2), (3): Xaa is C or S

SEQ ID NO: 66312 - protein, 31 aa, Artificial Sequence
  GFR-binding peptide
VPTRLSPISILYKDSANNVVLKYHYDMVVES

SEQ ID NO: 66313 - protein, 37 aa, Artificial Sequence; identical to SEQ ID NO: 7348
  GFR-binding peptide
  MOD_RES (1), (2), (36): Xaa is C or S
  MOD_RES (16), (17), (18), (19), (20): Xaa is A or G
  MOD_RES (21), (22), (23), (24): Xaa is A or G or is absent

SEQ ID NO: 66314 - protein, 39 aa, Artificial Sequence
  GFR-binding peptide
  MOD_RES (5), (6), (38): Xaa is C or S
SAGPXXTPTKMSATSMLYYNDKQQIILRKHRGMVVDRXG

SEQ ID NO: 66315 - protein, 35 aa, Artificial Sequence; identical to SEQ ID NO: 28545
  GFR-binding peptide
  MOD_RES (1), (33), (35): Xaa is C or S

SEQ ID NO: 66316 - protein, 33 aa, Artificial Sequence; identical to SEQ ID NO: 28547
  GFR-binding peptide
  MOD_RES (32), (32): Xaa is C or S

SEQ ID NO: 66317 - protein, 42 aa, Artificial Sequence; identical to SEQ ID NO: 28549
  GFR-binding peptide
  MOD_RES (6), (7), (41): Xaa is C or S
  MOD_RES (21), (22), (23), (24), (25): Xaa is A or G
  MOD_RES (26), (27), (28), (29): Xaa is A or G or is absent

SEQ ID NO: 66318 - protein, 37 aa, Artificial Sequence; identical to SEQ ID NO: 32627
  GFR-binding peptide
  MOD_RES (3), (4): Xaa is C or S
  MOD_RES (18), (19), (20), (21), (22): Xaa is A or G
  MOD_RES (23), (24), (25), (26): Xaa is A or G or is absent

SEQ ID NO: 66319 - protein, 34 aa, Artificial Sequence
  GFR-binding peptide
  MOD_RES (1), (1): Xaa is C or S
  MOD_RES (15), (16), (17), (18), (19): Xaa is A or G
  MOD_RES (20), (21), (22), (23): Xaa is A or G or is absent
XTPTKMSPISMLYKXXXXXXXXXLKYHYGMVVDR

SEQ ID NO: 66320 - protein, 38 aa, Artificial Sequence; identical to SEQ ID NO: 32630
  GFR-binding peptide
  MOD_RES (1), (35), (37): Xaa is C or S
  MOD_RES (15), (16), (17), (18), (19): Xaa is A or G
  MOD_RES (20), (21), (22), (23): Xaa is A or G or is absent

SEQ ID NO: 66321 - protein, 40 aa, Artificial Sequence; identical to SEQ ID NO: 7353
  GFR-binding peptide
  MOD_RES (2), (3), (37), (39): Xaa is C or S
  MOD_RES (17), (18), (19), (20), (21): Xaa is A or G
  MOD_RES (22), (23), (24), (25): Xaa is A or G or is absent

SEQ ID NO: 66322 - protein, 36 aa, Artificial Sequence; identical to SEQ ID NO: 32634
  GFR-binding peptide
  MOD_RES (1), (2), (33), (35): Xaa is C or S

SEQ ID NO: 66323 - protein, 39 aa, Artificial Sequence; identical to SEQ ID NO: 28559
  GFR-binding peptide
  MOD_RES (3), (4), (38): Xaa is C or S
  MOD_RES (18), (19), (20), (21), (22): Xaa is A or G
  MOD_RES (23), (24), (25), (26): Xaa is A or G or is absent

SEQ ID NO: 66324 - protein, 37 aa, Artificial Sequence; identical to SEQ ID NO: 7355
  GFR-binding peptide
  MOD_RES (1), (34), (36): Xaa is C or S

SEQ ID NO: 66325 - protein, 33 aa, Artificial Sequence; identical to SEQ ID NO: 7356
  GFR-binding peptide
  MOD_RES (32), (32): Xaa is C or S

SEQ ID NO: 66326 - protein, 40 aa, Artificial Sequence; identical to SEQ ID NO: 28564
  GFR-binding peptide
  MOD_RES (3), (4), (38), (40): Xaa is C or S
  MOD_RES (18), (19), (20), (21), (22): Xaa is A or G
  MOD_RES (23), (24), (25), (26): Xaa is A or G or is absent

SEQ ID NO: 66327 - protein, 35 aa, Artificial Sequence; identical to SEQ ID NO: 28566
  GFR-binding peptide
  MOD_RES (2), (3), (35): Xaa is C or S

SEQ ID NO: 66328 - protein, 41 aa, Artificial Sequence
  GFR-binding peptide
  MOD_RES (6), (7), (38), (40): Xaa is C or S
RVPSTXXAPVKTSPISMLYKDNGRVLLLKYHYMIVEEXGXL

SEQ ID NO: 66329 - protein, 35 aa, Artificial Sequence; identical to SEQ ID NO: 7360
  GFR-binding peptide
  MOD_RES (3), (4): Xaa is C or S

SEQ ID NO: 66330 - protein, 39 aa, Artificial Sequence; identical to SEQ ID NO: 7362
  GFR-binding peptide
  MOD_RES (3), (4), (36), (38): Xaa is C or S

SEQ ID NO: 66331 - protein, 36 aa, Artificial Sequence; identical to SEQ ID NO: 7366
  GFR-binding peptide
  MOD_RES (5), (6): Xaa is C or S

SEQ ID NO: 66332 - protein, 36 aa, Artificial Sequence; identical to SEQ ID NO: 28578
  GFR-binding peptide
  MOD_RES (1), (36): Xaa is C or S
  MOD_RES (15), (16), (17), (18), (19): Xaa is A or G
  MOD_RES (20), (21), (22), (23): Xaa is A or G or is absent

SEQ ID NO: 66333 - protein, 35 aa, Artificial Sequence
  GFR-binding peptide
  MOD_RES (33), (35): Xaa is C or S
  MOD_RES (14), (15), (16), (17), (18): Xaa is A or G
  MOD_RES (19), (20), (21), (22): Xaa is A or G or is absent
APVKTEPISMLYLXXXXXXXXXKFKYEMIVEEXGX

SEQ ID NO: 66334 - protein, 39 aa, Artificial Sequence; identical to SEQ ID NO: 28581
  GFR-binding peptide
  MOD_RES (6), (7), (38): Xaa is C or S

SEQ ID NO: 66335 - protein, 35 aa, Artificial Sequence; identical to SEQ ID NO: 7369
  GFR-binding peptide
  MOD_RES (3), (35): Xaa is C or S

SEQ ID NO: 66336 - protein, 34 aa, Artificial Sequence; identical to SEQ ID NO: 7371
  GFR-binding peptide
  MOD_RES (2), (2): Xaa is C or S
  MOD_RES (16), (17), (18), (19), (20): Xaa is A or G
  MOD_RES (21), (22), (23), (24): Xaa is A or G or is absent

SEQ ID NO: 66337 - protein, 32 aa, Artificial Sequence
  GFR-binding peptide
  MOD_RES (32), (32): Xaa is C or S
VPEKMSATSILYYDENKNVVLRKHRNMTVESX

SEQ ID NO: 66338 - protein, 38 aa, Artificial Sequence; identical to SEQ ID NO: 7375
  GFR-binding peptide
  MOD_RES (3), (4), (35), (37): Xaa is C or S

SEQ ID NO: 66339 - protein, 40 aa, Artificial Sequence; identical to SEQ ID NO: 28585
  GFR-binding peptide
  MOD_RES (6), (7), (39): Xaa is C or S

SEQ ID NO: 66340 - protein, 36 aa, Artificial Sequence; identical to SEQ ID NO: 32664
  GFR-binding peptide
  MOD_RES (3), (4): Xaa is C or S

SEQ ID NO: 66341 - protein, 40 aa, Artificial Sequence; identical to SEQ ID NO: 7378
  GFR-binding peptide
  MOD_RES (4), (5), (39): Xaa is C or S
  MOD_RES (19), (20), (21), (22), (23): Xaa is A or G
  MOD_RES (24), (25), (26), (27): Xaa is A or G or is absent

SEQ ID NO: 66342 - protein, 39 aa, Artificial Sequence; identical to SEQ ID NO: 32665
  GFR-binding peptide
  MOD_RES (1), (2), (36), (38): Xaa is C or S
  MOD_RES (16), (17), (18), (19), (20): Xaa is A or G
  MOD_RES (21), (22), (23), (24): Xaa is A or G or is absent

SEQ ID NO: 66343 - protein, 39 aa, Artificial Sequence; identical to SEQ ID NO: 32666
  GFR-binding peptide
  MOD_RES (5), (37), (39): Xaa is C or S

SEQ ID NO: 66344 - protein, 38 aa, Artificial Sequence; identical to SEQ ID NO: 32667
  GFR-binding peptide
  MOD_RES (4), (5): Xaa is C or S
  MOD_RES (19), (20), (21), (22), (23): Xaa is A or G
  MOD_RES (24), (25), (26), (27): Xaa is A or G or is absent

SEQ ID NO: 66345 - protein, 42 aa, Artificial Sequence; identical to SEQ ID NO: 28592
  GFR-binding peptide
  MOD_RES (5), (6), (40), (42): Xaa is C or S
  MOD_RES (20), (21), (22), (23), (24): Xaa is A or G
  MOD_RES (25), (26), (27), (28): Xaa is A or G or is absent

SEQ ID NO: 66346 - protein, 42 aa, Artificial Sequence
  GFR-binding peptide
  MOD_RES (6), (7), (41): Xaa is C or S
  MOD_RES (21), (22), (23), (24), (25): Xaa is A or G
  MOD_RES (26), (27), (28), (29): Xaa is A or G or is absent
HVPKPXXAPTKLEPISVLYLXXXXXXXXXKFKYENMVVRSXG

SEQ ID NO: 66347 - protein, 38 aa, Artificial Sequence; identical to SEQ ID NO: 7388
  GFR-binding peptide
  MOD_RES (1), (2), (36), (38): Xaa is C or S
  MOD_RES (16), (17), (18), (19), (20): Xaa is A or G
  MOD_RES (21), (22), (23), (24): Xaa is A or G or is absent

SEQ ID NO: 66348 - protein, 40 aa, Artificial Sequence
  GFR-binding peptide
  MOD_RES (4), (5), (39): Xaa is C or S
  MOD_RES (19), (20), (21), (22), (23): Xaa is A or G
  MOD_RES (24), (25), (26), (27): Xaa is A or G or is absent
PEPXXVPEKMSPINILYFXXXXXXXXXYGKIPNMTVESXA

SEQ ID NO: 66349 - protein, 37 aa, Artificial Sequence
  GFR-binding peptide
  MOD_RES (5), (6): Xaa is C or S
TPPTXXVPTRLSPISILYKDSANNVVLKYHYDMVVES

SEQ ID NO: 66350 - protein, 33 aa, Artificial Sequence
  GFR-binding peptide
  MOD_RES (1), (32): Xaa is C or S
XVPQALSPINILYFVGRKPKVYGKIPMIVRSXK

SEQ ID NO: 66351 - protein, 35 aa, Artificial Sequence
  GFR-binding peptide
  MOD_RES (1), (2): Xaa is C or S
  MOD_RES (16), (17), (18), (19), (20): Xaa is A or G
  MOD_RES (21), (22), (23), (24): Xaa is A or G or is absent
XXVPTRLSATSILYYXXXXXXXXXLRKHRDMVVES

SEQ ID NO: 66352 - protein, 42 aa, Artificial Sequence; identical to SEQ ID NO: 7396
  GFR-binding peptide
  MOD_RES (6), (7), (40), (42): Xaa is C or S
  MOD_RES (21), (22), (23), (24), (25): Xaa is A or G
  MOD_RES (26), (27), (28), (29): Xaa is A or G or is absent

SEQ ID NO: 66353 - protein, 38 aa, Artificial Sequence
  GFR-binding peptide
  MOD_RES (1), (2), (36), (38): Xaa is C or S
  MOD_RES (16), (17), (18), (19), (20): Xaa is A or G
  MOD_RES (21), (22), (23), (24): Xaa is A or G or is absent
XXVPEKMEPISILYLXXXXXXXXXKFKYENMTVESXAX

SEQ ID NO: 66354 - protein, 36 aa, Artificial Sequence
  GFR-binding peptide
  MOD_RES (5), (6): Xaa is C or S
IPEPXXVPEKMSPINILYFDENKNVVYGKIPNMTVE

SEQ ID NO: 66355 - protein, 36 aa, Artificial Sequence; identical to SEQ ID NO: 7398
  GFR-binding peptide
  MOD_RES (1), (2), (34), (36): Xaa is C or S

SEQ ID NO: 66356 - protein, 31 aa, Artificial Sequence
  GFR-binding peptide
VPTRLEPISILYLDSANNVVKFKYEDMVVES

SEQ ID NO: 66357 - protein, 37 aa, Artificial Sequence
  GFR-binding peptide
  MOD_RES (4), (5), (37): Xaa is C or S
AGPXXTPTKMEPISMLYLNDKQQIIKFKYEGMVVDRX

SEQ ID NO: 66358 - protein, 34 aa, Artificial Sequence; identical to SEQ ID NO: 28615
  GFR-binding peptide
  MOD_RES (34), (34): Xaa is C or S
  MOD_RES (14), (15), (16), (17), (18): Xaa is A or G
  MOD_RES (19), (20), (21), (22): Xaa is A or G or is absent

SEQ ID NO: 66359 - protein, 39 aa, Artificial Sequence; identical to SEQ ID NO: 7405
  GFR-binding peptide
  MOD_RES (1), (2), (36), (38): Xaa is C or S
  MOD_RES (16), (17), (18), (19), (20): Xaa is A or G
  MOD_RES (21), (22), (23), (24): Xaa is A or G or is absent

SEQ ID NO: 66360 - protein, 37 aa, Artificial Sequence; identical to SEQ ID NO: 7406
  GFR-binding peptide
  MOD_RES (1), (35), (37): Xaa is C or S
  MOD_RES (15), (16), (17), (18), (19): Xaa is A or G
  MOD_RES (20), (21), (22), (23): Xaa is A or G or is absent

SEQ ID NO: 66361 - protein, 39 aa, Artificial Sequence
  GFR-binding peptide
  MOD_RES (5), (6), (38): Xaa is C or S
TPPTXXVPTRLEPISILYLDSANNVVKFKYEDMVVESXG

SEQ ID NO: 66362 - protein, 36 aa, Artificial Sequence; identical to SEQ ID NO: 57586
  GFR-binding peptide
  MOD_RES (2), (3), (36): Xaa is C or S
  MOD_RES (17), (18), (19), (20), (21): Xaa is A or G
  MOD_RES (22), (23), (24), (25): Xaa is A or G or is absent

SEQ ID NO: 66363 - protein, 37 aa, Artificial Sequence
  GFR-binding peptide
  MOD_RES (1), (35), (37): Xaa is C or S
  MOD_RES (15), (16), (17), (18), (19): Xaa is A or G
  MOD_RES (20), (21), (22), (23): Xaa is A or G or is absent
XVPEKMSPISILYKXXXXXXXXXLKYHYNMTVESXAX

SEQ ID NO: 66364 - protein, 32 aa, Artificial Sequence; identical to SEQ ID NO: 32688
  GFR-binding peptide
  MOD_RES (32), (32): Xaa is C or S

SEQ ID NO: 66365 - protein, 34 aa, Artificial Sequence; identical to SEQ ID NO: 28617
  GFR-binding peptide
  MOD_RES (1), (1): Xaa is C or S
  MOD_RES (15), (16), (17), (18), (19): Xaa is A or G
  MOD_RES (20), (21), (22), (23): Xaa is A or G or is absent

SEQ ID NO: 66366 - protein, 38 aa, Artificial Sequence; identical to SEQ ID NO: 7407
  GFR-binding peptide
  MOD_RES (4), (5), (38): Xaa is C or S

SEQ ID NO: 66367 - protein, 39 aa, Artificial Sequence; identical to SEQ ID NO: 7408
  GFR-binding peptide
  MOD_RES (5), (6), (37), (39): Xaa is C or S

SEQ ID NO: 66368 - protein, 38 aa, Artificial Sequence; identical to SEQ ID NO: 32692
  GFR-binding peptide
  MOD_RES (4), (5): Xaa is C or S
  MOD_RES (19), (20), (21), (22), (23): Xaa is A or G
  MOD_RES (24), (25), (26), (27): Xaa is A or G or is absent

SEQ ID NO: 66369 - protein, 44 aa, Artificial Sequence
  GFR-binding peptide
  MOD_RES (6), (7), (41), (43): Xaa is C or S
  MOD_RES (21), (22), (23), (24), (25): Xaa is A or G
  MOD_RES (26), (27), (28), (29): Xaa is A or G or is absent
HVPKPXXAPTKLSPISVLYKXXXXXXXXXLKYHYNMVVRSXGXH

SEQ ID NO: 66370 - protein, 36 aa, Artificial Sequence; identical to SEQ ID NO: 7409
  GFR-binding peptide
  MOD_RES (5), (6): Xaa is C or S

SEQ ID NO: 66371 - protein, 35 aa, Artificial Sequence; identical to SEQ ID NO: 7410
  GFR-binding peptide
  MOD_RES (4), (5): Xaa is C or S

SEQ ID NO: 66372 - protein, 39 aa, Artificial Sequence; identical to SEQ ID NO: 32696
  GFR-binding peptide
  MOD_RES (4), (5), (39): Xaa is C or S
  MOD_RES (19), (20), (21), (22), (23): Xaa is A or G
  MOD_RES (24), (25), (26), (27): Xaa is A or G or is absent

SEQ ID NO: 66373 - protein, 42 aa, Artificial Sequence; identical to SEQ ID NO: 7415
  GFR-binding peptide
  MOD_RES (6), (7), (39), (41): Xaa is C or S

SEQ ID NO: 66374 - protein, 38 aa, Artificial Sequence
  GFR-binding peptide
  MOD_RES (1), (35), (37): Xaa is C or S
  MOD_RES (15), (16), (17), (18), (19): Xaa is A or G
  MOD_RES (20), (21), (22), (23): Xaa is A or G or is absent
XVPEKMEPISILYLXXXXXXXXXKFKYENMTVESXAXR

SEQ ID NO: 66375 - protein, 40 aa, Artificial Sequence; identical to SEQ ID NO: 32700
  GFR-binding peptide
  MOD_RES (2), (3), (37), (39): Xaa is C or S
  MOD_RES (17), (18), (19), (20), (21): Xaa is A or G
  MOD_RES (22), (23), (24), (25): Xaa is A or G or is absent

SEQ ID NO: 66376 - protein, 36 aa, Artificial Sequence
  GFR-binding peptide
  MOD_RES (4), (5), (36): Xaa is C or S
PSTXXAPVKTSATSMLYYDNGRVLLLRKHRMIVEEX

SEQ ID NO: 66377 - protein, 34 aa, Artificial Sequence
  GFR-binding peptide
  MOD_RES (1), (1): Xaa is C or S
  MOD_RES (15), (16), (17), (18), (19): Xaa is A or G
  MOD_RES (20), (21), (22), (23): Xaa is A or G or is absent
XVPTRLSATSILYYXXXXXXXXXLRKHRDMVVES

SEQ ID NO: 66378 - protein, 33 aa, Artificial Sequence
  GFR-binding peptide
  MOD_RES (1), (33): Xaa is C or S
XTPTKMSPISMLYKNDKQQIILKYHYGMVVDRX

SEQ ID NO: 66379 - protein, 36 aa, Artificial Sequence; identical to SEQ ID NO: 32707
  GFR-binding peptide
  MOD_RES (2), (3): Xaa is C or S
  MOD_RES (17), (18), (19), (20), (21): Xaa is A or G
  MOD_RES (22), (23), (24), (25): Xaa is A or G or is absent

SEQ ID NO: 66380 - protein, 33 aa, Artificial Sequence; identical to SEQ ID NO: 28636
  GFR-binding peptide
  MOD_RES (2), (3): Xaa is C or S

SEQ ID NO: 66381 - protein, 33 aa, Artificial Sequence; identical to SEQ ID NO: 7423
  GFR-binding peptide
  MOD_RES (1), (33): Xaa is C or S

SEQ ID NO: 66382 - protein, 37 aa, Artificial Sequence; identical to SEQ ID NO: 7424
  GFR-binding peptide
  MOD_RES (1), (2), (35), (37): Xaa is C or S
  MOD_RES (16), (17), (18), (19), (20): Xaa is A or G
  MOD_RES (21), (22), (23), (24): Xaa is A or G or is absent

SEQ ID NO: 66383 - protein, 37 aa, Artificial Sequence
  GFR-binding peptide
  MOD_RES (6), (7): Xaa is C or S
KASKAXXVPTKLSATSILYYDKGVVTYLRKHRGMAVS

SEQ ID NO: 66384 - protein, 38 aa, Artificial Sequence; identical to SEQ ID NO: 7427
  GFR-binding peptide
  MOD_RES (5), (6): Xaa is C or S
  MOD_RES (20), (21), (22), (23), (24): Xaa is A or G
  MOD_RES (25), (26), (27), (28): Xaa is A or G or is absent

SEQ ID NO: 66385 - protein, 34 aa, Artificial Sequence; identical to SEQ ID NO: 7428
  GFR-binding peptide
  MOD_RES (1), (2), (34): Xaa is C or S

SEQ ID NO: 66386 - protein, 33 aa, Artificial Sequence; identical to SEQ ID NO: 32721
  GFR-binding peptide
  MOD_RES (31), (33): Xaa is C or S

SEQ ID NO: 66387 - protein, 37 aa, Artificial Sequence; identical to SEQ ID NO: 32724
  GFR-binding peptide
  MOD_RES (5), (6): Xaa is C or S

SEQ ID NO: 66388 - protein, 37 aa, Artificial Sequence; identical to SEQ ID NO: 7431
  GFR-binding peptide
  MOD_RES (3), (4), (35), (37): Xaa is C or S

SEQ ID NO: 66389 - protein, 36 aa, Artificial Sequence
  GFR-binding peptide
  MOD_RES (2), (3): Xaa is C or S
  MOD_RES (17), (18), (19), (20), (21): Xaa is A or G
  MOD_RES (22), (23), (24), (25): Xaa is A or G or is absent
PXXVPEKMSPISILYKXXXXXXXXXLKYHYNMTVES

SEQ ID NO: 66390 - protein, 34 aa, Artificial Sequence; identical to SEQ ID NO: 28653
  GFR-binding peptide
  MOD_RES (1), (1): Xaa is C or S
  MOD_RES (15), (16), (17), (18), (19): Xaa is A or G
  MOD_RES (20), (21), (22), (23): Xaa is A or G or is absent

SEQ ID NO: 66391 - protein, 42 aa, Artificial Sequence
  GFR-binding peptide
  MOD_RES (6), (7), (39), (41): Xaa is C or S
GSAGPXXTPTKMSATSMLYYNDKQQIILRKHRGMVVDRXGXS

SEQ ID NO: 66392 - protein, 43 aa, Artificial Sequence
  GFR-binding peptide
  MOD_RES (5), (6), (40), (42): Xaa is C or S
  MOD_RES (20), (21), (22), (23), (24): Xaa is A or G
  MOD_RES (25), (26), (27), (28): Xaa is A or G or is absent
IPEPXXVPEKMSPINILYFXXXXXXXXXYGKIPNMTVESXAXR

SEQ ID NO: 66393 - protein, 38 aa, Artificial Sequence; identical to SEQ ID NO: 7438
  GFR-binding peptide
  MOD_RES (1), (36), (38): Xaa is C or S
  MOD_RES (15), (16), (17), (18), (19): Xaa is A or G
  MOD_RES (20), (21), (22), (23): Xaa is A or G or is absent

SEQ ID NO: 66394 - protein, 35 aa, Artificial Sequence
  GFR-binding peptide
  MOD_RES (2), (3): Xaa is C or S
  MOD_RES (17), (18), (19), (20), (21): Xaa is A or G
  MOD_RES (22), (23), (24), (25): Xaa is A or G or is absent
PXXVPEKMSATSILYYXXXXXXXXXLRKHRNMTVE

SEQ ID NO: 66395 - protein, 36 aa, Artificial Sequence
  GFR-binding peptide
  MOD_RES (4), (5): Xaa is C or S
PPTXXVPTRLSATSILYYDSANNVVLRKHRDMVVES

SEQ ID NO: 66396 - protein, 38 aa, Artificial Sequence; identical to SEQ ID NO: 7441
  GFR-binding peptide
  MOD_RES (5), (6), (38): Xaa is C or S

SEQ ID NO: 66397 - protein, 38 aa, Artificial Sequence; identical to SEQ ID NO: 7445
  GFR-binding peptide
  MOD_RES (2), (3), (37): Xaa is C or S
  MOD_RES (17), (18), (19), (20), (21): Xaa is A or G
  MOD_RES (22), (23), (24), (25): Xaa is A or G or is absent

SEQ ID NO: 66398 - protein, 37 aa, Artificial Sequence
  GFR-binding peptide
  MOD_RES (2), (3), (35), (37): Xaa is C or S
TXXVPTRLSATSILYYDSANNVVLRKHRDMVVESXGX

SEQ ID NO: 66399 - protein, 33 aa, Artificial Sequence; identical to SEQ ID NO: 28669
  GFR-binding peptide
  MOD_RES (1), (33): Xaa is C or S

SEQ ID NO: 66400 - protein, 33 aa, Artificial Sequence; identical to SEQ ID NO: 28670
  GFR-binding peptide
  MOD_RES (2), (3): Xaa is C or S

SEQ ID NO: 66401 - protein, 37 aa, Artificial Sequence
  GFR-binding peptide
  MOD_RES (4), (5), (36): Xaa is C or S
PSTXXAPVKTSPISMLYKDNGRVLLLKYHYMIVEEXG

SEQ ID NO: 66402 - protein, 37 aa, Artificial Sequence; identical to SEQ ID NO: 32745
  GFR-binding peptide
  MOD_RES (4), (5), (37): Xaa is C or S

SEQ ID NO: 66403 - protein, 37 aa, Artificial Sequence; identical to SEQ ID NO: 32746
  GFR-binding peptide
  MOD_RES (1), (35), (37): Xaa is C or S
  MOD_RES (15), (16), (17), (18), (19): Xaa is A or G
  MOD_RES (20), (21), (22), (23): Xaa is A or G or is absent

SEQ ID NO: 66404 - protein, 42 aa, Artificial Sequence; identical to SEQ ID NO: 28676
  GFR-binding peptide
  MOD_RES (4), (5), (39), (41): Xaa is C or S
  MOD_RES (19), (20), (21), (22), (23): Xaa is A or G
  MOD_RES (24), (25), (26), (27): Xaa is A or G or is absent

SEQ ID NO: 66405 - protein, 39 aa, Artificial Sequence; identical to SEQ ID NO: 28677
  GFR-binding peptide
  MOD_RES (4), (5), (39): Xaa is C or S
  MOD_RES (19), (20), (21), (22), (23): Xaa is A or G
  MOD_RES (24), (25), (26), (27): Xaa is A or G or is absent

SEQ ID NO: 66406 - protein, 40 aa, Artificial Sequence; identical to SEQ ID NO: 7452
  GFR-binding peptide
  MOD_RES (6), (7), (38), (40): Xaa is C or S

SEQ ID NO: 66407 - protein, 32 aa, Artificial Sequence; identical to SEQ ID NO: 7454
  GFR-binding peptide
  MOD_RES (1), (1): Xaa is C or S

SEQ ID NO: 66408 - protein, 43 aa, Artificial Sequence
  GFR-binding peptide
  MOD_RES (6), (7), (41), (43): Xaa is C or S
  MOD_RES (21), (22), (23), (24), (25): Xaa is A or G
  MOD_RES (26), (27), (28), (29): Xaa is A or G or is absent
AAPASXXVPARLSATSILYYXXXXXXXXXLRKHRDMVVEAXGX

SEQ ID NO: 66409 - protein, 35 aa, Artificial Sequence
  GFR-binding peptide
  MOD_RES (4), (5): Xaa is C or S
PEPXXVPEKMNAISILYFDENKNVVLKKYRNMTVE

SEQ ID NO: 66410 - protein, 38 aa, Artificial Sequence; identical to SEQ ID NO: 32751
  GFR-binding peptide
  MOD_RES (2), (3), (35), (37): Xaa is C or S

SEQ ID NO: 66411 - protein, 40 aa, Artificial Sequence; identical to SEQ ID NO: 28684
  GFR-binding peptide
  MOD_RES (6), (7), (39): Xaa is C or S

SEQ ID NO: 66412 - protein, 35 aa, Artificial Sequence; identical to SEQ ID NO: 7459
  GFR-binding peptide
  MOD_RES (1), (2), (35): Xaa is C or S
  MOD_RES (16), (17), (18), (19), (20): Xaa is A or G
  MOD_RES (21), (22), (23), (24): Xaa is A or G or is absent

SEQ ID NO: 66413 - protein, 36 aa, Artificial Sequence; identical to SEQ ID NO: 7460
  GFR-binding peptide
  MOD_RES (5), (5): Xaa is C or S

SEQ ID NO: 66414 - protein, 34 aa, Artificial Sequence; identical to SEQ ID NO: 28689
  GFR-binding peptide
  MOD_RES (2), (3): Xaa is C or S

SEQ ID NO: 66415 - protein, 35 aa, Artificial Sequence; identical to SEQ ID NO: 28692
  GFR-binding peptide
  MOD_RES (1), (2), (34): Xaa is C or S

SEQ ID NO: 66416 - protein, 32 aa, Artificial Sequence
  GFR-binding peptide
  MOD_RES (31), (31): Xaa is C or S
APVKTEPISMLYLDNGRVLLKFKYEMIVEEXG

SEQ ID NO: 66417 - protein, 40 aa, Artificial Sequence; identical to SEQ ID NO: 7469
  GFR-binding peptide
  MOD_RES (5), (6), (38), (40): Xaa is C or S

SEQ ID NO: 66418 - protein, 39 aa, Artificial Sequence; identical to SEQ ID NO: 7470
  GFR-binding peptide
  MOD_RES (2), (3), (37), (39): Xaa is C or S
  MOD_RES (17), (18), (19), (20), (21): Xaa is A or G
  MOD_RES (22), (23), (24), (25): Xaa is A or G or is absent

SEQ ID NO: 66419 - protein, 43 aa, Artificial Sequence
  GFR-binding peptide
  MOD_RES (5), (6), (40), (42): Xaa is C or S
  MOD_RES (20), (21), (22), (23), (24): Xaa is A or G
  MOD_RES (25), (26), (27), (28): Xaa is A or G or is absent
IPEPXXVPEKMSATSILYYXXXXXXXXXLRKHRNMTVESXAXR

SEQ ID NO: 66420 - protein, 37 aa, Artificial Sequence
  GFR-binding peptide
  MOD_RES (34), (36): Xaa is C or S
  MOD_RES (14), (15), (16), (17), (18): Xaa is A or G
  MOD_RES (19), (20), (21), (22): Xaa is A or G or is absent
VPTRLSPISILYKXXXXXXXXXLKYHYDMVVESXGXR

SEQ ID NO: 66421 - protein, 32 aa, Artificial Sequence; identical to SEQ ID NO: 32760
  GFR-binding peptide
  MOD_RES (2), (2): Xaa is C or S

SEQ ID NO: 66422 - protein, 36 aa, Artificial Sequence; identical to SEQ ID NO: 7473
  GFR-binding peptide
  MOD_RES (2), (3): Xaa is C or S
  MOD_RES (17), (18), (19), (20), (21): Xaa is A or G
  MOD_RES (22), (23), (24), (25): Xaa is A or G or is absent

SEQ ID NO: 66423 - protein, 39 aa, Artificial Sequence; identical to SEQ ID NO: 7474
  GFR-binding peptide
  MOD_RES (4), (5), (39): Xaa is C or S
  MOD_RES (19), (20), (21), (22), (23): Xaa is A or G
  MOD_RES (24), (25), (26), (27): Xaa is A or G or is absent

SEQ ID NO: 66424 - protein, 36 aa, Artificial Sequence; identical to SEQ ID NO: 28701
  GFR-binding peptide
  MOD_RES (3), (4): Xaa is C or S
  MOD_RES (18), (19), (20), (21), (22): Xaa is A or G
  MOD_RES (23), (24), (25), (26): Xaa is A or G or is absent

SEQ ID NO: 66425 - protein, 35 aa, Artificial Sequence
  GFR-binding peptide
  MOD_RES (2), (3): Xaa is C or S
  MOD_RES (17), (18), (19), (20), (21): Xaa is A or G
  MOD_RES (22), (23), (24), (25): Xaa is A or G or is absent
PXXTPTKMSATSMLYYXXXXXXXXXLRKHRGMVVD

SEQ ID NO: 66426 - protein, 37 aa, Artificial Sequence; identical to SEQ ID NO: 7479
  GFR-binding peptide
  MOD_RES (4), (5): Xaa is C or S
  MOD_RES (19), (20), (21), (22), (23): Xaa is A or G
  MOD_RES (24), (25), (26), (27): Xaa is A or G or is absent

SEQ ID NO: 66427 - protein, 33 aa, Artificial Sequence
  GFR-binding peptide
  MOD_RES (2), (3): Xaa is C or S
PXXVPEKMEPISILYLDENKNVVKFKYENMTVE

SEQ ID NO: 66428 - protein, 39 aa, Artificial Sequence
  GFR-binding peptide
  MOD_RES (3), (4), (36), (38): Xaa is C or S
PTXXVPTRLSPISILYKDSANNVVLKYHYDMVVESXGXR

SEQ ID NO: 66429 - protein, 38 aa, Artificial Sequence; identical to SEQ ID NO: 7480
  GFR-binding peptide
  MOD_RES (1), (2), (36), (38): Xaa is C or S
  MOD_RES (16), (17), (18), (19), (20): Xaa is A or G
  MOD_RES (21), (22), (23), (24): Xaa is A or G or is absent

SEQ ID NO: 66430 - protein, 36 aa, Artificial Sequence
  GFR-binding peptide
  MOD_RES (2), (3), (35): Xaa is C or S
TXXVPTRLSPISILYKDSANNVVLKYHYDMVVESXG

SEQ ID NO: 66431 - protein, 40 aa, Artificial Sequence; identical to SEQ ID NO: 32771
  GFR-binding peptide
  MOD_RES (6), (7), (39): Xaa is C or S

SEQ ID NO: 66432 - protein, 41 aa, Artificial Sequence; identical to SEQ ID NO: 7483
  GFR-binding peptide
  MOD_RES (6), (7), (41): Xaa is C or S
  MOD_RES (21), (22), (23), (24), (25): Xaa is A or G
  MOD_RES (26), (27), (28), (29): Xaa is A or G or is absent

SEQ ID NO: 66433 - protein, 33 aa, Artificial Sequence; identical to SEQ ID NO: 7487
  GFR-binding peptide
  MOD_RES (14), (15), (16), (17), (18): Xaa is A or G
  MOD_RES (19), (20), (21), (22): Xaa is A or G or is absent

SEQ ID NO: 66434 - protein, 35 aa, Artificial Sequence
  GFR-binding peptide
  MOD_RES (3), (4), (35): Xaa is C or S
SPXXVPQDLSPINILYFVGRTPKVYGKIPMVVKSX

SEQ ID NO: 66435 - protein, 37 aa, Artificial Sequence; identical to SEQ ID NO: 7489
  GFR-binding peptide
  MOD_RES (6), (7): Xaa is C or S

SEQ ID NO: 66436 - protein, 42 aa, Artificial Sequence
  GFR-binding peptide
  MOD_RES (4), (5), (39), (41): Xaa is C or S
  MOD_RES (19), (20), (21), (22), (23): Xaa is A or G
  MOD_RES (24), (25), (26), (27): Xaa is A or G or is absent
PEPXXVPEKMNAISILYFXXXXXXXXXLKKYRNMTVESXAXR

SEQ ID NO: 66437 - protein, 41 aa, Artificial Sequence; identical to SEQ ID NO: 7491
  GFR-binding peptide
  MOD_RES (4), (5), (38), (40): Xaa is C or S

SEQ ID NO: 66438 - protein, 34 aa, Artificial Sequence; identical to SEQ ID NO: 28716
  GFR-binding peptide
  MOD_RES (1), (32), (34): Xaa is C or S

SEQ ID NO: 66439 - protein, 31 aa, Artificial Sequence; identical to SEQ ID NO: 7495
  GFR-binding peptide

SEQ ID NO: 66440 - protein, 36 aa, Artificial Sequence; identical to SEQ ID NO: 28718
  GFR-binding peptide
  MOD_RES (5), (5): Xaa is C or S

SEQ ID NO: 66441 - protein, 34 aa, Artificial Sequence; identical to SEQ ID NO: 28719
  GFR-binding peptide
  MOD_RES (2), (3): Xaa is C or S

SEQ ID NO: 66442 - protein, 39 aa, Artificial Sequence; identical to SEQ ID NO: 32788
  GFR-binding peptide
  MOD_RES (4), (5), (37), (39): Xaa is C or S

SEQ ID NO: 66443 - protein, 33 aa, Artificial Sequence; identical to SEQ ID NO: 7497
  GFR-binding peptide
  MOD_RES (1), (2): Xaa is C or S

SEQ ID NO: 66444 - protein, 33 aa, Artificial Sequence; identical to SEQ ID NO: 7499
  GFR-binding peptide
  MOD_RES (1), (1): Xaa is C or S
  MOD_RES (15), (16), (17), (18), (19): Xaa is A or G
  MOD_RES (20), (21), (22), (23): Xaa is A or G or is absent

SEQ ID NO: 66445 - protein, 41 aa, Artificial Sequence; identical to SEQ ID NO: 28727
  GFR-binding peptide
  MOD_RES (4), (5), (39), (41): Xaa is C or S
  MOD_RES (19), (20), (21), (22), (23): Xaa is A or G
  MOD_RES (24), (25), (26), (27): Xaa is A or G or is absent

SEQ ID NO: 66446 - protein, 42 aa, Artificial Sequence; identical to SEQ ID NO: 7500
  GFR-binding peptide
  MOD_RES (3), (4), (39), (41): Xaa is C or S
  MOD_RES (18), (19), (20), (21), (22): Xaa is A or G
  MOD_RES (23), (24), (25), (26): Xaa is A or G or is absent

SEQ ID NO: 66447 - protein, 37 aa, Artificial Sequence; identical to SEQ ID NO: 14808
  GFR-binding peptide
  MOD_RES (1), (2), (36): Xaa is C or S
  MOD_RES (16), (17), (18), (19), (20): Xaa is A or G
  MOD_RES (21), (22), (23), (24): Xaa is A or G or is absent

SEQ ID NO: 66448 - protein, 34 aa, Artificial Sequence; identical to SEQ ID NO: 28731
  GFR-binding peptide
  MOD_RES (2), (3): Xaa is C or S

SEQ ID NO: 66449 - protein, 45 aa, Artificial Sequence; identical to SEQ ID NO: 7504
  GFR-binding peptide
  MOD_RES (6), (7), (42), (44): Xaa is C or S
  MOD_RES (21), (22), (23), (24), (25): Xaa is A or G
  MOD_RES (26), (27), (28), (29): Xaa is A or G or is absent

SEQ ID NO: 66450 - protein, 36 aa, Artificial Sequence; identical to SEQ ID NO: 28734
  GFR-binding peptide
  MOD_RES (3), (4): Xaa is C or S
  MOD_RES (18), (19), (20), (21), (22): Xaa is A or G
  MOD_RES (23), (24), (25), (26): Xaa is A or G or is absent

SEQ ID NO: 66451 - protein, 33 aa, Artificial Sequence
  GFR-binding peptide
  MOD_RES (1), (1): Xaa is C or S
  MOD_RES (15), (16), (17), (18), (19): Xaa is A or G
  MOD_RES (20), (21), (22), (23): Xaa is A or G or is absent
XVPTRLEPISILYLXXXXXXXXXKFKYEDMVVE

SEQ ID NO: 66452 - protein, 38 aa, Artificial Sequence
  GFR-binding peptide
  MOD_RES (1), (35), (37): Xaa is C or S
  MOD_RES (15), (16), (17), (18), (19): Xaa is A or G
  MOD_RES (20), (21), (22), (23): Xaa is A or G or is absent
XVPTRLSATSILYYXXXXXXXXXLRKHRDMVVESXGXR

SEQ ID NO: 66453 - protein, 35 aa, Artificial Sequence; identical to SEQ ID NO: 7508
  GFR-binding peptide
  MOD_RES (1), (32), (34): Xaa is C or S

SEQ ID NO: 66454 - protein, 36 aa, Artificial Sequence
  GFR-binding peptide
  MOD_RES (1), (2), (36): Xaa is C or S
  MOD_RES (16), (17), (18), (19), (20): Xaa is A or G
  MOD_RES (21), (22), (23), (24): Xaa is A or G or is absent
XXVPEKMSPINILYFXXXXXXXXXYGKIPNMTVESX

SEQ ID NO: 66455 - protein, 42 aa, Artificial Sequence; identical to SEQ ID NO: 32807
  GFR-binding peptide
  MOD_RES (4), (5), (39), (41): Xaa is C or S
  MOD_RES (19), (20), (21), (22), (23): Xaa is A or G
  MOD_RES (24), (25), (26), (27): Xaa is A or G or is absent

SEQ ID NO: 66456 - protein, 35 aa, Artificial Sequence; identical to SEQ ID NO: 7509
  GFR-binding peptide
  MOD_RES (1), (33), (35): Xaa is C or S

SEQ ID NO: 66457 - protein, 35 aa, Artificial Sequence
  GFR-binding peptide
  MOD_RES (4), (5): Xaa is C or S
ASPXXVPQDLSPINILYFVGRTPKVYGKIPMVVKS

SEQ ID NO: 66458 - protein, 35 aa, Artificial Sequence; identical to SEQ ID NO: 7510
  GFR-binding peptide
  MOD_RES (1), (32), (34): Xaa is C or S

SEQ ID NO: 66459 - protein, 40 aa, Artificial Sequence
  GFR-binding peptide
  MOD_RES (6), (7), (38), (40): Xaa is C or S
ASAAPXXVPQALSPINILYFVGRKPKVYGKIPMIVRSXKX

SEQ ID NO: 66460 - protein, 39 aa, Artificial Sequence; identical to SEQ ID NO: 7511
  GFR-binding peptide
  MOD_RES (1), (2), (36), (38): Xaa is C or S
  MOD_RES (16), (17), (18), (19), (20): Xaa is A or G
  MOD_RES (21), (22), (23), (24): Xaa is A or G or is absent

SEQ ID NO: 66461 - protein, 39 aa, Artificial Sequence; identical to SEQ ID NO: 7513
  GFR-binding peptide
  MOD_RES (5), (6), (38): Xaa is C or S

SEQ ID NO: 66462 - protein, 32 aa, Artificial Sequence; identical to SEQ ID NO: 32816
  GFR-binding peptide
  MOD_RES (32), (32): Xaa is C or S

SEQ ID NO: 66463 - protein, 42 aa, Artificial Sequence
  GFR-binding peptide
  MOD_RES (5), (6), (39), (41): Xaa is C or S
  MOD_RES (20), (21), (22), (23), (24): Xaa is A or G
  MOD_RES (25), (26), (27), (28): Xaa is A or G or is absent
SASPXXVPQDLSPINILYFXXXXXXXXXYGKIPMVVKSXKXS

SEQ ID NO: 66464 - protein, 34 aa, Artificial Sequence
  GFR-binding peptide
  MOD_RES (34), (34): Xaa is C or S
  MOD_RES (14), (15), (16), (17), (18): Xaa is A or G
  MOD_RES (19), (20), (21), (22): Xaa is A or G or is absent
VPEKMEPISILYLXXXXXXXXXKFKYENMTVESX

SEQ ID NO: 66465 - protein, 40 aa, Artificial Sequence; identical to SEQ ID NO: 7518
  GFR-binding peptide
  MOD_RES (6), (38), (40): Xaa is C or S

SEQ ID NO: 66466 - protein, 39 aa, Artificial Sequence; identical to SEQ ID NO: 32818
  GFR-binding peptide
  MOD_RES (4), (5), (36), (38): Xaa is C or S

SEQ ID NO: 66467 - protein, 34 aa, Artificial Sequence; identical to SEQ ID NO: 28749
  GFR-binding peptide
  MOD_RES (1), (2), (34): Xaa is C or S

SEQ ID NO: 66468 - protein, 40 aa, Artificial Sequence
  GFR-binding peptide
  MOD_RES (6), (7), (38), (40): Xaa is C or S
RVPSTXXAPVKTEPISMLYLDNGRVLLKFKYEMIVEEXGX

SEQ ID NO: 66469 - protein, 41 aa, Artificial Sequence
  GFR-binding peptide
  MOD_RES (4), (5), (39), (41): Xaa is C or S
  MOD_RES (19), (20), (21), (22), (23): Xaa is A or G
  MOD_RES (24), (25), (26), (27): Xaa is A or G or is absent
PASXXVPARLSATSILYYXXXXXXXXXLRKHRDMVVEAXGX

SEQ ID NO: 66470 - protein, 40 aa, Artificial Sequence; identical to SEQ ID NO: 7520
  GFR-binding peptide
  MOD_RES (4), (5), (37), (39): Xaa is C or S

SEQ ID NO: 66471 - protein, 42 aa, Artificial Sequence
  GFR-binding peptide
  MOD_RES (4), (5), (39), (41): Xaa is C or S
  MOD_RES (19), (20), (21), (22), (23): Xaa is A or G
  MOD_RES (24), (25), (26), (27): Xaa is A or G or is absent
PEPXXVPEKMEPISILYLXXXXXXXXXKFKYENMTVESXAXR

SEQ ID NO: 66472 - protein, 37 aa, Artificial Sequence; identical to SEQ ID NO: 7523
  GFR-binding peptide
  MOD_RES (1), (2), (36): Xaa is C or S
  MOD_RES (16), (17), (18), (19), (20): Xaa is A or G
  MOD_RES (21), (22), (23), (24): Xaa is A or G or is absent

SEQ ID NO: 66473 - protein, 34 aa, Artificial Sequence
  GFR-binding peptide
  MOD_RES (33), (33): Xaa is C or S
  MOD_RES (14), (15), (16), (17), (18): Xaa is A or G
  MOD_RES (19), (20), (21), (22): Xaa is A or G or is absent
VPQDLSPINILYFXXXXXXXXXYGKIPMVVKSXK

SEQ ID NO: 66474 - protein, 39 aa, Artificial Sequence
  GFR-binding peptide
  MOD_RES (5), (6): Xaa is C or S
  MOD_RES (20), (21), (22), (23), (24): Xaa is A or G
  MOD_RES (25), (26), (27), (28): Xaa is A or G or is absent
SAGPXXTPTKMSPISMLYKXXXXXXXXXLKYHYGMVVDR

SEQ ID NO: 66475 - protein, 38 aa, Artificial Sequence
  GFR-binding peptide
  MOD_RES (1), (2), (35), (37): Xaa is C or S
  MOD_RES (16), (17), (18), (19), (20): Xaa is A or G
  MOD_RES (21), (22), (23), (24): Xaa is A or G or is absent
XXVSQDLSPINILYFXXXXXXXXXYGKIPMIVKSXKXS

SEQ ID NO: 66476 - protein, 37 aa, Artificial Sequence; identical to SEQ ID NO: 7525
  GFR-binding peptide
  MOD_RES (7), (7): Xaa is C or S

SEQ ID NO: 66477 - protein, 33 aa, Artificial Sequence; identical to SEQ ID NO: 7526
  GFR-binding peptide
  MOD_RES (33), (33): Xaa is C or S

SEQ ID NO: 66478 - protein, 38 aa, Artificial Sequence; identical to SEQ ID NO: 32829
  GFR-binding peptide
  MOD_RES (2), (3), (37): Xaa is C or S
  MOD_RES (17), (18), (19), (20), (21): Xaa is A or G
  MOD_RES (22), (23), (24), (25): Xaa is A or G or is absent

SEQ ID NO: 66479 - protein, 37 aa, Artificial Sequence; identical to SEQ ID NO: 7528
  GFR-binding peptide
  MOD_RES (2), (3): Xaa is C or S
  MOD_RES (17), (18), (19), (20), (21): Xaa is A or G
  MOD_RES (22), (23), (24), (25): Xaa is A or G or is absent

SEQ ID NO: 66480 - protein, 41 aa, Artificial Sequence
  GFR-binding peptide
  MOD_RES (3), (4), (38), (40): Xaa is C or S
  MOD_RES (18), (19), (20), (21), (22): Xaa is A or G
  MOD_RES (23), (24), (25), (26): Xaa is A or G or is absent
EPXXVPEKMSATSILYYXXXXXXXXXLRKHRNMTVESXAXR

SEQ ID NO: 66481 - protein, 32 aa, Artificial Sequence; identical to SEQ ID NO: 28765
  GFR-binding peptide
  MOD_RES (1), (2): Xaa is C or S

SEQ ID NO: 66482 - protein, 39 aa, Artificial Sequence; identical to SEQ ID NO: 32836
  GFR-binding peptide
  MOD_RES (2), (3), (37), (39): Xaa is C or S
  MOD_RES (17), (18), (19), (20), (21): Xaa is A or G
  MOD_RES (22), (23), (24), (25): Xaa is A or G or is absent

SEQ ID NO: 66483 - protein, 33 aa, Artificial Sequence; identical to SEQ ID NO: 28774
  GFR-binding peptide
  MOD_RES (33), (33): Xaa is C or S

SEQ ID NO: 66484 - protein, 34 aa, Artificial Sequence
  GFR-binding peptide
  MOD_RES (3), (4): Xaa is C or S
GPXXTPTKMSPISMLYKNDKQQIILKYHYGMVVD

SEQ ID NO: 66485 - protein, 34 aa, Artificial Sequence
  GFR-binding peptide
  MOD_RES (1), (33): Xaa is C or S
XVPTKLSATSILYYDKGVVTYLRKHRGMAVSEXG

SEQ ID NO: 66486 - protein, 35 aa, Artificial Sequence
  GFR-binding peptide
  MOD_RES (1), (34): Xaa is C or S
  MOD_RES (15), (16), (17), (18), (19): Xaa is A or G
  MOD_RES (20), (21), (22), (23): Xaa is A or G or is absent
XAPVKTSATSMLYYXXXXXXXXXLRKHRMIVEEXG

SEQ ID NO: 66487 - protein, 42 aa, Artificial Sequence; identical to SEQ ID NO: 32847
  GFR-binding peptide
  MOD_RES (5), (6), (40), (42): Xaa is C or S
  MOD_RES (20), (21), (22), (23), (24): Xaa is A or G
  MOD_RES (25), (26), (27), (28): Xaa is A or G or is absent

SEQ ID NO: 66488 - protein, 35 aa, Artificial Sequence; identical to SEQ ID NO: 32848
  GFR-binding peptide
  MOD_RES (1), (35): Xaa is C or S
  MOD_RES (15), (16), (17), (18), (19): Xaa is A or G
  MOD_RES (20), (21), (22), (23): Xaa is A or G or is absent

SEQ ID NO: 66489 - protein, 34 aa, Artificial Sequence; identical to SEQ ID NO: 7541
  GFR-binding peptide
  MOD_RES (32), (34): Xaa is C or S

SEQ ID NO: 66490 - protein, 36 aa, Artificial Sequence; identical to SEQ ID NO: 32849
  GFR-binding peptide
  MOD_RES (2), (3), (35): Xaa is C or S

SEQ ID NO: 66491 - protein, 35 aa, Artificial Sequence
  GFR-binding peptide
  MOD_RES (34), (34): Xaa is C or S
  MOD_RES (14), (15), (16), (17), (18): Xaa is A or G
  MOD_RES (19), (20), (21), (22): Xaa is A or G or is absent
TPTKMEPISMLYLXXXXXXXXXKFKYEGMVVDRXG

SEQ ID NO: 66492 - protein, 35 aa, Artificial Sequence; identical to SEQ ID NO: 28782
  GFR-binding peptide
  MOD_RES (2), (3), (35): Xaa is C or S

SEQ ID NO: 66493 - protein, 37 aa, Artificial Sequence; identical to SEQ ID NO: 28783
  GFR-binding peptide
  MOD_RES (3), (4): Xaa is C or S
  MOD_RES (18), (19), (20), (21), (22): Xaa is A or G
  MOD_RES (23), (24), (25), (26): Xaa is A or G or is absent

SEQ ID NO: 66494 - protein, 34 aa, Artificial Sequence; identical to SEQ ID NO: 57755
  GFR-binding peptide
  MOD_RES (32), (34): Xaa is C or S

SEQ ID NO: 66495 - protein, 38 aa, Artificial Sequence; identical to SEQ ID NO: 7546
  GFR-binding peptide
  MOD_RES (1), (35), (37): Xaa is C or S
  MOD_RES (15), (16), (17), (18), (19): Xaa is A or G
  MOD_RES (20), (21), (22), (23): Xaa is A or G or is absent

SEQ ID NO: 66496 - protein, 37 aa, Artificial Sequence; identical to SEQ ID NO: 7549
  GFR-binding peptide
  MOD_RES (6), (7): Xaa is C or S

SEQ ID NO: 66497 - protein, 37 aa, Artificial Sequence; identical to SEQ ID NO: 7556
  GFR-binding peptide
  MOD_RES (4), (5): Xaa is C or S
  MOD_RES (19), (20), (21), (22), (23): Xaa is A or G
  MOD_RES (24), (25), (26), (27): Xaa is A or G or is absent

SEQ ID NO: 66498 - protein, 40 aa, Artificial Sequence; identical to SEQ ID NO: 7557
  GFR-binding peptide
  MOD_RES (5), (6): Xaa is C or S
  MOD_RES (20), (21), (22), (23), (24): Xaa is A or G
  MOD_RES (25), (26), (27), (28): Xaa is A or G or is absent

SEQ ID NO: 66499 - protein, 38 aa, Artificial Sequence; identical to SEQ ID NO: 7560
  GFR-binding peptide
  MOD_RES (3), (4), (37): Xaa is C or S
  MOD_RES (18), (19), (20), (21), (22): Xaa is A or G
  MOD_RES (23), (24), (25), (26): Xaa is A or G or is absent

SEQ ID NO: 66500 - protein, 38 aa, Artificial Sequence; identical to SEQ ID NO: 7561
  GFR-binding peptide
  MOD_RES (4), (5), (37): Xaa is C or S

SEQ ID NO: 66501 - protein, 40 aa, Artificial Sequence; identical to SEQ ID NO: 7563
  GFR-binding peptide
  MOD_RES (5), (6), (38), (40): Xaa is C or S

SEQ ID NO: 66502 - protein, 38 aa, Artificial Sequence
  GFR-binding peptide
  MOD_RES (4), (5): Xaa is C or S
  MOD_RES (19), (20), (21), (22), (23): Xaa is A or G
  MOD_RES (24), (25), (26), (27): Xaa is A or G or is absent
PPTXXVPTRLSATSILYYXXXXXXXXXLRKHRDMVVES

SEQ ID NO: 66503 - protein, 33 aa, Artificial Sequence; identical to SEQ ID NO: 28802
  GFR-binding peptide
  MOD_RES (2), (3): Xaa is C or S

SEQ ID NO: 66504 - protein, 32 aa, Artificial Sequence; identical to SEQ ID NO: 28806
  GFR-binding peptide
  MOD_RES (14), (15), (16), (17), (18): Xaa is A or G
  MOD_RES (19), (20), (21), (22): Xaa is A or G or is absent

SEQ ID NO: 66505 - protein, 41 aa, Artificial Sequence; identical to SEQ ID NO: 7570
  GFR-binding peptide
  MOD_RES (5), (6), (38), (40): Xaa is C or S

SEQ ID NO: 66506 - protein, 36 aa, Artificial Sequence; identical to SEQ ID NO: 7572
  GFR-binding peptide
  MOD_RES (34), (36): Xaa is C or S
  MOD_RES (14), (15), (16), (17), (18): Xaa is A or G
  MOD_RES (19), (20), (21), (22): Xaa is A or G or is absent

SEQ ID NO: 66507 - protein, 38 aa, Artificial Sequence; identical to SEQ ID NO: 57790
  GFR-binding peptide
  MOD_RES (2), (3), (36), (38): Xaa is C or S
  MOD_RES (17), (18), (19), (20), (21): Xaa is A or G
  MOD_RES (22), (23), (24), (25): Xaa is A or G or is absent

SEQ ID NO: 66508 - protein, 35 aa, Artificial Sequence; identical to SEQ ID NO: 7573
  GFR-binding peptide
  MOD_RES (1), (33), (35): Xaa is C or S

SEQ ID NO: 66509 - protein, 40 aa, Artificial Sequence; identical to SEQ ID NO: 14884
  GFR-binding peptide
  MOD_RES (5), (6), (40): Xaa is C or S
  MOD_RES (20), (21), (22), (23), (24): Xaa is A or G
  MOD_RES (25), (26), (27), (28): Xaa is A or G or is absent

SEQ ID NO: 66510 - protein, 41 aa, Artificial Sequence; identical to SEQ ID NO: 32874
  GFR-binding peptide
  MOD_RES (6), (38), (40): Xaa is C or S

SEQ ID NO: 66511 - protein, 33 aa, Artificial Sequence; identical to SEQ ID NO: 28815
  GFR-binding peptide
  MOD_RES (1), (1): Xaa is C or S
  MOD_RES (15), (16), (17), (18), (19): Xaa is A or G
  MOD_RES (20), (21), (22), (23): Xaa is A or G or is absent

SEQ ID NO: 66512 - protein, 33 aa, Artificial Sequence
  GFR-binding peptide
  MOD_RES (1), (1): Xaa is C or S
  MOD_RES (15), (16), (17), (18), (19): Xaa is A or G
  MOD_RES (20), (21), (22), (23): Xaa is A or G or is absent
XVPEKMNAISILYFXXXXXXXXXLKKYRNMTVE

SEQ ID NO: 66513 - protein, 37 aa, Artificial Sequence; identical to SEQ ID NO: 7576
  GFR-binding peptide
  MOD_RES (2), (3), (35), (37): Xaa is C or S

SEQ ID NO: 66514 - protein, 33 aa, Artificial Sequence
  GFR-binding peptide
  MOD_RES (1), (2): Xaa is C or S
XXTPTKMSPISMLYKNDKQQIILKYHYGMVVDR

SEQ ID NO: 66515 - protein, 38 aa, Artificial Sequence; identical to SEQ ID NO: 7578
  GFR-binding peptide
  MOD_RES (5), (6): Xaa is C or S
  MOD_RES (20), (21), (22), (23), (24): Xaa is A or G
  MOD_RES (25), (26), (27), (28): Xaa is A or G or is absent

SEQ ID NO: 66516 - protein, 37 aa, Artificial Sequence; identical to SEQ ID NO: 28818
  GFR-binding peptide
  MOD_RES (2), (3), (35), (37): Xaa is C or S

SEQ ID NO: 66517 - protein, 38 aa, Artificial Sequence
  GFR-binding peptide
  MOD_RES (1), (35), (37): Xaa is C or S
  MOD_RES (15), (16), (17), (18), (19): Xaa is A or G
  MOD_RES (20), (21), (22), (23): Xaa is A or G or is absent
XVPTRLEPISILYLXXXXXXXXXKFKYEDMVVESXGXR

SEQ ID NO: 66518 - protein, 43 aa, Artificial Sequence; identical to SEQ ID NO: 7581
  GFR-binding peptide
  MOD_RES (6), (7), (41), (43): Xaa is C or S
  MOD_RES (21), (22), (23), (24), (25): Xaa is A or G
  MOD_RES (26), (27), (28), (29): Xaa is A or G or is absent

SEQ ID NO: 66519 - protein, 32 aa, Artificial Sequence; identical to SEQ ID NO: 32881
  GFR-binding peptide
  MOD_RES (32), (32): Xaa is C or S

SEQ ID NO: 66520 - protein, 37 aa, Artificial Sequence; identical to SEQ ID NO: 14888
  GFR-binding peptide
  MOD_RES (4), (5): Xaa is C or S
  MOD_RES (19), (20), (21), (22), (23): Xaa is A or G
  MOD_RES (24), (25), (26), (27): Xaa is A or G or is absent

SEQ ID NO: 66521 - protein, 34 aa, Artificial Sequence
  GFR-binding peptide
  MOD_RES (1), (33): Xaa is C or S
XVPTRLSPISILYKDSANNVVLKYHYDMVVESXG

SEQ ID NO: 66522 - protein, 38 aa, Artificial Sequence; identical to SEQ ID NO: 32884
  GFR-binding peptide
  MOD_RES (5), (6): Xaa is C or S
  MOD_RES (20), (21), (22), (23), (24): Xaa is A or G
  MOD_RES (25), (26), (27), (28): Xaa is A or G or is absent

SEQ ID NO: 66523 - protein, 39 aa, Artificial Sequence
  GFR-binding peptide
  MOD_RES (5), (6): Xaa is C or S
  MOD_RES (20), (21), (22), (23), (24): Xaa is A or G
  MOD_RES (25), (26), (27), (28): Xaa is A or G or is absent
SAGPXXTPTKMEPISMLYLXXXXXXXXXKFKYEGMVVDR

SEQ ID NO: 66524 - protein, 40 aa, Artificial Sequence; identical to SEQ ID NO: 7582
  GFR-binding peptide
  MOD_RES (5), (6), (37), (39): Xaa is C or S

SEQ ID NO: 66525 - protein, 35 aa, Artificial Sequence
  GFR-binding peptide
  MOD_RES (1), (2), (35): Xaa is C or S
  MOD_RES (16), (17), (18), (19), (20): Xaa is A or G
  MOD_RES (21), (22), (23), (24): Xaa is A or G or is absent
XXVPQDLSPINILYFXXXXXXXXXYGKIPMVVKSX

SEQ ID NO: 66526 - protein, 37 aa, Artificial Sequence
  GFR-binding peptide
  MOD_RES (1), (2), (34), (36): Xaa is C or S
XXVPTRLSPISILYKDSANNVVLKYHYDMVVESXGXR

SEQ ID NO: 66527 - protein, 33 aa, Artificial Sequence; identical to SEQ ID NO: 7583
  GFR-binding peptide
  MOD_RES (1), (1): Xaa is C or S
  MOD_RES (15), (16), (17), (18), (19): Xaa is A or G
  MOD_RES (20), (21), (22), (23): Xaa is A or G or is absent

SEQ ID NO: 66528 - protein, 36 aa, Artificial Sequence
  GFR-binding peptide
  MOD_RES (3), (4), (36): Xaa is C or S
KAXXVPTKLSATSILYYDKGVVTYLRKHRGMAVSEX

SEQ ID NO: 66529 - protein, 34 aa, Artificial Sequence; identical to SEQ ID NO: 7584
  GFR-binding peptide
  MOD_RES (2), (2): Xaa is C or S
  MOD_RES (16), (17), (18), (19), (20): Xaa is A or G
  MOD_RES (21), (22), (23), (24): Xaa is A or G or is absent

SEQ ID NO: 66530 - protein, 35 aa, Artificial Sequence; identical to SEQ ID NO: 7586
  GFR-binding peptide
  MOD_RES (32), (34): Xaa is C or S

SEQ ID NO: 66531 - protein, 43 aa, Artificial Sequence
  GFR-binding peptide
  MOD_RES (6), (7), (40), (42): Xaa is C or S
  MOD_RES (21), (22), (23), (24), (25): Xaa is A or G
  MOD_RES (26), (27), (28), (29): Xaa is A or G or is absent
ASASPXXVSQDLSPINILYFXXXXXXXXXYGKIPMIVKSXKXS

SEQ ID NO: 66532 - protein, 39 aa, Artificial Sequence; identical to SEQ ID NO: 28828
  GFR-binding peptide
  MOD_RES (3), (4), (38): Xaa is C or S
  MOD_RES (18), (19), (20), (21), (22): Xaa is A or G
  MOD_RES (23), (24), (25), (26): Xaa is A or G or is absent

SEQ ID NO: 66533 - protein, 38 aa, Artificial Sequence; identical to SEQ ID NO: 28829
  GFR-binding peptide
  MOD_RES (4), (5), (37): Xaa is C or S

SEQ ID NO: 66534 - protein, 36 aa, Artificial Sequence; identical to SEQ ID NO: 28830
  GFR-binding peptide
  MOD_RES (35), (35): Xaa is C or S
  MOD_RES (14), (15), (16), (17), (18): Xaa is A or G
  MOD_RES (19), (20), (21), (22): Xaa is A or G or is absent

SEQ ID NO: 66535 - protein, 34 aa, Artificial Sequence; identical to SEQ ID NO: 32891
  GFR-binding peptide
  MOD_RES (2), (3): Xaa is C or S

SEQ ID NO: 66536 - protein, 38 aa, Artificial Sequence; identical to SEQ ID NO: 32898
  GFR-binding peptide
  MOD_RES (6), (7): Xaa is C or S

SEQ ID NO: 66537 - protein, 35 aa, Artificial Sequence; identical to SEQ ID NO: 7592
  GFR-binding peptide
  MOD_RES (1), (2), (35): Xaa is C or S
  MOD_RES (16), (17), (18), (19), (20): Xaa is A or G
  MOD_RES (21), (22), (23), (24): Xaa is A or G or is absent

SEQ ID NO: 66538 - protein, 35 aa, Artificial Sequence
  GFR-binding peptide
  MOD_RES (1), (2), (34): Xaa is C or S
XXVPEKMSPISILYKDENKNVVLKYHYNMTVESXA

SEQ ID NO: 66539 - protein, 39 aa, Artificial Sequence; identical to SEQ ID NO: 28835
  GFR-binding peptide
  MOD_RES (3), (4), (38): Xaa is C or S
  MOD_RES (18), (19), (20), (21), (22): Xaa is A or G
  MOD_RES (23), (24), (25), (26): Xaa is A or G or is absent

SEQ ID NO: 66540 - protein, 35 aa, Artificial Sequence; identical to SEQ ID NO: 28836
  GFR-binding peptide
  MOD_RES (1), (34): Xaa is C or S
  MOD_RES (15), (16), (17), (18), (19): Xaa is A or G
  MOD_RES (20), (21), (22), (23): Xaa is A or G or is absent

SEQ ID NO: 66541 - protein, 38 aa, Artificial Sequence; identical to SEQ ID NO: 7596
  GFR-binding peptide
  MOD_RES (5), (6), (37): Xaa is C or S

SEQ ID NO: 66542 - protein, 36 aa, Artificial Sequence; identical to SEQ ID NO: 28837
  GFR-binding peptide
  MOD_RES (4), (5), (36): Xaa is C or S

SEQ ID NO: 66543 - protein, 40 aa, Artificial Sequence; identical to SEQ ID NO: 7597
  GFR-binding peptide
  MOD_RES (5), (6), (38), (40): Xaa is C or S

SEQ ID NO: 66544 - protein, 41 aa, Artificial Sequence
  GFR-binding peptide
  MOD_RES (6), (7), (38), (40): Xaa is C or S
ASAAPXXVPQALSPINILYFVGRKPKVYGKIPMIVRSXKXS

SEQ ID NO: 66545 - protein, 41 aa, Artificial Sequence; identical to SEQ ID NO: 28841
  GFR-binding peptide
  MOD_RES (6), (7), (39), (41): Xaa is C or S

SEQ ID NO: 66546 - protein, 34 aa, Artificial Sequence; identical to SEQ ID NO: 32915
  GFR-binding peptide
  MOD_RES (32), (34): Xaa is C or S

SEQ ID NO: 66547 - protein, 37 aa, Artificial Sequence; identical to SEQ ID NO: 28842
  GFR-binding peptide
  MOD_RES (6), (7): Xaa is C or S

SEQ ID NO: 66548 - protein, 39 aa, Artificial Sequence; identical to SEQ ID NO: 28844
  GFR-binding peptide
  MOD_RES (5), (6), (38): Xaa is C or S

SEQ ID NO: 66549 - protein, 35 aa, Artificial Sequence; identical to SEQ ID NO: 28848
  GFR-binding peptide
  MOD_RES (1), (2), (34): Xaa is C or S

SEQ ID NO: 66550 - protein, 40 aa, Artificial Sequence
  GFR-binding peptide
  MOD_RES (6), (7), (40): Xaa is C or S
  MOD_RES (21), (22), (23), (24), (25): Xaa is A or G
  MOD_RES (26), (27), (28), (29): Xaa is A or G or is absent
ASASPXXVPQDLSPINILYFXXXXXXXXXYGKIPMVVKSX

SEQ ID NO: 66551 - protein, 38 aa, Artificial Sequence; identical to SEQ ID NO: 7605
  GFR-binding peptide
  MOD_RES (6), (7), (38): Xaa is C or S

SEQ ID NO: 66552 - protein, 41 aa, Artificial Sequence; identical to SEQ ID NO: 32922
  GFR-binding peptide
  MOD_RES (6), (7), (39), (41): Xaa is C or S

SEQ ID NO: 66553 - protein, 39 aa, Artificial Sequence
  GFR-binding peptide
  MOD_RES (5), (6): Xaa is C or S
  MOD_RES (20), (21), (22), (23), (24): Xaa is A or G
  MOD_RES (25), (26), (27), (28): Xaa is A or G or is absent
TPPTXXVPTRLSATSILYYXXXXXXXXXLRKHRDMVVES

SEQ ID NO: 66554 - protein, 35 aa, Artificial Sequence; identical to SEQ ID NO: 7607
  GFR-binding peptide
  MOD_RES (4), (5): Xaa is C or S

SEQ ID NO: 66555 - protein, 36 aa, Artificial Sequence; identical to SEQ ID NO: 57826
  GFR-binding peptide
  MOD_RES (3), (4), (35): Xaa is C or S

SEQ ID NO: 66556 - protein, 36 aa, Artificial Sequence
  GFR-binding peptide
  MOD_RES (1), (35): Xaa is C or S
  MOD_RES (15), (16), (17), (18), (19): Xaa is A or G
  MOD_RES (20), (21), (22), (23): Xaa is A or G or is absent
XVPEKMSPINILYFXXXXXXXXXYGKIPNMTVESXA

SEQ ID NO: 66557 - protein, 43 aa, Artificial Sequence; identical to SEQ ID NO: 28857
  GFR-binding peptide
  MOD_RES (5), (6), (40), (42): Xaa is C or S
  MOD_RES (20), (21), (22), (23), (24): Xaa is A or G
  MOD_RES (25), (26), (27), (28): Xaa is A or G or is absent

SEQ ID NO: 66558 - protein, 37 aa, Artificial Sequence; identical to SEQ ID NO: 32932
  GFR-binding peptide
  MOD_RES (1), (2), (34), (36): Xaa is C or S

SEQ ID NO: 66559 - protein, 37 aa, Artificial Sequence; identical to SEQ ID NO: 28863
  GFR-binding peptide
  MOD_RES (3), (4): Xaa is C or S
  MOD_RES (18), (19), (20), (21), (22): Xaa is A or G
  MOD_RES (23), (24), (25), (26): Xaa is A or G or is absent

SEQ ID NO: 66560 - protein, 34 aa, Artificial Sequence; identical to SEQ ID NO: 28864
  GFR-binding peptide
  MOD_RES (2), (2): Xaa is C or S
  MOD_RES (16), (17), (18), (19), (20): Xaa is A or G
  MOD_RES (21), (22), (23), (24): Xaa is A or G or is absent

SEQ ID NO: 66561 - protein, 43 aa, Artificial Sequence; identical to SEQ ID NO: 32936
  GFR-binding peptide
  MOD_RES (6), (7), (40), (42): Xaa is C or S
  MOD_RES (21), (22), (23), (24), (25): Xaa is A or G
  MOD_RES (26), (27), (28), (29): Xaa is A or G or is absent

SEQ ID NO: 66562 - protein, 33 aa, Artificial Sequence
  GFR-binding peptide
  MOD_RES (2), (3): Xaa is C or S
PXXVPEKMSPISILYKDENKNVVLKYHYNMTVE

SEQ ID NO: 66563 - protein, 40 aa, Artificial Sequence; identical to SEQ ID NO: 28871
  GFR-binding peptide
  MOD_RES (5), (39): Xaa is C or S
  MOD_RES (19), (20), (21), (22), (23): Xaa is A or G
  MOD_RES (24), (25), (26), (27): Xaa is A or G or is absent

SEQ ID NO: 66564 - protein, 41 aa, Artificial Sequence; identical to SEQ ID NO: 32940
  GFR-binding peptide
  MOD_RES (3), (4), (38), (40): Xaa is C or S
  MOD_RES (18), (19), (20), (21), (22): Xaa is A or G
  MOD_RES (23), (24), (25), (26): Xaa is A or G or is absent

SEQ ID NO: 66565 - protein, 36 aa, Artificial Sequence; identical to SEQ ID NO: 7615
  GFR-binding peptide
  MOD_RES (1), (2), (36): Xaa is C or S
  MOD_RES (16), (17), (18), (19), (20): Xaa is A or G
  MOD_RES (21), (22), (23), (24): Xaa is A or G or is absent

SEQ ID NO: 66566 - protein, 33 aa, Artificial Sequence; identical to SEQ ID NO: 32941
  GFR-binding peptide
  MOD_RES (2), (3): Xaa is C or S

SEQ ID NO: 66567 - protein, 39 aa, Artificial Sequence; identical to SEQ ID NO: 7616
  GFR-binding peptide
  MOD_RES (6), (7): Xaa is C or S
  MOD_RES (21), (22), (23), (24), (25): Xaa is A or G
  MOD_RES (26), (27), (28), (29): Xaa is A or G or is absent

SEQ ID NO: 66568 - protein, 40 aa, Artificial Sequence; identical to SEQ ID NO: 28873
  GFR-binding peptide
  MOD_RES (2), (3), (37), (39): Xaa is C or S
  MOD_RES (17), (18), (19), (20), (21): Xaa is A or G
  MOD_RES (22), (23), (24), (25): Xaa is A or G or is absent

SEQ ID NO: 66569 - protein, 36 aa, Artificial Sequence; identical to SEQ ID NO: 32942
  GFR-binding peptide
  MOD_RES (1), (33), (35): Xaa is C or S

SEQ ID NO: 66570 - protein, 36 aa, Artificial Sequence; identical to SEQ ID NO: 32943
  GFR-binding peptide
  MOD_RES (1), (34), (36): Xaa is C or S
  MOD_RES (15), (16), (17), (18), (19): Xaa is A or G
  MOD_RES (20), (21), (22), (23): Xaa is A or G or is absent

SEQ ID NO: 66571 - protein, 35 aa, Artificial Sequence
  GFR-binding peptide
  MOD_RES (2), (3): Xaa is C or S
  MOD_RES (17), (18), (19), (20), (21): Xaa is A or G
  MOD_RES (22), (23), (24), (25): Xaa is A or G or is absent
PXXVPEKMSPISILYKXXXXXXXXXLKYHYNMTVE

SEQ ID NO: 66572 - protein, 38 aa, Artificial Sequence; identical to SEQ ID NO: 32945
  GFR-binding peptide
  MOD_RES (1), (35), (37): Xaa is C or S
  MOD_RES (15), (16), (17), (18), (19): Xaa is A or G
  MOD_RES (20), (21), (22), (23): Xaa is A or G or is absent

SEQ ID NO: 66573 - protein, 38 aa, Artificial Sequence; identical to SEQ ID NO: 7619
  GFR-binding peptide
  MOD_RES (5), (6), (38): Xaa is C or S

SEQ ID NO: 66574 - protein, 37 aa, Artificial Sequence
  GFR-binding peptide
  MOD_RES (2), (3), (36): Xaa is C or S
  MOD_RES (17), (18), (19), (20), (21): Xaa is A or G
  MOD_RES (22), (23), (24), (25): Xaa is A or G or is absent
TXXAPVKTEPISMLYLXXXXXXXXXKFKYEMIVEEXG

SEQ ID NO: 66575 - protein, 35 aa, Artificial Sequence; identical to SEQ ID NO: 7624
  GFR-binding peptide
  MOD_RES (3), (35): Xaa is C or S

SEQ ID NO: 66576 - protein, 40 aa, Artificial Sequence
  GFR-binding peptide
  MOD_RES (4), (5), (37), (39): Xaa is C or S
PASXXVPARLSATSILYYDAANNVVLRKHRDMVVEAXGXR

SEQ ID NO: 66577 - protein, 39 aa, Artificial Sequence; identical to SEQ ID NO: 32959
  GFR-binding peptide
  MOD_RES (2), (3), (37), (39): Xaa is C or S
  MOD_RES (17), (18), (19), (20), (21): Xaa is A or G
  MOD_RES (22), (23), (24), (25): Xaa is A or G or is absent

SEQ ID NO: 66578 - protein, 36 aa, Artificial Sequence; identical to SEQ ID NO: 7629
  GFR-binding peptide
  MOD_RES (3), (4): Xaa is C or S
  MOD_RES (18), (19), (20), (21), (22): Xaa is A or G
  MOD_RES (23), (24), (25), (26): Xaa is A or G or is absent

SEQ ID NO: 66579 - protein, 31 aa, Artificial Sequence; identical to SEQ ID NO: 28901
  GFR-binding peptide

SEQ ID NO: 66580 - protein, 34 aa, Artificial Sequence
  GFR-binding peptide
  MOD_RES (1), (2): Xaa is C or S
  MOD_RES (16), (17), (18), (19), (20): Xaa is A or G
  MOD_RES (21), (22), (23), (24): Xaa is A or G or is absent
XXTPTKMSPISMLYKXXXXXXXXXLKYHYGMVVD

SEQ ID NO: 66581 - protein, 41 aa, Artificial Sequence; identical to SEQ ID NO: 7630
  GFR-binding peptide
  MOD_RES (5), (6), (40): Xaa is C or S
  MOD_RES (20), (21), (22), (23), (24): Xaa is A or G
  MOD_RES (25), (26), (27), (28): Xaa is A or G or is absent

SEQ ID NO: 66582 - protein, 41 aa, Artificial Sequence
  GFR-binding peptide
  MOD_RES (3), (4), (38), (40): Xaa is C or S
  MOD_RES (18), (19), (20), (21), (22): Xaa is A or G
  MOD_RES (23), (24), (25), (26): Xaa is A or G or is absent
GPXXTPTKMSATSMLYYXXXXXXXXXLRKHRGMVVDRXGXS

SEQ ID NO: 66583 - protein, 37 aa, Artificial Sequence
  GFR-binding peptide
  MOD_RES (2), (3), (37): Xaa is C or S
  MOD_RES (17), (18), (19), (20), (21): Xaa is A or G
  MOD_RES (22), (23), (24), (25): Xaa is A or G or is absent
PXXVPEKMNAISILYFXXXXXXXXXLKKYRNMTVESX

SEQ ID NO: 66584 - protein, 38 aa, Artificial Sequence; identical to SEQ ID NO: 28908
  GFR-binding peptide
  MOD_RES (2), (3), (35), (37): Xaa is C or S

SEQ ID NO: 66585 - protein, 42 aa, Artificial Sequence; identical to SEQ ID NO: 28909
  GFR-binding peptide
  MOD_RES (4), (5), (39), (41): Xaa is C or S
  MOD_RES (19), (20), (21), (22), (23): Xaa is A or G
  MOD_RES (24), (25), (26), (27): Xaa is A or G or is absent

SEQ ID NO: 66586 - protein, 39 aa, Artificial Sequence
  GFR-binding peptide
  MOD_RES (3), (4), (36), (38): Xaa is C or S
GPXXTPTKMSPISMLYKNDKQQIILKYHYGMVVDRXGXS

SEQ ID NO: 66587 - protein, 31 aa, Artificial Sequence; identical to SEQ ID NO: 28912
  GFR-binding peptide
  MOD_RES (31), (31): Xaa is C or S

SEQ ID NO: 66588 - protein, 37 aa, Artificial Sequence; identical to SEQ ID NO: 7636
  GFR-binding peptide
  MOD_RES (3), (4), (36): Xaa is C or S

SEQ ID NO: 66589 - protein, 38 aa, Artificial Sequence; identical to SEQ ID NO: 7637
  GFR-binding peptide
  MOD_RES (2), (3), (37): Xaa is C or S
  MOD_RES (17), (18), (19), (20), (21): Xaa is A or G
  MOD_RES (22), (23), (24), (25): Xaa is A or G or is absent

SEQ ID NO: 66590 - protein, 36 aa, Artificial Sequence
  GFR-binding peptide
  MOD_RES (2), (3), (34), (36): Xaa is C or S
PXXVPQALSPINILYFVGRKPKVYGKIPMIVRSXKX

SEQ ID NO: 66591 - protein, 40 aa, Artificial Sequence; identical to SEQ ID NO: 7641
  GFR-binding peptide
  MOD_RES (6), (7): Xaa is C or S
  MOD_RES (21), (22), (23), (24), (25): Xaa is A or G
  MOD_RES (26), (27), (28), (29): Xaa is A or G or is absent

SEQ ID NO: 66592 - protein, 37 aa, Artificial Sequence; identical to SEQ ID NO: 28922
  GFR-binding peptide
  MOD_RES (1), (35), (37): Xaa is C or S
  MOD_RES (15), (16), (17), (18), (19): Xaa is A or G
  MOD_RES (20), (21), (22), (23): Xaa is A or G or is absent

SEQ ID NO: 66593 - protein, 36 aa, Artificial Sequence
  GFR-binding peptide
  MOD_RES (2), (3): Xaa is C or S
  MOD_RES (17), (18), (19), (20), (21): Xaa is A or G
  MOD_RES (22), (23), (24), (25): Xaa is A or G or is absent
PXXTPTKMEPISMLYLXXXXXXXXXKFKYEGMVVDR

SEQ ID NO: 66594 - protein, 42 aa, Artificial Sequence; identical to SEQ ID NO: 7645
  GFR-binding peptide
  MOD_RES (5), (6), (39), (41): Xaa is C or S
  MOD_RES (20), (21), (22), (23), (24): Xaa is A or G
  MOD_RES (25), (26), (27), (28): Xaa is A or G or is absent

SEQ ID NO: 66595 - protein, 40 aa, Artificial Sequence; identical to SEQ ID NO: 28927
  GFR-binding peptide
  MOD_RES (2), (3), (37), (39): Xaa is C or S
  MOD_RES (17), (18), (19), (20), (21): Xaa is A or G
  MOD_RES (22), (23), (24), (25): Xaa is A or G or is absent

SEQ ID NO: 66596 - protein, 40 aa, Artificial Sequence; identical to SEQ ID NO: 28928
  GFR-binding peptide
  MOD_RES (1), (2), (37), (39): Xaa is C or S
  MOD_RES (16), (17), (18), (19), (20): Xaa is A or G
  MOD_RES (21), (22), (23), (24): Xaa is A or G or is absent

SEQ ID NO: 66597 - protein, 35 aa, Artificial Sequence
  GFR-binding peptide
  MOD_RES (1), (2): Xaa is C or S
  MOD_RES (16), (17), (18), (19), (20): Xaa is A or G
  MOD_RES (21), (22), (23), (24): Xaa is A or G or is absent
XXTPTKMEPISMLYLXXXXXXXXXKFKYEGMVVDR

SEQ ID NO: 66598 - protein, 33 aa, Artificial Sequence; identical to SEQ ID NO: 7648
  GFR-binding peptide
  MOD_RES (1), (32): Xaa is C or S

SEQ ID NO: 66599 - protein, 43 aa, Artificial Sequence
  GFR-binding peptide
  MOD_RES (6), (7), (40), (42): Xaa is C or S
  MOD_RES (21), (22), (23), (24), (25): Xaa is A or G
  MOD_RES (26), (27), (28), (29): Xaa is A or G or is absent
RVPSTXXAPVKTSPISMLYKXXXXXXXXXLKYHYMIVEEXGXL

SEQ ID NO: 66600 - protein, 39 aa, Artificial Sequence; identical to SEQ ID NO: 7649
  GFR-binding peptide
  MOD_RES (4), (5), (37), (39): Xaa is C or S

SEQ ID NO: 66601 - protein, 41 aa, Artificial Sequence; identical to SEQ ID NO: 7651
  GFR-binding peptide
  MOD_RES (5), (6), (40): Xaa is C or S
  MOD_RES (20), (21), (22), (23), (24): Xaa is A or G
  MOD_RES (25), (26), (27), (28): Xaa is A or G or is absent

SEQ ID NO: 66602 - protein, 37 aa, Artificial Sequence; identical to SEQ ID NO: 7653
  GFR-binding peptide
  MOD_RES (1), (2), (35), (37): Xaa is C or S
  MOD_RES (16), (17), (18), (19), (20): Xaa is A or G
  MOD_RES (21), (22), (23), (24): Xaa is A or G or is absent

SEQ ID NO: 66603 - protein, 35 aa, Artificial Sequence; identical to SEQ ID NO: 28936
  GFR-binding peptide
  MOD_RES (32), (34): Xaa is C or S

SEQ ID NO: 66604 - protein, 33 aa, Artificial Sequence; identical to SEQ ID NO: 28937
  GFR-binding peptide
  MOD_RES (32), (32): Xaa is C or S

SEQ ID NO: 66605 - protein, 36 aa, Artificial Sequence; identical to SEQ ID NO: 32992
  GFR-binding peptide
  MOD_RES (5), (6): Xaa is C or S

SEQ ID NO: 66606 - protein, 39 aa, Artificial Sequence
  GFR-binding peptide
  MOD_RES (4), (5), (38): Xaa is C or S
  MOD_RES (19), (20), (21), (22), (23): Xaa is A or G
  MOD_RES (24), (25), (26), (27): Xaa is A or G or is absent
PSTXXAPVKTSPISMLYKXXXXXXXXXLKYHYMIVEEXG

SEQ ID NO: 66607 - protein, 40 aa, Artificial Sequence; identical to SEQ ID NO: 28940
  GFR-binding peptide
  MOD_RES (4), (38), (40): Xaa is C or S
  MOD_RES (18), (19), (20), (21), (22): Xaa is A or G
  MOD_RES (23), (24), (25), (26): Xaa is A or G or is absent

SEQ ID NO: 66608 - protein, 40 aa, Artificial Sequence
  GFR-binding peptide
  MOD_RES (5), (6), (39): Xaa is C or S
  MOD_RES (20), (21), (22), (23), (24): Xaa is A or G
  MOD_RES (25), (26), (27), (28): Xaa is A or G or is absent
VPSTXXAPVKTSATSMLYYXXXXXXXXXLRKHRMIVEEXG

SEQ ID NO: 66609 - protein, 36 aa, Artificial Sequence; identical to SEQ ID NO: 7658
  GFR-binding peptide
  MOD_RES (5), (6): Xaa is C or S

SEQ ID NO: 66610 - protein, 40 aa, Artificial Sequence; identical to SEQ ID NO: 7660
  GFR-binding peptide
  MOD_RES (3), (4), (38), (40): Xaa is C or S
  MOD_RES (18), (19), (20), (21), (22): Xaa is A or G
  MOD_RES (23), (24), (25), (26): Xaa is A or G or is absent

SEQ ID NO: 66611 - protein, 36 aa, Artificial Sequence; identical to SEQ ID NO: 28946
  GFR-binding peptide
  MOD_RES (3), (4): Xaa is C or S
  MOD_RES (18), (19), (20), (21), (22): Xaa is A or G
  MOD_RES (23), (24), (25), (26): Xaa is A or G or is absent

SEQ ID NO: 66612 - protein, 35 aa, Artificial Sequence
  GFR-binding peptide
  MOD_RES (1), (2), (33), (35): Xaa is C or S
XXAPVKTEPISMLYLDNGRVLLKFKYEMIVEEXGX

SEQ ID NO: 66613 - protein, 38 aa, Artificial Sequence; identical to SEQ ID NO: 33007
  GFR-binding peptide
  MOD_RES (5), (37): Xaa is C or S

SEQ ID NO: 66614 - protein, 34 aa, Artificial Sequence; identical to SEQ ID NO: 7664
  GFR-binding peptide
  MOD_RES (34), (34): Xaa is C or S
  MOD_RES (14), (15), (16), (17), (18): Xaa is A or G
  MOD_RES (19), (20), (21), (22): Xaa is A or G or is absent

SEQ ID NO: 66615 - protein, 38 aa, Artificial Sequence; identical to SEQ ID NO: 7665
  GFR-binding peptide
  MOD_RES (4), (38): Xaa is C or S
  MOD_RES (18), (19), (20), (21), (22): Xaa is A or G
  MOD_RES (23), (24), (25), (26): Xaa is A or G or is absent

SEQ ID NO: 66616 - protein, 37 aa, Artificial Sequence; identical to SEQ ID NO: 7666
  GFR-binding peptide
  MOD_RES (2), (3), (34), (36): Xaa is C or S

SEQ ID NO: 66617 - protein, 39 aa, Artificial Sequence; identical to SEQ ID NO: 28955
  GFR-binding peptide
  MOD_RES (4), (5), (36), (38): Xaa is C or S

SEQ ID NO: 66618 - protein, 42 aa, Artificial Sequence; identical to SEQ ID NO: 7668
  GFR-binding peptide
  MOD_RES (3), (4), (39), (41): Xaa is C or S
  MOD_RES (18), (19), (20), (21), (22): Xaa is A or G
  MOD_RES (23), (24), (25), (26): Xaa is A or G or is absent

SEQ ID NO: 66619 - protein, 35 aa, Artificial Sequence; identical to SEQ ID NO: 28956
  GFR-binding peptide
  MOD_RES (2), (3), (35): Xaa is C or S

SEQ ID NO: 66620 - protein, 42 aa, Artificial Sequence; identical to SEQ ID NO: 33013
  GFR-binding peptide
  MOD_RES (6), (40), (42): Xaa is C or S
  MOD_RES (20), (21), (22), (23), (24): Xaa is A or G
  MOD_RES (25), (26), (27), (28): Xaa is A or G or is absent

SEQ ID NO: 66621 - protein, 37 aa, Artificial Sequence; identical to SEQ ID NO: 28958
  GFR-binding peptide
  MOD_RES (2), (3): Xaa is C or S
  MOD_RES (17), (18), (19), (20), (21): Xaa is A or G
  MOD_RES (22), (23), (24), (25): Xaa is A or G or is absent

SEQ ID NO: 66622 - protein, 36 aa, Artificial Sequence; identical to SEQ ID NO: 33015
  GFR-binding peptide
  MOD_RES (1), (35): Xaa is C or S
  MOD_RES (15), (16), (17), (18), (19): Xaa is A or G
  MOD_RES (20), (21), (22), (23): Xaa is A or G or is absent

SEQ ID NO: 66623 - protein, 36 aa, Artificial Sequence; identical to SEQ ID NO: 28962
  GFR-binding peptide
  MOD_RES (1), (35): Xaa is C or S
  MOD_RES (15), (16), (17), (18), (19): Xaa is A or G
  MOD_RES (20), (21), (22), (23): Xaa is A or G or is absent

SEQ ID NO: 66624 - protein, 34 aa, Artificial Sequence; identical to SEQ ID NO: 33018
  GFR-binding peptide
  MOD_RES (1), (2), (34): Xaa is C or S

SEQ ID NO: 66625 - protein, 38 aa, Artificial Sequence; identical to SEQ ID NO: 33023
  GFR-binding peptide
  MOD_RES (3), (4), (38): Xaa is C or S
  MOD_RES (18), (19), (20), (21), (22): Xaa is A or G
  MOD_RES (23), (24), (25), (26): Xaa is A or G or is absent

SEQ ID NO: 66626 - protein, 44 aa, Artificial Sequence; identical to SEQ ID NO: 28965
  GFR-binding peptide
  MOD_RES (7), (41), (43): Xaa is C or S
  MOD_RES (21), (22), (23), (24), (25): Xaa is A or G
  MOD_RES (26), (27), (28), (29): Xaa is A or G or is absent

SEQ ID NO: 66627 - protein, 42 aa, Artificial Sequence; identical to SEQ ID NO: 28966
  GFR-binding peptide
  MOD_RES (5), (6), (40), (42): Xaa is C or S
  MOD_RES (20), (21), (22), (23), (24): Xaa is A or G
  MOD_RES (25), (26), (27), (28): Xaa is A or G or is absent

SEQ ID NO: 66628 - protein, 36 aa, Artificial Sequence; identical to SEQ ID NO: 7673
  GFR-binding peptide
  MOD_RES (2), (3), (35): Xaa is C or S

SEQ ID NO: 66629 - protein, 32 aa, Artificial Sequence; identical to SEQ ID NO: 33028
  GFR-binding peptide
  MOD_RES (32), (32): Xaa is C or S

SEQ ID NO: 66630 - protein, 37 aa, Artificial Sequence
  GFR-binding peptide
  MOD_RES (2), (3), (35), (37): Xaa is C or S
SXXVPARLSATSILYYDAANNVVLRKHRDMVVEAXGX

SEQ ID NO: 66631 - protein, 39 aa, Artificial Sequence; identical to SEQ ID NO: 33030
  GFR-binding peptide
  MOD_RES (5), (6): Xaa is C or S
  MOD_RES (20), (21), (22), (23), (24): Xaa is A or G
  MOD_RES (25), (26), (27), (28): Xaa is A or G or is absent

SEQ ID NO: 66632 - protein, 40 aa, Artificial Sequence; identical to SEQ ID NO: 33033
  GFR-binding peptide
  MOD_RES (3), (4), (38), (40): Xaa is C or S
  MOD_RES (18), (19), (20), (21), (22): Xaa is A or G
  MOD_RES (23), (24), (25), (26): Xaa is A or G or is absent

SEQ ID NO: 66633 - protein, 33 aa, Artificial Sequence; identical to SEQ ID NO: 33034
  GFR-binding peptide
  MOD_RES (1), (33): Xaa is C or S

SEQ ID NO: 66634 - protein, 32 aa, Artificial Sequence; identical to SEQ ID NO: 7678
  GFR-binding peptide
  MOD_RES (32), (32): Xaa is C or S

SEQ ID NO: 66635 - protein, 39 aa, Artificial Sequence; identical to SEQ ID NO: 7679
  GFR-binding peptide
  MOD_RES (3), (4), (37), (39): Xaa is C or S
  MOD_RES (18), (19), (20), (21), (22): Xaa is A or G
  MOD_RES (23), (24), (25), (26): Xaa is A or G or is absent

SEQ ID NO: 66636 - protein, 35 aa, Artificial Sequence; identical to SEQ ID NO: 7682
  GFR-binding peptide
  MOD_RES (4), (5): Xaa is C or S

SEQ ID NO: 66637 - protein, 41 aa, Artificial Sequence; identical to SEQ ID NO: 7683
  GFR-binding peptide
  MOD_RES (6), (7), (40): Xaa is C or S
  MOD_RES (21), (22), (23), (24), (25): Xaa is A or G
  MOD_RES (26), (27), (28), (29): Xaa is A or G or is absent

SEQ ID NO: 66638 - protein, 36 aa, Artificial Sequence
  GFR-binding peptide
  MOD_RES (3), (4), (35): Xaa is C or S
STXXAPVKTSPISMLYKDNGRVLLLKYHYMIVEEXG

SEQ ID NO: 66639 - protein, 41 aa, Artificial Sequence; identical to SEQ ID NO: 7684
  GFR-binding peptide
  MOD_RES (6), (7), (40): Xaa is C or S
  MOD_RES (21), (22), (23), (24), (25): Xaa is A or G
  MOD_RES (26), (27), (28), (29): Xaa is A or G or is absent

SEQ ID NO: 66640 - protein, 33 aa, Artificial Sequence; identical to SEQ ID NO: 7685
  GFR-binding peptide
  MOD_RES (2), (3): Xaa is C or S

SEQ ID NO: 66641 - protein, 36 aa, Artificial Sequence
  GFR-binding peptide
  MOD_RES (4), (5): Xaa is C or S
AGPXXTPTKMEPISMLYLNDKQQIIKFKYEGMVVDR

SEQ ID NO: 66642 - protein, 37 aa, Artificial Sequence
  GFR-binding peptide
  MOD_RES (4), (5), (37): Xaa is C or S
PEPXXVPEKMSPINILYFDENKNVVYGKIPNMTVESX

SEQ ID NO: 66643 - protein, 35 aa, Artificial Sequence; identical to SEQ ID NO: 7688
  GFR-binding peptide
  MOD_RES (1), (2), (35): Xaa is C or S

SEQ ID NO: 66644 - protein, 37 aa, Artificial Sequence; identical to SEQ ID NO: 7689
  GFR-binding peptide
  MOD_RES (4), (5): Xaa is C or S
  MOD_RES (19), (20), (21), (22), (23): Xaa is A or G
  MOD_RES (24), (25), (26), (27): Xaa is A or G or is absent

SEQ ID NO: 66645 - protein, 39 aa, Artificial Sequence; identical to SEQ ID NO: 7690
  GFR-binding peptide
  MOD_RES (6), (7): Xaa is C or S
  MOD_RES (21), (22), (23), (24), (25): Xaa is A or G
  MOD_RES (26), (27), (28), (29): Xaa is A or G or is absent

SEQ ID NO: 66646 - protein, 36 aa, Artificial Sequence; identical to SEQ ID NO: 7695
  GFR-binding peptide
  MOD_RES (1), (2), (36): Xaa is C or S
  MOD_RES (16), (17), (18), (19), (20): Xaa is A or G
  MOD_RES (21), (22), (23), (24): Xaa is A or G or is absent

SEQ ID NO: 66647 - protein, 36 aa, Artificial Sequence; identical to SEQ ID NO: 7696
  GFR-binding peptide
  MOD_RES (5), (6): Xaa is C or S

SEQ ID NO: 66648 - protein, 40 aa, Artificial Sequence; identical to SEQ ID NO: 7697
  GFR-binding peptide
  MOD_RES (2), (3), (37), (39): Xaa is C or S
  MOD_RES (17), (18), (19), (20), (21): Xaa is A or G
  MOD_RES (22), (23), (24), (25): Xaa is A or G or is absent

SEQ ID NO: 66649 - protein, 32 aa, Artificial Sequence
  GFR-binding peptide
  MOD_RES (1), (2): Xaa is C or S
XXVPQALSPINILYFVGRKPKVYGKIPMIVRS

SEQ ID NO: 66650 - protein, 35 aa, Artificial Sequence; identical to SEQ ID NO: 7701
  GFR-binding peptide
  MOD_RES (2), (3), (35): Xaa is C or S

SEQ ID NO: 66651 - protein, 38 aa, Artificial Sequence; identical to SEQ ID NO: 33058
  GFR-binding peptide
  MOD_RES (6), (7): Xaa is C or S

SEQ ID NO: 66652 - protein, 35 aa, Artificial Sequence; identical to SEQ ID NO: 7702
  GFR-binding peptide
  MOD_RES (2), (3): Xaa is C or S
  MOD_RES (17), (18), (19), (20), (21): Xaa is A or G
  MOD_RES (22), (23), (24), (25): Xaa is A or G or is absent

SEQ ID NO: 66653 - protein, 35 aa, Artificial Sequence; identical to SEQ ID NO: 7703
  GFR-binding peptide
  MOD_RES (2), (3), (35): Xaa is C or S

SEQ ID NO: 66654 - protein, 35 aa, Artificial Sequence; identical to SEQ ID NO: 7704
  GFR-binding peptide
  MOD_RES (1), (2), (33), (35): Xaa is C or S

SEQ ID NO: 66655 - protein, 34 aa, Artificial Sequence; identical to SEQ ID NO: 33059
  GFR-binding peptide
  MOD_RES (1), (2), (34): Xaa is C or S

SEQ ID NO: 66656 - protein, 35 aa, Artificial Sequence; identical to SEQ ID NO: 15003
  GFR-binding peptide
  MOD_RES (3), (4): Xaa is C or S

SEQ ID NO: 66657 - protein, 34 aa, Artificial Sequence; identical to SEQ ID NO: 7705
  GFR-binding peptide
  MOD_RES (34), (34): Xaa is C or S
  MOD_RES (14), (15), (16), (17), (18): Xaa is A or G
  MOD_RES (19), (20), (21), (22): Xaa is A or G or is absent

SEQ ID NO: 66658 - protein, 44 aa, Artificial Sequence; identical to SEQ ID NO: 7706
  GFR-binding peptide
  MOD_RES (7), (41), (43): Xaa is C or S
  MOD_RES (21), (22), (23), (24), (25): Xaa is A or G
  MOD_RES (26), (27), (28), (29): Xaa is A or G or is absent

SEQ ID NO: 66659 - protein, 36 aa, Artificial Sequence; identical to SEQ ID NO: 29006
  GFR-binding peptide
  MOD_RES (2), (36): Xaa is C or S
  MOD_RES (16), (17), (18), (19), (20): Xaa is A or G
  MOD_RES (21), (22), (23), (24): Xaa is A or G or is absent

SEQ ID NO: 66660 - protein, 34 aa, Artificial Sequence; identical to SEQ ID NO: 7709
  GFR-binding peptide
  MOD_RES (1), (2): Xaa is C or S
  MOD_RES (16), (17), (18), (19), (20): Xaa is A or G
  MOD_RES (21), (22), (23), (24): Xaa is A or G or is absent

SEQ ID NO: 66661 - protein, 39 aa, Artificial Sequence; identical to SEQ ID NO: 29009
  GFR-binding peptide
  MOD_RES (5), (6): Xaa is C or S
  MOD_RES (20), (21), (22), (23), (24): Xaa is A or G
  MOD_RES (25), (26), (27), (28): Xaa is A or G or is absent

SEQ ID NO: 66662 - protein, 35 aa, Artificial Sequence; identical to SEQ ID NO: 7714
  GFR-binding peptide
  MOD_RES (1), (2), (33), (35): Xaa is C or S

SEQ ID NO: 66663 - protein, 36 aa, Artificial Sequence
  GFR-binding peptide
  MOD_RES (5), (6): Xaa is C or S
TPPTXXVPTRLEPISILYLDSANNVVKFKYEDMVVE

SEQ ID NO: 66664 - protein, 35 aa, Artificial Sequence
  GFR-binding peptide
  MOD_RES (34), (34): Xaa is C or S
  MOD_RES (14), (15), (16), (17), (18): Xaa is A or G
  MOD_RES (19), (20), (21), (22): Xaa is A or G or is absent
TPTKMSPISMLYKXXXXXXXXXLKYHYGMVVDRXG

SEQ ID NO: 66665 - protein, 36 aa, Artificial Sequence; identical to SEQ ID NO: 33069
  GFR-binding peptide
  MOD_RES (4), (5): Xaa is C or S

SEQ ID NO: 66666 - protein, 32 aa, Artificial Sequence; identical to SEQ ID NO: 29012
  GFR-binding peptide
  MOD_RES (1), (1): Xaa is C or S

SEQ ID NO: 66667 - protein, 35 aa, Artificial Sequence
  GFR-binding peptide
  MOD_RES (2), (3): Xaa is C or S
  MOD_RES (17), (18), (19), (20), (21): Xaa is A or G
  MOD_RES (22), (23), (24), (25): Xaa is A or G or is absent
PXXVPEKMEPISILYLXXXXXXXXXKFKYENMTVE

SEQ ID NO: 66668 - protein, 36 aa, Artificial Sequence
  GFR-binding peptide
  MOD_RES (3), (4), (35): Xaa is C or S
SPXXVPQDLSPINILYFVGRTPKVYGKIPMVVKSXK

SEQ ID NO: 66669 - protein, 39 aa, Artificial Sequence; identical to SEQ ID NO: 29013
  GFR-binding peptide
  MOD_RES (4), (38): Xaa is C or S
  MOD_RES (18), (19), (20), (21), (22): Xaa is A or G
  MOD_RES (23), (24), (25), (26): Xaa is A or G or is absent

SEQ ID NO: 66670 - protein, 39 aa, Artificial Sequence; identical to SEQ ID NO: 29014
  GFR-binding peptide
  MOD_RES (4), (5): Xaa is C or S
  MOD_RES (19), (20), (21), (22), (23): Xaa is A or G
  MOD_RES (24), (25), (26), (27): Xaa is A or G or is absent

SEQ ID NO: 66671 - protein, 37 aa, Artificial Sequence; identical to SEQ ID NO: 29015
  GFR-binding peptide
  MOD_RES (7), (7): Xaa is C or S

SEQ ID NO: 66672 - protein, 34 aa, Artificial Sequence; identical to SEQ ID NO: 7721
  GFR-binding peptide
  MOD_RES (32), (34): Xaa is C or S

SEQ ID NO: 66673 - protein, 40 aa, Artificial Sequence; identical to SEQ ID NO: 29021
  GFR-binding peptide
  MOD_RES (6), (7), (39): Xaa is C or S

SEQ ID NO: 66674 - protein, 35 aa, Artificial Sequence; identical to SEQ ID NO: 33080
  GFR-binding peptide
  MOD_RES (1), (35): Xaa is C or S
  MOD_RES (15), (16), (17), (18), (19): Xaa is A or G
  MOD_RES (20), (21), (22), (23): Xaa is A or G or is absent

SEQ ID NO: 66675 - protein, 43 aa, Artificial Sequence; identical to SEQ ID NO: 33083
  GFR-binding peptide
  MOD_RES (6), (7), (41), (43): Xaa is C or S
  MOD_RES (21), (22), (23), (24), (25): Xaa is A or G
  MOD_RES (26), (27), (28), (29): Xaa is A or G or is absent

SEQ ID NO: 66676 - protein, 39 aa, Artificial Sequence; identical to SEQ ID NO: 7726
  GFR-binding peptide
  MOD_RES (3), (4), (36), (38): Xaa is C or S

SEQ ID NO: 66677 - protein, 42 aa, Artificial Sequence; identical to SEQ ID NO: 33086
  GFR-binding peptide
  MOD_RES (5), (6), (40), (42): Xaa is C or S
  MOD_RES (20), (21), (22), (23), (24): Xaa is A or G
  MOD_RES (25), (26), (27), (28): Xaa is A or G or is absent

SEQ ID NO: 66678 - protein, 40 aa, Artificial Sequence; identical to SEQ ID NO: 29025
  GFR-binding peptide
  MOD_RES (5), (6), (37), (39): Xaa is C or S

SEQ ID NO: 66679 - protein, 36 aa, Artificial Sequence; identical to SEQ ID NO: 7732
  GFR-binding peptide
  MOD_RES (34), (36): Xaa is C or S
  MOD_RES (14), (15), (16), (17), (18): Xaa is A or G
  MOD_RES (19), (20), (21), (22): Xaa is A or G or is absent

SEQ ID NO: 66680 - protein, 37 aa, Artificial Sequence; identical to SEQ ID NO: 7733
  GFR-binding peptide
  MOD_RES (3), (4), (36): Xaa is C or S

SEQ ID NO: 66681 - protein, 34 aa, Artificial Sequence; identical to SEQ ID NO: 7735
  GFR-binding peptide
  MOD_RES (1), (34): Xaa is C or S
  MOD_RES (15), (16), (17), (18), (19): Xaa is A or G
  MOD_RES (20), (21), (22), (23): Xaa is A or G or is absent

SEQ ID NO: 66682 - protein, 35 aa, Artificial Sequence; identical to SEQ ID NO: 7736
  GFR-binding peptide
  MOD_RES (1), (35): Xaa is C or S
  MOD_RES (15), (16), (17), (18), (19): Xaa is A or G
  MOD_RES (20), (21), (22), (23): Xaa is A or G or is absent

SEQ ID NO: 66683 - protein, 38 aa, Artificial Sequence; identical to SEQ ID NO: 29032
  GFR-binding peptide
  MOD_RES (4), (5): Xaa is C or S
  MOD_RES (19), (20), (21), (22), (23): Xaa is A or G
  MOD_RES (24), (25), (26), (27): Xaa is A or G or is absent

SEQ ID NO: 66684 - protein, 39 aa, Artificial Sequence; identical to SEQ ID NO: 29034
  GFR-binding peptide
  MOD_RES (1), (2), (36), (38): Xaa is C or S
  MOD_RES (16), (17), (18), (19), (20): Xaa is A or G
  MOD_RES (21), (22), (23), (24): Xaa is A or G or is absent

SEQ ID NO: 66685 - protein, 36 aa, Artificial Sequence; identical to SEQ ID NO: 29035
  GFR-binding peptide
  MOD_RES (5), (6): Xaa is C or S

SEQ ID NO: 66686 - protein, 42 aa, Artificial Sequence; identical to SEQ ID NO: 29037
  GFR-binding peptide
  MOD_RES (6), (7), (40), (42): Xaa is C or S
  MOD_RES (21), (22), (23), (24), (25): Xaa is A or G
  MOD_RES (26), (27), (28), (29): Xaa is A or G or is absent

SEQ ID NO: 66687 - protein, 41 aa, Artificial Sequence; identical to SEQ ID NO: 15038
  GFR-binding peptide
  MOD_RES (6), (7), (41): Xaa is C or S
  MOD_RES (21), (22), (23), (24), (25): Xaa is A or G
  MOD_RES (26), (27), (28), (29): Xaa is A or G or is absent

SEQ ID NO: 66688 - protein, 39 aa, Artificial Sequence; identical to SEQ ID NO: 33107
  GFR-binding peptide
  MOD_RES (6), (7), (39): Xaa is C or S

SEQ ID NO: 66689 - protein, 34 aa, Artificial Sequence; identical to SEQ ID NO: 7743
  GFR-binding peptide
  MOD_RES (3), (4): Xaa is C or S

SEQ ID NO: 66690 - protein, 41 aa, Artificial Sequence; identical to SEQ ID NO: 7748
  GFR-binding peptide
  MOD_RES (4), (5), (39), (41): Xaa is C or S
  MOD_RES (19), (20), (21), (22), (23): Xaa is A or G
  MOD_RES (24), (25), (26), (27): Xaa is A or G or is absent

SEQ ID NO: 66691 - protein, 33 aa, Artificial Sequence; identical to SEQ ID NO: 57994
  GFR-binding peptide
  MOD_RES (33), (33): Xaa is C or S
  MOD_RES (14), (15), (16), (17), (18): Xaa is A or G
  MOD_RES (19), (20), (21), (22): Xaa is A or G or is absent

SEQ ID NO: 66692 - protein, 38 aa, Artificial Sequence; identical to SEQ ID NO: 33120
  GFR-binding peptide
  MOD_RES (3), (4), (37): Xaa is C or S

SEQ ID NO: 66693 - protein, 39 aa, Artificial Sequence; identical to SEQ ID NO: 33122
  GFR-binding peptide
  MOD_RES (7), (7): Xaa is C or S
  MOD_RES (21), (22), (23), (24), (25): Xaa is A or G
  MOD_RES (26), (27), (28), (29): Xaa is A or G or is absent

SEQ ID NO: 66694 - protein, 40 aa, Artificial Sequence
  GFR-binding peptide
  MOD_RES (6), (7): Xaa is C or S
  MOD_RES (21), (22), (23), (24), (25): Xaa is A or G
  MOD_RES (26), (27), (28), (29): Xaa is A or G or is absent
HVPKPXXAPTKLSATSVLYYXXXXXXXXXLRKHRNMVVRS

SEQ ID NO: 66695 - protein, 36 aa, Artificial Sequence
  GFR-binding peptide
  MOD_RES (3), (4), (36): Xaa is C or S
EPXXVPEKMSPINILYFDENKNVVYGKIPNMTVESX

SEQ ID NO: 66696 - protein, 32 aa, Artificial Sequence; identical to SEQ ID NO: 7753
  GFR-binding peptide
  MOD_RES (1), (1): Xaa is C or S

SEQ ID NO: 66697 - protein, 39 aa, Artificial Sequence; identical to SEQ ID NO: 29053
  GFR-binding peptide
  MOD_RES (5), (6): Xaa is C or S
  MOD_RES (20), (21), (22), (23), (24): Xaa is A or G
  MOD_RES (25), (26), (27), (28): Xaa is A or G or is absent

SEQ ID NO: 66698 - protein, 40 aa, Artificial Sequence
  GFR-binding peptide
  MOD_RES (4), (5), (37), (39): Xaa is C or S
AGPXXTPTKMSPISMLYKNDKQQIILKYHYGMVVDRXGXS

SEQ ID NO: 66699 - protein, 34 aa, Artificial Sequence; identical to SEQ ID NO: 29056
  GFR-binding peptide
  MOD_RES (1), (2), (33): Xaa is C or S

SEQ ID NO: 66700 - protein, 37 aa, Artificial Sequence; identical to SEQ ID NO: 58001
  GFR-binding peptide
  MOD_RES (34), (36): Xaa is C or S
  MOD_RES (14), (15), (16), (17), (18): Xaa is A or G
  MOD_RES (19), (20), (21), (22): Xaa is A or G or is absent

SEQ ID NO: 66701 - protein, 37 aa, Artificial Sequence; identical to SEQ ID NO: 7758
  GFR-binding peptide
  MOD_RES (4), (5): Xaa is C or S
  MOD_RES (19), (20), (21), (22), (23): Xaa is A or G
  MOD_RES (24), (25), (26), (27): Xaa is A or G or is absent

SEQ ID NO: 66702 - protein, 33 aa, Artificial Sequence; identical to SEQ ID NO: 33134
  GFR-binding peptide
  MOD_RES (1), (33): Xaa is C or S

SEQ ID NO: 66703 - protein, 42 aa, Artificial Sequence; identical to SEQ ID NO: 29060
  GFR-binding peptide
  MOD_RES (6), (7), (39), (41): Xaa is C or S

SEQ ID NO: 66704 - protein, 37 aa, Artificial Sequence
  GFR-binding peptide
  MOD_RES (1), (35), (37): Xaa is C or S
  MOD_RES (15), (16), (17), (18), (19): Xaa is A or G
  MOD_RES (20), (21), (22), (23): Xaa is A or G or is absent
XVPEKMNAISILYFXXXXXXXXXLKKYRNMTVESXAX

SEQ ID NO: 66705 - protein, 39 aa, Artificial Sequence; identical to SEQ ID NO: 7760
  GFR-binding peptide
  MOD_RES (2), (3), (36), (38): Xaa is C or S

SEQ ID NO: 66706 - protein, 37 aa, Artificial Sequence
  GFR-binding peptide
  MOD_RES (2), (3), (35), (37): Xaa is C or S
PXXVPEKMSPINILYFDENKNVVYGKIPNMTVESXAX

SEQ ID NO: 66707 - protein, 34 aa, Artificial Sequence
  GFR-binding peptide
  MOD_RES (33), (33): Xaa is C or S
  MOD_RES (14), (15), (16), (17), (18): Xaa is A or G
  MOD_RES (19), (20), (21), (22): Xaa is A or G or is absent
VPQALSPINILYFXXXXXXXXXYGKIPMIVRSXK

SEQ ID NO: 66708 - protein, 32 aa, Artificial Sequence; identical to SEQ ID NO: 7761
  GFR-binding peptide
  MOD_RES (1), (1): Xaa is C or S

SEQ ID NO: 66709 - protein, 35 aa, Artificial Sequence; identical to SEQ ID NO: 7762
  GFR-binding peptide
  MOD_RES (2), (2): Xaa is C or S
  MOD_RES (16), (17), (18), (19), (20): Xaa is A or G
  MOD_RES (21), (22), (23), (24): Xaa is A or G or is absent

SEQ ID NO: 66710 - protein, 36 aa, Artificial Sequence; identical to SEQ ID NO: 7763
  GFR-binding peptide
  MOD_RES (2), (3): Xaa is C or S
  MOD_RES (17), (18), (19), (20), (21): Xaa is A or G
  MOD_RES (22), (23), (24), (25): Xaa is A or G or is absent

SEQ ID NO: 66711 - protein, 35 aa, Artificial Sequence
  GFR-binding peptide
  MOD_RES (34), (34): Xaa is C or S
  MOD_RES (14), (15), (16), (17), (18): Xaa is A or G
  MOD_RES (19), (20), (21), (22): Xaa is A or G or is absent
VPTKLSATSILYYXXXXXXXXXLRKHRGMAVSEXG

SEQ ID NO: 66712 - protein, 37 aa, Artificial Sequence; identical to SEQ ID NO: 7770
  GFR-binding peptide
  MOD_RES (3), (4), (35), (37): Xaa is C or S

SEQ ID NO: 66713 - protein, 39 aa, Artificial Sequence; identical to SEQ ID NO: 29070
  GFR-binding peptide
  MOD_RES (5), (6), (38): Xaa is C or S

SEQ ID NO: 66714 - protein, 36 aa, Artificial Sequence; identical to SEQ ID NO: 7773
  GFR-binding peptide
  MOD_RES (1), (2), (36): Xaa is C or S
  MOD_RES (16), (17), (18), (19), (20): Xaa is A or G
  MOD_RES (21), (22), (23), (24): Xaa is A or G or is absent

SEQ ID NO: 66715 - protein, 34 aa, Artificial Sequence; identical to SEQ ID NO: 29072
  GFR-binding peptide
  MOD_RES (3), (4): Xaa is C or S

SEQ ID NO: 66716 - protein, 41 aa, Artificial Sequence; identical to SEQ ID NO: 7774
  GFR-binding peptide
  MOD_RES (2), (3), (38), (40): Xaa is C or S
  MOD_RES (17), (18), (19), (20), (21): Xaa is A or G
  MOD_RES (22), (23), (24), (25): Xaa is A or G or is absent

SEQ ID NO: 66717 - protein, 41 aa, Artificial Sequence
  GFR-binding peptide
  MOD_RES (6), (7), (39), (41): Xaa is C or S
AAPASXXVPARLSATSILYYDAANNVVLRKHRDMVVEAXGX

SEQ ID NO: 66718 - protein, 36 aa, Artificial Sequence; identical to SEQ ID NO: 7775
  GFR-binding peptide
  MOD_RES (2), (3), (35): Xaa is C or S

SEQ ID NO: 66719 - protein, 38 aa, Artificial Sequence; identical to SEQ ID NO: 7776
  GFR-binding peptide
  MOD_RES (5), (6), (37): Xaa is C or S

SEQ ID NO: 66720 - protein, 39 aa, Artificial Sequence; identical to SEQ ID NO: 7781
  GFR-binding peptide
  MOD_RES (4), (5), (39): Xaa is C or S
  MOD_RES (19), (20), (21), (22), (23): Xaa is A or G
  MOD_RES (24), (25), (26), (27): Xaa is A or G or is absent

SEQ ID NO: 66721 - protein, 39 aa, Artificial Sequence; identical to SEQ ID NO: 15087
  GFR-binding peptide
  MOD_RES (3), (4), (36), (38): Xaa is C or S

SEQ ID NO: 66722 - protein, 40 aa, Artificial Sequence; identical to SEQ ID NO: 29078
  GFR-binding peptide
  MOD_RES (4), (5), (37), (39): Xaa is C or S

SEQ ID NO: 66723 - protein, 42 aa, Artificial Sequence; identical to SEQ ID NO: 7782
  GFR-binding peptide
  MOD_RES (5), (6), (39), (41): Xaa is C or S
  MOD_RES (20), (21), (22), (23), (24): Xaa is A or G
  MOD_RES (25), (26), (27), (28): Xaa is A or G or is absent

SEQ ID NO: 66724 - protein, 41 aa, Artificial Sequence; identical to SEQ ID NO: 29079
  GFR-binding peptide
  MOD_RES (4), (5), (39), (41): Xaa is C or S
  MOD_RES (19), (20), (21), (22), (23): Xaa is A or G
  MOD_RES (24), (25), (26), (27): Xaa is A or G or is absent

SEQ ID NO: 66725 - protein, 37 aa, Artificial Sequence; identical to SEQ ID NO: 7785
  GFR-binding peptide
  MOD_RES (3), (4), (35), (37): Xaa is C or S

SEQ ID NO: 66726 - protein, 35 aa, Artificial Sequence
  GFR-binding peptide
  MOD_RES (32), (34): Xaa is C or S
VPTRLEPISILYLDSANNVVKFKYEDMVVESXGXR

SEQ ID NO: 66727 - protein, 38 aa, Artificial Sequence; identical to SEQ ID NO: 33180
  GFR-binding peptide
  MOD_RES (4), (36), (38): Xaa is C or S

SEQ ID NO: 66728 - protein, 36 aa, Artificial Sequence; identical to SEQ ID NO: 7790
  GFR-binding peptide
  MOD_RES (1), (36): Xaa is C or S
  MOD_RES (15), (16), (17), (18), (19): Xaa is A or G
  MOD_RES (20), (21), (22), (23): Xaa is A or G or is absent

SEQ ID NO: 66729 - protein, 38 aa, Artificial Sequence; identical to SEQ ID NO: 33182
  GFR-binding peptide
  MOD_RES (6), (7): Xaa is C or S

SEQ ID NO: 66730 - protein, 31 aa, Artificial Sequence; identical to SEQ ID NO: 33185
  GFR-binding peptide
  MOD_RES (1), (1): Xaa is C or S

SEQ ID NO: 66731 - protein, 38 aa, Artificial Sequence; identical to SEQ ID NO: 33188
  GFR-binding peptide
  MOD_RES (5), (6), (38): Xaa is C or S

SEQ ID NO: 66732 - protein, 41 aa, Artificial Sequence; identical to SEQ ID NO: 29087
  GFR-binding peptide
  MOD_RES (5), (6), (38), (40): Xaa is C or S

SEQ ID NO: 66733 - protein, 38 aa, Artificial Sequence; identical to SEQ ID NO: 15103
  GFR-binding peptide
  MOD_RES (2), (3), (35), (37): Xaa is C or S

SEQ ID NO: 66734 - protein, 37 aa, Artificial Sequence
  GFR-binding peptide
  MOD_RES (1), (2), (34), (36): Xaa is C or S
XXVPEKMSPINILYFDENKNVVYGKIPNMTVESXAXR

SEQ ID NO: 66735 - protein, 40 aa, Artificial Sequence; identical to SEQ ID NO: 29089
  GFR-binding peptide
  MOD_RES (5), (6), (40): Xaa is C or S
  MOD_RES (20), (21), (22), (23), (24): Xaa is A or G
  MOD_RES (25), (26), (27), (28): Xaa is A or G or is absent

SEQ ID NO: 66736 - protein, 33 aa, Artificial Sequence; identical to SEQ ID NO: 7794
  GFR-binding peptide
  MOD_RES (33), (33): Xaa is C or S
  MOD_RES (14), (15), (16), (17), (18): Xaa is A or G
  MOD_RES (19), (20), (21), (22): Xaa is A or G or is absent

SEQ ID NO: 66737 - protein, 35 aa, Artificial Sequence; identical to SEQ ID NO: 7795
  GFR-binding peptide
  MOD_RES (2), (3): Xaa is C or S
  MOD_RES (17), (18), (19), (20), (21): Xaa is A or G
  MOD_RES (22), (23), (24), (25): Xaa is A or G or is absent

SEQ ID NO: 66738 - protein, 31 aa, Artificial Sequence; identical to SEQ ID NO: 33196
  GFR-binding peptide
  MOD_RES (1), (1): Xaa is C or S

SEQ ID NO: 66739 - protein, 37 aa, Artificial Sequence; identical to SEQ ID NO: 29095
  GFR-binding peptide
  MOD_RES (1), (2), (34), (36): Xaa is C or S

SEQ ID NO: 66740 - protein, 43 aa, Artificial Sequence; identical to SEQ ID NO: 7799
  GFR-binding peptide
  MOD_RES (6), (7), (41), (43): Xaa is C or S
  MOD_RES (21), (22), (23), (24), (25): Xaa is A or G
  MOD_RES (26), (27), (28), (29): Xaa is A or G or is absent

SEQ ID NO: 66741 - protein, 36 aa, Artificial Sequence; identical to SEQ ID NO: 29096
  GFR-binding peptide
  MOD_RES (1), (35): Xaa is C or S
  MOD_RES (15), (16), (17), (18), (19): Xaa is A or G
  MOD_RES (20), (21), (22), (23): Xaa is A or G or is absent

SEQ ID NO: 66742 - protein, 38 aa, Artificial Sequence; identical to SEQ ID NO: 7800
  GFR-binding peptide
  MOD_RES (4), (5), (38): Xaa is C or S
  MOD_RES (19), (20), (21), (22), (23): Xaa is A or G
  MOD_RES (24), (25), (26), (27): Xaa is A or G or is absent

SEQ ID NO: 66743 - protein, 39 aa, Artificial Sequence; identical to SEQ ID NO: 29098
  GFR-binding peptide
  MOD_RES (4), (5), (37), (39): Xaa is C or S

SEQ ID NO: 66744 - protein, 36 aa, Artificial Sequence; identical to SEQ ID NO: 7804
  GFR-binding peptide
  MOD_RES (35), (35): Xaa is C or S
  MOD_RES (14), (15), (16), (17), (18): Xaa is A or G
  MOD_RES (19), (20), (21), (22): Xaa is A or G or is absent

SEQ ID NO: 66745 - protein, 37 aa, Artificial Sequence; identical to SEQ ID NO: 7805
  GFR-binding peptide
  MOD_RES (1), (2), (35), (37): Xaa is C or S

SEQ ID NO: 66746 - protein, 36 aa, Artificial Sequence
  GFR-binding peptide
  MOD_RES (2), (3): Xaa is C or S
  MOD_RES (17), (18), (19), (20), (21): Xaa is A or G
  MOD_RES (22), (23), (24), (25): Xaa is A or G or is absent
PXXTPTKMSPISMLYKXXXXXXXXXLKYHYGMVVDR

SEQ ID NO: 66747 - protein, 40 aa, Artificial Sequence; identical to SEQ ID NO: 7809
  GFR-binding peptide
  MOD_RES (5), (6), (39): Xaa is C or S
  MOD_RES (20), (21), (22), (23), (24): Xaa is A or G
  MOD_RES (25), (26), (27), (28): Xaa is A or G or is absent

SEQ ID NO: 66748 - protein, 35 aa, Artificial Sequence; identical to SEQ ID NO: 7811
  GFR-binding peptide
  MOD_RES (1), (2): Xaa is C or S
  MOD_RES (16), (17), (18), (19), (20): Xaa is A or G
  MOD_RES (21), (22), (23), (24): Xaa is A or G or is absent

SEQ ID NO: 66749 - protein, 36 aa, Artificial Sequence; identical to SEQ ID NO: 33211
  GFR-binding peptide
  MOD_RES (4), (5): Xaa is C or S

SEQ ID NO: 66750 - protein, 37 aa, Artificial Sequence; identical to SEQ ID NO: 29103
  GFR-binding peptide
  MOD_RES (3), (4), (36): Xaa is C or S

SEQ ID NO: 66751 - protein, 36 aa, Artificial Sequence; identical to SEQ ID NO: 7812
  GFR-binding peptide
  MOD_RES (1), (35): Xaa is C or S
  MOD_RES (15), (16), (17), (18), (19): Xaa is A or G
  MOD_RES (20), (21), (22), (23): Xaa is A or G or is absent

SEQ ID NO: 66752 - protein, 39 aa, Artificial Sequence; identical to SEQ ID NO: 7813
  GFR-binding peptide
  MOD_RES (6), (7): Xaa is C or S
  MOD_RES (21), (22), (23), (24), (25): Xaa is A or G
  MOD_RES (26), (27), (28), (29): Xaa is A or G or is absent

SEQ ID NO: 66753 - protein, 37 aa, Artificial Sequence; identical to SEQ ID NO: 29106
  GFR-binding peptide
  MOD_RES (2), (3), (36): Xaa is C or S
  MOD_RES (17), (18), (19), (20), (21): Xaa is A or G
  MOD_RES (22), (23), (24), (25): Xaa is A or G or is absent

SEQ ID NO: 66754 - protein, 38 aa, Artificial Sequence; identical to SEQ ID NO: 7817
  GFR-binding peptide
  MOD_RES (2), (3), (35), (37): Xaa is C or S

SEQ ID NO: 66755 - protein, 37 aa, Artificial Sequence
  GFR-binding peptide
  MOD_RES (4), (5), (37): Xaa is C or S
AGPXXTPTKMSATSMLYYNDKQQIILRKHRGMVVDRX

SEQ ID NO: 66756 - protein, 34 aa, Artificial Sequence; identical to SEQ ID NO: 7820
  GFR-binding peptide
  MOD_RES (4), (4): Xaa is C or S

SEQ ID NO: 66757 - protein, 40 aa, Artificial Sequence; identical to SEQ ID NO: 7821
  GFR-binding peptide
  MOD_RES (3), (4), (38), (40): Xaa is C or S
  MOD_RES (18), (19), (20), (21), (22): Xaa is A or G
  MOD_RES (23), (24), (25), (26): Xaa is A or G or is absent

SEQ ID NO: 66758 - protein, 37 aa, Artificial Sequence
  GFR-binding peptide
  MOD_RES (2), (3), (37): Xaa is C or S
  MOD_RES (17), (18), (19), (20), (21): Xaa is A or G
  MOD_RES (22), (23), (24), (25): Xaa is A or G or is absent
PXXTPTKMSATSMLYYXXXXXXXXXLRKHRGMVVDRX

SEQ ID NO: 66759 - protein, 36 aa, Artificial Sequence; identical to SEQ ID NO: 29111
  GFR-binding peptide
  MOD_RES (2), (3): Xaa is C or S
  MOD_RES (17), (18), (19), (20), (21): Xaa is A or G
  MOD_RES (22), (23), (24), (25): Xaa is A or G or is absent

SEQ ID NO: 66760 - protein, 37 aa, Artificial Sequence; identical to SEQ ID NO: 29112
  GFR-binding peptide
  MOD_RES (6), (7): Xaa is C or S

SEQ ID NO: 66761 - protein, 32 aa, Artificial Sequence; identical to SEQ ID NO: 7823
  GFR-binding peptide
  MOD_RES (31), (31): Xaa is C or S

SEQ ID NO: 66762 - protein, 40 aa, Artificial Sequence
  GFR-binding peptide
  MOD_RES (3), (4), (37), (39): Xaa is C or S
  MOD_RES (18), (19), (20), (21), (22): Xaa is A or G
  MOD_RES (23), (24), (25), (26): Xaa is A or G or is absent
SPXXVSQDLSPINILYFXXXXXXXXXYGKIPMIVKSXKXS

SEQ ID NO: 66763 - protein, 35 aa, Artificial Sequence; identical to SEQ ID NO: 7825
  GFR-binding peptide
  MOD_RES (3), (4), (35): Xaa is C or S

SEQ ID NO: 66764 - protein, 35 aa, Artificial Sequence
  GFR-binding peptide
  MOD_RES (2), (3), (35): Xaa is C or S
PXXTPTKMSPISMLYKNDKQQIILKYHYGMVVDRX

SEQ ID NO: 66765 - protein, 35 aa, Artificial Sequence; identical to SEQ ID NO: 29118
  GFR-binding peptide
  MOD_RES (2), (3): Xaa is C or S
  MOD_RES (17), (18), (19), (20), (21): Xaa is A or G
  MOD_RES (22), (23), (24), (25): Xaa is A or G or is absent

SEQ ID NO: 66766 - protein, 34 aa, Artificial Sequence; identical to SEQ ID NO: 7827
  GFR-binding peptide
  MOD_RES (1), (1): Xaa is C or S
  MOD_RES (15), (16), (17), (18), (19): Xaa is A or G
  MOD_RES (20), (21), (22), (23): Xaa is A or G or is absent

SEQ ID NO: 66767 - protein, 35 aa, Artificial Sequence; identical to SEQ ID NO: 58074
  GFR-binding peptide
  MOD_RES (3), (4), (35): Xaa is C or S

SEQ ID NO: 66768 - protein, 36 aa, Artificial Sequence
  GFR-binding peptide
  MOD_RES (4), (5): Xaa is C or S
AGPXXTPTKMSATSMLYYNDKQQIILRKHRGMVVDR

SEQ ID NO: 66769 - protein, 37 aa, Artificial Sequence; identical to SEQ ID NO: 29123
  GFR-binding peptide
  MOD_RES (34), (36): Xaa is C or S
  MOD_RES (14), (15), (16), (17), (18): Xaa is A or G
  MOD_RES (19), (20), (21), (22): Xaa is A or G or is absent

SEQ ID NO: 66770 - protein, 32 aa, Artificial Sequence; identical to SEQ ID NO: 29124
  GFR-binding peptide
  MOD_RES (1), (32): Xaa is C or S

SEQ ID NO: 66771 - protein, 37 aa, Artificial Sequence; identical to SEQ ID NO: 7835
  GFR-binding peptide
  MOD_RES (5), (6), (37): Xaa is C or S

SEQ ID NO: 66772 - protein, 38 aa, Artificial Sequence; identical to SEQ ID NO: 29126
  GFR-binding peptide
  MOD_RES (6), (7): Xaa is C or S

SEQ ID NO: 66773 - protein, 41 aa, Artificial Sequence
  GFR-binding peptide
  MOD_RES (6), (7), (39), (41): Xaa is C or S
STPPTXXVPTRLSATSILYYDSANNVVLRKHRDMVVESXGX

SEQ ID NO: 66774 - protein, 42 aa, Artificial Sequence
  GFR-binding peptide
  MOD_RES (6), (7), (41): Xaa is C or S
  MOD_RES (21), (22), (23), (24), (25): Xaa is A or G
  MOD_RES (26), (27), (28), (29): Xaa is A or G or is absent
GIPEPXXVPEKMSPISILYKXXXXXXXXXLKYHYNMTVESXA

SEQ ID NO: 66775 - protein, 33 aa, Artificial Sequence; identical to SEQ ID NO: 29128
  GFR-binding peptide
  MOD_RES (32), (32): Xaa is C or S

SEQ ID NO: 66776 - protein, 36 aa, Artificial Sequence; identical to SEQ ID NO: 29132
  GFR-binding peptide
  MOD_RES (3), (4): Xaa is C or S
  MOD_RES (18), (19), (20), (21), (22): Xaa is A or G
  MOD_RES (23), (24), (25), (26): Xaa is A or G or is absent

SEQ ID NO: 66777 - protein, 39 aa, Artificial Sequence; identical to SEQ ID NO: 7837
  GFR-binding peptide
  MOD_RES (1), (2), (36), (38): Xaa is C or S
  MOD_RES (16), (17), (18), (19), (20): Xaa is A or G
  MOD_RES (21), (22), (23), (24): Xaa is A or G or is absent

SEQ ID NO: 66778 - protein, 32 aa, Artificial Sequence
  GFR-binding peptide
  MOD_RES (14), (15), (16), (17), (18): Xaa is A or G
  MOD_RES (19), (20), (21), (22): Xaa is A or G or is absent
VPARLSATSILYYXXXXXXXXXLRKHRDMVVE

SEQ ID NO: 66779 - protein, 36 aa, Artificial Sequence; identical to SEQ ID NO: 7843
  GFR-binding peptide
  MOD_RES (34), (36): Xaa is C or S
  MOD_RES (14), (15), (16), (17), (18): Xaa is A or G
  MOD_RES (19), (20), (21), (22): Xaa is A or G or is absent

SEQ ID NO: 66780 - protein, 36 aa, Artificial Sequence; identical to SEQ ID NO: 7847
  GFR-binding peptide
  MOD_RES (3), (4): Xaa is C or S
  MOD_RES (18), (19), (20), (21), (22): Xaa is A or G
  MOD_RES (23), (24), (25), (26): Xaa is A or G or is absent

SEQ ID NO: 66781 - protein, 35 aa, Artificial Sequence; identical to SEQ ID NO: 7849
  GFR-binding peptide
  MOD_RES (4), (4): Xaa is C or S

SEQ ID NO: 66782 - protein, 34 aa, Artificial Sequence; identical to SEQ ID NO: 7856
  GFR-binding peptide
  MOD_RES (1), (34): Xaa is C or S
  MOD_RES (15), (16), (17), (18), (19): Xaa is A or G
  MOD_RES (20), (21), (22), (23): Xaa is A or G or is absent

SEQ ID NO: 66783 - protein, 38 aa, Artificial Sequence; identical to SEQ ID NO: 7861
  GFR-binding peptide
  MOD_RES (3), (4), (37): Xaa is C or S

SEQ ID NO: 66784 - protein, 32 aa, Artificial Sequence
  GFR-binding peptide
  MOD_RES (32), (32): Xaa is C or S
VPEKMEPISILYLDENKNVVKFKYENMTVESX

SEQ ID NO: 66785 - protein, 37 aa, Artificial Sequence; identical to SEQ ID NO: 7870
  GFR-binding peptide
  MOD_RES (4), (5), (37): Xaa is C or S

SEQ ID NO: 66786 - protein, 36 aa, Artificial Sequence
  GFR-binding peptide
  MOD_RES (1), (2), (34), (36): Xaa is C or S
XXVPTRLEPISILYLDSANNVVKFKYEDMVVESXGX

SEQ ID NO: 66787 - protein, 41 aa, Artificial Sequence; identical to SEQ ID NO: 33251
  GFR-binding peptide
  MOD_RES (5), (6), (40): Xaa is C or S
  MOD_RES (20), (21), (22), (23), (24): Xaa is A or G
  MOD_RES (25), (26), (27), (28): Xaa is A or G or is absent

SEQ ID NO: 66788 - protein, 39 aa, Artificial Sequence
  GFR-binding peptide
  MOD_RES (4), (5), (39): Xaa is C or S
  MOD_RES (19), (20), (21), (22), (23): Xaa is A or G
  MOD_RES (24), (25), (26), (27): Xaa is A or G or is absent
PASXXVPARLSATSILYYXXXXXXXXXLRKHRDMVVEAX

SEQ ID NO: 66789 - protein, 36 aa, Artificial Sequence; identical to SEQ ID NO: 7875
  GFR-binding peptide
  MOD_RES (3), (4), (36): Xaa is C or S

SEQ ID NO: 66790 - protein, 34 aa, Artificial Sequence; identical to SEQ ID NO: 33259
  GFR-binding peptide
  MOD_RES (34), (34): Xaa is C or S
  MOD_RES (14), (15), (16), (17), (18): Xaa is A or G
  MOD_RES (19), (20), (21), (22): Xaa is A or G or is absent

SEQ ID NO: 66791 - protein, 37 aa, Artificial Sequence; identical to SEQ ID NO: 7879
  GFR-binding peptide
  MOD_RES (1), (2), (34), (36): Xaa is C or S

SEQ ID NO: 66792 - protein, 42 aa, Artificial Sequence
  GFR-binding peptide
  MOD_RES (5), (6), (40), (42): Xaa is C or S
  MOD_RES (20), (21), (22), (23), (24): Xaa is A or G
  MOD_RES (25), (26), (27), (28): Xaa is A or G or is absent
IPEPXXVPEKMSPISILYKXXXXXXXXXLKYHYNMTVESXAX

SEQ ID NO: 66793 - protein, 40 aa, Artificial Sequence
  GFR-binding peptide
  MOD_RES (3), (4), (38), (40): Xaa is C or S
  MOD_RES (18), (19), (20), (21), (22): Xaa is A or G
  MOD_RES (23), (24), (25), (26): Xaa is A or G or is absent
PTXXVPTRLSATSILYYXXXXXXXXXLRKHRDMVVESXGX

SEQ ID NO: 66794 - protein, 37 aa, Artificial Sequence
  GFR-binding peptide
  MOD_RES (6), (7): Xaa is C or S
GIPEPXXVPEKMNAISILYFDENKNVVLKKYRNMTVE

SEQ ID NO: 66795 - protein, 37 aa, Artificial Sequence; identical to SEQ ID NO: 7890
  GFR-binding peptide
  MOD_RES (1), (2), (36): Xaa is C or S
  MOD_RES (16), (17), (18), (19), (20): Xaa is A or G
  MOD_RES (21), (22), (23), (24): Xaa is A or G or is absent

SEQ ID NO: 66796 - protein, 38 aa, Artificial Sequence; identical to SEQ ID NO: 7891
  GFR-binding peptide
  MOD_RES (4), (5), (37): Xaa is C or S

SEQ ID NO: 66797 - protein, 36 aa, Artificial Sequence
  GFR-binding peptide
  MOD_RES (34), (36): Xaa is C or S
  MOD_RES (14), (15), (16), (17), (18): Xaa is A or G
  MOD_RES (19), (20), (21), (22): Xaa is A or G or is absent
VPTRLEPISILYLXXXXXXXXXKFKYEDMVVESXGX

SEQ ID NO: 66798 - protein, 39 aa, Artificial Sequence; identical to SEQ ID NO: 7893
  GFR-binding peptide
  MOD_RES (5), (6), (38): Xaa is C or S

SEQ ID NO: 66799 - protein, 43 aa, Artificial Sequence; identical to SEQ ID NO: 7895
  GFR-binding peptide
  MOD_RES (5), (6), (40), (42): Xaa is C or S
  MOD_RES (20), (21), (22), (23), (24): Xaa is A or G
  MOD_RES (25), (26), (27), (28): Xaa is A or G or is absent

SEQ ID NO: 66800 - protein, 35 aa, Artificial Sequence
  GFR-binding peptide
  MOD_RES (1), (2), (33), (35): Xaa is C or S
XXVSQDLSPINILYFIGKTPKIYGKIPMIVKSXKX

SEQ ID NO: 66801 - protein, 39 aa, Artificial Sequence
  GFR-binding peptide
  MOD_RES (4), (5), (36), (38): Xaa is C or S
ASPXXVSQDLSPINILYFIGKTPKIYGKIPMIVKSXKXS

SEQ ID NO: 66802 - protein, 36 aa, Artificial Sequence; identical to SEQ ID NO: 7897
  GFR-binding peptide
  MOD_RES (1), (2), (35): Xaa is C or S
  MOD_RES (16), (17), (18), (19), (20): Xaa is A or G
  MOD_RES (21), (22), (23), (24): Xaa is A or G or is absent

SEQ ID NO: 66803 - protein, 35 aa, Artificial Sequence; identical to SEQ ID NO: 29172
  GFR-binding peptide
  MOD_RES (34), (34): Xaa is C or S
  MOD_RES (14), (15), (16), (17), (18): Xaa is A or G
  MOD_RES (19), (20), (21), (22): Xaa is A or G or is absent

SEQ ID NO: 66804 - protein, 35 aa, Artificial Sequence; identical to SEQ ID NO: 7899
  GFR-binding peptide
  MOD_RES (3), (4), (35): Xaa is C or S

SEQ ID NO: 66805 - protein, 34 aa, Artificial Sequence
  GFR-binding peptide
  MOD_RES (1), (2): Xaa is C or S
  MOD_RES (16), (17), (18), (19), (20): Xaa is A or G
  MOD_RES (21), (22), (23), (24): Xaa is A or G or is absent
XXAPVKTSPISMLYKXXXXXXXXXLKYHYMIVEE

SEQ ID NO: 66806 - protein, 35 aa, Artificial Sequence; identical to SEQ ID NO: 29176
  GFR-binding peptide
  MOD_RES (1), (33), (35): Xaa is C or S

SEQ ID NO: 66807 - protein, 32 aa, Artificial Sequence
  GFR-binding peptide
  MOD_RES (14), (15), (16), (17), (18): Xaa is A or G
  MOD_RES (19), (20), (21), (22): Xaa is A or G or is absent
VPEKMNAISILYFXXXXXXXXXLKKYRNMTVE

SEQ ID NO: 66808 - protein, 38 aa, Artificial Sequence
  GFR-binding peptide
  MOD_RES (2), (3), (37): Xaa is C or S
  MOD_RES (17), (18), (19), (20), (21): Xaa is A or G
  MOD_RES (22), (23), (24), (25): Xaa is A or G or is absent
PXXVPEKMNAISILYFXXXXXXXXXLKKYRNMTVESXA

SEQ ID NO: 66809 - protein, 44 aa, Artificial Sequence; identical to SEQ ID NO: 29177
  GFR-binding peptide
  MOD_RES (6), (7), (41), (43): Xaa is C or S
  MOD_RES (21), (22), (23), (24), (25): Xaa is A or G
  MOD_RES (26), (27), (28), (29): Xaa is A or G or is absent

SEQ ID NO: 66810 - protein, 39 aa, Artificial Sequence
  GFR-binding peptide
  MOD_RES (6), (7): Xaa is C or S
  MOD_RES (21), (22), (23), (24), (25): Xaa is A or G
  MOD_RES (26), (27), (28), (29): Xaa is A or G or is absent
GIPEPXXVPEKMSATSILYYXXXXXXXXXLRKHRNMTVE

SEQ ID NO: 66811 - protein, 38 aa, Artificial Sequence; identical to SEQ ID NO: 29179
  GFR-binding peptide
  MOD_RES (1), (35), (37): Xaa is C or S
  MOD_RES (15), (16), (17), (18), (19): Xaa is A or G
  MOD_RES (20), (21), (22), (23): Xaa is A or G or is absent

SEQ ID NO: 66812 - protein, 34 aa, Artificial Sequence; identical to SEQ ID NO: 29180
  GFR-binding peptide
  MOD_RES (1), (32), (34): Xaa is C or S

SEQ ID NO: 66813 - protein, 40 aa, Artificial Sequence; identical to SEQ ID NO: 7904
  GFR-binding peptide
  MOD_RES (6), (7), (40): Xaa is C or S
  MOD_RES (21), (22), (23), (24), (25): Xaa is A or G
  MOD_RES (26), (27), (28), (29): Xaa is A or G or is absent

SEQ ID NO: 66814 - protein, 35 aa, Artificial Sequence; identical to SEQ ID NO: 7905
  GFR-binding peptide
  MOD_RES (1), (33), (35): Xaa is C or S

SEQ ID NO: 66815 - protein, 32 aa, Artificial Sequence; identical to SEQ ID NO: 7907
  GFR-binding peptide
  MOD_RES (31), (31): Xaa is C or S

SEQ ID NO: 66816 - protein, 39 aa, Artificial Sequence; identical to SEQ ID NO: 33282
  GFR-binding peptide
  MOD_RES (6), (7): Xaa is C or S
  MOD_RES (21), (22), (23), (24), (25): Xaa is A or G
  MOD_RES (26), (27), (28), (29): Xaa is A or G or is absent

SEQ ID NO: 66817 - protein, 35 aa, Artificial Sequence; identical to SEQ ID NO: 7910
  GFR-binding peptide
  MOD_RES (2), (3), (35): Xaa is C or S

SEQ ID NO: 66818 - protein, 41 aa, Artificial Sequence; identical to SEQ ID NO: 33287
  GFR-binding peptide
  MOD_RES (6), (7), (40): Xaa is C or S
  MOD_RES (21), (22), (23), (24), (25): Xaa is A or G
  MOD_RES (26), (27), (28), (29): Xaa is A or G or is absent

SEQ ID NO: 66819 - protein, 38 aa, Artificial Sequence; identical to SEQ ID NO: 7912
  GFR-binding peptide
  MOD_RES (2), (3), (37): Xaa is C or S
  MOD_RES (17), (18), (19), (20), (21): Xaa is A or G
  MOD_RES (22), (23), (24), (25): Xaa is A or G or is absent

SEQ ID NO: 66820 - protein, 37 aa, Artificial Sequence; identical to SEQ ID NO: 7914
  GFR-binding peptide
  MOD_RES (1), (2), (34), (36): Xaa is C or S

SEQ ID NO: 66821 - protein, 40 aa, Artificial Sequence
  GFR-binding peptide
  MOD_RES (6), (7), (39): Xaa is C or S
HVPKPXXAPTKLEPISVLYLDDSSNVIKFKYENMVVRSXG

SEQ ID NO: 66822 - protein, 35 aa, Artificial Sequence
  GFR-binding peptide
  MOD_RES (1), (2), (35): Xaa is C or S
  MOD_RES (16), (17), (18), (19), (20): Xaa is A or G
  MOD_RES (21), (22), (23), (24): Xaa is A or G or is absent
XXAPVKTSPISMLYKXXXXXXXXXLKYHYMIVEEX

SEQ ID NO: 66823 - protein, 40 aa, Artificial Sequence; identical to SEQ ID NO: 7916
  GFR-binding peptide
  MOD_RES (5), (39): Xaa is C or S
  MOD_RES (19), (20), (21), (22), (23): Xaa is A or G
  MOD_RES (24), (25), (26), (27): Xaa is A or G or is absent

SEQ ID NO: 66824 - protein, 37 aa, Artificial Sequence; identical to SEQ ID NO: 7918
  GFR-binding peptide
  MOD_RES (5), (6), (37): Xaa is C or S

SEQ ID NO: 66825 - protein, 36 aa, Artificial Sequence; identical to SEQ ID NO: 33297
  GFR-binding peptide
  MOD_RES (1), (2), (36): Xaa is C or S
  MOD_RES (16), (17), (18), (19), (20): Xaa is A or G
  MOD_RES (21), (22), (23), (24): Xaa is A or G or is absent

SEQ ID NO: 66826 - protein, 36 aa, Artificial Sequence
  GFR-binding peptide
  MOD_RES (2), (3): Xaa is C or S
  MOD_RES (17), (18), (19), (20), (21): Xaa is A or G
  MOD_RES (22), (23), (24), (25): Xaa is A or G or is absent
PXXVPEKMEPISILYLXXXXXXXXXKFKYENMTVES

SEQ ID NO: 66827 - protein, 34 aa, Artificial Sequence; identical to SEQ ID NO: 7922
  GFR-binding peptide
  MOD_RES (1), (2): Xaa is C or S

SEQ ID NO: 66828 - protein, 38 aa, Artificial Sequence
  GFR-binding peptide
  MOD_RES (4), (5), (38): Xaa is C or S
  MOD_RES (19), (20), (21), (22), (23): Xaa is A or G
  MOD_RES (24), (25), (26), (27): Xaa is A or G or is absent
ASPXXVSQDLSPINILYFXXXXXXXXXYGKIPMIVKSX

SEQ ID NO: 66829 - protein, 34 aa, Artificial Sequence; identical to SEQ ID NO: 29202
  GFR-binding peptide
  MOD_RES (1), (32), (34): Xaa is C or S

SEQ ID NO: 66830 - protein, 42 aa, Artificial Sequence
  GFR-binding peptide
  MOD_RES (5), (6), (40), (42): Xaa is C or S
  MOD_RES (20), (21), (22), (23), (24): Xaa is A or G
  MOD_RES (25), (26), (27), (28): Xaa is A or G or is absent
TPPTXXVPTRLSPISILYKXXXXXXXXXLKYHYDMVVESXGX

SEQ ID NO: 66831 - protein, 38 aa, Artificial Sequence; identical to SEQ ID NO: 7933
  GFR-binding peptide
  MOD_RES (3), (4), (38): Xaa is C or S
  MOD_RES (18), (19), (20), (21), (22): Xaa is A or G
  MOD_RES (23), (24), (25), (26): Xaa is A or G or is absent

SEQ ID NO: 66832 - protein, 34 aa, Artificial Sequence; identical to SEQ ID NO: 33310
  GFR-binding peptide
  MOD_RES (1), (1): Xaa is C or S
  MOD_RES (15), (16), (17), (18), (19): Xaa is A or G
  MOD_RES (20), (21), (22), (23): Xaa is A or G or is absent

SEQ ID NO: 66833 - protein, 44 aa, Artificial Sequence; identical to SEQ ID NO: 7936
  GFR-binding peptide
  MOD_RES (5), (6), (41), (43): Xaa is C or S
  MOD_RES (20), (21), (22), (23), (24): Xaa is A or G
  MOD_RES (25), (26), (27), (28): Xaa is A or G or is absent

SEQ ID NO: 66834 - protein, 42 aa, Artificial Sequence
  GFR-binding peptide
  MOD_RES (6), (7), (39), (41): Xaa is C or S
HVPKPXXAPTKLEPISVLYLDDSSNVIKFKYENMVVRSXGXH

SEQ ID NO: 66835 - protein, 42 aa, Artificial Sequence
  GFR-binding peptide
  MOD_RES (6), (7), (41): Xaa is C or S
  MOD_RES (21), (22), (23), (24), (25): Xaa is A or G
  MOD_RES (26), (27), (28), (29): Xaa is A or G or is absent
HVPKPXXAPTKLSPISVLYKXXXXXXXXXLKYHYNMVVRSXG

SEQ ID NO: 66836 - protein, 34 aa, Artificial Sequence
  GFR-binding peptide
  MOD_RES (1), (2): Xaa is C or S
  MOD_RES (16), (17), (18), (19), (20): Xaa is A or G
  MOD_RES (21), (22), (23), (24): Xaa is A or G or is absent
XXTPTKMSATSMLYYXXXXXXXXXLRKHRGMVVD

SEQ ID NO: 66837 - protein, 31 aa, Artificial Sequence; identical to SEQ ID NO: 29213
  GFR-binding peptide
  MOD_RES (31), (31): Xaa is C or S

SEQ ID NO: 66838 - protein, 40 aa, Artificial Sequence; identical to SEQ ID NO: 7940
  GFR-binding peptide
  MOD_RES (6), (7): Xaa is C or S
  MOD_RES (21), (22), (23), (24), (25): Xaa is A or G
  MOD_RES (26), (27), (28), (29): Xaa is A or G or is absent

SEQ ID NO: 66839 - protein, 35 aa, Artificial Sequence
  GFR-binding peptide
  MOD_RES (1), (2), (33), (35): Xaa is C or S
XXVPQDLSPINILYFVGRTPKVYGKIPMVVKSXKX

SEQ ID NO: 66840 - protein, 33 aa, Artificial Sequence; identical to SEQ ID NO: 29215
  GFR-binding peptide
  MOD_RES (31), (33): Xaa is C or S

SEQ ID NO: 66841 - protein, 37 aa, Artificial Sequence; identical to SEQ ID NO: 7942
  GFR-binding peptide
  MOD_RES (3), (4), (36): Xaa is C or S

SEQ ID NO: 66842 - protein, 42 aa, Artificial Sequence; identical to SEQ ID NO: 7943
  GFR-binding peptide
  MOD_RES (6), (7), (40), (42): Xaa is C or S
  MOD_RES (21), (22), (23), (24), (25): Xaa is A or G
  MOD_RES (26), (27), (28), (29): Xaa is A or G or is absent

SEQ ID NO: 66843 - protein, 37 aa, Artificial Sequence; identical to SEQ ID NO: 29219
  GFR-binding peptide
  MOD_RES (2), (3), (37): Xaa is C or S
  MOD_RES (17), (18), (19), (20), (21): Xaa is A or G
  MOD_RES (22), (23), (24), (25): Xaa is A or G or is absent

SEQ ID NO: 66844 - protein, 33 aa, Artificial Sequence
  GFR-binding peptide
  MOD_RES (2), (3): Xaa is C or S
PXXVPEKMNAISILYFDENKNVVLKKYRNMTVE

SEQ ID NO: 66845 - protein, 35 aa, Artificial Sequence; identical to SEQ ID NO: 7946
  GFR-binding peptide
  MOD_RES (2), (3), (35): Xaa is C or S

SEQ ID NO: 66846 - protein, 33 aa, Artificial Sequence; identical to SEQ ID NO: 7947
  GFR-binding peptide
  MOD_RES (2), (3): Xaa is C or S

SEQ ID NO: 66847 - protein, 39 aa, Artificial Sequence
  GFR-binding peptide
  MOD_RES (6), (7): Xaa is C or S
  MOD_RES (21), (22), (23), (24), (25): Xaa is A or G
  MOD_RES (26), (27), (28), (29): Xaa is A or G or is absent
ASAAPXXVPQALSPINILYFXXXXXXXXXYGKIPMIVRS

SEQ ID NO: 66848 - protein, 42 aa, Artificial Sequence
  GFR-binding peptide
  MOD_RES (4), (5), (39), (41): Xaa is C or S
  MOD_RES (19), (20), (21), (22), (23): Xaa is A or G
  MOD_RES (24), (25), (26), (27): Xaa is A or G or is absent
PASXXVPARLSATSILYYXXXXXXXXXLRKHRDMVVEAXGXR

SEQ ID NO: 66849 - protein, 37 aa, Artificial Sequence
  GFR-binding peptide
  MOD_RES (4), (5): Xaa is C or S
  MOD_RES (19), (20), (21), (22), (23): Xaa is A or G
  MOD_RES (24), (25), (26), (27): Xaa is A or G or is absent
PSTXXAPVKTEPISMLYLXXXXXXXXXKFKYEMIVEE

SEQ ID NO: 66850 - protein, 32 aa, Artificial Sequence; identical to SEQ ID NO: 7949
  GFR-binding peptide
  MOD_RES (14), (15), (16), (17), (18): Xaa is A or G
  MOD_RES (19), (20), (21), (22): Xaa is A or G or is absent

SEQ ID NO: 66851 - protein, 38 aa, Artificial Sequence; identical to SEQ ID NO: 29227
  GFR-binding peptide
  MOD_RES (5), (6): Xaa is C or S
  MOD_RES (20), (21), (22), (23), (24): Xaa is A or G
  MOD_RES (25), (26), (27), (28): Xaa is A or G or is absent

SEQ ID NO: 66852 - protein, 42 aa, Artificial Sequence
  GFR-binding peptide
  MOD_RES (5), (6), (40), (42): Xaa is C or S
  MOD_RES (20), (21), (22), (23), (24): Xaa is A or G
  MOD_RES (25), (26), (27), (28): Xaa is A or G or is absent
IPEPXXVPEKMSPINILYFXXXXXXXXXYGKIPNMTVESXAX

SEQ ID NO: 66853 - protein, 34 aa, Artificial Sequence; identical to SEQ ID NO: 7951
  GFR-binding peptide
  MOD_RES (3), (4): Xaa is C or S

SEQ ID NO: 66854 - protein, 36 aa, Artificial Sequence
  GFR-binding peptide
  MOD_RES (1), (2), (35): Xaa is C or S
  MOD_RES (16), (17), (18), (19), (20): Xaa is A or G
  MOD_RES (21), (22), (23), (24): Xaa is A or G or is absent
XXAPVKTEPISMLYLXXXXXXXXXKFKYEMIVEEXG

SEQ ID NO: 66855 - protein, 33 aa, Artificial Sequence; identical to SEQ ID NO: 29232
  GFR-binding peptide
  MOD_RES (31), (33): Xaa is C or S

SEQ ID NO: 66856 - protein, 37 aa, Artificial Sequence; identical to SEQ ID NO: 7952
  GFR-binding peptide
  MOD_RES (1), (35), (37): Xaa is C or S
  MOD_RES (15), (16), (17), (18), (19): Xaa is A or G
  MOD_RES (20), (21), (22), (23): Xaa is A or G or is absent

SEQ ID NO: 66857 - protein, 33 aa, Artificial Sequence; identical to SEQ ID NO: 29236
  GFR-binding peptide
  MOD_RES (2), (2): Xaa is C or S

SEQ ID NO: 66858 - protein, 38 aa, Artificial Sequence; identical to SEQ ID NO: 33335
  GFR-binding peptide
  MOD_RES (4), (5), (36), (38): Xaa is C or S

SEQ ID NO: 66859 - protein, 39 aa, Artificial Sequence; identical to SEQ ID NO: 15243
  GFR-binding peptide
  MOD_RES (2), (3), (37), (39): Xaa is C or S
  MOD_RES (17), (18), (19), (20), (21): Xaa is A or G
  MOD_RES (22), (23), (24), (25): Xaa is A or G or is absent

SEQ ID NO: 66860 - protein, 37 aa, Artificial Sequence; identical to SEQ ID NO: 29238
  GFR-binding peptide
  MOD_RES (3), (4): Xaa is C or S
  MOD_RES (18), (19), (20), (21), (22): Xaa is A or G
  MOD_RES (23), (24), (25), (26): Xaa is A or G or is absent

SEQ ID NO: 66861 - protein, 37 aa, Artificial Sequence; identical to SEQ ID NO: 33338
  GFR-binding peptide
  MOD_RES (1), (2), (34), (36): Xaa is C or S

SEQ ID NO: 66862 - protein, 38 aa, Artificial Sequence; identical to SEQ ID NO: 7957
  GFR-binding peptide
  MOD_RES (3), (4), (38): Xaa is C or S
  MOD_RES (18), (19), (20), (21), (22): Xaa is A or G
  MOD_RES (23), (24), (25), (26): Xaa is A or G or is absent

SEQ ID NO: 66863 - protein, 35 aa, Artificial Sequence; identical to SEQ ID NO: 15246
  GFR-binding peptide
  MOD_RES (1), (33), (35): Xaa is C or S

SEQ ID NO: 66864 - protein, 41 aa, Artificial Sequence
  GFR-binding peptide
  MOD_RES (3), (4), (38), (40): Xaa is C or S
  MOD_RES (18), (19), (20), (21), (22): Xaa is A or G
  MOD_RES (23), (24), (25), (26): Xaa is A or G or is absent
GPXXTPTKMEPISMLYLXXXXXXXXXKFKYEGMVVDRXGXS

SEQ ID NO: 66865 - protein, 38 aa, Artificial Sequence; identical to SEQ ID NO: 7959
  GFR-binding peptide
  MOD_RES (2), (3), (37): Xaa is C or S
  MOD_RES (17), (18), (19), (20), (21): Xaa is A or G
  MOD_RES (22), (23), (24), (25): Xaa is A or G or is absent

SEQ ID NO: 66866 - protein, 36 aa, Artificial Sequence
  GFR-binding peptide
  MOD_RES (1), (2), (36): Xaa is C or S
  MOD_RES (16), (17), (18), (19), (20): Xaa is A or G
  MOD_RES (21), (22), (23), (24): Xaa is A or G or is absent
XXVPARLSATSILYYXXXXXXXXXLRKHRDMVVEAX

SEQ ID NO: 66867 - protein, 37 aa, Artificial Sequence; identical to SEQ ID NO: 7962
  GFR-binding peptide
  MOD_RES (2), (3), (37): Xaa is C or S
  MOD_RES (17), (18), (19), (20), (21): Xaa is A or G
  MOD_RES (22), (23), (24), (25): Xaa is A or G or is absent

SEQ ID NO: 66868 - protein, 38 aa, Artificial Sequence; identical to SEQ ID NO: 7963
  GFR-binding peptide
  MOD_RES (6), (7), (38): Xaa is C or S

SEQ ID NO: 66869 - protein, 36 aa, Artificial Sequence; identical to SEQ ID NO: 29245
  GFR-binding peptide
  MOD_RES (1), (2), (36): Xaa is C or S
  MOD_RES (16), (17), (18), (19), (20): Xaa is A or G
  MOD_RES (21), (22), (23), (24): Xaa is A or G or is absent

SEQ ID NO: 66870 - protein, 30 aa, Artificial Sequence; identical to SEQ ID NO: 7964
  GFR-binding peptide

SEQ ID NO: 66871 - protein, 39 aa, Artificial Sequence
  GFR-binding peptide
  MOD_RES (6), (7): Xaa is C or S
  MOD_RES (21), (22), (23), (24), (25): Xaa is A or G
  MOD_RES (26), (27), (28), (29): Xaa is A or G or is absent
GSAGPXXTPTKMSATSMLYYXXXXXXXXXLRKHRGMVVD

SEQ ID NO: 66872 - protein, 37 aa, Artificial Sequence; identical to SEQ ID NO: 7969
  GFR-binding peptide
  MOD_RES (1), (2), (36): Xaa is C or S
  MOD_RES (16), (17), (18), (19), (20): Xaa is A or G
  MOD_RES (21), (22), (23), (24): Xaa is A or G or is absent

SEQ ID NO: 66873 - protein, 36 aa, Artificial Sequence; identical to SEQ ID NO: 7970
  GFR-binding peptide
  MOD_RES (1), (2), (33), (35): Xaa is C or S

SEQ ID NO: 66874 - protein, 35 aa, Artificial Sequence; identical to SEQ ID NO: 33352
  GFR-binding peptide
  MOD_RES (1), (2): Xaa is C or S
  MOD_RES (16), (17), (18), (19), (20): Xaa is A or G
  MOD_RES (21), (22), (23), (24): Xaa is A or G or is absent

SEQ ID NO: 66875 - protein, 39 aa, Artificial Sequence; identical to SEQ ID NO: 29253
  GFR-binding peptide
  MOD_RES (6), (7): Xaa is C or S
  MOD_RES (21), (22), (23), (24), (25): Xaa is A or G
  MOD_RES (26), (27), (28), (29): Xaa is A or G or is absent

SEQ ID NO: 66876 - protein, 38 aa, Artificial Sequence
  GFR-binding peptide
  MOD_RES (5), (6): Xaa is C or S
  MOD_RES (20), (21), (22), (23), (24): Xaa is A or G
  MOD_RES (25), (26), (27), (28): Xaa is A or G or is absent
SAAPXXVPQALSPINILYFXXXXXXXXXYGKIPMIVRS

SEQ ID NO: 66877 - protein, 35 aa, Artificial Sequence; identical to SEQ ID NO: 7971
  GFR-binding peptide
  MOD_RES (1), (32), (34): Xaa is C or S

SEQ ID NO: 66878 - protein, 32 aa, Artificial Sequence
  GFR-binding peptide
  MOD_RES (14), (15), (16), (17), (18): Xaa is A or G
  MOD_RES (19), (20), (21), (22): Xaa is A or G or is absent
TPTKMEPISMLYLXXXXXXXXXKFKYEGMVVD

SEQ ID NO: 66879 - protein, 40 aa, Artificial Sequence
  GFR-binding peptide
  MOD_RES (4), (5), (38), (40): Xaa is C or S
  MOD_RES (19), (20), (21), (22), (23): Xaa is A or G
  MOD_RES (24), (25), (26), (27): Xaa is A or G or is absent
PSTXXAPVKTSATSMLYYXXXXXXXXXLRKHRMIVEEXGX

SEQ ID NO: 66880 - protein, 38 aa, Artificial Sequence; identical to SEQ ID NO: 7973
  GFR-binding peptide
  MOD_RES (4), (5), (38): Xaa is C or S
  MOD_RES (19), (20), (21), (22), (23): Xaa is A or G
  MOD_RES (24), (25), (26), (27): Xaa is A or G or is absent

SEQ ID NO: 66881 - protein, 41 aa, Artificial Sequence
  GFR-binding peptide
  MOD_RES (5), (6), (40): Xaa is C or S
  MOD_RES (20), (21), (22), (23), (24): Xaa is A or G
  MOD_RES (25), (26), (27), (28): Xaa is A or G or is absent
IPEPXXVPEKMSPINILYFXXXXXXXXXYGKIPNMTVESXA

SEQ ID NO: 66882 - protein, 41 aa, Artificial Sequence; identical to SEQ ID NO: 32310
  GFR-binding peptide
  MOD_RES (4), (5), (39), (41): Xaa is C or S
  MOD_RES (19), (20), (21), (22), (23): Xaa is A or G
  MOD_RES (24), (25), (26), (27): Xaa is A or G or is absent

SEQ ID NO: 66883 - protein, 37 aa, Artificial Sequence; identical to SEQ ID NO: 7974
  GFR-binding peptide
  MOD_RES (2), (3), (34), (36): Xaa is C or S

SEQ ID NO: 66884 - protein, 40 aa, Artificial Sequence; identical to SEQ ID NO: 32313
  GFR-binding peptide
  MOD_RES (5), (6), (38), (40): Xaa is C or S

SEQ ID NO: 66885 - protein, 37 aa, Artificial Sequence; identical to SEQ ID NO: 32314
  GFR-binding peptide
  MOD_RES (4), (36): Xaa is C or S

SEQ ID NO: 66886 - protein, 40 aa, Artificial Sequence; identical to SEQ ID NO: 29261
  GFR-binding peptide
  MOD_RES (6), (7): Xaa is C or S
  MOD_RES (21), (22), (23), (24), (25): Xaa is A or G
  MOD_RES (26), (27), (28), (29): Xaa is A or G or is absent

SEQ ID NO: 66887 - protein, 35 aa, Artificial Sequence; identical to SEQ ID NO: 7976
  GFR-binding peptide
  MOD_RES (1), (2), (33), (35): Xaa is C or S

SEQ ID NO: 66888 - protein, 35 aa, Artificial Sequence
  GFR-binding peptide
  MOD_RES (1), (35): Xaa is C or S
  MOD_RES (15), (16), (17), (18), (19): Xaa is A or G
  MOD_RES (20), (21), (22), (23): Xaa is A or G or is absent
XVPTRLSPISILYKXXXXXXXXXLKYHYDMVVESX

SEQ ID NO: 66889 - protein, 42 aa, Artificial Sequence; identical to SEQ ID NO: 7977
  GFR-binding peptide
  MOD_RES (5), (6), (39), (41): Xaa is C or S
  MOD_RES (20), (21), (22), (23), (24): Xaa is A or G
  MOD_RES (25), (26), (27), (28): Xaa is A or G or is absent

SEQ ID NO: 66890 - protein, 38 aa, Artificial Sequence; identical to SEQ ID NO: 7979
  GFR-binding peptide
  MOD_RES (5), (6), (38): Xaa is C or S

SEQ ID NO: 66891 - protein, 35 aa, Artificial Sequence
  GFR-binding peptide
  MOD_RES (2), (3), (34): Xaa is C or S
TXXAPVKTEPISMLYLDNGRVLLKFKYEMIVEEXG

SEQ ID NO: 66892 - protein, 41 aa, Artificial Sequence; identical to SEQ ID NO: 29265
  GFR-binding peptide
  MOD_RES (4), (38), (40): Xaa is C or S
  MOD_RES (18), (19), (20), (21), (22): Xaa is A or G
  MOD_RES (23), (24), (25), (26): Xaa is A or G or is absent

SEQ ID NO: 66893 - protein, 39 aa, Artificial Sequence
  GFR-binding peptide
  MOD_RES (3), (4), (36), (38): Xaa is C or S
KAXXVPTKLSATSILYYDKGVVTYLRKHRGMAVSEXGXR

SEQ ID NO: 66894 - protein, 37 aa, Artificial Sequence; identical to SEQ ID NO: 7983
  GFR-binding peptide
  MOD_RES (2), (3), (35), (37): Xaa is C or S

SEQ ID NO: 66895 - protein, 39 aa, Artificial Sequence
  GFR-binding peptide
  MOD_RES (6), (7), (39): Xaa is C or S
GIPEPXXVPEKMSPISILYKDENKNVVLKYHYNMTVESX

SEQ ID NO: 66896 - protein, 40 aa, Artificial Sequence
  GFR-binding peptide
  MOD_RES (6), (7), (39): Xaa is C or S
GIPEPXXVPEKMSPINILYFDENKNVVYGKIPNMTVESXA

SEQ ID NO: 66897 - protein, 39 aa, Artificial Sequence; identical to SEQ ID NO: 32324
  GFR-binding peptide
  MOD_RES (2), (3), (36), (38): Xaa is C or S

SEQ ID NO: 66898 - protein, 38 aa, Artificial Sequence; identical to SEQ ID NO: 7988
  GFR-binding peptide
  MOD_RES (3), (4), (37): Xaa is C or S

SEQ ID NO: 66899 - protein, 37 aa, Artificial Sequence; identical to SEQ ID NO: 7989
  GFR-binding peptide
  MOD_RES (2), (3), (36): Xaa is C or S
  MOD_RES (17), (18), (19), (20), (21): Xaa is A or G
  MOD_RES (22), (23), (24), (25): Xaa is A or G or is absent

SEQ ID NO: 66900 - protein, 33 aa, Artificial Sequence; identical to SEQ ID NO: 32330
  GFR-binding peptide
  MOD_RES (1), (2): Xaa is C or S

SEQ ID NO: 66901 - protein, 39 aa, Artificial Sequence; identical to SEQ ID NO: 7990
  GFR-binding peptide
  MOD_RES (3), (4), (38): Xaa is C or S
  MOD_RES (18), (19), (20), (21), (22): Xaa is A or G
  MOD_RES (23), (24), (25), (26): Xaa is A or G or is absent

SEQ ID NO: 66902 - protein, 39 aa, Artificial Sequence; identical to SEQ ID NO: 32332
  GFR-binding peptide
  MOD_RES (3), (4), (36), (38): Xaa is C or S

SEQ ID NO: 66903 - protein, 31 aa, Artificial Sequence; identical to SEQ ID NO: 57259
  GFR-binding peptide
  MOD_RES (31), (31): Xaa is C or S

SEQ ID NO: 66904 - protein, 39 aa, Artificial Sequence
  GFR-binding peptide
  MOD_RES (5), (6): Xaa is C or S
  MOD_RES (20), (21), (22), (23), (24): Xaa is A or G
  MOD_RES (25), (26), (27), (28): Xaa is A or G or is absent
TPPTXXVPTRLEPISILYLXXXXXXXXXKFKYEDMVVES

SEQ ID NO: 66905 - protein, 35 aa, Artificial Sequence; identical to SEQ ID NO: 7994
  GFR-binding peptide
  MOD_RES (1), (32), (34): Xaa is C or S

SEQ ID NO: 66906 - protein, 37 aa, Artificial Sequence; identical to SEQ ID NO: 7997
  GFR-binding peptide
  MOD_RES (6), (7): Xaa is C or S

SEQ ID NO: 66907 - protein, 36 aa, Artificial Sequence
  GFR-binding peptide
  MOD_RES (3), (4), (36): Xaa is C or S
GPXXTPTKMEPISMLYLNDKQQIIKFKYEGMVVDRX

SEQ ID NO: 66908 - protein, 36 aa, Artificial Sequence
  GFR-binding peptide
  MOD_RES (4), (5): Xaa is C or S
PEPXXVPEKMEPISILYLDENKNVVKFKYENMTVES

SEQ ID NO: 66909 - protein, 40 aa, Artificial Sequence
  GFR-binding peptide
  MOD_RES (4), (5), (37), (39): Xaa is C or S
PEPXXVPEKMSPINILYFDENKNVVYGKIPNMTVESXAXR

SEQ ID NO: 66910 - protein, 40 aa, Artificial Sequence
  GFR-binding peptide
  MOD_RES (3), (4), (38), (40): Xaa is C or S
  MOD_RES (18), (19), (20), (21), (22): Xaa is A or G
  MOD_RES (23), (24), (25), (26): Xaa is A or G or is absent
ASXXVPARLSATSILYYXXXXXXXXXLRKHRDMVVEAXGX

SEQ ID NO: 66911 - protein, 39 aa, Artificial Sequence; identical to SEQ ID NO: 32341
  GFR-binding peptide
  MOD_RES (6), (7), (39): Xaa is C or S

SEQ ID NO: 66912 - protein, 39 aa, Artificial Sequence; identical to SEQ ID NO: 8000
  GFR-binding peptide
  MOD_RES (5), (6): Xaa is C or S
  MOD_RES (20), (21), (22), (23), (24): Xaa is A or G
  MOD_RES (25), (26), (27), (28): Xaa is A or G or is absent

SEQ ID NO: 66913 - protein, 37 aa, Artificial Sequence; identical to SEQ ID NO: 8001
  GFR-binding peptide
  MOD_RES (2), (3), (34), (36): Xaa is C or S

SEQ ID NO: 66914 - protein, 39 aa, Artificial Sequence
  GFR-binding peptide
  MOD_RES (3), (4), (38): Xaa is C or S
  MOD_RES (18), (19), (20), (21), (22): Xaa is A or G
  MOD_RES (23), (24), (25), (26): Xaa is A or G or is absent
GPXXTPTKMEPISMLYLXXXXXXXXXKFKYEGMVVDRXG

SEQ ID NO: 66915 - protein, 37 aa, Artificial Sequence
  GFR-binding peptide
  MOD_RES (2), (3), (37): Xaa is C or S
  MOD_RES (17), (18), (19), (20), (21): Xaa is A or G
  MOD_RES (22), (23), (24), (25): Xaa is A or G or is absent
AXXVPTKLSATSILYYXXXXXXXXXLRKHRGMAVSEX

SEQ ID NO: 66916 - protein, 32 aa, Artificial Sequence
  GFR-binding peptide
  MOD_RES (1), (32): Xaa is C or S
XAPVKTSPISMLYKDNGRVLLLKYHYMIVEEX

SEQ ID NO: 66917 - protein, 36 aa, Artificial Sequence; identical to SEQ ID NO: 15303
  GFR-binding peptide
  MOD_RES (1), (2), (34), (36): Xaa is C or S

SEQ ID NO: 66918 - protein, 40 aa, Artificial Sequence; identical to SEQ ID NO: 32355
  GFR-binding peptide
  MOD_RES (4), (5), (39): Xaa is C or S
  MOD_RES (19), (20), (21), (22), (23): Xaa is A or G
  MOD_RES (24), (25), (26), (27): Xaa is A or G or is absent

SEQ ID NO: 66919 - protein, 37 aa, Artificial Sequence
  GFR-binding peptide
  MOD_RES (1), (2), (36): Xaa is C or S
  MOD_RES (16), (17), (18), (19), (20): Xaa is A or G
  MOD_RES (21), (22), (23), (24): Xaa is A or G or is absent
XXVPEKMSPINILYFXXXXXXXXXYGKIPNMTVESXA

SEQ ID NO: 66920 - protein, 35 aa, Artificial Sequence; identical to SEQ ID NO: 32359
  GFR-binding peptide
  MOD_RES (34), (34): Xaa is C or S
  MOD_RES (14), (15), (16), (17), (18): Xaa is A or G
  MOD_RES (19), (20), (21), (22): Xaa is A or G or is absent

SEQ ID NO: 66921 - protein, 35 aa, Artificial Sequence; identical to SEQ ID NO: 15305
  GFR-binding peptide
  MOD_RES (2), (3): Xaa is C or S
  MOD_RES (17), (18), (19), (20), (21): Xaa is A or G
  MOD_RES (22), (23), (24), (25): Xaa is A or G or is absent

SEQ ID NO: 66922 - protein, 37 aa, Artificial Sequence
  GFR-binding peptide
  MOD_RES (1), (2), (35), (37): Xaa is C or S
  MOD_RES (16), (17), (18), (19), (20): Xaa is A or G
  MOD_RES (21), (22), (23), (24): Xaa is A or G or is absent
XXAPVKTSPISMLYKXXXXXXXXXLKYHYMIVEEXGX

SEQ ID NO: 66923 - protein, 41 aa, Artificial Sequence
  GFR-binding peptide
  MOD_RES (4), (5), (38), (40): Xaa is C or S
  MOD_RES (19), (20), (21), (22), (23): Xaa is A or G
  MOD_RES (24), (25), (26), (27): Xaa is A or G or is absent
ASPXXVPQDLSPINILYFXXXXXXXXXYGKIPMVVKSXKXS

SEQ ID NO: 66924 - protein, 39 aa, Artificial Sequence; identical to SEQ ID NO: 32364
  GFR-binding peptide
  MOD_RES (4), (5), (38): Xaa is C or S
  MOD_RES (19), (20), (21), (22), (23): Xaa is A or G
  MOD_RES (24), (25), (26), (27): Xaa is A or G or is absent

SEQ ID NO: 66925 - protein, 36 aa, Artificial Sequence
  GFR-binding peptide
  MOD_RES (2), (3), (35): Xaa is C or S
PXXTPTKMSPISMLYKNDKQQIILKYHYGMVVDRXG

SEQ ID NO: 66926 - protein, 40 aa, Artificial Sequence; identical to SEQ ID NO: 32367
  GFR-binding peptide
  MOD_RES (6), (7), (39): Xaa is C or S

SEQ ID NO: 66927 - protein, 42 aa, Artificial Sequence; identical to SEQ ID NO: 8016
  GFR-binding peptide
  MOD_RES (5), (6), (39), (41): Xaa is C or S

SEQ ID NO: 66928 - protein, 38 aa, Artificial Sequence; identical to SEQ ID NO: 29291
  GFR-binding peptide
  MOD_RES (4), (5), (37): Xaa is C or S

SEQ ID NO: 66929 - protein, 38 aa, Artificial Sequence
  GFR-binding peptide
  MOD_RES (5), (6), (37): Xaa is C or S
VPSTXXAPVKTEPISMLYLDNGRVLLKFKYEMIVEEXG

SEQ ID NO: 66930 - protein, 36 aa, Artificial Sequence; identical to SEQ ID NO: 8018
  GFR-binding peptide
  MOD_RES (2), (36): Xaa is C or S
  MOD_RES (16), (17), (18), (19), (20): Xaa is A or G
  MOD_RES (21), (22), (23), (24): Xaa is A or G or is absent

SEQ ID NO: 66931 - protein, 34 aa, Artificial Sequence; identical to SEQ ID NO: 8019
  GFR-binding peptide
  MOD_RES (34), (34): Xaa is C or S
  MOD_RES (14), (15), (16), (17), (18): Xaa is A or G
  MOD_RES (19), (20), (21), (22): Xaa is A or G or is absent

SEQ ID NO: 66932 - protein, 36 aa, Artificial Sequence
  GFR-binding peptide
  MOD_RES (5), (6): Xaa is C or S
SASPXXVPQDLSPINILYFVGRTPKVYGKIPMVVKS

SEQ ID NO: 66933 - protein, 40 aa, Artificial Sequence; identical to SEQ ID NO: 32374
  GFR-binding peptide
  MOD_RES (5), (6), (38), (40): Xaa is C or S

SEQ ID NO: 66934 - protein, 39 aa, Artificial Sequence
  GFR-binding peptide
  MOD_RES (3), (4), (38): Xaa is C or S
  MOD_RES (18), (19), (20), (21), (22): Xaa is A or G
  MOD_RES (23), (24), (25), (26): Xaa is A or G or is absent
GPXXTPTKMSPISMLYKXXXXXXXXXLKYHYGMVVDRXG

SEQ ID NO: 66935 - protein, 32 aa, Artificial Sequence; identical to SEQ ID NO: 57305
  GFR-binding peptide
  MOD_RES (1), (1): Xaa is C or S

SEQ ID NO: 66936 - protein, 41 aa, Artificial Sequence; identical to SEQ ID NO: 32379
  GFR-binding peptide
  MOD_RES (5), (6), (38), (40): Xaa is C or S

SEQ ID NO: 66937 - protein, 34 aa, Artificial Sequence
  GFR-binding peptide
  MOD_RES (32), (34): Xaa is C or S
VPEKMSPISILYKDENKNVVLKYHYNMTVESXAX

SEQ ID NO: 66938 - protein, 33 aa, Artificial Sequence; identical to SEQ ID NO: 8023
  GFR-binding peptide
  MOD_RES (3), (3): Xaa is C or S

SEQ ID NO: 66939 - protein, 44 aa, Artificial Sequence; identical to SEQ ID NO: 8024
  GFR-binding peptide
  MOD_RES (6), (7), (41), (43): Xaa is C or S
  MOD_RES (21), (22), (23), (24), (25): Xaa is A or G
  MOD_RES (26), (27), (28), (29): Xaa is A or G or is absent

SEQ ID NO: 66940 - protein, 36 aa, Artificial Sequence
  GFR-binding peptide
  MOD_RES (2), (3), (35): Xaa is C or S
PXXVPEKMSPISILYKDENKNVVLKYHYNMTVESXA

SEQ ID NO: 66941 - protein, 38 aa, Artificial Sequence; identical to SEQ ID NO: 29297
  GFR-binding peptide
  MOD_RES (6), (7): Xaa is C or S

SEQ ID NO: 66942 - protein, 32 aa, Artificial Sequence
  GFR-binding peptide
  MOD_RES (1), (2): Xaa is C or S
XXVPTRLSATSILYYDSANNVVLRKHRDMVVE

SEQ ID NO: 66943 - protein, 32 aa, Artificial Sequence; identical to SEQ ID NO: 32392
  GFR-binding peptide
  MOD_RES (14), (15), (16), (17), (18): Xaa is A or G
  MOD_RES (19), (20), (21), (22): Xaa is A or G or is absent

SEQ ID NO: 66944 - protein, 43 aa, Artificial Sequence; identical to SEQ ID NO: 32393
  GFR-binding peptide
  MOD_RES (5), (6), (40), (42): Xaa is C or S
  MOD_RES (20), (21), (22), (23), (24): Xaa is A or G
  MOD_RES (25), (26), (27), (28): Xaa is A or G or is absent

SEQ ID NO: 66945 - protein, 43 aa, Artificial Sequence; identical to SEQ ID NO: 8030
  GFR-binding peptide
  MOD_RES (6), (7), (41), (43): Xaa is C or S
  MOD_RES (21), (22), (23), (24), (25): Xaa is A or G
  MOD_RES (26), (27), (28), (29): Xaa is A or G or is absent

SEQ ID NO: 66946 - protein, 38 aa, Artificial Sequence; identical to SEQ ID NO: 32396
  GFR-binding peptide
  MOD_RES (3), (4), (36), (38): Xaa is C or S

SEQ ID NO: 66947 - protein, 33 aa, Artificial Sequence; identical to SEQ ID NO: 32397
  GFR-binding peptide
  MOD_RES (1), (1): Xaa is C or S
  MOD_RES (15), (16), (17), (18), (19): Xaa is A or G
  MOD_RES (20), (21), (22), (23): Xaa is A or G or is absent

SEQ ID NO: 66948 - protein, 39 aa, Artificial Sequence
  GFR-binding peptide
  MOD_RES (5), (6), (38): Xaa is C or S
IPEPXXVPEKMSATSILYYDENKNVVLRKHRNMTVESXA

SEQ ID NO: 66949 - protein, 44 aa, Artificial Sequence; identical to SEQ ID NO: 29306
  GFR-binding peptide
  MOD_RES (6), (7), (41), (43): Xaa is C or S
  MOD_RES (21), (22), (23), (24), (25): Xaa is A or G
  MOD_RES (26), (27), (28), (29): Xaa is A or G or is absent

SEQ ID NO: 66950 - protein, 37 aa, Artificial Sequence; identical to SEQ ID NO: 29307
  GFR-binding peptide
  MOD_RES (4), (5): Xaa is C or S
  MOD_RES (19), (20), (21), (22), (23): Xaa is A or G
  MOD_RES (24), (25), (26), (27): Xaa is A or G or is absent

SEQ ID NO: 66951 - protein, 31 aa, Artificial Sequence; identical to SEQ ID NO: 32401
  GFR-binding peptide

SEQ ID NO: 66952 - protein, 33 aa, Artificial Sequence
  GFR-binding peptide
  MOD_RES (2), (3): Xaa is C or S
TXXAPVKTSPISMLYKDNGRVLLLKYHYMIVEE

SEQ ID NO: 66953 - protein, 41 aa, Artificial Sequence; identical to SEQ ID NO: 8035
  GFR-binding peptide
  MOD_RES (4), (5), (40): Xaa is C or S
  MOD_RES (19), (20), (21), (22), (23): Xaa is A or G
  MOD_RES (24), (25), (26), (27): Xaa is A or G or is absent

SEQ ID NO: 66954 - protein, 38 aa, Artificial Sequence; identical to SEQ ID NO: 8036
  GFR-binding peptide
  MOD_RES (5), (6): Xaa is C or S
  MOD_RES (20), (21), (22), (23), (24): Xaa is A or G
  MOD_RES (25), (26), (27), (28): Xaa is A or G or is absent

SEQ ID NO: 66955 - protein, 33 aa, Artificial Sequence; identical to SEQ ID NO: 8037
  GFR-binding peptide
  MOD_RES (1), (32): Xaa is C or S

SEQ ID NO: 66956 - protein, 36 aa, Artificial Sequence
  GFR-binding peptide
  MOD_RES (5), (6): Xaa is C or S
IPEPXXVPEKMNAISILYFDENKNVVLKKYRNMTVE

SEQ ID NO: 66957 - protein, 33 aa, Artificial Sequence; identical to SEQ ID NO: 8039
  GFR-binding peptide
  MOD_RES (1), (32): Xaa is C or S

SEQ ID NO: 66958 - protein, 37 aa, Artificial Sequence; identical to SEQ ID NO: 8040
  GFR-binding peptide
  MOD_RES (1), (2), (36): Xaa is C or S
  MOD_RES (16), (17), (18), (19), (20): Xaa is A or G
  MOD_RES (21), (22), (23), (24): Xaa is A or G or is absent

SEQ ID NO: 66959 - protein, 40 aa, Artificial Sequence; identical to SEQ ID NO: 32413
  GFR-binding peptide
  MOD_RES (4), (5), (39): Xaa is C or S
  MOD_RES (19), (20), (21), (22), (23): Xaa is A or G
  MOD_RES (24), (25), (26), (27): Xaa is A or G or is absent

SEQ ID NO: 66960 - protein, 33 aa, Artificial Sequence
  GFR-binding peptide
  MOD_RES (1), (2): Xaa is C or S
XXTPTKMSATSMLYYNDKQQIILRKHRGMVVDR

SEQ ID NO: 66961 - protein, 40 aa, Artificial Sequence; identical to SEQ ID NO: 32417
  GFR-binding peptide
  MOD_RES (6), (7), (38), (40): Xaa is C or S

SEQ ID NO: 66962 - protein, 40 aa, Artificial Sequence; identical to SEQ ID NO: 8047
  GFR-binding peptide
  MOD_RES (5), (6), (39): Xaa is C or S

SEQ ID NO: 66963 - protein, 36 aa, Artificial Sequence; identical to SEQ ID NO: 32419
  GFR-binding peptide
  MOD_RES (3), (4), (36): Xaa is C or S

SEQ ID NO: 66964 - protein, 41 aa, Artificial Sequence; identical to SEQ ID NO: 8051
  GFR-binding peptide
  MOD_RES (6), (7), (41): Xaa is C or S
  MOD_RES (21), (22), (23), (24), (25): Xaa is A or G
  MOD_RES (26), (27), (28), (29): Xaa is A or G or is absent

SEQ ID NO: 66965 - protein, 40 aa, Artificial Sequence; identical to SEQ ID NO: 57338
  GFR-binding peptide
  MOD_RES (5), (6), (38), (40): Xaa is C or S

SEQ ID NO: 66966 - protein, 39 aa, Artificial Sequence; identical to SEQ ID NO: 8054
  GFR-binding peptide
  MOD_RES (6), (7), (38): Xaa is C or S

SEQ ID NO: 66967 - protein, 36 aa, Artificial Sequence
  GFR-binding peptide
  MOD_RES (1), (2), (33), (35): Xaa is C or S
XXVSQDLSPINILYFIGKTPKIYGKIPMIVKSXKXS

SEQ ID NO: 66968 - protein, 39 aa, Artificial Sequence; identical to SEQ ID NO: 8056
  GFR-binding peptide
  MOD_RES (4), (5): Xaa is C or S
  MOD_RES (19), (20), (21), (22), (23): Xaa is A or G
  MOD_RES (24), (25), (26), (27): Xaa is A or G or is absent

SEQ ID NO: 66969 - protein, 36 aa, Artificial Sequence; identical to SEQ ID NO: 32430
  GFR-binding peptide
  MOD_RES (33), (35): Xaa is C or S
  MOD_RES (14), (15), (16), (17), (18): Xaa is A or G
  MOD_RES (19), (20), (21), (22): Xaa is A or G or is absent

SEQ ID NO: 66970 - protein, 39 aa, Artificial Sequence; identical to SEQ ID NO: 29335
  GFR-binding peptide
  MOD_RES (5), (6), (38): Xaa is C or S

SEQ ID NO: 66971 - protein, 36 aa, Artificial Sequence; identical to SEQ ID NO: 8058
  GFR-binding peptide
  MOD_RES (1), (2), (34), (36): Xaa is C or S

SEQ ID NO: 66972 - protein, 36 aa, Artificial Sequence; identical to SEQ ID NO: 32441
  GFR-binding peptide
  MOD_RES (2), (3), (35): Xaa is C or S

SEQ ID NO: 66973 - protein, 38 aa, Artificial Sequence; identical to SEQ ID NO: 32442
  GFR-binding peptide
  MOD_RES (6), (7): Xaa is C or S

SEQ ID NO: 66974 - protein, 38 aa, Artificial Sequence; identical to SEQ ID NO: 8063
  GFR-binding peptide
  MOD_RES (4), (5), (37): Xaa is C or S

SEQ ID NO: 66975 - protein, 37 aa, Artificial Sequence; identical to SEQ ID NO: 8064
  GFR-binding peptide
  MOD_RES (6), (7): Xaa is C or S

SEQ ID NO: 66976 - protein, 33 aa, Artificial Sequence; identical to SEQ ID NO: 8065
  GFR-binding peptide
  MOD_RES (2), (3): Xaa is C or S

SEQ ID NO: 66977 - protein, 36 aa, Artificial Sequence; identical to SEQ ID NO: 32444
  GFR-binding peptide
  MOD_RES (1), (2), (36): Xaa is C or S
  MOD_RES (16), (17), (18), (19), (20): Xaa is A or G
  MOD_RES (21), (22), (23), (24): Xaa is A or G or is absent

SEQ ID NO: 66978 - protein, 38 aa, Artificial Sequence; identical to SEQ ID NO: 29350
  GFR-binding peptide
  MOD_RES (5), (6), (37): Xaa is C or S

SEQ ID NO: 66979 - protein, 35 aa, Artificial Sequence; identical to SEQ ID NO: 8066
  GFR-binding peptide
  MOD_RES (4), (5): Xaa is C or S

SEQ ID NO: 66980 - protein, 36 aa, Artificial Sequence
  GFR-binding peptide
  MOD_RES (1), (2), (34), (36): Xaa is C or S
XXTPTKMSATSMLYYNDKQQIILRKHRGMVVDRXGX

SEQ ID NO: 66981 - protein, 34 aa, Artificial Sequence
  GFR-binding peptide
  MOD_RES (1), (2), (33): Xaa is C or S
XXVSQDLSPINILYFIGKTPKIYGKIPMIVKSXK

SEQ ID NO: 66982 - protein, 43 aa, Artificial Sequence; identical to SEQ ID NO: 32446
  GFR-binding peptide
  MOD_RES (6), (7), (41), (43): Xaa is C or S
  MOD_RES (21), (22), (23), (24), (25): Xaa is A or G
  MOD_RES (26), (27), (28), (29): Xaa is A or G or is absent

SEQ ID NO: 66983 - protein, 38 aa, Artificial Sequence; identical to SEQ ID NO: 8067
  GFR-binding peptide
  MOD_RES (2), (3), (36), (38): Xaa is C or S
  MOD_RES (17), (18), (19), (20), (21): Xaa is A or G
  MOD_RES (22), (23), (24), (25): Xaa is A or G or is absent

SEQ ID NO: 66984 - protein, 34 aa, Artificial Sequence
  GFR-binding peptide
  MOD_RES (2), (3): Xaa is C or S
AXXVPTKLSATSILYYDKGVVTYLRKHRGMAVSE

SEQ ID NO: 66985 - protein, 38 aa, Artificial Sequence; identical to SEQ ID NO: 29353
  GFR-binding peptide
  MOD_RES (5), (6): Xaa is C or S
  MOD_RES (20), (21), (22), (23), (24): Xaa is A or G
  MOD_RES (25), (26), (27), (28): Xaa is A or G or is absent

SEQ ID NO: 66986 - protein, 37 aa, Artificial Sequence; identical to SEQ ID NO: 8068
  GFR-binding peptide
  MOD_RES (2), (3), (34), (36): Xaa is C or S

SEQ ID NO: 66987 - protein, 31 aa, Artificial Sequence; identical to SEQ ID NO: 32449
  GFR-binding peptide

SEQ ID NO: 66988 - protein, 34 aa, Artificial Sequence
  GFR-binding peptide
  MOD_RES (1), (2), (34): Xaa is C or S
XXVPTRLEPISILYLDSANNVVKFKYEDMVVESX

SEQ ID NO: 66989 - protein, 35 aa, Artificial Sequence; identical to SEQ ID NO: 29359
  GFR-binding peptide
  MOD_RES (1), (35): Xaa is C or S
  MOD_RES (15), (16), (17), (18), (19): Xaa is A or G
  MOD_RES (20), (21), (22), (23): Xaa is A or G or is absent

SEQ ID NO: 66990 - protein, 37 aa, Artificial Sequence; identical to SEQ ID NO: 32453
  GFR-binding peptide
  MOD_RES (6), (7): Xaa is C or S

SEQ ID NO: 66991 - protein, 37 aa, Artificial Sequence
  GFR-binding peptide
  MOD_RES (6), (7): Xaa is C or S
STPPTXXVPTRLSPISILYKDSANNVVLKYHYDMVVE

SEQ ID NO: 66992 - protein, 39 aa, Artificial Sequence; identical to SEQ ID NO: 8078
  GFR-binding peptide
  MOD_RES (6), (7), (38): Xaa is C or S

SEQ ID NO: 66993 - protein, 38 aa, Artificial Sequence; identical to SEQ ID NO: 57363
  GFR-binding peptide
  MOD_RES (2), (3), (37): Xaa is C or S
  MOD_RES (17), (18), (19), (20), (21): Xaa is A or G
  MOD_RES (22), (23), (24), (25): Xaa is A or G or is absent

SEQ ID NO: 66994 - protein, 39 aa, Artificial Sequence
  GFR-binding peptide
  MOD_RES (6), (7): Xaa is C or S
  MOD_RES (21), (22), (23), (24), (25): Xaa is A or G
  MOD_RES (26), (27), (28), (29): Xaa is A or G or is absent
GSAGPXXTPTKMEPISMLYLXXXXXXXXXKFKYEGMVVD

SEQ ID NO: 66995 - protein, 36 aa, Artificial Sequence; identical to SEQ ID NO: 8082
  GFR-binding peptide
  MOD_RES (4), (5), (36): Xaa is C or S

SEQ ID NO: 66996 - protein, 38 aa, Artificial Sequence; identical to SEQ ID NO: 32462
  GFR-binding peptide
  MOD_RES (2), (3), (36), (38): Xaa is C or S

SEQ ID NO: 66997 - protein, 37 aa, Artificial Sequence; identical to SEQ ID NO: 8083
  GFR-binding peptide
  MOD_RES (1), (35), (37): Xaa is C or S
  MOD_RES (15), (16), (17), (18), (19): Xaa is A or G
  MOD_RES (20), (21), (22), (23): Xaa is A or G or is absent

SEQ ID NO: 66998 - protein, 38 aa, Artificial Sequence; identical to SEQ ID NO: 29366
  GFR-binding peptide
  MOD_RES (4), (5), (37): Xaa is C or S

SEQ ID NO: 66999 - protein, 31 aa, Artificial Sequence; identical to SEQ ID NO: 29367
  GFR-binding peptide

SEQ ID NO: 67000 - protein, 40 aa, Artificial Sequence; identical to SEQ ID NO: 8085
  GFR-binding peptide
  MOD_RES (3), (4), (37), (39): Xaa is C or S
  MOD_RES (18), (19), (20), (21), (22): Xaa is A or G
  MOD_RES (23), (24), (25), (26): Xaa is A or G or is absent

SEQ ID NO: 67001 - protein, 42 aa, Artificial Sequence
  GFR-binding peptide
  MOD_RES (4), (5), (39), (41): Xaa is C or S
  MOD_RES (19), (20), (21), (22), (23): Xaa is A or G
  MOD_RES (24), (25), (26), (27): Xaa is A or G or is absent
PPTXXVPTRLSPISILYKXXXXXXXXXLKYHYDMVVESXGXR

SEQ ID NO: 67002 - protein, 43 aa, Artificial Sequence
  GFR-binding peptide
  MOD_RES (5), (6), (40), (42): Xaa is C or S
  MOD_RES (20), (21), (22), (23), (24): Xaa is A or G
  MOD_RES (25), (26), (27), (28): Xaa is A or G or is absent
TPPTXXVPTRLSATSILYYXXXXXXXXXLRKHRDMVVESXGXR

SEQ ID NO: 67003 - protein, 34 aa, Artificial Sequence; identical to SEQ ID NO: 8089
  GFR-binding peptide
  MOD_RES (2), (3), (34): Xaa is C or S

SEQ ID NO: 67004 - protein, 37 aa, Artificial Sequence; identical to SEQ ID NO: 8091
  GFR-binding peptide
  MOD_RES (1), (2), (34), (36): Xaa is C or S

SEQ ID NO: 67005 - protein, 39 aa, Artificial Sequence
  GFR-binding peptide
  MOD_RES (6), (7): Xaa is C or S
  MOD_RES (21), (22), (23), (24), (25): Xaa is A or G
  MOD_RES (26), (27), (28), (29): Xaa is A or G or is absent
GSAGPXXTPTKMSPISMLYKXXXXXXXXXLKYHYGMVVD

SEQ ID NO: 67006 - protein, 37 aa, Artificial Sequence; identical to SEQ ID NO: 57371
  GFR-binding peptide
  MOD_RES (3), (4), (37): Xaa is C or S
  MOD_RES (18), (19), (20), (21), (22): Xaa is A or G
  MOD_RES (23), (24), (25), (26): Xaa is A or G or is absent

SEQ ID NO: 67007 - protein, 37 aa, Artificial Sequence; identical to SEQ ID NO: 29374
  GFR-binding peptide
  MOD_RES (5), (6): Xaa is C or S

SEQ ID NO: 67008 - protein, 37 aa, Artificial Sequence; identical to SEQ ID NO: 8093
  GFR-binding peptide
  MOD_RES (1), (2), (34), (36): Xaa is C or S

SEQ ID NO: 67009 - protein, 38 aa, Artificial Sequence; identical to SEQ ID NO: 32470
  GFR-binding peptide
  MOD_RES (3), (4), (38): Xaa is C or S
  MOD_RES (18), (19), (20), (21), (22): Xaa is A or G
  MOD_RES (23), (24), (25), (26): Xaa is A or G or is absent

SEQ ID NO: 67010 - protein, 40 aa, Artificial Sequence
  GFR-binding peptide
  MOD_RES (5), (6), (40): Xaa is C or S
  MOD_RES (20), (21), (22), (23), (24): Xaa is A or G
  MOD_RES (25), (26), (27), (28): Xaa is A or G or is absent
SAGPXXTPTKMSPISMLYKXXXXXXXXXLKYHYGMVVDRX

SEQ ID NO: 67011 - protein, 39 aa, Artificial Sequence
  GFR-binding peptide
  MOD_RES (5), (6), (37), (39): Xaa is C or S
VPSTXXAPVKTSATSMLYYDNGRVLLLRKHRMIVEEXGX

SEQ ID NO: 67012 - protein, 35 aa, Artificial Sequence; identical to SEQ ID NO: 32473
  GFR-binding peptide
  MOD_RES (1), (2): Xaa is C or S
  MOD_RES (16), (17), (18), (19), (20): Xaa is A or G
  MOD_RES (21), (22), (23), (24): Xaa is A or G or is absent

SEQ ID NO: 67013 - protein, 42 aa, Artificial Sequence; identical to SEQ ID NO: 8096
  GFR-binding peptide
  MOD_RES (4), (5), (39), (41): Xaa is C or S
  MOD_RES (19), (20), (21), (22), (23): Xaa is A or G
  MOD_RES (24), (25), (26), (27): Xaa is A or G or is absent

SEQ ID NO: 67014 - protein, 43 aa, Artificial Sequence
  GFR-binding peptide
  MOD_RES (6), (7), (41), (43): Xaa is C or S
  MOD_RES (21), (22), (23), (24), (25): Xaa is A or G
  MOD_RES (26), (27), (28), (29): Xaa is A or G or is absent
STPPTXXVPTRLSPISILYKXXXXXXXXXLKYHYDMVVESXGX

SEQ ID NO: 67015 - protein, 42 aa, Artificial Sequence; identical to SEQ ID NO: 8097
  GFR-binding peptide
  MOD_RES (6), (7), (41): Xaa is C or S
  MOD_RES (21), (22), (23), (24), (25): Xaa is A or G
  MOD_RES (26), (27), (28), (29): Xaa is A or G or is absent

SEQ ID NO: 67016 - protein, 35 aa, Artificial Sequence; identical to SEQ ID NO: 8098
  GFR-binding peptide
  MOD_RES (4), (5): Xaa is C or S

SEQ ID NO: 67017 - protein, 32 aa, Artificial Sequence; identical to SEQ ID NO: 8099
  GFR-binding peptide
  MOD_RES (1), (1): Xaa is C or S

SEQ ID NO: 67018 - protein, 34 aa, Artificial Sequence; identical to SEQ ID NO: 32475
  GFR-binding peptide
  MOD_RES (3), (4): Xaa is C or S

SEQ ID NO: 67019 - protein, 31 aa, Artificial Sequence; identical to SEQ ID NO: 29382
  GFR-binding peptide

SEQ ID NO: 67020 - protein, 34 aa, Artificial Sequence; identical to SEQ ID NO: 32481
  GFR-binding peptide
  MOD_RES (1), (2): Xaa is C or S
  MOD_RES (16), (17), (18), (19), (20): Xaa is A or G
  MOD_RES (21), (22), (23), (24): Xaa is A or G or is absent

SEQ ID NO: 67021 - protein, 38 aa, Artificial Sequence; identical to SEQ ID NO: 29384
  GFR-binding peptide
  MOD_RES (6), (7): Xaa is C or S

SEQ ID NO: 67022 - protein, 34 aa, Artificial Sequence; identical to SEQ ID NO: 8101
  GFR-binding peptide
  MOD_RES (34), (34): Xaa is C or S
  MOD_RES (14), (15), (16), (17), (18): Xaa is A or G
  MOD_RES (19), (20), (21), (22): Xaa is A or G or is absent

SEQ ID NO: 67023 - protein, 37 aa, Artificial Sequence
  GFR-binding peptide
  MOD_RES (1), (35), (37): Xaa is C or S
  MOD_RES (15), (16), (17), (18), (19): Xaa is A or G
  MOD_RES (20), (21), (22), (23): Xaa is A or G or is absent
XVPEKMEPISILYLXXXXXXXXXKFKYENMTVESXAX

SEQ ID NO: 67024 - protein, 38 aa, Artificial Sequence; identical to SEQ ID NO: 29387
  GFR-binding peptide
  MOD_RES (3), (4), (36), (38): Xaa is C or S

SEQ ID NO: 67025 - protein, 33 aa, Artificial Sequence; identical to SEQ ID NO: 32487
  GFR-binding peptide
  MOD_RES (32), (32): Xaa is C or S

SEQ ID NO: 67026 - protein, 40 aa, Artificial Sequence; identical to SEQ ID NO: 29389
  GFR-binding peptide
  MOD_RES (3), (4), (38), (40): Xaa is C or S
  MOD_RES (18), (19), (20), (21), (22): Xaa is A or G
  MOD_RES (23), (24), (25), (26): Xaa is A or G or is absent

SEQ ID NO: 67027 - protein, 40 aa, Artificial Sequence; identical to SEQ ID NO: 32491
  GFR-binding peptide
  MOD_RES (2), (3), (38), (40): Xaa is C or S
  MOD_RES (17), (18), (19), (20), (21): Xaa is A or G
  MOD_RES (22), (23), (24), (25): Xaa is A or G or is absent

SEQ ID NO: 67028 - protein, 42 aa, Artificial Sequence; identical to SEQ ID NO: 29392
  GFR-binding peptide
  MOD_RES (6), (7), (39), (41): Xaa is C or S

SEQ ID NO: 67029 - protein, 33 aa, Artificial Sequence; identical to SEQ ID NO: 32498
  GFR-binding peptide
  MOD_RES (1), (33): Xaa is C or S

SEQ ID NO: 67030 - protein, 39 aa, Artificial Sequence; identical to SEQ ID NO: 32502
  GFR-binding peptide
  MOD_RES (4), (5), (37), (39): Xaa is C or S

SEQ ID NO: 67031 - protein, 33 aa, Artificial Sequence; identical to SEQ ID NO: 32503
  GFR-binding peptide
  MOD_RES (14), (15), (16), (17), (18): Xaa is A or G
  MOD_RES (19), (20), (21), (22): Xaa is A or G or is absent

SEQ ID NO: 67032 - protein, 35 aa, Artificial Sequence; identical to SEQ ID NO: 29398
  GFR-binding peptide
  MOD_RES (1), (35): Xaa is C or S
  MOD_RES (15), (16), (17), (18), (19): Xaa is A or G
  MOD_RES (20), (21), (22), (23): Xaa is A or G or is absent

SEQ ID NO: 67033 - protein, 38 aa, Artificial Sequence; identical to SEQ ID NO: 15413
  GFR-binding peptide
  MOD_RES (4), (5): Xaa is C or S
  MOD_RES (19), (20), (21), (22), (23): Xaa is A or G
  MOD_RES (24), (25), (26), (27): Xaa is A or G or is absent

SEQ ID NO: 67034 - protein, 36 aa, Artificial Sequence; identical to SEQ ID NO: 29401
  GFR-binding peptide
  MOD_RES (2), (3), (34), (36): Xaa is C or S

SEQ ID NO: 67035 - protein, 37 aa, Artificial Sequence; identical to SEQ ID NO: 8117
  GFR-binding peptide
  MOD_RES (1), (35), (37): Xaa is C or S
  MOD_RES (15), (16), (17), (18), (19): Xaa is A or G
  MOD_RES (20), (21), (22), (23): Xaa is A or G or is absent

SEQ ID NO: 67036 - protein, 36 aa, Artificial Sequence; identical to SEQ ID NO: 29404
  GFR-binding peptide
  MOD_RES (34), (36): Xaa is C or S
  MOD_RES (14), (15), (16), (17), (18): Xaa is A or G
  MOD_RES (19), (20), (21), (22): Xaa is A or G or is absent

SEQ ID NO: 67037 - protein, 40 aa, Artificial Sequence; identical to SEQ ID NO: 8118
  GFR-binding peptide
  MOD_RES (3), (4), (37), (39): Xaa is C or S
  MOD_RES (18), (19), (20), (21), (22): Xaa is A or G
  MOD_RES (23), (24), (25), (26): Xaa is A or G or is absent

SEQ ID NO: 67038 - protein, 37 aa, Artificial Sequence
  GFR-binding peptide
  MOD_RES (3), (4), (37): Xaa is C or S
  MOD_RES (18), (19), (20), (21), (22): Xaa is A or G
  MOD_RES (23), (24), (25), (26): Xaa is A or G or is absent
STXXAPVKTEPISMLYLXXXXXXXXXKFKYEMIVEEX

SEQ ID NO: 67039 - protein, 38 aa, Artificial Sequence
  GFR-binding peptide
  MOD_RES (5), (6), (38): Xaa is C or S
IPEPXXVPEKMNAISILYFDENKNVVLKKYRNMTVESX

SEQ ID NO: 67040 - protein, 36 aa, Artificial Sequence; identical to SEQ ID NO: 8120
  GFR-binding peptide
  MOD_RES (1), (35): Xaa is C or S
  MOD_RES (15), (16), (17), (18), (19): Xaa is A or G
  MOD_RES (20), (21), (22), (23): Xaa is A or G or is absent

SEQ ID NO: 67041 - protein, 40 aa, Artificial Sequence; identical to SEQ ID NO: 32516
  GFR-binding peptide
  MOD_RES (4), (5), (37), (39): Xaa is C or S

SEQ ID NO: 67042 - protein, 36 aa, Artificial Sequence; identical to SEQ ID NO: 8121
  GFR-binding peptide
  MOD_RES (33), (35): Xaa is C or S
  MOD_RES (14), (15), (16), (17), (18): Xaa is A or G
  MOD_RES (19), (20), (21), (22): Xaa is A or G or is absent

SEQ ID NO: 67043 - protein, 32 aa, Artificial Sequence
  GFR-binding peptide
  MOD_RES (1), (2): Xaa is C or S
XXTPTKMSPISMLYKNDKQQIILKYHYGMVVD

SEQ ID NO: 67044 - protein, 36 aa, Artificial Sequence; identical to SEQ ID NO: 15425
  GFR-binding peptide
  MOD_RES (2), (3): Xaa is C or S
  MOD_RES (17), (18), (19), (20), (21): Xaa is A or G
  MOD_RES (22), (23), (24), (25): Xaa is A or G or is absent

SEQ ID NO: 67045 - protein, 40 aa, Artificial Sequence; identical to SEQ ID NO: 29410
  GFR-binding peptide
  MOD_RES (4), (5), (38), (40): Xaa is C or S

SEQ ID NO: 67046 - protein, 33 aa, Artificial Sequence; identical to SEQ ID NO: 8128
  GFR-binding peptide
  MOD_RES (1), (2): Xaa is C or S

SEQ ID NO: 67047 - protein, 35 aa, Artificial Sequence; identical to SEQ ID NO: 8130
  GFR-binding peptide
  MOD_RES (2), (3), (34): Xaa is C or S

SEQ ID NO: 67048 - protein, 40 aa, Artificial Sequence
  GFR-binding peptide
  MOD_RES (5), (6), (39): Xaa is C or S
  MOD_RES (20), (21), (22), (23), (24): Xaa is A or G
  MOD_RES (25), (26), (27), (28): Xaa is A or G or is absent
VPSTXXAPVKTEPISMLYLXXXXXXXXXKFKYEMIVEEXG

SEQ ID NO: 67049 - protein, 40 aa, Artificial Sequence; identical to SEQ ID NO: 8131
  GFR-binding peptide
  MOD_RES (6), (7): Xaa is C or S
  MOD_RES (21), (22), (23), (24), (25): Xaa is A or G
  MOD_RES (26), (27), (28), (29): Xaa is A or G or is absent

SEQ ID NO: 67050 - protein, 38 aa, Artificial Sequence; identical to SEQ ID NO: 32521
  GFR-binding peptide
  MOD_RES (6), (7): Xaa is C or S

SEQ ID NO: 67051 - protein, 33 aa, Artificial Sequence; identical to SEQ ID NO: 8134
  GFR-binding peptide
  MOD_RES (1), (33): Xaa is C or S

SEQ ID NO: 67052 - protein, 34 aa, Artificial Sequence; identical to SEQ ID NO: 8137
  GFR-binding peptide
  MOD_RES (32), (34): Xaa is C or S

SEQ ID NO: 67053 - protein, 34 aa, Artificial Sequence
  GFR-binding peptide
  MOD_RES (1), (2): Xaa is C or S
  MOD_RES (16), (17), (18), (19), (20): Xaa is A or G
  MOD_RES (21), (22), (23), (24): Xaa is A or G or is absent
XXAPVKTSATSMLYYXXXXXXXXXLRKHRMIVEE

SEQ ID NO: 67054 - protein, 35 aa, Artificial Sequence; identical to SEQ ID NO: 8138
  GFR-binding peptide
  MOD_RES (35), (35): Xaa is C or S
  MOD_RES (14), (15), (16), (17), (18): Xaa is A or G
  MOD_RES (19), (20), (21), (22): Xaa is A or G or is absent

SEQ ID NO: 67055 - protein, 40 aa, Artificial Sequence; identical to SEQ ID NO: 32532
  GFR-binding peptide
  MOD_RES (5), (6), (38), (40): Xaa is C or S

SEQ ID NO: 67056 - protein, 34 aa, Artificial Sequence; identical to SEQ ID NO: 8139
  GFR-binding peptide
  MOD_RES (3), (4): Xaa is C or S

SEQ ID NO: 67057 - protein, 34 aa, Artificial Sequence; identical to SEQ ID NO: 8142
  GFR-binding peptide
  MOD_RES (1), (33): Xaa is C or S

SEQ ID NO: 67058 - protein, 38 aa, Artificial Sequence; identical to SEQ ID NO: 29431
  GFR-binding peptide
  MOD_RES (5), (37): Xaa is C or S

SEQ ID NO: 67059 - protein, 40 aa, Artificial Sequence
  GFR-binding peptide
  MOD_RES (6), (7), (40): Xaa is C or S
  MOD_RES (21), (22), (23), (24), (25): Xaa is A or G
  MOD_RES (26), (27), (28), (29): Xaa is A or G or is absent
ASAAPXXVPQALSPINILYFXXXXXXXXXYGKIPMIVRSX

SEQ ID NO: 67060 - protein, 37 aa, Artificial Sequence
  GFR-binding peptide
  MOD_RES (1), (35), (37): Xaa is C or S
  MOD_RES (15), (16), (17), (18), (19): Xaa is A or G
  MOD_RES (20), (21), (22), (23): Xaa is A or G or is absent
XVPARLSATSILYYXXXXXXXXXLRKHRDMVVEAXGX

SEQ ID NO: 67061 - protein, 33 aa, Artificial Sequence; identical to SEQ ID NO: 8146
  GFR-binding peptide
  MOD_RES (1), (2), (33): Xaa is C or S

SEQ ID NO: 67062 - protein, 35 aa, Artificial Sequence; identical to SEQ ID NO: 32544
  GFR-binding peptide
  MOD_RES (32), (34): Xaa is C or S

SEQ ID NO: 67063 - protein, 35 aa, Artificial Sequence; identical to SEQ ID NO: 8148
  GFR-binding peptide
  MOD_RES (4), (5): Xaa is C or S

SEQ ID NO: 67064 - protein, 37 aa, Artificial Sequence
  GFR-binding peptide
  MOD_RES (4), (5): Xaa is C or S
  MOD_RES (19), (20), (21), (22), (23): Xaa is A or G
  MOD_RES (24), (25), (26), (27): Xaa is A or G or is absent
PSTXXAPVKTSATSMLYYXXXXXXXXXLRKHRMIVEE

SEQ ID NO: 67065 - protein, 33 aa, Artificial Sequence; identical to SEQ ID NO: 8150
  GFR-binding peptide
  MOD_RES (2), (3): Xaa is C or S

SEQ ID NO: 67066 - protein, 38 aa, Artificial Sequence
  GFR-binding peptide
  MOD_RES (3), (4), (36), (38): Xaa is C or S
EPXXVPEKMSPISILYKDENKNVVLKYHYNMTVESXAX

SEQ ID NO: 67067 - protein, 35 aa, Artificial Sequence
  GFR-binding peptide
  MOD_RES (1), (34): Xaa is C or S
  MOD_RES (15), (16), (17), (18), (19): Xaa is A or G
  MOD_RES (20), (21), (22), (23): Xaa is A or G or is absent
XAPVKTSPISMLYKXXXXXXXXXLKYHYMIVEEXG

SEQ ID NO: 67068 - protein, 34 aa, Artificial Sequence; identical to SEQ ID NO: 8156
  GFR-binding peptide
  MOD_RES (1), (34): Xaa is C or S
  MOD_RES (15), (16), (17), (18), (19): Xaa is A or G
  MOD_RES (20), (21), (22), (23): Xaa is A or G or is absent

SEQ ID NO: 67069 - protein, 38 aa, Artificial Sequence; identical to SEQ ID NO: 29448
  GFR-binding peptide
  MOD_RES (1), (35), (37): Xaa is C or S
  MOD_RES (15), (16), (17), (18), (19): Xaa is A or G
  MOD_RES (20), (21), (22), (23): Xaa is A or G or is absent

SEQ ID NO: 67070 - protein, 36 aa, Artificial Sequence; identical to SEQ ID NO: 8158
  GFR-binding peptide
  MOD_RES (33), (35): Xaa is C or S

SEQ ID NO: 67071 - protein, 38 aa, Artificial Sequence; identical to SEQ ID NO: 8161
  GFR-binding peptide
  MOD_RES (5), (6), (37): Xaa is C or S

SEQ ID NO: 67072 - protein, 39 aa, Artificial Sequence
  GFR-binding peptide
  MOD_RES (5), (6): Xaa is C or S
  MOD_RES (20), (21), (22), (23), (24): Xaa is A or G
  MOD_RES (25), (26), (27), (28): Xaa is A or G or is absent
APASXXVPARLSATSILYYXXXXXXXXXLRKHRDMVVEA

SEQ ID NO: 67073 - protein, 44 aa, Artificial Sequence; identical to SEQ ID NO: 29458
  GFR-binding peptide
  MOD_RES (6), (7), (41), (43): Xaa is C or S
  MOD_RES (21), (22), (23), (24), (25): Xaa is A or G
  MOD_RES (26), (27), (28), (29): Xaa is A or G or is absent

SEQ ID NO: 67074 - protein, 34 aa, Artificial Sequence; identical to SEQ ID NO: 8166
  GFR-binding peptide
  MOD_RES (1), (2), (34): Xaa is C or S

SEQ ID NO: 67075 - protein, 35 aa, Artificial Sequence; identical to SEQ ID NO: 8167
  GFR-binding peptide
  MOD_RES (1), (2), (34): Xaa is C or S

SEQ ID NO: 67076 - protein, 36 aa, Artificial Sequence; identical to SEQ ID NO: 29466
  GFR-binding peptide
  MOD_RES (2), (3): Xaa is C or S
  MOD_RES (17), (18), (19), (20), (21): Xaa is A or G
  MOD_RES (22), (23), (24), (25): Xaa is A or G or is absent

SEQ ID NO: 67077 - protein, 39 aa, Artificial Sequence; identical to SEQ ID NO: 32564
  GFR-binding peptide
  MOD_RES (6), (7), (39): Xaa is C or S

SEQ ID NO: 67078 - protein, 40 aa, Artificial Sequence
  GFR-binding peptide
  MOD_RES (5), (6), (40): Xaa is C or S
  MOD_RES (20), (21), (22), (23), (24): Xaa is A or G
  MOD_RES (25), (26), (27), (28): Xaa is A or G or is absent
TPPTXXVPTRLSATSILYYXXXXXXXXXLRKHRDMVVESX

SEQ ID NO: 67079 - protein, 42 aa, Artificial Sequence; identical to SEQ ID NO: 29473
  GFR-binding peptide
  MOD_RES (6), (7), (41): Xaa is C or S
  MOD_RES (21), (22), (23), (24), (25): Xaa is A or G
  MOD_RES (26), (27), (28), (29): Xaa is A or G or is absent

SEQ ID NO: 67080 - protein, 32 aa, Artificial Sequence
  GFR-binding peptide
  MOD_RES (1), (2): Xaa is C or S
XXVPTRLEPISILYLDSANNVVKFKYEDMVVE

SEQ ID NO: 67081 - protein, 41 aa, Artificial Sequence; identical to SEQ ID NO: 32567
  GFR-binding peptide
  MOD_RES (5), (6), (38), (40): Xaa is C or S

SEQ ID NO: 67082 - protein, 41 aa, Artificial Sequence; identical to SEQ ID NO: 29474
  GFR-binding peptide
  MOD_RES (3), (4), (38), (40): Xaa is C or S
  MOD_RES (18), (19), (20), (21), (22): Xaa is A or G
  MOD_RES (23), (24), (25), (26): Xaa is A or G or is absent

SEQ ID NO: 67083 - protein, 39 aa, Artificial Sequence
  GFR-binding peptide
  MOD_RES (1), (2), (36), (38): Xaa is C or S
  MOD_RES (16), (17), (18), (19), (20): Xaa is A or G
  MOD_RES (21), (22), (23), (24): Xaa is A or G or is absent
XXVPTRLSATSILYYXXXXXXXXXLRKHRDMVVESXGXR

SEQ ID NO: 67084 - protein, 41 aa, Artificial Sequence
  GFR-binding peptide
  MOD_RES (5), (6), (40): Xaa is C or S
  MOD_RES (20), (21), (22), (23), (24): Xaa is A or G
  MOD_RES (25), (26), (27), (28): Xaa is A or G or is absent
APASXXVPARLSATSILYYXXXXXXXXXLRKHRDMVVEAXG

SEQ ID NO: 67085 - protein, 42 aa, Artificial Sequence; identical to SEQ ID NO: 32569
  GFR-binding peptide
  MOD_RES (6), (7), (41): Xaa is C or S
  MOD_RES (21), (22), (23), (24), (25): Xaa is A or G
  MOD_RES (26), (27), (28), (29): Xaa is A or G or is absent

SEQ ID NO: 67086 - protein, 44 aa, Artificial Sequence; identical to SEQ ID NO: 29475
  GFR-binding peptide
  MOD_RES (6), (7), (41), (43): Xaa is C or S
  MOD_RES (21), (22), (23), (24), (25): Xaa is A or G
  MOD_RES (26), (27), (28), (29): Xaa is A or G or is absent

SEQ ID NO: 67087 - protein, 40 aa, Artificial Sequence
  GFR-binding peptide
  MOD_RES (6), (7): Xaa is C or S
  MOD_RES (21), (22), (23), (24), (25): Xaa is A or G
  MOD_RES (26), (27), (28), (29): Xaa is A or G or is absent
GIPEPXXVPEKMSPISILYKXXXXXXXXXLKYHYNMTVES

SEQ ID NO: 67088 - protein, 39 aa, Artificial Sequence; identical to SEQ ID NO: 8177
  GFR-binding peptide
  MOD_RES (7), (7): Xaa is C or S
  MOD_RES (21), (22), (23), (24), (25): Xaa is A or G
  MOD_RES (26), (27), (28), (29): Xaa is A or G or is absent

SEQ ID NO: 67089 - protein, 35 aa, Artificial Sequence
  GFR-binding peptide
  MOD_RES (34), (34): Xaa is C or S
  MOD_RES (14), (15), (16), (17), (18): Xaa is A or G
  MOD_RES (19), (20), (21), (22): Xaa is A or G or is absent
VPARLSATSILYYXXXXXXXXXLRKHRDMVVEAXG

SEQ ID NO: 67090 - protein, 36 aa, Artificial Sequence
  GFR-binding peptide
  MOD_RES (1), (2), (36): Xaa is C or S
  MOD_RES (16), (17), (18), (19), (20): Xaa is A or G
  MOD_RES (21), (22), (23), (24): Xaa is A or G or is absent
XXVPTRLSPISILYKXXXXXXXXXLKYHYDMVVESX

SEQ ID NO: 67091 - protein, 36 aa, Artificial Sequence; identical to SEQ ID NO: 8179
  GFR-binding peptide
  MOD_RES (5), (6): Xaa is C or S

SEQ ID NO: 67092 - protein, 38 aa, Artificial Sequence; identical to SEQ ID NO: 57482
  GFR-binding peptide
  MOD_RES (3), (4), (36), (38): Xaa is C or S

SEQ ID NO: 67093 - protein, 34 aa, Artificial Sequence
  GFR-binding peptide
  MOD_RES (34), (34): Xaa is C or S
  MOD_RES (14), (15), (16), (17), (18): Xaa is A or G
  MOD_RES (19), (20), (21), (22): Xaa is A or G or is absent
TPTKMSATSMLYYXXXXXXXXXLRKHRGMVVDRX

SEQ ID NO: 67094 - protein, 41 aa, Artificial Sequence; identical to SEQ ID NO: 8181
  GFR-binding peptide
  MOD_RES (3), (4), (39), (41): Xaa is C or S
  MOD_RES (18), (19), (20), (21), (22): Xaa is A or G
  MOD_RES (23), (24), (25), (26): Xaa is A or G or is absent

SEQ ID NO: 67095 - protein, 35 aa, Artificial Sequence; identical to SEQ ID NO: 8183
  GFR-binding peptide
  MOD_RES (2), (3): Xaa is C or S
  MOD_RES (17), (18), (19), (20), (21): Xaa is A or G
  MOD_RES (22), (23), (24), (25): Xaa is A or G or is absent

SEQ ID NO: 67096 - protein, 41 aa, Artificial Sequence; identical to SEQ ID NO: 29482
  GFR-binding peptide
  MOD_RES (3), (4), (38), (40): Xaa is C or S
  MOD_RES (18), (19), (20), (21), (22): Xaa is A or G
  MOD_RES (23), (24), (25), (26): Xaa is A or G or is absent

SEQ ID NO: 67097 - protein, 37 aa, Artificial Sequence
  GFR-binding peptide
  MOD_RES (6), (7): Xaa is C or S
STPPTXXVPTRLSATSILYYDSANNVVLRKHRDMVVE

SEQ ID NO: 67098 - protein, 36 aa, Artificial Sequence
  GFR-binding peptide
  MOD_RES (1), (2), (36): Xaa is C or S
  MOD_RES (16), (17), (18), (19), (20): Xaa is A or G
  MOD_RES (21), (22), (23), (24): Xaa is A or G or is absent
XXVPEKMNAISILYFXXXXXXXXXLKKYRNMTVESX

SEQ ID NO: 67099 - protein, 36 aa, Artificial Sequence; identical to SEQ ID NO: 32583
  GFR-binding peptide
  MOD_RES (4), (36): Xaa is C or S

SEQ ID NO: 67100 - protein, 39 aa, Artificial Sequence; identical to SEQ ID NO: 29485
  GFR-binding peptide
  MOD_RES (4), (5), (39): Xaa is C or S
  MOD_RES (19), (20), (21), (22), (23): Xaa is A or G
  MOD_RES (24), (25), (26), (27): Xaa is A or G or is absent

SEQ ID NO: 67101 - protein, 32 aa, Artificial Sequence; identical to SEQ ID NO: 32587
  GFR-binding peptide
  MOD_RES (14), (15), (16), (17), (18): Xaa is A or G
  MOD_RES (19), (20), (21), (22): Xaa is A or G or is absent

SEQ ID NO: 67102 - protein, 39 aa, Artificial Sequence
  GFR-binding peptide
  MOD_RES (6), (7): Xaa is C or S
  MOD_RES (21), (22), (23), (24), (25): Xaa is A or G
  MOD_RES (26), (27), (28), (29): Xaa is A or G or is absent
HVPKPXXAPTKLSATSVLYYXXXXXXXXXLRKHRNMVVR

SEQ ID NO: 67103 - protein, 43 aa, Artificial Sequence; identical to SEQ ID NO: 8186
  GFR-binding peptide
  MOD_RES (6), (7), (40), (42): Xaa is C or S
  MOD_RES (21), (22), (23), (24), (25): Xaa is A or G
  MOD_RES (26), (27), (28), (29): Xaa is A or G or is absent

SEQ ID NO: 67104 - protein, 39 aa, Artificial Sequence; identical to SEQ ID NO: 29490
  GFR-binding peptide
  MOD_RES (3), (4), (37), (39): Xaa is C or S
  MOD_RES (18), (19), (20), (21), (22): Xaa is A or G
  MOD_RES (23), (24), (25), (26): Xaa is A or G or is absent

SEQ ID NO: 67105 - protein, 36 aa, Artificial Sequence; identical to SEQ ID NO: 8191
  GFR-binding peptide
  MOD_RES (33), (35): Xaa is C or S
  MOD_RES (14), (15), (16), (17), (18): Xaa is A or G
  MOD_RES (19), (20), (21), (22): Xaa is A or G or is absent

SEQ ID NO: 67106 - protein, 36 aa, Artificial Sequence; identical to SEQ ID NO: 8192
  GFR-binding peptide
  MOD_RES (2), (3), (36): Xaa is C or S
  MOD_RES (17), (18), (19), (20), (21): Xaa is A or G
  MOD_RES (22), (23), (24), (25): Xaa is A or G or is absent

SEQ ID NO: 67107 - protein, 34 aa, Artificial Sequence; identical to SEQ ID NO: 57499
  GFR-binding peptide
  MOD_RES (1), (2), (34): Xaa is C or S

SEQ ID NO: 67108 - protein, 41 aa, Artificial Sequence
  GFR-binding peptide
  MOD_RES (5), (6), (38), (40): Xaa is C or S
TPPTXXVPTRLSPISILYKDSANNVVLKYHYDMVVESXGXR

SEQ ID NO: 67109 - protein, 42 aa, Artificial Sequence; identical to SEQ ID NO: 32597
  GFR-binding peptide
  MOD_RES (6), (7), (39), (41): Xaa is C or S

SEQ ID NO: 67110 - protein, 41 aa, Artificial Sequence
  GFR-binding peptide
  MOD_RES (4), (5), (39), (41): Xaa is C or S
  MOD_RES (19), (20), (21), (22), (23): Xaa is A or G
  MOD_RES (24), (25), (26), (27): Xaa is A or G or is absent
PEPXXVPEKMSPISILYKXXXXXXXXXLKYHYNMTVESXAX

SEQ ID NO: 67111 - protein, 36 aa, Artificial Sequence
  GFR-binding peptide
  MOD_RES (1), (2), (34), (36): Xaa is C or S
XXVPARLSATSILYYDAANNVVLRKHRDMVVEAXGX

SEQ ID NO: 67112 - protein, 33 aa, Artificial Sequence; identical to SEQ ID NO: 8202
  GFR-binding peptide
  MOD_RES (32), (32): Xaa is C or S

SEQ ID NO: 67113 - protein, 39 aa, Artificial Sequence; identical to SEQ ID NO: 29512
  GFR-binding peptide
  MOD_RES (6), (7), (39): Xaa is C or S

SEQ ID NO: 67114 - protein, 39 aa, Artificial Sequence; identical to SEQ ID NO: 32608
  GFR-binding peptide
  MOD_RES (3), (4), (38): Xaa is C or S
  MOD_RES (18), (19), (20), (21), (22): Xaa is A or G
  MOD_RES (23), (24), (25), (26): Xaa is A or G or is absent

SEQ ID NO: 67115 - protein, 33 aa, Artificial Sequence
  GFR-binding peptide
  MOD_RES (32), (32): Xaa is C or S
TPTKMSPISMLYKNDKQQIILKYHYGMVVDRXG

SEQ ID NO: 67116 - protein, 34 aa, Artificial Sequence
  GFR-binding peptide
  MOD_RES (1), (2), (34): Xaa is C or S
XXVPARLSATSILYYDAANNVVLRKHRDMVVEAX

SEQ ID NO: 67117 - protein, 35 aa, Artificial Sequence; identical to SEQ ID NO: 8209
  GFR-binding peptide
  MOD_RES (4), (5): Xaa is C or S

SEQ ID NO: 67118 - protein, 34 aa, Artificial Sequence; identical to SEQ ID NO: 29523
  GFR-binding peptide
  MOD_RES (1), (2): Xaa is C or S
  MOD_RES (16), (17), (18), (19), (20): Xaa is A or G
  MOD_RES (21), (22), (23), (24): Xaa is A or G or is absent

SEQ ID NO: 67119 - protein, 36 aa, Artificial Sequence
  GFR-binding peptide
  MOD_RES (4), (5): Xaa is C or S
AGPXXTPTKMSPISMLYKNDKQQIILKYHYGMVVDR

SEQ ID NO: 67120 - protein, 38 aa, Artificial Sequence; identical to SEQ ID NO: 8210
  GFR-binding peptide
  MOD_RES (1), (2), (36), (38): Xaa is C or S
  MOD_RES (16), (17), (18), (19), (20): Xaa is A or G
  MOD_RES (21), (22), (23), (24): Xaa is A or G or is absent

SEQ ID NO: 67121 - protein, 39 aa, Artificial Sequence; identical to SEQ ID NO: 8212
  GFR-binding peptide
  MOD_RES (5), (6), (39): Xaa is C or S
  MOD_RES (20), (21), (22), (23), (24): Xaa is A or G
  MOD_RES (25), (26), (27), (28): Xaa is A or G or is absent

SEQ ID NO: 67122 - protein, 36 aa, Artificial Sequence; identical to SEQ ID NO: 15518
  GFR-binding peptide
  MOD_RES (1), (33), (35): Xaa is C or S

SEQ ID NO: 67123 - protein, 37 aa, Artificial Sequence; identical to SEQ ID NO: 8214
  GFR-binding peptide
  MOD_RES (4), (5), (36): Xaa is C or S

SEQ ID NO: 67124 - protein, 38 aa, Artificial Sequence; identical to SEQ ID NO: 32625
  GFR-binding peptide
  MOD_RES (2), (3), (37): Xaa is C or S
  MOD_RES (17), (18), (19), (20), (21): Xaa is A or G
  MOD_RES (22), (23), (24), (25): Xaa is A or G or is absent

SEQ ID NO: 67125 - protein, 37 aa, Artificial Sequence; identical to SEQ ID NO: 32628
  GFR-binding peptide
  MOD_RES (2), (3), (37): Xaa is C or S
  MOD_RES (17), (18), (19), (20), (21): Xaa is A or G
  MOD_RES (22), (23), (24), (25): Xaa is A or G or is absent

SEQ ID NO: 67126 - protein, 40 aa, Artificial Sequence; identical to SEQ ID NO: 29535
  GFR-binding peptide
  MOD_RES (4), (5), (39): Xaa is C or S
  MOD_RES (19), (20), (21), (22), (23): Xaa is A or G
  MOD_RES (24), (25), (26), (27): Xaa is A or G or is absent

SEQ ID NO: 67127 - protein, 41 aa, Artificial Sequence
  GFR-binding peptide
  MOD_RES (5), (6), (39), (41): Xaa is C or S
  MOD_RES (20), (21), (22), (23), (24): Xaa is A or G
  MOD_RES (25), (26), (27), (28): Xaa is A or G or is absent
VPSTXXAPVKTSPISMLYKXXXXXXXXXLKYHYMIVEEXGX

SEQ ID NO: 67128 - protein, 35 aa, Artificial Sequence; identical to SEQ ID NO: 8219
  GFR-binding peptide
  MOD_RES (2), (3), (35): Xaa is C or S

SEQ ID NO: 67129 - protein, 37 aa, Artificial Sequence
  GFR-binding peptide
  MOD_RES (2), (3), (35), (37): Xaa is C or S
PXXVPEKMEPISILYLDENKNVVKFKYENMTVESXAX

SEQ ID NO: 67130 - protein, 38 aa, Artificial Sequence; identical to SEQ ID NO: 29539
  GFR-binding peptide
  MOD_RES (2), (3), (37): Xaa is C or S
  MOD_RES (17), (18), (19), (20), (21): Xaa is A or G
  MOD_RES (22), (23), (24), (25): Xaa is A or G or is absent

SEQ ID NO: 67131 - protein, 38 aa, Artificial Sequence; identical to SEQ ID NO: 32636
  GFR-binding peptide
  MOD_RES (2), (3), (35), (37): Xaa is C or S

SEQ ID NO: 67132 - protein, 41 aa, Artificial Sequence; identical to SEQ ID NO: 8221
  GFR-binding peptide
  MOD_RES (6), (7), (39), (41): Xaa is C or S

SEQ ID NO: 67133 - protein, 34 aa, Artificial Sequence
  GFR-binding peptide
  MOD_RES (33), (33): Xaa is C or S
  MOD_RES (14), (15), (16), (17), (18): Xaa is A or G
  MOD_RES (19), (20), (21), (22): Xaa is A or G or is absent
APVKTSPISMLYKXXXXXXXXXLKYHYMIVEEXG

SEQ ID NO: 67134 - protein, 40 aa, Artificial Sequence; identical to SEQ ID NO: 29541
  GFR-binding peptide
  MOD_RES (5), (6), (39): Xaa is C or S
  MOD_RES (20), (21), (22), (23), (24): Xaa is A or G
  MOD_RES (25), (26), (27), (28): Xaa is A or G or is absent

SEQ ID NO: 67135 - protein, 42 aa, Artificial Sequence; identical to SEQ ID NO: 8224
  GFR-binding peptide
  MOD_RES (6), (7), (40), (42): Xaa is C or S
  MOD_RES (21), (22), (23), (24), (25): Xaa is A or G
  MOD_RES (26), (27), (28), (29): Xaa is A or G or is absent

SEQ ID NO: 67136 - protein, 40 aa, Artificial Sequence; identical to SEQ ID NO: 8225
  GFR-binding peptide
  MOD_RES (4), (5), (39): Xaa is C or S
  MOD_RES (19), (20), (21), (22), (23): Xaa is A or G
  MOD_RES (24), (25), (26), (27): Xaa is A or G or is absent

SEQ ID NO: 67137 - protein, 34 aa, Artificial Sequence; identical to SEQ ID NO: 32641
  GFR-binding peptide
  MOD_RES (1), (1): Xaa is C or S
  MOD_RES (15), (16), (17), (18), (19): Xaa is A or G
  MOD_RES (20), (21), (22), (23): Xaa is A or G or is absent

SEQ ID NO: 67138 - protein, 37 aa, Artificial Sequence; identical to SEQ ID NO: 32642
  GFR-binding peptide
  MOD_RES (5), (6): Xaa is C or S

SEQ ID NO: 67139 - protein, 39 aa, Artificial Sequence; identical to SEQ ID NO: 32643
  GFR-binding peptide
  MOD_RES (1), (2), (37), (39): Xaa is C or S
  MOD_RES (16), (17), (18), (19), (20): Xaa is A or G
  MOD_RES (21), (22), (23), (24): Xaa is A or G or is absent

SEQ ID NO: 67140 - protein, 35 aa, Artificial Sequence; identical to SEQ ID NO: 32644
  GFR-binding peptide
  MOD_RES (1), (34): Xaa is C or S

SEQ ID NO: 67141 - protein, 43 aa, Artificial Sequence; identical to SEQ ID NO: 32646
  GFR-binding peptide
  MOD_RES (6), (7), (40), (42): Xaa is C or S

SEQ ID NO: 67142 - protein, 39 aa, Artificial Sequence; identical to SEQ ID NO: 8228
  GFR-binding peptide
  MOD_RES (5), (6): Xaa is C or S
  MOD_RES (20), (21), (22), (23), (24): Xaa is A or G
  MOD_RES (25), (26), (27), (28): Xaa is A or G or is absent

SEQ ID NO: 67143 - protein, 38 aa, Artificial Sequence; identical to SEQ ID NO: 29550
  GFR-binding peptide
  MOD_RES (6), (7), (38): Xaa is C or S

SEQ ID NO: 67144 - protein, 36 aa, Artificial Sequence; identical to SEQ ID NO: 57556
  GFR-binding peptide
  MOD_RES (4), (5), (36): Xaa is C or S

SEQ ID NO: 67145 - protein, 39 aa, Artificial Sequence
  GFR-binding peptide
  MOD_RES (2), (3), (37), (39): Xaa is C or S
  MOD_RES (17), (18), (19), (20), (21): Xaa is A or G
  MOD_RES (22), (23), (24), (25): Xaa is A or G or is absent
PXXVPEKMEPISILYLXXXXXXXXXKFKYENMTVESXAX

SEQ ID NO: 67146 - protein, 39 aa, Artificial Sequence; identical to SEQ ID NO: 8231
  GFR-binding peptide
  MOD_RES (6), (7), (39): Xaa is C or S

SEQ ID NO: 67147 - protein, 37 aa, Artificial Sequence; identical to SEQ ID NO: 15547
  GFR-binding peptide
  MOD_RES (1), (2), (34), (36): Xaa is C or S

SEQ ID NO: 67148 - protein, 37 aa, Artificial Sequence
  GFR-binding peptide
  MOD_RES (2), (3), (34), (36): Xaa is C or S
TXXAPVKTSPISMLYKDNGRVLLLKYHYMIVEEXGXL

SEQ ID NO: 67149 - protein, 40 aa, Artificial Sequence; identical to SEQ ID NO: 32656
  GFR-binding peptide
  MOD_RES (4), (5), (37), (39): Xaa is C or S

SEQ ID NO: 67150 - protein, 37 aa, Artificial Sequence; identical to SEQ ID NO: 8238
  GFR-binding peptide
  MOD_RES (2), (3), (36): Xaa is C or S
  MOD_RES (17), (18), (19), (20), (21): Xaa is A or G
  MOD_RES (22), (23), (24), (25): Xaa is A or G or is absent

SEQ ID NO: 67151 - protein, 41 aa, Artificial Sequence; identical to SEQ ID NO: 29559
  GFR-binding peptide
  MOD_RES (4), (5), (39), (41): Xaa is C or S
  MOD_RES (19), (20), (21), (22), (23): Xaa is A or G
  MOD_RES (24), (25), (26), (27): Xaa is A or G or is absent

SEQ ID NO: 67152 - protein, 40 aa, Artificial Sequence
  GFR-binding peptide
  MOD_RES (2), (3), (37), (39): Xaa is C or S
  MOD_RES (17), (18), (19), (20), (21): Xaa is A or G
  MOD_RES (22), (23), (24), (25): Xaa is A or G or is absent
TXXVPTRLSATSILYYXXXXXXXXXLRKHRDMVVESXGXR

SEQ ID NO: 67153 - protein, 39 aa, Artificial Sequence; identical to SEQ ID NO: 8241
  GFR-binding peptide
  MOD_RES (3), (4), (38): Xaa is C or S
  MOD_RES (18), (19), (20), (21), (22): Xaa is A or G
  MOD_RES (23), (24), (25), (26): Xaa is A or G or is absent

SEQ ID NO: 67154 - protein, 32 aa, Artificial Sequence; identical to SEQ ID NO: 57572
  GFR-binding peptide
  MOD_RES (32), (32): Xaa is C or S

SEQ ID NO: 67155 - protein, 33 aa, Artificial Sequence; identical to SEQ ID NO: 8246
  GFR-binding peptide
  MOD_RES (2), (3): Xaa is C or S

SEQ ID NO: 67156 - protein, 37 aa, Artificial Sequence; identical to SEQ ID NO: 8247
  GFR-binding peptide
  MOD_RES (3), (4): Xaa is C or S
  MOD_RES (18), (19), (20), (21), (22): Xaa is A or G
  MOD_RES (23), (24), (25), (26): Xaa is A or G or is absent

SEQ ID NO: 67157 - protein, 35 aa, Artificial Sequence; identical to SEQ ID NO: 8249
  GFR-binding peptide
  MOD_RES (2), (3): Xaa is C or S
  MOD_RES (17), (18), (19), (20), (21): Xaa is A or G
  MOD_RES (22), (23), (24), (25): Xaa is A or G or is absent

SEQ ID NO: 67158 - protein, 36 aa, Artificial Sequence; identical to SEQ ID NO: 8250
  GFR-binding peptide
  MOD_RES (34), (36): Xaa is C or S
  MOD_RES (14), (15), (16), (17), (18): Xaa is A or G
  MOD_RES (19), (20), (21), (22): Xaa is A or G or is absent

SEQ ID NO: 67159 - protein, 41 aa, Artificial Sequence
  GFR-binding peptide
  MOD_RES (5), (6), (38), (40): Xaa is C or S
IPEPXXVPEKMSPINILYFDENKNVVYGKIPNMTVESXAXR

SEQ ID NO: 67160 - protein, 36 aa, Artificial Sequence; identical to SEQ ID NO: 29575
  GFR-binding peptide
  MOD_RES (4), (36): Xaa is C or S

SEQ ID NO: 67161 - protein, 38 aa, Artificial Sequence; identical to SEQ ID NO: 29579
  GFR-binding peptide
  MOD_RES (5), (6), (38): Xaa is C or S

SEQ ID NO: 67162 - protein, 41 aa, Artificial Sequence; identical to SEQ ID NO: 8257
  GFR-binding peptide
  MOD_RES (2), (3), (38), (40): Xaa is C or S
  MOD_RES (17), (18), (19), (20), (21): Xaa is A or G
  MOD_RES (22), (23), (24), (25): Xaa is A or G or is absent

SEQ ID NO: 67163 - protein, 43 aa, Artificial Sequence; identical to SEQ ID NO: 32686
  GFR-binding peptide
  MOD_RES (7), (41), (43): Xaa is C or S
  MOD_RES (21), (22), (23), (24), (25): Xaa is A or G
  MOD_RES (26), (27), (28), (29): Xaa is A or G or is absent

SEQ ID NO: 67164 - protein, 39 aa, Artificial Sequence; identical to SEQ ID NO: 8258
  GFR-binding peptide
  MOD_RES (4), (5), (39): Xaa is C or S
  MOD_RES (19), (20), (21), (22), (23): Xaa is A or G
  MOD_RES (24), (25), (26), (27): Xaa is A or G or is absent

SEQ ID NO: 67165 - protein, 38 aa, Artificial Sequence; identical to SEQ ID NO: 8259
  GFR-binding peptide
  MOD_RES (3), (35), (37): Xaa is C or S

SEQ ID NO: 67166 - protein, 34 aa, Artificial Sequence; identical to SEQ ID NO: 8262
  GFR-binding peptide
  MOD_RES (1), (2), (33): Xaa is C or S

SEQ ID NO: 67167 - protein, 34 aa, Artificial Sequence; identical to SEQ ID NO: 8264
  GFR-binding peptide
  MOD_RES (1), (33): Xaa is C or S

SEQ ID NO: 67168 - protein, 37 aa, Artificial Sequence; identical to SEQ ID NO: 29588
  GFR-binding peptide
  MOD_RES (1), (2), (34), (36): Xaa is C or S

SEQ ID NO: 67169 - protein, 40 aa, Artificial Sequence; identical to SEQ ID NO: 8267
  GFR-binding peptide
  MOD_RES (6), (7), (38), (40): Xaa is C or S

SEQ ID NO: 67170 - protein, 34 aa, Artificial Sequence
  GFR-binding peptide
  MOD_RES (1), (33): Xaa is C or S
XVPARLSATSILYYDAANNVVLRKHRDMVVEAXG

SEQ ID NO: 67171 - protein, 38 aa, Artificial Sequence
  GFR-binding peptide
  MOD_RES (5), (6): Xaa is C or S
  MOD_RES (20), (21), (22), (23), (24): Xaa is A or G
  MOD_RES (25), (26), (27), (28): Xaa is A or G or is absent
SASPXXVSQDLSPINILYFXXXXXXXXXYGKIPMIVKS

SEQ ID NO: 67172 - protein, 41 aa, Artificial Sequence; identical to SEQ ID NO: 8269
  GFR-binding peptide
  MOD_RES (3), (4), (38), (40): Xaa is C or S
  MOD_RES (18), (19), (20), (21), (22): Xaa is A or G
  MOD_RES (23), (24), (25), (26): Xaa is A or G or is absent

SEQ ID NO: 67173 - protein, 33 aa, Artificial Sequence; identical to SEQ ID NO: 29593
  GFR-binding peptide
  MOD_RES (14), (15), (16), (17), (18): Xaa is A or G
  MOD_RES (19), (20), (21), (22): Xaa is A or G or is absent

SEQ ID NO: 67174 - protein, 40 aa, Artificial Sequence; identical to SEQ ID NO: 8273
  GFR-binding peptide
  MOD_RES (5), (6), (40): Xaa is C or S
  MOD_RES (20), (21), (22), (23), (24): Xaa is A or G
  MOD_RES (25), (26), (27), (28): Xaa is A or G or is absent

SEQ ID NO: 67175 - protein, 42 aa, Artificial Sequence
  GFR-binding peptide
  MOD_RES (4), (5), (39), (41): Xaa is C or S
  MOD_RES (19), (20), (21), (22), (23): Xaa is A or G
  MOD_RES (24), (25), (26), (27): Xaa is A or G or is absent
PEPXXVPEKMSATSILYYXXXXXXXXXLRKHRNMTVESXAXR

SEQ ID NO: 67176 - protein, 37 aa, Artificial Sequence; identical to SEQ ID NO: 8282
  GFR-binding peptide
  MOD_RES (2), (3), (37): Xaa is C or S
  MOD_RES (17), (18), (19), (20), (21): Xaa is A or G
  MOD_RES (22), (23), (24), (25): Xaa is A or G or is absent

SEQ ID NO: 67177 - protein, 38 aa, Artificial Sequence; identical to SEQ ID NO: 8286
  GFR-binding peptide
  MOD_RES (2), (3), (36), (38): Xaa is C or S
  MOD_RES (17), (18), (19), (20), (21): Xaa is A or G
  MOD_RES (22), (23), (24), (25): Xaa is A or G or is absent

SEQ ID NO: 67178 - protein, 39 aa, Artificial Sequence; identical to SEQ ID NO: 29607
  GFR-binding peptide
  MOD_RES (4), (5), (39): Xaa is C or S
  MOD_RES (19), (20), (21), (22), (23): Xaa is A or G
  MOD_RES (24), (25), (26), (27): Xaa is A or G or is absent

SEQ ID NO: 67179 - protein, 37 aa, Artificial Sequence; identical to SEQ ID NO: 32705
  GFR-binding peptide
  MOD_RES (1), (2), (34), (36): Xaa is C or S

SEQ ID NO: 67180 - protein, 37 aa, Artificial Sequence; identical to SEQ ID NO: 8287
  GFR-binding peptide
  MOD_RES (1), (35), (37): Xaa is C or S
  MOD_RES (15), (16), (17), (18), (19): Xaa is A or G
  MOD_RES (20), (21), (22), (23): Xaa is A or G or is absent

SEQ ID NO: 67181 - protein, 37 aa, Artificial Sequence
  GFR-binding peptide
  MOD_RES (1), (2), (36): Xaa is C or S
  MOD_RES (16), (17), (18), (19), (20): Xaa is A or G
  MOD_RES (21), (22), (23), (24): Xaa is A or G or is absent
XXVPEKMNAISILYFXXXXXXXXXLKKYRNMTVESXA

SEQ ID NO: 67182 - protein, 39 aa, Artificial Sequence; identical to SEQ ID NO: 8290
  GFR-binding peptide
  MOD_RES (4), (5), (37), (39): Xaa is C or S

SEQ ID NO: 67183 - protein, 41 aa, Artificial Sequence
  GFR-binding peptide
  MOD_RES (6), (7), (41): Xaa is C or S
  MOD_RES (21), (22), (23), (24), (25): Xaa is A or G
  MOD_RES (26), (27), (28), (29): Xaa is A or G or is absent
HVPKPXXAPTKLEPISVLYLXXXXXXXXXKFKYENMVVRSX

SEQ ID NO: 67184 - protein, 39 aa, Artificial Sequence
  GFR-binding peptide
  MOD_RES (4), (5), (39): Xaa is C or S
  MOD_RES (19), (20), (21), (22), (23): Xaa is A or G
  MOD_RES (24), (25), (26), (27): Xaa is A or G or is absent
PEPXXVPEKMSPINILYFXXXXXXXXXYGKIPNMTVESX

SEQ ID NO: 67185 - protein, 37 aa, Artificial Sequence; identical to SEQ ID NO: 8293
  GFR-binding peptide
  MOD_RES (3), (4): Xaa is C or S
  MOD_RES (18), (19), (20), (21), (22): Xaa is A or G
  MOD_RES (23), (24), (25), (26): Xaa is A or G or is absent

SEQ ID NO: 67186 - protein, 36 aa, Artificial Sequence; identical to SEQ ID NO: 29611
  GFR-binding peptide
  MOD_RES (3), (4): Xaa is C or S
  MOD_RES (18), (19), (20), (21), (22): Xaa is A or G
  MOD_RES (23), (24), (25), (26): Xaa is A or G or is absent

SEQ ID NO: 67187 - protein, 37 aa, Artificial Sequence; identical to SEQ ID NO: 32716
  GFR-binding peptide
  MOD_RES (1), (35), (37): Xaa is C or S
  MOD_RES (15), (16), (17), (18), (19): Xaa is A or G
  MOD_RES (20), (21), (22), (23): Xaa is A or G or is absent

SEQ ID NO: 67188 - protein, 36 aa, Artificial Sequence; identical to SEQ ID NO: 57614
  GFR-binding peptide
  MOD_RES (1), (2), (33), (35): Xaa is C or S

SEQ ID NO: 67189 - protein, 41 aa, Artificial Sequence; identical to SEQ ID NO: 8295
  GFR-binding peptide
  MOD_RES (6), (7), (39), (41): Xaa is C or S

SEQ ID NO: 67190 - protein, 40 aa, Artificial Sequence; identical to SEQ ID NO: 32718
  GFR-binding peptide
  MOD_RES (5), (6), (38), (40): Xaa is C or S

SEQ ID NO: 67191 - protein, 38 aa, Artificial Sequence; identical to SEQ ID NO: 8299
  GFR-binding peptide
  MOD_RES (6), (7): Xaa is C or S

SEQ ID NO: 67192 - protein, 37 aa, Artificial Sequence; identical to SEQ ID NO: 29617
  GFR-binding peptide
  MOD_RES (5), (6): Xaa is C or S

SEQ ID NO: 67193 - protein, 33 aa, Artificial Sequence
  GFR-binding peptide
  MOD_RES (33), (33): Xaa is C or S
  MOD_RES (14), (15), (16), (17), (18): Xaa is A or G
  MOD_RES (19), (20), (21), (22): Xaa is A or G or is absent
APVKTSPISMLYKXXXXXXXXXLKYHYMIVEEX

SEQ ID NO: 67194 - protein, 41 aa, Artificial Sequence
  GFR-binding peptide
  MOD_RES (6), (7), (39), (41): Xaa is C or S
GIPEPXXVPEKMSPISILYKDENKNVVLKYHYNMTVESXAX

SEQ ID NO: 67195 - protein, 37 aa, Artificial Sequence; identical to SEQ ID NO: 32723
  GFR-binding peptide
  MOD_RES (6), (7): Xaa is C or S

SEQ ID NO: 67196 - protein, 34 aa, Artificial Sequence; identical to SEQ ID NO: 29620
  GFR-binding peptide
  MOD_RES (1), (1): Xaa is C or S
  MOD_RES (15), (16), (17), (18), (19): Xaa is A or G
  MOD_RES (20), (21), (22), (23): Xaa is A or G or is absent

SEQ ID NO: 67197 - protein, 35 aa, Artificial Sequence; identical to SEQ ID NO: 8304
  GFR-binding peptide
  MOD_RES (34), (34): Xaa is C or S
  MOD_RES (14), (15), (16), (17), (18): Xaa is A or G
  MOD_RES (19), (20), (21), (22): Xaa is A or G or is absent

SEQ ID NO: 67198 - protein, 38 aa, Artificial Sequence; identical to SEQ ID NO: 57633
  GFR-binding peptide
  MOD_RES (5), (6), (38): Xaa is C or S

SEQ ID NO: 67199 - protein, 40 aa, Artificial Sequence
  GFR-binding peptide
  MOD_RES (3), (4), (38), (40): Xaa is C or S
  MOD_RES (18), (19), (20), (21), (22): Xaa is A or G
  MOD_RES (23), (24), (25), (26): Xaa is A or G or is absent
GPXXTPTKMEPISMLYLXXXXXXXXXKFKYEGMVVDRXGX

SEQ ID NO: 67200 - protein, 32 aa, Artificial Sequence; identical to SEQ ID NO: 29628
  GFR-binding peptide
  MOD_RES (32), (32): Xaa is C or S

SEQ ID NO: 67201 - protein, 40 aa, Artificial Sequence
  GFR-binding peptide
  MOD_RES (5), (6), (40): Xaa is C or S
  MOD_RES (20), (21), (22), (23), (24): Xaa is A or G
  MOD_RES (25), (26), (27), (28): Xaa is A or G or is absent
ASKAXXVPTKLSATSILYYXXXXXXXXXLRKHRGMAVSEX

SEQ ID NO: 67202 - protein, 37 aa, Artificial Sequence
  GFR-binding peptide
  MOD_RES (6), (7): Xaa is C or S
ASASPXXVSQDLSPINILYFIGKTPKIYGKIPMIVKS

SEQ ID NO: 67203 - protein, 33 aa, Artificial Sequence
  GFR-binding peptide
  MOD_RES (1), (32): Xaa is C or S
XVSQDLSPINILYFIGKTPKIYGKIPMIVKSXK

SEQ ID NO: 67204 - protein, 40 aa, Artificial Sequence; identical to SEQ ID NO: 29632
  GFR-binding peptide
  MOD_RES (4), (5), (38), (40): Xaa is C or S
  MOD_RES (19), (20), (21), (22), (23): Xaa is A or G
  MOD_RES (24), (25), (26), (27): Xaa is A or G or is absent

SEQ ID NO: 67205 - protein, 37 aa, Artificial Sequence; identical to SEQ ID NO: 8314
  GFR-binding peptide
  MOD_RES (2), (3), (37): Xaa is C or S
  MOD_RES (17), (18), (19), (20), (21): Xaa is A or G
  MOD_RES (22), (23), (24), (25): Xaa is A or G or is absent

SEQ ID NO: 67206 - protein, 33 aa, Artificial Sequence; identical to SEQ ID NO: 29634
  GFR-binding peptide
  MOD_RES (14), (15), (16), (17), (18): Xaa is A or G
  MOD_RES (19), (20), (21), (22): Xaa is A or G or is absent

SEQ ID NO: 67207 - protein, 38 aa, Artificial Sequence; identical to SEQ ID NO: 29635
  GFR-binding peptide
  MOD_RES (2), (3), (37): Xaa is C or S
  MOD_RES (17), (18), (19), (20), (21): Xaa is A or G
  MOD_RES (22), (23), (24), (25): Xaa is A or G or is absent

SEQ ID NO: 67208 - protein, 40 aa, Artificial Sequence; identical to SEQ ID NO: 8318
  GFR-binding peptide
  MOD_RES (5), (6), (38), (40): Xaa is C or S

SEQ ID NO: 67209 - protein, 40 aa, Artificial Sequence; identical to SEQ ID NO: 29639
  GFR-binding peptide
  MOD_RES (6), (7), (39): Xaa is C or S

SEQ ID NO: 67210 - protein, 34 aa, Artificial Sequence; identical to SEQ ID NO: 8319
  GFR-binding peptide
  MOD_RES (1), (32), (34): Xaa is C or S

SEQ ID NO: 67211 - protein, 37 aa, Artificial Sequence; identical to SEQ ID NO: 32743
  GFR-binding peptide
  MOD_RES (3), (35), (37): Xaa is C or S

SEQ ID NO: 67212 - protein, 34 aa, Artificial Sequence; identical to SEQ ID NO: 8320
  GFR-binding peptide
  MOD_RES (1), (32), (34): Xaa is C or S

SEQ ID NO: 67213 - protein, 42 aa, Artificial Sequence; identical to SEQ ID NO: 8324
  GFR-binding peptide
  MOD_RES (5), (39), (41): Xaa is C or S
  MOD_RES (19), (20), (21), (22), (23): Xaa is A or G
  MOD_RES (24), (25), (26), (27): Xaa is A or G or is absent

SEQ ID NO: 67214 - protein, 34 aa, Artificial Sequence
  GFR-binding peptide
  MOD_RES (1), (2): Xaa is C or S
  MOD_RES (16), (17), (18), (19), (20): Xaa is A or G
  MOD_RES (21), (22), (23), (24): Xaa is A or G or is absent
XXAPVKTEPISMLYLXXXXXXXXXKFKYEMIVEE

SEQ ID NO: 67215 - protein, 37 aa, Artificial Sequence
  GFR-binding peptide
  MOD_RES (5), (6), (37): Xaa is C or S
SASPXXVPQDLSPINILYFVGRTPKVYGKIPMVVKSX

SEQ ID NO: 67216 - protein, 34 aa, Artificial Sequence; identical to SEQ ID NO: 32750
  GFR-binding peptide
  MOD_RES (34), (34): Xaa is C or S
  MOD_RES (14), (15), (16), (17), (18): Xaa is A or G
  MOD_RES (19), (20), (21), (22): Xaa is A or G or is absent

SEQ ID NO: 67217 - protein, 34 aa, Artificial Sequence; identical to SEQ ID NO: 29648
  GFR-binding peptide
  MOD_RES (31), (33): Xaa is C or S

SEQ ID NO: 67218 - protein, 36 aa, Artificial Sequence; identical to SEQ ID NO: 29653
  GFR-binding peptide
  MOD_RES (1), (33), (35): Xaa is C or S

SEQ ID NO: 67219 - protein, 41 aa, Artificial Sequence; identical to SEQ ID NO: 8334
  GFR-binding peptide
  MOD_RES (4), (5), (39), (41): Xaa is C or S
  MOD_RES (19), (20), (21), (22), (23): Xaa is A or G
  MOD_RES (24), (25), (26), (27): Xaa is A or G or is absent

SEQ ID NO: 67220 - protein, 37 aa, Artificial Sequence; identical to SEQ ID NO: 29657
  GFR-binding peptide
  MOD_RES (1), (35), (37): Xaa is C or S
  MOD_RES (15), (16), (17), (18), (19): Xaa is A or G
  MOD_RES (20), (21), (22), (23): Xaa is A or G or is absent

SEQ ID NO: 67221 - protein, 32 aa, Artificial Sequence; identical to SEQ ID NO: 32753
  GFR-binding peptide
  MOD_RES (14), (15), (16), (17), (18): Xaa is A or G
  MOD_RES (19), (20), (21), (22): Xaa is A or G or is absent

SEQ ID NO: 67222 - protein, 33 aa, Artificial Sequence
  GFR-binding peptide
  MOD_RES (1), (2): Xaa is C or S
XXVPTRLSPISILYKDSANNVVLKYHYDMVVES

SEQ ID NO: 67223 - protein, 34 aa, Artificial Sequence; identical to SEQ ID NO: 29659
  GFR-binding peptide
  MOD_RES (1), (34): Xaa is C or S
  MOD_RES (15), (16), (17), (18), (19): Xaa is A or G
  MOD_RES (20), (21), (22), (23): Xaa is A or G or is absent

SEQ ID NO: 67224 - protein, 40 aa, Artificial Sequence; identical to SEQ ID NO: 32757
  GFR-binding peptide
  MOD_RES (2), (3), (37), (39): Xaa is C or S
  MOD_RES (17), (18), (19), (20), (21): Xaa is A or G
  MOD_RES (22), (23), (24), (25): Xaa is A or G or is absent

SEQ ID NO: 67225 - protein, 39 aa, Artificial Sequence; identical to SEQ ID NO: 8347
  GFR-binding peptide
  MOD_RES (5), (6), (39): Xaa is C or S
  MOD_RES (20), (21), (22), (23), (24): Xaa is A or G
  MOD_RES (25), (26), (27), (28): Xaa is A or G or is absent

SEQ ID NO: 67226 - protein, 37 aa, Artificial Sequence; identical to SEQ ID NO: 32764
  GFR-binding peptide
  MOD_RES (2), (3), (35), (37): Xaa is C or S

SEQ ID NO: 67227 - protein, 33 aa, Artificial Sequence
  GFR-binding peptide
  MOD_RES (1), (33): Xaa is C or S
XVPARLSATSILYYDAANNVVLRKHRDMVVEAX

SEQ ID NO: 67228 - protein, 39 aa, Artificial Sequence; identical to SEQ ID NO: 29663
  GFR-binding peptide
  MOD_RES (2), (3), (37), (39): Xaa is C or S
  MOD_RES (17), (18), (19), (20), (21): Xaa is A or G
  MOD_RES (22), (23), (24), (25): Xaa is A or G or is absent

SEQ ID NO: 67229 - protein, 41 aa, Artificial Sequence; identical to SEQ ID NO: 32765
  GFR-binding peptide
  MOD_RES (5), (6), (38), (40): Xaa is C or S

SEQ ID NO: 67230 - protein, 39 aa, Artificial Sequence; identical to SEQ ID NO: 32766
  GFR-binding peptide
  MOD_RES (1), (2), (36), (38): Xaa is C or S
  MOD_RES (16), (17), (18), (19), (20): Xaa is A or G
  MOD_RES (21), (22), (23), (24): Xaa is A or G or is absent

SEQ ID NO: 67231 - protein, 34 aa, Artificial Sequence; identical to SEQ ID NO: 57672
  GFR-binding peptide
  MOD_RES (1), (2): Xaa is C or S
  MOD_RES (16), (17), (18), (19), (20): Xaa is A or G
  MOD_RES (21), (22), (23), (24): Xaa is A or G or is absent

SEQ ID NO: 67232 - protein, 41 aa, Artificial Sequence; identical to SEQ ID NO: 29665
  GFR-binding peptide
  MOD_RES (5), (6), (40): Xaa is C or S
  MOD_RES (20), (21), (22), (23), (24): Xaa is A or G
  MOD_RES (25), (26), (27), (28): Xaa is A or G or is absent

SEQ ID NO: 67233 - protein, 37 aa, Artificial Sequence; identical to SEQ ID NO: 29667
  GFR-binding peptide
  MOD_RES (5), (6), (37): Xaa is C or S

SEQ ID NO: 67234 - protein, 36 aa, Artificial Sequence; identical to SEQ ID NO: 8351
  GFR-binding peptide
  MOD_RES (34), (36): Xaa is C or S
  MOD_RES (14), (15), (16), (17), (18): Xaa is A or G
  MOD_RES (19), (20), (21), (22): Xaa is A or G or is absent

SEQ ID NO: 67235 - protein, 34 aa, Artificial Sequence; identical to SEQ ID NO: 32768
  GFR-binding peptide
  MOD_RES (1), (33): Xaa is C or S

SEQ ID NO: 67236 - protein, 39 aa, Artificial Sequence
  GFR-binding peptide
  MOD_RES (6), (7), (39): Xaa is C or S
GSAGPXXTPTKMSPISMLYKNDKQQIILKYHYGMVVDRX

SEQ ID NO: 67237 - protein, 31 aa, Artificial Sequence
  GFR-binding peptide
  MOD_RES (1), (1): Xaa is C or S
XVPTKLSATSILYYDKGVVTYLRKHRGMAVS

SEQ ID NO: 67238 - protein, 39 aa, Artificial Sequence; identical to SEQ ID NO: 29672
  GFR-binding peptide
  MOD_RES (3), (4), (38): Xaa is C or S
  MOD_RES (18), (19), (20), (21), (22): Xaa is A or G
  MOD_RES (23), (24), (25), (26): Xaa is A or G or is absent

SEQ ID NO: 67239 - protein, 32 aa, Artificial Sequence; identical to SEQ ID NO: 32776
  GFR-binding peptide
  MOD_RES (32), (32): Xaa is C or S

SEQ ID NO: 67240 - protein, 34 aa, Artificial Sequence; identical to SEQ ID NO: 32780
  GFR-binding peptide
  MOD_RES (3), (4): Xaa is C or S

SEQ ID NO: 67241 - protein, 38 aa, Artificial Sequence
  GFR-binding peptide
  MOD_RES (6), (7): Xaa is C or S
HVPKPXXAPTKLEPISVLYLDDSSNVIKFKYENMVVRS

SEQ ID NO: 67242 - protein, 37 aa, Artificial Sequence; identical to SEQ ID NO: 32783
  GFR-binding peptide
  MOD_RES (2), (36): Xaa is C or S
  MOD_RES (16), (17), (18), (19), (20): Xaa is A or G
  MOD_RES (21), (22), (23), (24): Xaa is A or G or is absent

SEQ ID NO: 67243 - protein, 34 aa, Artificial Sequence; identical to SEQ ID NO: 57688
  GFR-binding peptide
  MOD_RES (1), (34): Xaa is C or S
  MOD_RES (15), (16), (17), (18), (19): Xaa is A or G
  MOD_RES (20), (21), (22), (23): Xaa is A or G or is absent

SEQ ID NO: 67244 - protein, 36 aa, Artificial Sequence; identical to SEQ ID NO: 32785
  GFR-binding peptide
  MOD_RES (3), (4): Xaa is C or S
  MOD_RES (18), (19), (20), (21), (22): Xaa is A or G
  MOD_RES (23), (24), (25), (26): Xaa is A or G or is absent

SEQ ID NO: 67245 - protein, 39 aa, Artificial Sequence; identical to SEQ ID NO: 8358
  GFR-binding peptide
  MOD_RES (5), (6): Xaa is C or S
  MOD_RES (20), (21), (22), (23), (24): Xaa is A or G
  MOD_RES (25), (26), (27), (28): Xaa is A or G or is absent

SEQ ID NO: 67246 - protein, 38 aa, Artificial Sequence
  GFR-binding peptide
  MOD_RES (1), (35), (37): Xaa is C or S
  MOD_RES (15), (16), (17), (18), (19): Xaa is A or G
  MOD_RES (20), (21), (22), (23): Xaa is A or G or is absent
XVPEKMSPINILYFXXXXXXXXXYGKIPNMTVESXAXR

SEQ ID NO: 67247 - protein, 39 aa, Artificial Sequence; identical to SEQ ID NO: 8359
  GFR-binding peptide
  MOD_RES (4), (5), (38): Xaa is C or S
  MOD_RES (19), (20), (21), (22), (23): Xaa is A or G
  MOD_RES (24), (25), (26), (27): Xaa is A or G or is absent

SEQ ID NO: 67248 - protein, 38 aa, Artificial Sequence; identical to SEQ ID NO: 57689
  GFR-binding peptide
  MOD_RES (3), (4), (38): Xaa is C or S
  MOD_RES (18), (19), (20), (21), (22): Xaa is A or G
  MOD_RES (23), (24), (25), (26): Xaa is A or G or is absent

SEQ ID NO: 67249 - protein, 38 aa, Artificial Sequence; identical to SEQ ID NO: 32787
  GFR-binding peptide
  MOD_RES (4), (5), (37): Xaa is C or S

SEQ ID NO: 67250 - protein, 40 aa, Artificial Sequence; identical to SEQ ID NO: 32790
  GFR-binding peptide
  MOD_RES (5), (6), (40): Xaa is C or S
  MOD_RES (20), (21), (22), (23), (24): Xaa is A or G
  MOD_RES (25), (26), (27), (28): Xaa is A or G or is absent

SEQ ID NO: 67251 - protein, 41 aa, Artificial Sequence; identical to SEQ ID NO: 29683
  GFR-binding peptide
  MOD_RES (6), (7), (39), (41): Xaa is C or S

SEQ ID NO: 67252 - protein, 37 aa, Artificial Sequence; identical to SEQ ID NO: 32791
  GFR-binding peptide
  MOD_RES (3), (37): Xaa is C or S
  MOD_RES (17), (18), (19), (20), (21): Xaa is A or G
  MOD_RES (22), (23), (24), (25): Xaa is A or G or is absent

SEQ ID NO: 67253 - protein, 38 aa, Artificial Sequence; identical to SEQ ID NO: 8365
  GFR-binding peptide
  MOD_RES (4), (5), (36), (38): Xaa is C or S

SEQ ID NO: 67254 - protein, 31 aa, Artificial Sequence; identical to SEQ ID NO: 8371
  GFR-binding peptide
  MOD_RES (31), (31): Xaa is C or S

SEQ ID NO: 67255 - protein, 34 aa, Artificial Sequence; identical to SEQ ID NO: 32796
  GFR-binding peptide
  MOD_RES (33), (33): Xaa is C or S

SEQ ID NO: 67256 - protein, 38 aa, Artificial Sequence; identical to SEQ ID NO: 29691
  GFR-binding peptide
  MOD_RES (1), (2), (36), (38): Xaa is C or S
  MOD_RES (16), (17), (18), (19), (20): Xaa is A or G
  MOD_RES (21), (22), (23), (24): Xaa is A or G or is absent

SEQ ID NO: 67257 - protein, 38 aa, Artificial Sequence; identical to SEQ ID NO: 29695
  GFR-binding peptide
  MOD_RES (5), (6): Xaa is C or S
  MOD_RES (20), (21), (22), (23), (24): Xaa is A or G
  MOD_RES (25), (26), (27), (28): Xaa is A or G or is absent

SEQ ID NO: 67258 - protein, 41 aa, Artificial Sequence; identical to SEQ ID NO: 29696
  GFR-binding peptide
  MOD_RES (5), (6), (40): Xaa is C or S
  MOD_RES (20), (21), (22), (23), (24): Xaa is A or G
  MOD_RES (25), (26), (27), (28): Xaa is A or G or is absent

SEQ ID NO: 67259 - protein, 43 aa, Artificial Sequence
  GFR-binding peptide
  MOD_RES (5), (6), (40), (42): Xaa is C or S
  MOD_RES (20), (21), (22), (23), (24): Xaa is A or G
  MOD_RES (25), (26), (27), (28): Xaa is A or G or is absent
IPEPXXVPEKMEPISILYLXXXXXXXXXKFKYENMTVESXAXR

SEQ ID NO: 67260 - protein, 38 aa, Artificial Sequence
  GFR-binding peptide
  MOD_RES (4), (5), (37): Xaa is C or S
PEPXXVPEKMNAISILYFDENKNVVLKKYRNMTVESXA

SEQ ID NO: 67261 - protein, 36 aa, Artificial Sequence
  GFR-binding peptide
  MOD_RES (1), (2), (35): Xaa is C or S
  MOD_RES (16), (17), (18), (19), (20): Xaa is A or G
  MOD_RES (21), (22), (23), (24): Xaa is A or G or is absent
XXAPVKTSATSMLYYXXXXXXXXXLRKHRMIVEEXG

SEQ ID NO: 67262 - protein, 32 aa, Artificial Sequence; identical to SEQ ID NO: 8373
  GFR-binding peptide
  MOD_RES (1), (1): Xaa is C or S

SEQ ID NO: 67263 - protein, 38 aa, Artificial Sequence
  GFR-binding peptide
  MOD_RES (2), (3), (36), (38): Xaa is C or S
  MOD_RES (17), (18), (19), (20), (21): Xaa is A or G
  MOD_RES (22), (23), (24), (25): Xaa is A or G or is absent
PXXVPQALSPINILYFXXXXXXXXXYGKIPMIVRSXKX

SEQ ID NO: 67264 - protein, 31 aa, Artificial Sequence; identical to SEQ ID NO: 8378
  GFR-binding peptide

SEQ ID NO: 67265 - protein, 40 aa, Artificial Sequence; identical to SEQ ID NO: 32805
  GFR-binding peptide
  MOD_RES (2), (3), (37), (39): Xaa is C or S
  MOD_RES (17), (18), (19), (20), (21): Xaa is A or G
  MOD_RES (22), (23), (24), (25): Xaa is A or G or is absent

SEQ ID NO: 67266 - protein, 38 aa, Artificial Sequence; identical to SEQ ID NO: 8383
  GFR-binding peptide
  MOD_RES (5), (6): Xaa is C or S
  MOD_RES (20), (21), (22), (23), (24): Xaa is A or G
  MOD_RES (25), (26), (27), (28): Xaa is A or G or is absent

SEQ ID NO: 67267 - protein, 36 aa, Artificial Sequence; identical to SEQ ID NO: 57717
  GFR-binding peptide
  MOD_RES (2), (3), (34), (36): Xaa is C or S

SEQ ID NO: 67268 - protein, 39 aa, Artificial Sequence; identical to SEQ ID NO: 8384
  GFR-binding peptide
  MOD_RES (5), (6), (37), (39): Xaa is C or S

SEQ ID NO: 67269 - protein, 37 aa, Artificial Sequence; identical to SEQ ID NO: 8385
  GFR-binding peptide
  MOD_RES (5), (6): Xaa is C or S

SEQ ID NO: 67270 - protein, 42 aa, Artificial Sequence; identical to SEQ ID NO: 32812
  GFR-binding peptide
  MOD_RES (4), (5), (39), (41): Xaa is C or S
  MOD_RES (19), (20), (21), (22), (23): Xaa is A or G
  MOD_RES (24), (25), (26), (27): Xaa is A or G or is absent

SEQ ID NO: 67271 - protein, 37 aa, Artificial Sequence
  GFR-binding peptide
  MOD_RES (6), (7): Xaa is C or S
GIPEPXXVPEKMEPISILYLDENKNVVKFKYENMTVE

SEQ ID NO: 67272 - protein, 37 aa, Artificial Sequence; identical to SEQ ID NO: 8386
  GFR-binding peptide
  MOD_RES (1), (2), (36): Xaa is C or S
  MOD_RES (16), (17), (18), (19), (20): Xaa is A or G
  MOD_RES (21), (22), (23), (24): Xaa is A or G or is absent

SEQ ID NO: 67273 - protein, 38 aa, Artificial Sequence
  GFR-binding peptide
  MOD_RES (4), (5): Xaa is C or S
  MOD_RES (19), (20), (21), (22), (23): Xaa is A or G
  MOD_RES (24), (25), (26), (27): Xaa is A or G or is absent
PEPXXVPEKMNAISILYFXXXXXXXXXLKKYRNMTVES

SEQ ID NO: 67274 - protein, 35 aa, Artificial Sequence; identical to SEQ ID NO: 8387
  GFR-binding peptide
  MOD_RES (2), (3): Xaa is C or S
  MOD_RES (17), (18), (19), (20), (21): Xaa is A or G
  MOD_RES (22), (23), (24), (25): Xaa is A or G or is absent

SEQ ID NO: 67275 - protein, 38 aa, Artificial Sequence; identical to SEQ ID NO: 57720
  GFR-binding peptide
  MOD_RES (3), (4), (37): Xaa is C or S
  MOD_RES (18), (19), (20), (21), (22): Xaa is A or G
  MOD_RES (23), (24), (25), (26): Xaa is A or G or is absent

SEQ ID NO: 67276 - protein, 39 aa, Artificial Sequence; identical to SEQ ID NO: 29708
  GFR-binding peptide
  MOD_RES (5), (6), (39): Xaa is C or S

SEQ ID NO: 67277 - protein, 32 aa, Artificial Sequence; identical to SEQ ID NO: 8389
  GFR-binding peptide
  MOD_RES (14), (15), (16), (17), (18): Xaa is A or G
  MOD_RES (19), (20), (21), (22): Xaa is A or G or is absent

SEQ ID NO: 67278 - protein, 38 aa, Artificial Sequence
  GFR-binding peptide
  MOD_RES (4), (5), (37): Xaa is C or S
AGPXXTPTKMSATSMLYYNDKQQIILRKHRGMVVDRXG

SEQ ID NO: 67279 - protein, 37 aa, Artificial Sequence; identical to SEQ ID NO: 29711
  GFR-binding peptide
  MOD_RES (2), (3), (35), (37): Xaa is C or S

SEQ ID NO: 67280 - protein, 40 aa, Artificial Sequence; identical to SEQ ID NO: 8394
  GFR-binding peptide
  MOD_RES (6), (7), (39): Xaa is C or S

SEQ ID NO: 67281 - protein, 37 aa, Artificial Sequence; identical to SEQ ID NO: 8396
  GFR-binding peptide
  MOD_RES (3), (4), (35), (37): Xaa is C or S

SEQ ID NO: 67282 - protein, 37 aa, Artificial Sequence
  GFR-binding peptide
  MOD_RES (2), (3), (35), (37): Xaa is C or S
TXXVPTRLSPISILYKDSANNVVLKYHYDMVVESXGX

SEQ ID NO: 67283 - protein, 38 aa, Artificial Sequence; identical to SEQ ID NO: 32821
  GFR-binding peptide
  MOD_RES (2), (3), (37): Xaa is C or S
  MOD_RES (17), (18), (19), (20), (21): Xaa is A or G
  MOD_RES (22), (23), (24), (25): Xaa is A or G or is absent

SEQ ID NO: 67284 - protein, 36 aa, Artificial Sequence; identical to SEQ ID NO: 8397
  GFR-binding peptide
  MOD_RES (3), (4), (35): Xaa is C or S

SEQ ID NO: 67285 - protein, 38 aa, Artificial Sequence
  GFR-binding peptide
  MOD_RES (4), (5), (37): Xaa is C or S
PASXXVPARLSATSILYYDAANNVVLRKHRDMVVEAXG

SEQ ID NO: 67286 - protein, 32 aa, Artificial Sequence; identical to SEQ ID NO: 8400
  GFR-binding peptide
  MOD_RES (1), (32): Xaa is C or S

SEQ ID NO: 67287 - protein, 32 aa, Artificial Sequence
  GFR-binding peptide
  MOD_RES (1), (32): Xaa is C or S
XVPQALSPINILYFVGRKPKVYGKIPMIVRSX

SEQ ID NO: 67288 - protein, 38 aa, Artificial Sequence; identical to SEQ ID NO: 57730
  GFR-binding peptide
  MOD_RES (6), (7), (38): Xaa is C or S

SEQ ID NO: 67289 - protein, 36 aa, Artificial Sequence; identical to SEQ ID NO: 8401
  GFR-binding peptide
  MOD_RES (1), (2), (35): Xaa is C or S
  MOD_RES (16), (17), (18), (19), (20): Xaa is A or G
  MOD_RES (21), (22), (23), (24): Xaa is A or G or is absent

SEQ ID NO: 67290 - protein, 43 aa, Artificial Sequence; identical to SEQ ID NO: 29718
  GFR-binding peptide
  MOD_RES (6), (7), (40), (42): Xaa is C or S
  MOD_RES (21), (22), (23), (24), (25): Xaa is A or G
  MOD_RES (26), (27), (28), (29): Xaa is A or G or is absent

SEQ ID NO: 67291 - protein, 36 aa, Artificial Sequence
  GFR-binding peptide
  MOD_RES (1), (35): Xaa is C or S
  MOD_RES (15), (16), (17), (18), (19): Xaa is A or G
  MOD_RES (20), (21), (22), (23): Xaa is A or G or is absent
XTPTKMSPISMLYKXXXXXXXXXLKYHYGMVVDRXG

SEQ ID NO: 67292 - protein, 38 aa, Artificial Sequence; identical to SEQ ID NO: 8402
  GFR-binding peptide
  MOD_RES (1), (2), (36), (38): Xaa is C or S
  MOD_RES (16), (17), (18), (19), (20): Xaa is A or G
  MOD_RES (21), (22), (23), (24): Xaa is A or G or is absent

SEQ ID NO: 67293 - protein, 36 aa, Artificial Sequence
  GFR-binding peptide
  MOD_RES (1), (35): Xaa is C or S
  MOD_RES (15), (16), (17), (18), (19): Xaa is A or G
  MOD_RES (20), (21), (22), (23): Xaa is A or G or is absent
XVPTRLSPISILYKXXXXXXXXXLKYHYDMVVESXG

SEQ ID NO: 67294 - protein, 36 aa, Artificial Sequence; identical to SEQ ID NO: 8404
  GFR-binding peptide
  MOD_RES (1), (2), (36): Xaa is C or S
  MOD_RES (16), (17), (18), (19), (20): Xaa is A or G
  MOD_RES (21), (22), (23), (24): Xaa is A or G or is absent

SEQ ID NO: 67295 - protein, 36 aa, Artificial Sequence; identical to SEQ ID NO: 32843
  GFR-binding peptide
  MOD_RES (1), (2), (34), (36): Xaa is C or S

SEQ ID NO: 67296 - protein, 35 aa, Artificial Sequence; identical to SEQ ID NO: 29725
  GFR-binding peptide
  MOD_RES (1), (35): Xaa is C or S
  MOD_RES (15), (16), (17), (18), (19): Xaa is A or G
  MOD_RES (20), (21), (22), (23): Xaa is A or G or is absent

SEQ ID NO: 67297 - protein, 38 aa, Artificial Sequence; identical to SEQ ID NO: 29726
  GFR-binding peptide
  MOD_RES (2), (3), (37): Xaa is C or S
  MOD_RES (17), (18), (19), (20), (21): Xaa is A or G
  MOD_RES (22), (23), (24), (25): Xaa is A or G or is absent

SEQ ID NO: 67298 - protein, 41 aa, Artificial Sequence; identical to SEQ ID NO: 8406
  GFR-binding peptide
  MOD_RES (5), (6), (40): Xaa is C or S
  MOD_RES (20), (21), (22), (23), (24): Xaa is A or G
  MOD_RES (25), (26), (27), (28): Xaa is A or G or is absent

SEQ ID NO: 67299 - protein, 40 aa, Artificial Sequence
  GFR-binding peptide
  MOD_RES (6), (7): Xaa is C or S
  MOD_RES (21), (22), (23), (24), (25): Xaa is A or G
  MOD_RES (26), (27), (28), (29): Xaa is A or G or is absent
HVPKPXXAPTKLSPISVLYKXXXXXXXXXLKYHYNMVVRS

SEQ ID NO: 67300 - protein, 34 aa, Artificial Sequence; identical to SEQ ID NO: 8411
  GFR-binding peptide
  MOD_RES (1), (2), (33): Xaa is C or S

SEQ ID NO: 67301 - protein, 43 aa, Artificial Sequence; identical to SEQ ID NO: 8414
  GFR-binding peptide
  MOD_RES (6), (7), (41), (43): Xaa is C or S
  MOD_RES (21), (22), (23), (24), (25): Xaa is A or G
  MOD_RES (26), (27), (28), (29): Xaa is A or G or is absent

SEQ ID NO: 67302 - protein, 36 aa, Artificial Sequence; identical to SEQ ID NO: 8415
  GFR-binding peptide
  MOD_RES (2), (3), (36): Xaa is C or S
  MOD_RES (17), (18), (19), (20), (21): Xaa is A or G
  MOD_RES (22), (23), (24), (25): Xaa is A or G or is absent

SEQ ID NO: 67303 - protein, 36 aa, Artificial Sequence
  GFR-binding peptide
  MOD_RES (2), (3), (34), (36): Xaa is C or S
TXXAPVKTSPISMLYKDNGRVLLLKYHYMIVEEXGX

SEQ ID NO: 67304 - protein, 34 aa, Artificial Sequence
  GFR-binding peptide
  MOD_RES (1), (1): Xaa is C or S
  MOD_RES (15), (16), (17), (18), (19): Xaa is A or G
  MOD_RES (20), (21), (22), (23): Xaa is A or G or is absent
XTPTKMSATSMLYYXXXXXXXXXLRKHRGMVVDR

SEQ ID NO: 67305 - protein, 40 aa, Artificial Sequence; identical to SEQ ID NO: 8416
  GFR-binding peptide
  MOD_RES (3), (37), (39): Xaa is C or S
  MOD_RES (17), (18), (19), (20), (21): Xaa is A or G
  MOD_RES (22), (23), (24), (25): Xaa is A or G or is absent

SEQ ID NO: 67306 - protein, 37 aa, Artificial Sequence
  GFR-binding peptide
  MOD_RES (3), (4): Xaa is C or S
  MOD_RES (18), (19), (20), (21), (22): Xaa is A or G
  MOD_RES (23), (24), (25), (26): Xaa is A or G or is absent
PTXXVPTRLEPISILYLXXXXXXXXXKFKYEDMVVES

SEQ ID NO: 67307 - protein, 34 aa, Artificial Sequence; identical to SEQ ID NO: 8421
  GFR-binding peptide
  MOD_RES (1), (2), (34): Xaa is C or S

SEQ ID NO: 67308 - protein, 35 aa, Artificial Sequence
  GFR-binding peptide
  MOD_RES (2), (3), (35): Xaa is C or S
PXXVPEKMSPISILYKDENKNVVLKYHYNMTVESX

SEQ ID NO: 67309 - protein, 35 aa, Artificial Sequence; identical to SEQ ID NO: 8422
  GFR-binding peptide
  MOD_RES (34), (34): Xaa is C or S
  MOD_RES (14), (15), (16), (17), (18): Xaa is A or G
  MOD_RES (19), (20), (21), (22): Xaa is A or G or is absent

SEQ ID NO: 67310 - protein, 42 aa, Artificial Sequence; identical to SEQ ID NO: 29736
  GFR-binding peptide
  MOD_RES (6), (7), (40), (42): Xaa is C or S
  MOD_RES (21), (22), (23), (24), (25): Xaa is A or G
  MOD_RES (26), (27), (28), (29): Xaa is A or G or is absent

SEQ ID NO: 67311 - protein, 40 aa, Artificial Sequence; identical to SEQ ID NO: 32857
  GFR-binding peptide
  MOD_RES (7), (39): Xaa is C or S

SEQ ID NO: 67312 - protein, 37 aa, Artificial Sequence; identical to SEQ ID NO: 29737
  GFR-binding peptide
  MOD_RES (5), (6): Xaa is C or S

SEQ ID NO: 67313 - protein, 38 aa, Artificial Sequence; identical to SEQ ID NO: 8425
  GFR-binding peptide
  MOD_RES (1), (2), (37): Xaa is C or S
  MOD_RES (16), (17), (18), (19), (20): Xaa is A or G
  MOD_RES (21), (22), (23), (24): Xaa is A or G or is absent

SEQ ID NO: 67314 - protein, 36 aa, Artificial Sequence; identical to SEQ ID NO: 32860
  GFR-binding peptide
  MOD_RES (5), (6): Xaa is C or S

SEQ ID NO: 67315 - protein, 35 aa, Artificial Sequence; identical to SEQ ID NO: 29739
  GFR-binding peptide
  MOD_RES (32), (34): Xaa is C or S

SEQ ID NO: 67316 - protein, 32 aa, Artificial Sequence; identical to SEQ ID NO: 29740
  GFR-binding peptide
  MOD_RES (1), (2): Xaa is C or S

SEQ ID NO: 67317 - protein, 36 aa, Artificial Sequence; identical to SEQ ID NO: 8428
  GFR-binding peptide
  MOD_RES (1), (2), (34), (36): Xaa is C or S

SEQ ID NO: 67318 - protein, 33 aa, Artificial Sequence
  GFR-binding peptide
  MOD_RES (1), (32): Xaa is C or S
XAPVKTSPISMLYKDNGRVLLLKYHYMIVEEXG

SEQ ID NO: 67319 - protein, 33 aa, Artificial Sequence
  GFR-binding peptide
  MOD_RES (33), (33): Xaa is C or S
  MOD_RES (14), (15), (16), (17), (18): Xaa is A or G
  MOD_RES (19), (20), (21), (22): Xaa is A or G or is absent
VPQALSPINILYFXXXXXXXXXYGKIPMIVRSX

SEQ ID NO: 67320 - protein, 40 aa, Artificial Sequence
  GFR-binding peptide
  MOD_RES (6), (7), (39): Xaa is C or S
GSAGPXXTPTKMEPISMLYLNDKQQIIKFKYEGMVVDRXG

SEQ ID NO: 67321 - protein, 31 aa, Artificial Sequence
  GFR-binding peptide
  MOD_RES (1), (1): Xaa is C or S
XVPQDLSPINILYFVGRTPKVYGKIPMVVKS

SEQ ID NO: 67322 - protein, 37 aa, Artificial Sequence; identical to SEQ ID NO: 8432
  GFR-binding peptide
  MOD_RES (5), (6), (37): Xaa is C or S

SEQ ID NO: 67323 - protein, 37 aa, Artificial Sequence; identical to SEQ ID NO: 29748
  GFR-binding peptide
  MOD_RES (2), (3), (35), (37): Xaa is C or S

SEQ ID NO: 67324 - protein, 33 aa, Artificial Sequence; identical to SEQ ID NO: 29749
  GFR-binding peptide
  MOD_RES (3), (3): Xaa is C or S

SEQ ID NO: 67325 - protein, 34 aa, Artificial Sequence; identical to SEQ ID NO: 8434
  GFR-binding peptide
  MOD_RES (1), (2): Xaa is C or S
  MOD_RES (16), (17), (18), (19), (20): Xaa is A or G
  MOD_RES (21), (22), (23), (24): Xaa is A or G or is absent

SEQ ID NO: 67326 - protein, 32 aa, Artificial Sequence; identical to SEQ ID NO: 32866
  GFR-binding peptide
  MOD_RES (14), (15), (16), (17), (18): Xaa is A or G
  MOD_RES (19), (20), (21), (22): Xaa is A or G or is absent

SEQ ID NO: 67327 - protein, 36 aa, Artificial Sequence; identical to SEQ ID NO: 32870
  GFR-binding peptide
  MOD_RES (5), (6): Xaa is C or S

SEQ ID NO: 67328 - protein, 37 aa, Artificial Sequence
  GFR-binding peptide
  MOD_RES (2), (3), (37): Xaa is C or S
  MOD_RES (17), (18), (19), (20), (21): Xaa is A or G
  MOD_RES (22), (23), (24), (25): Xaa is A or G or is absent
PXXVPEKMSPINILYFXXXXXXXXXYGKIPNMTVESX

SEQ ID NO: 67329 - protein, 33 aa, Artificial Sequence; identical to SEQ ID NO: 8441
  GFR-binding peptide
  MOD_RES (33), (33): Xaa is C or S
  MOD_RES (14), (15), (16), (17), (18): Xaa is A or G
  MOD_RES (19), (20), (21), (22): Xaa is A or G or is absent

SEQ ID NO: 67330 - protein, 40 aa, Artificial Sequence; identical to SEQ ID NO: 32872
  GFR-binding peptide
  MOD_RES (3), (4), (38), (40): Xaa is C or S
  MOD_RES (18), (19), (20), (21), (22): Xaa is A or G
  MOD_RES (23), (24), (25), (26): Xaa is A or G or is absent

SEQ ID NO: 67331 - protein, 32 aa, Artificial Sequence; identical to SEQ ID NO: 8444
  GFR-binding peptide
  MOD_RES (1), (2): Xaa is C or S

SEQ ID NO: 67332 - protein, 38 aa, Artificial Sequence
  GFR-binding peptide
  MOD_RES (4), (5): Xaa is C or S
  MOD_RES (19), (20), (21), (22), (23): Xaa is A or G
  MOD_RES (24), (25), (26), (27): Xaa is A or G or is absent
AGPXXTPTKMSPISMLYKXXXXXXXXXLKYHYGMVVDR

SEQ ID NO: 67333 - protein, 35 aa, Artificial Sequence; identical to SEQ ID NO: 32876
  GFR-binding peptide
  MOD_RES (1), (2): Xaa is C or S
  MOD_RES (16), (17), (18), (19), (20): Xaa is A or G
  MOD_RES (21), (22), (23), (24): Xaa is A or G or is absent

SEQ ID NO: 67334 - protein, 37 aa, Artificial Sequence; identical to SEQ ID NO: 29758
  GFR-binding peptide
  MOD_RES (1), (35), (37): Xaa is C or S
  MOD_RES (15), (16), (17), (18), (19): Xaa is A or G
  MOD_RES (20), (21), (22), (23): Xaa is A or G or is absent

SEQ ID NO: 67335 - protein, 41 aa, Artificial Sequence; identical to SEQ ID NO: 8447
  GFR-binding peptide
  MOD_RES (5), (6), (40): Xaa is C or S
  MOD_RES (20), (21), (22), (23), (24): Xaa is A or G
  MOD_RES (25), (26), (27), (28): Xaa is A or G or is absent

SEQ ID NO: 67336 - protein, 41 aa, Artificial Sequence; identical to SEQ ID NO: 8450
  GFR-binding peptide
  MOD_RES (5), (6), (39), (41): Xaa is C or S
  MOD_RES (20), (21), (22), (23), (24): Xaa is A or G
  MOD_RES (25), (26), (27), (28): Xaa is A or G or is absent

SEQ ID NO: 67337 - protein, 40 aa, Artificial Sequence; identical to SEQ ID NO: 8451
  GFR-binding peptide
  MOD_RES (6), (7), (38), (40): Xaa is C or S

SEQ ID NO: 67338 - protein, 35 aa, Artificial Sequence
  GFR-binding peptide
  MOD_RES (2), (3): Xaa is C or S
  MOD_RES (17), (18), (19), (20), (21): Xaa is A or G
  MOD_RES (22), (23), (24), (25): Xaa is A or G or is absent
TXXVPTRLSPISILYKXXXXXXXXXLKYHYDMVVE

SEQ ID NO: 67339 - protein, 39 aa, Artificial Sequence; identical to SEQ ID NO: 32883
  GFR-binding peptide
  MOD_RES (4), (5), (39): Xaa is C or S
  MOD_RES (19), (20), (21), (22), (23): Xaa is A or G
  MOD_RES (24), (25), (26), (27): Xaa is A or G or is absent

SEQ ID NO: 67340 - protein, 35 aa, Artificial Sequence
  GFR-binding peptide
  MOD_RES (2), (3): Xaa is C or S
  MOD_RES (17), (18), (19), (20), (21): Xaa is A or G
  MOD_RES (22), (23), (24), (25): Xaa is A or G or is absent
TXXVPTRLEPISILYLXXXXXXXXXKFKYEDMVVE

SEQ ID NO: 67341 - protein, 41 aa, Artificial Sequence; identical to SEQ ID NO: 32892
  GFR-binding peptide
  MOD_RES (3), (4), (38), (40): Xaa is C or S
  MOD_RES (18), (19), (20), (21), (22): Xaa is A or G
  MOD_RES (23), (24), (25), (26): Xaa is A or G or is absent

SEQ ID NO: 67342 - protein, 39 aa, Artificial Sequence; identical to SEQ ID NO: 29767
  GFR-binding peptide
  MOD_RES (1), (2), (36), (38): Xaa is C or S
  MOD_RES (16), (17), (18), (19), (20): Xaa is A or G
  MOD_RES (21), (22), (23), (24): Xaa is A or G or is absent

SEQ ID NO: 67343 - protein, 39 aa, Artificial Sequence; identical to SEQ ID NO: 8455
  GFR-binding peptide
  MOD_RES (4), (5), (39): Xaa is C or S
  MOD_RES (19), (20), (21), (22), (23): Xaa is A or G
  MOD_RES (24), (25), (26), (27): Xaa is A or G or is absent

SEQ ID NO: 67344 - protein, 34 aa, Artificial Sequence; identical to SEQ ID NO: 8456
  GFR-binding peptide
  MOD_RES (1), (2): Xaa is C or S
  MOD_RES (16), (17), (18), (19), (20): Xaa is A or G
  MOD_RES (21), (22), (23), (24): Xaa is A or G or is absent

SEQ ID NO: 67345 - protein, 38 aa, Artificial Sequence; identical to SEQ ID NO: 29769
  GFR-binding peptide
  MOD_RES (2), (3), (35), (37): Xaa is C or S

SEQ ID NO: 67346 - protein, 39 aa, Artificial Sequence; identical to SEQ ID NO: 8457
  GFR-binding peptide
  MOD_RES (2), (3), (37), (39): Xaa is C or S
  MOD_RES (17), (18), (19), (20), (21): Xaa is A or G
  MOD_RES (22), (23), (24), (25): Xaa is A or G or is absent

SEQ ID NO: 67347 - protein, 37 aa, Artificial Sequence; identical to SEQ ID NO: 8458
  GFR-binding peptide
  MOD_RES (6), (7): Xaa is C or S

SEQ ID NO: 67348 - protein, 33 aa, Artificial Sequence; identical to SEQ ID NO: 29775
  GFR-binding peptide
  MOD_RES (2), (3): Xaa is C or S

SEQ ID NO: 67349 - protein, 36 aa, Artificial Sequence; identical to SEQ ID NO: 8461
  GFR-binding peptide
  MOD_RES (33), (35): Xaa is C or S
  MOD_RES (14), (15), (16), (17), (18): Xaa is A or G
  MOD_RES (19), (20), (21), (22): Xaa is A or G or is absent

SEQ ID NO: 67350 - protein, 37 aa, Artificial Sequence; identical to SEQ ID NO: 8462
  GFR-binding peptide
  MOD_RES (2), (3), (35), (37): Xaa is C or S

SEQ ID NO: 67351 - protein, 38 aa, Artificial Sequence; identical to SEQ ID NO: 32914
  GFR-binding peptide
  MOD_RES (3), (4): Xaa is C or S
  MOD_RES (18), (19), (20), (21), (22): Xaa is A or G
  MOD_RES (23), (24), (25), (26): Xaa is A or G or is absent

SEQ ID NO: 67352 - protein, 36 aa, Artificial Sequence; identical to SEQ ID NO: 29781
  GFR-binding peptide
  MOD_RES (1), (33), (35): Xaa is C or S

SEQ ID NO: 67353 - protein, 37 aa, Artificial Sequence
  GFR-binding peptide
  MOD_RES (4), (5): Xaa is C or S
  MOD_RES (19), (20), (21), (22), (23): Xaa is A or G
  MOD_RES (24), (25), (26), (27): Xaa is A or G or is absent
PEPXXVPEKMSATSILYYXXXXXXXXXLRKHRNMTVE

SEQ ID NO: 67354 - protein, 35 aa, Artificial Sequence
  GFR-binding peptide
  MOD_RES (32), (34): Xaa is C or S
VPARLSATSILYYDAANNVVLRKHRDMVVEAXGXR

SEQ ID NO: 67355 - protein, 38 aa, Artificial Sequence; identical to SEQ ID NO: 29786
  GFR-binding peptide
  MOD_RES (6), (7): Xaa is C or S

SEQ ID NO: 67356 - protein, 40 aa, Artificial Sequence; identical to SEQ ID NO: 32918
  GFR-binding peptide
  MOD_RES (5), (6), (40): Xaa is C or S
  MOD_RES (20), (21), (22), (23), (24): Xaa is A or G
  MOD_RES (25), (26), (27), (28): Xaa is A or G or is absent

SEQ ID NO: 67357 - protein, 38 aa, Artificial Sequence; identical to SEQ ID NO: 29790
  GFR-binding peptide
  MOD_RES (4), (5), (37): Xaa is C or S

SEQ ID NO: 67358 - protein, 37 aa, Artificial Sequence; identical to SEQ ID NO: 32925
  GFR-binding peptide
  MOD_RES (2), (3), (37): Xaa is C or S
  MOD_RES (17), (18), (19), (20), (21): Xaa is A or G
  MOD_RES (22), (23), (24), (25): Xaa is A or G or is absent

SEQ ID NO: 67359 - protein, 39 aa, Artificial Sequence; identical to SEQ ID NO: 8471
  GFR-binding peptide
  MOD_RES (4), (38): Xaa is C or S
  MOD_RES (18), (19), (20), (21), (22): Xaa is A or G
  MOD_RES (23), (24), (25), (26): Xaa is A or G or is absent

SEQ ID NO: 67360 - protein, 37 aa, Artificial Sequence; identical to SEQ ID NO: 8475
  GFR-binding peptide
  MOD_RES (3), (4): Xaa is C or S
  MOD_RES (18), (19), (20), (21), (22): Xaa is A or G
  MOD_RES (23), (24), (25), (26): Xaa is A or G or is absent

SEQ ID NO: 67361 - protein, 40 aa, Artificial Sequence
  GFR-binding peptide
  MOD_RES (5), (6), (37), (39): Xaa is C or S
VPSTXXAPVKTEPISMLYLDNGRVLLKFKYEMIVEEXGXL

SEQ ID NO: 67362 - protein, 38 aa, Artificial Sequence
  GFR-binding peptide
  MOD_RES (3), (4), (35), (37): Xaa is C or S
APXXVPQALSPINILYFVGRKPKVYGKIPMIVRSXKXS

SEQ ID NO: 67363 - protein, 37 aa, Artificial Sequence; identical to SEQ ID NO: 15783
  GFR-binding peptide
  MOD_RES (3), (4), (36): Xaa is C or S

SEQ ID NO: 67364 - protein, 40 aa, Artificial Sequence
  GFR-binding peptide
  MOD_RES (2), (3), (37), (39): Xaa is C or S
  MOD_RES (17), (18), (19), (20), (21): Xaa is A or G
  MOD_RES (22), (23), (24), (25): Xaa is A or G or is absent
TXXVPTRLSPISILYKXXXXXXXXXLKYHYDMVVESXGXR

SEQ ID NO: 67365 - protein, 37 aa, Artificial Sequence
  GFR-binding peptide
  MOD_RES (1), (35), (37): Xaa is C or S
  MOD_RES (15), (16), (17), (18), (19): Xaa is A or G
  MOD_RES (20), (21), (22), (23): Xaa is A or G or is absent
XVPEKMSATSILYYXXXXXXXXXLRKHRNMTVESXAX

SEQ ID NO: 67366 - protein, 37 aa, Artificial Sequence; identical to SEQ ID NO: 57834
  GFR-binding peptide
  MOD_RES (2), (3), (36): Xaa is C or S
  MOD_RES (17), (18), (19), (20), (21): Xaa is A or G
  MOD_RES (22), (23), (24), (25): Xaa is A or G or is absent

SEQ ID NO: 67367 - protein, 40 aa, Artificial Sequence; identical to SEQ ID NO: 29801
  GFR-binding peptide
  MOD_RES (3), (37), (39): Xaa is C or S
  MOD_RES (17), (18), (19), (20), (21): Xaa is A or G
  MOD_RES (22), (23), (24), (25): Xaa is A or G or is absent

SEQ ID NO: 67368 - protein, 35 aa, Artificial Sequence
  GFR-binding peptide
  MOD_RES (1), (33), (35): Xaa is C or S
XVPEKMSPISILYKDENKNVVLKYHYNMTVESXAX

SEQ ID NO: 67369 - protein, 40 aa, Artificial Sequence
  GFR-binding peptide
  MOD_RES (2), (3), (37), (39): Xaa is C or S
  MOD_RES (17), (18), (19), (20), (21): Xaa is A or G
  MOD_RES (22), (23), (24), (25): Xaa is A or G or is absent
PXXTPTKMSATSMLYYXXXXXXXXXLRKHRGMVVDRXGXS

SEQ ID NO: 67370 - protein, 34 aa, Artificial Sequence
  GFR-binding peptide
  MOD_RES (1), (2): Xaa is C or S
  MOD_RES (16), (17), (18), (19), (20): Xaa is A or G
  MOD_RES (21), (22), (23), (24): Xaa is A or G or is absent
XXVPEKMNAISILYFXXXXXXXXXLKKYRNMTVE

SEQ ID NO: 67371 - protein, 32 aa, Artificial Sequence
  GFR-binding peptide
  MOD_RES (31), (31): Xaa is C or S
VSQDLSPINILYFIGKTPKIYGKIPMIVKSXK

SEQ ID NO: 67372 - protein, 35 aa, Artificial Sequence; identical to SEQ ID NO: 8482
  GFR-binding peptide
  MOD_RES (4), (4): Xaa is C or S

SEQ ID NO: 67373 - protein, 37 aa, Artificial Sequence; identical to SEQ ID NO: 32939
  GFR-binding peptide
  MOD_RES (4), (5): Xaa is C or S
  MOD_RES (19), (20), (21), (22), (23): Xaa is A or G
  MOD_RES (24), (25), (26), (27): Xaa is A or G or is absent

SEQ ID NO: 67374 - protein, 36 aa, Artificial Sequence; identical to SEQ ID NO: 8483
  GFR-binding peptide
  MOD_RES (33), (35): Xaa is C or S

SEQ ID NO: 67375 - protein, 41 aa, Artificial Sequence; identical to SEQ ID NO: 8485
  GFR-binding peptide
  MOD_RES (3), (4), (38), (40): Xaa is C or S
  MOD_RES (18), (19), (20), (21), (22): Xaa is A or G
  MOD_RES (23), (24), (25), (26): Xaa is A or G or is absent

SEQ ID NO: 67376 - protein, 32 aa, Artificial Sequence; identical to SEQ ID NO: 29806
  GFR-binding peptide
  MOD_RES (1), (1): Xaa is C or S

SEQ ID NO: 67377 - protein, 36 aa, Artificial Sequence; identical to SEQ ID NO: 8489
  GFR-binding peptide
  MOD_RES (3), (3): Xaa is C or S
  MOD_RES (17), (18), (19), (20), (21): Xaa is A or G
  MOD_RES (22), (23), (24), (25): Xaa is A or G or is absent

SEQ ID NO: 67378 - protein, 35 aa, Artificial Sequence; identical to SEQ ID NO: 8490
  GFR-binding peptide
  MOD_RES (1), (35): Xaa is C or S
  MOD_RES (15), (16), (17), (18), (19): Xaa is A or G
  MOD_RES (20), (21), (22), (23): Xaa is A or G or is absent

SEQ ID NO: 67379 - protein, 36 aa, Artificial Sequence; identical to SEQ ID NO: 8492
  GFR-binding peptide
  MOD_RES (5), (6): Xaa is C or S

SEQ ID NO: 67380 - protein, 35 aa, Artificial Sequence
  GFR-binding peptide
  MOD_RES (3), (4), (35): Xaa is C or S
STXXAPVKTSPISMLYKDNGRVLLLKYHYMIVEEX

SEQ ID NO: 67381 - protein, 34 aa, Artificial Sequence; identical to SEQ ID NO: 15792
  GFR-binding peptide
  MOD_RES (3), (4): Xaa is C or S

SEQ ID NO: 67382 - protein, 42 aa, Artificial Sequence; identical to SEQ ID NO: 8493
  GFR-binding peptide
  MOD_RES (6), (7), (39), (41): Xaa is C or S

SEQ ID NO: 67383 - protein, 42 aa, Artificial Sequence; identical to SEQ ID NO: 29811
  GFR-binding peptide
  MOD_RES (6), (7), (41): Xaa is C or S
  MOD_RES (21), (22), (23), (24), (25): Xaa is A or G
  MOD_RES (26), (27), (28), (29): Xaa is A or G or is absent

SEQ ID NO: 67384 - protein, 38 aa, Artificial Sequence; identical to SEQ ID NO: 8495
  GFR-binding peptide
  MOD_RES (5), (6), (37): Xaa is C or S

SEQ ID NO: 67385 - protein, 40 aa, Artificial Sequence
  GFR-binding peptide
  MOD_RES (4), (5), (39): Xaa is C or S
  MOD_RES (19), (20), (21), (22), (23): Xaa is A or G
  MOD_RES (24), (25), (26), (27): Xaa is A or G or is absent
PASXXVPARLSATSILYYXXXXXXXXXLRKHRDMVVEAXG

SEQ ID NO: 67386 - protein, 35 aa, Artificial Sequence; identical to SEQ ID NO: 8498
  GFR-binding peptide
  MOD_RES (5), (5): Xaa is C or S

SEQ ID NO: 67387 - protein, 33 aa, Artificial Sequence
  GFR-binding peptide
  MOD_RES (2), (3): Xaa is C or S
TXXAPVKTEPISMLYLDNGRVLLKFKYEMIVEE

SEQ ID NO: 67388 - protein, 39 aa, Artificial Sequence
  GFR-binding peptide
  MOD_RES (2), (3), (37), (39): Xaa is C or S
  MOD_RES (17), (18), (19), (20), (21): Xaa is A or G
  MOD_RES (22), (23), (24), (25): Xaa is A or G or is absent
PXXTPTKMSPISMLYKXXXXXXXXXLKYHYGMVVDRXGX

SEQ ID NO: 67389 - protein, 34 aa, Artificial Sequence; identical to SEQ ID NO: 32948
  GFR-binding peptide
  MOD_RES (1), (1): Xaa is C or S
  MOD_RES (15), (16), (17), (18), (19): Xaa is A or G
  MOD_RES (20), (21), (22), (23): Xaa is A or G or is absent

SEQ ID NO: 67390 - protein, 33 aa, Artificial Sequence; identical to SEQ ID NO: 8501
  GFR-binding peptide
  MOD_RES (1), (1): Xaa is C or S
  MOD_RES (15), (16), (17), (18), (19): Xaa is A or G
  MOD_RES (20), (21), (22), (23): Xaa is A or G or is absent

SEQ ID NO: 67391 - protein, 37 aa, Artificial Sequence; identical to SEQ ID NO: 8504
  GFR-binding peptide
  MOD_RES (1), (2), (35), (37): Xaa is C or S
  MOD_RES (16), (17), (18), (19), (20): Xaa is A or G
  MOD_RES (21), (22), (23), (24): Xaa is A or G or is absent

SEQ ID NO: 67392 - protein, 39 aa, Artificial Sequence; identical to SEQ ID NO: 32953
  GFR-binding peptide
  MOD_RES (5), (6): Xaa is C or S
  MOD_RES (20), (21), (22), (23), (24): Xaa is A or G
  MOD_RES (25), (26), (27), (28): Xaa is A or G or is absent

SEQ ID NO: 67393 - protein, 40 aa, Artificial Sequence; identical to SEQ ID NO: 8506
  GFR-binding peptide
  MOD_RES (1), (2), (37), (39): Xaa is C or S
  MOD_RES (16), (17), (18), (19), (20): Xaa is A or G
  MOD_RES (21), (22), (23), (24): Xaa is A or G or is absent

SEQ ID NO: 67394 - protein, 39 aa, Artificial Sequence; identical to SEQ ID NO: 8507
  GFR-binding peptide
  MOD_RES (2), (3), (37), (39): Xaa is C or S
  MOD_RES (17), (18), (19), (20), (21): Xaa is A or G
  MOD_RES (22), (23), (24), (25): Xaa is A or G or is absent

SEQ ID NO: 67395 - protein, 41 aa, Artificial Sequence; identical to SEQ ID NO: 8510
  GFR-binding peptide
  MOD_RES (5), (6), (40): Xaa is C or S
  MOD_RES (20), (21), (22), (23), (24): Xaa is A or G
  MOD_RES (25), (26), (27), (28): Xaa is A or G or is absent

SEQ ID NO: 67396 - protein, 39 aa, Artificial Sequence; identical to SEQ ID NO: 8511
  GFR-binding peptide
  MOD_RES (4), (5), (36), (38): Xaa is C or S

SEQ ID NO: 67397 - protein, 39 aa, Artificial Sequence; identical to SEQ ID NO: 29828
  GFR-binding peptide
  MOD_RES (3), (4), (38): Xaa is C or S
  MOD_RES (18), (19), (20), (21), (22): Xaa is A or G
  MOD_RES (23), (24), (25), (26): Xaa is A or G or is absent

SEQ ID NO: 67398 - protein, 33 aa, Artificial Sequence; identical to SEQ ID NO: 8512
  GFR-binding peptide
  MOD_RES (31), (33): Xaa is C or S

SEQ ID NO: 67399 - protein, 37 aa, Artificial Sequence; identical to SEQ ID NO: 8513
  GFR-binding peptide
  MOD_RES (2), (3), (35), (37): Xaa is C or S

SEQ ID NO: 67400 - protein, 37 aa, Artificial Sequence; identical to SEQ ID NO: 29830
  GFR-binding peptide
  MOD_RES (3), (4), (37): Xaa is C or S
  MOD_RES (18), (19), (20), (21), (22): Xaa is A or G
  MOD_RES (23), (24), (25), (26): Xaa is A or G or is absent

SEQ ID NO: 67401 - protein, 37 aa, Artificial Sequence; identical to SEQ ID NO: 32965
  GFR-binding peptide
  MOD_RES (2), (3), (35), (37): Xaa is C or S

SEQ ID NO: 67402 - protein, 36 aa, Artificial Sequence
  GFR-binding peptide
  MOD_RES (3), (4): Xaa is C or S
  MOD_RES (18), (19), (20), (21), (22): Xaa is A or G
  MOD_RES (23), (24), (25), (26): Xaa is A or G or is absent
ASXXVPARLSATSILYYXXXXXXXXXLRKHRDMVVE

SEQ ID NO: 67403 - protein, 32 aa, Artificial Sequence; identical to SEQ ID NO: 8514
  GFR-binding peptide
  MOD_RES (32), (32): Xaa is C or S

SEQ ID NO: 67404 - protein, 40 aa, Artificial Sequence; identical to SEQ ID NO: 29835
  GFR-binding peptide
  MOD_RES (4), (5), (39): Xaa is C or S
  MOD_RES (19), (20), (21), (22), (23): Xaa is A or G
  MOD_RES (24), (25), (26), (27): Xaa is A or G or is absent

SEQ ID NO: 67405 - protein, 40 aa, Artificial Sequence; identical to SEQ ID NO: 8515
  GFR-binding peptide
  MOD_RES (3), (4), (39): Xaa is C or S
  MOD_RES (18), (19), (20), (21), (22): Xaa is A or G
  MOD_RES (23), (24), (25), (26): Xaa is A or G or is absent

SEQ ID NO: 67406 - protein, 33 aa, Artificial Sequence; identical to SEQ ID NO: 8516
  GFR-binding peptide
  MOD_RES (14), (15), (16), (17), (18): Xaa is A or G
  MOD_RES (19), (20), (21), (22): Xaa is A or G or is absent

SEQ ID NO: 67407 - protein, 38 aa, Artificial Sequence; identical to SEQ ID NO: 32969
  GFR-binding peptide
  MOD_RES (2), (3), (35), (37): Xaa is C or S

SEQ ID NO: 67408 - protein, 41 aa, Artificial Sequence; identical to SEQ ID NO: 29838
  GFR-binding peptide
  MOD_RES (6), (7), (39), (41): Xaa is C or S

SEQ ID NO: 67409 - protein, 31 aa, Artificial Sequence; identical to SEQ ID NO: 8519
  GFR-binding peptide
  MOD_RES (1), (1): Xaa is C or S

SEQ ID NO: 67410 - protein, 37 aa, Artificial Sequence; identical to SEQ ID NO: 8521
  GFR-binding peptide
  MOD_RES (4), (5), (37): Xaa is C or S

SEQ ID NO: 67411 - protein, 37 aa, Artificial Sequence; identical to SEQ ID NO: 8524
  GFR-binding peptide
  MOD_RES (5), (6): Xaa is C or S

SEQ ID NO: 67412 - protein, 42 aa, Artificial Sequence; identical to SEQ ID NO: 32970
  GFR-binding peptide
  MOD_RES (4), (5), (39), (41): Xaa is C or S
  MOD_RES (19), (20), (21), (22), (23): Xaa is A or G
  MOD_RES (24), (25), (26), (27): Xaa is A or G or is absent

SEQ ID NO: 67413 - protein, 39 aa, Artificial Sequence; identical to SEQ ID NO: 8525
  GFR-binding peptide
  MOD_RES (4), (5), (38): Xaa is C or S

SEQ ID NO: 67414 - protein, 37 aa, Artificial Sequence; identical to SEQ ID NO: 8527
  GFR-binding peptide
  MOD_RES (6), (7): Xaa is C or S

SEQ ID NO: 67415 - protein, 36 aa, Artificial Sequence
  GFR-binding peptide
  MOD_RES (2), (3), (35): Xaa is C or S
TXXVPTRLSATSILYYDSANNVVLRKHRDMVVESXG

SEQ ID NO: 67416 - protein, 37 aa, Artificial Sequence
  GFR-binding peptide
  MOD_RES (3), (4), (36): Xaa is C or S
PTXXVPTRLEPISILYLDSANNVVKFKYEDMVVESXG

SEQ ID NO: 67417 - protein, 38 aa, Artificial Sequence
  GFR-binding peptide
  MOD_RES (4), (5), (38): Xaa is C or S
  MOD_RES (19), (20), (21), (22), (23): Xaa is A or G
  MOD_RES (24), (25), (26), (27): Xaa is A or G or is absent
AAPXXVPQALSPINILYFXXXXXXXXXYGKIPMIVRSX

SEQ ID NO: 67418 - protein, 39 aa, Artificial Sequence; identical to SEQ ID NO: 8528
  GFR-binding peptide
  MOD_RES (4), (5): Xaa is C or S
  MOD_RES (19), (20), (21), (22), (23): Xaa is A or G
  MOD_RES (24), (25), (26), (27): Xaa is A or G or is absent

SEQ ID NO: 67419 - protein, 39 aa, Artificial Sequence; identical to SEQ ID NO: 8531
  GFR-binding peptide
  MOD_RES (2), (3), (36), (38): Xaa is C or S
  MOD_RES (17), (18), (19), (20), (21): Xaa is A or G
  MOD_RES (22), (23), (24), (25): Xaa is A or G or is absent

SEQ ID NO: 67420 - protein, 38 aa, Artificial Sequence; identical to SEQ ID NO: 8534
  GFR-binding peptide
  MOD_RES (1), (2), (35), (37): Xaa is C or S
  MOD_RES (16), (17), (18), (19), (20): Xaa is A or G
  MOD_RES (21), (22), (23), (24): Xaa is A or G or is absent

SEQ ID NO: 67421 - protein, 42 aa, Artificial Sequence
  GFR-binding peptide
  MOD_RES (5), (6), (40), (42): Xaa is C or S
  MOD_RES (20), (21), (22), (23), (24): Xaa is A or G
  MOD_RES (25), (26), (27), (28): Xaa is A or G or is absent
TPPTXXVPTRLEPISILYLXXXXXXXXXKFKYEDMVVESXGX

SEQ ID NO: 67422 - protein, 34 aa, Artificial Sequence; identical to SEQ ID NO: 29850
  GFR-binding peptide
  MOD_RES (32), (34): Xaa is C or S

SEQ ID NO: 67423 - protein, 39 aa, Artificial Sequence
  GFR-binding peptide
  MOD_RES (6), (7), (39): Xaa is C or S
STPPTXXVPTRLSATSILYYDSANNVVLRKHRDMVVESX

SEQ ID NO: 67424 - protein, 37 aa, Artificial Sequence; identical to SEQ ID NO: 32981
  GFR-binding peptide
  MOD_RES (1), (35), (37): Xaa is C or S
  MOD_RES (15), (16), (17), (18), (19): Xaa is A or G
  MOD_RES (20), (21), (22), (23): Xaa is A or G or is absent

SEQ ID NO: 67425 - protein, 41 aa, Artificial Sequence
  GFR-binding peptide
  MOD_RES (5), (6), (40): Xaa is C or S
  MOD_RES (20), (21), (22), (23), (24): Xaa is A or G
  MOD_RES (25), (26), (27), (28): Xaa is A or G or is absent
IPEPXXVPEKMSATSILYYXXXXXXXXXLRKHRNMTVESXA

SEQ ID NO: 67426 - protein, 35 aa, Artificial Sequence; identical to SEQ ID NO: 32982
  GFR-binding peptide
  MOD_RES (4), (5): Xaa is C or S

SEQ ID NO: 67427 - protein, 36 aa, Artificial Sequence; identical to SEQ ID NO: 8539
  GFR-binding peptide
  MOD_RES (4), (5), (36): Xaa is C or S

SEQ ID NO: 67428 - protein, 34 aa, Artificial Sequence
  GFR-binding peptide
  MOD_RES (34), (34): Xaa is C or S
  MOD_RES (14), (15), (16), (17), (18): Xaa is A or G
  MOD_RES (19), (20), (21), (22): Xaa is A or G or is absent
TPTKMSPISMLYKXXXXXXXXXLKYHYGMVVDRX

SEQ ID NO: 67429 - protein, 38 aa, Artificial Sequence; identical to SEQ ID NO: 29853
  GFR-binding peptide
  MOD_RES (3), (37): Xaa is C or S
  MOD_RES (17), (18), (19), (20), (21): Xaa is A or G
  MOD_RES (22), (23), (24), (25): Xaa is A or G or is absent

SEQ ID NO: 67430 - protein, 36 aa, Artificial Sequence; identical to SEQ ID NO: 8544
  GFR-binding peptide
  MOD_RES (3), (4): Xaa is C or S
  MOD_RES (18), (19), (20), (21), (22): Xaa is A or G
  MOD_RES (23), (24), (25), (26): Xaa is A or G or is absent

SEQ ID NO: 67431 - protein, 43 aa, Artificial Sequence
  GFR-binding peptide
  MOD_RES (6), (7), (41), (43): Xaa is C or S
  MOD_RES (21), (22), (23), (24), (25): Xaa is A or G
  MOD_RES (26), (27), (28), (29): Xaa is A or G or is absent
GIPEPXXVPEKMEPISILYLXXXXXXXXXKFKYENMTVESXAX

SEQ ID NO: 67432 - protein, 39 aa, Artificial Sequence
  GFR-binding peptide
  MOD_RES (3), (4), (36), (38): Xaa is C or S
EPXXVPEKMNAISILYFDENKNVVLKKYRNMTVESXAXR

SEQ ID NO: 67433 - protein, 37 aa, Artificial Sequence; identical to SEQ ID NO: 32989
  GFR-binding peptide
  MOD_RES (4), (5): Xaa is C or S
  MOD_RES (19), (20), (21), (22), (23): Xaa is A or G
  MOD_RES (24), (25), (26), (27): Xaa is A or G or is absent

SEQ ID NO: 67434 - protein, 37 aa, Artificial Sequence; identical to SEQ ID NO: 32991
  GFR-binding peptide
  MOD_RES (5), (6): Xaa is C or S

SEQ ID NO: 67435 - protein, 35 aa, Artificial Sequence
  GFR-binding peptide
  MOD_RES (3), (4), (35): Xaa is C or S
STXXAPVKTSATSMLYYDNGRVLLLRKHRMIVEEX

SEQ ID NO: 67436 - protein, 36 aa, Artificial Sequence; identical to SEQ ID NO: 29861
  GFR-binding peptide
  MOD_RES (34), (36): Xaa is C or S
  MOD_RES (14), (15), (16), (17), (18): Xaa is A or G
  MOD_RES (19), (20), (21), (22): Xaa is A or G or is absent

SEQ ID NO: 67437 - protein, 39 aa, Artificial Sequence
  GFR-binding peptide
  MOD_RES (3), (4), (38): Xaa is C or S
  MOD_RES (18), (19), (20), (21), (22): Xaa is A or G
  MOD_RES (23), (24), (25), (26): Xaa is A or G or is absent
ASXXVPARLSATSILYYXXXXXXXXXLRKHRDMVVEAXG

SEQ ID NO: 67438 - protein, 32 aa, Artificial Sequence; identical to SEQ ID NO: 8549
  GFR-binding peptide
  MOD_RES (1), (1): Xaa is C or S

SEQ ID NO: 67439 - protein, 36 aa, Artificial Sequence; identical to SEQ ID NO: 8552
  GFR-binding peptide
  MOD_RES (4), (4): Xaa is C or S
  MOD_RES (18), (19), (20), (21), (22): Xaa is A or G
  MOD_RES (23), (24), (25), (26): Xaa is A or G or is absent

SEQ ID NO: 67440 - protein, 36 aa, Artificial Sequence; identical to SEQ ID NO: 8555
  GFR-binding peptide
  MOD_RES (3), (4): Xaa is C or S
  MOD_RES (18), (19), (20), (21), (22): Xaa is A or G
  MOD_RES (23), (24), (25), (26): Xaa is A or G or is absent

SEQ ID NO: 67441 - protein, 37 aa, Artificial Sequence; identical to SEQ ID NO: 57883
  GFR-binding peptide
  MOD_RES (3), (4), (35), (37): Xaa is C or S

SEQ ID NO: 67442 - protein, 41 aa, Artificial Sequence; identical to SEQ ID NO: 8556
  GFR-binding peptide
  MOD_RES (6), (7), (41): Xaa is C or S
  MOD_RES (21), (22), (23), (24), (25): Xaa is A or G
  MOD_RES (26), (27), (28), (29): Xaa is A or G or is absent

SEQ ID NO: 67443 - protein, 32 aa, Artificial Sequence; identical to SEQ ID NO: 8558
  GFR-binding peptide
  MOD_RES (1), (1): Xaa is C or S

SEQ ID NO: 67444 - protein, 40 aa, Artificial Sequence; identical to SEQ ID NO: 57889
  GFR-binding peptide
  MOD_RES (3), (4), (37), (39): Xaa is C or S
  MOD_RES (18), (19), (20), (21), (22): Xaa is A or G
  MOD_RES (23), (24), (25), (26): Xaa is A or G or is absent

SEQ ID NO: 67445 - protein, 38 aa, Artificial Sequence; identical to SEQ ID NO: 8559
  GFR-binding peptide
  MOD_RES (2), (3), (37): Xaa is C or S
  MOD_RES (17), (18), (19), (20), (21): Xaa is A or G
  MOD_RES (22), (23), (24), (25): Xaa is A or G or is absent

SEQ ID NO: 67446 - protein, 36 aa, Artificial Sequence
  GFR-binding peptide
  MOD_RES (34), (36): Xaa is C or S
  MOD_RES (14), (15), (16), (17), (18): Xaa is A or G
  MOD_RES (19), (20), (21), (22): Xaa is A or G or is absent
VPTRLSPISILYKXXXXXXXXXLKYHYDMVVESXGX

SEQ ID NO: 67447 - protein, 39 aa, Artificial Sequence; identical to SEQ ID NO: 8562
  GFR-binding peptide
  MOD_RES (4), (5), (39): Xaa is C or S
  MOD_RES (19), (20), (21), (22), (23): Xaa is A or G
  MOD_RES (24), (25), (26), (27): Xaa is A or G or is absent

SEQ ID NO: 67448 - protein, 37 aa, Artificial Sequence; identical to SEQ ID NO: 8563
  GFR-binding peptide
  MOD_RES (34), (36): Xaa is C or S
  MOD_RES (14), (15), (16), (17), (18): Xaa is A or G
  MOD_RES (19), (20), (21), (22): Xaa is A or G or is absent

SEQ ID NO: 67449 - protein, 40 aa, Artificial Sequence; identical to SEQ ID NO: 29875
  GFR-binding peptide
  MOD_RES (5), (6), (40): Xaa is C or S
  MOD_RES (20), (21), (22), (23), (24): Xaa is A or G
  MOD_RES (25), (26), (27), (28): Xaa is A or G or is absent

SEQ ID NO: 67450 - protein, 40 aa, Artificial Sequence
  GFR-binding peptide
  MOD_RES (6), (7), (39): Xaa is C or S
GIPEPXXVPEKMSATSILYYDENKNVVLRKHRNMTVESXA

SEQ ID NO: 67451 - protein, 40 aa, Artificial Sequence; identical to SEQ ID NO: 8566
  GFR-binding peptide
  MOD_RES (6), (7), (39): Xaa is C or S

SEQ ID NO: 67452 - protein, 30 aa, Artificial Sequence; identical to SEQ ID NO: 29879
  GFR-binding peptide

SEQ ID NO: 67453 - protein, 36 aa, Artificial Sequence
  GFR-binding peptide
  MOD_RES (3), (4), (36): Xaa is C or S
GPXXTPTKMSATSMLYYNDKQQIILRKHRGMVVDRX

SEQ ID NO: 67454 - protein, 31 aa, Artificial Sequence; identical to SEQ ID NO: 29880
  GFR-binding peptide

SEQ ID NO: 67455 - protein, 40 aa, Artificial Sequence
  GFR-binding peptide
  MOD_RES (6), (7): Xaa is C or S
  MOD_RES (21), (22), (23), (24), (25): Xaa is A or G
  MOD_RES (26), (27), (28), (29): Xaa is A or G or is absent
GSAGPXXTPTKMEPISMLYLXXXXXXXXXKFKYEGMVVDR

SEQ ID NO: 67456 - protein, 39 aa, Artificial Sequence; identical to SEQ ID NO: 33005
  GFR-binding peptide
  MOD_RES (6), (6): Xaa is C or S
  MOD_RES (20), (21), (22), (23), (24): Xaa is A or G
  MOD_RES (25), (26), (27), (28): Xaa is A or G or is absent

SEQ ID NO: 67457 - protein, 35 aa, Artificial Sequence; identical to SEQ ID NO: 29882
  GFR-binding peptide
  MOD_RES (32), (34): Xaa is C or S

SEQ ID NO: 67458 - protein, 41 aa, Artificial Sequence; identical to SEQ ID NO: 33009
  GFR-binding peptide
  MOD_RES (3), (4), (38), (40): Xaa is C or S
  MOD_RES (18), (19), (20), (21), (22): Xaa is A or G
  MOD_RES (23), (24), (25), (26): Xaa is A or G or is absent

SEQ ID NO: 67459 - protein, 37 aa, Artificial Sequence
  GFR-binding peptide
  MOD_RES (1), (2), (36): Xaa is C or S
  MOD_RES (16), (17), (18), (19), (20): Xaa is A or G
  MOD_RES (21), (22), (23), (24): Xaa is A or G or is absent
XXVPEKMSATSILYYXXXXXXXXXLRKHRNMTVESXA

SEQ ID NO: 67460 - protein, 34 aa, Artificial Sequence; identical to SEQ ID NO: 8568
  GFR-binding peptide
  MOD_RES (3), (4): Xaa is C or S

SEQ ID NO: 67461 - protein, 33 aa, Artificial Sequence; identical to SEQ ID NO: 29886
  GFR-binding peptide
  MOD_RES (1), (1): Xaa is C or S
  MOD_RES (15), (16), (17), (18), (19): Xaa is A or G
  MOD_RES (20), (21), (22), (23): Xaa is A or G or is absent

SEQ ID NO: 67462 - protein, 35 aa, Artificial Sequence; identical to SEQ ID NO: 8569
  GFR-binding peptide
  MOD_RES (2), (3), (34): Xaa is C or S

SEQ ID NO: 67463 - protein, 44 aa, Artificial Sequence; identical to SEQ ID NO: 29889
  GFR-binding peptide
  MOD_RES (6), (7), (41), (43): Xaa is C or S
  MOD_RES (21), (22), (23), (24), (25): Xaa is A or G
  MOD_RES (26), (27), (28), (29): Xaa is A or G or is absent

SEQ ID NO: 67464 - protein, 35 aa, Artificial Sequence; identical to SEQ ID NO: 8570
  GFR-binding peptide
  MOD_RES (33), (35): Xaa is C or S
  MOD_RES (14), (15), (16), (17), (18): Xaa is A or G
  MOD_RES (19), (20), (21), (22): Xaa is A or G or is absent

SEQ ID NO: 67465 - protein, 38 aa, Artificial Sequence
  GFR-binding peptide
  MOD_RES (1), (35), (37): Xaa is C or S
  MOD_RES (15), (16), (17), (18), (19): Xaa is A or G
  MOD_RES (20), (21), (22), (23): Xaa is A or G or is absent
XVPTRLSPISILYKXXXXXXXXXLKYHYDMVVESXGXR

SEQ ID NO: 67466 - protein, 38 aa, Artificial Sequence; identical to SEQ ID NO: 29892
  GFR-binding peptide
  MOD_RES (2), (3), (37): Xaa is C or S
  MOD_RES (17), (18), (19), (20), (21): Xaa is A or G
  MOD_RES (22), (23), (24), (25): Xaa is A or G or is absent

SEQ ID NO: 67467 - protein, 39 aa, Artificial Sequence
  GFR-binding peptide
  MOD_RES (2), (3), (37), (39): Xaa is C or S
  MOD_RES (17), (18), (19), (20), (21): Xaa is A or G
  MOD_RES (22), (23), (24), (25): Xaa is A or G or is absent
SXXVPARLSATSILYYXXXXXXXXXLRKHRDMVVEAXGX

SEQ ID NO: 67468 - protein, 44 aa, Artificial Sequence; identical to SEQ ID NO: 8577
  GFR-binding peptide
  MOD_RES (5), (6), (41), (43): Xaa is C or S
  MOD_RES (20), (21), (22), (23), (24): Xaa is A or G
  MOD_RES (25), (26), (27), (28): Xaa is A or G or is absent

SEQ ID NO: 67469 - protein, 39 aa, Artificial Sequence; identical to SEQ ID NO: 29897
  GFR-binding peptide
  MOD_RES (3), (37), (39): Xaa is C or S
  MOD_RES (17), (18), (19), (20), (21): Xaa is A or G
  MOD_RES (22), (23), (24), (25): Xaa is A or G or is absent

SEQ ID NO: 67470 - protein, 39 aa, Artificial Sequence; identical to SEQ ID NO: 8580
  GFR-binding peptide
  MOD_RES (3), (4), (36), (38): Xaa is C or S

SEQ ID NO: 67471 - protein, 39 aa, Artificial Sequence
  GFR-binding peptide
  MOD_RES (3), (4), (36), (38): Xaa is C or S
PTXXVPTRLEPISILYLDSANNVVKFKYEDMVVESXGXR

SEQ ID NO: 67472 - protein, 34 aa, Artificial Sequence; identical to SEQ ID NO: 29903
  GFR-binding peptide
  MOD_RES (1), (1): Xaa is C or S
  MOD_RES (15), (16), (17), (18), (19): Xaa is A or G
  MOD_RES (20), (21), (22), (23): Xaa is A or G or is absent

SEQ ID NO: 67473 - protein, 35 aa, Artificial Sequence; identical to SEQ ID NO: 8583
  GFR-binding peptide
  MOD_RES (1), (35): Xaa is C or S
  MOD_RES (15), (16), (17), (18), (19): Xaa is A or G
  MOD_RES (20), (21), (22), (23): Xaa is A or G or is absent

SEQ ID NO: 67474 - protein, 37 aa, Artificial Sequence; identical to SEQ ID NO: 33041
  GFR-binding peptide
  MOD_RES (1), (2), (34), (36): Xaa is C or S

SEQ ID NO: 67475 - protein, 39 aa, Artificial Sequence; identical to SEQ ID NO: 29906
  GFR-binding peptide
  MOD_RES (2), (36), (38): Xaa is C or S
  MOD_RES (16), (17), (18), (19), (20): Xaa is A or G
  MOD_RES (21), (22), (23), (24): Xaa is A or G or is absent

SEQ ID NO: 67476 - protein, 33 aa, Artificial Sequence; identical to SEQ ID NO: 29907
  GFR-binding peptide
  MOD_RES (1), (2): Xaa is C or S

SEQ ID NO: 67477 - protein, 37 aa, Artificial Sequence; identical to SEQ ID NO: 33042
  GFR-binding peptide
  MOD_RES (34), (36): Xaa is C or S
  MOD_RES (14), (15), (16), (17), (18): Xaa is A or G
  MOD_RES (19), (20), (21), (22): Xaa is A or G or is absent

SEQ ID NO: 67478 - protein, 37 aa, Artificial Sequence; identical to SEQ ID NO: 8587
  GFR-binding peptide
  MOD_RES (6), (7): Xaa is C or S

SEQ ID NO: 67479 - protein, 36 aa, Artificial Sequence; identical to SEQ ID NO: 29912
  GFR-binding peptide
  MOD_RES (5), (6): Xaa is C or S

SEQ ID NO: 67480 - protein, 31 aa, Artificial Sequence
  GFR-binding peptide
TPTKMEPISMLYLNDKQQIIKFKYEGMVVDR

SEQ ID NO: 67481 - protein, 38 aa, Artificial Sequence
  GFR-binding peptide
  MOD_RES (4), (5), (36), (38): Xaa is C or S
ASPXXVPQDLSPINILYFVGRTPKVYGKIPMVVKSXKX

SEQ ID NO: 67482 - protein, 36 aa, Artificial Sequence
  GFR-binding peptide
  MOD_RES (2), (3), (35): Xaa is C or S
PXXVPEKMSPINILYFDENKNVVYGKIPNMTVESXA

SEQ ID NO: 67483 - protein, 33 aa, Artificial Sequence
  GFR-binding peptide
  MOD_RES (2), (3): Xaa is C or S
PXXTPTKMSATSMLYYNDKQQIILRKHRGMVVD

SEQ ID NO: 67484 - protein, 38 aa, Artificial Sequence; identical to SEQ ID NO: 29915
  GFR-binding peptide
  MOD_RES (1), (2), (36), (38): Xaa is C or S
  MOD_RES (16), (17), (18), (19), (20): Xaa is A or G
  MOD_RES (21), (22), (23), (24): Xaa is A or G or is absent

SEQ ID NO: 67485 - protein, 41 aa, Artificial Sequence; identical to SEQ ID NO: 29916
  GFR-binding peptide
  MOD_RES (3), (4), (38), (40): Xaa is C or S
  MOD_RES (18), (19), (20), (21), (22): Xaa is A or G
  MOD_RES (23), (24), (25), (26): Xaa is A or G or is absent

SEQ ID NO: 67486 - protein, 36 aa, Artificial Sequence; identical to SEQ ID NO: 33050
  GFR-binding peptide
  MOD_RES (1), (2), (34), (36): Xaa is C or S

SEQ ID NO: 67487 - protein, 34 aa, Artificial Sequence; identical to SEQ ID NO: 8591
  GFR-binding peptide
  MOD_RES (1), (2), (34): Xaa is C or S

SEQ ID NO: 67488 - protein, 37 aa, Artificial Sequence; identical to SEQ ID NO: 29922
  GFR-binding peptide
  MOD_RES (4), (5), (37): Xaa is C or S

SEQ ID NO: 67489 - protein, 34 aa, Artificial Sequence; identical to SEQ ID NO: 8595
  GFR-binding peptide
  MOD_RES (2), (3): Xaa is C or S

SEQ ID NO: 67490 - protein, 34 aa, Artificial Sequence; identical to SEQ ID NO: 8596
  GFR-binding peptide
  MOD_RES (32), (34): Xaa is C or S

SEQ ID NO: 67491 - protein, 35 aa, Artificial Sequence
  GFR-binding peptide
  MOD_RES (32), (34): Xaa is C or S
VPEKMSPINILYFDENKNVVYGKIPNMTVESXAXR

SEQ ID NO: 67492 - protein, 38 aa, Artificial Sequence; identical to SEQ ID NO: 8598
  GFR-binding peptide
  MOD_RES (7), (7): Xaa is C or S

SEQ ID NO: 67493 - protein, 35 aa, Artificial Sequence
  GFR-binding peptide
  MOD_RES (1), (2), (35): Xaa is C or S
  MOD_RES (16), (17), (18), (19), (20): Xaa is A or G
  MOD_RES (21), (22), (23), (24): Xaa is A or G or is absent
XXAPVKTEPISMLYLXXXXXXXXXKFKYEMIVEEX

SEQ ID NO: 67494 - protein, 35 aa, Artificial Sequence; identical to SEQ ID NO: 29928
  GFR-binding peptide
  MOD_RES (5), (5): Xaa is C or S

SEQ ID NO: 67495 - protein, 37 aa, Artificial Sequence; identical to SEQ ID NO: 29929
  GFR-binding peptide
  MOD_RES (3), (4), (36): Xaa is C or S

SEQ ID NO: 67496 - protein, 39 aa, Artificial Sequence
  GFR-binding peptide
  MOD_RES (6), (7): Xaa is C or S
  MOD_RES (21), (22), (23), (24), (25): Xaa is A or G
  MOD_RES (26), (27), (28), (29): Xaa is A or G or is absent
RVPSTXXAPVKTSATSMLYYXXXXXXXXXLRKHRMIVEE

SEQ ID NO: 67497 - protein, 36 aa, Artificial Sequence
  GFR-binding peptide
  MOD_RES (1), (35): Xaa is C or S
  MOD_RES (15), (16), (17), (18), (19): Xaa is A or G
  MOD_RES (20), (21), (22), (23): Xaa is A or G or is absent
XVPEKMEPISILYLXXXXXXXXXKFKYENMTVESXA

SEQ ID NO: 67498 - protein, 32 aa, Artificial Sequence; identical to SEQ ID NO: 29936
  GFR-binding peptide
  MOD_RES (32), (32): Xaa is C or S

SEQ ID NO: 67499 - protein, 40 aa, Artificial Sequence
  GFR-binding peptide
  MOD_RES (6), (7), (39): Xaa is C or S
STPPTXXVPTRLSPISILYKDSANNVVLKYHYDMVVESXG

SEQ ID NO: 67500 - protein, 41 aa, Artificial Sequence; identical to SEQ ID NO: 29937
  GFR-binding peptide
  MOD_RES (3), (4), (38), (40): Xaa is C or S
  MOD_RES (18), (19), (20), (21), (22): Xaa is A or G
  MOD_RES (23), (24), (25), (26): Xaa is A or G or is absent

SEQ ID NO: 67501 - protein, 35 aa, Artificial Sequence; identical to SEQ ID NO: 33061
  GFR-binding peptide
  MOD_RES (32), (34): Xaa is C or S

SEQ ID NO: 67502 - protein, 41 aa, Artificial Sequence
  GFR-binding peptide
  MOD_RES (5), (6), (39), (41): Xaa is C or S
  MOD_RES (20), (21), (22), (23), (24): Xaa is A or G
  MOD_RES (25), (26), (27), (28): Xaa is A or G or is absent
VPSTXXAPVKTSATSMLYYXXXXXXXXXLRKHRMIVEEXGX

SEQ ID NO: 67503 - protein, 33 aa, Artificial Sequence; identical to SEQ ID NO: 29938
  GFR-binding peptide
  MOD_RES (33), (33): Xaa is C or S
  MOD_RES (14), (15), (16), (17), (18): Xaa is A or G
  MOD_RES (19), (20), (21), (22): Xaa is A or G or is absent

SEQ ID NO: 67504 - protein, 32 aa, Artificial Sequence; identical to SEQ ID NO: 33062
  GFR-binding peptide
  MOD_RES (1), (32): Xaa is C or S

SEQ ID NO: 67505 - protein, 44 aa, Artificial Sequence; identical to SEQ ID NO: 29939
  GFR-binding peptide
  MOD_RES (6), (7), (41), (43): Xaa is C or S
  MOD_RES (21), (22), (23), (24), (25): Xaa is A or G
  MOD_RES (26), (27), (28), (29): Xaa is A or G or is absent

SEQ ID NO: 67506 - protein, 33 aa, Artificial Sequence; identical to SEQ ID NO: 8606
  GFR-binding peptide
  MOD_RES (1), (33): Xaa is C or S

SEQ ID NO: 67507 - protein, 37 aa, Artificial Sequence; identical to SEQ ID NO: 29940
  GFR-binding peptide
  MOD_RES (2), (3), (36): Xaa is C or S
  MOD_RES (17), (18), (19), (20), (21): Xaa is A or G
  MOD_RES (22), (23), (24), (25): Xaa is A or G or is absent

SEQ ID NO: 67508 - protein, 39 aa, Artificial Sequence; identical to SEQ ID NO: 29941
  GFR-binding peptide
  MOD_RES (3), (4), (38): Xaa is C or S
  MOD_RES (18), (19), (20), (21), (22): Xaa is A or G
  MOD_RES (23), (24), (25), (26): Xaa is A or G or is absent

SEQ ID NO: 67509 - protein, 35 aa, Artificial Sequence; identical to SEQ ID NO: 29942
  GFR-binding peptide
  MOD_RES (1), (2): Xaa is C or S
  MOD_RES (16), (17), (18), (19), (20): Xaa is A or G
  MOD_RES (21), (22), (23), (24): Xaa is A or G or is absent

SEQ ID NO: 67510 - protein, 37 aa, Artificial Sequence
  GFR-binding peptide
  MOD_RES (2), (3), (34), (36): Xaa is C or S
PXXVPQDLSPINILYFVGRTPKVYGKIPMVVKSXKXS

SEQ ID NO: 67511 - protein, 37 aa, Artificial Sequence
  GFR-binding peptide
  MOD_RES (5), (6), (37): Xaa is C or S
VPSTXXAPVKTSATSMLYYDNGRVLLLRKHRMIVEEX

SEQ ID NO: 67512 - protein, 41 aa, Artificial Sequence; identical to SEQ ID NO: 8611
  GFR-binding peptide
  MOD_RES (6), (7), (38), (40): Xaa is C or S

SEQ ID NO: 67513 - protein, 39 aa, Artificial Sequence; identical to SEQ ID NO: 8615
  GFR-binding peptide
  MOD_RES (1), (2), (36), (38): Xaa is C or S
  MOD_RES (16), (17), (18), (19), (20): Xaa is A or G
  MOD_RES (21), (22), (23), (24): Xaa is A or G or is absent

SEQ ID NO: 67514 - protein, 35 aa, Artificial Sequence; identical to SEQ ID NO: 8618
  GFR-binding peptide
  MOD_RES (1), (35): Xaa is C or S
  MOD_RES (15), (16), (17), (18), (19): Xaa is A or G
  MOD_RES (20), (21), (22), (23): Xaa is A or G or is absent

SEQ ID NO: 67515 - protein, 33 aa, Artificial Sequence
  GFR-binding peptide
  MOD_RES (1), (2), (33): Xaa is C or S
XXVPQDLSPINILYFVGRTPKVYGKIPMVVKSX

SEQ ID NO: 67516 - protein, 36 aa, Artificial Sequence; identical to SEQ ID NO: 8620
  GFR-binding peptide
  MOD_RES (3), (4): Xaa is C or S
  MOD_RES (18), (19), (20), (21), (22): Xaa is A or G
  MOD_RES (23), (24), (25), (26): Xaa is A or G or is absent

SEQ ID NO: 67517 - protein, 40 aa, Artificial Sequence; identical to SEQ ID NO: 8622
  GFR-binding peptide
  MOD_RES (5), (6), (40): Xaa is C or S
  MOD_RES (20), (21), (22), (23), (24): Xaa is A or G
  MOD_RES (25), (26), (27), (28): Xaa is A or G or is absent

SEQ ID NO: 67518 - protein, 33 aa, Artificial Sequence; identical to SEQ ID NO: 8623
  GFR-binding peptide
  MOD_RES (1), (2): Xaa is C or S

SEQ ID NO: 67519 - protein, 45 aa, Artificial Sequence; identical to SEQ ID NO: 8625
  GFR-binding peptide
  MOD_RES (6), (7), (42), (44): Xaa is C or S
  MOD_RES (21), (22), (23), (24), (25): Xaa is A or G
  MOD_RES (26), (27), (28), (29): Xaa is A or G or is absent

SEQ ID NO: 67520 - protein, 33 aa, Artificial Sequence
  GFR-binding peptide
  MOD_RES (31), (33): Xaa is C or S
APVKTSATSMLYYDNGRVLLLRKHRMIVEEXGX

SEQ ID NO: 67521 - protein, 38 aa, Artificial Sequence; identical to SEQ ID NO: 33076
  GFR-binding peptide
  MOD_RES (6), (7): Xaa is C or S

SEQ ID NO: 67522 - protein, 36 aa, Artificial Sequence; identical to SEQ ID NO: 29960
  GFR-binding peptide
  MOD_RES (3), (4), (36): Xaa is C or S

SEQ ID NO: 67523 - protein, 38 aa, Artificial Sequence; identical to SEQ ID NO: 29961
  GFR-binding peptide
  MOD_RES (1), (35), (37): Xaa is C or S
  MOD_RES (15), (16), (17), (18), (19): Xaa is A or G
  MOD_RES (20), (21), (22), (23): Xaa is A or G or is absent

SEQ ID NO: 67524 - protein, 32 aa, Artificial Sequence; identical to SEQ ID NO: 29963
  GFR-binding peptide
  MOD_RES (32), (32): Xaa is C or S

SEQ ID NO: 67525 - protein, 34 aa, Artificial Sequence
  GFR-binding peptide
  MOD_RES (32), (34): Xaa is C or S
VPTRLSATSILYYDSANNVVLRKHRDMVVESXGX

SEQ ID NO: 67526 - protein, 32 aa, Artificial Sequence
  GFR-binding peptide
  MOD_RES (1), (2): Xaa is C or S
XXTPTKMSATSMLYYNDKQQIILRKHRGMVVD

SEQ ID NO: 67527 - protein, 39 aa, Artificial Sequence; identical to SEQ ID NO: 33092
  GFR-binding peptide
  MOD_RES (3), (4), (36), (38): Xaa is C or S

SEQ ID NO: 67528 - protein, 40 aa, Artificial Sequence
  GFR-binding peptide
  MOD_RES (5), (6), (39): Xaa is C or S
  MOD_RES (20), (21), (22), (23), (24): Xaa is A or G
  MOD_RES (25), (26), (27), (28): Xaa is A or G or is absent
VPSTXXAPVKTSPISMLYKXXXXXXXXXLKYHYMIVEEXG

SEQ ID NO: 67529 - protein, 41 aa, Artificial Sequence; identical to SEQ ID NO: 33094
  GFR-binding peptide
  MOD_RES (5), (6), (40): Xaa is C or S
  MOD_RES (20), (21), (22), (23), (24): Xaa is A or G
  MOD_RES (25), (26), (27), (28): Xaa is A or G or is absent

SEQ ID NO: 67530 - protein, 36 aa, Artificial Sequence; identical to SEQ ID NO: 8632
  GFR-binding peptide
  MOD_RES (2), (36): Xaa is C or S
  MOD_RES (16), (17), (18), (19), (20): Xaa is A or G
  MOD_RES (21), (22), (23), (24): Xaa is A or G or is absent

SEQ ID NO: 67531 - protein, 36 aa, Artificial Sequence; identical to SEQ ID NO: 33097
  GFR-binding peptide
  MOD_RES (1), (2), (36): Xaa is C or S
  MOD_RES (16), (17), (18), (19), (20): Xaa is A or G
  MOD_RES (21), (22), (23), (24): Xaa is A or G or is absent

SEQ ID NO: 67532 - protein, 36 aa, Artificial Sequence; identical to SEQ ID NO: 29974
  GFR-binding peptide
  MOD_RES (3), (4), (36): Xaa is C or S

SEQ ID NO: 67533 - protein, 35 aa, Artificial Sequence
  GFR-binding peptide
  MOD_RES (1), (2): Xaa is C or S
  MOD_RES (16), (17), (18), (19), (20): Xaa is A or G
  MOD_RES (21), (22), (23), (24): Xaa is A or G or is absent
XXVPTKLSATSILYYXXXXXXXXXLRKHRGMAVSE

SEQ ID NO: 67534 - protein, 34 aa, Artificial Sequence; identical to SEQ ID NO: 29975
  GFR-binding peptide
  MOD_RES (32), (34): Xaa is C or S

SEQ ID NO: 67535 - protein, 33 aa, Artificial Sequence; identical to SEQ ID NO: 29977
  GFR-binding peptide
  MOD_RES (1), (32): Xaa is C or S

SEQ ID NO: 67536 - protein, 42 aa, Artificial Sequence; identical to SEQ ID NO: 33108
  GFR-binding peptide
  MOD_RES (6), (7), (40), (42): Xaa is C or S

SEQ ID NO: 67537 - protein, 39 aa, Artificial Sequence; identical to SEQ ID NO: 57985
  GFR-binding peptide
  MOD_RES (6), (7): Xaa is C or S
  MOD_RES (21), (22), (23), (24), (25): Xaa is A or G
  MOD_RES (26), (27), (28), (29): Xaa is A or G or is absent

SEQ ID NO: 67538 - protein, 35 aa, Artificial Sequence; identical to SEQ ID NO: 29978
  GFR-binding peptide
  MOD_RES (4), (5): Xaa is C or S

SEQ ID NO: 67539 - protein, 40 aa, Artificial Sequence; identical to SEQ ID NO: 33111
  GFR-binding peptide
  MOD_RES (6), (7), (39): Xaa is C or S

SEQ ID NO: 67540 - protein, 38 aa, Artificial Sequence; identical to SEQ ID NO: 8644
  GFR-binding peptide
  MOD_RES (4), (36), (38): Xaa is C or S

SEQ ID NO: 67541 - protein, 39 aa, Artificial Sequence; identical to SEQ ID NO: 29983
  GFR-binding peptide
  MOD_RES (6), (7), (39): Xaa is C or S

SEQ ID NO: 67542 - protein, 39 aa, Artificial Sequence; identical to SEQ ID NO: 29985
  GFR-binding peptide
  MOD_RES (2), (3), (36), (38): Xaa is C or S

SEQ ID NO: 67543 - protein, 34 aa, Artificial Sequence; identical to SEQ ID NO: 8650
  GFR-binding peptide
  MOD_RES (31), (33): Xaa is C or S

SEQ ID NO: 67544 - protein, 34 aa, Artificial Sequence
  GFR-binding peptide
  MOD_RES (34), (34): Xaa is C or S
  MOD_RES (14), (15), (16), (17), (18): Xaa is A or G
  MOD_RES (19), (20), (21), (22): Xaa is A or G or is absent
VPTRLEPISILYLXXXXXXXXXKFKYEDMVVESX

SEQ ID NO: 67545 - protein, 33 aa, Artificial Sequence; identical to SEQ ID NO: 33131
  GFR-binding peptide
  MOD_RES (1), (1): Xaa is C or S
  MOD_RES (15), (16), (17), (18), (19): Xaa is A or G
  MOD_RES (20), (21), (22), (23): Xaa is A or G or is absent

SEQ ID NO: 67546 - protein, 40 aa, Artificial Sequence; identical to SEQ ID NO: 29998
  GFR-binding peptide
  MOD_RES (3), (4), (37), (39): Xaa is C or S
  MOD_RES (18), (19), (20), (21), (22): Xaa is A or G
  MOD_RES (23), (24), (25), (26): Xaa is A or G or is absent

SEQ ID NO: 67547 - protein, 39 aa, Artificial Sequence; identical to SEQ ID NO: 29999
  GFR-binding peptide
  MOD_RES (4), (5), (38): Xaa is C or S
  MOD_RES (19), (20), (21), (22), (23): Xaa is A or G
  MOD_RES (24), (25), (26), (27): Xaa is A or G or is absent

SEQ ID NO: 67548 - protein, 36 aa, Artificial Sequence; identical to SEQ ID NO: 8664
  GFR-binding peptide
  MOD_RES (1), (33), (35): Xaa is C or S

SEQ ID NO: 67549 - protein, 35 aa, Artificial Sequence; identical to SEQ ID NO: 8666
  GFR-binding peptide
  MOD_RES (34), (34): Xaa is C or S
  MOD_RES (14), (15), (16), (17), (18): Xaa is A or G
  MOD_RES (19), (20), (21), (22): Xaa is A or G or is absent

SEQ ID NO: 67550 - protein, 32 aa, Artificial Sequence; identical to SEQ ID NO: 8668
  GFR-binding peptide
  MOD_RES (14), (15), (16), (17), (18): Xaa is A or G
  MOD_RES (19), (20), (21), (22): Xaa is A or G or is absent

SEQ ID NO: 67551 - protein, 42 aa, Artificial Sequence
  GFR-binding peptide
  MOD_RES (4), (5), (39), (41): Xaa is C or S
  MOD_RES (19), (20), (21), (22), (23): Xaa is A or G
  MOD_RES (24), (25), (26), (27): Xaa is A or G or is absent
PEPXXVPEKMSPISILYKXXXXXXXXXLKYHYNMTVESXAXR

SEQ ID NO: 67552 - protein, 41 aa, Artificial Sequence; identical to SEQ ID NO: 33138
  GFR-binding peptide
  MOD_RES (4), (5), (39), (41): Xaa is C or S
  MOD_RES (19), (20), (21), (22), (23): Xaa is A or G
  MOD_RES (24), (25), (26), (27): Xaa is A or G or is absent

SEQ ID NO: 67553 - protein, 40 aa, Artificial Sequence; identical to SEQ ID NO: 33139
  GFR-binding peptide
  MOD_RES (5), (6): Xaa is C or S
  MOD_RES (20), (21), (22), (23), (24): Xaa is A or G
  MOD_RES (25), (26), (27), (28): Xaa is A or G or is absent

SEQ ID NO: 67554 - protein, 40 aa, Artificial Sequence; identical to SEQ ID NO: 8669
  GFR-binding peptide
  MOD_RES (3), (4), (37), (39): Xaa is C or S
  MOD_RES (18), (19), (20), (21), (22): Xaa is A or G
  MOD_RES (23), (24), (25), (26): Xaa is A or G or is absent

SEQ ID NO: 67555 - protein, 38 aa, Artificial Sequence
  GFR-binding peptide
  MOD_RES (4), (5), (37): Xaa is C or S
PEPXXVPEKMEPISILYLDENKNVVKFKYENMTVESXA

SEQ ID NO: 67556 - protein, 42 aa, Artificial Sequence
  GFR-binding peptide
  MOD_RES (6), (7), (41): Xaa is C or S
  MOD_RES (21), (22), (23), (24), (25): Xaa is A or G
  MOD_RES (26), (27), (28), (29): Xaa is A or G or is absent
GSAGPXXTPTKMSATSMLYYXXXXXXXXXLRKHRGMVVDRXG

SEQ ID NO: 67557 - protein, 40 aa, Artificial Sequence; identical to SEQ ID NO: 30008
  GFR-binding peptide
  MOD_RES (4), (5), (39): Xaa is C or S
  MOD_RES (19), (20), (21), (22), (23): Xaa is A or G
  MOD_RES (24), (25), (26), (27): Xaa is A or G or is absent

SEQ ID NO: 67558 - protein, 40 aa, Artificial Sequence; identical to SEQ ID NO: 8671
  GFR-binding peptide
  MOD_RES (7), (7): Xaa is C or S
  MOD_RES (21), (22), (23), (24), (25): Xaa is A or G
  MOD_RES (26), (27), (28), (29): Xaa is A or G or is absent

SEQ ID NO: 67559 - protein, 35 aa, Artificial Sequence; identical to SEQ ID NO: 30010
  GFR-binding peptide
  MOD_RES (2), (3): Xaa is C or S
  MOD_RES (17), (18), (19), (20), (21): Xaa is A or G
  MOD_RES (22), (23), (24), (25): Xaa is A or G or is absent

SEQ ID NO: 67560 - protein, 34 aa, Artificial Sequence; identical to SEQ ID NO: 30011
  GFR-binding peptide
  MOD_RES (34), (34): Xaa is C or S
  MOD_RES (14), (15), (16), (17), (18): Xaa is A or G
  MOD_RES (19), (20), (21), (22): Xaa is A or G or is absent

SEQ ID NO: 67561 - protein, 38 aa, Artificial Sequence
  GFR-binding peptide
  MOD_RES (1), (2), (36), (38): Xaa is C or S
  MOD_RES (16), (17), (18), (19), (20): Xaa is A or G
  MOD_RES (21), (22), (23), (24): Xaa is A or G or is absent
XXVPTRLSPISILYKXXXXXXXXXLKYHYDMVVESXGX

SEQ ID NO: 67562 - protein, 41 aa, Artificial Sequence
  GFR-binding peptide
  MOD_RES (5), (6), (40): Xaa is C or S
  MOD_RES (20), (21), (22), (23), (24): Xaa is A or G
  MOD_RES (25), (26), (27), (28): Xaa is A or G or is absent
TPPTXXVPTRLSATSILYYXXXXXXXXXLRKHRDMVVESXG

SEQ ID NO: 67563 - protein, 36 aa, Artificial Sequence; identical to SEQ ID NO: 33152
  GFR-binding peptide
  MOD_RES (1), (35): Xaa is C or S
  MOD_RES (15), (16), (17), (18), (19): Xaa is A or G
  MOD_RES (20), (21), (22), (23): Xaa is A or G or is absent

SEQ ID NO: 67564 - protein, 40 aa, Artificial Sequence; identical to SEQ ID NO: 33153
  GFR-binding peptide
  MOD_RES (2), (3), (37), (39): Xaa is C or S
  MOD_RES (17), (18), (19), (20), (21): Xaa is A or G
  MOD_RES (22), (23), (24), (25): Xaa is A or G or is absent

SEQ ID NO: 67565 - protein, 38 aa, Artificial Sequence; identical to SEQ ID NO: 8678
  GFR-binding peptide
  MOD_RES (5), (6): Xaa is C or S
  MOD_RES (20), (21), (22), (23), (24): Xaa is A or G
  MOD_RES (25), (26), (27), (28): Xaa is A or G or is absent

SEQ ID NO: 67566 - protein, 44 aa, Artificial Sequence; identical to SEQ ID NO: 8679
  GFR-binding peptide
  MOD_RES (6), (7), (41), (43): Xaa is C or S
  MOD_RES (21), (22), (23), (24), (25): Xaa is A or G
  MOD_RES (26), (27), (28), (29): Xaa is A or G or is absent

SEQ ID NO: 67567 - protein, 32 aa, Artificial Sequence; identical to SEQ ID NO: 30018
  GFR-binding peptide
  MOD_RES (14), (15), (16), (17), (18): Xaa is A or G
  MOD_RES (19), (20), (21), (22): Xaa is A or G or is absent

SEQ ID NO: 67568 - protein, 32 aa, Artificial Sequence
  GFR-binding peptide
  MOD_RES (32), (32): Xaa is C or S
VPARLSATSILYYDAANNVVLRKHRDMVVEAX

SEQ ID NO: 67569 - protein, 42 aa, Artificial Sequence; identical to SEQ ID NO: 30020
  GFR-binding peptide
  MOD_RES (6), (7), (42): Xaa is C or S
  MOD_RES (21), (22), (23), (24), (25): Xaa is A or G
  MOD_RES (26), (27), (28), (29): Xaa is A or G or is absent

SEQ ID NO: 67570 - protein, 38 aa, Artificial Sequence; identical to SEQ ID NO: 30021
  GFR-binding peptide
  MOD_RES (3), (4), (38): Xaa is C or S
  MOD_RES (18), (19), (20), (21), (22): Xaa is A or G
  MOD_RES (23), (24), (25), (26): Xaa is A or G or is absent

SEQ ID NO: 67571 - protein, 34 aa, Artificial Sequence; identical to SEQ ID NO: 30022
  GFR-binding peptide
  MOD_RES (1), (2): Xaa is C or S
  MOD_RES (16), (17), (18), (19), (20): Xaa is A or G
  MOD_RES (21), (22), (23), (24): Xaa is A or G or is absent

SEQ ID NO: 67572 - protein, 40 aa, Artificial Sequence; identical to SEQ ID NO: 33163
  GFR-binding peptide
  MOD_RES (6), (40): Xaa is C or S
  MOD_RES (20), (21), (22), (23), (24): Xaa is A or G
  MOD_RES (25), (26), (27), (28): Xaa is A or G or is absent

SEQ ID NO: 67573 - protein, 38 aa, Artificial Sequence; identical to SEQ ID NO: 8680
  GFR-binding peptide
  MOD_RES (5), (6), (37): Xaa is C or S

SEQ ID NO: 67574 - protein, 42 aa, Artificial Sequence; identical to SEQ ID NO: 58033
  GFR-binding peptide
  MOD_RES (6), (7), (40), (42): Xaa is C or S
  MOD_RES (21), (22), (23), (24), (25): Xaa is A or G
  MOD_RES (26), (27), (28), (29): Xaa is A or G or is absent

SEQ ID NO: 67575 - protein, 36 aa, Artificial Sequence; identical to SEQ ID NO: 8684
  GFR-binding peptide
  MOD_RES (1), (2), (34), (36): Xaa is C or S

SEQ ID NO: 67576 - protein, 33 aa, Artificial Sequence; identical to SEQ ID NO: 30027
  GFR-binding peptide
  MOD_RES (1), (33): Xaa is C or S

SEQ ID NO: 67577 - protein, 31 aa, Artificial Sequence; identical to SEQ ID NO: 8690
  GFR-binding peptide
  MOD_RES (1), (1): Xaa is C or S

SEQ ID NO: 67578 - protein, 39 aa, Artificial Sequence; identical to SEQ ID NO: 8691
  GFR-binding peptide
  MOD_RES (4), (5), (37), (39): Xaa is C or S

SEQ ID NO: 67579 - protein, 33 aa, Artificial Sequence; identical to SEQ ID NO: 8692
  GFR-binding peptide
  MOD_RES (2), (3): Xaa is C or S

SEQ ID NO: 67580 - protein, 38 aa, Artificial Sequence; identical to SEQ ID NO: 33178
  GFR-binding peptide
  MOD_RES (2), (36), (38): Xaa is C or S
  MOD_RES (16), (17), (18), (19), (20): Xaa is A or G
  MOD_RES (21), (22), (23), (24): Xaa is A or G or is absent

SEQ ID NO: 67581 - protein, 33 aa, Artificial Sequence
  GFR-binding peptide
  MOD_RES (1), (2): Xaa is C or S
XXVPARLSATSILYYDAANNVVLRKHRDMVVEA

SEQ ID NO: 67582 - protein, 37 aa, Artificial Sequence; identical to SEQ ID NO: 8693
  GFR-binding peptide
  MOD_RES (3), (4), (35), (37): Xaa is C or S

SEQ ID NO: 67583 - protein, 36 aa, Artificial Sequence; identical to SEQ ID NO: 30034
  GFR-binding peptide
  MOD_RES (3), (4): Xaa is C or S
  MOD_RES (18), (19), (20), (21), (22): Xaa is A or G
  MOD_RES (23), (24), (25), (26): Xaa is A or G or is absent

SEQ ID NO: 67584 - protein, 38 aa, Artificial Sequence; identical to SEQ ID NO: 33187
  GFR-binding peptide
  MOD_RES (4), (5): Xaa is C or S
  MOD_RES (19), (20), (21), (22), (23): Xaa is A or G
  MOD_RES (24), (25), (26), (27): Xaa is A or G or is absent

SEQ ID NO: 67585 - protein, 30 aa, Artificial Sequence; identical to SEQ ID NO: 33194
  GFR-binding peptide

SEQ ID NO: 67586 - protein, 32 aa, Artificial Sequence
  GFR-binding peptide
  MOD_RES (1), (32): Xaa is C or S
XAPVKTEPISMLYLDNGRVLLKFKYEMIVEEX

SEQ ID NO: 67587 - protein, 39 aa, Artificial Sequence
  GFR-binding peptide
  MOD_RES (4), (5), (39): Xaa is C or S
  MOD_RES (19), (20), (21), (22), (23): Xaa is A or G
  MOD_RES (24), (25), (26), (27): Xaa is A or G or is absent
SKAXXVPTKLSATSILYYXXXXXXXXXLRKHRGMAVSEX

SEQ ID NO: 67588 - protein, 33 aa, Artificial Sequence
  GFR-binding peptide
  MOD_RES (1), (1): Xaa is C or S
  MOD_RES (15), (16), (17), (18), (19): Xaa is A or G
  MOD_RES (20), (21), (22), (23): Xaa is A or G or is absent
XVPTRLSPISILYKXXXXXXXXXLKYHYDMVVE

SEQ ID NO: 67589 - protein, 37 aa, Artificial Sequence; identical to SEQ ID NO: 8700
  GFR-binding peptide
  MOD_RES (6), (7): Xaa is C or S

SEQ ID NO: 67590 - protein, 39 aa, Artificial Sequence; identical to SEQ ID NO: 8701
  GFR-binding peptide
  MOD_RES (2), (3), (37), (39): Xaa is C or S
  MOD_RES (17), (18), (19), (20), (21): Xaa is A or G
  MOD_RES (22), (23), (24), (25): Xaa is A or G or is absent

SEQ ID NO: 67591 - protein, 39 aa, Artificial Sequence; identical to SEQ ID NO: 8702
  GFR-binding peptide
  MOD_RES (4), (5), (39): Xaa is C or S
  MOD_RES (19), (20), (21), (22), (23): Xaa is A or G
  MOD_RES (24), (25), (26), (27): Xaa is A or G or is absent

SEQ ID NO: 67592 - protein, 36 aa, Artificial Sequence; identical to SEQ ID NO: 8703
  GFR-binding peptide
  MOD_RES (2), (3), (35): Xaa is C or S

SEQ ID NO: 67593 - protein, 39 aa, Artificial Sequence; identical to SEQ ID NO: 33199
  GFR-binding peptide
  MOD_RES (6), (7), (38): Xaa is C or S

SEQ ID NO: 67594 - protein, 43 aa, Artificial Sequence; identical to SEQ ID NO: 58054
  GFR-binding peptide
  MOD_RES (6), (7), (41), (43): Xaa is C or S
  MOD_RES (21), (22), (23), (24), (25): Xaa is A or G
  MOD_RES (26), (27), (28), (29): Xaa is A or G or is absent

SEQ ID NO: 67595 - protein, 40 aa, Artificial Sequence; identical to SEQ ID NO: 30044
  GFR-binding peptide
  MOD_RES (4), (5), (37), (39): Xaa is C or S

SEQ ID NO: 67596 - protein, 44 aa, Artificial Sequence
  GFR-binding peptide
  MOD_RES (6), (7), (41), (43): Xaa is C or S
  MOD_RES (21), (22), (23), (24), (25): Xaa is A or G
  MOD_RES (26), (27), (28), (29): Xaa is A or G or is absent
KASKAXXVPTKLSATSILYYXXXXXXXXXLRKHRGMAVSEXGXR

SEQ ID NO: 67597 - protein, 34 aa, Artificial Sequence; identical to SEQ ID NO: 30047
  GFR-binding peptide
  MOD_RES (34), (34): Xaa is C or S
  MOD_RES (14), (15), (16), (17), (18): Xaa is A or G
  MOD_RES (19), (20), (21), (22): Xaa is A or G or is absent

SEQ ID NO: 67598 - protein, 33 aa, Artificial Sequence; identical to SEQ ID NO: 8713
  GFR-binding peptide
  MOD_RES (2), (3): Xaa is C or S

SEQ ID NO: 67599 - protein, 40 aa, Artificial Sequence; identical to SEQ ID NO: 8714
  GFR-binding peptide
  MOD_RES (3), (4), (37), (39): Xaa is C or S

SEQ ID NO: 67600 - protein, 36 aa, Artificial Sequence; identical to SEQ ID NO: 8716
  GFR-binding peptide
  MOD_RES (3), (4): Xaa is C or S
  MOD_RES (18), (19), (20), (21), (22): Xaa is A or G
  MOD_RES (23), (24), (25), (26): Xaa is A or G or is absent

SEQ ID NO: 67601 - protein, 37 aa, Artificial Sequence
  GFR-binding peptide
  MOD_RES (1), (2), (34), (36): Xaa is C or S
XXVPEKMNAISILYFDENKNVVLKKYRNMTVESXAXR

SEQ ID NO: 67602 - protein, 36 aa, Artificial Sequence
  GFR-binding peptide
  MOD_RES (3), (4), (35): Xaa is C or S
APXXVPQALSPINILYFVGRKPKVYGKIPMIVRSXK

SEQ ID NO: 67603 - protein, 40 aa, Artificial Sequence
  GFR-binding peptide
  MOD_RES (5), (6), (40): Xaa is C or S
  MOD_RES (20), (21), (22), (23), (24): Xaa is A or G
  MOD_RES (25), (26), (27), (28): Xaa is A or G or is absent
SAGPXXTPTKMSATSMLYYXXXXXXXXXLRKHRGMVVDRX

SEQ ID NO: 67604 - protein, 36 aa, Artificial Sequence; identical to SEQ ID NO: 33212
  GFR-binding peptide
  MOD_RES (3), (4), (36): Xaa is C or S

SEQ ID NO: 67605 - protein, 34 aa, Artificial Sequence; identical to SEQ ID NO: 30058
  GFR-binding peptide
  MOD_RES (1), (33): Xaa is C or S

SEQ ID NO: 67606 - protein, 37 aa, Artificial Sequence; identical to SEQ ID NO: 8721
  GFR-binding peptide
  MOD_RES (6), (7): Xaa is C or S

SEQ ID NO: 67607 - protein, 38 aa, Artificial Sequence; identical to SEQ ID NO: 33216
  GFR-binding peptide
  MOD_RES (5), (6), (38): Xaa is C or S

SEQ ID NO: 67608 - protein, 38 aa, Artificial Sequence; identical to SEQ ID NO: 8724
  GFR-binding peptide
  MOD_RES (1), (2), (35), (37): Xaa is C or S

SEQ ID NO: 67609 - protein, 34 aa, Artificial Sequence; identical to SEQ ID NO: 8726
  GFR-binding peptide
  MOD_RES (2), (3): Xaa is C or S

SEQ ID NO: 67610 - protein, 34 aa, Artificial Sequence
  GFR-binding peptide
  MOD_RES (2), (3): Xaa is C or S
PXXVPEKMSPINILYFDENKNVVYGKIPNMTVES

SEQ ID NO: 67611 - protein, 41 aa, Artificial Sequence; identical to SEQ ID NO: 33222
  GFR-binding peptide
  MOD_RES (4), (5), (40): Xaa is C or S
  MOD_RES (19), (20), (21), (22), (23): Xaa is A or G
  MOD_RES (24), (25), (26), (27): Xaa is A or G or is absent

SEQ ID NO: 67612 - protein, 37 aa, Artificial Sequence; identical to SEQ ID NO: 8728
  GFR-binding peptide
  MOD_RES (5), (6): Xaa is C or S

SEQ ID NO: 67613 - protein, 42 aa, Artificial Sequence; identical to SEQ ID NO: 30067
  GFR-binding peptide
  MOD_RES (6), (7), (41): Xaa is C or S
  MOD_RES (21), (22), (23), (24), (25): Xaa is A or G
  MOD_RES (26), (27), (28), (29): Xaa is A or G or is absent

SEQ ID NO: 67614 - protein, 37 aa, Artificial Sequence; identical to SEQ ID NO: 30069
  GFR-binding peptide
  MOD_RES (2), (3), (37): Xaa is C or S
  MOD_RES (17), (18), (19), (20), (21): Xaa is A or G
  MOD_RES (22), (23), (24), (25): Xaa is A or G or is absent

SEQ ID NO: 67615 - protein, 36 aa, Artificial Sequence
  GFR-binding peptide
  MOD_RES (3), (4): Xaa is C or S
  MOD_RES (18), (19), (20), (21), (22): Xaa is A or G
  MOD_RES (23), (24), (25), (26): Xaa is A or G or is absent
PTXXVPTRLSATSILYYXXXXXXXXXLRKHRDMVVE

SEQ ID NO: 67616 - protein, 40 aa, Artificial Sequence; identical to SEQ ID NO: 30073
  GFR-binding peptide
  MOD_RES (5), (6), (38), (40): Xaa is C or S

SEQ ID NO: 67617 - protein, 38 aa, Artificial Sequence; identical to SEQ ID NO: 8732
  GFR-binding peptide
  MOD_RES (1), (35), (37): Xaa is C or S
  MOD_RES (15), (16), (17), (18), (19): Xaa is A or G
  MOD_RES (20), (21), (22), (23): Xaa is A or G or is absent

SEQ ID NO: 67618 - protein, 39 aa, Artificial Sequence; identical to SEQ ID NO: 8736
  GFR-binding peptide
  MOD_RES (1), (2), (36), (38): Xaa is C or S
  MOD_RES (16), (17), (18), (19), (20): Xaa is A or G
  MOD_RES (21), (22), (23), (24): Xaa is A or G or is absent

SEQ ID NO: 67619 - protein, 41 aa, Artificial Sequence; identical to SEQ ID NO: 30078
  GFR-binding peptide
  MOD_RES (4), (5), (38), (40): Xaa is C or S
  MOD_RES (19), (20), (21), (22), (23): Xaa is A or G
  MOD_RES (24), (25), (26), (27): Xaa is A or G or is absent

SEQ ID NO: 67620 - protein, 42 aa, Artificial Sequence
  GFR-binding peptide
  MOD_RES (5), (6), (39), (41): Xaa is C or S
  MOD_RES (20), (21), (22), (23), (24): Xaa is A or G
  MOD_RES (25), (26), (27), (28): Xaa is A or G or is absent
VPSTXXAPVKTEPISMLYLXXXXXXXXXKFKYEMIVEEXGXL

SEQ ID NO: 67621 - protein, 36 aa, Artificial Sequence; identical to SEQ ID NO: 30079
  GFR-binding peptide
  MOD_RES (4), (5): Xaa is C or S

SEQ ID NO: 67622 - protein, 38 aa, Artificial Sequence; identical to SEQ ID NO: 8738
  GFR-binding peptide
  MOD_RES (6), (6): Xaa is C or S
  MOD_RES (20), (21), (22), (23), (24): Xaa is A or G
  MOD_RES (25), (26), (27), (28): Xaa is A or G or is absent

SEQ ID NO: 67623 - protein, 37 aa, Artificial Sequence
  GFR-binding peptide
  MOD_RES (2), (3), (36): Xaa is C or S
  MOD_RES (17), (18), (19), (20), (21): Xaa is A or G
  MOD_RES (22), (23), (24), (25): Xaa is A or G or is absent
PXXVSQDLSPINILYFXXXXXXXXXYGKIPMIVKSXK

SEQ ID NO: 67624 - protein, 32 aa, Artificial Sequence; identical to SEQ ID NO: 30080
  GFR-binding peptide

SEQ ID NO: 67625 - protein, 39 aa, Artificial Sequence; identical to SEQ ID NO: 58083
  GFR-binding peptide
  MOD_RES (5), (6), (39): Xaa is C or S
  MOD_RES (20), (21), (22), (23), (24): Xaa is A or G
  MOD_RES (25), (26), (27), (28): Xaa is A or G or is absent

SEQ ID NO: 67626 - protein, 39 aa, Artificial Sequence
  GFR-binding peptide
  MOD_RES (4), (5), (37), (39): Xaa is C or S
PEPXXVPEKMSPISILYKDENKNVVLKYHYNMTVESXAX

SEQ ID NO: 67627 - protein, 38 aa, Artificial Sequence
  GFR-binding peptide
  MOD_RES (6), (7): Xaa is C or S
GSAGPXXTPTKMSPISMLYKNDKQQIILKYHYGMVVDR

SEQ ID NO: 67628 - protein, 33 aa, Artificial Sequence; identical to SEQ ID NO: 30088
  GFR-binding peptide
  MOD_RES (32), (32): Xaa is C or S

SEQ ID NO: 67629 - protein, 37 aa, Artificial Sequence
  GFR-binding peptide
  MOD_RES (2), (3), (37): Xaa is C or S
  MOD_RES (17), (18), (19), (20), (21): Xaa is A or G
  MOD_RES (22), (23), (24), (25): Xaa is A or G or is absent
SXXVPARLSATSILYYXXXXXXXXXLRKHRDMVVEAX

SEQ ID NO: 67630 - protein, 34 aa, Artificial Sequence
  GFR-binding peptide
  MOD_RES (1), (2): Xaa is C or S
  MOD_RES (16), (17), (18), (19), (20): Xaa is A or G
  MOD_RES (21), (22), (23), (24): Xaa is A or G or is absent
XXVPEKMSATSILYYXXXXXXXXXLRKHRNMTVE

SEQ ID NO: 67631 - protein, 35 aa, Artificial Sequence
  GFR-binding peptide
  MOD_RES (3), (4): Xaa is C or S
PTXXVPTRLSATSILYYDSANNVVLRKHRDMVVES

SEQ ID NO: 67632 - protein, 43 aa, Artificial Sequence
  GFR-binding peptide
  MOD_RES (6), (7), (40), (42): Xaa is C or S
  MOD_RES (21), (22), (23), (24), (25): Xaa is A or G
  MOD_RES (26), (27), (28), (29): Xaa is A or G or is absent
ASAAPXXVPQALSPINILYFXXXXXXXXXYGKIPMIVRSXKXS

SEQ ID NO: 67633 - protein, 36 aa, Artificial Sequence; identical to SEQ ID NO: 8749
  GFR-binding peptide
  MOD_RES (5), (6): Xaa is C or S

SEQ ID NO: 67634 - protein, 34 aa, Artificial Sequence; identical to SEQ ID NO: 30098
  GFR-binding peptide
  MOD_RES (1), (33): Xaa is C or S

SEQ ID NO: 67635 - protein, 39 aa, Artificial Sequence; identical to SEQ ID NO: 30100
  GFR-binding peptide
  MOD_RES (5), (6), (39): Xaa is C or S
  MOD_RES (20), (21), (22), (23), (24): Xaa is A or G
  MOD_RES (25), (26), (27), (28): Xaa is A or G or is absent

SEQ ID NO: 67636 - protein, 40 aa, Artificial Sequence; identical to SEQ ID NO: 33238
  GFR-binding peptide
  MOD_RES (6), (7), (39): Xaa is C or S

SEQ ID NO: 67637 - protein, 34 aa, Artificial Sequence; identical to SEQ ID NO: 33239
  GFR-binding peptide
  MOD_RES (2), (3): Xaa is C or S

SEQ ID NO: 67638 - protein, 40 aa, Artificial Sequence; identical to SEQ ID NO: 33240
  GFR-binding peptide
  MOD_RES (4), (5), (39): Xaa is C or S
  MOD_RES (19), (20), (21), (22), (23): Xaa is A or G
  MOD_RES (24), (25), (26), (27): Xaa is A or G or is absent

SEQ ID NO: 67639 - protein, 37 aa, Artificial Sequence; identical to SEQ ID NO: 33241
  GFR-binding peptide
  MOD_RES (6), (6): Xaa is C or S

SEQ ID NO: 67640 - protein, 33 aa, Artificial Sequence
  GFR-binding peptide
  MOD_RES (14), (15), (16), (17), (18): Xaa is A or G
  MOD_RES (19), (20), (21), (22): Xaa is A or G or is absent
VPTKLSATSILYYXXXXXXXXXLRKHRGMAVSE

SEQ ID NO: 67641 - protein, 36 aa, Artificial Sequence; identical to SEQ ID NO: 33242
  GFR-binding peptide
  MOD_RES (4), (4): Xaa is C or S
  MOD_RES (18), (19), (20), (21), (22): Xaa is A or G
  MOD_RES (23), (24), (25), (26): Xaa is A or G or is absent

SEQ ID NO: 67642 - protein, 36 aa, Artificial Sequence; identical to SEQ ID NO: 8752
  GFR-binding peptide
  MOD_RES (3), (4), (36): Xaa is C or S

SEQ ID NO: 67643 - protein, 32 aa, Artificial Sequence; identical to SEQ ID NO: 58092
  GFR-binding peptide
  MOD_RES (1), (2): Xaa is C or S

SEQ ID NO: 67644 - protein, 41 aa, Artificial Sequence
  GFR-binding peptide
  MOD_RES (6), (7), (39), (41): Xaa is C or S
GSAGPXXTPTKMEPISMLYLNDKQQIIKFKYEGMVVDRXGX

SEQ ID NO: 67645 - protein, 37 aa, Artificial Sequence; identical to SEQ ID NO: 30103
  GFR-binding peptide
  MOD_RES (2), (3), (36): Xaa is C or S

SEQ ID NO: 67646 - protein, 41 aa, Artificial Sequence; identical to SEQ ID NO: 8753
  GFR-binding peptide
  MOD_RES (5), (6), (41): Xaa is C or S
  MOD_RES (20), (21), (22), (23), (24): Xaa is A or G
  MOD_RES (25), (26), (27), (28): Xaa is A or G or is absent

SEQ ID NO: 67647 - protein, 36 aa, Artificial Sequence; identical to SEQ ID NO: 8754
  GFR-binding peptide
  MOD_RES (3), (4): Xaa is C or S
  MOD_RES (18), (19), (20), (21), (22): Xaa is A or G
  MOD_RES (23), (24), (25), (26): Xaa is A or G or is absent

SEQ ID NO: 67648 - protein, 35 aa, Artificial Sequence; identical to SEQ ID NO: 8755
  GFR-binding peptide
  MOD_RES (5), (5): Xaa is C or S

SEQ ID NO: 67649 - protein, 35 aa, Artificial Sequence
  GFR-binding peptide
  MOD_RES (1), (2): Xaa is C or S
  MOD_RES (16), (17), (18), (19), (20): Xaa is A or G
  MOD_RES (21), (22), (23), (24): Xaa is A or G or is absent
XXVPEKMSPISILYKXXXXXXXXXLKYHYNMTVES

SEQ ID NO: 67650 - protein, 35 aa, Artificial Sequence; identical to SEQ ID NO: 30107
  GFR-binding peptide
  MOD_RES (3), (4): Xaa is C or S

SEQ ID NO: 67651 - protein, 37 aa, Artificial Sequence; identical to SEQ ID NO: 8758
  GFR-binding peptide
  MOD_RES (1), (2), (34), (36): Xaa is C or S

SEQ ID NO: 67652 - protein, 36 aa, Artificial Sequence
  GFR-binding peptide
  MOD_RES (2), (3): Xaa is C or S
  MOD_RES (17), (18), (19), (20), (21): Xaa is A or G
  MOD_RES (22), (23), (24), (25): Xaa is A or G or is absent
PXXVPEKMSATSILYYXXXXXXXXXLRKHRNMTVES

SEQ ID NO: 67653 - protein, 36 aa, Artificial Sequence; identical to SEQ ID NO: 8759
  GFR-binding peptide
  MOD_RES (2), (3), (35): Xaa is C or S

SEQ ID NO: 67654 - protein, 37 aa, Artificial Sequence; identical to SEQ ID NO: 30111
  GFR-binding peptide
  MOD_RES (35), (37): Xaa is C or S
  MOD_RES (14), (15), (16), (17), (18): Xaa is A or G
  MOD_RES (19), (20), (21), (22): Xaa is A or G or is absent

SEQ ID NO: 67655 - protein, 41 aa, Artificial Sequence; identical to SEQ ID NO: 8760
  GFR-binding peptide
  MOD_RES (6), (7), (41): Xaa is C or S
  MOD_RES (21), (22), (23), (24), (25): Xaa is A or G
  MOD_RES (26), (27), (28), (29): Xaa is A or G or is absent

SEQ ID NO: 67656 - protein, 34 aa, Artificial Sequence
  GFR-binding peptide
  MOD_RES (32), (34): Xaa is C or S
VPEKMNAISILYFDENKNVVLKKYRNMTVESXAX

SEQ ID NO: 67657 - protein, 32 aa, Artificial Sequence; identical to SEQ ID NO: 8764
  GFR-binding peptide
  MOD_RES (32), (32): Xaa is C or S

SEQ ID NO: 67658 - protein, 34 aa, Artificial Sequence; identical to SEQ ID NO: 30119
  GFR-binding peptide
  MOD_RES (1), (2), (34): Xaa is C or S

SEQ ID NO: 67659 - protein, 35 aa, Artificial Sequence; identical to SEQ ID NO: 8767
  GFR-binding peptide
  MOD_RES (1), (33), (35): Xaa is C or S

SEQ ID NO: 67660 - protein, 35 aa, Artificial Sequence; identical to SEQ ID NO: 30122
  GFR-binding peptide
  MOD_RES (2), (3), (34): Xaa is C or S

SEQ ID NO: 67661 - protein, 41 aa, Artificial Sequence; identical to SEQ ID NO: 33254
  GFR-binding peptide
  MOD_RES (6), (7), (41): Xaa is C or S
  MOD_RES (21), (22), (23), (24), (25): Xaa is A or G
  MOD_RES (26), (27), (28), (29): Xaa is A or G or is absent

SEQ ID NO: 67662 - protein, 39 aa, Artificial Sequence
  GFR-binding peptide
  MOD_RES (2), (3), (36), (38): Xaa is C or S
  MOD_RES (17), (18), (19), (20), (21): Xaa is A or G
  MOD_RES (22), (23), (24), (25): Xaa is A or G or is absent
TXXAPVKTSPISMLYKXXXXXXXXXLKYHYMIVEEXGXL

SEQ ID NO: 67663 - protein, 39 aa, Artificial Sequence; identical to SEQ ID NO: 8770
  GFR-binding peptide
  MOD_RES (4), (36), (38): Xaa is C or S

SEQ ID NO: 67664 - protein, 41 aa, Artificial Sequence; identical to SEQ ID NO: 8771
  GFR-binding peptide
  MOD_RES (5), (6), (40): Xaa is C or S
  MOD_RES (20), (21), (22), (23), (24): Xaa is A or G
  MOD_RES (25), (26), (27), (28): Xaa is A or G or is absent

SEQ ID NO: 67665 - protein, 42 aa, Artificial Sequence; identical to SEQ ID NO: 30124
  GFR-binding peptide
  MOD_RES (5), (6), (39), (41): Xaa is C or S
  MOD_RES (20), (21), (22), (23), (24): Xaa is A or G
  MOD_RES (25), (26), (27), (28): Xaa is A or G or is absent

SEQ ID NO: 67666 - protein, 35 aa, Artificial Sequence
  GFR-binding peptide
  MOD_RES (3), (4): Xaa is C or S
GPXXTPTKMEPISMLYLNDKQQIIKFKYEGMVVDR

SEQ ID NO: 67667 - protein, 41 aa, Artificial Sequence; identical to SEQ ID NO: 8776
  GFR-binding peptide
  MOD_RES (6), (7), (40): Xaa is C or S

SEQ ID NO: 67668 - protein, 36 aa, Artificial Sequence; identical to SEQ ID NO: 30126
  GFR-binding peptide
  MOD_RES (1), (35): Xaa is C or S
  MOD_RES (15), (16), (17), (18), (19): Xaa is A or G
  MOD_RES (20), (21), (22), (23): Xaa is A or G or is absent

SEQ ID NO: 67669 - protein, 38 aa, Artificial Sequence
  GFR-binding peptide
  MOD_RES (5), (6), (37): Xaa is C or S
SAAPXXVPQALSPINILYFVGRKPKVYGKIPMIVRSXK

SEQ ID NO: 67670 - protein, 33 aa, Artificial Sequence; identical to SEQ ID NO: 8780
  GFR-binding peptide
  MOD_RES (1), (1): Xaa is C or S
  MOD_RES (15), (16), (17), (18), (19): Xaa is A or G
  MOD_RES (20), (21), (22), (23): Xaa is A or G or is absent

SEQ ID NO: 67671 - protein, 36 aa, Artificial Sequence; identical to SEQ ID NO: 33266
  GFR-binding peptide
  MOD_RES (3), (4): Xaa is C or S
  MOD_RES (18), (19), (20), (21), (22): Xaa is A or G
  MOD_RES (23), (24), (25), (26): Xaa is A or G or is absent

SEQ ID NO: 67672 - protein, 37 aa, Artificial Sequence; identical to SEQ ID NO: 8781
  GFR-binding peptide
  MOD_RES (1), (2), (34), (36): Xaa is C or S

SEQ ID NO: 67673 - protein, 31 aa, Artificial Sequence; identical to SEQ ID NO: 30131
  GFR-binding peptide
  MOD_RES (1), (1): Xaa is C or S

SEQ ID NO: 67674 - protein, 34 aa, Artificial Sequence
  GFR-binding peptide
  MOD_RES (2), (3): Xaa is C or S
PXXVPEKMSATSILYYDENKNVVLRKHRNMTVES

SEQ ID NO: 67675 - protein, 39 aa, Artificial Sequence; identical to SEQ ID NO: 30134
  GFR-binding peptide
  MOD_RES (6), (7): Xaa is C or S
  MOD_RES (21), (22), (23), (24), (25): Xaa is A or G
  MOD_RES (26), (27), (28), (29): Xaa is A or G or is absent

SEQ ID NO: 67676 - protein, 30 aa, Artificial Sequence; identical to SEQ ID NO: 8785
  GFR-binding peptide

SEQ ID NO: 67677 - protein, 33 aa, Artificial Sequence; identical to SEQ ID NO: 30137
  GFR-binding peptide
  MOD_RES (2), (3): Xaa is C or S

SEQ ID NO: 67678 - protein, 39 aa, Artificial Sequence
  GFR-binding peptide
  MOD_RES (3), (4), (38): Xaa is C or S
  MOD_RES (18), (19), (20), (21), (22): Xaa is A or G
  MOD_RES (23), (24), (25), (26): Xaa is A or G or is absent
EPXXVPEKMEPISILYLXXXXXXXXXKFKYENMTVESXA

SEQ ID NO: 67679 - protein, 41 aa, Artificial Sequence
  GFR-binding peptide
  MOD_RES (3), (4), (38), (40): Xaa is C or S
  MOD_RES (18), (19), (20), (21), (22): Xaa is A or G
  MOD_RES (23), (24), (25), (26): Xaa is A or G or is absent
KAXXVPTKLSATSILYYXXXXXXXXXLRKHRGMAVSEXGXR

SEQ ID NO: 67680 - protein, 35 aa, Artificial Sequence
  GFR-binding peptide
  MOD_RES (1), (2), (33), (35): Xaa is C or S
XXAPVKTSATSMLYYDNGRVLLLRKHRMIVEEXGX

SEQ ID NO: 67681 - protein, 39 aa, Artificial Sequence; identical to SEQ ID NO: 33277
  GFR-binding peptide
  MOD_RES (2), (3), (37), (39): Xaa is C or S
  MOD_RES (17), (18), (19), (20), (21): Xaa is A or G
  MOD_RES (22), (23), (24), (25): Xaa is A or G or is absent

SEQ ID NO: 67682 - protein, 34 aa, Artificial Sequence; identical to SEQ ID NO: 30141
  GFR-binding peptide
  MOD_RES (3), (4): Xaa is C or S

SEQ ID NO: 67683 - protein, 33 aa, Artificial Sequence; identical to SEQ ID NO: 8788
  GFR-binding peptide
  MOD_RES (1), (1): Xaa is C or S
  MOD_RES (15), (16), (17), (18), (19): Xaa is A or G
  MOD_RES (20), (21), (22), (23): Xaa is A or G or is absent

SEQ ID NO: 67684 - protein, 34 aa, Artificial Sequence; identical to SEQ ID NO: 8790
  GFR-binding peptide
  MOD_RES (1), (33): Xaa is C or S

SEQ ID NO: 67685 - protein, 31 aa, Artificial Sequence; identical to SEQ ID NO: 8791
  GFR-binding peptide
  MOD_RES (31), (31): Xaa is C or S

SEQ ID NO: 67686 - protein, 37 aa, Artificial Sequence; identical to SEQ ID NO: 8794
  GFR-binding peptide
  MOD_RES (7), (7): Xaa is C or S

SEQ ID NO: 67687 - protein, 32 aa, Artificial Sequence; identical to SEQ ID NO: 8795
  GFR-binding peptide
  MOD_RES (1), (2): Xaa is C or S

SEQ ID NO: 67688 - protein, 36 aa, Artificial Sequence; identical to SEQ ID NO: 30147
  GFR-binding peptide
  MOD_RES (4), (4): Xaa is C or S
  MOD_RES (18), (19), (20), (21), (22): Xaa is A or G
  MOD_RES (23), (24), (25), (26): Xaa is A or G or is absent

SEQ ID NO: 67689 - protein, 36 aa, Artificial Sequence; identical to SEQ ID NO: 8796
  GFR-binding peptide
  MOD_RES (1), (34), (36): Xaa is C or S

SEQ ID NO: 67690 - protein, 37 aa, Artificial Sequence
  GFR-binding peptide
  MOD_RES (4), (5): Xaa is C or S
  MOD_RES (19), (20), (21), (22), (23): Xaa is A or G
  MOD_RES (24), (25), (26), (27): Xaa is A or G or is absent
AGPXXTPTKMSPISMLYKXXXXXXXXXLKYHYGMVVD

SEQ ID NO: 67691 - protein, 35 aa, Artificial Sequence
  GFR-binding peptide
  MOD_RES (1), (35): Xaa is C or S
  MOD_RES (15), (16), (17), (18), (19): Xaa is A or G
  MOD_RES (20), (21), (22), (23): Xaa is A or G or is absent
XVPTRLEPISILYLXXXXXXXXXKFKYEDMVVESX

SEQ ID NO: 67692 - protein, 39 aa, Artificial Sequence; identical to SEQ ID NO: 16090
  GFR-binding peptide
  MOD_RES (5), (6), (38): Xaa is C or S

SEQ ID NO: 67693 - protein, 33 aa, Artificial Sequence; identical to SEQ ID NO: 8797
  GFR-binding peptide
  MOD_RES (31), (33): Xaa is C or S

SEQ ID NO: 67694 - protein, 40 aa, Artificial Sequence; identical to SEQ ID NO: 30151
  GFR-binding peptide
  MOD_RES (6), (7): Xaa is C or S
  MOD_RES (21), (22), (23), (24), (25): Xaa is A or G
  MOD_RES (26), (27), (28), (29): Xaa is A or G or is absent

SEQ ID NO: 67695 - protein, 35 aa, Artificial Sequence; identical to SEQ ID NO: 33286
  GFR-binding peptide
  MOD_RES (34), (34): Xaa is C or S
  MOD_RES (14), (15), (16), (17), (18): Xaa is A or G
  MOD_RES (19), (20), (21), (22): Xaa is A or G or is absent

SEQ ID NO: 67696 - protein, 39 aa, Artificial Sequence; identical to SEQ ID NO: 8801
  GFR-binding peptide
  MOD_RES (3), (4), (38): Xaa is C or S
  MOD_RES (18), (19), (20), (21), (22): Xaa is A or G
  MOD_RES (23), (24), (25), (26): Xaa is A or G or is absent

SEQ ID NO: 67697 - protein, 34 aa, Artificial Sequence; identical to SEQ ID NO: 8802
  GFR-binding peptide
  MOD_RES (1), (2): Xaa is C or S
  MOD_RES (16), (17), (18), (19), (20): Xaa is A or G
  MOD_RES (21), (22), (23), (24): Xaa is A or G or is absent

SEQ ID NO: 67698 - protein, 41 aa, Artificial Sequence; identical to SEQ ID NO: 8804
  GFR-binding peptide
  MOD_RES (6), (7), (41): Xaa is C or S
  MOD_RES (21), (22), (23), (24), (25): Xaa is A or G
  MOD_RES (26), (27), (28), (29): Xaa is A or G or is absent

SEQ ID NO: 67699 - protein, 36 aa, Artificial Sequence; identical to SEQ ID NO: 30156
  GFR-binding peptide
  MOD_RES (3), (4): Xaa is C or S
  MOD_RES (18), (19), (20), (21), (22): Xaa is A or G
  MOD_RES (23), (24), (25), (26): Xaa is A or G or is absent

SEQ ID NO: 67700 - protein, 32 aa, Artificial Sequence
  GFR-binding peptide
  MOD_RES (14), (15), (16), (17), (18): Xaa is A or G
  MOD_RES (19), (20), (21), (22): Xaa is A or G or is absent
APVKTSATSMLYYXXXXXXXXXLRKHRMIVEE

SEQ ID NO: 67701 - protein, 39 aa, Artificial Sequence; identical to SEQ ID NO: 33293
  GFR-binding peptide
  MOD_RES (6), (7), (39): Xaa is C or S

SEQ ID NO: 67702 - protein, 37 aa, Artificial Sequence; identical to SEQ ID NO: 8806
  GFR-binding peptide
  MOD_RES (3), (4): Xaa is C or S
  MOD_RES (18), (19), (20), (21), (22): Xaa is A or G
  MOD_RES (23), (24), (25), (26): Xaa is A or G or is absent

SEQ ID NO: 67703 - protein, 40 aa, Artificial Sequence; identical to SEQ ID NO: 8807
  GFR-binding peptide
  MOD_RES (5), (37), (39): Xaa is C or S

SEQ ID NO: 67704 - protein, 44 aa, Artificial Sequence; identical to SEQ ID NO: 8808
  GFR-binding peptide
  MOD_RES (6), (7), (41), (43): Xaa is C or S
  MOD_RES (21), (22), (23), (24), (25): Xaa is A or G
  MOD_RES (26), (27), (28), (29): Xaa is A or G or is absent

SEQ ID NO: 67705 - protein, 40 aa, Artificial Sequence; identical to SEQ ID NO: 33296
  GFR-binding peptide
  MOD_RES (3), (4), (37), (39): Xaa is C or S

SEQ ID NO: 67706 - protein, 37 aa, Artificial Sequence; identical to SEQ ID NO: 33299
  GFR-binding peptide
  MOD_RES (5), (6): Xaa is C or S

SEQ ID NO: 67707 - protein, 37 aa, Artificial Sequence; identical to SEQ ID NO: 30165
  GFR-binding peptide
  MOD_RES (6), (7): Xaa is C or S

SEQ ID NO: 67708 - protein, 37 aa, Artificial Sequence; identical to SEQ ID NO: 8815
  GFR-binding peptide
  MOD_RES (2), (36): Xaa is C or S
  MOD_RES (16), (17), (18), (19), (20): Xaa is A or G
  MOD_RES (21), (22), (23), (24): Xaa is A or G or is absent

SEQ ID NO: 67709 - protein, 40 aa, Artificial Sequence; identical to SEQ ID NO: 30166
  GFR-binding peptide
  MOD_RES (2), (3), (37), (39): Xaa is C or S
  MOD_RES (17), (18), (19), (20), (21): Xaa is A or G
  MOD_RES (22), (23), (24), (25): Xaa is A or G or is absent

SEQ ID NO: 67710 - protein, 37 aa, Artificial Sequence
  GFR-binding peptide
  MOD_RES (3), (4), (35), (37): Xaa is C or S
SPXXVSQDLSPINILYFIGKTPKIYGKIPMIVKSXKX

SEQ ID NO: 67711 - protein, 37 aa, Artificial Sequence
  GFR-binding peptide
  MOD_RES (3), (4): Xaa is C or S
  MOD_RES (18), (19), (20), (21), (22): Xaa is A or G
  MOD_RES (23), (24), (25), (26): Xaa is A or G or is absent
KAXXVPTKLSATSILYYXXXXXXXXXLRKHRGMAVSE

SEQ ID NO: 67712 - protein, 35 aa, Artificial Sequence
  GFR-binding peptide
  MOD_RES (32), (34): Xaa is C or S
VPTKLSATSILYYDKGVVTYLRKHRGMAVSEXGXR

SEQ ID NO: 67713 - protein, 38 aa, Artificial Sequence; identical to SEQ ID NO: 8816
  GFR-binding peptide
  MOD_RES (4), (5), (37): Xaa is C or S

SEQ ID NO: 67714 - protein, 32 aa, Artificial Sequence; identical to SEQ ID NO: 8818
  GFR-binding peptide
  MOD_RES (32), (32): Xaa is C or S

SEQ ID NO: 67715 - protein, 43 aa, Artificial Sequence
  GFR-binding peptide
  MOD_RES (5), (6), (40), (42): Xaa is C or S
  MOD_RES (20), (21), (22), (23), (24): Xaa is A or G
  MOD_RES (25), (26), (27), (28): Xaa is A or G or is absent
SAGPXXTPTKMSPISMLYKXXXXXXXXXLKYHYGMVVDRXGXS

SEQ ID NO: 67716 - protein, 39 aa, Artificial Sequence; identical to SEQ ID NO: 30172
  GFR-binding peptide
  MOD_RES (6), (7), (39): Xaa is C or S

SEQ ID NO: 67717 - protein, 34 aa, Artificial Sequence; identical to SEQ ID NO: 33305
  GFR-binding peptide
  MOD_RES (3), (4): Xaa is C or S

SEQ ID NO: 67718 - protein, 40 aa, Artificial Sequence
  GFR-binding peptide
  MOD_RES (4), (5), (39): Xaa is C or S
  MOD_RES (19), (20), (21), (22), (23): Xaa is A or G
  MOD_RES (24), (25), (26), (27): Xaa is A or G or is absent
PEPXXVPEKMEPISILYLXXXXXXXXXKFKYENMTVESXA

SEQ ID NO: 67719 - protein, 38 aa, Artificial Sequence; identical to SEQ ID NO: 30174
  GFR-binding peptide
  MOD_RES (3), (4), (36), (38): Xaa is C or S

SEQ ID NO: 67720 - protein, 32 aa, Artificial Sequence; identical to SEQ ID NO: 8821
  GFR-binding peptide
  MOD_RES (1), (32): Xaa is C or S

SEQ ID NO: 67721 - protein, 32 aa, Artificial Sequence; identical to SEQ ID NO: 33308
  GFR-binding peptide
  MOD_RES (1), (2): Xaa is C or S

SEQ ID NO: 67722 - protein, 36 aa, Artificial Sequence
  GFR-binding peptide
  MOD_RES (3), (4): Xaa is C or S
  MOD_RES (18), (19), (20), (21), (22): Xaa is A or G
  MOD_RES (23), (24), (25), (26): Xaa is A or G or is absent
GPXXTPTKMSPISMLYKXXXXXXXXXLKYHYGMVVD

SEQ ID NO: 67723 - protein, 33 aa, Artificial Sequence; identical to SEQ ID NO: 33312
  GFR-binding peptide
  MOD_RES (3), (3): Xaa is C or S

SEQ ID NO: 67724 - protein, 40 aa, Artificial Sequence; identical to SEQ ID NO: 16128
  GFR-binding peptide
  MOD_RES (3), (4), (38), (40): Xaa is C or S
  MOD_RES (18), (19), (20), (21), (22): Xaa is A or G
  MOD_RES (23), (24), (25), (26): Xaa is A or G or is absent

SEQ ID NO: 67725 - protein, 38 aa, Artificial Sequence
  GFR-binding peptide
  MOD_RES (2), (3), (37): Xaa is C or S
  MOD_RES (17), (18), (19), (20), (21): Xaa is A or G
  MOD_RES (22), (23), (24), (25): Xaa is A or G or is absent
PXXTPTKMSATSMLYYXXXXXXXXXLRKHRGMVVDRXG

SEQ ID NO: 67726 - protein, 39 aa, Artificial Sequence; identical to SEQ ID NO: 8823
  GFR-binding peptide
  MOD_RES (6), (7), (39): Xaa is C or S

SEQ ID NO: 67727 - protein, 42 aa, Artificial Sequence; identical to SEQ ID NO: 33317
  GFR-binding peptide
  MOD_RES (6), (7), (39), (41): Xaa is C or S

SEQ ID NO: 67728 - protein, 39 aa, Artificial Sequence
  GFR-binding peptide
  MOD_RES (6), (7), (39): Xaa is C or S
STPPTXXVPTRLEPISILYLDSANNVVKFKYEDMVVESX

SEQ ID NO: 67729 - protein, 34 aa, Artificial Sequence
  GFR-binding peptide
  MOD_RES (1), (1): Xaa is C or S
  MOD_RES (15), (16), (17), (18), (19): Xaa is A or G
  MOD_RES (20), (21), (22), (23): Xaa is A or G or is absent
XVPEKMSPISILYKXXXXXXXXXLKYHYNMTVES

SEQ ID NO: 67730 - protein, 33 aa, Artificial Sequence; identical to SEQ ID NO: 16137
  GFR-binding peptide
  MOD_RES (2), (3): Xaa is C or S

SEQ ID NO: 67731 - protein, 37 aa, Artificial Sequence; identical to SEQ ID NO: 30184
  GFR-binding peptide
  MOD_RES (4), (5): Xaa is C or S
  MOD_RES (19), (20), (21), (22), (23): Xaa is A or G
  MOD_RES (24), (25), (26), (27): Xaa is A or G or is absent

SEQ ID NO: 67732 - protein, 34 aa, Artificial Sequence; identical to SEQ ID NO: 30185
  GFR-binding peptide
  MOD_RES (31), (33): Xaa is C or S

SEQ ID NO: 67733 - protein, 34 aa, Artificial Sequence; identical to SEQ ID NO: 30186
  GFR-binding peptide
  MOD_RES (1), (2): Xaa is C or S
  MOD_RES (16), (17), (18), (19), (20): Xaa is A or G
  MOD_RES (21), (22), (23), (24): Xaa is A or G or is absent

SEQ ID NO: 67734 - protein, 37 aa, Artificial Sequence; identical to SEQ ID NO: 30188
  GFR-binding peptide
  MOD_RES (34), (36): Xaa is C or S
  MOD_RES (14), (15), (16), (17), (18): Xaa is A or G
  MOD_RES (19), (20), (21), (22): Xaa is A or G or is absent

SEQ ID NO: 67735 - protein, 39 aa, Artificial Sequence; identical to SEQ ID NO: 33319
  GFR-binding peptide
  MOD_RES (3), (4), (39): Xaa is C or S
  MOD_RES (18), (19), (20), (21), (22): Xaa is A or G
  MOD_RES (23), (24), (25), (26): Xaa is A or G or is absent

SEQ ID NO: 67736 - protein, 34 aa, Artificial Sequence; identical to SEQ ID NO: 33322
  GFR-binding peptide
  MOD_RES (1), (1): Xaa is C or S
  MOD_RES (15), (16), (17), (18), (19): Xaa is A or G
  MOD_RES (20), (21), (22), (23): Xaa is A or G or is absent

SEQ ID NO: 67737 - protein, 39 aa, Artificial Sequence; identical to SEQ ID NO: 30193
  GFR-binding peptide
  MOD_RES (6), (7), (39): Xaa is C or S

SEQ ID NO: 67738 - protein, 41 aa, Artificial Sequence; identical to SEQ ID NO: 8836
  GFR-binding peptide
  MOD_RES (6), (38), (40): Xaa is C or S

SEQ ID NO: 67739 - protein, 34 aa, Artificial Sequence
  GFR-binding peptide
  MOD_RES (34), (34): Xaa is C or S
  MOD_RES (14), (15), (16), (17), (18): Xaa is A or G
  MOD_RES (19), (20), (21), (22): Xaa is A or G or is absent
VPTRLSPISILYKXXXXXXXXXLKYHYDMVVESX

SEQ ID NO: 67740 - protein, 36 aa, Artificial Sequence; identical to SEQ ID NO: 8840
  GFR-binding peptide
  MOD_RES (3), (4), (36): Xaa is C or S

SEQ ID NO: 67741 - protein, 42 aa, Artificial Sequence; identical to SEQ ID NO: 30200
  GFR-binding peptide
  MOD_RES (6), (7), (39), (41): Xaa is C or S

SEQ ID NO: 67742 - protein, 38 aa, Artificial Sequence; identical to SEQ ID NO: 30201
  GFR-binding peptide
  MOD_RES (1), (35), (37): Xaa is C or S
  MOD_RES (15), (16), (17), (18), (19): Xaa is A or G
  MOD_RES (20), (21), (22), (23): Xaa is A or G or is absent

SEQ ID NO: 67743 - protein, 36 aa, Artificial Sequence; identical to SEQ ID NO: 30203
  GFR-binding peptide
  MOD_RES (1), (34), (36): Xaa is C or S
  MOD_RES (15), (16), (17), (18), (19): Xaa is A or G
  MOD_RES (20), (21), (22), (23): Xaa is A or G or is absent

SEQ ID NO: 67744 - protein, 36 aa, Artificial Sequence; identical to SEQ ID NO: 8843
  GFR-binding peptide
  MOD_RES (1), (2), (36): Xaa is C or S
  MOD_RES (16), (17), (18), (19), (20): Xaa is A or G
  MOD_RES (21), (22), (23), (24): Xaa is A or G or is absent

SEQ ID NO: 67745 - protein, 42 aa, Artificial Sequence; identical to SEQ ID NO: 8846
  GFR-binding peptide
  MOD_RES (6), (7), (40), (42): Xaa is C or S
  MOD_RES (21), (22), (23), (24), (25): Xaa is A or G
  MOD_RES (26), (27), (28), (29): Xaa is A or G or is absent

SEQ ID NO: 67746 - protein, 35 aa, Artificial Sequence
  GFR-binding peptide
  MOD_RES (4), (5): Xaa is C or S
PEPXXVPEKMEPISILYLDENKNVVKFKYENMTVE

SEQ ID NO: 67747 - protein, 34 aa, Artificial Sequence; identical to SEQ ID NO: 8849
  GFR-binding peptide
  MOD_RES (1), (32), (34): Xaa is C or S

SEQ ID NO: 67748 - protein, 38 aa, Artificial Sequence; identical to SEQ ID NO: 30212
  GFR-binding peptide
  MOD_RES (1), (35), (37): Xaa is C or S
  MOD_RES (15), (16), (17), (18), (19): Xaa is A or G
  MOD_RES (20), (21), (22), (23): Xaa is A or G or is absent

SEQ ID NO: 67749 - protein, 32 aa, Artificial Sequence; identical to SEQ ID NO: 8852
  GFR-binding peptide
  MOD_RES (32), (32): Xaa is C or S

SEQ ID NO: 67750 - protein, 37 aa, Artificial Sequence; identical to SEQ ID NO: 58189
  GFR-binding peptide
  MOD_RES (4), (5): Xaa is C or S
  MOD_RES (19), (20), (21), (22), (23): Xaa is A or G
  MOD_RES (24), (25), (26), (27): Xaa is A or G or is absent

SEQ ID NO: 67751 - protein, 37 aa, Artificial Sequence; identical to SEQ ID NO: 8853
  GFR-binding peptide
  MOD_RES (4), (5): Xaa is C or S
  MOD_RES (19), (20), (21), (22), (23): Xaa is A or G
  MOD_RES (24), (25), (26), (27): Xaa is A or G or is absent

SEQ ID NO: 67752 - protein, 33 aa, Artificial Sequence; identical to SEQ ID NO: 8854
  GFR-binding peptide
  MOD_RES (14), (15), (16), (17), (18): Xaa is A or G
  MOD_RES (19), (20), (21), (22): Xaa is A or G or is absent

SEQ ID NO: 67753 - protein, 32 aa, Artificial Sequence; identical to SEQ ID NO: 58192
  GFR-binding peptide
  MOD_RES (14), (15), (16), (17), (18): Xaa is A or G
  MOD_RES (19), (20), (21), (22): Xaa is A or G or is absent

SEQ ID NO: 67754 - protein, 38 aa, Artificial Sequence; identical to SEQ ID NO: 30220
  GFR-binding peptide
  MOD_RES (6), (7): Xaa is C or S

SEQ ID NO: 67755 - protein, 39 aa, Artificial Sequence; identical to SEQ ID NO: 33342
  GFR-binding peptide
  MOD_RES (3), (4), (38): Xaa is C or S
  MOD_RES (18), (19), (20), (21), (22): Xaa is A or G
  MOD_RES (23), (24), (25), (26): Xaa is A or G or is absent

SEQ ID NO: 67756 - protein, 36 aa, Artificial Sequence; identical to SEQ ID NO: 8858
  GFR-binding peptide
  MOD_RES (3), (4), (35): Xaa is C or S

SEQ ID NO: 67757 - protein, 39 aa, Artificial Sequence; identical to SEQ ID NO: 33345
  GFR-binding peptide
  MOD_RES (7), (39): Xaa is C or S

SEQ ID NO: 67758 - protein, 37 aa, Artificial Sequence; identical to SEQ ID NO: 8860
  GFR-binding peptide
  MOD_RES (5), (6), (37): Xaa is C or S

SEQ ID NO: 67759 - protein, 33 aa, Artificial Sequence; identical to SEQ ID NO: 33349
  GFR-binding peptide
  MOD_RES (2), (3): Xaa is C or S

SEQ ID NO: 67760 - protein, 38 aa, Artificial Sequence; identical to SEQ ID NO: 33351
  GFR-binding peptide
  MOD_RES (1), (2), (35), (37): Xaa is C or S
  MOD_RES (16), (17), (18), (19), (20): Xaa is A or G
  MOD_RES (21), (22), (23), (24): Xaa is A or G or is absent

SEQ ID NO: 67761 - protein, 39 aa, Artificial Sequence
  GFR-binding peptide
  MOD_RES (5), (6), (39): Xaa is C or S
  MOD_RES (20), (21), (22), (23), (24): Xaa is A or G
  MOD_RES (25), (26), (27), (28): Xaa is A or G or is absent
SASPXXVPQDLSPINILYFXXXXXXXXXYGKIPMVVKSX

SEQ ID NO: 67762 - protein, 42 aa, Artificial Sequence; identical to SEQ ID NO: 8867
  GFR-binding peptide
  MOD_RES (4), (5), (39), (41): Xaa is C or S
  MOD_RES (19), (20), (21), (22), (23): Xaa is A or G
  MOD_RES (24), (25), (26), (27): Xaa is A or G or is absent

SEQ ID NO: 67763 - protein, 35 aa, Artificial Sequence; identical to SEQ ID NO: 8868
  GFR-binding peptide
  MOD_RES (3), (4), (35): Xaa is C or S

SEQ ID NO: 67764 - protein, 37 aa, Artificial Sequence; identical to SEQ ID NO: 33354
  GFR-binding peptide
  MOD_RES (1), (2), (35), (37): Xaa is C or S
  MOD_RES (16), (17), (18), (19), (20): Xaa is A or G
  MOD_RES (21), (22), (23), (24): Xaa is A or G or is absent

SEQ ID NO: 67765 - protein, 40 aa, Artificial Sequence; identical to SEQ ID NO: 30232
  GFR-binding peptide
  MOD_RES (4), (5), (37), (39): Xaa is C or S

SEQ ID NO: 67766 - protein, 36 aa, Artificial Sequence; identical to SEQ ID NO: 8871
  GFR-binding peptide
  MOD_RES (4), (5): Xaa is C or S

SEQ ID NO: 67767 - protein, 34 aa, Artificial Sequence; identical to SEQ ID NO: 30234
  GFR-binding peptide
  MOD_RES (1), (33): Xaa is C or S

SEQ ID NO: 67768 - protein, 41 aa, Artificial Sequence; identical to SEQ ID NO: 8872
  GFR-binding peptide
  MOD_RES (7), (39), (41): Xaa is C or S

SEQ ID NO: 67769 - protein, 43 aa, Artificial Sequence; identical to SEQ ID NO: 32302
  GFR-binding peptide
  MOD_RES (6), (7), (41), (43): Xaa is C or S
  MOD_RES (21), (22), (23), (24), (25): Xaa is A or G
  MOD_RES (26), (27), (28), (29): Xaa is A or G or is absent

SEQ ID NO: 67770 - protein, 38 aa, Artificial Sequence; identical to SEQ ID NO: 8873
  GFR-binding peptide
  MOD_RES (5), (6), (38): Xaa is C or S

SEQ ID NO: 67771 - protein, 37 aa, Artificial Sequence; identical to SEQ ID NO: 30239
  GFR-binding peptide
  MOD_RES (3), (4), (37): Xaa is C or S

SEQ ID NO: 67772 - protein, 32 aa, Artificial Sequence; identical to SEQ ID NO: 32306
  GFR-binding peptide
  MOD_RES (31), (31): Xaa is C or S

SEQ ID NO: 67773 - protein, 37 aa, Artificial Sequence; identical to SEQ ID NO: 8878
  GFR-binding peptide
  MOD_RES (3), (4), (36): Xaa is C or S

SEQ ID NO: 67774 - protein, 42 aa, Artificial Sequence
  GFR-binding peptide
  MOD_RES (6), (7), (41): Xaa is C or S
  MOD_RES (21), (22), (23), (24), (25): Xaa is A or G
  MOD_RES (26), (27), (28), (29): Xaa is A or G or is absent
STPPTXXVPTRLSATSILYYXXXXXXXXXLRKHRDMVVESXG

SEQ ID NO: 67775 - protein, 35 aa, Artificial Sequence; identical to SEQ ID NO: 32311
  GFR-binding peptide
  MOD_RES (2), (3), (35): Xaa is C or S

SEQ ID NO: 67776 - protein, 40 aa, Artificial Sequence; identical to SEQ ID NO: 8885
  GFR-binding peptide
  MOD_RES (6), (7): Xaa is C or S
  MOD_RES (21), (22), (23), (24), (25): Xaa is A or G
  MOD_RES (26), (27), (28), (29): Xaa is A or G or is absent

SEQ ID NO: 67777 - protein, 40 aa, Artificial Sequence; identical to SEQ ID NO: 32319
  GFR-binding peptide
  MOD_RES (5), (6), (40): Xaa is C or S
  MOD_RES (20), (21), (22), (23), (24): Xaa is A or G
  MOD_RES (25), (26), (27), (28): Xaa is A or G or is absent

SEQ ID NO: 67778 - protein, 35 aa, Artificial Sequence; identical to SEQ ID NO: 8887
  GFR-binding peptide
  MOD_RES (2), (2): Xaa is C or S
  MOD_RES (16), (17), (18), (19), (20): Xaa is A or G
  MOD_RES (21), (22), (23), (24): Xaa is A or G or is absent

SEQ ID NO: 67779 - protein, 31 aa, Artificial Sequence
  GFR-binding peptide
VPEKMSPISILYKDENKNVVLKYHYNMTVES

SEQ ID NO: 67780 - protein, 34 aa, Artificial Sequence
  GFR-binding peptide
  MOD_RES (3), (4): Xaa is C or S
EPXXVPEKMSPISILYKDENKNVVLKYHYNMTVE

SEQ ID NO: 67781 - protein, 39 aa, Artificial Sequence
  GFR-binding peptide
  MOD_RES (1), (2), (36), (38): Xaa is C or S
  MOD_RES (16), (17), (18), (19), (20): Xaa is A or G
  MOD_RES (21), (22), (23), (24): Xaa is A or G or is absent
XXVPTRLEPISILYLXXXXXXXXXKFKYEDMVVESXGXR

SEQ ID NO: 67782 - protein, 37 aa, Artificial Sequence; identical to SEQ ID NO: 8889
  GFR-binding peptide
  MOD_RES (1), (2), (35), (37): Xaa is C or S
  MOD_RES (16), (17), (18), (19), (20): Xaa is A or G
  MOD_RES (21), (22), (23), (24): Xaa is A or G or is absent

SEQ ID NO: 67783 - protein, 36 aa, Artificial Sequence; identical to SEQ ID NO: 30252
  GFR-binding peptide
  MOD_RES (3), (4), (36): Xaa is C or S

SEQ ID NO: 67784 - protein, 35 aa, Artificial Sequence; identical to SEQ ID NO: 8891
  GFR-binding peptide
  MOD_RES (1), (2), (34): Xaa is C or S

SEQ ID NO: 67785 - protein, 37 aa, Artificial Sequence; identical to SEQ ID NO: 8893
  GFR-binding peptide
  MOD_RES (2), (3), (36): Xaa is C or S
  MOD_RES (17), (18), (19), (20), (21): Xaa is A or G
  MOD_RES (22), (23), (24), (25): Xaa is A or G or is absent

SEQ ID NO: 67786 - protein, 36 aa, Artificial Sequence; identical to SEQ ID NO: 30257
  GFR-binding peptide
  MOD_RES (5), (6): Xaa is C or S

SEQ ID NO: 67787 - protein, 40 aa, Artificial Sequence; identical to SEQ ID NO: 8894
  GFR-binding peptide
  MOD_RES (5), (6), (40): Xaa is C or S
  MOD_RES (20), (21), (22), (23), (24): Xaa is A or G
  MOD_RES (25), (26), (27), (28): Xaa is A or G or is absent

SEQ ID NO: 67788 - protein, 42 aa, Artificial Sequence; identical to SEQ ID NO: 8896
  GFR-binding peptide
  MOD_RES (5), (6), (41): Xaa is C or S
  MOD_RES (20), (21), (22), (23), (24): Xaa is A or G
  MOD_RES (25), (26), (27), (28): Xaa is A or G or is absent

SEQ ID NO: 67789 - protein, 40 aa, Artificial Sequence
  GFR-binding peptide
  MOD_RES (4), (5), (39): Xaa is C or S
  MOD_RES (19), (20), (21), (22), (23): Xaa is A or G
  MOD_RES (24), (25), (26), (27): Xaa is A or G or is absent
PEPXXVPEKMNAISILYFXXXXXXXXXLKKYRNMTVESXA

SEQ ID NO: 67790 - protein, 37 aa, Artificial Sequence
  GFR-binding peptide
  MOD_RES (4), (5): Xaa is C or S
  MOD_RES (19), (20), (21), (22), (23): Xaa is A or G
  MOD_RES (24), (25), (26), (27): Xaa is A or G or is absent
PPTXXVPTRLSPISILYKXXXXXXXXXLKYHYDMVVE

SEQ ID NO: 67791 - protein, 38 aa, Artificial Sequence
  GFR-binding peptide
  MOD_RES (3), (4), (36), (38): Xaa is C or S
GPXXTPTKMSPISMLYKNDKQQIILKYHYGMVVDRXGX

SEQ ID NO: 67792 - protein, 37 aa, Artificial Sequence
  GFR-binding peptide
  MOD_RES (1), (35), (37): Xaa is C or S
  MOD_RES (15), (16), (17), (18), (19): Xaa is A or G
  MOD_RES (20), (21), (22), (23): Xaa is A or G or is absent
XVPTRLEPISILYLXXXXXXXXXKFKYEDMVVESXGX

SEQ ID NO: 67793 - protein, 35 aa, Artificial Sequence; identical to SEQ ID NO: 30264
  GFR-binding peptide
  MOD_RES (1), (2), (34): Xaa is C or S

SEQ ID NO: 67794 - protein, 39 aa, Artificial Sequence; identical to SEQ ID NO: 30265
  GFR-binding peptide
  MOD_RES (4), (5), (37), (39): Xaa is C or S

SEQ ID NO: 67795 - protein, 37 aa, Artificial Sequence; identical to SEQ ID NO: 57265
  GFR-binding peptide
  MOD_RES (1), (2), (34), (36): Xaa is C or S

SEQ ID NO: 67796 - protein, 38 aa, Artificial Sequence; identical to SEQ ID NO: 8900
  GFR-binding peptide
  MOD_RES (1), (2), (37): Xaa is C or S
  MOD_RES (16), (17), (18), (19), (20): Xaa is A or G
  MOD_RES (21), (22), (23), (24): Xaa is A or G or is absent

SEQ ID NO: 67797 - protein, 43 aa, Artificial Sequence; identical to SEQ ID NO: 32335
  GFR-binding peptide
  MOD_RES (5), (6), (40), (42): Xaa is C or S
  MOD_RES (20), (21), (22), (23), (24): Xaa is A or G
  MOD_RES (25), (26), (27), (28): Xaa is A or G or is absent

SEQ ID NO: 67798 - protein, 34 aa, Artificial Sequence
  GFR-binding peptide
  MOD_RES (34), (34): Xaa is C or S
  MOD_RES (14), (15), (16), (17), (18): Xaa is A or G
  MOD_RES (19), (20), (21), (22): Xaa is A or G or is absent
VPARLSATSILYYXXXXXXXXXLRKHRDMVVEAX

SEQ ID NO: 67799 - protein, 37 aa, Artificial Sequence; identical to SEQ ID NO: 30267
  GFR-binding peptide
  MOD_RES (1), (2), (36): Xaa is C or S
  MOD_RES (16), (17), (18), (19), (20): Xaa is A or G
  MOD_RES (21), (22), (23), (24): Xaa is A or G or is absent

SEQ ID NO: 67800 - protein, 35 aa, Artificial Sequence; identical to SEQ ID NO: 30269
  GFR-binding peptide
  MOD_RES (1), (2), (34): Xaa is C or S

SEQ ID NO: 67801 - protein, 35 aa, Artificial Sequence; identical to SEQ ID NO: 30270
  GFR-binding peptide
  MOD_RES (1), (2), (34): Xaa is C or S

SEQ ID NO: 67802 - protein, 35 aa, Artificial Sequence
  GFR-binding peptide
  MOD_RES (1), (35): Xaa is C or S
  MOD_RES (15), (16), (17), (18), (19): Xaa is A or G
  MOD_RES (20), (21), (22), (23): Xaa is A or G or is absent
XTPTKMSPISMLYKXXXXXXXXXLKYHYGMVVDRX

SEQ ID NO: 67803 - protein, 37 aa, Artificial Sequence; identical to SEQ ID NO: 16207
  GFR-binding peptide
  MOD_RES (2), (3), (35), (37): Xaa is C or S

SEQ ID NO: 67804 - protein, 35 aa, Artificial Sequence; identical to SEQ ID NO: 8906
  GFR-binding peptide
  MOD_RES (1), (2), (34): Xaa is C or S

SEQ ID NO: 67805 - protein, 37 aa, Artificial Sequence; identical to SEQ ID NO: 32344
  GFR-binding peptide
  MOD_RES (2), (34), (36): Xaa is C or S

SEQ ID NO: 67806 - protein, 41 aa, Artificial Sequence
  GFR-binding peptide
  MOD_RES (5), (6), (39), (41): Xaa is C or S
  MOD_RES (20), (21), (22), (23), (24): Xaa is A or G
  MOD_RES (25), (26), (27), (28): Xaa is A or G or is absent
VPSTXXAPVKTEPISMLYLXXXXXXXXXKFKYEMIVEEXGX

SEQ ID NO: 67807 - protein, 35 aa, Artificial Sequence; identical to SEQ ID NO: 8907
  GFR-binding peptide
  MOD_RES (1), (32), (34): Xaa is C or S

SEQ ID NO: 67808 - protein, 42 aa, Artificial Sequence
  GFR-binding peptide
  MOD_RES (5), (6), (40), (42): Xaa is C or S
  MOD_RES (20), (21), (22), (23), (24): Xaa is A or G
  MOD_RES (25), (26), (27), (28): Xaa is A or G or is absent
TPPTXXVPTRLSATSILYYXXXXXXXXXLRKHRDMVVESXGX

SEQ ID NO: 67809 - protein, 31 aa, Artificial Sequence; identical to SEQ ID NO: 30276
  GFR-binding peptide
  MOD_RES (1), (1): Xaa is C or S

SEQ ID NO: 67810 - protein, 35 aa, Artificial Sequence
  GFR-binding peptide
  MOD_RES (2), (3): Xaa is C or S
  MOD_RES (17), (18), (19), (20), (21): Xaa is A or G
  MOD_RES (22), (23), (24), (25): Xaa is A or G or is absent
PXXTPTKMEPISMLYLXXXXXXXXXKFKYEGMVVD

SEQ ID NO: 67811 - protein, 33 aa, Artificial Sequence
  GFR-binding peptide
  MOD_RES (1), (2): Xaa is C or S
XXVPEKMNAISILYFDENKNVVLKKYRNMTVES

SEQ ID NO: 67812 - protein, 37 aa, Artificial Sequence; identical to SEQ ID NO: 32347
  GFR-binding peptide
  MOD_RES (2), (3), (36): Xaa is C or S

SEQ ID NO: 67813 - protein, 36 aa, Artificial Sequence
  GFR-binding peptide
  MOD_RES (1), (2), (36): Xaa is C or S
  MOD_RES (16), (17), (18), (19), (20): Xaa is A or G
  MOD_RES (21), (22), (23), (24): Xaa is A or G or is absent
XXVPEKMEPISILYLXXXXXXXXXKFKYENMTVESX

SEQ ID NO: 67814 - protein, 42 aa, Artificial Sequence; identical to SEQ ID NO: 32348
  GFR-binding peptide
  MOD_RES (4), (5), (39), (41): Xaa is C or S
  MOD_RES (19), (20), (21), (22), (23): Xaa is A or G
  MOD_RES (24), (25), (26), (27): Xaa is A or G or is absent

SEQ ID NO: 67815 - protein, 36 aa, Artificial Sequence; identical to SEQ ID NO: 32351
  GFR-binding peptide
  MOD_RES (1), (33), (35): Xaa is C or S

SEQ ID NO: 67816 - protein, 41 aa, Artificial Sequence; identical to SEQ ID NO: 8913
  GFR-binding peptide
  MOD_RES (6), (7), (40): Xaa is C or S
  MOD_RES (21), (22), (23), (24), (25): Xaa is A or G
  MOD_RES (26), (27), (28), (29): Xaa is A or G or is absent

SEQ ID NO: 67817 - protein, 38 aa, Artificial Sequence; identical to SEQ ID NO: 8914
  GFR-binding peptide
  MOD_RES (5), (6): Xaa is C or S
  MOD_RES (20), (21), (22), (23), (24): Xaa is A or G
  MOD_RES (25), (26), (27), (28): Xaa is A or G or is absent

SEQ ID NO: 67818 - protein, 41 aa, Artificial Sequence
  GFR-binding peptide
  MOD_RES (6), (7), (41): Xaa is C or S
  MOD_RES (21), (22), (23), (24), (25): Xaa is A or G
  MOD_RES (26), (27), (28), (29): Xaa is A or G or is absent
HVPKPXXAPTKLSPISVLYKXXXXXXXXXLKYHYNMVVRSX

SEQ ID NO: 67819 - protein, 35 aa, Artificial Sequence; identical to SEQ ID NO: 32356
  GFR-binding peptide
  MOD_RES (1), (2): Xaa is C or S
  MOD_RES (16), (17), (18), (19), (20): Xaa is A or G
  MOD_RES (21), (22), (23), (24): Xaa is A or G or is absent

SEQ ID NO: 67820 - protein, 34 aa, Artificial Sequence; identical to SEQ ID NO: 30289
  GFR-binding peptide
  MOD_RES (2), (3): Xaa is C or S

SEQ ID NO: 67821 - protein, 39 aa, Artificial Sequence; identical to SEQ ID NO: 30290
  GFR-binding peptide
  MOD_RES (5), (6): Xaa is C or S
  MOD_RES (20), (21), (22), (23), (24): Xaa is A or G
  MOD_RES (25), (26), (27), (28): Xaa is A or G or is absent

SEQ ID NO: 67822 - protein, 35 aa, Artificial Sequence; identical to SEQ ID NO: 8918
  GFR-binding peptide
  MOD_RES (4), (5): Xaa is C or S

SEQ ID NO: 67823 - protein, 39 aa, Artificial Sequence; identical to SEQ ID NO: 32365
  GFR-binding peptide
  MOD_RES (6), (38): Xaa is C or S

SEQ ID NO: 67824 - protein, 42 aa, Artificial Sequence; identical to SEQ ID NO: 32366
  GFR-binding peptide
  MOD_RES (5), (6), (41): Xaa is C or S
  MOD_RES (20), (21), (22), (23), (24): Xaa is A or G
  MOD_RES (25), (26), (27), (28): Xaa is A or G or is absent

SEQ ID NO: 67825 - protein, 37 aa, Artificial Sequence; identical to SEQ ID NO: 8923
  GFR-binding peptide
  MOD_RES (3), (4), (37): Xaa is C or S

SEQ ID NO: 67826 - protein, 36 aa, Artificial Sequence
  GFR-binding peptide
  MOD_RES (2), (3), (36): Xaa is C or S
  MOD_RES (17), (18), (19), (20), (21): Xaa is A or G
  MOD_RES (22), (23), (24), (25): Xaa is A or G or is absent
PXXVSQDLSPINILYFXXXXXXXXXYGKIPMIVKSX

SEQ ID NO: 67827 - protein, 44 aa, Artificial Sequence
  GFR-binding peptide
  MOD_RES (6), (7), (41), (43): Xaa is C or S
  MOD_RES (21), (22), (23), (24), (25): Xaa is A or G
  MOD_RES (26), (27), (28), (29): Xaa is A or G or is absent
GSAGPXXTPTKMSATSMLYYXXXXXXXXXLRKHRGMVVDRXGXS

SEQ ID NO: 67828 - protein, 38 aa, Artificial Sequence
  GFR-binding peptide
  MOD_RES (6), (7): Xaa is C or S
GIPEPXXVPEKMSPINILYFDENKNVVYGKIPNMTVES

SEQ ID NO: 67829 - protein, 33 aa, Artificial Sequence; identical to SEQ ID NO: 8925
  GFR-binding peptide
  MOD_RES (1), (1): Xaa is C or S
  MOD_RES (15), (16), (17), (18), (19): Xaa is A or G
  MOD_RES (20), (21), (22), (23): Xaa is A or G or is absent

SEQ ID NO: 67830 - protein, 36 aa, Artificial Sequence; identical to SEQ ID NO: 32375
  GFR-binding peptide
  MOD_RES (34), (36): Xaa is C or S
  MOD_RES (14), (15), (16), (17), (18): Xaa is A or G
  MOD_RES (19), (20), (21), (22): Xaa is A or G or is absent

SEQ ID NO: 67831 - protein, 39 aa, Artificial Sequence; identical to SEQ ID NO: 8931
  GFR-binding peptide
  MOD_RES (2), (3), (37), (39): Xaa is C or S
  MOD_RES (17), (18), (19), (20), (21): Xaa is A or G
  MOD_RES (22), (23), (24), (25): Xaa is A or G or is absent

SEQ ID NO: 67832 - protein, 41 aa, Artificial Sequence; identical to SEQ ID NO: 30306
  GFR-binding peptide
  MOD_RES (7), (39), (41): Xaa is C or S

SEQ ID NO: 67833 - protein, 32 aa, Artificial Sequence; identical to SEQ ID NO: 8934
  GFR-binding peptide
  MOD_RES (31), (31): Xaa is C or S

SEQ ID NO: 67834 - protein, 37 aa, Artificial Sequence; identical to SEQ ID NO: 8939
  GFR-binding peptide
  MOD_RES (2), (3): Xaa is C or S
  MOD_RES (17), (18), (19), (20), (21): Xaa is A or G
  MOD_RES (22), (23), (24), (25): Xaa is A or G or is absent

SEQ ID NO: 67835 - protein, 38 aa, Artificial Sequence; identical to SEQ ID NO: 32384
  GFR-binding peptide
  MOD_RES (2), (3), (37): Xaa is C or S
  MOD_RES (17), (18), (19), (20), (21): Xaa is A or G
  MOD_RES (22), (23), (24), (25): Xaa is A or G or is absent

SEQ ID NO: 67836 - protein, 36 aa, Artificial Sequence; identical to SEQ ID NO: 8941
  GFR-binding peptide
  MOD_RES (4), (5), (36): Xaa is C or S

SEQ ID NO: 67837 - protein, 38 aa, Artificial Sequence; identical to SEQ ID NO: 32386
  GFR-binding peptide
  MOD_RES (5), (6), (38): Xaa is C or S

SEQ ID NO: 67838 - protein, 35 aa, Artificial Sequence; identical to SEQ ID NO: 32388
  GFR-binding peptide
  MOD_RES (4), (5): Xaa is C or S

SEQ ID NO: 67839 - protein, 37 aa, Artificial Sequence
  GFR-binding peptide
  MOD_RES (4), (5): Xaa is C or S
  MOD_RES (19), (20), (21), (22), (23): Xaa is A or G
  MOD_RES (24), (25), (26), (27): Xaa is A or G or is absent
AGPXXTPTKMEPISMLYLXXXXXXXXXKFKYEGMVVD

SEQ ID NO: 67840 - protein, 41 aa, Artificial Sequence
  GFR-binding peptide
  MOD_RES (3), (4), (38), (40): Xaa is C or S
  MOD_RES (18), (19), (20), (21), (22): Xaa is A or G
  MOD_RES (23), (24), (25), (26): Xaa is A or G or is absent
ASXXVPARLSATSILYYXXXXXXXXXLRKHRDMVVEAXGXR

SEQ ID NO: 67841 - protein, 39 aa, Artificial Sequence; identical to SEQ ID NO: 32390
  GFR-binding peptide
  MOD_RES (6), (7): Xaa is C or S

SEQ ID NO: 67842 - protein, 35 aa, Artificial Sequence; identical to SEQ ID NO: 30315
  GFR-binding peptide
  MOD_RES (34), (34): Xaa is C or S
  MOD_RES (14), (15), (16), (17), (18): Xaa is A or G
  MOD_RES (19), (20), (21), (22): Xaa is A or G or is absent

SEQ ID NO: 67843 - protein, 41 aa, Artificial Sequence
  GFR-binding peptide
  MOD_RES (6), (7), (39), (41): Xaa is C or S
GIPEPXXVPEKMNAISILYFDENKNVVLKKYRNMTVESXAX

SEQ ID NO: 67844 - protein, 34 aa, Artificial Sequence; identical to SEQ ID NO: 30318
  GFR-binding peptide
  MOD_RES (2), (3): Xaa is C or S

SEQ ID NO: 67845 - protein, 40 aa, Artificial Sequence; identical to SEQ ID NO: 8947
  GFR-binding peptide
  MOD_RES (6), (7), (39): Xaa is C or S

SEQ ID NO: 67846 - protein, 39 aa, Artificial Sequence; identical to SEQ ID NO: 32398
  GFR-binding peptide
  MOD_RES (1), (2), (36), (38): Xaa is C or S
  MOD_RES (16), (17), (18), (19), (20): Xaa is A or G
  MOD_RES (21), (22), (23), (24): Xaa is A or G or is absent

SEQ ID NO: 67847 - protein, 37 aa, Artificial Sequence; identical to SEQ ID NO: 30320
  GFR-binding peptide
  MOD_RES (2), (3), (35), (37): Xaa is C or S

SEQ ID NO: 67848 - protein, 41 aa, Artificial Sequence; identical to SEQ ID NO: 30322
  GFR-binding peptide
  MOD_RES (5), (6), (41): Xaa is C or S
  MOD_RES (20), (21), (22), (23), (24): Xaa is A or G
  MOD_RES (25), (26), (27), (28): Xaa is A or G or is absent

SEQ ID NO: 67849 - protein, 35 aa, Artificial Sequence
  GFR-binding peptide
  MOD_RES (4), (5): Xaa is C or S
AAPXXVPQALSPINILYFVGRKPKVYGKIPMIVRS

SEQ ID NO: 67850 - protein, 38 aa, Artificial Sequence; identical to SEQ ID NO: 8948
  GFR-binding peptide
  MOD_RES (3), (4), (38): Xaa is C or S
  MOD_RES (18), (19), (20), (21), (22): Xaa is A or G
  MOD_RES (23), (24), (25), (26): Xaa is A or G or is absent

SEQ ID NO: 67851 - protein, 37 aa, Artificial Sequence; identical to SEQ ID NO: 32404
  GFR-binding peptide
  MOD_RES (34), (36): Xaa is C or S
  MOD_RES (14), (15), (16), (17), (18): Xaa is A or G
  MOD_RES (19), (20), (21), (22): Xaa is A or G or is absent

SEQ ID NO: 67852 - protein, 38 aa, Artificial Sequence; identical to SEQ ID NO: 30327
  GFR-binding peptide
  MOD_RES (2), (3), (36), (38): Xaa is C or S
  MOD_RES (17), (18), (19), (20), (21): Xaa is A or G
  MOD_RES (22), (23), (24), (25): Xaa is A or G or is absent

SEQ ID NO: 67853 - protein, 39 aa, Artificial Sequence
  GFR-binding peptide
  MOD_RES (4), (5), (37), (39): Xaa is C or S
PEPXXVPEKMEPISILYLDENKNVVKFKYENMTVESXAX

SEQ ID NO: 67854 - protein, 35 aa, Artificial Sequence; identical to SEQ ID NO: 8957
  GFR-binding peptide
  MOD_RES (1), (33), (35): Xaa is C or S

SEQ ID NO: 67855 - protein, 39 aa, Artificial Sequence; identical to SEQ ID NO: 30331
  GFR-binding peptide
  MOD_RES (5), (6), (37), (39): Xaa is C or S

SEQ ID NO: 67856 - protein, 33 aa, Artificial Sequence; identical to SEQ ID NO: 8958
  GFR-binding peptide
  MOD_RES (2), (3): Xaa is C or S

SEQ ID NO: 67857 - protein, 40 aa, Artificial Sequence; identical to SEQ ID NO: 8959
  GFR-binding peptide
  MOD_RES (3), (4), (37), (39): Xaa is C or S
  MOD_RES (18), (19), (20), (21), (22): Xaa is A or G
  MOD_RES (23), (24), (25), (26): Xaa is A or G or is absent

SEQ ID NO: 67858 - protein, 36 aa, Artificial Sequence; identical to SEQ ID NO: 8961
  GFR-binding peptide
  MOD_RES (2), (34), (36): Xaa is C or S

SEQ ID NO: 67859 - protein, 36 aa, Artificial Sequence; identical to SEQ ID NO: 32412
  GFR-binding peptide
  MOD_RES (4), (5): Xaa is C or S

SEQ ID NO: 67860 - protein, 32 aa, Artificial Sequence; identical to SEQ ID NO: 8962
  GFR-binding peptide
  MOD_RES (1), (2): Xaa is C or S

SEQ ID NO: 67861 - protein, 35 aa, Artificial Sequence; identical to SEQ ID NO: 8963
  GFR-binding peptide
  MOD_RES (1), (2): Xaa is C or S
  MOD_RES (16), (17), (18), (19), (20): Xaa is A or G
  MOD_RES (21), (22), (23), (24): Xaa is A or G or is absent

SEQ ID NO: 67862 - protein, 40 aa, Artificial Sequence; identical to SEQ ID NO: 30336
  GFR-binding peptide
  MOD_RES (3), (4), (38), (40): Xaa is C or S
  MOD_RES (18), (19), (20), (21), (22): Xaa is A or G
  MOD_RES (23), (24), (25), (26): Xaa is A or G or is absent

SEQ ID NO: 67863 - protein, 36 aa, Artificial Sequence; identical to SEQ ID NO: 30338
  GFR-binding peptide
  MOD_RES (3), (4), (36): Xaa is C or S

SEQ ID NO: 67864 - protein, 40 aa, Artificial Sequence; identical to SEQ ID NO: 8966
  GFR-binding peptide
  MOD_RES (3), (4), (38), (40): Xaa is C or S
  MOD_RES (18), (19), (20), (21), (22): Xaa is A or G
  MOD_RES (23), (24), (25), (26): Xaa is A or G or is absent

SEQ ID NO: 67865 - protein, 35 aa, Artificial Sequence; identical to SEQ ID NO: 8968
  GFR-binding peptide
  MOD_RES (32), (34): Xaa is C or S

SEQ ID NO: 67866 - protein, 38 aa, Artificial Sequence; identical to SEQ ID NO: 8970
  GFR-binding peptide
  MOD_RES (3), (4), (35), (37): Xaa is C or S

SEQ ID NO: 67867 - protein, 38 aa, Artificial Sequence
  GFR-binding peptide
  MOD_RES (5), (6), (38): Xaa is C or S
APASXXVPARLSATSILYYDAANNVVLRKHRDMVVEAX

SEQ ID NO: 67868 - protein, 36 aa, Artificial Sequence; identical to SEQ ID NO: 8971
  GFR-binding peptide
  MOD_RES (5), (6): Xaa is C or S

SEQ ID NO: 67869 - protein, 38 aa, Artificial Sequence; identical to SEQ ID NO: 8973
  GFR-binding peptide
  MOD_RES (4), (5), (37): Xaa is C or S

SEQ ID NO: 67870 - protein, 33 aa, Artificial Sequence; identical to SEQ ID NO: 8974
  GFR-binding peptide
  MOD_RES (1), (2): Xaa is C or S

SEQ ID NO: 67871 - protein, 33 aa, Artificial Sequence; identical to SEQ ID NO: 57343
  GFR-binding peptide
  MOD_RES (14), (15), (16), (17), (18): Xaa is A or G
  MOD_RES (19), (20), (21), (22): Xaa is A or G or is absent

SEQ ID NO: 67872 - protein, 32 aa, Artificial Sequence; identical to SEQ ID NO: 30349
  GFR-binding peptide
  MOD_RES (32), (32): Xaa is C or S

SEQ ID NO: 67873 - protein, 38 aa, Artificial Sequence
  GFR-binding peptide
  MOD_RES (4), (5): Xaa is C or S
  MOD_RES (19), (20), (21), (22), (23): Xaa is A or G
  MOD_RES (24), (25), (26), (27): Xaa is A or G or is absent
PPTXXVPTRLEPISILYLXXXXXXXXXKFKYEDMVVES

SEQ ID NO: 67874 - protein, 39 aa, Artificial Sequence; identical to SEQ ID NO: 8977
  GFR-binding peptide
  MOD_RES (3), (4), (36), (38): Xaa is C or S

SEQ ID NO: 67875 - protein, 38 aa, Artificial Sequence; identical to SEQ ID NO: 8980
  GFR-binding peptide
  MOD_RES (5), (6), (38): Xaa is C or S

SEQ ID NO: 67876 - protein, 38 aa, Artificial Sequence; identical to SEQ ID NO: 32429
  GFR-binding peptide
  MOD_RES (4), (5): Xaa is C or S
  MOD_RES (19), (20), (21), (22), (23): Xaa is A or G
  MOD_RES (24), (25), (26), (27): Xaa is A or G or is absent

SEQ ID NO: 67877 - protein, 35 aa, Artificial Sequence; identical to SEQ ID NO: 32432
  GFR-binding peptide
  MOD_RES (1), (33), (35): Xaa is C or S

SEQ ID NO: 67878 - protein, 32 aa, Artificial Sequence; identical to SEQ ID NO: 8981
  GFR-binding peptide
  MOD_RES (31), (31): Xaa is C or S

SEQ ID NO: 67879 - protein, 38 aa, Artificial Sequence; identical to SEQ ID NO: 8983
  GFR-binding peptide
  MOD_RES (5), (6), (37): Xaa is C or S

SEQ ID NO: 67880 - protein, 36 aa, Artificial Sequence; identical to SEQ ID NO: 30359
  GFR-binding peptide
  MOD_RES (34), (36): Xaa is C or S
  MOD_RES (14), (15), (16), (17), (18): Xaa is A or G
  MOD_RES (19), (20), (21), (22): Xaa is A or G or is absent

SEQ ID NO: 67881 - protein, 37 aa, Artificial Sequence; identical to SEQ ID NO: 32438
  GFR-binding peptide
  MOD_RES (1), (35), (37): Xaa is C or S
  MOD_RES (15), (16), (17), (18), (19): Xaa is A or G
  MOD_RES (20), (21), (22), (23): Xaa is A or G or is absent

SEQ ID NO: 67882 - protein, 34 aa, Artificial Sequence; identical to SEQ ID NO: 30361
  GFR-binding peptide
  MOD_RES (1), (2): Xaa is C or S

SEQ ID NO: 67883 - protein, 41 aa, Artificial Sequence
  GFR-binding peptide
  MOD_RES (6), (7), (41): Xaa is C or S
  MOD_RES (21), (22), (23), (24), (25): Xaa is A or G
  MOD_RES (26), (27), (28), (29): Xaa is A or G or is absent
GIPEPXXVPEKMSATSILYYXXXXXXXXXLRKHRNMTVESX

SEQ ID NO: 67884 - protein, 40 aa, Artificial Sequence; identical to SEQ ID NO: 8985
  GFR-binding peptide
  MOD_RES (6), (40): Xaa is C or S
  MOD_RES (20), (21), (22), (23), (24): Xaa is A or G
  MOD_RES (25), (26), (27), (28): Xaa is A or G or is absent

SEQ ID NO: 67885 - protein, 39 aa, Artificial Sequence; identical to SEQ ID NO: 30362
  GFR-binding peptide
  MOD_RES (3), (4), (38): Xaa is C or S
  MOD_RES (18), (19), (20), (21), (22): Xaa is A or G
  MOD_RES (23), (24), (25), (26): Xaa is A or G or is absent

SEQ ID NO: 67886 - protein, 30 aa, Artificial Sequence; identical to SEQ ID NO: 16279
  GFR-binding peptide

SEQ ID NO: 67887 - protein, 35 aa, Artificial Sequence; identical to SEQ ID NO: 30366
  GFR-binding peptide
  MOD_RES (34), (34): Xaa is C or S
  MOD_RES (14), (15), (16), (17), (18): Xaa is A or G
  MOD_RES (19), (20), (21), (22): Xaa is A or G or is absent

SEQ ID NO: 67888 - protein, 34 aa, Artificial Sequence
  GFR-binding peptide
  MOD_RES (1), (2), (33): Xaa is C or S
XXAPVKTSPISMLYKDNGRVLLLKYHYMIVEEXG

SEQ ID NO: 67889 - protein, 35 aa, Artificial Sequence; identical to SEQ ID NO: 32448
  GFR-binding peptide
  MOD_RES (1), (2): Xaa is C or S
  MOD_RES (16), (17), (18), (19), (20): Xaa is A or G
  MOD_RES (21), (22), (23), (24): Xaa is A or G or is absent

SEQ ID NO: 67890 - protein, 41 aa, Artificial Sequence; identical to SEQ ID NO: 32450
  GFR-binding peptide
  MOD_RES (3), (4), (38), (40): Xaa is C or S
  MOD_RES (18), (19), (20), (21), (22): Xaa is A or G
  MOD_RES (23), (24), (25), (26): Xaa is A or G or is absent

SEQ ID NO: 67891 - protein, 40 aa, Artificial Sequence; identical to SEQ ID NO: 32451
  GFR-binding peptide
  MOD_RES (5), (6), (38), (40): Xaa is C or S

SEQ ID NO: 67892 - protein, 33 aa, Artificial Sequence; identical to SEQ ID NO: 8992
  GFR-binding peptide
  MOD_RES (1), (33): Xaa is C or S

SEQ ID NO: 67893 - protein, 30 aa, Artificial Sequence; identical to SEQ ID NO: 8993
  GFR-binding peptide

SEQ ID NO: 67894 - protein, 39 aa, Artificial Sequence; identical to SEQ ID NO: 8996
  GFR-binding peptide
  MOD_RES (4), (5), (39): Xaa is C or S
  MOD_RES (19), (20), (21), (22), (23): Xaa is A or G
  MOD_RES (24), (25), (26), (27): Xaa is A or G or is absent

SEQ ID NO: 67895 - protein, 39 aa, Artificial Sequence
  GFR-binding peptide
  MOD_RES (4), (5), (39): Xaa is C or S
  MOD_RES (19), (20), (21), (22), (23): Xaa is A or G
  MOD_RES (24), (25), (26), (27): Xaa is A or G or is absent
PEPXXVPEKMSATSILYYXXXXXXXXXLRKHRNMTVESX

SEQ ID NO: 67896 - protein, 38 aa, Artificial Sequence
  GFR-binding peptide
  MOD_RES (2), (3), (35), (37): Xaa is C or S
TXXVPTRLSATSILYYDSANNVVLRKHRDMVVESXGXR

SEQ ID NO: 67897 - protein, 32 aa, Artificial Sequence
  GFR-binding peptide
  MOD_RES (1), (1): Xaa is C or S
XTPTKMSATSMLYYNDKQQIILRKHRGMVVDR

SEQ ID NO: 67898 - protein, 38 aa, Artificial Sequence
  GFR-binding peptide
  MOD_RES (4), (5): Xaa is C or S
  MOD_RES (19), (20), (21), (22), (23): Xaa is A or G
  MOD_RES (24), (25), (26), (27): Xaa is A or G or is absent
PEPXXVPEKMEPISILYLXXXXXXXXXKFKYENMTVES

SEQ ID NO: 67899 - protein, 41 aa, Artificial Sequence; identical to SEQ ID NO: 8998
  GFR-binding peptide
  MOD_RES (4), (5), (39), (41): Xaa is C or S
  MOD_RES (19), (20), (21), (22), (23): Xaa is A or G
  MOD_RES (24), (25), (26), (27): Xaa is A or G or is absent

SEQ ID NO: 67900 - protein, 35 aa, Artificial Sequence; identical to SEQ ID NO: 30374
  GFR-binding peptide
  MOD_RES (4), (5): Xaa is C or S

SEQ ID NO: 67901 - protein, 36 aa, Artificial Sequence; identical to SEQ ID NO: 30375
  GFR-binding peptide
  MOD_RES (34), (36): Xaa is C or S
  MOD_RES (14), (15), (16), (17), (18): Xaa is A or G
  MOD_RES (19), (20), (21), (22): Xaa is A or G or is absent

SEQ ID NO: 67902 - protein, 34 aa, Artificial Sequence
  GFR-binding peptide
  MOD_RES (1), (32), (34): Xaa is C or S
XVSQDLSPINILYFIGKTPKIYGKIPMIVKSXKX

SEQ ID NO: 67903 - protein, 37 aa, Artificial Sequence
  GFR-binding peptide
  MOD_RES (5), (6), (37): Xaa is C or S
VPSTXXAPVKTSPISMLYKDNGRVLLLKYHYMIVEEX

SEQ ID NO: 67904 - protein, 31 aa, Artificial Sequence; identical to SEQ ID NO: 30379
  GFR-binding peptide

SEQ ID NO: 67905 - protein, 38 aa, Artificial Sequence
  GFR-binding peptide
  MOD_RES (5), (6): Xaa is C or S
  MOD_RES (20), (21), (22), (23), (24): Xaa is A or G
  MOD_RES (25), (26), (27), (28): Xaa is A or G or is absent
VPSTXXAPVKTEPISMLYLXXXXXXXXXKFKYEMIVEE

SEQ ID NO: 67906 - protein, 37 aa, Artificial Sequence; identical to SEQ ID NO: 32468
  GFR-binding peptide
  MOD_RES (4), (4): Xaa is C or S
  MOD_RES (18), (19), (20), (21), (22): Xaa is A or G
  MOD_RES (23), (24), (25), (26): Xaa is A or G or is absent

SEQ ID NO: 67907 - protein, 37 aa, Artificial Sequence
  GFR-binding peptide
  MOD_RES (2), (3), (35), (37): Xaa is C or S
PXXTPTKMEPISMLYLNDKQQIIKFKYEGMVVDRXGX

SEQ ID NO: 67908 - protein, 38 aa, Artificial Sequence; identical to SEQ ID NO: 9005
  GFR-binding peptide
  MOD_RES (3), (4), (36), (38): Xaa is C or S

SEQ ID NO: 67909 - protein, 40 aa, Artificial Sequence; identical to SEQ ID NO: 30387
  GFR-binding peptide
  MOD_RES (6), (7), (39): Xaa is C or S

SEQ ID NO: 67910 - protein, 39 aa, Artificial Sequence; identical to SEQ ID NO: 9008
  GFR-binding peptide
  MOD_RES (4), (36), (38): Xaa is C or S

SEQ ID NO: 67911 - protein, 39 aa, Artificial Sequence; identical to SEQ ID NO: 32478
  GFR-binding peptide
  MOD_RES (4), (5), (37), (39): Xaa is C or S

SEQ ID NO: 67912 - protein, 40 aa, Artificial Sequence
  GFR-binding peptide
  MOD_RES (4), (5), (38), (40): Xaa is C or S
  MOD_RES (19), (20), (21), (22), (23): Xaa is A or G
  MOD_RES (24), (25), (26), (27): Xaa is A or G or is absent
PSTXXAPVKTSPISMLYKXXXXXXXXXLKYHYMIVEEXGX

SEQ ID NO: 67913 - protein, 37 aa, Artificial Sequence; identical to SEQ ID NO: 30392
  GFR-binding peptide
  MOD_RES (3), (4), (36): Xaa is C or S

SEQ ID NO: 67914 - protein, 34 aa, Artificial Sequence; identical to SEQ ID NO: 32483
  GFR-binding peptide
  MOD_RES (2), (3): Xaa is C or S

SEQ ID NO: 67915 - protein, 36 aa, Artificial Sequence
  GFR-binding peptide
  MOD_RES (3), (4): Xaa is C or S
  MOD_RES (18), (19), (20), (21), (22): Xaa is A or G
  MOD_RES (23), (24), (25), (26): Xaa is A or G or is absent
KAXXVPTKLSATSILYYXXXXXXXXXLRKHRGMAVS

SEQ ID NO: 67916 - protein, 39 aa, Artificial Sequence; identical to SEQ ID NO: 9013
  GFR-binding peptide
  MOD_RES (4), (5), (37), (39): Xaa is C or S

SEQ ID NO: 67917 - protein, 44 aa, Artificial Sequence; identical to SEQ ID NO: 9014
  GFR-binding peptide
  MOD_RES (6), (7), (41), (43): Xaa is C or S
  MOD_RES (21), (22), (23), (24), (25): Xaa is A or G
  MOD_RES (26), (27), (28), (29): Xaa is A or G or is absent

SEQ ID NO: 67918 - protein, 37 aa, Artificial Sequence; identical to SEQ ID NO: 57389
  GFR-binding peptide
  MOD_RES (2), (3), (37): Xaa is C or S
  MOD_RES (17), (18), (19), (20), (21): Xaa is A or G
  MOD_RES (22), (23), (24), (25): Xaa is A or G or is absent

SEQ ID NO: 67919 - protein, 39 aa, Artificial Sequence; identical to SEQ ID NO: 32489
  GFR-binding peptide
  MOD_RES (1), (2), (36), (38): Xaa is C or S
  MOD_RES (16), (17), (18), (19), (20): Xaa is A or G
  MOD_RES (21), (22), (23), (24): Xaa is A or G or is absent

SEQ ID NO: 67920 - protein, 33 aa, Artificial Sequence; identical to SEQ ID NO: 9016
  GFR-binding peptide
  MOD_RES (2), (3): Xaa is C or S

SEQ ID NO: 67921 - protein, 40 aa, Artificial Sequence; identical to SEQ ID NO: 9020
  GFR-binding peptide
  MOD_RES (5), (6), (40): Xaa is C or S
  MOD_RES (20), (21), (22), (23), (24): Xaa is A or G
  MOD_RES (25), (26), (27), (28): Xaa is A or G or is absent

SEQ ID NO: 67922 - protein, 35 aa, Artificial Sequence; identical to SEQ ID NO: 9024
  GFR-binding peptide
  MOD_RES (3), (4): Xaa is C or S

SEQ ID NO: 67923 - protein, 35 aa, Artificial Sequence
  GFR-binding peptide
  MOD_RES (2), (3), (35): Xaa is C or S
PXXVPEKMSPINILYFDENKNVVYGKIPNMTVESX

SEQ ID NO: 67924 - protein, 35 aa, Artificial Sequence; identical to SEQ ID NO: 9025
  GFR-binding peptide
  MOD_RES (4), (5): Xaa is C or S

SEQ ID NO: 67925 - protein, 35 aa, Artificial Sequence; identical to SEQ ID NO: 32500
  GFR-binding peptide
  MOD_RES (2), (3): Xaa is C or S

SEQ ID NO: 67926 - protein, 40 aa, Artificial Sequence; identical to SEQ ID NO: 30407
  GFR-binding peptide
  MOD_RES (3), (4), (38), (40): Xaa is C or S
  MOD_RES (18), (19), (20), (21), (22): Xaa is A or G
  MOD_RES (23), (24), (25), (26): Xaa is A or G or is absent

SEQ ID NO: 67927 - protein, 42 aa, Artificial Sequence; identical to SEQ ID NO: 32501
  GFR-binding peptide
  MOD_RES (6), (7), (42): Xaa is C or S
  MOD_RES (21), (22), (23), (24), (25): Xaa is A or G
  MOD_RES (26), (27), (28), (29): Xaa is A or G or is absent

SEQ ID NO: 67928 - protein, 38 aa, Artificial Sequence
  GFR-binding peptide
  MOD_RES (1), (2), (36), (38): Xaa is C or S
  MOD_RES (16), (17), (18), (19), (20): Xaa is A or G
  MOD_RES (21), (22), (23), (24): Xaa is A or G or is absent
XXVPARLSATSILYYXXXXXXXXXLRKHRDMVVEAXGX

SEQ ID NO: 67929 - protein, 32 aa, Artificial Sequence; identical to SEQ ID NO: 30408
  GFR-binding peptide
  MOD_RES (14), (15), (16), (17), (18): Xaa is A or G
  MOD_RES (19), (20), (21), (22): Xaa is A or G or is absent

SEQ ID NO: 67930 - protein, 38 aa, Artificial Sequence
  GFR-binding peptide
  MOD_RES (5), (6), (37): Xaa is C or S
SASPXXVPQDLSPINILYFVGRTPKVYGKIPMVVKSXK

SEQ ID NO: 67931 - protein, 37 aa, Artificial Sequence; identical to SEQ ID NO: 30410
  GFR-binding peptide
  MOD_RES (6), (7): Xaa is C or S

SEQ ID NO: 67932 - protein, 39 aa, Artificial Sequence
  GFR-binding peptide
  MOD_RES (4), (5), (36), (38): Xaa is C or S
ASPXXVPQDLSPINILYFVGRTPKVYGKIPMVVKSXKXS

SEQ ID NO: 67933 - protein, 37 aa, Artificial Sequence; identical to SEQ ID NO: 30411
  GFR-binding peptide
  MOD_RES (2), (3), (37): Xaa is C or S
  MOD_RES (17), (18), (19), (20), (21): Xaa is A or G
  MOD_RES (22), (23), (24), (25): Xaa is A or G or is absent

SEQ ID NO: 67934 - protein, 41 aa, Artificial Sequence; identical to SEQ ID NO: 9027
  GFR-binding peptide
  MOD_RES (6), (7), (41): Xaa is C or S
  MOD_RES (21), (22), (23), (24), (25): Xaa is A or G
  MOD_RES (26), (27), (28), (29): Xaa is A or G or is absent

SEQ ID NO: 67935 - protein, 34 aa, Artificial Sequence; identical to SEQ ID NO: 9029
  GFR-binding peptide
  MOD_RES (1), (2): Xaa is C or S
  MOD_RES (16), (17), (18), (19), (20): Xaa is A or G
  MOD_RES (21), (22), (23), (24): Xaa is A or G or is absent

SEQ ID NO: 67936 - protein, 39 aa, Artificial Sequence; identical to SEQ ID NO: 16329
  GFR-binding peptide
  MOD_RES (5), (6): Xaa is C or S
  MOD_RES (20), (21), (22), (23), (24): Xaa is A or G
  MOD_RES (25), (26), (27), (28): Xaa is A or G or is absent

SEQ ID NO: 67937 - protein, 35 aa, Artificial Sequence; identical to SEQ ID NO: 32509
  GFR-binding peptide
  MOD_RES (1), (2), (33), (35): Xaa is C or S

SEQ ID NO: 67938 - protein, 35 aa, Artificial Sequence; identical to SEQ ID NO: 9031
  GFR-binding peptide
  MOD_RES (2), (3): Xaa is C or S

SEQ ID NO: 67939 - protein, 33 aa, Artificial Sequence; identical to SEQ ID NO: 9032
  GFR-binding peptide
  MOD_RES (1), (33): Xaa is C or S

SEQ ID NO: 67940 - protein, 34 aa, Artificial Sequence; identical to SEQ ID NO: 9035
  GFR-binding peptide
  MOD_RES (1), (2): Xaa is C or S
  MOD_RES (16), (17), (18), (19), (20): Xaa is A or G
  MOD_RES (21), (22), (23), (24): Xaa is A or G or is absent

SEQ ID NO: 67941 - protein, 42 aa, Artificial Sequence
  GFR-binding peptide
  MOD_RES (5), (6), (40), (42): Xaa is C or S
  MOD_RES (20), (21), (22), (23), (24): Xaa is A or G
  MOD_RES (25), (26), (27), (28): Xaa is A or G or is absent
IPEPXXVPEKMSATSILYYXXXXXXXXXLRKHRNMTVESXAX

SEQ ID NO: 67942 - protein, 40 aa, Artificial Sequence; identical to SEQ ID NO: 30422
  GFR-binding peptide
  MOD_RES (6), (7), (40): Xaa is C or S
  MOD_RES (21), (22), (23), (24), (25): Xaa is A or G
  MOD_RES (26), (27), (28), (29): Xaa is A or G or is absent

SEQ ID NO: 67943 - protein, 33 aa, Artificial Sequence
  GFR-binding peptide
  MOD_RES (1), (2): Xaa is C or S
XXVPTRLEPISILYLDSANNVVKFKYEDMVVES

SEQ ID NO: 67944 - protein, 37 aa, Artificial Sequence
  GFR-binding peptide
  MOD_RES (4), (5), (36): Xaa is C or S
AAPXXVPQALSPINILYFVGRKPKVYGKIPMIVRSXK

SEQ ID NO: 67945 - protein, 39 aa, Artificial Sequence
  GFR-binding peptide
  MOD_RES (2), (3), (36), (38): Xaa is C or S
  MOD_RES (17), (18), (19), (20), (21): Xaa is A or G
  MOD_RES (22), (23), (24), (25): Xaa is A or G or is absent
PXXVPQDLSPINILYFXXXXXXXXXYGKIPMVVKSXKXS

SEQ ID NO: 67946 - protein, 35 aa, Artificial Sequence; identical to SEQ ID NO: 30427
  GFR-binding peptide
  MOD_RES (4), (5): Xaa is C or S

SEQ ID NO: 67947 - protein, 38 aa, Artificial Sequence; identical to SEQ ID NO: 32520
  GFR-binding peptide
  MOD_RES (3), (4), (36), (38): Xaa is C or S

SEQ ID NO: 67948 - protein, 39 aa, Artificial Sequence
  GFR-binding peptide
  MOD_RES (3), (4), (37), (39): Xaa is C or S
  MOD_RES (18), (19), (20), (21), (22): Xaa is A or G
  MOD_RES (23), (24), (25), (26): Xaa is A or G or is absent
SPXXVSQDLSPINILYFXXXXXXXXXYGKIPMIVKSXKX

SEQ ID NO: 67949 - protein, 34 aa, Artificial Sequence
  GFR-binding peptide
  MOD_RES (1), (32), (34): Xaa is C or S
XAPVKTSATSMLYYDNGRVLLLRKHRMIVEEXGX

SEQ ID NO: 67950 - protein, 31 aa, Artificial Sequence
  GFR-binding peptide
VPTKLSATSILYYDKGVVTYLRKHRGMAVSE

SEQ ID NO: 67951 - protein, 43 aa, Artificial Sequence; identical to SEQ ID NO: 30429
  GFR-binding peptide
  MOD_RES (5), (6), (40), (42): Xaa is C or S
  MOD_RES (20), (21), (22), (23), (24): Xaa is A or G
  MOD_RES (25), (26), (27), (28): Xaa is A or G or is absent

SEQ ID NO: 67952 - protein, 34 aa, Artificial Sequence; identical to SEQ ID NO: 9045
  GFR-binding peptide
  MOD_RES (34), (34): Xaa is C or S
  MOD_RES (14), (15), (16), (17), (18): Xaa is A or G
  MOD_RES (19), (20), (21), (22): Xaa is A or G or is absent

SEQ ID NO: 67953 - protein, 32 aa, Artificial Sequence; identical to SEQ ID NO: 9046
  GFR-binding peptide
  MOD_RES (14), (15), (16), (17), (18): Xaa is A or G
  MOD_RES (19), (20), (21), (22): Xaa is A or G or is absent

SEQ ID NO: 67954 - protein, 39 aa, Artificial Sequence
  GFR-binding peptide
  MOD_RES (3), (4), (36), (38): Xaa is C or S
EPXXVPEKMSPISILYKDENKNVVLKYHYNMTVESXAXR

SEQ ID NO: 67955 - protein, 40 aa, Artificial Sequence
  GFR-binding peptide
  MOD_RES (3), (4), (38), (40): Xaa is C or S
  MOD_RES (18), (19), (20), (21), (22): Xaa is A or G
  MOD_RES (23), (24), (25), (26): Xaa is A or G or is absent
GPXXTPTKMSPISMLYKXXXXXXXXXLKYHYGMVVDRXGX

SEQ ID NO: 67956 - protein, 35 aa, Artificial Sequence; identical to SEQ ID NO: 9048
  GFR-binding peptide
  MOD_RES (1), (34): Xaa is C or S
  MOD_RES (15), (16), (17), (18), (19): Xaa is A or G
  MOD_RES (20), (21), (22), (23): Xaa is A or G or is absent

SEQ ID NO: 67957 - protein, 40 aa, Artificial Sequence; identical to SEQ ID NO: 9049
  GFR-binding peptide
  MOD_RES (5), (6), (38), (40): Xaa is C or S

SEQ ID NO: 67958 - protein, 37 aa, Artificial Sequence; identical to SEQ ID NO: 9052
  GFR-binding peptide
  MOD_RES (2), (3), (37): Xaa is C or S
  MOD_RES (17), (18), (19), (20), (21): Xaa is A or G
  MOD_RES (22), (23), (24), (25): Xaa is A or G or is absent

SEQ ID NO: 67959 - protein, 39 aa, Artificial Sequence; identical to SEQ ID NO: 30436
  GFR-binding peptide
  MOD_RES (3), (4), (36), (38): Xaa is C or S

SEQ ID NO: 67960 - protein, 42 aa, Artificial Sequence; identical to SEQ ID NO: 16356
  GFR-binding peptide
  MOD_RES (6), (7), (39), (41): Xaa is C or S

SEQ ID NO: 67961 - protein, 43 aa, Artificial Sequence; identical to SEQ ID NO: 32531
  GFR-binding peptide
  MOD_RES (5), (6), (40), (42): Xaa is C or S
  MOD_RES (20), (21), (22), (23), (24): Xaa is A or G
  MOD_RES (25), (26), (27), (28): Xaa is A or G or is absent

SEQ ID NO: 67962 - protein, 41 aa, Artificial Sequence; identical to SEQ ID NO: 9059
  GFR-binding peptide
  MOD_RES (4), (5), (40): Xaa is C or S
  MOD_RES (19), (20), (21), (22), (23): Xaa is A or G
  MOD_RES (24), (25), (26), (27): Xaa is A or G or is absent

SEQ ID NO: 67963 - protein, 40 aa, Artificial Sequence; identical to SEQ ID NO: 9060
  GFR-binding peptide
  MOD_RES (5), (6), (40): Xaa is C or S
  MOD_RES (20), (21), (22), (23), (24): Xaa is A or G
  MOD_RES (25), (26), (27), (28): Xaa is A or G or is absent

SEQ ID NO: 67964 - protein, 33 aa, Artificial Sequence; identical to SEQ ID NO: 30438
  GFR-binding peptide
  MOD_RES (32), (32): Xaa is C or S

SEQ ID NO: 67965 - protein, 37 aa, Artificial Sequence; identical to SEQ ID NO: 9063
  GFR-binding peptide
  MOD_RES (2), (3), (34), (36): Xaa is C or S

SEQ ID NO: 67966 - protein, 37 aa, Artificial Sequence; identical to SEQ ID NO: 30442
  GFR-binding peptide
  MOD_RES (1), (2), (34), (36): Xaa is C or S

SEQ ID NO: 67967 - protein, 44 aa, Artificial Sequence; identical to SEQ ID NO: 30444
  GFR-binding peptide
  MOD_RES (6), (7), (41), (43): Xaa is C or S
  MOD_RES (21), (22), (23), (24), (25): Xaa is A or G
  MOD_RES (26), (27), (28), (29): Xaa is A or G or is absent

SEQ ID NO: 67968 - protein, 33 aa, Artificial Sequence; identical to SEQ ID NO: 32543
  GFR-binding peptide
  MOD_RES (33), (33): Xaa is C or S
  MOD_RES (14), (15), (16), (17), (18): Xaa is A or G
  MOD_RES (19), (20), (21), (22): Xaa is A or G or is absent

SEQ ID NO: 67969 - protein, 41 aa, Artificial Sequence
  GFR-binding peptide
  MOD_RES (6), (7), (40): Xaa is C or S
  MOD_RES (21), (22), (23), (24), (25): Xaa is A or G
  MOD_RES (26), (27), (28), (29): Xaa is A or G or is absent
RVPSTXXAPVKTSPISMLYKXXXXXXXXXLKYHYMIVEEXG

SEQ ID NO: 67970 - protein, 34 aa, Artificial Sequence
  GFR-binding peptide
  MOD_RES (1), (1): Xaa is C or S
  MOD_RES (15), (16), (17), (18), (19): Xaa is A or G
  MOD_RES (20), (21), (22), (23): Xaa is A or G or is absent
XVPTKLSATSILYYXXXXXXXXXLRKHRGMAVSE

SEQ ID NO: 67971 - protein, 37 aa, Artificial Sequence
  GFR-binding peptide
  MOD_RES (34), (36): Xaa is C or S
  MOD_RES (14), (15), (16), (17), (18): Xaa is A or G
  MOD_RES (19), (20), (21), (22): Xaa is A or G or is absent
VPEKMEPISILYLXXXXXXXXXKFKYENMTVESXAXR

SEQ ID NO: 67972 - protein, 36 aa, Artificial Sequence; identical to SEQ ID NO: 32551
  GFR-binding peptide
  MOD_RES (3), (4), (36): Xaa is C or S

SEQ ID NO: 67973 - protein, 39 aa, Artificial Sequence; identical to SEQ ID NO: 9070
  GFR-binding peptide
  MOD_RES (3), (4), (37), (39): Xaa is C or S
  MOD_RES (18), (19), (20), (21), (22): Xaa is A or G
  MOD_RES (23), (24), (25), (26): Xaa is A or G or is absent

SEQ ID NO: 67974 - protein, 38 aa, Artificial Sequence; identical to SEQ ID NO: 9071
  GFR-binding peptide
  MOD_RES (3), (4), (37): Xaa is C or S
  MOD_RES (18), (19), (20), (21), (22): Xaa is A or G
  MOD_RES (23), (24), (25), (26): Xaa is A or G or is absent

SEQ ID NO: 67975 - protein, 38 aa, Artificial Sequence
  GFR-binding peptide
  MOD_RES (6), (7): Xaa is C or S
GSAGPXXTPTKMEPISMLYLNDKQQIIKFKYEGMVVDR

SEQ ID NO: 67976 - protein, 34 aa, Artificial Sequence; identical to SEQ ID NO: 30451
  GFR-binding peptide
  MOD_RES (1), (2), (33): Xaa is C or S

SEQ ID NO: 67977 - protein, 32 aa, Artificial Sequence; identical to SEQ ID NO: 32557
  GFR-binding peptide
  MOD_RES (1), (2): Xaa is C or S

SEQ ID NO: 67978 - protein, 40 aa, Artificial Sequence; identical to SEQ ID NO: 30454
  GFR-binding peptide
  MOD_RES (2), (3), (37), (39): Xaa is C or S
  MOD_RES (17), (18), (19), (20), (21): Xaa is A or G
  MOD_RES (22), (23), (24), (25): Xaa is A or G or is absent

SEQ ID NO: 67979 - protein, 38 aa, Artificial Sequence; identical to SEQ ID NO: 9074
  GFR-binding peptide
  MOD_RES (2), (3), (37): Xaa is C or S
  MOD_RES (17), (18), (19), (20), (21): Xaa is A or G
  MOD_RES (22), (23), (24), (25): Xaa is A or G or is absent

SEQ ID NO: 67980 - protein, 42 aa, Artificial Sequence; identical to SEQ ID NO: 30456
  GFR-binding peptide
  MOD_RES (6), (7), (41): Xaa is C or S
  MOD_RES (21), (22), (23), (24), (25): Xaa is A or G
  MOD_RES (26), (27), (28), (29): Xaa is A or G or is absent

SEQ ID NO: 67981 - protein, 35 aa, Artificial Sequence; identical to SEQ ID NO: 30457
  GFR-binding peptide
  MOD_RES (2), (3): Xaa is C or S
  MOD_RES (17), (18), (19), (20), (21): Xaa is A or G
  MOD_RES (22), (23), (24), (25): Xaa is A or G or is absent

SEQ ID NO: 67982 - protein, 36 aa, Artificial Sequence; identical to SEQ ID NO: 9076
  GFR-binding peptide
  MOD_RES (1), (34), (36): Xaa is C or S
  MOD_RES (15), (16), (17), (18), (19): Xaa is A or G
  MOD_RES (20), (21), (22), (23): Xaa is A or G or is absent

SEQ ID NO: 67983 - protein, 35 aa, Artificial Sequence
  GFR-binding peptide
  MOD_RES (1), (34): Xaa is C or S
  MOD_RES (15), (16), (17), (18), (19): Xaa is A or G
  MOD_RES (20), (21), (22), (23): Xaa is A or G or is absent
XAPVKTEPISMLYLXXXXXXXXXKFKYEMIVEEXG

SEQ ID NO: 67984 - protein, 39 aa, Artificial Sequence; identical to SEQ ID NO: 9077
  GFR-binding peptide
  MOD_RES (6), (7): Xaa is C or S
  MOD_RES (21), (22), (23), (24), (25): Xaa is A or G
  MOD_RES (26), (27), (28), (29): Xaa is A or G or is absent

SEQ ID NO: 67985 - protein, 34 aa, Artificial Sequence; identical to SEQ ID NO: 32562
  GFR-binding peptide
  MOD_RES (31), (33): Xaa is C or S

SEQ ID NO: 67986 - protein, 35 aa, Artificial Sequence; identical to SEQ ID NO: 30461
  GFR-binding peptide
  MOD_RES (1), (32), (34): Xaa is C or S

SEQ ID NO: 67987 - protein, 38 aa, Artificial Sequence; identical to SEQ ID NO: 9082
  GFR-binding peptide
  MOD_RES (1), (2), (35), (37): Xaa is C or S

SEQ ID NO: 67988 - protein, 35 aa, Artificial Sequence
  GFR-binding peptide
  MOD_RES (1), (34): Xaa is C or S
  MOD_RES (15), (16), (17), (18), (19): Xaa is A or G
  MOD_RES (20), (21), (22), (23): Xaa is A or G or is absent
XVSQDLSPINILYFXXXXXXXXXYGKIPMIVKSXK

SEQ ID NO: 67989 - protein, 36 aa, Artificial Sequence; identical to SEQ ID NO: 9086
  GFR-binding peptide
  MOD_RES (2), (3): Xaa is C or S
  MOD_RES (17), (18), (19), (20), (21): Xaa is A or G
  MOD_RES (22), (23), (24), (25): Xaa is A or G or is absent

SEQ ID NO: 67990 - protein, 34 aa, Artificial Sequence; identical to SEQ ID NO: 9087
  GFR-binding peptide
  MOD_RES (2), (3), (34): Xaa is C or S

SEQ ID NO: 67991 - protein, 40 aa, Artificial Sequence; identical to SEQ ID NO: 30465
  GFR-binding peptide
  MOD_RES (5), (6), (39): Xaa is C or S

SEQ ID NO: 67992 - protein, 43 aa, Artificial Sequence; identical to SEQ ID NO: 30466
  GFR-binding peptide
  MOD_RES (6), (7), (41), (43): Xaa is C or S
  MOD_RES (21), (22), (23), (24), (25): Xaa is A or G
  MOD_RES (26), (27), (28), (29): Xaa is A or G or is absent

SEQ ID NO: 67993 - protein, 44 aa, Artificial Sequence; identical to SEQ ID NO: 9089
  GFR-binding peptide
  MOD_RES (6), (7), (42), (44): Xaa is C or S
  MOD_RES (21), (22), (23), (24), (25): Xaa is A or G
  MOD_RES (26), (27), (28), (29): Xaa is A or G or is absent

SEQ ID NO: 67994 - protein, 40 aa, Artificial Sequence
  GFR-binding peptide
  MOD_RES (2), (3), (37), (39): Xaa is C or S
  MOD_RES (17), (18), (19), (20), (21): Xaa is A or G
  MOD_RES (22), (23), (24), (25): Xaa is A or G or is absent
PXXVPEKMSATSILYYXXXXXXXXXLRKHRNMTVESXAXR

SEQ ID NO: 67995 - protein, 39 aa, Artificial Sequence; identical to SEQ ID NO: 32571
  GFR-binding peptide
  MOD_RES (3), (4), (38): Xaa is C or S
  MOD_RES (18), (19), (20), (21), (22): Xaa is A or G
  MOD_RES (23), (24), (25), (26): Xaa is A or G or is absent

SEQ ID NO: 67996 - protein, 34 aa, Artificial Sequence; identical to SEQ ID NO: 57478
  GFR-binding peptide
  MOD_RES (1), (2): Xaa is C or S
  MOD_RES (16), (17), (18), (19), (20): Xaa is A or G
  MOD_RES (21), (22), (23), (24): Xaa is A or G or is absent

SEQ ID NO: 67997 - protein, 38 aa, Artificial Sequence; identical to SEQ ID NO: 9092
  GFR-binding peptide
  MOD_RES (2), (3), (37): Xaa is C or S
  MOD_RES (17), (18), (19), (20), (21): Xaa is A or G
  MOD_RES (22), (23), (24), (25): Xaa is A or G or is absent

SEQ ID NO: 67998 - protein, 33 aa, Artificial Sequence; identical to SEQ ID NO: 9093
  GFR-binding peptide
  MOD_RES (1), (33): Xaa is C or S

SEQ ID NO: 67999 - protein, 33 aa, Artificial Sequence; identical to SEQ ID NO: 9095
  GFR-binding peptide
  MOD_RES (1), (1): Xaa is C or S
  MOD_RES (15), (16), (17), (18), (19): Xaa is A or G
  MOD_RES (20), (21), (22), (23): Xaa is A or G or is absent

SEQ ID NO: 68000 - protein, 35 aa, Artificial Sequence; identical to SEQ ID NO: 32580
  GFR-binding peptide
  MOD_RES (1), (2), (34): Xaa is C or S

SEQ ID NO: 68001 - protein, 38 aa, Artificial Sequence
  GFR-binding peptide
  MOD_RES (5), (6): Xaa is C or S
  MOD_RES (20), (21), (22), (23), (24): Xaa is A or G
  MOD_RES (25), (26), (27), (28): Xaa is A or G or is absent
VPSTXXAPVKTSPISMLYKXXXXXXXXXLKYHYMIVEE

SEQ ID NO: 68002 - protein, 41 aa, Artificial Sequence; identical to SEQ ID NO: 32581
  GFR-binding peptide
  MOD_RES (3), (4), (38), (40): Xaa is C or S
  MOD_RES (18), (19), (20), (21), (22): Xaa is A or G
  MOD_RES (23), (24), (25), (26): Xaa is A or G or is absent

SEQ ID NO: 68003 - protein, 35 aa, Artificial Sequence
  GFR-binding peptide
  MOD_RES (2), (3): Xaa is C or S
  MOD_RES (17), (18), (19), (20), (21): Xaa is A or G
  MOD_RES (22), (23), (24), (25): Xaa is A or G or is absent
PXXVPEKMNAISILYFXXXXXXXXXLKKYRNMTVE

SEQ ID NO: 68004 - protein, 40 aa, Artificial Sequence; identical to SEQ ID NO: 9102
  GFR-binding peptide
  MOD_RES (6), (7), (40): Xaa is C or S
  MOD_RES (21), (22), (23), (24), (25): Xaa is A or G
  MOD_RES (26), (27), (28), (29): Xaa is A or G or is absent

SEQ ID NO: 68005 - protein, 35 aa, Artificial Sequence; identical to SEQ ID NO: 9104
  GFR-binding peptide
  MOD_RES (33), (35): Xaa is C or S
  MOD_RES (14), (15), (16), (17), (18): Xaa is A or G
  MOD_RES (19), (20), (21), (22): Xaa is A or G or is absent

SEQ ID NO: 68006 - protein, 34 aa, Artificial Sequence; identical to SEQ ID NO: 9105
  GFR-binding peptide
  MOD_RES (1), (33): Xaa is C or S

SEQ ID NO: 68007 - protein, 33 aa, Artificial Sequence; identical to SEQ ID NO: 9106
  GFR-binding peptide
  MOD_RES (1), (2), (33): Xaa is C or S

SEQ ID NO: 68008 - protein, 36 aa, Artificial Sequence; identical to SEQ ID NO: 32591
  GFR-binding peptide
  MOD_RES (1), (33), (35): Xaa is C or S

SEQ ID NO: 68009 - protein, 34 aa, Artificial Sequence
  GFR-binding peptide
  MOD_RES (33), (33): Xaa is C or S
  MOD_RES (14), (15), (16), (17), (18): Xaa is A or G
  MOD_RES (19), (20), (21), (22): Xaa is A or G or is absent
VSQDLSPINILYFXXXXXXXXXYGKIPMIVKSXK

SEQ ID NO: 68010 - protein, 39 aa, Artificial Sequence; identical to SEQ ID NO: 9109
  GFR-binding peptide
  MOD_RES (1), (2), (36), (38): Xaa is C or S
  MOD_RES (16), (17), (18), (19), (20): Xaa is A or G
  MOD_RES (21), (22), (23), (24): Xaa is A or G or is absent

SEQ ID NO: 68011 - protein, 39 aa, Artificial Sequence; identical to SEQ ID NO: 30480
  GFR-binding peptide
  MOD_RES (5), (6), (38): Xaa is C or S

SEQ ID NO: 68012 - protein, 40 aa, Artificial Sequence; identical to SEQ ID NO: 9112
  GFR-binding peptide
  MOD_RES (6), (7): Xaa is C or S
  MOD_RES (21), (22), (23), (24), (25): Xaa is A or G
  MOD_RES (26), (27), (28), (29): Xaa is A or G or is absent

SEQ ID NO: 68013 - protein, 30 aa, Artificial Sequence
  GFR-binding peptide
APVKTEPISMLYLDNGRVLLKFKYEMIVEE

SEQ ID NO: 68014 - protein, 32 aa, Artificial Sequence
  GFR-binding peptide
  MOD_RES (1), (1): Xaa is C or S
XVPEKMSATSILYYDENKNVVLRKHRNMTVES

SEQ ID NO: 68015 - protein, 38 aa, Artificial Sequence; identical to SEQ ID NO: 9115
  GFR-binding peptide
  MOD_RES (2), (36), (38): Xaa is C or S
  MOD_RES (16), (17), (18), (19), (20): Xaa is A or G
  MOD_RES (21), (22), (23), (24): Xaa is A or G or is absent

SEQ ID NO: 68016 - protein, 40 aa, Artificial Sequence
  GFR-binding peptide
  MOD_RES (3), (4), (37), (39): Xaa is C or S
  MOD_RES (18), (19), (20), (21), (22): Xaa is A or G
  MOD_RES (23), (24), (25), (26): Xaa is A or G or is absent
STXXAPVKTSATSMLYYXXXXXXXXXLRKHRMIVEEXGXL

SEQ ID NO: 68017 - protein, 37 aa, Artificial Sequence; identical to SEQ ID NO: 9116
  GFR-binding peptide
  MOD_RES (3), (4), (37): Xaa is C or S
  MOD_RES (18), (19), (20), (21), (22): Xaa is A or G
  MOD_RES (23), (24), (25), (26): Xaa is A or G or is absent

SEQ ID NO: 68018 - protein, 35 aa, Artificial Sequence
  GFR-binding peptide
  MOD_RES (4), (5): Xaa is C or S
PSTXXAPVKTEPISMLYLDNGRVLLKFKYEMIVEE

SEQ ID NO: 68019 - protein, 43 aa, Artificial Sequence; identical to SEQ ID NO: 9120
  GFR-binding peptide
  MOD_RES (6), (7), (40), (42): Xaa is C or S
  MOD_RES (21), (22), (23), (24), (25): Xaa is A or G
  MOD_RES (26), (27), (28), (29): Xaa is A or G or is absent

SEQ ID NO: 68020 - protein, 41 aa, Artificial Sequence; identical to SEQ ID NO: 9121
  GFR-binding peptide
  MOD_RES (6), (7), (40): Xaa is C or S
  MOD_RES (21), (22), (23), (24), (25): Xaa is A or G
  MOD_RES (26), (27), (28), (29): Xaa is A or G or is absent

SEQ ID NO: 68021 - protein, 31 aa, Artificial Sequence; identical to SEQ ID NO: 9122
  GFR-binding peptide
  MOD_RES (1), (1): Xaa is C or S

SEQ ID NO: 68022 - protein, 39 aa, Artificial Sequence
  GFR-binding peptide
  MOD_RES (6), (7): Xaa is C or S
  MOD_RES (21), (22), (23), (24), (25): Xaa is A or G
  MOD_RES (26), (27), (28), (29): Xaa is A or G or is absent
STPPTXXVPTRLSATSILYYXXXXXXXXXLRKHRDMVVE

SEQ ID NO: 68023 - protein, 38 aa, Artificial Sequence; identical to SEQ ID NO: 32605
  GFR-binding peptide
  MOD_RES (4), (5), (37): Xaa is C or S

SEQ ID NO: 68024 - protein, 38 aa, Artificial Sequence; identical to SEQ ID NO: 9124
  GFR-binding peptide
  MOD_RES (5), (6): Xaa is C or S
  MOD_RES (20), (21), (22), (23), (24): Xaa is A or G
  MOD_RES (25), (26), (27), (28): Xaa is A or G or is absent

SEQ ID NO: 68025 - protein, 34 aa, Artificial Sequence; identical to SEQ ID NO: 30496
  GFR-binding peptide
  MOD_RES (1), (2): Xaa is C or S
  MOD_RES (16), (17), (18), (19), (20): Xaa is A or G
  MOD_RES (21), (22), (23), (24): Xaa is A or G or is absent

SEQ ID NO: 68026 - protein, 43 aa, Artificial Sequence; identical to SEQ ID NO: 9126
  GFR-binding peptide
  MOD_RES (6), (7), (41), (43): Xaa is C or S
  MOD_RES (21), (22), (23), (24), (25): Xaa is A or G
  MOD_RES (26), (27), (28), (29): Xaa is A or G or is absent

SEQ ID NO: 68027 - protein, 36 aa, Artificial Sequence; identical to SEQ ID NO: 9129
  GFR-binding peptide
  MOD_RES (4), (36): Xaa is C or S

SEQ ID NO: 68028 - protein, 44 aa, Artificial Sequence; identical to SEQ ID NO: 9131
  GFR-binding peptide
  MOD_RES (6), (7), (41), (43): Xaa is C or S
  MOD_RES (21), (22), (23), (24), (25): Xaa is A or G
  MOD_RES (26), (27), (28), (29): Xaa is A or G or is absent

SEQ ID NO: 68029 - protein, 39 aa, Artificial Sequence; identical to SEQ ID NO: 30500
  GFR-binding peptide
  MOD_RES (2), (3), (37), (39): Xaa is C or S
  MOD_RES (17), (18), (19), (20), (21): Xaa is A or G
  MOD_RES (22), (23), (24), (25): Xaa is A or G or is absent

SEQ ID NO: 68030 - protein, 40 aa, Artificial Sequence; identical to SEQ ID NO: 32613
  GFR-binding peptide
  MOD_RES (6), (7), (39): Xaa is C or S

SEQ ID NO: 68031 - protein, 35 aa, Artificial Sequence
  GFR-binding peptide
  MOD_RES (33), (35): Xaa is C or S
  MOD_RES (14), (15), (16), (17), (18): Xaa is A or G
  MOD_RES (19), (20), (21), (22): Xaa is A or G or is absent
VSQDLSPINILYFXXXXXXXXXYGKIPMIVKSXKX

SEQ ID NO: 68032 - protein, 40 aa, Artificial Sequence; identical to SEQ ID NO: 32616
  GFR-binding peptide
  MOD_RES (1), (2), (37), (39): Xaa is C or S
  MOD_RES (16), (17), (18), (19), (20): Xaa is A or G
  MOD_RES (21), (22), (23), (24): Xaa is A or G or is absent

SEQ ID NO: 68033 - protein, 40 aa, Artificial Sequence; identical to SEQ ID NO: 30501
  GFR-binding peptide
  MOD_RES (4), (5), (39): Xaa is C or S
  MOD_RES (19), (20), (21), (22), (23): Xaa is A or G
  MOD_RES (24), (25), (26), (27): Xaa is A or G or is absent

SEQ ID NO: 68034 - protein, 36 aa, Artificial Sequence
  GFR-binding peptide
  MOD_RES (1), (2), (36): Xaa is C or S
  MOD_RES (16), (17), (18), (19), (20): Xaa is A or G
  MOD_RES (21), (22), (23), (24): Xaa is A or G or is absent
XXVPTKLSATSILYYXXXXXXXXXLRKHRGMAVSEX

SEQ ID NO: 68035 - protein, 34 aa, Artificial Sequence; identical to SEQ ID NO: 9137
  GFR-binding peptide
  MOD_RES (1), (33): Xaa is C or S

SEQ ID NO: 68036 - protein, 36 aa, Artificial Sequence; identical to SEQ ID NO: 30504
  GFR-binding peptide
  MOD_RES (5), (6): Xaa is C or S

SEQ ID NO: 68037 - protein, 36 aa, Artificial Sequence; identical to SEQ ID NO: 9140
  GFR-binding peptide
  MOD_RES (1), (2), (33), (35): Xaa is C or S

SEQ ID NO: 68038 - protein, 43 aa, Artificial Sequence; identical to SEQ ID NO: 9141
  GFR-binding peptide
  MOD_RES (5), (6), (40), (42): Xaa is C or S
  MOD_RES (20), (21), (22), (23), (24): Xaa is A or G
  MOD_RES (25), (26), (27), (28): Xaa is A or G or is absent

SEQ ID NO: 68039 - protein, 38 aa, Artificial Sequence; identical to SEQ ID NO: 30507
  GFR-binding peptide
  MOD_RES (5), (6), (38): Xaa is C or S

SEQ ID NO: 68040 - protein, 37 aa, Artificial Sequence; identical to SEQ ID NO: 32622
  GFR-binding peptide
  MOD_RES (4), (5): Xaa is C or S

SEQ ID NO: 68041 - protein, 43 aa, Artificial Sequence
  GFR-binding peptide
  MOD_RES (5), (6), (40), (42): Xaa is C or S
  MOD_RES (20), (21), (22), (23), (24): Xaa is A or G
  MOD_RES (25), (26), (27), (28): Xaa is A or G or is absent
APASXXVPARLSATSILYYXXXXXXXXXLRKHRDMVVEAXGXR

SEQ ID NO: 68042 - protein, 36 aa, Artificial Sequence; identical to SEQ ID NO: 9145
  GFR-binding peptide
  MOD_RES (3), (4): Xaa is C or S
  MOD_RES (18), (19), (20), (21), (22): Xaa is A or G
  MOD_RES (23), (24), (25), (26): Xaa is A or G or is absent

SEQ ID NO: 68043 - protein, 33 aa, Artificial Sequence
  GFR-binding peptide
  MOD_RES (2), (3): Xaa is C or S
PXXVPQALSPINILYFVGRKPKVYGKIPMIVRS

SEQ ID NO: 68044 - protein, 34 aa, Artificial Sequence; identical to SEQ ID NO: 32624
  GFR-binding peptide
  MOD_RES (1), (1): Xaa is C or S
  MOD_RES (15), (16), (17), (18), (19): Xaa is A or G
  MOD_RES (20), (21), (22), (23): Xaa is A or G or is absent

SEQ ID NO: 68045 - protein, 34 aa, Artificial Sequence; identical to SEQ ID NO: 9147
  GFR-binding peptide
  MOD_RES (32), (34): Xaa is C or S

SEQ ID NO: 68046 - protein, 34 aa, Artificial Sequence; identical to SEQ ID NO: 30510
  GFR-binding peptide
  MOD_RES (32), (34): Xaa is C or S

SEQ ID NO: 68047 - protein, 30 aa, Artificial Sequence; identical to SEQ ID NO: 32633
  GFR-binding peptide

SEQ ID NO: 68048 - protein, 37 aa, Artificial Sequence; identical to SEQ ID NO: 32635
  GFR-binding peptide
  MOD_RES (3), (4), (37): Xaa is C or S

SEQ ID NO: 68049 - protein, 37 aa, Artificial Sequence
  GFR-binding peptide
  MOD_RES (4), (5), (37): Xaa is C or S
PEPXXVPEKMEPISILYLDENKNVVKFKYENMTVESX

SEQ ID NO: 68050 - protein, 42 aa, Artificial Sequence
  GFR-binding peptide
  MOD_RES (6), (7), (39), (41): Xaa is C or S
GIPEPXXVPEKMSPINILYFDENKNVVYGKIPNMTVESXAXR

SEQ ID NO: 68051 - protein, 43 aa, Artificial Sequence; identical to SEQ ID NO: 32640
  GFR-binding peptide
  MOD_RES (5), (6), (41), (43): Xaa is C or S
  MOD_RES (20), (21), (22), (23), (24): Xaa is A or G
  MOD_RES (25), (26), (27), (28): Xaa is A or G or is absent

SEQ ID NO: 68052 - protein, 37 aa, Artificial Sequence; identical to SEQ ID NO: 9158
  GFR-binding peptide
  MOD_RES (4), (5), (37): Xaa is C or S

SEQ ID NO: 68053 - protein, 37 aa, Artificial Sequence; identical to SEQ ID NO: 30523
  GFR-binding peptide
  MOD_RES (4), (4): Xaa is C or S
  MOD_RES (18), (19), (20), (21), (22): Xaa is A or G
  MOD_RES (23), (24), (25), (26): Xaa is A or G or is absent

SEQ ID NO: 68054 - protein, 36 aa, Artificial Sequence; identical to SEQ ID NO: 30526
  GFR-binding peptide
  MOD_RES (3), (4), (36): Xaa is C or S

SEQ ID NO: 68055 - protein, 38 aa, Artificial Sequence; identical to SEQ ID NO: 30527
  GFR-binding peptide
  MOD_RES (3), (4): Xaa is C or S
  MOD_RES (18), (19), (20), (21), (22): Xaa is A or G
  MOD_RES (23), (24), (25), (26): Xaa is A or G or is absent

SEQ ID NO: 68056 - protein, 35 aa, Artificial Sequence; identical to SEQ ID NO: 9166
  GFR-binding peptide
  MOD_RES (32), (34): Xaa is C or S

SEQ ID NO: 68057 - protein, 38 aa, Artificial Sequence; identical to SEQ ID NO: 9167
  GFR-binding peptide
  MOD_RES (5), (6): Xaa is C or S
  MOD_RES (20), (21), (22), (23), (24): Xaa is A or G
  MOD_RES (25), (26), (27), (28): Xaa is A or G or is absent

SEQ ID NO: 68058 - protein, 34 aa, Artificial Sequence; identical to SEQ ID NO: 9169
  GFR-binding peptide
  MOD_RES (3), (3): Xaa is C or S

SEQ ID NO: 68059 - protein, 42 aa, Artificial Sequence; identical to SEQ ID NO: 9170
  GFR-binding peptide
  MOD_RES (6), (7), (41): Xaa is C or S
  MOD_RES (21), (22), (23), (24), (25): Xaa is A or G
  MOD_RES (26), (27), (28), (29): Xaa is A or G or is absent

SEQ ID NO: 68060 - protein, 33 aa, Artificial Sequence; identical to SEQ ID NO: 30534
  GFR-binding peptide
  MOD_RES (1), (33): Xaa is C or S

SEQ ID NO: 68061 - protein, 32 aa, Artificial Sequence; identical to SEQ ID NO: 9171
  GFR-binding peptide
  MOD_RES (1), (2): Xaa is C or S

SEQ ID NO: 68062 - protein, 41 aa, Artificial Sequence
  GFR-binding peptide
  MOD_RES (3), (4), (38), (40): Xaa is C or S
  MOD_RES (18), (19), (20), (21), (22): Xaa is A or G
  MOD_RES (23), (24), (25), (26): Xaa is A or G or is absent
EPXXVPEKMSPISILYKXXXXXXXXXLKYHYNMTVESXAXR

SEQ ID NO: 68063 - protein, 37 aa, Artificial Sequence
  GFR-binding peptide
  MOD_RES (4), (5): Xaa is C or S
  MOD_RES (19), (20), (21), (22), (23): Xaa is A or G
  MOD_RES (24), (25), (26), (27): Xaa is A or G or is absent
ASPXXVPQDLSPINILYFXXXXXXXXXYGKIPMVVKS

SEQ ID NO: 68064 - protein, 43 aa, Artificial Sequence; identical to SEQ ID NO: 30537
  GFR-binding peptide
  MOD_RES (5), (6), (40), (42): Xaa is C or S
  MOD_RES (20), (21), (22), (23), (24): Xaa is A or G
  MOD_RES (25), (26), (27), (28): Xaa is A or G or is absent

SEQ ID NO: 68065 - protein, 37 aa, Artificial Sequence; identical to SEQ ID NO: 9172
  GFR-binding peptide
  MOD_RES (2), (3), (37): Xaa is C or S
  MOD_RES (17), (18), (19), (20), (21): Xaa is A or G
  MOD_RES (22), (23), (24), (25): Xaa is A or G or is absent

SEQ ID NO: 68066 - protein, 39 aa, Artificial Sequence; identical to SEQ ID NO: 9174
  GFR-binding peptide
  MOD_RES (3), (4), (37), (39): Xaa is C or S

SEQ ID NO: 68067 - protein, 38 aa, Artificial Sequence; identical to SEQ ID NO: 30541
  GFR-binding peptide
  MOD_RES (3), (4), (37): Xaa is C or S

SEQ ID NO: 68068 - protein, 30 aa, Artificial Sequence
  GFR-binding peptide
VPEKMSATSILYYDENKNVVLRKHRNMTVE

SEQ ID NO: 68069 - protein, 35 aa, Artificial Sequence; identical to SEQ ID NO: 32657
  GFR-binding peptide
  MOD_RES (1), (2), (34): Xaa is C or S

SEQ ID NO: 68070 - protein, 38 aa, Artificial Sequence
  GFR-binding peptide
  MOD_RES (4), (5), (36), (38): Xaa is C or S
PSTXXAPVKTEPISMLYLDNGRVLLKFKYEMIVEEXGX

SEQ ID NO: 68071 - protein, 31 aa, Artificial Sequence; identical to SEQ ID NO: 30544
  GFR-binding peptide
  MOD_RES (1), (1): Xaa is C or S

SEQ ID NO: 68072 - protein, 32 aa, Artificial Sequence; identical to SEQ ID NO: 9179
  GFR-binding peptide
  MOD_RES (1), (1): Xaa is C or S

SEQ ID NO: 68073 - protein, 39 aa, Artificial Sequence; identical to SEQ ID NO: 30552
  GFR-binding peptide
  MOD_RES (6), (7): Xaa is C or S
  MOD_RES (21), (22), (23), (24), (25): Xaa is A or G
  MOD_RES (26), (27), (28), (29): Xaa is A or G or is absent

SEQ ID NO: 68074 - protein, 38 aa, Artificial Sequence; identical to SEQ ID NO: 30553
  GFR-binding peptide
  MOD_RES (5), (6): Xaa is C or S
  MOD_RES (20), (21), (22), (23), (24): Xaa is A or G
  MOD_RES (25), (26), (27), (28): Xaa is A or G or is absent

SEQ ID NO: 68075 - protein, 36 aa, Artificial Sequence; identical to SEQ ID NO: 9183
  GFR-binding peptide
  MOD_RES (1), (2), (36): Xaa is C or S
  MOD_RES (16), (17), (18), (19), (20): Xaa is A or G
  MOD_RES (21), (22), (23), (24): Xaa is A or G or is absent

SEQ ID NO: 68076 - protein, 38 aa, Artificial Sequence; identical to SEQ ID NO: 9184
  GFR-binding peptide
  MOD_RES (5), (6): Xaa is C or S
  MOD_RES (20), (21), (22), (23), (24): Xaa is A or G
  MOD_RES (25), (26), (27), (28): Xaa is A or G or is absent

SEQ ID NO: 68077 - protein, 43 aa, Artificial Sequence; identical to SEQ ID NO: 30556
  GFR-binding peptide
  MOD_RES (6), (7), (40), (42): Xaa is C or S
  MOD_RES (21), (22), (23), (24), (25): Xaa is A or G
  MOD_RES (26), (27), (28), (29): Xaa is A or G or is absent

SEQ ID NO: 68078 - protein, 41 aa, Artificial Sequence
  GFR-binding peptide
  MOD_RES (6), (7), (41): Xaa is C or S
  MOD_RES (21), (22), (23), (24), (25): Xaa is A or G
  MOD_RES (26), (27), (28), (29): Xaa is A or G or is absent
KASKAXXVPTKLSATSILYYXXXXXXXXXLRKHRGMAVSEX

SEQ ID NO: 68079 - protein, 38 aa, Artificial Sequence; identical to SEQ ID NO: 32671
  GFR-binding peptide
  MOD_RES (1), (36), (38): Xaa is C or S
  MOD_RES (15), (16), (17), (18), (19): Xaa is A or G
  MOD_RES (20), (21), (22), (23): Xaa is A or G or is absent

SEQ ID NO: 68080 - protein, 34 aa, Artificial Sequence; identical to SEQ ID NO: 32674
  GFR-binding peptide
  MOD_RES (1), (33): Xaa is C or S

SEQ ID NO: 68081 - protein, 35 aa, Artificial Sequence; identical to SEQ ID NO: 32677
  GFR-binding peptide
  MOD_RES (1), (2): Xaa is C or S
  MOD_RES (16), (17), (18), (19), (20): Xaa is A or G
  MOD_RES (21), (22), (23), (24): Xaa is A or G or is absent

SEQ ID NO: 68082 - protein, 35 aa, Artificial Sequence; identical to SEQ ID NO: 30559
  GFR-binding peptide
  MOD_RES (2), (3): Xaa is C or S
  MOD_RES (17), (18), (19), (20), (21): Xaa is A or G
  MOD_RES (22), (23), (24), (25): Xaa is A or G or is absent

SEQ ID NO: 68083 - protein, 38 aa, Artificial Sequence; identical to SEQ ID NO: 9189
  GFR-binding peptide
  MOD_RES (2), (3), (37): Xaa is C or S
  MOD_RES (17), (18), (19), (20), (21): Xaa is A or G
  MOD_RES (22), (23), (24), (25): Xaa is A or G or is absent

SEQ ID NO: 68084 - protein, 39 aa, Artificial Sequence; identical to SEQ ID NO: 30561
  GFR-binding peptide
  MOD_RES (6), (7): Xaa is C or S
  MOD_RES (21), (22), (23), (24), (25): Xaa is A or G
  MOD_RES (26), (27), (28), (29): Xaa is A or G or is absent

SEQ ID NO: 68085 - protein, 39 aa, Artificial Sequence; identical to SEQ ID NO: 30563
  GFR-binding peptide
  MOD_RES (3), (4), (36), (38): Xaa is C or S

SEQ ID NO: 68086 - protein, 32 aa, Artificial Sequence
  GFR-binding peptide
  MOD_RES (31), (31): Xaa is C or S
APVKTSPISMLYKDNGRVLLLKYHYMIVEEXG

SEQ ID NO: 68087 - protein, 37 aa, Artificial Sequence
  GFR-binding peptide
  MOD_RES (2), (3), (35), (37): Xaa is C or S
PXXTPTKMSPISMLYKNDKQQIILKYHYGMVVDRXGX

SEQ ID NO: 68088 - protein, 34 aa, Artificial Sequence; identical to SEQ ID NO: 30566
  GFR-binding peptide
  MOD_RES (32), (34): Xaa is C or S

SEQ ID NO: 68089 - protein, 40 aa, Artificial Sequence; identical to SEQ ID NO: 9195
  GFR-binding peptide
  MOD_RES (3), (4), (38), (40): Xaa is C or S
  MOD_RES (18), (19), (20), (21), (22): Xaa is A or G
  MOD_RES (23), (24), (25), (26): Xaa is A or G or is absent

SEQ ID NO: 68090 - protein, 35 aa, Artificial Sequence; identical to SEQ ID NO: 9196
  GFR-binding peptide
  MOD_RES (2), (3): Xaa is C or S
  MOD_RES (17), (18), (19), (20), (21): Xaa is A or G
  MOD_RES (22), (23), (24), (25): Xaa is A or G or is absent

SEQ ID NO: 68091 - protein, 38 aa, Artificial Sequence; identical to SEQ ID NO: 30569
  GFR-binding peptide
  MOD_RES (5), (6): Xaa is C or S
  MOD_RES (20), (21), (22), (23), (24): Xaa is A or G
  MOD_RES (25), (26), (27), (28): Xaa is A or G or is absent

SEQ ID NO: 68092 - protein, 33 aa, Artificial Sequence; identical to SEQ ID NO: 9199
  GFR-binding peptide
  MOD_RES (1), (33): Xaa is C or S

SEQ ID NO: 68093 - protein, 40 aa, Artificial Sequence; identical to SEQ ID NO: 30572
  GFR-binding peptide
  MOD_RES (5), (6), (39): Xaa is C or S
  MOD_RES (20), (21), (22), (23), (24): Xaa is A or G
  MOD_RES (25), (26), (27), (28): Xaa is A or G or is absent

SEQ ID NO: 68094 - protein, 34 aa, Artificial Sequence; identical to SEQ ID NO: 9202
  GFR-binding peptide
  MOD_RES (31), (33): Xaa is C or S

SEQ ID NO: 68095 - protein, 36 aa, Artificial Sequence; identical to SEQ ID NO: 30575
  GFR-binding peptide
  MOD_RES (4), (5): Xaa is C or S

SEQ ID NO: 68096 - protein, 32 aa, Artificial Sequence; identical to SEQ ID NO: 30578
  GFR-binding peptide
  MOD_RES (1), (1): Xaa is C or S

SEQ ID NO: 68097 - protein, 31 aa, Artificial Sequence
  GFR-binding peptide
TPTKMSPISMLYKNDKQQIILKYHYGMVVDR

SEQ ID NO: 68098 - protein, 37 aa, Artificial Sequence; identical to SEQ ID NO: 9205
  GFR-binding peptide
  MOD_RES (2), (3), (35), (37): Xaa is C or S

SEQ ID NO: 68099 - protein, 36 aa, Artificial Sequence
  GFR-binding peptide
  MOD_RES (2), (3): Xaa is C or S
  MOD_RES (17), (18), (19), (20), (21): Xaa is A or G
  MOD_RES (22), (23), (24), (25): Xaa is A or G or is absent
PXXVPEKMNAISILYFXXXXXXXXXLKKYRNMTVES

SEQ ID NO: 68100 - protein, 33 aa, Artificial Sequence
  GFR-binding peptide
  MOD_RES (31), (33): Xaa is C or S
VSQDLSPINILYFIGKTPKIYGKIPMIVKSXKX

SEQ ID NO: 68101 - protein, 32 aa, Artificial Sequence; identical to SEQ ID NO: 9207
  GFR-binding peptide
  MOD_RES (1), (2): Xaa is C or S

SEQ ID NO: 68102 - protein, 38 aa, Artificial Sequence; identical to SEQ ID NO: 30583
  GFR-binding peptide
  MOD_RES (5), (6), (38): Xaa is C or S

SEQ ID NO: 68103 - protein, 33 aa, Artificial Sequence; identical to SEQ ID NO: 32699
  GFR-binding peptide
  MOD_RES (14), (15), (16), (17), (18): Xaa is A or G
  MOD_RES (19), (20), (21), (22): Xaa is A or G or is absent

SEQ ID NO: 68104 - protein, 42 aa, Artificial Sequence; identical to SEQ ID NO: 9211
  GFR-binding peptide
  MOD_RES (5), (6), (40), (42): Xaa is C or S
  MOD_RES (20), (21), (22), (23), (24): Xaa is A or G
  MOD_RES (25), (26), (27), (28): Xaa is A or G or is absent

SEQ ID NO: 68105 - protein, 37 aa, Artificial Sequence; identical to SEQ ID NO: 57607
  GFR-binding peptide
  MOD_RES (2), (3), (34), (36): Xaa is C or S

SEQ ID NO: 68106 - protein, 36 aa, Artificial Sequence
  GFR-binding peptide
  MOD_RES (33), (35): Xaa is C or S
  MOD_RES (14), (15), (16), (17), (18): Xaa is A or G
  MOD_RES (19), (20), (21), (22): Xaa is A or G or is absent
VPQALSPINILYFXXXXXXXXXYGKIPMIVRSXKXS

SEQ ID NO: 68107 - protein, 37 aa, Artificial Sequence
  GFR-binding peptide
  MOD_RES (6), (7): Xaa is C or S
AAPASXXVPARLSATSILYYDAANNVVLRKHRDMVVE

SEQ ID NO: 68108 - protein, 38 aa, Artificial Sequence; identical to SEQ ID NO: 9216
  GFR-binding peptide
  MOD_RES (2), (3), (38): Xaa is C or S
  MOD_RES (17), (18), (19), (20), (21): Xaa is A or G
  MOD_RES (22), (23), (24), (25): Xaa is A or G or is absent

SEQ ID NO: 68109 - protein, 38 aa, Artificial Sequence
  GFR-binding peptide
  MOD_RES (5), (6), (37): Xaa is C or S
VPSTXXAPVKTSATSMLYYDNGRVLLLRKHRMIVEEXG

SEQ ID NO: 68110 - protein, 44 aa, Artificial Sequence
  GFR-binding peptide
  MOD_RES (6), (7), (41), (43): Xaa is C or S
  MOD_RES (21), (22), (23), (24), (25): Xaa is A or G
  MOD_RES (26), (27), (28), (29): Xaa is A or G or is absent
HVPKPXXAPTKLSATSVLYYXXXXXXXXXLRKHRNMVVRSXGXH

SEQ ID NO: 68111 - protein, 33 aa, Artificial Sequence; identical to SEQ ID NO: 9221
  GFR-binding peptide
  MOD_RES (14), (15), (16), (17), (18): Xaa is A or G
  MOD_RES (19), (20), (21), (22): Xaa is A or G or is absent

SEQ ID NO: 68112 - protein, 36 aa, Artificial Sequence; identical to SEQ ID NO: 9223
  GFR-binding peptide
  MOD_RES (2), (3): Xaa is C or S
  MOD_RES (17), (18), (19), (20), (21): Xaa is A or G
  MOD_RES (22), (23), (24), (25): Xaa is A or G or is absent

SEQ ID NO: 68113 - protein, 33 aa, Artificial Sequence; identical to SEQ ID NO: 30597
  GFR-binding peptide
  MOD_RES (14), (15), (16), (17), (18): Xaa is A or G
  MOD_RES (19), (20), (21), (22): Xaa is A or G or is absent

SEQ ID NO: 68114 - protein, 34 aa, Artificial Sequence; identical to SEQ ID NO: 9227
  GFR-binding peptide
  MOD_RES (1), (2): Xaa is C or S
  MOD_RES (16), (17), (18), (19), (20): Xaa is A or G
  MOD_RES (21), (22), (23), (24): Xaa is A or G or is absent

SEQ ID NO: 68115 - protein, 40 aa, Artificial Sequence; identical to SEQ ID NO: 9230
  GFR-binding peptide
  MOD_RES (5), (6), (39): Xaa is C or S
  MOD_RES (20), (21), (22), (23), (24): Xaa is A or G
  MOD_RES (25), (26), (27), (28): Xaa is A or G or is absent

SEQ ID NO: 68116 - protein, 36 aa, Artificial Sequence
  GFR-binding peptide
  MOD_RES (1), (34), (36): Xaa is C or S
  MOD_RES (15), (16), (17), (18), (19): Xaa is A or G
  MOD_RES (20), (21), (22), (23): Xaa is A or G or is absent
XVPQALSPINILYFXXXXXXXXXYGKIPMIVRSXKX

SEQ ID NO: 68117 - protein, 37 aa, Artificial Sequence; identical to SEQ ID NO: 30605
  GFR-binding peptide
  MOD_RES (2), (3), (35), (37): Xaa is C or S

SEQ ID NO: 68118 - protein, 35 aa, Artificial Sequence; identical to SEQ ID NO: 32732
  GFR-binding peptide
  MOD_RES (34), (34): Xaa is C or S
  MOD_RES (14), (15), (16), (17), (18): Xaa is A or G
  MOD_RES (19), (20), (21), (22): Xaa is A or G or is absent

SEQ ID NO: 68119 - protein, 41 aa, Artificial Sequence; identical to SEQ ID NO: 9240
  GFR-binding peptide
  MOD_RES (5), (6), (39), (41): Xaa is C or S
  MOD_RES (20), (21), (22), (23), (24): Xaa is A or G
  MOD_RES (25), (26), (27), (28): Xaa is A or G or is absent

SEQ ID NO: 68120 - protein, 36 aa, Artificial Sequence; identical to SEQ ID NO: 9241
  GFR-binding peptide
  MOD_RES (1), (34), (36): Xaa is C or S
  MOD_RES (15), (16), (17), (18), (19): Xaa is A or G
  MOD_RES (20), (21), (22), (23): Xaa is A or G or is absent

SEQ ID NO: 68121 - protein, 41 aa, Artificial Sequence; identical to SEQ ID NO: 30611
  GFR-binding peptide
  MOD_RES (5), (6), (39), (41): Xaa is C or S

SEQ ID NO: 68122 - protein, 32 aa, Artificial Sequence
  GFR-binding peptide
  MOD_RES (32), (32): Xaa is C or S
VPTRLSATSILYYDSANNVVLRKHRDMVVESX

SEQ ID NO: 68123 - protein, 40 aa, Artificial Sequence; identical to SEQ ID NO: 32737
  GFR-binding peptide
  MOD_RES (4), (5), (39): Xaa is C or S
  MOD_RES (19), (20), (21), (22), (23): Xaa is A or G
  MOD_RES (24), (25), (26), (27): Xaa is A or G or is absent

SEQ ID NO: 68124 - protein, 34 aa, Artificial Sequence; identical to SEQ ID NO: 32739
  GFR-binding peptide
  MOD_RES (1), (1): Xaa is C or S
  MOD_RES (15), (16), (17), (18), (19): Xaa is A or G
  MOD_RES (20), (21), (22), (23): Xaa is A or G or is absent

SEQ ID NO: 68125 - protein, 37 aa, Artificial Sequence; identical to SEQ ID NO: 9244
  GFR-binding peptide
  MOD_RES (3), (4), (37): Xaa is C or S
  MOD_RES (18), (19), (20), (21), (22): Xaa is A or G
  MOD_RES (23), (24), (25), (26): Xaa is A or G or is absent

SEQ ID NO: 68126 - protein, 34 aa, Artificial Sequence
  GFR-binding peptide
  MOD_RES (1), (34): Xaa is C or S
  MOD_RES (15), (16), (17), (18), (19): Xaa is A or G
  MOD_RES (20), (21), (22), (23): Xaa is A or G or is absent
XVPQDLSPINILYFXXXXXXXXXYGKIPMVVKSX

SEQ ID NO: 68127 - protein, 34 aa, Artificial Sequence; identical to SEQ ID NO: 9249
  GFR-binding peptide
  MOD_RES (1), (2), (34): Xaa is C or S

SEQ ID NO: 68128 - protein, 43 aa, Artificial Sequence
  GFR-binding peptide
  MOD_RES (6), (7), (41), (43): Xaa is C or S
  MOD_RES (21), (22), (23), (24), (25): Xaa is A or G
  MOD_RES (26), (27), (28), (29): Xaa is A or G or is absent
STPPTXXVPTRLSATSILYYXXXXXXXXXLRKHRDMVVESXGX

SEQ ID NO: 68129 - protein, 34 aa, Artificial Sequence; identical to SEQ ID NO: 57652
  GFR-binding peptide
  MOD_RES (1), (2), (33): Xaa is C or S

SEQ ID NO: 68130 - protein, 33 aa, Artificial Sequence; identical to SEQ ID NO: 57653
  GFR-binding peptide
  MOD_RES (1), (2): Xaa is C or S

SEQ ID NO: 68131 - protein, 35 aa, Artificial Sequence
  GFR-binding peptide
  MOD_RES (1), (2), (34): Xaa is C or S
XXVPTKLSATSILYYDKGVVTYLRKHRGMAVSEXG

SEQ ID NO: 68132 - protein, 36 aa, Artificial Sequence; identical to SEQ ID NO: 9253
  GFR-binding peptide
  MOD_RES (1), (34), (36): Xaa is C or S
  MOD_RES (15), (16), (17), (18), (19): Xaa is A or G
  MOD_RES (20), (21), (22), (23): Xaa is A or G or is absent

SEQ ID NO: 68133 - protein, 38 aa, Artificial Sequence; identical to SEQ ID NO: 9255
  GFR-binding peptide
  MOD_RES (5), (6), (37): Xaa is C or S

SEQ ID NO: 68134 - protein, 36 aa, Artificial Sequence; identical to SEQ ID NO: 57655
  GFR-binding peptide
  MOD_RES (4), (5): Xaa is C or S

SEQ ID NO: 68135 - protein, 41 aa, Artificial Sequence; identical to SEQ ID NO: 30628
  GFR-binding peptide
  MOD_RES (6), (7), (41): Xaa is C or S
  MOD_RES (21), (22), (23), (24), (25): Xaa is A or G
  MOD_RES (26), (27), (28), (29): Xaa is A or G or is absent

SEQ ID NO: 68136 - protein, 37 aa, Artificial Sequence; identical to SEQ ID NO: 9256
  GFR-binding peptide
  MOD_RES (34), (36): Xaa is C or S
  MOD_RES (14), (15), (16), (17), (18): Xaa is A or G
  MOD_RES (19), (20), (21), (22): Xaa is A or G or is absent

SEQ ID NO: 68137 - protein, 40 aa, Artificial Sequence; identical to SEQ ID NO: 30630
  GFR-binding peptide
  MOD_RES (6), (7), (39): Xaa is C or S

SEQ ID NO: 68138 - protein, 39 aa, Artificial Sequence
  GFR-binding peptide
  MOD_RES (2), (3), (36), (38): Xaa is C or S
  MOD_RES (17), (18), (19), (20), (21): Xaa is A or G
  MOD_RES (22), (23), (24), (25): Xaa is A or G or is absent
PXXVPQALSPINILYFXXXXXXXXXYGKIPMIVRSXKXS

SEQ ID NO: 68139 - protein, 31 aa, Artificial Sequence; identical to SEQ ID NO: 30632
  GFR-binding peptide

SEQ ID NO: 68140 - protein, 39 aa, Artificial Sequence; identical to SEQ ID NO: 57665
  GFR-binding peptide
  MOD_RES (5), (6): Xaa is C or S
  MOD_RES (20), (21), (22), (23), (24): Xaa is A or G
  MOD_RES (25), (26), (27), (28): Xaa is A or G or is absent

SEQ ID NO: 68141 - protein, 37 aa, Artificial Sequence; identical to SEQ ID NO: 9258
  GFR-binding peptide
  MOD_RES (4), (5), (36): Xaa is C or S

SEQ ID NO: 68142 - protein, 34 aa, Artificial Sequence; identical to SEQ ID NO: 9261
  GFR-binding peptide
  MOD_RES (3), (4): Xaa is C or S

SEQ ID NO: 68143 - protein, 41 aa, Artificial Sequence
  GFR-binding peptide
  MOD_RES (6), (7), (41): Xaa is C or S
  MOD_RES (21), (22), (23), (24), (25): Xaa is A or G
  MOD_RES (26), (27), (28), (29): Xaa is A or G or is absent
GSAGPXXTPTKMSPISMLYKXXXXXXXXXLKYHYGMVVDRX

SEQ ID NO: 68144 - protein, 32 aa, Artificial Sequence; identical to SEQ ID NO: 32756
  GFR-binding peptide
  MOD_RES (1), (1): Xaa is C or S

SEQ ID NO: 68145 - protein, 34 aa, Artificial Sequence
  GFR-binding peptide
  MOD_RES (3), (4): Xaa is C or S
STXXAPVKTSPISMLYKDNGRVLLLKYHYMIVEE

SEQ ID NO: 68146 - protein, 36 aa, Artificial Sequence
  GFR-binding peptide
  MOD_RES (1), (33), (35): Xaa is C or S
XVPTRLSATSILYYDSANNVVLRKHRDMVVESXGXR

SEQ ID NO: 68147 - protein, 32 aa, Artificial Sequence; identical to SEQ ID NO: 9266
  GFR-binding peptide
  MOD_RES (1), (32): Xaa is C or S

SEQ ID NO: 68148 - protein, 38 aa, Artificial Sequence
  GFR-binding peptide
  MOD_RES (3), (4), (36), (38): Xaa is C or S
GPXXTPTKMEPISMLYLNDKQQIIKFKYEGMVVDRXGX

SEQ ID NO: 68149 - protein, 43 aa, Artificial Sequence
  GFR-binding peptide
  MOD_RES (6), (7), (41), (43): Xaa is C or S
  MOD_RES (21), (22), (23), (24), (25): Xaa is A or G
  MOD_RES (26), (27), (28), (29): Xaa is A or G or is absent
STPPTXXVPTRLEPISILYLXXXXXXXXXKFKYEDMVVESXGX

SEQ ID NO: 68150 - protein, 32 aa, Artificial Sequence; identical to SEQ ID NO: 30644
  GFR-binding peptide
  MOD_RES (14), (15), (16), (17), (18): Xaa is A or G
  MOD_RES (19), (20), (21), (22): Xaa is A or G or is absent

SEQ ID NO: 68151 - protein, 37 aa, Artificial Sequence
  GFR-binding peptide
  MOD_RES (4), (5), (37): Xaa is C or S
PEPXXVPEKMSATSILYYDENKNVVLRKHRNMTVESX

SEQ ID NO: 68152 - protein, 34 aa, Artificial Sequence; identical to SEQ ID NO: 30645
  GFR-binding peptide
  MOD_RES (1), (2), (34): Xaa is C or S

SEQ ID NO: 68153 - protein, 40 aa, Artificial Sequence
  GFR-binding peptide
  MOD_RES (2), (3), (37), (39): Xaa is C or S
  MOD_RES (17), (18), (19), (20), (21): Xaa is A or G
  MOD_RES (22), (23), (24), (25): Xaa is A or G or is absent
PXXTPTKMEPISMLYLXXXXXXXXXKFKYEGMVVDRXGXS

SEQ ID NO: 68154 - protein, 40 aa, Artificial Sequence; identical to SEQ ID NO: 9271
  GFR-binding peptide
  MOD_RES (3), (4), (38), (40): Xaa is C or S
  MOD_RES (18), (19), (20), (21), (22): Xaa is A or G
  MOD_RES (23), (24), (25), (26): Xaa is A or G or is absent

SEQ ID NO: 68155 - protein, 39 aa, Artificial Sequence; identical to SEQ ID NO: 30651
  GFR-binding peptide
  MOD_RES (2), (3), (37), (39): Xaa is C or S
  MOD_RES (17), (18), (19), (20), (21): Xaa is A or G
  MOD_RES (22), (23), (24), (25): Xaa is A or G or is absent

SEQ ID NO: 68156 - protein, 38 aa, Artificial Sequence; identical to SEQ ID NO: 9272
  GFR-binding peptide
  MOD_RES (2), (3), (37): Xaa is C or S
  MOD_RES (17), (18), (19), (20), (21): Xaa is A or G
  MOD_RES (22), (23), (24), (25): Xaa is A or G or is absent

SEQ ID NO: 68157 - protein, 35 aa, Artificial Sequence; identical to SEQ ID NO: 32767
  GFR-binding peptide
  MOD_RES (2), (34): Xaa is C or S

SEQ ID NO: 68158 - protein, 36 aa, Artificial Sequence
  GFR-binding peptide
  MOD_RES (3), (4), (36): Xaa is C or S
EPXXVPEKMSATSILYYDENKNVVLRKHRNMTVESX

SEQ ID NO: 68159 - protein, 33 aa, Artificial Sequence; identical to SEQ ID NO: 30652
  GFR-binding peptide
  MOD_RES (1), (1): Xaa is C or S
  MOD_RES (15), (16), (17), (18), (19): Xaa is A or G
  MOD_RES (20), (21), (22), (23): Xaa is A or G or is absent

SEQ ID NO: 68160 - protein, 40 aa, Artificial Sequence; identical to SEQ ID NO: 9274
  GFR-binding peptide
  MOD_RES (2), (3), (37), (39): Xaa is C or S
  MOD_RES (17), (18), (19), (20), (21): Xaa is A or G
  MOD_RES (22), (23), (24), (25): Xaa is A or G or is absent

SEQ ID NO: 68161 - protein, 38 aa, Artificial Sequence; identical to SEQ ID NO: 30654
  GFR-binding peptide
  MOD_RES (3), (4), (38): Xaa is C or S
  MOD_RES (18), (19), (20), (21), (22): Xaa is A or G
  MOD_RES (23), (24), (25), (26): Xaa is A or G or is absent

SEQ ID NO: 68162 - protein, 31 aa, Artificial Sequence; identical to SEQ ID NO: 9275
  GFR-binding peptide
  MOD_RES (31), (31): Xaa is C or S

SEQ ID NO: 68163 - protein, 41 aa, Artificial Sequence; identical to SEQ ID NO: 9276
  GFR-binding peptide
  MOD_RES (6), (7), (38), (40): Xaa is C or S

SEQ ID NO: 68164 - protein, 39 aa, Artificial Sequence; identical to SEQ ID NO: 9279
  GFR-binding peptide
  MOD_RES (4), (5), (36), (38): Xaa is C or S

SEQ ID NO: 68165 - protein, 37 aa, Artificial Sequence; identical to SEQ ID NO: 9280
  GFR-binding peptide
  MOD_RES (1), (2), (36): Xaa is C or S
  MOD_RES (16), (17), (18), (19), (20): Xaa is A or G
  MOD_RES (21), (22), (23), (24): Xaa is A or G or is absent

SEQ ID NO: 68166 - protein, 34 aa, Artificial Sequence; identical to SEQ ID NO: 9283
  GFR-binding peptide
  MOD_RES (34), (34): Xaa is C or S
  MOD_RES (14), (15), (16), (17), (18): Xaa is A or G
  MOD_RES (19), (20), (21), (22): Xaa is A or G or is absent

SEQ ID NO: 68167 - protein, 37 aa, Artificial Sequence
  GFR-binding peptide
  MOD_RES (1), (2), (34), (36): Xaa is C or S
XXTPTKMSPISMLYKNDKQQIILKYHYGMVVDRXGXS

SEQ ID NO: 68168 - protein, 39 aa, Artificial Sequence; identical to SEQ ID NO: 32786
  GFR-binding peptide
  MOD_RES (2), (3), (37), (39): Xaa is C or S
  MOD_RES (17), (18), (19), (20), (21): Xaa is A or G
  MOD_RES (22), (23), (24), (25): Xaa is A or G or is absent

SEQ ID NO: 68169 - protein, 35 aa, Artificial Sequence; identical to SEQ ID NO: 32789
  GFR-binding peptide
  MOD_RES (34), (34): Xaa is C or S
  MOD_RES (14), (15), (16), (17), (18): Xaa is A or G
  MOD_RES (19), (20), (21), (22): Xaa is A or G or is absent

SEQ ID NO: 68170 - protein, 37 aa, Artificial Sequence; identical to SEQ ID NO: 9285
  GFR-binding peptide
  MOD_RES (4), (5): Xaa is C or S
  MOD_RES (19), (20), (21), (22), (23): Xaa is A or G
  MOD_RES (24), (25), (26), (27): Xaa is A or G or is absent

SEQ ID NO: 68171 - protein, 40 aa, Artificial Sequence; identical to SEQ ID NO: 30667
  GFR-binding peptide
  MOD_RES (6), (7), (38), (40): Xaa is C or S

SEQ ID NO: 68172 - protein, 42 aa, Artificial Sequence; identical to SEQ ID NO: 30669
  GFR-binding peptide
  MOD_RES (5), (39), (41): Xaa is C or S
  MOD_RES (19), (20), (21), (22), (23): Xaa is A or G
  MOD_RES (24), (25), (26), (27): Xaa is A or G or is absent

SEQ ID NO: 68173 - protein, 40 aa, Artificial Sequence; identical to SEQ ID NO: 9287
  GFR-binding peptide
  MOD_RES (5), (6), (38), (40): Xaa is C or S

SEQ ID NO: 68174 - protein, 39 aa, Artificial Sequence; identical to SEQ ID NO: 9288
  GFR-binding peptide
  MOD_RES (5), (6), (39): Xaa is C or S

SEQ ID NO: 68175 - protein, 42 aa, Artificial Sequence; identical to SEQ ID NO: 30675
  GFR-binding peptide
  MOD_RES (5), (6), (40), (42): Xaa is C or S
  MOD_RES (20), (21), (22), (23), (24): Xaa is A or G
  MOD_RES (25), (26), (27), (28): Xaa is A or G or is absent

SEQ ID NO: 68176 - protein, 35 aa, Artificial Sequence; identical to SEQ ID NO: 30676
  GFR-binding peptide
  MOD_RES (2), (34): Xaa is C or S

SEQ ID NO: 68177 - protein, 32 aa, Artificial Sequence; identical to SEQ ID NO: 32794
  GFR-binding peptide
  MOD_RES (1), (1): Xaa is C or S

SEQ ID NO: 68178 - protein, 39 aa, Artificial Sequence
  GFR-binding peptide
  MOD_RES (6), (7): Xaa is C or S
  MOD_RES (21), (22), (23), (24), (25): Xaa is A or G
  MOD_RES (26), (27), (28), (29): Xaa is A or G or is absent
ASASPXXVPQDLSPINILYFXXXXXXXXXYGKIPMVVKS

SEQ ID NO: 68179 - protein, 38 aa, Artificial Sequence; identical to SEQ ID NO: 32795
  GFR-binding peptide
  MOD_RES (6), (7): Xaa is C or S

SEQ ID NO: 68180 - protein, 40 aa, Artificial Sequence; identical to SEQ ID NO: 30677
  GFR-binding peptide
  MOD_RES (4), (5), (39): Xaa is C or S
  MOD_RES (19), (20), (21), (22), (23): Xaa is A or G
  MOD_RES (24), (25), (26), (27): Xaa is A or G or is absent

SEQ ID NO: 68181 - protein, 40 aa, Artificial Sequence; identical to SEQ ID NO: 57704
  GFR-binding peptide
  MOD_RES (2), (3), (37), (39): Xaa is C or S
  MOD_RES (17), (18), (19), (20), (21): Xaa is A or G
  MOD_RES (22), (23), (24), (25): Xaa is A or G or is absent

SEQ ID NO: 68182 - protein, 34 aa, Artificial Sequence; identical to SEQ ID NO: 9289
  GFR-binding peptide
  MOD_RES (3), (4): Xaa is C or S

SEQ ID NO: 68183 - protein, 39 aa, Artificial Sequence; identical to SEQ ID NO: 9290
  GFR-binding peptide
  MOD_RES (5), (6), (38): Xaa is C or S

SEQ ID NO: 68184 - protein, 34 aa, Artificial Sequence; identical to SEQ ID NO: 9293
  GFR-binding peptide
  MOD_RES (1), (2): Xaa is C or S
  MOD_RES (16), (17), (18), (19), (20): Xaa is A or G
  MOD_RES (21), (22), (23), (24): Xaa is A or G or is absent

SEQ ID NO: 68185 - protein, 36 aa, Artificial Sequence
  GFR-binding peptide
  MOD_RES (1), (2), (33), (35): Xaa is C or S
XXAPVKTSPISMLYKDNGRVLLLKYHYMIVEEXGXL

SEQ ID NO: 68186 - protein, 39 aa, Artificial Sequence
  GFR-binding peptide
  MOD_RES (5), (6), (37), (39): Xaa is C or S
VPSTXXAPVKTEPISMLYLDNGRVLLKFKYEMIVEEXGX

SEQ ID NO: 68187 - protein, 31 aa, Artificial Sequence; identical to SEQ ID NO: 30685
  GFR-binding peptide
  MOD_RES (1), (1): Xaa is C or S

SEQ ID NO: 68188 - protein, 36 aa, Artificial Sequence; identical to SEQ ID NO: 32802
  GFR-binding peptide
  MOD_RES (5), (6): Xaa is C or S

SEQ ID NO: 68189 - protein, 41 aa, Artificial Sequence; identical to SEQ ID NO: 9299
  GFR-binding peptide
  MOD_RES (4), (5), (39), (41): Xaa is C or S
  MOD_RES (19), (20), (21), (22), (23): Xaa is A or G
  MOD_RES (24), (25), (26), (27): Xaa is A or G or is absent

SEQ ID NO: 68190 - protein, 40 aa, Artificial Sequence; identical to SEQ ID NO: 30687
  GFR-binding peptide
  MOD_RES (5), (6), (40): Xaa is C or S
  MOD_RES (20), (21), (22), (23), (24): Xaa is A or G
  MOD_RES (25), (26), (27), (28): Xaa is A or G or is absent

SEQ ID NO: 68191 - protein, 36 aa, Artificial Sequence; identical to SEQ ID NO: 9300
  GFR-binding peptide
  MOD_RES (5), (6): Xaa is C or S

SEQ ID NO: 68192 - protein, 39 aa, Artificial Sequence
  GFR-binding peptide
  MOD_RES (3), (4), (36), (38): Xaa is C or S
EPXXVPEKMEPISILYLDENKNVVKFKYENMTVESXAXR

SEQ ID NO: 68193 - protein, 33 aa, Artificial Sequence; identical to SEQ ID NO: 30690
  GFR-binding peptide
  MOD_RES (2), (3): Xaa is C or S

SEQ ID NO: 68194 - protein, 39 aa, Artificial Sequence; identical to SEQ ID NO: 32803
  GFR-binding peptide
  MOD_RES (3), (4), (38): Xaa is C or S
  MOD_RES (18), (19), (20), (21), (22): Xaa is A or G
  MOD_RES (23), (24), (25), (26): Xaa is A or G or is absent

SEQ ID NO: 68195 - protein, 40 aa, Artificial Sequence; identical to SEQ ID NO: 32806
  GFR-binding peptide
  MOD_RES (4), (5), (39): Xaa is C or S
  MOD_RES (19), (20), (21), (22), (23): Xaa is A or G
  MOD_RES (24), (25), (26), (27): Xaa is A or G or is absent

SEQ ID NO: 68196 - protein, 37 aa, Artificial Sequence; identical to SEQ ID NO: 30693
  GFR-binding peptide
  MOD_RES (2), (3), (37): Xaa is C or S
  MOD_RES (17), (18), (19), (20), (21): Xaa is A or G
  MOD_RES (22), (23), (24), (25): Xaa is A or G or is absent

SEQ ID NO: 68197 - protein, 42 aa, Artificial Sequence; identical to SEQ ID NO: 32808
  GFR-binding peptide
  MOD_RES (7), (39), (41): Xaa is C or S

SEQ ID NO: 68198 - protein, 33 aa, Artificial Sequence; identical to SEQ ID NO: 32810
  GFR-binding peptide
  MOD_RES (1), (2), (33): Xaa is C or S

SEQ ID NO: 68199 - protein, 33 aa, Artificial Sequence; identical to SEQ ID NO: 9304
  GFR-binding peptide
  MOD_RES (31), (33): Xaa is C or S

SEQ ID NO: 68200 - protein, 36 aa, Artificial Sequence
  GFR-binding peptide
  MOD_RES (1), (35): Xaa is C or S
  MOD_RES (15), (16), (17), (18), (19): Xaa is A or G
  MOD_RES (20), (21), (22), (23): Xaa is A or G or is absent
XVPARLSATSILYYXXXXXXXXXLRKHRDMVVEAXG

SEQ ID NO: 68201 - protein, 35 aa, Artificial Sequence; identical to SEQ ID NO: 30697
  GFR-binding peptide
  MOD_RES (1), (33), (35): Xaa is C or S

SEQ ID NO: 68202 - protein, 35 aa, Artificial Sequence
  GFR-binding peptide
  MOD_RES (3), (4): Xaa is C or S
EPXXVPEKMNAISILYFDENKNVVLKKYRNMTVES

SEQ ID NO: 68203 - protein, 30 aa, Artificial Sequence; identical to SEQ ID NO: 30698
  GFR-binding peptide

SEQ ID NO: 68204 - protein, 41 aa, Artificial Sequence; identical to SEQ ID NO: 9306
  GFR-binding peptide
  MOD_RES (5), (6), (38), (40): Xaa is C or S

SEQ ID NO: 68205 - protein, 35 aa, Artificial Sequence; identical to SEQ ID NO: 9307
  GFR-binding peptide
  MOD_RES (34), (34): Xaa is C or S
  MOD_RES (14), (15), (16), (17), (18): Xaa is A or G
  MOD_RES (19), (20), (21), (22): Xaa is A or G or is absent

SEQ ID NO: 68206 - protein, 39 aa, Artificial Sequence; identical to SEQ ID NO: 9308
  GFR-binding peptide
  MOD_RES (3), (4), (39): Xaa is C or S
  MOD_RES (18), (19), (20), (21), (22): Xaa is A or G
  MOD_RES (23), (24), (25), (26): Xaa is A or G or is absent

SEQ ID NO: 68207 - protein, 35 aa, Artificial Sequence; identical to SEQ ID NO: 9311
  GFR-binding peptide
  MOD_RES (1), (35): Xaa is C or S
  MOD_RES (15), (16), (17), (18), (19): Xaa is A or G
  MOD_RES (20), (21), (22), (23): Xaa is A or G or is absent

SEQ ID NO: 68208 - protein, 34 aa, Artificial Sequence
  GFR-binding peptide
  MOD_RES (2), (3): Xaa is C or S
TXXVPTRLSATSILYYDSANNVVLRKHRDMVVES

SEQ ID NO: 68209 - protein, 36 aa, Artificial Sequence; identical to SEQ ID NO: 9315
  GFR-binding peptide
  MOD_RES (1), (2), (34), (36): Xaa is C or S

SEQ ID NO: 68210 - protein, 42 aa, Artificial Sequence; identical to SEQ ID NO: 32824
  GFR-binding peptide
  MOD_RES (4), (5), (39), (41): Xaa is C or S
  MOD_RES (19), (20), (21), (22), (23): Xaa is A or G
  MOD_RES (24), (25), (26), (27): Xaa is A or G or is absent

SEQ ID NO: 68211 - protein, 39 aa, Artificial Sequence; identical to SEQ ID NO: 30709
  GFR-binding peptide
  MOD_RES (4), (5), (39): Xaa is C or S
  MOD_RES (19), (20), (21), (22), (23): Xaa is A or G
  MOD_RES (24), (25), (26), (27): Xaa is A or G or is absent

SEQ ID NO: 68212 - protein, 43 aa, Artificial Sequence; identical to SEQ ID NO: 32832
  GFR-binding peptide
  MOD_RES (6), (7), (41), (43): Xaa is C or S
  MOD_RES (21), (22), (23), (24), (25): Xaa is A or G
  MOD_RES (26), (27), (28), (29): Xaa is A or G or is absent

SEQ ID NO: 68213 - protein, 37 aa, Artificial Sequence
  GFR-binding peptide
  MOD_RES (1), (2), (36): Xaa is C or S
  MOD_RES (16), (17), (18), (19), (20): Xaa is A or G
  MOD_RES (21), (22), (23), (24): Xaa is A or G or is absent
XXVPTKLSATSILYYXXXXXXXXXLRKHRGMAVSEXG

SEQ ID NO: 68214 - protein, 37 aa, Artificial Sequence; identical to SEQ ID NO: 9320
  GFR-binding peptide
  MOD_RES (3), (35), (37): Xaa is C or S

SEQ ID NO: 68215 - protein, 35 aa, Artificial Sequence; identical to SEQ ID NO: 32834
  GFR-binding peptide
  MOD_RES (1), (34): Xaa is C or S
  MOD_RES (15), (16), (17), (18), (19): Xaa is A or G
  MOD_RES (20), (21), (22), (23): Xaa is A or G or is absent

SEQ ID NO: 68216 - protein, 40 aa, Artificial Sequence; identical to SEQ ID NO: 57735
  GFR-binding peptide
  MOD_RES (6), (7): Xaa is C or S
  MOD_RES (21), (22), (23), (24), (25): Xaa is A or G
  MOD_RES (26), (27), (28), (29): Xaa is A or G or is absent

SEQ ID NO: 68217 - protein, 41 aa, Artificial Sequence; identical to SEQ ID NO: 32837
  GFR-binding peptide
  MOD_RES (4), (5), (39), (41): Xaa is C or S
  MOD_RES (19), (20), (21), (22), (23): Xaa is A or G
  MOD_RES (24), (25), (26), (27): Xaa is A or G or is absent

SEQ ID NO: 68218 - protein, 39 aa, Artificial Sequence; identical to SEQ ID NO: 9325
  GFR-binding peptide
  MOD_RES (5), (6): Xaa is C or S
  MOD_RES (20), (21), (22), (23), (24): Xaa is A or G
  MOD_RES (25), (26), (27), (28): Xaa is A or G or is absent

SEQ ID NO: 68219 - protein, 35 aa, Artificial Sequence; identical to SEQ ID NO: 32839
  GFR-binding peptide
  MOD_RES (1), (35): Xaa is C or S
  MOD_RES (15), (16), (17), (18), (19): Xaa is A or G
  MOD_RES (20), (21), (22), (23): Xaa is A or G or is absent

SEQ ID NO: 68220 - protein, 40 aa, Artificial Sequence; identical to SEQ ID NO: 9326
  GFR-binding peptide
  MOD_RES (4), (5), (39): Xaa is C or S
  MOD_RES (19), (20), (21), (22), (23): Xaa is A or G
  MOD_RES (24), (25), (26), (27): Xaa is A or G or is absent

SEQ ID NO: 68221 - protein, 37 aa, Artificial Sequence; identical to SEQ ID NO: 9328
  GFR-binding peptide
  MOD_RES (3), (4), (36): Xaa is C or S

SEQ ID NO: 68222 - protein, 32 aa, Artificial Sequence
  GFR-binding peptide
  MOD_RES (14), (15), (16), (17), (18): Xaa is A or G
  MOD_RES (19), (20), (21), (22): Xaa is A or G or is absent
VPEKMSATSILYYXXXXXXXXXLRKHRNMTVE

SEQ ID NO: 68223 - protein, 35 aa, Artificial Sequence; identical to SEQ ID NO: 57744
  GFR-binding peptide
  MOD_RES (2), (3): Xaa is C or S
  MOD_RES (17), (18), (19), (20), (21): Xaa is A or G
  MOD_RES (22), (23), (24), (25): Xaa is A or G or is absent

SEQ ID NO: 68224 - protein, 41 aa, Artificial Sequence; identical to SEQ ID NO: 32846
  GFR-binding peptide
  MOD_RES (5), (6), (38), (40): Xaa is C or S

SEQ ID NO: 68225 - protein, 43 aa, Artificial Sequence; identical to SEQ ID NO: 9333
  GFR-binding peptide
  MOD_RES (4), (5), (40), (42): Xaa is C or S
  MOD_RES (19), (20), (21), (22), (23): Xaa is A or G
  MOD_RES (24), (25), (26), (27): Xaa is A or G or is absent

SEQ ID NO: 68226 - protein, 35 aa, Artificial Sequence
  GFR-binding peptide
  MOD_RES (1), (2), (34): Xaa is C or S
XXVPARLSATSILYYDAANNVVLRKHRDMVVEAXG

SEQ ID NO: 68227 - protein, 37 aa, Artificial Sequence; identical to SEQ ID NO: 30723
  GFR-binding peptide
  MOD_RES (34), (36): Xaa is C or S
  MOD_RES (14), (15), (16), (17), (18): Xaa is A or G
  MOD_RES (19), (20), (21), (22): Xaa is A or G or is absent

SEQ ID NO: 68228 - protein, 38 aa, Artificial Sequence
  GFR-binding peptide
  MOD_RES (3), (4), (37): Xaa is C or S
  MOD_RES (18), (19), (20), (21), (22): Xaa is A or G
  MOD_RES (23), (24), (25), (26): Xaa is A or G or is absent
SPXXVSQDLSPINILYFXXXXXXXXXYGKIPMIVKSXK

SEQ ID NO: 68229 - protein, 30 aa, Artificial Sequence; identical to SEQ ID NO: 57751
  GFR-binding peptide

SEQ ID NO: 68230 - protein, 39 aa, Artificial Sequence
  GFR-binding peptide
  MOD_RES (6), (7): Xaa is C or S
  MOD_RES (21), (22), (23), (24), (25): Xaa is A or G
  MOD_RES (26), (27), (28), (29): Xaa is A or G or is absent
GIPEPXXVPEKMNAISILYFXXXXXXXXXLKKYRNMTVE

SEQ ID NO: 68231 - protein, 40 aa, Artificial Sequence
  GFR-binding peptide
  MOD_RES (5), (6), (37), (39): Xaa is C or S
VPSTXXAPVKTSPISMLYKDNGRVLLLKYHYMIVEEXGXL

SEQ ID NO: 68232 - protein, 38 aa, Artificial Sequence; identical to SEQ ID NO: 30728
  GFR-binding peptide
  MOD_RES (4), (5), (37): Xaa is C or S

SEQ ID NO: 68233 - protein, 33 aa, Artificial Sequence; identical to SEQ ID NO: 9341
  GFR-binding peptide
  MOD_RES (14), (15), (16), (17), (18): Xaa is A or G
  MOD_RES (19), (20), (21), (22): Xaa is A or G or is absent

SEQ ID NO: 68234 - protein, 41 aa, Artificial Sequence; identical to SEQ ID NO: 9342
  GFR-binding peptide
  MOD_RES (6), (7), (38), (40): Xaa is C or S

SEQ ID NO: 68235 - protein, 39 aa, Artificial Sequence; identical to SEQ ID NO: 9344
  GFR-binding peptide
  MOD_RES (3), (4), (38): Xaa is C or S
  MOD_RES (18), (19), (20), (21), (22): Xaa is A or G
  MOD_RES (23), (24), (25), (26): Xaa is A or G or is absent

SEQ ID NO: 68236 - protein, 38 aa, Artificial Sequence
  GFR-binding peptide
  MOD_RES (3), (4), (38): Xaa is C or S
  MOD_RES (18), (19), (20), (21), (22): Xaa is A or G
  MOD_RES (23), (24), (25), (26): Xaa is A or G or is absent
EPXXVPEKMEPISILYLXXXXXXXXXKFKYENMTVESX

SEQ ID NO: 68237 - protein, 35 aa, Artificial Sequence; identical to SEQ ID NO: 32859
  GFR-binding peptide
  MOD_RES (33), (35): Xaa is C or S

SEQ ID NO: 68238 - protein, 41 aa, Artificial Sequence; identical to SEQ ID NO: 9348
  GFR-binding peptide
  MOD_RES (4), (5), (38), (40): Xaa is C or S
  MOD_RES (19), (20), (21), (22), (23): Xaa is A or G
  MOD_RES (24), (25), (26), (27): Xaa is A or G or is absent

SEQ ID NO: 68239 - protein, 38 aa, Artificial Sequence; identical to SEQ ID NO: 30738
  GFR-binding peptide
  MOD_RES (1), (35), (37): Xaa is C or S
  MOD_RES (15), (16), (17), (18), (19): Xaa is A or G
  MOD_RES (20), (21), (22), (23): Xaa is A or G or is absent

SEQ ID NO: 68240 - protein, 41 aa, Artificial Sequence
  GFR-binding peptide
  MOD_RES (6), (7), (40): Xaa is C or S
  MOD_RES (21), (22), (23), (24), (25): Xaa is A or G
  MOD_RES (26), (27), (28), (29): Xaa is A or G or is absent
RVPSTXXAPVKTSATSMLYYXXXXXXXXXLRKHRMIVEEXG

SEQ ID NO: 68241 - protein, 36 aa, Artificial Sequence; identical to SEQ ID NO: 32865
  GFR-binding peptide
  MOD_RES (1), (35): Xaa is C or S
  MOD_RES (15), (16), (17), (18), (19): Xaa is A or G
  MOD_RES (20), (21), (22), (23): Xaa is A or G or is absent

SEQ ID NO: 68242 - protein, 36 aa, Artificial Sequence
  GFR-binding peptide
  MOD_RES (1), (33), (35): Xaa is C or S
XVPARLSATSILYYDAANNVVLRKHRDMVVEAXGXR

SEQ ID NO: 68243 - protein, 38 aa, Artificial Sequence; identical to SEQ ID NO: 30741
  GFR-binding peptide
  MOD_RES (1), (2), (36), (38): Xaa is C or S
  MOD_RES (16), (17), (18), (19), (20): Xaa is A or G
  MOD_RES (21), (22), (23), (24): Xaa is A or G or is absent

SEQ ID NO: 68244 - protein, 37 aa, Artificial Sequence; identical to SEQ ID NO: 30742
  GFR-binding peptide
  MOD_RES (6), (7): Xaa is C or S

SEQ ID NO: 68245 - protein, 37 aa, Artificial Sequence; identical to SEQ ID NO: 9355
  GFR-binding peptide
  MOD_RES (4), (5), (37): Xaa is C or S

SEQ ID NO: 68246 - protein, 37 aa, Artificial Sequence; identical to SEQ ID NO: 30746
  GFR-binding peptide
  MOD_RES (1), (34), (36): Xaa is C or S

SEQ ID NO: 68247 - protein, 36 aa, Artificial Sequence; identical to SEQ ID NO: 9356
  GFR-binding peptide
  MOD_RES (1), (2), (34), (36): Xaa is C or S

SEQ ID NO: 68248 - protein, 35 aa, Artificial Sequence
  GFR-binding peptide
  MOD_RES (2), (3), (35): Xaa is C or S
PXXVPEKMNAISILYFDENKNVVLKKYRNMTVESX

SEQ ID NO: 68249 - protein, 38 aa, Artificial Sequence
  GFR-binding peptide
  MOD_RES (4), (5), (37): Xaa is C or S
PEPXXVPEKMSPINILYFDENKNVVYGKIPNMTVESXA

SEQ ID NO: 68250 - protein, 43 aa, Artificial Sequence
  GFR-binding peptide
  MOD_RES (5), (6), (40), (42): Xaa is C or S
  MOD_RES (20), (21), (22), (23), (24): Xaa is A or G
  MOD_RES (25), (26), (27), (28): Xaa is A or G or is absent
IPEPXXVPEKMNAISILYFXXXXXXXXXLKKYRNMTVESXAXR

SEQ ID NO: 68251 - protein, 38 aa, Artificial Sequence; identical to SEQ ID NO: 9361
  GFR-binding peptide
  MOD_RES (3), (4), (38): Xaa is C or S
  MOD_RES (18), (19), (20), (21), (22): Xaa is A or G
  MOD_RES (23), (24), (25), (26): Xaa is A or G or is absent

SEQ ID NO: 68252 - protein, 44 aa, Artificial Sequence; identical to SEQ ID NO: 30754
  GFR-binding peptide
  MOD_RES (6), (7), (41), (43): Xaa is C or S
  MOD_RES (21), (22), (23), (24), (25): Xaa is A or G
  MOD_RES (26), (27), (28), (29): Xaa is A or G or is absent

SEQ ID NO: 68253 - protein, 37 aa, Artificial Sequence; identical to SEQ ID NO: 9363
  GFR-binding peptide
  MOD_RES (34), (36): Xaa is C or S
  MOD_RES (14), (15), (16), (17), (18): Xaa is A or G
  MOD_RES (19), (20), (21), (22): Xaa is A or G or is absent

SEQ ID NO: 68254 - protein, 36 aa, Artificial Sequence; identical to SEQ ID NO: 30755
  GFR-binding peptide
  MOD_RES (4), (5): Xaa is C or S

SEQ ID NO: 68255 - protein, 33 aa, Artificial Sequence; identical to SEQ ID NO: 32878
  GFR-binding peptide
  MOD_RES (1), (2): Xaa is C or S

SEQ ID NO: 68256 - protein, 36 aa, Artificial Sequence
  GFR-binding peptide
  MOD_RES (3), (4): Xaa is C or S
  MOD_RES (18), (19), (20), (21), (22): Xaa is A or G
  MOD_RES (23), (24), (25), (26): Xaa is A or G or is absent
STXXAPVKTSPISMLYKXXXXXXXXXLKYHYMIVEE

SEQ ID NO: 68257 - protein, 39 aa, Artificial Sequence; identical to SEQ ID NO: 30758
  GFR-binding peptide
  MOD_RES (1), (2), (36), (38): Xaa is C or S
  MOD_RES (16), (17), (18), (19), (20): Xaa is A or G
  MOD_RES (21), (22), (23), (24): Xaa is A or G or is absent

SEQ ID NO: 68258 - protein, 43 aa, Artificial Sequence
  GFR-binding peptide
  MOD_RES (6), (7), (41), (43): Xaa is C or S
  MOD_RES (21), (22), (23), (24), (25): Xaa is A or G
  MOD_RES (26), (27), (28), (29): Xaa is A or G or is absent
GIPEPXXVPEKMSPISILYKXXXXXXXXXLKYHYNMTVESXAX

SEQ ID NO: 68259 - protein, 39 aa, Artificial Sequence; identical to SEQ ID NO: 9370
  GFR-binding peptide
  MOD_RES (6), (7): Xaa is C or S
  MOD_RES (21), (22), (23), (24), (25): Xaa is A or G
  MOD_RES (26), (27), (28), (29): Xaa is A or G or is absent

SEQ ID NO: 68260 - protein, 34 aa, Artificial Sequence; identical to SEQ ID NO: 32890
  GFR-binding peptide
  MOD_RES (32), (34): Xaa is C or S

SEQ ID NO: 68261 - protein, 33 aa, Artificial Sequence; identical to SEQ ID NO: 32895
  GFR-binding peptide
  MOD_RES (14), (15), (16), (17), (18): Xaa is A or G
  MOD_RES (19), (20), (21), (22): Xaa is A or G or is absent

SEQ ID NO: 68262 - protein, 41 aa, Artificial Sequence; identical to SEQ ID NO: 9371
  GFR-binding peptide
  MOD_RES (6), (7), (39), (41): Xaa is C or S

SEQ ID NO: 68263 - protein, 39 aa, Artificial Sequence; identical to SEQ ID NO: 9373
  GFR-binding peptide
  MOD_RES (4), (5), (36), (38): Xaa is C or S

SEQ ID NO: 68264 - protein, 42 aa, Artificial Sequence; identical to SEQ ID NO: 9374
  GFR-binding peptide
  MOD_RES (4), (5), (39), (41): Xaa is C or S
  MOD_RES (19), (20), (21), (22), (23): Xaa is A or G
  MOD_RES (24), (25), (26), (27): Xaa is A or G or is absent

SEQ ID NO: 68265 - protein, 33 aa, Artificial Sequence; identical to SEQ ID NO: 9375
  GFR-binding peptide
  MOD_RES (32), (32): Xaa is C or S

SEQ ID NO: 68266 - protein, 37 aa, Artificial Sequence; identical to SEQ ID NO: 57813
  GFR-binding peptide
  MOD_RES (4), (5): Xaa is C or S
  MOD_RES (19), (20), (21), (22), (23): Xaa is A or G
  MOD_RES (24), (25), (26), (27): Xaa is A or G or is absent

SEQ ID NO: 68267 - protein, 39 aa, Artificial Sequence
  GFR-binding peptide
  MOD_RES (5), (6), (39): Xaa is C or S
  MOD_RES (20), (21), (22), (23), (24): Xaa is A or G
  MOD_RES (25), (26), (27), (28): Xaa is A or G or is absent
VPSTXXAPVKTSATSMLYYXXXXXXXXXLRKHRMIVEEX

SEQ ID NO: 68268 - protein, 39 aa, Artificial Sequence; identical to SEQ ID NO: 30775
  GFR-binding peptide
  MOD_RES (3), (4), (36), (38): Xaa is C or S

SEQ ID NO: 68269 - protein, 37 aa, Artificial Sequence
  GFR-binding peptide
  MOD_RES (6), (7): Xaa is C or S
STPPTXXVPTRLEPISILYLDSANNVVKFKYEDMVVE

SEQ ID NO: 68270 - protein, 37 aa, Artificial Sequence
  GFR-binding peptide
  MOD_RES (1), (35), (37): Xaa is C or S
  MOD_RES (15), (16), (17), (18), (19): Xaa is A or G
  MOD_RES (20), (21), (22), (23): Xaa is A or G or is absent
XTPTKMSPISMLYKXXXXXXXXXLKYHYGMVVDRXGX

SEQ ID NO: 68271 - protein, 35 aa, Artificial Sequence; identical to SEQ ID NO: 9381
  GFR-binding peptide
  MOD_RES (2), (3): Xaa is C or S
  MOD_RES (17), (18), (19), (20), (21): Xaa is A or G
  MOD_RES (22), (23), (24), (25): Xaa is A or G or is absent

SEQ ID NO: 68272 - protein, 33 aa, Artificial Sequence; identical to SEQ ID NO: 32916
  GFR-binding peptide
  MOD_RES (32), (32): Xaa is C or S

SEQ ID NO: 68273 - protein, 38 aa, Artificial Sequence
  GFR-binding peptide
  MOD_RES (6), (7): Xaa is C or S
STPPTXXVPTRLSATSILYYDSANNVVLRKHRDMVVES

SEQ ID NO: 68274 - protein, 36 aa, Artificial Sequence
  GFR-binding peptide
  MOD_RES (2), (3): Xaa is C or S
  MOD_RES (17), (18), (19), (20), (21): Xaa is A or G
  MOD_RES (22), (23), (24), (25): Xaa is A or G or is absent
TXXVPTRLSATSILYYXXXXXXXXXLRKHRDMVVES

SEQ ID NO: 68275 - protein, 32 aa, Artificial Sequence; identical to SEQ ID NO: 9383
  GFR-binding peptide
  MOD_RES (14), (15), (16), (17), (18): Xaa is A or G
  MOD_RES (19), (20), (21), (22): Xaa is A or G or is absent

SEQ ID NO: 68276 - protein, 35 aa, Artificial Sequence; identical to SEQ ID NO: 9385
  GFR-binding peptide
  MOD_RES (4), (5): Xaa is C or S

SEQ ID NO: 68277 - protein, 37 aa, Artificial Sequence; identical to SEQ ID NO: 9386
  GFR-binding peptide
  MOD_RES (2), (3), (35), (37): Xaa is C or S

SEQ ID NO: 68278 - protein, 42 aa, Artificial Sequence; identical to SEQ ID NO: 30784
  GFR-binding peptide
  MOD_RES (5), (6), (39), (41): Xaa is C or S
  MOD_RES (20), (21), (22), (23), (24): Xaa is A or G
  MOD_RES (25), (26), (27), (28): Xaa is A or G or is absent

SEQ ID NO: 68279 - protein, 37 aa, Artificial Sequence; identical to SEQ ID NO: 30786
  GFR-binding peptide
  MOD_RES (5), (6): Xaa is C or S

SEQ ID NO: 68280 - protein, 40 aa, Artificial Sequence; identical to SEQ ID NO: 9388
  GFR-binding peptide
  MOD_RES (3), (4), (38), (40): Xaa is C or S
  MOD_RES (18), (19), (20), (21), (22): Xaa is A or G
  MOD_RES (23), (24), (25), (26): Xaa is A or G or is absent

SEQ ID NO: 68281 - protein, 38 aa, Artificial Sequence; identical to SEQ ID NO: 9389
  GFR-binding peptide
  MOD_RES (3), (4), (37): Xaa is C or S
  MOD_RES (18), (19), (20), (21), (22): Xaa is A or G
  MOD_RES (23), (24), (25), (26): Xaa is A or G or is absent

SEQ ID NO: 68282 - protein, 38 aa, Artificial Sequence; identical to SEQ ID NO: 9390
  GFR-binding peptide
  MOD_RES (1), (2), (35), (37): Xaa is C or S
  MOD_RES (16), (17), (18), (19), (20): Xaa is A or G
  MOD_RES (21), (22), (23), (24): Xaa is A or G or is absent

SEQ ID NO: 68283 - protein, 32 aa, Artificial Sequence
  GFR-binding peptide
  MOD_RES (32), (32): Xaa is C or S
VPTRLEPISILYLDSANNVVKFKYEDMVVESX

SEQ ID NO: 68284 - protein, 34 aa, Artificial Sequence; identical to SEQ ID NO: 9392
  GFR-binding peptide
  MOD_RES (1), (1): Xaa is C or S
  MOD_RES (15), (16), (17), (18), (19): Xaa is A or G
  MOD_RES (20), (21), (22), (23): Xaa is A or G or is absent

SEQ ID NO: 68285 - protein, 40 aa, Artificial Sequence
  GFR-binding peptide
  MOD_RES (5), (6), (38), (40): Xaa is C or S
TPPTXXVPTRLSATSILYYDSANNVVLRKHRDMVVESXGX

SEQ ID NO: 68286 - protein, 33 aa, Artificial Sequence; identical to SEQ ID NO: 30790
  GFR-binding peptide
  MOD_RES (14), (15), (16), (17), (18): Xaa is A or G
  MOD_RES (19), (20), (21), (22): Xaa is A or G or is absent

SEQ ID NO: 68287 - protein, 37 aa, Artificial Sequence; identical to SEQ ID NO: 9394
  GFR-binding peptide
  MOD_RES (35), (37): Xaa is C or S
  MOD_RES (14), (15), (16), (17), (18): Xaa is A or G
  MOD_RES (19), (20), (21), (22): Xaa is A or G or is absent

SEQ ID NO: 68288 - protein, 35 aa, Artificial Sequence
  GFR-binding peptide
  MOD_RES (2), (3), (34): Xaa is C or S
TXXAPVKTSATSMLYYDNGRVLLLRKHRMIVEEXG

SEQ ID NO: 68289 - protein, 39 aa, Artificial Sequence
  GFR-binding peptide
  MOD_RES (4), (5), (39): Xaa is C or S
  MOD_RES (19), (20), (21), (22), (23): Xaa is A or G
  MOD_RES (24), (25), (26), (27): Xaa is A or G or is absent
PEPXXVPEKMSPISILYKXXXXXXXXXLKYHYNMTVESX

SEQ ID NO: 68290 - protein, 42 aa, Artificial Sequence; identical to SEQ ID NO: 9396
  GFR-binding peptide
  MOD_RES (5), (6), (40), (42): Xaa is C or S
  MOD_RES (20), (21), (22), (23), (24): Xaa is A or G
  MOD_RES (25), (26), (27), (28): Xaa is A or G or is absent

SEQ ID NO: 68291 - protein, 36 aa, Artificial Sequence; identical to SEQ ID NO: 30796
  GFR-binding peptide
  MOD_RES (1), (2), (36): Xaa is C or S
  MOD_RES (16), (17), (18), (19), (20): Xaa is A or G
  MOD_RES (21), (22), (23), (24): Xaa is A or G or is absent

SEQ ID NO: 68292 - protein, 31 aa, Artificial Sequence
  GFR-binding peptide
  MOD_RES (1), (1): Xaa is C or S
XTPTKMEPISMLYLNDKQQIIKFKYEGMVVD

SEQ ID NO: 68293 - protein, 40 aa, Artificial Sequence
  GFR-binding peptide
  MOD_RES (4), (5), (39): Xaa is C or S
  MOD_RES (19), (20), (21), (22), (23): Xaa is A or G
  MOD_RES (24), (25), (26), (27): Xaa is A or G or is absent
PPTXXVPTRLSATSILYYXXXXXXXXXLRKHRDMVVESXG

SEQ ID NO: 68294 - protein, 39 aa, Artificial Sequence; identical to SEQ ID NO: 30802
  GFR-binding peptide
  MOD_RES (6), (7): Xaa is C or S
  MOD_RES (21), (22), (23), (24), (25): Xaa is A or G
  MOD_RES (26), (27), (28), (29): Xaa is A or G or is absent

SEQ ID NO: 68295 - protein, 40 aa, Artificial Sequence; identical to SEQ ID NO: 57836
  GFR-binding peptide
  MOD_RES (6), (7), (39): Xaa is C or S

SEQ ID NO: 68296 - protein, 34 aa, Artificial Sequence; identical to SEQ ID NO: 30803
  GFR-binding peptide
  MOD_RES (1), (2), (34): Xaa is C or S

SEQ ID NO: 68297 - protein, 44 aa, Artificial Sequence
  GFR-binding peptide
  MOD_RES (6), (7), (41), (43): Xaa is C or S
  MOD_RES (21), (22), (23), (24), (25): Xaa is A or G
  MOD_RES (26), (27), (28), (29): Xaa is A or G or is absent
AAPASXXVPARLSATSILYYXXXXXXXXXLRKHRDMVVEAXGXR

SEQ ID NO: 68298 - protein, 40 aa, Artificial Sequence; identical to SEQ ID NO: 9402
  GFR-binding peptide
  MOD_RES (7), (7): Xaa is C or S
  MOD_RES (21), (22), (23), (24), (25): Xaa is A or G
  MOD_RES (26), (27), (28), (29): Xaa is A or G or is absent

SEQ ID NO: 68299 - protein, 42 aa, Artificial Sequence; identical to SEQ ID NO: 30807
  GFR-binding peptide
  MOD_RES (6), (7), (39), (41): Xaa is C or S

SEQ ID NO: 68300 - protein, 36 aa, Artificial Sequence
  GFR-binding peptide
  MOD_RES (34), (36): Xaa is C or S
  MOD_RES (14), (15), (16), (17), (18): Xaa is A or G
  MOD_RES (19), (20), (21), (22): Xaa is A or G or is absent
VPARLSATSILYYXXXXXXXXXLRKHRDMVVEAXGX

SEQ ID NO: 68301 - protein, 32 aa, Artificial Sequence
  GFR-binding peptide
  MOD_RES (31), (31): Xaa is C or S
VPQDLSPINILYFVGRTPKVYGKIPMVVKSXK

SEQ ID NO: 68302 - protein, 37 aa, Artificial Sequence; identical to SEQ ID NO: 9406
  GFR-binding peptide
  MOD_RES (4), (5), (36): Xaa is C or S

SEQ ID NO: 68303 - protein, 35 aa, Artificial Sequence; identical to SEQ ID NO: 57845
  GFR-binding peptide
  MOD_RES (1), (2): Xaa is C or S
  MOD_RES (16), (17), (18), (19), (20): Xaa is A or G
  MOD_RES (21), (22), (23), (24): Xaa is A or G or is absent

SEQ ID NO: 68304 - protein, 30 aa, Artificial Sequence
  GFR-binding peptide
APVKTSATSMLYYDNGRVLLLRKHRMIVEE

SEQ ID NO: 68305 - protein, 35 aa, Artificial Sequence; identical to SEQ ID NO: 32952
  GFR-binding peptide
  MOD_RES (2), (3): Xaa is C or S
  MOD_RES (17), (18), (19), (20), (21): Xaa is A or G
  MOD_RES (22), (23), (24), (25): Xaa is A or G or is absent

SEQ ID NO: 68306 - protein, 36 aa, Artificial Sequence; identical to SEQ ID NO: 32956
  GFR-binding peptide
  MOD_RES (1), (2), (36): Xaa is C or S
  MOD_RES (16), (17), (18), (19), (20): Xaa is A or G
  MOD_RES (21), (22), (23), (24): Xaa is A or G or is absent

SEQ ID NO: 68307 - protein, 36 aa, Artificial Sequence; identical to SEQ ID NO: 9415
  GFR-binding peptide
  MOD_RES (1), (35): Xaa is C or S
  MOD_RES (15), (16), (17), (18), (19): Xaa is A or G
  MOD_RES (20), (21), (22), (23): Xaa is A or G or is absent

SEQ ID NO: 68308 - protein, 33 aa, Artificial Sequence
  GFR-binding peptide
  MOD_RES (14), (15), (16), (17), (18): Xaa is A or G
  MOD_RES (19), (20), (21), (22): Xaa is A or G or is absent
VPARLSATSILYYXXXXXXXXXLRKHRDMVVEA

SEQ ID NO: 68309 - protein, 37 aa, Artificial Sequence
  GFR-binding peptide
  MOD_RES (6), (7): Xaa is C or S
GSAGPXXTPTKMSATSMLYYNDKQQIILRKHRGMVVD

SEQ ID NO: 68310 - protein, 34 aa, Artificial Sequence; identical to SEQ ID NO: 30827
  GFR-binding peptide
  MOD_RES (33), (33): Xaa is C or S

SEQ ID NO: 68311 - protein, 37 aa, Artificial Sequence; identical to SEQ ID NO: 9422
  GFR-binding peptide
  MOD_RES (4), (5): Xaa is C or S

SEQ ID NO: 68312 - protein, 39 aa, Artificial Sequence; identical to SEQ ID NO: 9423
  GFR-binding peptide
  MOD_RES (3), (4), (36), (38): Xaa is C or S

SEQ ID NO: 68313 - protein, 38 aa, Artificial Sequence
  GFR-binding peptide
  MOD_RES (1), (35), (37): Xaa is C or S
  MOD_RES (15), (16), (17), (18), (19): Xaa is A or G
  MOD_RES (20), (21), (22), (23): Xaa is A or G or is absent
XVPARLSATSILYYXXXXXXXXXLRKHRDMVVEAXGXR

SEQ ID NO: 68314 - protein, 34 aa, Artificial Sequence
  GFR-binding peptide
  MOD_RES (32), (34): Xaa is C or S
TPTKMEPISMLYLNDKQQIIKFKYEGMVVDRXGX

SEQ ID NO: 68315 - protein, 35 aa, Artificial Sequence; identical to SEQ ID NO: 30832
  GFR-binding peptide
  MOD_RES (4), (5): Xaa is C or S

SEQ ID NO: 68316 - protein, 40 aa, Artificial Sequence; identical to SEQ ID NO: 32971
  GFR-binding peptide
  MOD_RES (3), (4), (38), (40): Xaa is C or S
  MOD_RES (18), (19), (20), (21), (22): Xaa is A or G
  MOD_RES (23), (24), (25), (26): Xaa is A or G or is absent

SEQ ID NO: 68317 - protein, 37 aa, Artificial Sequence; identical to SEQ ID NO: 30834
  GFR-binding peptide
  MOD_RES (3), (4): Xaa is C or S
  MOD_RES (18), (19), (20), (21), (22): Xaa is A or G
  MOD_RES (23), (24), (25), (26): Xaa is A or G or is absent

SEQ ID NO: 68318 - protein, 39 aa, Artificial Sequence; identical to SEQ ID NO: 9428
  GFR-binding peptide
  MOD_RES (2), (3), (37), (39): Xaa is C or S
  MOD_RES (17), (18), (19), (20), (21): Xaa is A or G
  MOD_RES (22), (23), (24), (25): Xaa is A or G or is absent

SEQ ID NO: 68319 - protein, 38 aa, Artificial Sequence; identical to SEQ ID NO: 32975
  GFR-binding peptide
  MOD_RES (1), (35), (37): Xaa is C or S
  MOD_RES (15), (16), (17), (18), (19): Xaa is A or G
  MOD_RES (20), (21), (22), (23): Xaa is A or G or is absent

SEQ ID NO: 68320 - protein, 35 aa, Artificial Sequence
  GFR-binding peptide
  MOD_RES (1), (35): Xaa is C or S
  MOD_RES (15), (16), (17), (18), (19): Xaa is A or G
  MOD_RES (20), (21), (22), (23): Xaa is A or G or is absent
XVPARLSATSILYYXXXXXXXXXLRKHRDMVVEAX

SEQ ID NO: 68321 - protein, 37 aa, Artificial Sequence; identical to SEQ ID NO: 9430
  GFR-binding peptide
  MOD_RES (5), (6): Xaa is C or S

SEQ ID NO: 68322 - protein, 39 aa, Artificial Sequence; identical to SEQ ID NO: 57867
  GFR-binding peptide
  MOD_RES (6), (7), (38): Xaa is C or S

SEQ ID NO: 68323 - protein, 34 aa, Artificial Sequence; identical to SEQ ID NO: 30838
  GFR-binding peptide
  MOD_RES (3), (4): Xaa is C or S

SEQ ID NO: 68324 - protein, 43 aa, Artificial Sequence; identical to SEQ ID NO: 30840
  GFR-binding peptide
  MOD_RES (6), (7), (41), (43): Xaa is C or S
  MOD_RES (21), (22), (23), (24), (25): Xaa is A or G
  MOD_RES (26), (27), (28), (29): Xaa is A or G or is absent

SEQ ID NO: 68325 - protein, 40 aa, Artificial Sequence; identical to SEQ ID NO: 9437
  GFR-binding peptide
  MOD_RES (3), (4), (38), (40): Xaa is C or S
  MOD_RES (18), (19), (20), (21), (22): Xaa is A or G
  MOD_RES (23), (24), (25), (26): Xaa is A or G or is absent

SEQ ID NO: 68326 - protein, 39 aa, Artificial Sequence; identical to SEQ ID NO: 57875
  GFR-binding peptide
  MOD_RES (6), (7): Xaa is C or S
  MOD_RES (21), (22), (23), (24), (25): Xaa is A or G
  MOD_RES (26), (27), (28), (29): Xaa is A or G or is absent

SEQ ID NO: 68327 - protein, 31 aa, Artificial Sequence; identical to SEQ ID NO: 32985
  GFR-binding peptide
  MOD_RES (1), (1): Xaa is C or S

SEQ ID NO: 68328 - protein, 35 aa, Artificial Sequence; identical to SEQ ID NO: 32986
  GFR-binding peptide
  MOD_RES (34), (34): Xaa is C or S
  MOD_RES (14), (15), (16), (17), (18): Xaa is A or G
  MOD_RES (19), (20), (21), (22): Xaa is A or G or is absent

SEQ ID NO: 68329 - protein, 37 aa, Artificial Sequence; identical to SEQ ID NO: 32987
  GFR-binding peptide
  MOD_RES (2), (3), (37): Xaa is C or S
  MOD_RES (17), (18), (19), (20), (21): Xaa is A or G
  MOD_RES (22), (23), (24), (25): Xaa is A or G or is absent

SEQ ID NO: 68330 - protein, 40 aa, Artificial Sequence; identical to SEQ ID NO: 30844
  GFR-binding peptide
  MOD_RES (3), (4), (38), (40): Xaa is C or S
  MOD_RES (18), (19), (20), (21), (22): Xaa is A or G
  MOD_RES (23), (24), (25), (26): Xaa is A or G or is absent

SEQ ID NO: 68331 - protein, 30 aa, Artificial Sequence; identical to SEQ ID NO: 9444
  GFR-binding peptide

SEQ ID NO: 68332 - protein, 41 aa, Artificial Sequence; identical to SEQ ID NO: 9445
  GFR-binding peptide
  MOD_RES (3), (4), (38), (40): Xaa is C or S
  MOD_RES (18), (19), (20), (21), (22): Xaa is A or G
  MOD_RES (23), (24), (25), (26): Xaa is A or G or is absent

SEQ ID NO: 68333 - protein, 41 aa, Artificial Sequence
  GFR-binding peptide
  MOD_RES (3), (4), (38), (40): Xaa is C or S
  MOD_RES (18), (19), (20), (21), (22): Xaa is A or G
  MOD_RES (23), (24), (25), (26): Xaa is A or G or is absent
GPXXTPTKMSPISMLYKXXXXXXXXXLKYHYGMVVDRXGXS

SEQ ID NO: 68334 - protein, 38 aa, Artificial Sequence; identical to SEQ ID NO: 9447
  GFR-binding peptide
  MOD_RES (6), (7): Xaa is C or S

SEQ ID NO: 68335 - protein, 31 aa, Artificial Sequence; identical to SEQ ID NO: 9449
  GFR-binding peptide

SEQ ID NO: 68336 - protein, 40 aa, Artificial Sequence; identical to SEQ ID NO: 32997
  GFR-binding peptide
  MOD_RES (4), (5), (37), (39): Xaa is C or S

SEQ ID NO: 68337 - protein, 36 aa, Artificial Sequence
  GFR-binding peptide
  MOD_RES (1), (2), (36): Xaa is C or S
  MOD_RES (16), (17), (18), (19), (20): Xaa is A or G
  MOD_RES (21), (22), (23), (24): Xaa is A or G or is absent
XXVPTRLSATSILYYXXXXXXXXXLRKHRDMVVESX

SEQ ID NO: 68338 - protein, 34 aa, Artificial Sequence
  GFR-binding peptide
  MOD_RES (31), (33): Xaa is C or S
APVKTSATSMLYYDNGRVLLLRKHRMIVEEXGXL

SEQ ID NO: 68339 - protein, 38 aa, Artificial Sequence; identical to SEQ ID NO: 9456
  GFR-binding peptide
  MOD_RES (5), (6): Xaa is C or S
  MOD_RES (20), (21), (22), (23), (24): Xaa is A or G
  MOD_RES (25), (26), (27), (28): Xaa is A or G or is absent

SEQ ID NO: 68340 - protein, 40 aa, Artificial Sequence; identical to SEQ ID NO: 9457
  GFR-binding peptide
  MOD_RES (6), (40): Xaa is C or S
  MOD_RES (20), (21), (22), (23), (24): Xaa is A or G
  MOD_RES (25), (26), (27), (28): Xaa is A or G or is absent

SEQ ID NO: 68341 - protein, 38 aa, Artificial Sequence; identical to SEQ ID NO: 9459
  GFR-binding peptide
  MOD_RES (2), (3), (35), (37): Xaa is C or S

SEQ ID NO: 68342 - protein, 36 aa, Artificial Sequence; identical to SEQ ID NO: 9462
  GFR-binding peptide
  MOD_RES (3), (4): Xaa is C or S
  MOD_RES (18), (19), (20), (21), (22): Xaa is A or G
  MOD_RES (23), (24), (25), (26): Xaa is A or G or is absent

SEQ ID NO: 68343 - protein, 41 aa, Artificial Sequence; identical to SEQ ID NO: 30862
  GFR-binding peptide
  MOD_RES (6), (7), (39), (41): Xaa is C or S

SEQ ID NO: 68344 - protein, 39 aa, Artificial Sequence; identical to SEQ ID NO: 9464
  GFR-binding peptide
  MOD_RES (7), (39): Xaa is C or S

SEQ ID NO: 68345 - protein, 39 aa, Artificial Sequence; identical to SEQ ID NO: 9465
  GFR-binding peptide
  MOD_RES (3), (4), (36), (38): Xaa is C or S

SEQ ID NO: 68346 - protein, 37 aa, Artificial Sequence
  GFR-binding peptide
  MOD_RES (3), (4), (36): Xaa is C or S
GPXXTPTKMSPISMLYKNDKQQIILKYHYGMVVDRXG

SEQ ID NO: 68347 - protein, 41 aa, Artificial Sequence
  GFR-binding peptide
  MOD_RES (6), (7), (41): Xaa is C or S
  MOD_RES (21), (22), (23), (24), (25): Xaa is A or G
  MOD_RES (26), (27), (28), (29): Xaa is A or G or is absent
STPPTXXVPTRLEPISILYLXXXXXXXXXKFKYEDMVVESX

SEQ ID NO: 68348 - protein, 38 aa, Artificial Sequence; identical to SEQ ID NO: 30866
  GFR-binding peptide
  MOD_RES (1), (2), (36), (38): Xaa is C or S
  MOD_RES (16), (17), (18), (19), (20): Xaa is A or G
  MOD_RES (21), (22), (23), (24): Xaa is A or G or is absent

SEQ ID NO: 68349 - protein, 36 aa, Artificial Sequence; identical to SEQ ID NO: 9468
  GFR-binding peptide
  MOD_RES (3), (4), (35): Xaa is C or S

SEQ ID NO: 68350 - protein, 35 aa, Artificial Sequence; identical to SEQ ID NO: 33016
  GFR-binding peptide
  MOD_RES (1), (35): Xaa is C or S
  MOD_RES (15), (16), (17), (18), (19): Xaa is A or G
  MOD_RES (20), (21), (22), (23): Xaa is A or G or is absent

SEQ ID NO: 68351 - protein, 39 aa, Artificial Sequence; identical to SEQ ID NO: 33020
  GFR-binding peptide
  MOD_RES (4), (5), (37), (39): Xaa is C or S

SEQ ID NO: 68352 - protein, 34 aa, Artificial Sequence; identical to SEQ ID NO: 33021
  GFR-binding peptide
  MOD_RES (1), (2), (33): Xaa is C or S

SEQ ID NO: 68353 - protein, 40 aa, Artificial Sequence; identical to SEQ ID NO: 9471
  GFR-binding peptide
  MOD_RES (4), (5), (40): Xaa is C or S
  MOD_RES (19), (20), (21), (22), (23): Xaa is A or G
  MOD_RES (24), (25), (26), (27): Xaa is A or G or is absent

SEQ ID NO: 68354 - protein, 39 aa, Artificial Sequence
  GFR-binding peptide
  MOD_RES (1), (2), (36), (38): Xaa is C or S
  MOD_RES (16), (17), (18), (19), (20): Xaa is A or G
  MOD_RES (21), (22), (23), (24): Xaa is A or G or is absent
XXVPEKMSPINILYFXXXXXXXXXYGKIPNMTVESXAXR

SEQ ID NO: 68355 - protein, 42 aa, Artificial Sequence; identical to SEQ ID NO: 30876
  GFR-binding peptide
  MOD_RES (4), (5), (39), (41): Xaa is C or S
  MOD_RES (19), (20), (21), (22), (23): Xaa is A or G
  MOD_RES (24), (25), (26), (27): Xaa is A or G or is absent

SEQ ID NO: 68356 - protein, 38 aa, Artificial Sequence; identical to SEQ ID NO: 9478
  GFR-binding peptide
  MOD_RES (5), (6): Xaa is C or S
  MOD_RES (20), (21), (22), (23), (24): Xaa is A or G
  MOD_RES (25), (26), (27), (28): Xaa is A or G or is absent

SEQ ID NO: 68357 - protein, 37 aa, Artificial Sequence; identical to SEQ ID NO: 33032
  GFR-binding peptide
  MOD_RES (4), (5): Xaa is C or S
  MOD_RES (19), (20), (21), (22), (23): Xaa is A or G
  MOD_RES (24), (25), (26), (27): Xaa is A or G or is absent

SEQ ID NO: 68358 - protein, 38 aa, Artificial Sequence
  GFR-binding peptide
  MOD_RES (1), (2), (36), (38): Xaa is C or S
  MOD_RES (16), (17), (18), (19), (20): Xaa is A or G
  MOD_RES (21), (22), (23), (24): Xaa is A or G or is absent
XXVPEKMSPISILYKXXXXXXXXXLKYHYNMTVESXAX

SEQ ID NO: 68359 - protein, 35 aa, Artificial Sequence; identical to SEQ ID NO: 9484
  GFR-binding peptide
  MOD_RES (1), (2), (34): Xaa is C or S

SEQ ID NO: 68360 - protein, 37 aa, Artificial Sequence; identical to SEQ ID NO: 33036
  GFR-binding peptide
  MOD_RES (3), (4), (36): Xaa is C or S

SEQ ID NO: 68361 - protein, 35 aa, Artificial Sequence; identical to SEQ ID NO: 30887
  GFR-binding peptide
  MOD_RES (1), (2), (33), (35): Xaa is C or S

SEQ ID NO: 68362 - protein, 41 aa, Artificial Sequence; identical to SEQ ID NO: 9485
  GFR-binding peptide
  MOD_RES (3), (4), (38), (40): Xaa is C or S
  MOD_RES (18), (19), (20), (21), (22): Xaa is A or G
  MOD_RES (23), (24), (25), (26): Xaa is A or G or is absent

SEQ ID NO: 68363 - protein, 36 aa, Artificial Sequence; identical to SEQ ID NO: 9491
  GFR-binding peptide
  MOD_RES (1), (2), (35): Xaa is C or S
  MOD_RES (16), (17), (18), (19), (20): Xaa is A or G
  MOD_RES (21), (22), (23), (24): Xaa is A or G or is absent

SEQ ID NO: 68364 - protein, 38 aa, Artificial Sequence
  GFR-binding peptide
  MOD_RES (5), (6): Xaa is C or S
  MOD_RES (20), (21), (22), (23), (24): Xaa is A or G
  MOD_RES (25), (26), (27), (28): Xaa is A or G or is absent
IPEPXXVPEKMSATSILYYXXXXXXXXXLRKHRNMTVE

SEQ ID NO: 68365 - protein, 40 aa, Artificial Sequence; identical to SEQ ID NO: 30893
  GFR-binding peptide
  MOD_RES (5), (6), (40): Xaa is C or S
  MOD_RES (20), (21), (22), (23), (24): Xaa is A or G
  MOD_RES (25), (26), (27), (28): Xaa is A or G or is absent

SEQ ID NO: 68366 - protein, 35 aa, Artificial Sequence
  GFR-binding peptide
  MOD_RES (3), (4): Xaa is C or S
KAXXVPTKLSATSILYYDKGVVTYLRKHRGMAVSE

SEQ ID NO: 68367 - protein, 40 aa, Artificial Sequence; identical to SEQ ID NO: 9494
  GFR-binding peptide
  MOD_RES (6), (7), (39): Xaa is C or S

SEQ ID NO: 68368 - protein, 38 aa, Artificial Sequence; identical to SEQ ID NO: 33044
  GFR-binding peptide
  MOD_RES (1), (2), (36), (38): Xaa is C or S
  MOD_RES (16), (17), (18), (19), (20): Xaa is A or G
  MOD_RES (21), (22), (23), (24): Xaa is A or G or is absent

SEQ ID NO: 68369 - protein, 39 aa, Artificial Sequence
  GFR-binding peptide
  MOD_RES (4), (5), (38): Xaa is C or S
  MOD_RES (19), (20), (21), (22), (23): Xaa is A or G
  MOD_RES (24), (25), (26), (27): Xaa is A or G or is absent
AAPXXVPQALSPINILYFXXXXXXXXXYGKIPMIVRSXK

SEQ ID NO: 68370 - protein, 36 aa, Artificial Sequence
  GFR-binding peptide
  MOD_RES (4), (5), (36): Xaa is C or S
ASPXXVSQDLSPINILYFIGKTPKIYGKIPMIVKSX

SEQ ID NO: 68371 - protein, 32 aa, Artificial Sequence
  GFR-binding peptide
  MOD_RES (1), (1): Xaa is C or S
XVPTRLSPISILYKDSANNVVLKYHYDMVVES

SEQ ID NO: 68372 - protein, 35 aa, Artificial Sequence; identical to SEQ ID NO: 30899
  GFR-binding peptide
  MOD_RES (1), (35): Xaa is C or S
  MOD_RES (15), (16), (17), (18), (19): Xaa is A or G
  MOD_RES (20), (21), (22), (23): Xaa is A or G or is absent

SEQ ID NO: 68373 - protein, 34 aa, Artificial Sequence
  GFR-binding peptide
  MOD_RES (33), (33): Xaa is C or S
  MOD_RES (14), (15), (16), (17), (18): Xaa is A or G
  MOD_RES (19), (20), (21), (22): Xaa is A or G or is absent
APVKTEPISMLYLXXXXXXXXXKFKYEMIVEEXG

SEQ ID NO: 68374 - protein, 39 aa, Artificial Sequence; identical to SEQ ID NO: 9498
  GFR-binding peptide
  MOD_RES (1), (2), (37), (39): Xaa is C or S
  MOD_RES (16), (17), (18), (19), (20): Xaa is A or G
  MOD_RES (21), (22), (23), (24): Xaa is A or G or is absent

SEQ ID NO: 68375 - protein, 43 aa, Artificial Sequence; identical to SEQ ID NO: 9503
  GFR-binding peptide
  MOD_RES (6), (7), (40), (42): Xaa is C or S
  MOD_RES (21), (22), (23), (24), (25): Xaa is A or G
  MOD_RES (26), (27), (28), (29): Xaa is A or G or is absent

SEQ ID NO: 68376 - protein, 41 aa, Artificial Sequence; identical to SEQ ID NO: 9504
  GFR-binding peptide
  MOD_RES (6), (7), (38), (40): Xaa is C or S

SEQ ID NO: 68377 - protein, 33 aa, Artificial Sequence
  GFR-binding peptide
  MOD_RES (2), (3): Xaa is C or S
TXXAPVKTSATSMLYYDNGRVLLLRKHRMIVEE

SEQ ID NO: 68378 - protein, 35 aa, Artificial Sequence; identical to SEQ ID NO: 9506
  GFR-binding peptide
  MOD_RES (1), (2), (34): Xaa is C or S

SEQ ID NO: 68379 - protein, 32 aa, Artificial Sequence; identical to SEQ ID NO: 57942
  GFR-binding peptide
  MOD_RES (31), (31): Xaa is C or S

SEQ ID NO: 68380 - protein, 42 aa, Artificial Sequence; identical to SEQ ID NO: 9508
  GFR-binding peptide
  MOD_RES (7), (41): Xaa is C or S
  MOD_RES (21), (22), (23), (24), (25): Xaa is A or G
  MOD_RES (26), (27), (28), (29): Xaa is A or G or is absent

SEQ ID NO: 68381 - protein, 38 aa, Artificial Sequence
  GFR-binding peptide
  MOD_RES (5), (6): Xaa is C or S
  MOD_RES (20), (21), (22), (23), (24): Xaa is A or G
  MOD_RES (25), (26), (27), (28): Xaa is A or G or is absent
SAGPXXTPTKMSATSMLYYXXXXXXXXXLRKHRGMVVD

SEQ ID NO: 68382 - protein, 35 aa, Artificial Sequence
  GFR-binding peptide
  MOD_RES (1), (35): Xaa is C or S
  MOD_RES (15), (16), (17), (18), (19): Xaa is A or G
  MOD_RES (20), (21), (22), (23): Xaa is A or G or is absent
XTPTKMSATSMLYYXXXXXXXXXLRKHRGMVVDRX

SEQ ID NO: 68383 - protein, 41 aa, Artificial Sequence; identical to SEQ ID NO: 30910
  GFR-binding peptide
  MOD_RES (6), (7), (40): Xaa is C or S
  MOD_RES (21), (22), (23), (24), (25): Xaa is A or G
  MOD_RES (26), (27), (28), (29): Xaa is A or G or is absent

SEQ ID NO: 68384 - protein, 38 aa, Artificial Sequence; identical to SEQ ID NO: 30914
  GFR-binding peptide
  MOD_RES (6), (38): Xaa is C or S

SEQ ID NO: 68385 - protein, 34 aa, Artificial Sequence; identical to SEQ ID NO: 9518
  GFR-binding peptide
  MOD_RES (33), (33): Xaa is C or S
  MOD_RES (14), (15), (16), (17), (18): Xaa is A or G
  MOD_RES (19), (20), (21), (22): Xaa is A or G or is absent

SEQ ID NO: 68386 - protein, 31 aa, Artificial Sequence; identical to SEQ ID NO: 9519
  GFR-binding peptide

SEQ ID NO: 68387 - protein, 40 aa, Artificial Sequence; identical to SEQ ID NO: 9521
  GFR-binding peptide
  MOD_RES (3), (4), (39): Xaa is C or S
  MOD_RES (18), (19), (20), (21), (22): Xaa is A or G
  MOD_RES (23), (24), (25), (26): Xaa is A or G or is absent

SEQ ID NO: 68388 - protein, 37 aa, Artificial Sequence
  GFR-binding peptide
  MOD_RES (3), (4): Xaa is C or S
  MOD_RES (18), (19), (20), (21), (22): Xaa is A or G
  MOD_RES (23), (24), (25), (26): Xaa is A or G or is absent
EPXXVPEKMEPISILYLXXXXXXXXXKFKYENMTVES

SEQ ID NO: 68389 - protein, 37 aa, Artificial Sequence; identical to SEQ ID NO: 33070
  GFR-binding peptide
  MOD_RES (2), (3), (37): Xaa is C or S
  MOD_RES (17), (18), (19), (20), (21): Xaa is A or G
  MOD_RES (22), (23), (24), (25): Xaa is A or G or is absent

SEQ ID NO: 68390 - protein, 34 aa, Artificial Sequence; identical to SEQ ID NO: 30920
  GFR-binding peptide
  MOD_RES (1), (2), (34): Xaa is C or S

SEQ ID NO: 68391 - protein, 33 aa, Artificial Sequence; identical to SEQ ID NO: 33072
  GFR-binding peptide
  MOD_RES (2), (2): Xaa is C or S

SEQ ID NO: 68392 - protein, 39 aa, Artificial Sequence; identical to SEQ ID NO: 9525
  GFR-binding peptide
  MOD_RES (2), (3), (36), (38): Xaa is C or S
  MOD_RES (17), (18), (19), (20), (21): Xaa is A or G
  MOD_RES (22), (23), (24), (25): Xaa is A or G or is absent

SEQ ID NO: 68393 - protein, 36 aa, Artificial Sequence; identical to SEQ ID NO: 9528
  GFR-binding peptide
  MOD_RES (3), (4), (35): Xaa is C or S

SEQ ID NO: 68394 - protein, 39 aa, Artificial Sequence; identical to SEQ ID NO: 9531
  GFR-binding peptide
  MOD_RES (4), (5), (36), (38): Xaa is C or S

SEQ ID NO: 68395 - protein, 36 aa, Artificial Sequence; identical to SEQ ID NO: 9533
  GFR-binding peptide
  MOD_RES (2), (3): Xaa is C or S
  MOD_RES (17), (18), (19), (20), (21): Xaa is A or G
  MOD_RES (22), (23), (24), (25): Xaa is A or G or is absent

SEQ ID NO: 68396 - protein, 38 aa, Artificial Sequence; identical to SEQ ID NO: 33078
  GFR-binding peptide
  MOD_RES (2), (3), (37): Xaa is C or S
  MOD_RES (17), (18), (19), (20), (21): Xaa is A or G
  MOD_RES (22), (23), (24), (25): Xaa is A or G or is absent

SEQ ID NO: 68397 - protein, 30 aa, Artificial Sequence; identical to SEQ ID NO: 9534
  GFR-binding peptide

SEQ ID NO: 68398 - protein, 39 aa, Artificial Sequence; identical to SEQ ID NO: 33089
  GFR-binding peptide
  MOD_RES (4), (5), (39): Xaa is C or S
  MOD_RES (19), (20), (21), (22), (23): Xaa is A or G
  MOD_RES (24), (25), (26), (27): Xaa is A or G or is absent

SEQ ID NO: 68399 - protein, 39 aa, Artificial Sequence
  GFR-binding peptide
  MOD_RES (5), (6), (38): Xaa is C or S
IPEPXXVPEKMNAISILYFDENKNVVLKKYRNMTVESXA

SEQ ID NO: 68400 - protein, 40 aa, Artificial Sequence
  GFR-binding peptide
  MOD_RES (6), (7): Xaa is C or S
  MOD_RES (21), (22), (23), (24), (25): Xaa is A or G
  MOD_RES (26), (27), (28), (29): Xaa is A or G or is absent
STPPTXXVPTRLSPISILYKXXXXXXXXXLKYHYDMVVES

SEQ ID NO: 68401 - protein, 40 aa, Artificial Sequence
  GFR-binding peptide
  MOD_RES (6), (7): Xaa is C or S
  MOD_RES (21), (22), (23), (24), (25): Xaa is A or G
  MOD_RES (26), (27), (28), (29): Xaa is A or G or is absent
GIPEPXXVPEKMSATSILYYXXXXXXXXXLRKHRNMTVES

SEQ ID NO: 68402 - protein, 37 aa, Artificial Sequence; identical to SEQ ID NO: 33098
  GFR-binding peptide
  MOD_RES (3), (4), (36): Xaa is C or S

SEQ ID NO: 68403 - protein, 37 aa, Artificial Sequence; identical to SEQ ID NO: 33101
  GFR-binding peptide
  MOD_RES (3), (4): Xaa is C or S
  MOD_RES (18), (19), (20), (21), (22): Xaa is A or G
  MOD_RES (23), (24), (25), (26): Xaa is A or G or is absent

SEQ ID NO: 68404 - protein, 33 aa, Artificial Sequence; identical to SEQ ID NO: 9544
  GFR-binding peptide
  MOD_RES (3), (3): Xaa is C or S

SEQ ID NO: 68405 - protein, 41 aa, Artificial Sequence; identical to SEQ ID NO: 30936
  GFR-binding peptide
  MOD_RES (6), (7), (39), (41): Xaa is C or S

SEQ ID NO: 68406 - protein, 35 aa, Artificial Sequence; identical to SEQ ID NO: 30937
  GFR-binding peptide
  MOD_RES (1), (2), (34): Xaa is C or S

SEQ ID NO: 68407 - protein, 37 aa, Artificial Sequence; identical to SEQ ID NO: 9548
  GFR-binding peptide
  MOD_RES (1), (2), (35), (37): Xaa is C or S

SEQ ID NO: 68408 - protein, 37 aa, Artificial Sequence; identical to SEQ ID NO: 30942
  GFR-binding peptide
  MOD_RES (1), (2), (34), (36): Xaa is C or S

SEQ ID NO: 68409 - protein, 36 aa, Artificial Sequence
  GFR-binding peptide
  MOD_RES (1), (2), (35): Xaa is C or S
  MOD_RES (16), (17), (18), (19), (20): Xaa is A or G
  MOD_RES (21), (22), (23), (24): Xaa is A or G or is absent
XXAPVKTSPISMLYKXXXXXXXXXLKYHYMIVEEXG

SEQ ID NO: 68410 - protein, 38 aa, Artificial Sequence
  GFR-binding peptide
  MOD_RES (5), (6), (38): Xaa is C or S
TPPTXXVPTRLSPISILYKDSANNVVLKYHYDMVVESX

SEQ ID NO: 68411 - protein, 36 aa, Artificial Sequence
  GFR-binding peptide
  MOD_RES (1), (35): Xaa is C or S
  MOD_RES (15), (16), (17), (18), (19): Xaa is A or G
  MOD_RES (20), (21), (22), (23): Xaa is A or G or is absent
XVPEKMNAISILYFXXXXXXXXXLKKYRNMTVESXA

SEQ ID NO: 68412 - protein, 36 aa, Artificial Sequence; identical to SEQ ID NO: 16846
  GFR-binding peptide
  MOD_RES (3), (4), (36): Xaa is C or S

SEQ ID NO: 68413 - protein, 34 aa, Artificial Sequence; identical to SEQ ID NO: 30948
  GFR-binding peptide
  MOD_RES (33), (33): Xaa is C or S
  MOD_RES (14), (15), (16), (17), (18): Xaa is A or G
  MOD_RES (19), (20), (21), (22): Xaa is A or G or is absent

SEQ ID NO: 68414 - protein, 33 aa, Artificial Sequence
  GFR-binding peptide
  MOD_RES (1), (32): Xaa is C or S
XVPQDLSPINILYFVGRTPKVYGKIPMVVKSXK

SEQ ID NO: 68415 - protein, 37 aa, Artificial Sequence; identical to SEQ ID NO: 9555
  GFR-binding peptide
  MOD_RES (1), (2), (37): Xaa is C or S
  MOD_RES (16), (17), (18), (19), (20): Xaa is A or G
  MOD_RES (21), (22), (23), (24): Xaa is A or G or is absent

SEQ ID NO: 68416 - protein, 35 aa, Artificial Sequence
  GFR-binding peptide
  MOD_RES (34), (34): Xaa is C or S
  MOD_RES (14), (15), (16), (17), (18): Xaa is A or G
  MOD_RES (19), (20), (21), (22): Xaa is A or G or is absent
TPTKMSATSMLYYXXXXXXXXXLRKHRGMVVDRXG

SEQ ID NO: 68417 - protein, 36 aa, Artificial Sequence
  GFR-binding peptide
  MOD_RES (3), (4), (36): Xaa is C or S
PTXXVPTRLSPISILYKDSANNVVLKYHYDMVVESX

SEQ ID NO: 68418 - protein, 41 aa, Artificial Sequence
  GFR-binding peptide
  MOD_RES (6), (7), (38), (40): Xaa is C or S
ASASPXXVPQDLSPINILYFVGRTPKVYGKIPMVVKSXKXS

SEQ ID NO: 68419 - protein, 34 aa, Artificial Sequence; identical to SEQ ID NO: 33117
  GFR-binding peptide
  MOD_RES (1), (34): Xaa is C or S
  MOD_RES (15), (16), (17), (18), (19): Xaa is A or G
  MOD_RES (20), (21), (22), (23): Xaa is A or G or is absent

SEQ ID NO: 68420 - protein, 36 aa, Artificial Sequence; identical to SEQ ID NO: 30955
  GFR-binding peptide
  MOD_RES (4), (5): Xaa is C or S

SEQ ID NO: 68421 - protein, 37 aa, Artificial Sequence; identical to SEQ ID NO: 33118
  GFR-binding peptide
  MOD_RES (4), (5), (37): Xaa is C or S

SEQ ID NO: 68422 - protein, 34 aa, Artificial Sequence
  GFR-binding peptide
  MOD_RES (3), (4): Xaa is C or S
STXXAPVKTEPISMLYLDNGRVLLKFKYEMIVEE

SEQ ID NO: 68423 - protein, 39 aa, Artificial Sequence; identical to SEQ ID NO: 33123
  GFR-binding peptide
  MOD_RES (4), (5), (39): Xaa is C or S
  MOD_RES (19), (20), (21), (22), (23): Xaa is A or G
  MOD_RES (24), (25), (26), (27): Xaa is A or G or is absent

SEQ ID NO: 68424 - protein, 43 aa, Artificial Sequence; identical to SEQ ID NO: 16861
  GFR-binding peptide
  MOD_RES (5), (6), (40), (42): Xaa is C or S
  MOD_RES (20), (21), (22), (23), (24): Xaa is A or G
  MOD_RES (25), (26), (27), (28): Xaa is A or G or is absent

SEQ ID NO: 68425 - protein, 39 aa, Artificial Sequence
  GFR-binding peptide
  MOD_RES (5), (6): Xaa is C or S
  MOD_RES (20), (21), (22), (23), (24): Xaa is A or G
  MOD_RES (25), (26), (27), (28): Xaa is A or G or is absent
IPEPXXVPEKMSPISILYKXXXXXXXXXLKYHYNMTVES

SEQ ID NO: 68426 - protein, 39 aa, Artificial Sequence
  GFR-binding peptide
  MOD_RES (2), (3), (37), (39): Xaa is C or S
  MOD_RES (17), (18), (19), (20), (21): Xaa is A or G
  MOD_RES (22), (23), (24), (25): Xaa is A or G or is absent
TXXVPTRLEPISILYLXXXXXXXXXKFKYEDMVVESXGX

SEQ ID NO: 68427 - protein, 40 aa, Artificial Sequence
  GFR-binding peptide
  MOD_RES (5), (6), (38), (40): Xaa is C or S
ASKAXXVPTKLSATSILYYDKGVVTYLRKHRGMAVSEXGX

SEQ ID NO: 68428 - protein, 38 aa, Artificial Sequence
  GFR-binding peptide
  MOD_RES (5), (6), (37): Xaa is C or S
SASPXXVSQDLSPINILYFIGKTPKIYGKIPMIVKSXK

SEQ ID NO: 68429 - protein, 37 aa, Artificial Sequence; identical to SEQ ID NO: 30960
  GFR-binding peptide
  MOD_RES (1), (35), (37): Xaa is C or S
  MOD_RES (15), (16), (17), (18), (19): Xaa is A or G
  MOD_RES (20), (21), (22), (23): Xaa is A or G or is absent

SEQ ID NO: 68430 - protein, 37 aa, Artificial Sequence; identical to SEQ ID NO: 9568
  GFR-binding peptide
  MOD_RES (2), (3), (37): Xaa is C or S
  MOD_RES (17), (18), (19), (20), (21): Xaa is A or G
  MOD_RES (22), (23), (24), (25): Xaa is A or G or is absent

SEQ ID NO: 68431 - protein, 36 aa, Artificial Sequence; identical to SEQ ID NO: 9569
  GFR-binding peptide
  MOD_RES (1), (35): Xaa is C or S
  MOD_RES (15), (16), (17), (18), (19): Xaa is A or G
  MOD_RES (20), (21), (22), (23): Xaa is A or G or is absent

SEQ ID NO: 68432 - protein, 39 aa, Artificial Sequence; identical to SEQ ID NO: 30964
  GFR-binding peptide
  MOD_RES (4), (5), (37), (39): Xaa is C or S

SEQ ID NO: 68433 - protein, 32 aa, Artificial Sequence
  GFR-binding peptide
  MOD_RES (1), (2): Xaa is C or S
XXTPTKMEPISMLYLNDKQQIIKFKYEGMVVD

SEQ ID NO: 68434 - protein, 34 aa, Artificial Sequence
  GFR-binding peptide
  MOD_RES (1), (1): Xaa is C or S
  MOD_RES (15), (16), (17), (18), (19): Xaa is A or G
  MOD_RES (20), (21), (22), (23): Xaa is A or G or is absent
XVPARLSATSILYYXXXXXXXXXLRKHRDMVVEA

SEQ ID NO: 68435 - protein, 33 aa, Artificial Sequence; identical to SEQ ID NO: 9572
  GFR-binding peptide
  MOD_RES (1), (1): Xaa is C or S
  MOD_RES (15), (16), (17), (18), (19): Xaa is A or G
  MOD_RES (20), (21), (22), (23): Xaa is A or G or is absent

SEQ ID NO: 68436 - protein, 38 aa, Artificial Sequence; identical to SEQ ID NO: 16870
  GFR-binding peptide
  MOD_RES (5), (6), (38): Xaa is C or S

SEQ ID NO: 68437 - protein, 42 aa, Artificial Sequence; identical to SEQ ID NO: 9573
  GFR-binding peptide
  MOD_RES (5), (6), (39), (41): Xaa is C or S

SEQ ID NO: 68438 - protein, 37 aa, Artificial Sequence
  GFR-binding peptide
  MOD_RES (4), (5), (37): Xaa is C or S
PPTXXVPTRLSPISILYKDSANNVVLKYHYDMVVESX

SEQ ID NO: 68439 - protein, 38 aa, Artificial Sequence; identical to SEQ ID NO: 30971
  GFR-binding peptide
  MOD_RES (3), (4), (38): Xaa is C or S
  MOD_RES (18), (19), (20), (21), (22): Xaa is A or G
  MOD_RES (23), (24), (25), (26): Xaa is A or G or is absent

SEQ ID NO: 68440 - protein, 34 aa, Artificial Sequence; identical to SEQ ID NO: 9579
  GFR-binding peptide
  MOD_RES (3), (4): Xaa is C or S

SEQ ID NO: 68441 - protein, 41 aa, Artificial Sequence; identical to SEQ ID NO: 9580
  GFR-binding peptide
  MOD_RES (6), (7), (41): Xaa is C or S
  MOD_RES (21), (22), (23), (24), (25): Xaa is A or G
  MOD_RES (26), (27), (28), (29): Xaa is A or G or is absent

SEQ ID NO: 68442 - protein, 33 aa, Artificial Sequence
  GFR-binding peptide
  MOD_RES (1), (33): Xaa is C or S
XVPTRLSATSILYYDSANNVVLRKHRDMVVESX

SEQ ID NO: 68443 - protein, 39 aa, Artificial Sequence; identical to SEQ ID NO: 30978
  GFR-binding peptide
  MOD_RES (4), (36), (38): Xaa is C or S

SEQ ID NO: 68444 - protein, 32 aa, Artificial Sequence; identical to SEQ ID NO: 9584
  GFR-binding peptide
  MOD_RES (31), (31): Xaa is C or S

SEQ ID NO: 68445 - protein, 39 aa, Artificial Sequence; identical to SEQ ID NO: 9585
  GFR-binding peptide
  MOD_RES (5), (6), (39): Xaa is C or S

SEQ ID NO: 68446 - protein, 36 aa, Artificial Sequence; identical to SEQ ID NO: 33150
  GFR-binding peptide
  MOD_RES (1), (2), (35): Xaa is C or S

SEQ ID NO: 68447 - protein, 42 aa, Artificial Sequence
  GFR-binding peptide
  MOD_RES (6), (7), (40), (42): Xaa is C or S
  MOD_RES (21), (22), (23), (24), (25): Xaa is A or G
  MOD_RES (26), (27), (28), (29): Xaa is A or G or is absent
ASASPXXVSQDLSPINILYFXXXXXXXXXYGKIPMIVKSXKX

SEQ ID NO: 68448 - protein, 34 aa, Artificial Sequence; identical to SEQ ID NO: 9587
  GFR-binding peptide
  MOD_RES (32), (34): Xaa is C or S

SEQ ID NO: 68449 - protein, 36 aa, Artificial Sequence; identical to SEQ ID NO: 9592
  GFR-binding peptide
  MOD_RES (1), (35): Xaa is C or S
  MOD_RES (15), (16), (17), (18), (19): Xaa is A or G
  MOD_RES (20), (21), (22), (23): Xaa is A or G or is absent

SEQ ID NO: 68450 - protein, 40 aa, Artificial Sequence; identical to SEQ ID NO: 9593
  GFR-binding peptide
  MOD_RES (5), (6), (40): Xaa is C or S
  MOD_RES (20), (21), (22), (23), (24): Xaa is A or G
  MOD_RES (25), (26), (27), (28): Xaa is A or G or is absent

SEQ ID NO: 68451 - protein, 32 aa, Artificial Sequence; identical to SEQ ID NO: 9595
  GFR-binding peptide
  MOD_RES (14), (15), (16), (17), (18): Xaa is A or G
  MOD_RES (19), (20), (21), (22): Xaa is A or G or is absent

SEQ ID NO: 68452 - protein, 35 aa, Artificial Sequence; identical to SEQ ID NO: 30990
  GFR-binding peptide
  MOD_RES (3), (3): Xaa is C or S
  MOD_RES (17), (18), (19), (20), (21): Xaa is A or G
  MOD_RES (22), (23), (24), (25): Xaa is A or G or is absent

SEQ ID NO: 68453 - protein, 42 aa, Artificial Sequence; identical to SEQ ID NO: 9598
  GFR-binding peptide
  MOD_RES (6), (7), (40), (42): Xaa is C or S
  MOD_RES (21), (22), (23), (24), (25): Xaa is A or G
  MOD_RES (26), (27), (28), (29): Xaa is A or G or is absent

SEQ ID NO: 68454 - protein, 37 aa, Artificial Sequence; identical to SEQ ID NO: 30992
  GFR-binding peptide
  MOD_RES (2), (3), (35), (37): Xaa is C or S

SEQ ID NO: 68455 - protein, 36 aa, Artificial Sequence
  GFR-binding peptide
  MOD_RES (34), (36): Xaa is C or S
  MOD_RES (14), (15), (16), (17), (18): Xaa is A or G
  MOD_RES (19), (20), (21), (22): Xaa is A or G or is absent
VPEKMSPISILYKXXXXXXXXXLKYHYNMTVESXAX

SEQ ID NO: 68456 - protein, 37 aa, Artificial Sequence; identical to SEQ ID NO: 33164
  GFR-binding peptide
  MOD_RES (34), (36): Xaa is C or S
  MOD_RES (14), (15), (16), (17), (18): Xaa is A or G
  MOD_RES (19), (20), (21), (22): Xaa is A or G or is absent

SEQ ID NO: 68457 - protein, 35 aa, Artificial Sequence; identical to SEQ ID NO: 9599
  GFR-binding peptide
  MOD_RES (1), (35): Xaa is C or S
  MOD_RES (15), (16), (17), (18), (19): Xaa is A or G
  MOD_RES (20), (21), (22), (23): Xaa is A or G or is absent

SEQ ID NO: 68458 - protein, 39 aa, Artificial Sequence; identical to SEQ ID NO: 33167
  GFR-binding peptide
  MOD_RES (1), (2), (36), (38): Xaa is C or S
  MOD_RES (16), (17), (18), (19), (20): Xaa is A or G
  MOD_RES (21), (22), (23), (24): Xaa is A or G or is absent

SEQ ID NO: 68459 - protein, 33 aa, Artificial Sequence; identical to SEQ ID NO: 9603
  GFR-binding peptide
  MOD_RES (1), (2): Xaa is C or S

SEQ ID NO: 68460 - protein, 39 aa, Artificial Sequence; identical to SEQ ID NO: 9604
  GFR-binding peptide
  MOD_RES (4), (5), (37), (39): Xaa is C or S

SEQ ID NO: 68461 - protein, 33 aa, Artificial Sequence; identical to SEQ ID NO: 30998
  GFR-binding peptide
  MOD_RES (32), (32): Xaa is C or S

SEQ ID NO: 68462 - protein, 35 aa, Artificial Sequence; identical to SEQ ID NO: 9606
  GFR-binding peptide
  MOD_RES (2), (3): Xaa is C or S
  MOD_RES (17), (18), (19), (20), (21): Xaa is A or G
  MOD_RES (22), (23), (24), (25): Xaa is A or G or is absent

SEQ ID NO: 68463 - protein, 33 aa, Artificial Sequence; identical to SEQ ID NO: 33174
  GFR-binding peptide
  MOD_RES (32), (32): Xaa is C or S

SEQ ID NO: 68464 - protein, 40 aa, Artificial Sequence; identical to SEQ ID NO: 33177
  GFR-binding peptide
  MOD_RES (6), (7): Xaa is C or S
  MOD_RES (21), (22), (23), (24), (25): Xaa is A or G
  MOD_RES (26), (27), (28), (29): Xaa is A or G or is absent

SEQ ID NO: 68465 - protein, 35 aa, Artificial Sequence; identical to SEQ ID NO: 33179
  GFR-binding peptide
  MOD_RES (3), (4): Xaa is C or S

SEQ ID NO: 68466 - protein, 34 aa, Artificial Sequence; identical to SEQ ID NO: 31007
  GFR-binding peptide
  MOD_RES (1), (2): Xaa is C or S
  MOD_RES (16), (17), (18), (19), (20): Xaa is A or G
  MOD_RES (21), (22), (23), (24): Xaa is A or G or is absent

SEQ ID NO: 68467 - protein, 34 aa, Artificial Sequence
  GFR-binding peptide
  MOD_RES (1), (2), (34): Xaa is C or S
XXVPTRLSATSILYYDSANNVVLRKHRDMVVESX

SEQ ID NO: 68468 - protein, 39 aa, Artificial Sequence; identical to SEQ ID NO: 9613
  GFR-binding peptide
  MOD_RES (5), (6), (39): Xaa is C or S
  MOD_RES (20), (21), (22), (23), (24): Xaa is A or G
  MOD_RES (25), (26), (27), (28): Xaa is A or G or is absent

SEQ ID NO: 68469 - protein, 30 aa, Artificial Sequence
  GFR-binding peptide
APVKTSPISMLYKDNGRVLLLKYHYMIVEE

SEQ ID NO: 68470 - protein, 40 aa, Artificial Sequence
  GFR-binding peptide
  MOD_RES (2), (3), (37), (39): Xaa is C or S
  MOD_RES (17), (18), (19), (20), (21): Xaa is A or G
  MOD_RES (22), (23), (24), (25): Xaa is A or G or is absent
AXXVPTKLSATSILYYXXXXXXXXXLRKHRGMAVSEXGXR

SEQ ID NO: 68471 - protein, 36 aa, Artificial Sequence
  GFR-binding peptide
  MOD_RES (3), (4), (36): Xaa is C or S
EPXXVPEKMEPISILYLDENKNVVKFKYENMTVESX

SEQ ID NO: 68472 - protein, 36 aa, Artificial Sequence; identical to SEQ ID NO: 9615
  GFR-binding peptide
  MOD_RES (4), (5): Xaa is C or S

SEQ ID NO: 68473 - protein, 39 aa, Artificial Sequence; identical to SEQ ID NO: 31018
  GFR-binding peptide
  MOD_RES (4), (5), (37), (39): Xaa is C or S

SEQ ID NO: 68474 - protein, 38 aa, Artificial Sequence; identical to SEQ ID NO: 31021
  GFR-binding peptide
  MOD_RES (3), (4), (36), (38): Xaa is C or S

SEQ ID NO: 68475 - protein, 36 aa, Artificial Sequence; identical to SEQ ID NO: 9618
  GFR-binding peptide
  MOD_RES (2), (3), (35): Xaa is C or S

SEQ ID NO: 68476 - protein, 37 aa, Artificial Sequence; identical to SEQ ID NO: 9620
  GFR-binding peptide
  MOD_RES (3), (4): Xaa is C or S
  MOD_RES (18), (19), (20), (21), (22): Xaa is A or G
  MOD_RES (23), (24), (25), (26): Xaa is A or G or is absent

SEQ ID NO: 68477 - protein, 35 aa, Artificial Sequence; identical to SEQ ID NO: 33200
  GFR-binding peptide
  MOD_RES (1), (33), (35): Xaa is C or S

SEQ ID NO: 68478 - protein, 35 aa, Artificial Sequence; identical to SEQ ID NO: 9621
  GFR-binding peptide
  MOD_RES (1), (2): Xaa is C or S
  MOD_RES (16), (17), (18), (19), (20): Xaa is A or G
  MOD_RES (21), (22), (23), (24): Xaa is A or G or is absent

SEQ ID NO: 68479 - protein, 37 aa, Artificial Sequence
  GFR-binding peptide
  MOD_RES (3), (4), (35), (37): Xaa is C or S
STXXAPVKTSPISMLYKDNGRVLLLKYHYMIVEEXGX

SEQ ID NO: 68480 - protein, 40 aa, Artificial Sequence; identical to SEQ ID NO: 9622
  GFR-binding peptide
  MOD_RES (4), (5), (38), (40): Xaa is C or S
  MOD_RES (19), (20), (21), (22), (23): Xaa is A or G
  MOD_RES (24), (25), (26), (27): Xaa is A or G or is absent

SEQ ID NO: 68481 - protein, 40 aa, Artificial Sequence; identical to SEQ ID NO: 31024
  GFR-binding peptide
  MOD_RES (6), (7), (39): Xaa is C or S

SEQ ID NO: 68482 - protein, 34 aa, Artificial Sequence; identical to SEQ ID NO: 31027
  GFR-binding peptide
  MOD_RES (1), (1): Xaa is C or S
  MOD_RES (15), (16), (17), (18), (19): Xaa is A or G
  MOD_RES (20), (21), (22), (23): Xaa is A or G or is absent

SEQ ID NO: 68483 - protein, 36 aa, Artificial Sequence; identical to SEQ ID NO: 31028
  GFR-binding peptide
  MOD_RES (2), (3), (35): Xaa is C or S

SEQ ID NO: 68484 - protein, 39 aa, Artificial Sequence; identical to SEQ ID NO: 16910
  GFR-binding peptide
  MOD_RES (4), (5), (39): Xaa is C or S
  MOD_RES (19), (20), (21), (22), (23): Xaa is A or G
  MOD_RES (24), (25), (26), (27): Xaa is A or G or is absent

SEQ ID NO: 68485 - protein, 40 aa, Artificial Sequence
  GFR-binding peptide
  MOD_RES (4), (5), (38), (40): Xaa is C or S
  MOD_RES (19), (20), (21), (22), (23): Xaa is A or G
  MOD_RES (24), (25), (26), (27): Xaa is A or G or is absent
ASPXXVSQDLSPINILYFXXXXXXXXXYGKIPMIVKSXKX

SEQ ID NO: 68486 - protein, 39 aa, Artificial Sequence; identical to SEQ ID NO: 9626
  GFR-binding peptide
  MOD_RES (4), (5), (39): Xaa is C or S
  MOD_RES (19), (20), (21), (22), (23): Xaa is A or G
  MOD_RES (24), (25), (26), (27): Xaa is A or G or is absent

SEQ ID NO: 68487 - protein, 33 aa, Artificial Sequence; identical to SEQ ID NO: 9627
  GFR-binding peptide
  MOD_RES (2), (3): Xaa is C or S

SEQ ID NO: 68488 - protein, 36 aa, Artificial Sequence; identical to SEQ ID NO: 33208
  GFR-binding peptide
  MOD_RES (3), (4), (36): Xaa is C or S

SEQ ID NO: 68489 - protein, 40 aa, Artificial Sequence
  GFR-binding peptide
  MOD_RES (5), (6), (38), (40): Xaa is C or S
IPEPXXVPEKMSATSILYYDENKNVVLRKHRNMTVESXAX

SEQ ID NO: 68490 - protein, 38 aa, Artificial Sequence
  GFR-binding peptide
  MOD_RES (4), (5): Xaa is C or S
  MOD_RES (19), (20), (21), (22), (23): Xaa is A or G
  MOD_RES (24), (25), (26), (27): Xaa is A or G or is absent
AGPXXTPTKMSATSMLYYXXXXXXXXXLRKHRGMVVDR

SEQ ID NO: 68491 - protein, 37 aa, Artificial Sequence; identical to SEQ ID NO: 31034
  GFR-binding peptide
  MOD_RES (1), (2), (36): Xaa is C or S
  MOD_RES (16), (17), (18), (19), (20): Xaa is A or G
  MOD_RES (21), (22), (23), (24): Xaa is A or G or is absent

SEQ ID NO: 68492 - protein, 35 aa, Artificial Sequence; identical to SEQ ID NO: 31035
  GFR-binding peptide
  MOD_RES (1), (34): Xaa is C or S

SEQ ID NO: 68493 - protein, 33 aa, Artificial Sequence
  GFR-binding peptide
  MOD_RES (1), (33): Xaa is C or S
XVPTRLEPISILYLDSANNVVKFKYEDMVVESX

SEQ ID NO: 68494 - protein, 36 aa, Artificial Sequence; identical to SEQ ID NO: 9632
  GFR-binding peptide
  MOD_RES (4), (5): Xaa is C or S

SEQ ID NO: 68495 - protein, 39 aa, Artificial Sequence; identical to SEQ ID NO: 9633
  GFR-binding peptide
  MOD_RES (3), (37), (39): Xaa is C or S
  MOD_RES (17), (18), (19), (20), (21): Xaa is A or G
  MOD_RES (22), (23), (24), (25): Xaa is A or G or is absent

SEQ ID NO: 68496 - protein, 37 aa, Artificial Sequence; identical to SEQ ID NO: 33215
  GFR-binding peptide
  MOD_RES (7), (7): Xaa is C or S

SEQ ID NO: 68497 - protein, 33 aa, Artificial Sequence; identical to SEQ ID NO: 9634
  GFR-binding peptide
  MOD_RES (32), (32): Xaa is C or S

SEQ ID NO: 68498 - protein, 42 aa, Artificial Sequence
  GFR-binding peptide
  MOD_RES (5), (6), (39), (41): Xaa is C or S
  MOD_RES (20), (21), (22), (23), (24): Xaa is A or G
  MOD_RES (25), (26), (27), (28): Xaa is A or G or is absent
VPSTXXAPVKTSATSMLYYXXXXXXXXXLRKHRMIVEEXGXL

SEQ ID NO: 68499 - protein, 40 aa, Artificial Sequence; identical to SEQ ID NO: 9636
  GFR-binding peptide
  MOD_RES (6), (7), (39): Xaa is C or S

SEQ ID NO: 68500 - protein, 40 aa, Artificial Sequence; identical to SEQ ID NO: 9637
  GFR-binding peptide
  MOD_RES (7), (39): Xaa is C or S

SEQ ID NO: 68501 - protein, 36 aa, Artificial Sequence; identical to SEQ ID NO: 31044
  GFR-binding peptide
  MOD_RES (3), (4): Xaa is C or S
  MOD_RES (18), (19), (20), (21), (22): Xaa is A or G
  MOD_RES (23), (24), (25), (26): Xaa is A or G or is absent

SEQ ID NO: 68502 - protein, 36 aa, Artificial Sequence; identical to SEQ ID NO: 31045
  GFR-binding peptide
  MOD_RES (2), (3), (35): Xaa is C or S

SEQ ID NO: 68503 - protein, 42 aa, Artificial Sequence; identical to SEQ ID NO: 9642
  GFR-binding peptide
  MOD_RES (4), (5), (40), (42): Xaa is C or S
  MOD_RES (19), (20), (21), (22), (23): Xaa is A or G
  MOD_RES (24), (25), (26), (27): Xaa is A or G or is absent

SEQ ID NO: 68504 - protein, 34 aa, Artificial Sequence; identical to SEQ ID NO: 9643
  GFR-binding peptide
  MOD_RES (1), (1): Xaa is C or S
  MOD_RES (15), (16), (17), (18), (19): Xaa is A or G
  MOD_RES (20), (21), (22), (23): Xaa is A or G or is absent

SEQ ID NO: 68505 - protein, 37 aa, Artificial Sequence; identical to SEQ ID NO: 9645
  GFR-binding peptide
  MOD_RES (34), (36): Xaa is C or S
  MOD_RES (14), (15), (16), (17), (18): Xaa is A or G
  MOD_RES (19), (20), (21), (22): Xaa is A or G or is absent

SEQ ID NO: 68506 - protein, 35 aa, Artificial Sequence; identical to SEQ ID NO: 33226
  GFR-binding peptide
  MOD_RES (1), (2), (34): Xaa is C or S

SEQ ID NO: 68507 - protein, 39 aa, Artificial Sequence; identical to SEQ ID NO: 9646
  GFR-binding peptide
  MOD_RES (2), (3), (37), (39): Xaa is C or S
  MOD_RES (17), (18), (19), (20), (21): Xaa is A or G
  MOD_RES (22), (23), (24), (25): Xaa is A or G or is absent

SEQ ID NO: 68508 - protein, 39 aa, Artificial Sequence
  GFR-binding peptide
  MOD_RES (3), (4), (38): Xaa is C or S
  MOD_RES (18), (19), (20), (21), (22): Xaa is A or G
  MOD_RES (23), (24), (25), (26): Xaa is A or G or is absent
GPXXTPTKMSATSMLYYXXXXXXXXXLRKHRGMVVDRXG

SEQ ID NO: 68509 - protein, 35 aa, Artificial Sequence
  GFR-binding peptide
  MOD_RES (1), (2): Xaa is C or S
  MOD_RES (16), (17), (18), (19), (20): Xaa is A or G
  MOD_RES (21), (22), (23), (24): Xaa is A or G or is absent
XXVPARLSATSILYYXXXXXXXXXLRKHRDMVVEA

SEQ ID NO: 68510 - protein, 32 aa, Artificial Sequence; identical to SEQ ID NO: 9650
  GFR-binding peptide
  MOD_RES (31), (31): Xaa is C or S

SEQ ID NO: 68511 - protein, 39 aa, Artificial Sequence
  GFR-binding peptide
  MOD_RES (5), (6), (38): Xaa is C or S
IPEPXXVPEKMSPINILYFDENKNVVYGKIPNMTVESXA

SEQ ID NO: 68512 - protein, 37 aa, Artificial Sequence; identical to SEQ ID NO: 16930
  GFR-binding peptide
  MOD_RES (4), (5), (37): Xaa is C or S

SEQ ID NO: 68513 - protein, 33 aa, Artificial Sequence
  GFR-binding peptide
  MOD_RES (31), (33): Xaa is C or S
APVKTEPISMLYLDNGRVLLKFKYEMIVEEXGX

SEQ ID NO: 68514 - protein, 33 aa, Artificial Sequence; identical to SEQ ID NO: 31061
  GFR-binding peptide
  MOD_RES (1), (2): Xaa is C or S

SEQ ID NO: 68515 - protein, 35 aa, Artificial Sequence; identical to SEQ ID NO: 31062
  GFR-binding peptide
  MOD_RES (1), (2): Xaa is C or S
  MOD_RES (16), (17), (18), (19), (20): Xaa is A or G
  MOD_RES (21), (22), (23), (24): Xaa is A or G or is absent

SEQ ID NO: 68516 - protein, 33 aa, Artificial Sequence
  GFR-binding peptide
  MOD_RES (31), (33): Xaa is C or S
VPQALSPINILYFVGRKPKVYGKIPMIVRSXKX

SEQ ID NO: 68517 - protein, 37 aa, Artificial Sequence
  GFR-binding peptide
  MOD_RES (2), (3), (35), (37): Xaa is C or S
PXXVPEKMNAISILYFDENKNVVLKKYRNMTVESXAX

SEQ ID NO: 68518 - protein, 34 aa, Artificial Sequence
  GFR-binding peptide
  MOD_RES (1), (2), (33): Xaa is C or S
XXVPQDLSPINILYFVGRTPKVYGKIPMVVKSXK

SEQ ID NO: 68519 - protein, 36 aa, Artificial Sequence
  GFR-binding peptide
  MOD_RES (1), (2), (35): Xaa is C or S
  MOD_RES (16), (17), (18), (19), (20): Xaa is A or G
  MOD_RES (21), (22), (23), (24): Xaa is A or G or is absent
XXVPQALSPINILYFXXXXXXXXXYGKIPMIVRSXK

SEQ ID NO: 68520 - protein, 42 aa, Artificial Sequence
  GFR-binding peptide
  MOD_RES (6), (7), (40), (42): Xaa is C or S
  MOD_RES (21), (22), (23), (24), (25): Xaa is A or G
  MOD_RES (26), (27), (28), (29): Xaa is A or G or is absent
RVPSTXXAPVKTSATSMLYYXXXXXXXXXLRKHRMIVEEXGX

SEQ ID NO: 68521 - protein, 40 aa, Artificial Sequence; identical to SEQ ID NO: 31071
  GFR-binding peptide
  MOD_RES (7), (39): Xaa is C or S

SEQ ID NO: 68522 - protein, 38 aa, Artificial Sequence; identical to SEQ ID NO: 9671
  GFR-binding peptide
  MOD_RES (3), (4), (36), (38): Xaa is C or S

SEQ ID NO: 68523 - protein, 37 aa, Artificial Sequence; identical to SEQ ID NO: 9673
  GFR-binding peptide
  MOD_RES (34), (36): Xaa is C or S
  MOD_RES (14), (15), (16), (17), (18): Xaa is A or G
  MOD_RES (19), (20), (21), (22): Xaa is A or G or is absent

SEQ ID NO: 68524 - protein, 36 aa, Artificial Sequence; identical to SEQ ID NO: 31082
  GFR-binding peptide
  MOD_RES (2), (3): Xaa is C or S
  MOD_RES (17), (18), (19), (20), (21): Xaa is A or G
  MOD_RES (22), (23), (24), (25): Xaa is A or G or is absent

SEQ ID NO: 68525 - protein, 30 aa, Artificial Sequence
  GFR-binding peptide
VPARLSATSILYYDAANNVVLRKHRDMVVE

SEQ ID NO: 68526 - protein, 38 aa, Artificial Sequence
  GFR-binding peptide
  MOD_RES (6), (7): Xaa is C or S
KASKAXXVPTKLSATSILYYDKGVVTYLRKHRGMAVSE

SEQ ID NO: 68527 - protein, 36 aa, Artificial Sequence; identical to SEQ ID NO: 9678
  GFR-binding peptide
  MOD_RES (1), (35): Xaa is C or S
  MOD_RES (15), (16), (17), (18), (19): Xaa is A or G
  MOD_RES (20), (21), (22), (23): Xaa is A or G or is absent

SEQ ID NO: 68528 - protein, 39 aa, Artificial Sequence; identical to SEQ ID NO: 9681
  GFR-binding peptide
  MOD_RES (6), (7): Xaa is C or S
  MOD_RES (21), (22), (23), (24), (25): Xaa is A or G
  MOD_RES (26), (27), (28), (29): Xaa is A or G or is absent

SEQ ID NO: 68529 - protein, 39 aa, Artificial Sequence
  GFR-binding peptide
  MOD_RES (6), (7), (38): Xaa is C or S
RVPSTXXAPVKTSPISMLYKDNGRVLLLKYHYMIVEEXG

SEQ ID NO: 68530 - protein, 41 aa, Artificial Sequence; identical to SEQ ID NO: 31088
  GFR-binding peptide
  MOD_RES (6), (7), (41): Xaa is C or S
  MOD_RES (21), (22), (23), (24), (25): Xaa is A or G
  MOD_RES (26), (27), (28), (29): Xaa is A or G or is absent

SEQ ID NO: 68531 - protein, 36 aa, Artificial Sequence; identical to SEQ ID NO: 9683
  GFR-binding peptide
  MOD_RES (5), (6): Xaa is C or S

SEQ ID NO: 68532 - protein, 37 aa, Artificial Sequence
  GFR-binding peptide
  MOD_RES (1), (2), (35), (37): Xaa is C or S
  MOD_RES (16), (17), (18), (19), (20): Xaa is A or G
  MOD_RES (21), (22), (23), (24): Xaa is A or G or is absent
XXAPVKTSATSMLYYXXXXXXXXXLRKHRMIVEEXGX

SEQ ID NO: 68533 - protein, 41 aa, Artificial Sequence
  GFR-binding peptide
  MOD_RES (5), (6), (40): Xaa is C or S
  MOD_RES (20), (21), (22), (23), (24): Xaa is A or G
  MOD_RES (25), (26), (27), (28): Xaa is A or G or is absent
SAGPXXTPTKMEPISMLYLXXXXXXXXXKFKYEGMVVDRXG

SEQ ID NO: 68534 - protein, 39 aa, Artificial Sequence
  GFR-binding peptide
  MOD_RES (4), (5), (37), (39): Xaa is C or S
SKAXXVPTKLSATSILYYDKGVVTYLRKHRGMAVSEXGX

SEQ ID NO: 68535 - protein, 30 aa, Artificial Sequence; identical to SEQ ID NO: 33257
  GFR-binding peptide

SEQ ID NO: 68536 - protein, 42 aa, Artificial Sequence; identical to SEQ ID NO: 33260
  GFR-binding peptide
  MOD_RES (6), (7), (41): Xaa is C or S
  MOD_RES (21), (22), (23), (24), (25): Xaa is A or G
  MOD_RES (26), (27), (28), (29): Xaa is A or G or is absent

SEQ ID NO: 68537 - protein, 39 aa, Artificial Sequence
  GFR-binding peptide
  MOD_RES (2), (3), (37), (39): Xaa is C or S
  MOD_RES (17), (18), (19), (20), (21): Xaa is A or G
  MOD_RES (22), (23), (24), (25): Xaa is A or G or is absent
PXXVPEKMSPISILYKXXXXXXXXXLKYHYNMTVESXAX

SEQ ID NO: 68538 - protein, 34 aa, Artificial Sequence; identical to SEQ ID NO: 31095
  GFR-binding peptide
  MOD_RES (1), (1): Xaa is C or S
  MOD_RES (15), (16), (17), (18), (19): Xaa is A or G
  MOD_RES (20), (21), (22), (23): Xaa is A or G or is absent

SEQ ID NO: 68539 - protein, 44 aa, Artificial Sequence
  GFR-binding peptide
  MOD_RES (6), (7), (41), (43): Xaa is C or S
  MOD_RES (21), (22), (23), (24), (25): Xaa is A or G
  MOD_RES (26), (27), (28), (29): Xaa is A or G or is absent
GIPEPXXVPEKMSPINILYFXXXXXXXXXYGKIPNMTVESXAXR

SEQ ID NO: 68540 - protein, 37 aa, Artificial Sequence; identical to SEQ ID NO: 9690
  GFR-binding peptide
  MOD_RES (4), (5): Xaa is C or S
  MOD_RES (19), (20), (21), (22), (23): Xaa is A or G
  MOD_RES (24), (25), (26), (27): Xaa is A or G or is absent

SEQ ID NO: 68541 - protein, 40 aa, Artificial Sequence; identical to SEQ ID NO: 31097
  GFR-binding peptide
  MOD_RES (2), (3), (37), (39): Xaa is C or S
  MOD_RES (17), (18), (19), (20), (21): Xaa is A or G
  MOD_RES (22), (23), (24), (25): Xaa is A or G or is absent

SEQ ID NO: 68542 - protein, 40 aa, Artificial Sequence; identical to SEQ ID NO: 33271
  GFR-binding peptide
  MOD_RES (2), (3), (37), (39): Xaa is C or S
  MOD_RES (17), (18), (19), (20), (21): Xaa is A or G
  MOD_RES (22), (23), (24), (25): Xaa is A or G or is absent

SEQ ID NO: 68543 - protein, 36 aa, Artificial Sequence
  GFR-binding peptide
  MOD_RES (4), (5): Xaa is C or S
PPTXXVPTRLSPISILYKDSANNVVLKYHYDMVVES

SEQ ID NO: 68544 - protein, 40 aa, Artificial Sequence; identical to SEQ ID NO: 9696
  GFR-binding peptide
  MOD_RES (6), (7): Xaa is C or S
  MOD_RES (21), (22), (23), (24), (25): Xaa is A or G
  MOD_RES (26), (27), (28), (29): Xaa is A or G or is absent

SEQ ID NO: 68545 - protein, 36 aa, Artificial Sequence; identical to SEQ ID NO: 33276
  GFR-binding peptide
  MOD_RES (3), (4), (36): Xaa is C or S

SEQ ID NO: 68546 - protein, 44 aa, Artificial Sequence; identical to SEQ ID NO: 9699
  GFR-binding peptide
  MOD_RES (6), (7), (41), (43): Xaa is C or S
  MOD_RES (21), (22), (23), (24), (25): Xaa is A or G
  MOD_RES (26), (27), (28), (29): Xaa is A or G or is absent

SEQ ID NO: 68547 - protein, 35 aa, Artificial Sequence; identical to SEQ ID NO: 9700
  GFR-binding peptide
  MOD_RES (2), (3): Xaa is C or S
  MOD_RES (17), (18), (19), (20), (21): Xaa is A or G
  MOD_RES (22), (23), (24), (25): Xaa is A or G or is absent

SEQ ID NO: 68548 - protein, 39 aa, Artificial Sequence; identical to SEQ ID NO: 9701
  GFR-binding peptide
  MOD_RES (5), (6): Xaa is C or S
  MOD_RES (20), (21), (22), (23), (24): Xaa is A or G
  MOD_RES (25), (26), (27), (28): Xaa is A or G or is absent

SEQ ID NO: 68549 - protein, 39 aa, Artificial Sequence; identical to SEQ ID NO: 31109
  GFR-binding peptide
  MOD_RES (2), (3), (37), (39): Xaa is C or S
  MOD_RES (17), (18), (19), (20), (21): Xaa is A or G
  MOD_RES (22), (23), (24), (25): Xaa is A or G or is absent

SEQ ID NO: 68550 - protein, 37 aa, Artificial Sequence; identical to SEQ ID NO: 9702
  GFR-binding peptide
  MOD_RES (4), (5): Xaa is C or S
  MOD_RES (19), (20), (21), (22), (23): Xaa is A or G
  MOD_RES (24), (25), (26), (27): Xaa is A or G or is absent

SEQ ID NO: 68551 - protein, 38 aa, Artificial Sequence; identical to SEQ ID NO: 31114
  GFR-binding peptide
  MOD_RES (2), (3), (35), (37): Xaa is C or S

SEQ ID NO: 68552 - protein, 34 aa, Artificial Sequence
  GFR-binding peptide
  MOD_RES (1), (32), (34): Xaa is C or S
XAPVKTEPISMLYLDNGRVLLKFKYEMIVEEXGX

SEQ ID NO: 68553 - protein, 37 aa, Artificial Sequence; identical to SEQ ID NO: 31115
  GFR-binding peptide
  MOD_RES (2), (3), (34), (36): Xaa is C or S

SEQ ID NO: 68554 - protein, 38 aa, Artificial Sequence; identical to SEQ ID NO: 33281
  GFR-binding peptide
  MOD_RES (2), (3), (35), (37): Xaa is C or S

SEQ ID NO: 68555 - protein, 37 aa, Artificial Sequence; identical to SEQ ID NO: 9703
  GFR-binding peptide
  MOD_RES (2), (3): Xaa is C or S
  MOD_RES (17), (18), (19), (20), (21): Xaa is A or G
  MOD_RES (22), (23), (24), (25): Xaa is A or G or is absent

SEQ ID NO: 68556 - protein, 34 aa, Artificial Sequence; identical to SEQ ID NO: 31118
  GFR-binding peptide
  MOD_RES (1), (2): Xaa is C or S
  MOD_RES (16), (17), (18), (19), (20): Xaa is A or G
  MOD_RES (21), (22), (23), (24): Xaa is A or G or is absent

SEQ ID NO: 68557 - protein, 37 aa, Artificial Sequence; identical to SEQ ID NO: 9705
  GFR-binding peptide
  MOD_RES (4), (36): Xaa is C or S

SEQ ID NO: 68558 - protein, 39 aa, Artificial Sequence; identical to SEQ ID NO: 9707
  GFR-binding peptide
  MOD_RES (5), (6): Xaa is C or S
  MOD_RES (20), (21), (22), (23), (24): Xaa is A or G
  MOD_RES (25), (26), (27), (28): Xaa is A or G or is absent

SEQ ID NO: 68559 - protein, 39 aa, Artificial Sequence
  GFR-binding peptide
  MOD_RES (1), (2), (36), (38): Xaa is C or S
  MOD_RES (16), (17), (18), (19), (20): Xaa is A or G
  MOD_RES (21), (22), (23), (24): Xaa is A or G or is absent
XXVPTKLSATSILYYXXXXXXXXXLRKHRGMAVSEXGXR

SEQ ID NO: 68560 - protein, 39 aa, Artificial Sequence; identical to SEQ ID NO: 9708
  GFR-binding peptide
  MOD_RES (6), (7): Xaa is C or S
  MOD_RES (21), (22), (23), (24), (25): Xaa is A or G
  MOD_RES (26), (27), (28), (29): Xaa is A or G or is absent

SEQ ID NO: 68561 - protein, 40 aa, Artificial Sequence; identical to SEQ ID NO: 9709
  GFR-binding peptide
  MOD_RES (5), (6), (39): Xaa is C or S
  MOD_RES (20), (21), (22), (23), (24): Xaa is A or G
  MOD_RES (25), (26), (27), (28): Xaa is A or G or is absent

SEQ ID NO: 68562 - protein, 37 aa, Artificial Sequence; identical to SEQ ID NO: 9710
  GFR-binding peptide
  MOD_RES (2), (3), (36): Xaa is C or S

SEQ ID NO: 68563 - protein, 42 aa, Artificial Sequence
  GFR-binding peptide
  MOD_RES (6), (7), (39), (41): Xaa is C or S
STPPTXXVPTRLSPISILYKDSANNVVLKYHYDMVVESXGXR

SEQ ID NO: 68564 - protein, 36 aa, Artificial Sequence
  GFR-binding peptide
  MOD_RES (1), (33), (35): Xaa is C or S
XVPEKMSATSILYYDENKNVVLRKHRNMTVESXAXR

SEQ ID NO: 68565 - protein, 42 aa, Artificial Sequence; identical to SEQ ID NO: 9715
  GFR-binding peptide
  MOD_RES (6), (7), (41): Xaa is C or S
  MOD_RES (21), (22), (23), (24), (25): Xaa is A or G
  MOD_RES (26), (27), (28), (29): Xaa is A or G or is absent

SEQ ID NO: 68566 - protein, 35 aa, Artificial Sequence
  GFR-binding peptide
  MOD_RES (34), (34): Xaa is C or S
  MOD_RES (14), (15), (16), (17), (18): Xaa is A or G
  MOD_RES (19), (20), (21), (22): Xaa is A or G or is absent
VPTRLSATSILYYXXXXXXXXXLRKHRDMVVESXG

SEQ ID NO: 68567 - protein, 35 aa, Artificial Sequence
  GFR-binding peptide
  MOD_RES (1), (33), (35): Xaa is C or S
XVPTRLSATSILYYDSANNVVLRKHRDMVVESXGX

SEQ ID NO: 68568 - protein, 33 aa, Artificial Sequence; identical to SEQ ID NO: 31134
  GFR-binding peptide
  MOD_RES (2), (3): Xaa is C or S

SEQ ID NO: 68569 - protein, 39 aa, Artificial Sequence
  GFR-binding peptide
  MOD_RES (5), (6), (38): Xaa is C or S
SAGPXXTPTKMSPISMLYKNDKQQIILKYHYGMVVDRXG

SEQ ID NO: 68570 - protein, 40 aa, Artificial Sequence; identical to SEQ ID NO: 33300
  GFR-binding peptide
  MOD_RES (5), (6), (39): Xaa is C or S
  MOD_RES (20), (21), (22), (23), (24): Xaa is A or G
  MOD_RES (25), (26), (27), (28): Xaa is A or G or is absent

SEQ ID NO: 68571 - protein, 38 aa, Artificial Sequence; identical to SEQ ID NO: 9723
  GFR-binding peptide
  MOD_RES (3), (4), (36), (38): Xaa is C or S

SEQ ID NO: 68572 - protein, 34 aa, Artificial Sequence; identical to SEQ ID NO: 9724
  GFR-binding peptide
  MOD_RES (1), (2): Xaa is C or S
  MOD_RES (16), (17), (18), (19), (20): Xaa is A or G
  MOD_RES (21), (22), (23), (24): Xaa is A or G or is absent

SEQ ID NO: 68573 - protein, 39 aa, Artificial Sequence; identical to SEQ ID NO: 31142
  GFR-binding peptide
  MOD_RES (6), (6): Xaa is C or S
  MOD_RES (20), (21), (22), (23), (24): Xaa is A or G
  MOD_RES (25), (26), (27), (28): Xaa is A or G or is absent

SEQ ID NO: 68574 - protein, 40 aa, Artificial Sequence
  GFR-binding peptide
  MOD_RES (5), (6), (38), (40): Xaa is C or S
IPEPXXVPEKMSPINILYFDENKNVVYGKIPNMTVESXAX

SEQ ID NO: 68575 - protein, 36 aa, Artificial Sequence; identical to SEQ ID NO: 33304
  GFR-binding peptide
  MOD_RES (2), (3): Xaa is C or S
  MOD_RES (17), (18), (19), (20), (21): Xaa is A or G
  MOD_RES (22), (23), (24), (25): Xaa is A or G or is absent

SEQ ID NO: 68576 - protein, 39 aa, Artificial Sequence; identical to SEQ ID NO: 9730
  GFR-binding peptide
  MOD_RES (6), (7): Xaa is C or S
  MOD_RES (21), (22), (23), (24), (25): Xaa is A or G
  MOD_RES (26), (27), (28), (29): Xaa is A or G or is absent

SEQ ID NO: 68577 - protein, 41 aa, Artificial Sequence
  GFR-binding peptide
  MOD_RES (4), (5), (39), (41): Xaa is C or S
  MOD_RES (19), (20), (21), (22), (23): Xaa is A or G
  MOD_RES (24), (25), (26), (27): Xaa is A or G or is absent
PEPXXVPEKMEPISILYLXXXXXXXXXKFKYENMTVESXAX

SEQ ID NO: 68578 - protein, 40 aa, Artificial Sequence; identical to SEQ ID NO: 9731
  GFR-binding peptide
  MOD_RES (6), (7), (39): Xaa is C or S

SEQ ID NO: 68579 - protein, 36 aa, Artificial Sequence; identical to SEQ ID NO: 31147
  GFR-binding peptide
  MOD_RES (2), (3): Xaa is C or S
  MOD_RES (17), (18), (19), (20), (21): Xaa is A or G
  MOD_RES (22), (23), (24), (25): Xaa is A or G or is absent

SEQ ID NO: 68580 - protein, 41 aa, Artificial Sequence; identical to SEQ ID NO: 31149
  GFR-binding peptide
  MOD_RES (6), (7), (40): Xaa is C or S

SEQ ID NO: 68581 - protein, 35 aa, Artificial Sequence
  GFR-binding peptide
  MOD_RES (3), (4): Xaa is C or S
GPXXTPTKMSPISMLYKNDKQQIILKYHYGMVVDR

SEQ ID NO: 68582 - protein, 40 aa, Artificial Sequence; identical to SEQ ID NO: 31151
  GFR-binding peptide
  MOD_RES (3), (4), (37), (39): Xaa is C or S

SEQ ID NO: 68583 - protein, 38 aa, Artificial Sequence; identical to SEQ ID NO: 33313
  GFR-binding peptide
  MOD_RES (2), (3), (37): Xaa is C or S
  MOD_RES (17), (18), (19), (20), (21): Xaa is A or G
  MOD_RES (22), (23), (24), (25): Xaa is A or G or is absent

SEQ ID NO: 68584 - protein, 41 aa, Artificial Sequence
  GFR-binding peptide
  MOD_RES (6), (7), (41): Xaa is C or S
  MOD_RES (21), (22), (23), (24), (25): Xaa is A or G
  MOD_RES (26), (27), (28), (29): Xaa is A or G or is absent
GSAGPXXTPTKMSATSMLYYXXXXXXXXXLRKHRGMVVDRX

SEQ ID NO: 68585 - protein, 35 aa, Artificial Sequence; identical to SEQ ID NO: 31153
  GFR-binding peptide
  MOD_RES (1), (34): Xaa is C or S
  MOD_RES (15), (16), (17), (18), (19): Xaa is A or G
  MOD_RES (20), (21), (22), (23): Xaa is A or G or is absent

SEQ ID NO: 68586 - protein, 34 aa, Artificial Sequence
  GFR-binding peptide
  MOD_RES (34), (34): Xaa is C or S
  MOD_RES (14), (15), (16), (17), (18): Xaa is A or G
  MOD_RES (19), (20), (21), (22): Xaa is A or G or is absent
VPEKMNAISILYFXXXXXXXXXLKKYRNMTVESX

SEQ ID NO: 68587 - protein, 42 aa, Artificial Sequence; identical to SEQ ID NO: 33318
  GFR-binding peptide
  MOD_RES (6), (7), (41): Xaa is C or S
  MOD_RES (21), (22), (23), (24), (25): Xaa is A or G
  MOD_RES (26), (27), (28), (29): Xaa is A or G or is absent

SEQ ID NO: 68588 - protein, 37 aa, Artificial Sequence; identical to SEQ ID NO: 31156
  GFR-binding peptide
  MOD_RES (6), (7): Xaa is C or S

SEQ ID NO: 68589 - protein, 37 aa, Artificial Sequence; identical to SEQ ID NO: 9743
  GFR-binding peptide
  MOD_RES (4), (5), (36): Xaa is C or S

SEQ ID NO: 68590 - protein, 34 aa, Artificial Sequence; identical to SEQ ID NO: 9746
  GFR-binding peptide
  MOD_RES (1), (1): Xaa is C or S
  MOD_RES (15), (16), (17), (18), (19): Xaa is A or G
  MOD_RES (20), (21), (22), (23): Xaa is A or G or is absent

SEQ ID NO: 68591 - protein, 41 aa, Artificial Sequence; identical to SEQ ID NO: 31160
  GFR-binding peptide
  MOD_RES (6), (7), (39), (41): Xaa is C or S

SEQ ID NO: 68592 - protein, 36 aa, Artificial Sequence; identical to SEQ ID NO: 31161
  GFR-binding peptide
  MOD_RES (34), (36): Xaa is C or S
  MOD_RES (14), (15), (16), (17), (18): Xaa is A or G
  MOD_RES (19), (20), (21), (22): Xaa is A or G or is absent

SEQ ID NO: 68593 - protein, 37 aa, Artificial Sequence; identical to SEQ ID NO: 9749
  GFR-binding peptide
  MOD_RES (3), (4), (37): Xaa is C or S
  MOD_RES (18), (19), (20), (21), (22): Xaa is A or G
  MOD_RES (23), (24), (25), (26): Xaa is A or G or is absent

SEQ ID NO: 68594 - protein, 38 aa, Artificial Sequence; identical to SEQ ID NO: 9750
  GFR-binding peptide
  MOD_RES (6), (38): Xaa is C or S

SEQ ID NO: 68595 - protein, 36 aa, Artificial Sequence; identical to SEQ ID NO: 9751
  GFR-binding peptide
  MOD_RES (34), (36): Xaa is C or S
  MOD_RES (14), (15), (16), (17), (18): Xaa is A or G
  MOD_RES (19), (20), (21), (22): Xaa is A or G or is absent

SEQ ID NO: 68596 - protein, 40 aa, Artificial Sequence; identical to SEQ ID NO: 31170
  GFR-binding peptide
  MOD_RES (4), (5), (37), (39): Xaa is C or S

SEQ ID NO: 68597 - protein, 37 aa, Artificial Sequence
  GFR-binding peptide
  MOD_RES (2), (3), (36): Xaa is C or S
  MOD_RES (17), (18), (19), (20), (21): Xaa is A or G
  MOD_RES (22), (23), (24), (25): Xaa is A or G or is absent
PXXVPQALSPINILYFXXXXXXXXXYGKIPMIVRSXK

SEQ ID NO: 68598 - protein, 38 aa, Artificial Sequence; identical to SEQ ID NO: 9756
  GFR-binding peptide
  MOD_RES (1), (35), (37): Xaa is C or S
  MOD_RES (15), (16), (17), (18), (19): Xaa is A or G
  MOD_RES (20), (21), (22), (23): Xaa is A or G or is absent

SEQ ID NO: 68599 - protein, 39 aa, Artificial Sequence
  GFR-binding peptide
  MOD_RES (3), (4), (38): Xaa is C or S
  MOD_RES (18), (19), (20), (21), (22): Xaa is A or G
  MOD_RES (23), (24), (25), (26): Xaa is A or G or is absent
PTXXVPTRLSATSILYYXXXXXXXXXLRKHRDMVVESXG

SEQ ID NO: 68600 - protein, 34 aa, Artificial Sequence
  GFR-binding peptide
  MOD_RES (1), (34): Xaa is C or S
  MOD_RES (15), (16), (17), (18), (19): Xaa is A or G
  MOD_RES (20), (21), (22), (23): Xaa is A or G or is absent
XAPVKTEPISMLYLXXXXXXXXXKFKYEMIVEEX

SEQ ID NO: 68601 - protein, 36 aa, Artificial Sequence
  GFR-binding peptide
  MOD_RES (3), (4): Xaa is C or S
  MOD_RES (18), (19), (20), (21), (22): Xaa is A or G
  MOD_RES (23), (24), (25), (26): Xaa is A or G or is absent
EPXXVPEKMEPISILYLXXXXXXXXXKFKYENMTVE

SEQ ID NO: 68602 - protein, 37 aa, Artificial Sequence; identical to SEQ ID NO: 9757
  GFR-binding peptide
  MOD_RES (1), (34), (36): Xaa is C or S
  MOD_RES (15), (16), (17), (18), (19): Xaa is A or G
  MOD_RES (20), (21), (22), (23): Xaa is A or G or is absent

SEQ ID NO: 68603 - protein, 32 aa, Artificial Sequence
  GFR-binding peptide
  MOD_RES (1), (2): Xaa is C or S
XXVPTRLSPISILYKDSANNVVLKYHYDMVVE

SEQ ID NO: 68604 - protein, 34 aa, Artificial Sequence; identical to SEQ ID NO: 33332
  GFR-binding peptide
  MOD_RES (1), (2): Xaa is C or S
  MOD_RES (16), (17), (18), (19), (20): Xaa is A or G
  MOD_RES (21), (22), (23), (24): Xaa is A or G or is absent

SEQ ID NO: 68605 - protein, 33 aa, Artificial Sequence; identical to SEQ ID NO: 58178
  GFR-binding peptide
  MOD_RES (1), (2), (33): Xaa is C or S

SEQ ID NO: 68606 - protein, 37 aa, Artificial Sequence
  GFR-binding peptide
  MOD_RES (1), (2), (35), (37): Xaa is C or S
  MOD_RES (16), (17), (18), (19), (20): Xaa is A or G
  MOD_RES (21), (22), (23), (24): Xaa is A or G or is absent
XXVPQDLSPINILYFXXXXXXXXXYGKIPMVVKSXKX

SEQ ID NO: 68607 - protein, 39 aa, Artificial Sequence; identical to SEQ ID NO: 31178
  GFR-binding peptide
  MOD_RES (1), (2), (36), (38): Xaa is C or S
  MOD_RES (16), (17), (18), (19), (20): Xaa is A or G
  MOD_RES (21), (22), (23), (24): Xaa is A or G or is absent

SEQ ID NO: 68608 - protein, 34 aa, Artificial Sequence; identical to SEQ ID NO: 9759
  GFR-binding peptide
  MOD_RES (34), (34): Xaa is C or S
  MOD_RES (14), (15), (16), (17), (18): Xaa is A or G
  MOD_RES (19), (20), (21), (22): Xaa is A or G or is absent

SEQ ID NO: 68609 - protein, 32 aa, Artificial Sequence
  GFR-binding peptide
  MOD_RES (1), (2): Xaa is C or S
XXVPEKMNAISILYFDENKNVVLKKYRNMTVE

SEQ ID NO: 68610 - protein, 40 aa, Artificial Sequence; identical to SEQ ID NO: 9761
  GFR-binding peptide
  MOD_RES (4), (5), (37), (39): Xaa is C or S

SEQ ID NO: 68611 - protein, 35 aa, Artificial Sequence; identical to SEQ ID NO: 9767
  GFR-binding peptide
  MOD_RES (1), (2): Xaa is C or S
  MOD_RES (16), (17), (18), (19), (20): Xaa is A or G
  MOD_RES (21), (22), (23), (24): Xaa is A or G or is absent

SEQ ID NO: 68612 - protein, 35 aa, Artificial Sequence
  GFR-binding peptide
  MOD_RES (1), (35): Xaa is C or S
  MOD_RES (15), (16), (17), (18), (19): Xaa is A or G
  MOD_RES (20), (21), (22), (23): Xaa is A or G or is absent
XVPEKMNAISILYFXXXXXXXXXLKKYRNMTVESX

SEQ ID NO: 68613 - protein, 31 aa, Artificial Sequence
  GFR-binding peptide
  MOD_RES (1), (1): Xaa is C or S
XVPTRLSPISILYKDSANNVVLKYHYDMVVE

SEQ ID NO: 68614 - protein, 36 aa, Artificial Sequence; identical to SEQ ID NO: 9771
  GFR-binding peptide
  MOD_RES (2), (3), (36): Xaa is C or S
  MOD_RES (17), (18), (19), (20), (21): Xaa is A or G
  MOD_RES (22), (23), (24), (25): Xaa is A or G or is absent

SEQ ID NO: 68615 - protein, 32 aa, Artificial Sequence
  GFR-binding peptide
  MOD_RES (1), (32): Xaa is C or S
XVPQDLSPINILYFVGRTPKVYGKIPMVVKSX

SEQ ID NO: 68616 - protein, 31 aa, Artificial Sequence
  GFR-binding peptide
  MOD_RES (31), (31): Xaa is C or S
VPQDLSPINILYFVGRTPKVYGKIPMVVKSX

SEQ ID NO: 68617 - protein, 39 aa, Artificial Sequence; identical to SEQ ID NO: 9773
  GFR-binding peptide
  MOD_RES (3), (4), (36), (38): Xaa is C or S

SEQ ID NO: 68618 - protein, 40 aa, Artificial Sequence; identical to SEQ ID NO: 31194
  GFR-binding peptide
  MOD_RES (5), (6), (37), (39): Xaa is C or S

SEQ ID NO: 68619 - protein, 38 aa, Artificial Sequence
  GFR-binding peptide
  MOD_RES (3), (4), (38): Xaa is C or S
  MOD_RES (18), (19), (20), (21), (22): Xaa is A or G
  MOD_RES (23), (24), (25), (26): Xaa is A or G or is absent
PTXXVPTRLSATSILYYXXXXXXXXXLRKHRDMVVESX

SEQ ID NO: 68620 - protein, 38 aa, Artificial Sequence; identical to SEQ ID NO: 6181
  GFR-binding peptide
  MOD_RES (6), (7): Xaa is C or S

SEQ ID NO: 68621 - protein, 36 aa, Artificial Sequence
  GFR-binding peptide
  MOD_RES (1), (2), (34), (36): Xaa is C or S
XXVPEKMSPISILYKDENKNVVLKYHYNMTVESXAX

SEQ ID NO: 68622 - protein, 42 aa, Artificial Sequence; identical to SEQ ID NO: 6186
  GFR-binding peptide
  MOD_RES (4), (5), (40), (42): Xaa is C or S
  MOD_RES (19), (20), (21), (22), (23): Xaa is A or G
  MOD_RES (24), (25), (26), (27): Xaa is A or G or is absent

SEQ ID NO: 68623 - protein, 36 aa, Artificial Sequence
  GFR-binding peptide
  MOD_RES (34), (36): Xaa is C or S
  MOD_RES (14), (15), (16), (17), (18): Xaa is A or G
  MOD_RES (19), (20), (21), (22): Xaa is A or G or is absent
VPEKMSATSILYYXXXXXXXXXLRKHRNMTVESXAX

SEQ ID NO: 68624 - protein, 31 aa, Artificial Sequence
  GFR-binding peptide
  MOD_RES (1), (1): Xaa is C or S
XVPEKMNAISILYFDENKNVVLKKYRNMTVE

SEQ ID NO: 68625 - protein, 38 aa, Artificial Sequence
  GFR-binding peptide
  MOD_RES (4), (5), (36), (38): Xaa is C or S
PSTXXAPVKTSATSMLYYDNGRVLLLRKHRMIVEEXGX

SEQ ID NO: 68626 - protein, 38 aa, Artificial Sequence; identical to SEQ ID NO: 6188
  GFR-binding peptide
  MOD_RES (7), (7): Xaa is C or S

SEQ ID NO: 68627 - protein, 33 aa, Artificial Sequence; identical to SEQ ID NO: 6189
  GFR-binding peptide
  MOD_RES (32), (32): Xaa is C or S

SEQ ID NO: 68628 - protein, 42 aa, Artificial Sequence
  GFR-binding peptide
  MOD_RES (6), (7), (41): Xaa is C or S
  MOD_RES (21), (22), (23), (24), (25): Xaa is A or G
  MOD_RES (26), (27), (28), (29): Xaa is A or G or is absent
GSAGPXXTPTKMEPISMLYLXXXXXXXXXKFKYEGMVVDRXG

SEQ ID NO: 68629 - protein, 34 aa, Artificial Sequence
  GFR-binding peptide
  MOD_RES (32), (34): Xaa is C or S
VPEKMEPISILYLDENKNVVKFKYENMTVESXAX

SEQ ID NO: 68630 - protein, 44 aa, Artificial Sequence; identical to SEQ ID NO: 57242
  GFR-binding peptide
  MOD_RES (6), (7), (41), (43): Xaa is C or S
  MOD_RES (21), (22), (23), (24), (25): Xaa is A or G
  MOD_RES (26), (27), (28), (29): Xaa is A or G or is absent

SEQ ID NO: 68631 - protein, 38 aa, Artificial Sequence; identical to SEQ ID NO: 57243
  GFR-binding peptide
  MOD_RES (1), (2), (36), (38): Xaa is C or S
  MOD_RES (16), (17), (18), (19), (20): Xaa is A or G
  MOD_RES (21), (22), (23), (24): Xaa is A or G or is absent

SEQ ID NO: 68632 - protein, 40 aa, Artificial Sequence
  GFR-binding peptide
  MOD_RES (6), (7), (38), (40): Xaa is C or S
ASASPXXVSQDLSPINILYFIGKTPKIYGKIPMIVKSXKX

SEQ ID NO: 68633 - protein, 33 aa, Artificial Sequence
  GFR-binding peptide
  MOD_RES (1), (1): Xaa is C or S
  MOD_RES (15), (16), (17), (18), (19): Xaa is A or G
  MOD_RES (20), (21), (22), (23): Xaa is A or G or is absent
XAPVKTSPISMLYKXXXXXXXXXLKYHYMIVEE

SEQ ID NO: 68634 - protein, 35 aa, Artificial Sequence; identical to SEQ ID NO: 32312
  GFR-binding peptide
  MOD_RES (1), (2): Xaa is C or S
  MOD_RES (16), (17), (18), (19), (20): Xaa is A or G
  MOD_RES (21), (22), (23), (24): Xaa is A or G or is absent

SEQ ID NO: 68635 - protein, 37 aa, Artificial Sequence
  GFR-binding peptide
  MOD_RES (1), (2), (34), (36): Xaa is C or S
XXVPEKMSPISILYKDENKNVVLKYHYNMTVESXAXR

SEQ ID NO: 68636 - protein, 39 aa, Artificial Sequence
  GFR-binding peptide
  MOD_RES (5), (6), (37), (39): Xaa is C or S
SASPXXVPQDLSPINILYFVGRTPKVYGKIPMVVKSXKX

SEQ ID NO: 68637 - protein, 33 aa, Artificial Sequence
  GFR-binding peptide
  MOD_RES (1), (1): Xaa is C or S
  MOD_RES (15), (16), (17), (18), (19): Xaa is A or G
  MOD_RES (20), (21), (22), (23): Xaa is A or G or is absent
XAPVKTEPISMLYLXXXXXXXXXKFKYEMIVEE

SEQ ID NO: 68638 - protein, 35 aa, Artificial Sequence; identical to SEQ ID NO: 32320
  GFR-binding peptide
  MOD_RES (3), (4): Xaa is C or S

SEQ ID NO: 68639 - protein, 38 aa, Artificial Sequence; identical to SEQ ID NO: 6198
  GFR-binding peptide
  MOD_RES (6), (7): Xaa is C or S

SEQ ID NO: 68640 - protein, 33 aa, Artificial Sequence; identical to SEQ ID NO: 27334
  GFR-binding peptide
  MOD_RES (2), (3): Xaa is C or S

SEQ ID NO: 68641 - protein, 36 aa, Artificial Sequence; identical to SEQ ID NO: 57248
  GFR-binding peptide
  MOD_RES (3), (4): Xaa is C or S
  MOD_RES (18), (19), (20), (21), (22): Xaa is A or G
  MOD_RES (23), (24), (25), (26): Xaa is A or G or is absent

SEQ ID NO: 68642 - protein, 41 aa, Artificial Sequence; identical to SEQ ID NO: 57249
  GFR-binding peptide
  MOD_RES (5), (6), (40): Xaa is C or S
  MOD_RES (20), (21), (22), (23), (24): Xaa is A or G
  MOD_RES (25), (26), (27), (28): Xaa is A or G or is absent

SEQ ID NO: 68643 - protein, 40 aa, Artificial Sequence
  GFR-binding peptide
  MOD_RES (3), (4), (37), (39): Xaa is C or S
  MOD_RES (18), (19), (20), (21), (22): Xaa is A or G
  MOD_RES (23), (24), (25), (26): Xaa is A or G or is absent
STXXAPVKTSPISMLYKXXXXXXXXXLKYHYMIVEEXGXL

SEQ ID NO: 68644 - protein, 42 aa, Artificial Sequence; identical to SEQ ID NO: 6200
  GFR-binding peptide
  MOD_RES (5), (6), (40), (42): Xaa is C or S
  MOD_RES (20), (21), (22), (23), (24): Xaa is A or G
  MOD_RES (25), (26), (27), (28): Xaa is A or G or is absent

SEQ ID NO: 68645 - protein, 40 aa, Artificial Sequence; identical to SEQ ID NO: 27337
  GFR-binding peptide
  MOD_RES (4), (5), (38), (40): Xaa is C or S
  MOD_RES (19), (20), (21), (22), (23): Xaa is A or G
  MOD_RES (24), (25), (26), (27): Xaa is A or G or is absent

SEQ ID NO: 68646 - protein, 39 aa, Artificial Sequence; identical to SEQ ID NO: 6201
  GFR-binding peptide
  MOD_RES (3), (4), (38): Xaa is C or S
  MOD_RES (18), (19), (20), (21), (22): Xaa is A or G
  MOD_RES (23), (24), (25), (26): Xaa is A or G or is absent

SEQ ID NO: 68647 - protein, 38 aa, Artificial Sequence; identical to SEQ ID NO: 6203
  GFR-binding peptide
  MOD_RES (1), (2), (35), (37): Xaa is C or S
  MOD_RES (16), (17), (18), (19), (20): Xaa is A or G
  MOD_RES (21), (22), (23), (24): Xaa is A or G or is absent

SEQ ID NO: 68648 - protein, 34 aa, Artificial Sequence
  GFR-binding peptide
  MOD_RES (2), (3): Xaa is C or S
SXXVPARLSATSILYYDAANNVVLRKHRDMVVEA

SEQ ID NO: 68649 - protein, 40 aa, Artificial Sequence; identical to SEQ ID NO: 27342
  GFR-binding peptide
  MOD_RES (4), (5), (37), (39): Xaa is C or S

SEQ ID NO: 68650 - protein, 35 aa, Artificial Sequence; identical to SEQ ID NO: 27349
  GFR-binding peptide
  MOD_RES (1), (35): Xaa is C or S
  MOD_RES (15), (16), (17), (18), (19): Xaa is A or G
  MOD_RES (20), (21), (22), (23): Xaa is A or G or is absent

SEQ ID NO: 68651 - protein, 35 aa, Artificial Sequence; identical to SEQ ID NO: 27350
  GFR-binding peptide
  MOD_RES (2), (3): Xaa is C or S
  MOD_RES (17), (18), (19), (20), (21): Xaa is A or G
  MOD_RES (22), (23), (24), (25): Xaa is A or G or is absent

SEQ ID NO: 68652 - protein, 36 aa, Artificial Sequence; identical to SEQ ID NO: 27353
  GFR-binding peptide
  MOD_RES (1), (2), (36): Xaa is C or S
  MOD_RES (16), (17), (18), (19), (20): Xaa is A or G
  MOD_RES (21), (22), (23), (24): Xaa is A or G or is absent

SEQ ID NO: 68653 - protein, 36 aa, Artificial Sequence; identical to SEQ ID NO: 32337
  GFR-binding peptide
  MOD_RES (34), (36): Xaa is C or S
  MOD_RES (14), (15), (16), (17), (18): Xaa is A or G
  MOD_RES (19), (20), (21), (22): Xaa is A or G or is absent

SEQ ID NO: 68654 - protein, 34 aa, Artificial Sequence; identical to SEQ ID NO: 6214
  GFR-binding peptide
  MOD_RES (2), (3): Xaa is C or S

SEQ ID NO: 68655 - protein, 30 aa, Artificial Sequence; identical to SEQ ID NO: 6216
  GFR-binding peptide

SEQ ID NO: 68656 - protein, 32 aa, Artificial Sequence; identical to SEQ ID NO: 6220
  GFR-binding peptide
  MOD_RES (1), (1): Xaa is C or S

SEQ ID NO: 68657 - protein, 35 aa, Artificial Sequence; identical to SEQ ID NO: 27358
  GFR-binding peptide
  MOD_RES (33), (35): Xaa is C or S
  MOD_RES (14), (15), (16), (17), (18): Xaa is A or G
  MOD_RES (19), (20), (21), (22): Xaa is A or G or is absent

SEQ ID NO: 68658 - protein, 43 aa, Artificial Sequence; identical to SEQ ID NO: 32342
  GFR-binding peptide
  MOD_RES (6), (7), (41), (43): Xaa is C or S
  MOD_RES (21), (22), (23), (24), (25): Xaa is A or G
  MOD_RES (26), (27), (28), (29): Xaa is A or G or is absent

SEQ ID NO: 68659 - protein, 35 aa, Artificial Sequence; identical to SEQ ID NO: 6222
  GFR-binding peptide
  MOD_RES (1), (34): Xaa is C or S

SEQ ID NO: 68660 - protein, 35 aa, Artificial Sequence; identical to SEQ ID NO: 32345
  GFR-binding peptide
  MOD_RES (35), (35): Xaa is C or S
  MOD_RES (14), (15), (16), (17), (18): Xaa is A or G
  MOD_RES (19), (20), (21), (22): Xaa is A or G or is absent

SEQ ID NO: 68661 - protein, 40 aa, Artificial Sequence; identical to SEQ ID NO: 27360
  GFR-binding peptide
  MOD_RES (5), (6), (40): Xaa is C or S
  MOD_RES (20), (21), (22), (23), (24): Xaa is A or G
  MOD_RES (25), (26), (27), (28): Xaa is A or G or is absent

SEQ ID NO: 68662 - protein, 41 aa, Artificial Sequence; identical to SEQ ID NO: 57280
  GFR-binding peptide
  MOD_RES (6), (7), (39), (41): Xaa is C or S

SEQ ID NO: 68663 - protein, 40 aa, Artificial Sequence
  GFR-binding peptide
  MOD_RES (5), (6), (38), (40): Xaa is C or S
IPEPXXVPEKMSPISILYKDENKNVVLKYHYNMTVESXAX

SEQ ID NO: 68664 - protein, 30 aa, Artificial Sequence; identical to SEQ ID NO: 27364
  GFR-binding peptide

SEQ ID NO: 68665 - protein, 34 aa, Artificial Sequence; identical to SEQ ID NO: 6233
  GFR-binding peptide
  MOD_RES (1), (34): Xaa is C or S
  MOD_RES (15), (16), (17), (18), (19): Xaa is A or G
  MOD_RES (20), (21), (22), (23): Xaa is A or G or is absent

SEQ ID NO: 68666 - protein, 40 aa, Artificial Sequence; identical to SEQ ID NO: 27369
  GFR-binding peptide
  MOD_RES (5), (6): Xaa is C or S
  MOD_RES (20), (21), (22), (23), (24): Xaa is A or G
  MOD_RES (25), (26), (27), (28): Xaa is A or G or is absent

SEQ ID NO: 68667 - protein, 42 aa, Artificial Sequence; identical to SEQ ID NO: 6234
  GFR-binding peptide
  MOD_RES (5), (6), (39), (41): Xaa is C or S
  MOD_RES (20), (21), (22), (23), (24): Xaa is A or G
  MOD_RES (25), (26), (27), (28): Xaa is A or G or is absent

SEQ ID NO: 68668 - protein, 40 aa, Artificial Sequence; identical to SEQ ID NO: 32354
  GFR-binding peptide
  MOD_RES (6), (7), (39): Xaa is C or S

SEQ ID NO: 68669 - protein, 33 aa, Artificial Sequence; identical to SEQ ID NO: 6236
  GFR-binding peptide
  MOD_RES (33), (33): Xaa is C or S
  MOD_RES (14), (15), (16), (17), (18): Xaa is A or G
  MOD_RES (19), (20), (21), (22): Xaa is A or G or is absent

SEQ ID NO: 68670 - protein, 38 aa, Artificial Sequence; identical to SEQ ID NO: 32361
  GFR-binding peptide
  MOD_RES (3), (4), (36), (38): Xaa is C or S

SEQ ID NO: 68671 - protein, 37 aa, Artificial Sequence; identical to SEQ ID NO: 27379
  GFR-binding peptide
  MOD_RES (4), (5), (37): Xaa is C or S

SEQ ID NO: 68672 - protein, 41 aa, Artificial Sequence; identical to SEQ ID NO: 32363
  GFR-binding peptide
  MOD_RES (3), (4), (39), (41): Xaa is C or S
  MOD_RES (18), (19), (20), (21), (22): Xaa is A or G
  MOD_RES (23), (24), (25), (26): Xaa is A or G or is absent

SEQ ID NO: 68673 - protein, 42 aa, Artificial Sequence; identical to SEQ ID NO: 27382
  GFR-binding peptide
  MOD_RES (6), (7), (39), (41): Xaa is C or S

SEQ ID NO: 68674 - protein, 37 aa, Artificial Sequence
  GFR-binding peptide
  MOD_RES (4), (5), (36): Xaa is C or S
ASPXXVSQDLSPINILYFIGKTPKIYGKIPMIVKSXK

SEQ ID NO: 68675 - protein, 39 aa, Artificial Sequence; identical to SEQ ID NO: 6246
  GFR-binding peptide
  MOD_RES (6), (7): Xaa is C or S
  MOD_RES (21), (22), (23), (24), (25): Xaa is A or G
  MOD_RES (26), (27), (28), (29): Xaa is A or G or is absent

SEQ ID NO: 68676 - protein, 33 aa, Artificial Sequence
  GFR-binding peptide
  MOD_RES (1), (1): Xaa is C or S
  MOD_RES (15), (16), (17), (18), (19): Xaa is A or G
  MOD_RES (20), (21), (22), (23): Xaa is A or G or is absent
XVPEKMSPISILYKXXXXXXXXXLKYHYNMTVE

SEQ ID NO: 68677 - protein, 35 aa, Artificial Sequence; identical to SEQ ID NO: 32382
  GFR-binding peptide
  MOD_RES (4), (5): Xaa is C or S

SEQ ID NO: 68678 - protein, 37 aa, Artificial Sequence; identical to SEQ ID NO: 27390
  GFR-binding peptide
  MOD_RES (4), (5), (37): Xaa is C or S

SEQ ID NO: 68679 - protein, 39 aa, Artificial Sequence; identical to SEQ ID NO: 6251
  GFR-binding peptide
  MOD_RES (6), (7): Xaa is C or S
  MOD_RES (21), (22), (23), (24), (25): Xaa is A or G
  MOD_RES (26), (27), (28), (29): Xaa is A or G or is absent

SEQ ID NO: 68680 - protein, 32 aa, Artificial Sequence
  GFR-binding peptide
  MOD_RES (1), (2): Xaa is C or S
XXAPVKTEPISMLYLDNGRVLLKFKYEMIVEE

SEQ ID NO: 68681 - protein, 33 aa, Artificial Sequence
  GFR-binding peptide
  MOD_RES (1), (1): Xaa is C or S
  MOD_RES (15), (16), (17), (18), (19): Xaa is A or G
  MOD_RES (20), (21), (22), (23): Xaa is A or G or is absent
XVPEKMEPISILYLXXXXXXXXXKFKYENMTVE

SEQ ID NO: 68682 - protein, 36 aa, Artificial Sequence; identical to SEQ ID NO: 27391
  GFR-binding peptide
  MOD_RES (1), (34), (36): Xaa is C or S
  MOD_RES (15), (16), (17), (18), (19): Xaa is A or G
  MOD_RES (20), (21), (22), (23): Xaa is A or G or is absent

SEQ ID NO: 68683 - protein, 35 aa, Artificial Sequence; identical to SEQ ID NO: 6252
  GFR-binding peptide
  MOD_RES (34), (34): Xaa is C or S
  MOD_RES (14), (15), (16), (17), (18): Xaa is A or G
  MOD_RES (19), (20), (21), (22): Xaa is A or G or is absent

SEQ ID NO: 68684 - protein, 33 aa, Artificial Sequence; identical to SEQ ID NO: 6255
  GFR-binding peptide
  MOD_RES (1), (32): Xaa is C or S

SEQ ID NO: 68685 - protein, 35 aa, Artificial Sequence; identical to SEQ ID NO: 27395
  GFR-binding peptide
  MOD_RES (3), (4), (35): Xaa is C or S

SEQ ID NO: 68686 - protein, 43 aa, Artificial Sequence; identical to SEQ ID NO: 6258
  GFR-binding peptide
  MOD_RES (5), (6), (40), (42): Xaa is C or S
  MOD_RES (20), (21), (22), (23), (24): Xaa is A or G
  MOD_RES (25), (26), (27), (28): Xaa is A or G or is absent

SEQ ID NO: 68687 - protein, 34 aa, Artificial Sequence; identical to SEQ ID NO: 6259
  GFR-binding peptide
  MOD_RES (1), (34): Xaa is C or S
  MOD_RES (15), (16), (17), (18), (19): Xaa is A or G
  MOD_RES (20), (21), (22), (23): Xaa is A or G or is absent

SEQ ID NO: 68688 - protein, 36 aa, Artificial Sequence; identical to SEQ ID NO: 27401
  GFR-binding peptide
  MOD_RES (1), (2), (36): Xaa is C or S
  MOD_RES (16), (17), (18), (19), (20): Xaa is A or G
  MOD_RES (21), (22), (23), (24): Xaa is A or G or is absent

SEQ ID NO: 68689 - protein, 41 aa, Artificial Sequence; identical to SEQ ID NO: 27403
  GFR-binding peptide
  MOD_RES (5), (6), (38), (40): Xaa is C or S

SEQ ID NO: 68690 - protein, 35 aa, Artificial Sequence
  GFR-binding peptide
  MOD_RES (1), (2), (34): Xaa is C or S
XXVPEKMSPINILYFDENKNVVYGKIPNMTVESXA

SEQ ID NO: 68691 - protein, 44 aa, Artificial Sequence
  GFR-binding peptide
  MOD_RES (6), (7), (41), (43): Xaa is C or S
  MOD_RES (21), (22), (23), (24), (25): Xaa is A or G
  MOD_RES (26), (27), (28), (29): Xaa is A or G or is absent
HVPKPXXAPTKLEPISVLYLXXXXXXXXXKFKYENMVVRSXGXH

SEQ ID NO: 68692 - protein, 37 aa, Artificial Sequence; identical to SEQ ID NO: 32408
  GFR-binding peptide
  MOD_RES (6), (7): Xaa is C or S

SEQ ID NO: 68693 - protein, 33 aa, Artificial Sequence; identical to SEQ ID NO: 6271
  GFR-binding peptide
  MOD_RES (32), (32): Xaa is C or S

SEQ ID NO: 68694 - protein, 38 aa, Artificial Sequence; identical to SEQ ID NO: 32418
  GFR-binding peptide
  MOD_RES (4), (5), (37): Xaa is C or S

SEQ ID NO: 68695 - protein, 38 aa, Artificial Sequence; identical to SEQ ID NO: 6281
  GFR-binding peptide
  MOD_RES (1), (2), (36), (38): Xaa is C or S
  MOD_RES (16), (17), (18), (19), (20): Xaa is A or G
  MOD_RES (21), (22), (23), (24): Xaa is A or G or is absent

SEQ ID NO: 68696 - protein, 39 aa, Artificial Sequence; identical to SEQ ID NO: 6282
  GFR-binding peptide
  MOD_RES (3), (4), (38): Xaa is C or S
  MOD_RES (18), (19), (20), (21), (22): Xaa is A or G
  MOD_RES (23), (24), (25), (26): Xaa is A or G or is absent

SEQ ID NO: 68697 - protein, 42 aa, Artificial Sequence; identical to SEQ ID NO: 6284
  GFR-binding peptide
  MOD_RES (6), (7), (41): Xaa is C or S
  MOD_RES (21), (22), (23), (24), (25): Xaa is A or G
  MOD_RES (26), (27), (28), (29): Xaa is A or G or is absent

SEQ ID NO: 68698 - protein, 40 aa, Artificial Sequence; identical to SEQ ID NO: 32422
  GFR-binding peptide
  MOD_RES (6), (7): Xaa is C or S
  MOD_RES (21), (22), (23), (24), (25): Xaa is A or G
  MOD_RES (26), (27), (28), (29): Xaa is A or G or is absent

SEQ ID NO: 68699 - protein, 38 aa, Artificial Sequence; identical to SEQ ID NO: 27414
  GFR-binding peptide
  MOD_RES (6), (7): Xaa is C or S

SEQ ID NO: 68700 - protein, 36 aa, Artificial Sequence; identical to SEQ ID NO: 6286
  GFR-binding peptide
  MOD_RES (2), (3), (34), (36): Xaa is C or S

SEQ ID NO: 68701 - protein, 38 aa, Artificial Sequence; identical to SEQ ID NO: 27417
  GFR-binding peptide
  MOD_RES (4), (5): Xaa is C or S
  MOD_RES (19), (20), (21), (22), (23): Xaa is A or G
  MOD_RES (24), (25), (26), (27): Xaa is A or G or is absent

SEQ ID NO: 68702 - protein, 39 aa, Artificial Sequence
  GFR-binding peptide
  MOD_RES (4), (5), (37), (39): Xaa is C or S
PASXXVPARLSATSILYYDAANNVVLRKHRDMVVEAXGX

SEQ ID NO: 68703 - protein, 44 aa, Artificial Sequence; identical to SEQ ID NO: 32425
  GFR-binding peptide
  MOD_RES (6), (7), (41), (43): Xaa is C or S
  MOD_RES (21), (22), (23), (24), (25): Xaa is A or G
  MOD_RES (26), (27), (28), (29): Xaa is A or G or is absent

SEQ ID NO: 68704 - protein, 38 aa, Artificial Sequence; identical to SEQ ID NO: 27419
  GFR-binding peptide
  MOD_RES (3), (4), (36), (38): Xaa is C or S

SEQ ID NO: 68705 - protein, 35 aa, Artificial Sequence; identical to SEQ ID NO: 6290
  GFR-binding peptide
  MOD_RES (3), (4), (35): Xaa is C or S

SEQ ID NO: 68706 - protein, 39 aa, Artificial Sequence
  GFR-binding peptide
  MOD_RES (1), (2), (36), (38): Xaa is C or S
  MOD_RES (16), (17), (18), (19), (20): Xaa is A or G
  MOD_RES (21), (22), (23), (24): Xaa is A or G or is absent
XXVPARLSATSILYYXXXXXXXXXLRKHRDMVVEAXGXR

SEQ ID NO: 68707 - protein, 38 aa, Artificial Sequence
  GFR-binding peptide
  MOD_RES (2), (3), (35), (37): Xaa is C or S
PXXTPTKMSPISMLYKNDKQQIILKYHYGMVVDRXGXS

SEQ ID NO: 68708 - protein, 33 aa, Artificial Sequence; identical to SEQ ID NO: 32435
  GFR-binding peptide
  MOD_RES (1), (1): Xaa is C or S
  MOD_RES (15), (16), (17), (18), (19): Xaa is A or G
  MOD_RES (20), (21), (22), (23): Xaa is A or G or is absent

SEQ ID NO: 68709 - protein, 35 aa, Artificial Sequence; identical to SEQ ID NO: 27427
  GFR-binding peptide
  MOD_RES (1), (33), (35): Xaa is C or S

SEQ ID NO: 68710 - protein, 36 aa, Artificial Sequence; identical to SEQ ID NO: 27429
  GFR-binding peptide
  MOD_RES (3), (4): Xaa is C or S
  MOD_RES (18), (19), (20), (21), (22): Xaa is A or G
  MOD_RES (23), (24), (25), (26): Xaa is A or G or is absent

SEQ ID NO: 68711 - protein, 39 aa, Artificial Sequence
  GFR-binding peptide
  MOD_RES (3), (4), (38): Xaa is C or S
  MOD_RES (18), (19), (20), (21), (22): Xaa is A or G
  MOD_RES (23), (24), (25), (26): Xaa is A or G or is absent
EPXXVPEKMNAISILYFXXXXXXXXXLKKYRNMTVESXA

SEQ ID NO: 68712 - protein, 35 aa, Artificial Sequence
  GFR-binding peptide
  MOD_RES (34), (34): Xaa is C or S
  MOD_RES (14), (15), (16), (17), (18): Xaa is A or G
  MOD_RES (19), (20), (21), (22): Xaa is A or G or is absent
VPEKMSPINILYFXXXXXXXXXYGKIPNMTVESXA

SEQ ID NO: 68713 - protein, 41 aa, Artificial Sequence; identical to SEQ ID NO: 6301
  GFR-binding peptide
  MOD_RES (6), (7), (39), (41): Xaa is C or S

SEQ ID NO: 68714 - protein, 38 aa, Artificial Sequence; identical to SEQ ID NO: 6302
  GFR-binding peptide
  MOD_RES (2), (3), (35), (37): Xaa is C or S

SEQ ID NO: 68715 - protein, 40 aa, Artificial Sequence
  GFR-binding peptide
  MOD_RES (4), (5), (39): Xaa is C or S
  MOD_RES (19), (20), (21), (22), (23): Xaa is A or G
  MOD_RES (24), (25), (26), (27): Xaa is A or G or is absent
PPTXXVPTRLSPISILYKXXXXXXXXXLKYHYDMVVESXG

SEQ ID NO: 68716 - protein, 31 aa, Artificial Sequence
  GFR-binding peptide
  MOD_RES (1), (1): Xaa is C or S
XVPTRLEPISILYLDSANNVVKFKYEDMVVE

SEQ ID NO: 68717 - protein, 31 aa, Artificial Sequence; identical to SEQ ID NO: 32456
  GFR-binding peptide
  MOD_RES (1), (1): Xaa is C or S

SEQ ID NO: 68718 - protein, 36 aa, Artificial Sequence; identical to SEQ ID NO: 6304
  GFR-binding peptide
  MOD_RES (2), (3), (35): Xaa is C or S

SEQ ID NO: 68719 - protein, 41 aa, Artificial Sequence; identical to SEQ ID NO: 32457
  GFR-binding peptide
  MOD_RES (6), (7), (40): Xaa is C or S

SEQ ID NO: 68720 - protein, 37 aa, Artificial Sequence
  GFR-binding peptide
  MOD_RES (3), (4), (37): Xaa is C or S
  MOD_RES (18), (19), (20), (21), (22): Xaa is A or G
  MOD_RES (23), (24), (25), (26): Xaa is A or G or is absent
STXXAPVKTSATSMLYYXXXXXXXXXLRKHRMIVEEX

SEQ ID NO: 68721 - protein, 34 aa, Artificial Sequence; identical to SEQ ID NO: 6310
  GFR-binding peptide
  MOD_RES (3), (4): Xaa is C or S

SEQ ID NO: 68722 - protein, 38 aa, Artificial Sequence; identical to SEQ ID NO: 6311
  GFR-binding peptide
  MOD_RES (2), (3), (35), (37): Xaa is C or S

SEQ ID NO: 68723 - protein, 34 aa, Artificial Sequence; identical to SEQ ID NO: 32461
  GFR-binding peptide
  MOD_RES (1), (2): Xaa is C or S
  MOD_RES (16), (17), (18), (19), (20): Xaa is A or G
  MOD_RES (21), (22), (23), (24): Xaa is A or G or is absent

SEQ ID NO: 68724 - protein, 36 aa, Artificial Sequence; identical to SEQ ID NO: 6312
  GFR-binding peptide
  MOD_RES (1), (2), (35): Xaa is C or S
  MOD_RES (16), (17), (18), (19), (20): Xaa is A or G
  MOD_RES (21), (22), (23), (24): Xaa is A or G or is absent

SEQ ID NO: 68725 - protein, 39 aa, Artificial Sequence; identical to SEQ ID NO: 6314
  GFR-binding peptide
  MOD_RES (4), (5), (37), (39): Xaa is C or S

SEQ ID NO: 68726 - protein, 40 aa, Artificial Sequence; identical to SEQ ID NO: 13695
  GFR-binding peptide
  MOD_RES (6), (7), (39): Xaa is C or S

SEQ ID NO: 68727 - protein, 34 aa, Artificial Sequence
  GFR-binding peptide
  MOD_RES (1), (2): Xaa is C or S
  MOD_RES (16), (17), (18), (19), (20): Xaa is A or G
  MOD_RES (21), (22), (23), (24): Xaa is A or G or is absent
XXVPQALSPINILYFXXXXXXXXXYGKIPMIVRS

SEQ ID NO: 68728 - protein, 37 aa, Artificial Sequence; identical to SEQ ID NO: 27455
  GFR-binding peptide
  MOD_RES (1), (2), (34), (36): Xaa is C or S

SEQ ID NO: 68729 - protein, 36 aa, Artificial Sequence; identical to SEQ ID NO: 6317
  GFR-binding peptide
  MOD_RES (4), (5), (36): Xaa is C or S

SEQ ID NO: 68730 - protein, 40 aa, Artificial Sequence; identical to SEQ ID NO: 6319
  GFR-binding peptide
  MOD_RES (4), (5), (37), (39): Xaa is C or S

SEQ ID NO: 68731 - protein, 35 aa, Artificial Sequence; identical to SEQ ID NO: 6324
  GFR-binding peptide
  MOD_RES (1), (34): Xaa is C or S
  MOD_RES (15), (16), (17), (18), (19): Xaa is A or G
  MOD_RES (20), (21), (22), (23): Xaa is A or G or is absent

SEQ ID NO: 68732 - protein, 41 aa, Artificial Sequence; identical to SEQ ID NO: 27462
  GFR-binding peptide
  MOD_RES (5), (6), (38), (40): Xaa is C or S

SEQ ID NO: 68733 - protein, 41 aa, Artificial Sequence; identical to SEQ ID NO: 27463
  GFR-binding peptide
  MOD_RES (5), (6), (39), (41): Xaa is C or S
  MOD_RES (20), (21), (22), (23), (24): Xaa is A or G
  MOD_RES (25), (26), (27), (28): Xaa is A or G or is absent

SEQ ID NO: 68734 - protein, 33 aa, Artificial Sequence
  GFR-binding peptide
  MOD_RES (14), (15), (16), (17), (18): Xaa is A or G
  MOD_RES (19), (20), (21), (22): Xaa is A or G or is absent
VPEKMNAISILYFXXXXXXXXXLKKYRNMTVES

SEQ ID NO: 68735 - protein, 37 aa, Artificial Sequence; identical to SEQ ID NO: 32471
  GFR-binding peptide
  MOD_RES (2), (3), (35), (37): Xaa is C or S

SEQ ID NO: 68736 - protein, 38 aa, Artificial Sequence; identical to SEQ ID NO: 32472
  GFR-binding peptide
  MOD_RES (5), (6): Xaa is C or S
  MOD_RES (20), (21), (22), (23), (24): Xaa is A or G
  MOD_RES (25), (26), (27), (28): Xaa is A or G or is absent

SEQ ID NO: 68737 - protein, 33 aa, Artificial Sequence; identical to SEQ ID NO: 32474
  GFR-binding peptide
  MOD_RES (14), (15), (16), (17), (18): Xaa is A or G
  MOD_RES (19), (20), (21), (22): Xaa is A or G or is absent

SEQ ID NO: 68738 - protein, 36 aa, Artificial Sequence; identical to SEQ ID NO: 32476
  GFR-binding peptide
  MOD_RES (3), (4): Xaa is C or S
  MOD_RES (18), (19), (20), (21), (22): Xaa is A or G
  MOD_RES (23), (24), (25), (26): Xaa is A or G or is absent

SEQ ID NO: 68739 - protein, 37 aa, Artificial Sequence; identical to SEQ ID NO: 6328
  GFR-binding peptide
  MOD_RES (1), (2), (34), (36): Xaa is C or S

SEQ ID NO: 68740 - protein, 35 aa, Artificial Sequence; identical to SEQ ID NO: 27469
  GFR-binding peptide
  MOD_RES (1), (34): Xaa is C or S
  MOD_RES (15), (16), (17), (18), (19): Xaa is A or G
  MOD_RES (20), (21), (22), (23): Xaa is A or G or is absent

SEQ ID NO: 68741 - protein, 37 aa, Artificial Sequence; identical to SEQ ID NO: 32482
  GFR-binding peptide
  MOD_RES (3), (4): Xaa is C or S
  MOD_RES (18), (19), (20), (21), (22): Xaa is A or G
  MOD_RES (23), (24), (25), (26): Xaa is A or G or is absent

SEQ ID NO: 68742 - protein, 40 aa, Artificial Sequence; identical to SEQ ID NO: 6330
  GFR-binding peptide
  MOD_RES (6), (7): Xaa is C or S
  MOD_RES (21), (22), (23), (24), (25): Xaa is A or G
  MOD_RES (26), (27), (28), (29): Xaa is A or G or is absent

SEQ ID NO: 68743 - protein, 40 aa, Artificial Sequence; identical to SEQ ID NO: 27470
  GFR-binding peptide
  MOD_RES (4), (5), (39): Xaa is C or S
  MOD_RES (19), (20), (21), (22), (23): Xaa is A or G
  MOD_RES (24), (25), (26), (27): Xaa is A or G or is absent

SEQ ID NO: 68744 - protein, 33 aa, Artificial Sequence; identical to SEQ ID NO: 27471
  GFR-binding peptide
  MOD_RES (2), (3): Xaa is C or S

SEQ ID NO: 68745 - protein, 43 aa, Artificial Sequence; identical to SEQ ID NO: 27474
  GFR-binding peptide
  MOD_RES (6), (7), (41), (43): Xaa is C or S
  MOD_RES (21), (22), (23), (24), (25): Xaa is A or G
  MOD_RES (26), (27), (28), (29): Xaa is A or G or is absent

SEQ ID NO: 68746 - protein, 39 aa, Artificial Sequence
  GFR-binding peptide
  MOD_RES (4), (5), (37), (39): Xaa is C or S
AGPXXTPTKMSPISMLYKNDKQQIILKYHYGMVVDRXGX

SEQ ID NO: 68747 - protein, 41 aa, Artificial Sequence; identical to SEQ ID NO: 6336
  GFR-binding peptide
  MOD_RES (5), (6), (40): Xaa is C or S
  MOD_RES (20), (21), (22), (23), (24): Xaa is A or G
  MOD_RES (25), (26), (27), (28): Xaa is A or G or is absent

SEQ ID NO: 68748 - protein, 33 aa, Artificial Sequence; identical to SEQ ID NO: 32493
  GFR-binding peptide
  MOD_RES (32), (32): Xaa is C or S

SEQ ID NO: 68749 - protein, 41 aa, Artificial Sequence
  GFR-binding peptide
  MOD_RES (6), (7), (40): Xaa is C or S
  MOD_RES (21), (22), (23), (24), (25): Xaa is A or G
  MOD_RES (26), (27), (28), (29): Xaa is A or G or is absent
RVPSTXXAPVKTEPISMLYLXXXXXXXXXKFKYEMIVEEXG

SEQ ID NO: 68750 - protein, 36 aa, Artificial Sequence; identical to SEQ ID NO: 6339
  GFR-binding peptide
  MOD_RES (3), (4): Xaa is C or S

SEQ ID NO: 68751 - protein, 35 aa, Artificial Sequence; identical to SEQ ID NO: 6341
  GFR-binding peptide
  MOD_RES (4), (5): Xaa is C or S

SEQ ID NO: 68752 - protein, 38 aa, Artificial Sequence; identical to SEQ ID NO: 32504
  GFR-binding peptide
  MOD_RES (5), (6): Xaa is C or S
  MOD_RES (20), (21), (22), (23), (24): Xaa is A or G
  MOD_RES (25), (26), (27), (28): Xaa is A or G or is absent

SEQ ID NO: 68753 - protein, 39 aa, Artificial Sequence; identical to SEQ ID NO: 6345
  GFR-binding peptide
  MOD_RES (4), (5), (38): Xaa is C or S
  MOD_RES (19), (20), (21), (22), (23): Xaa is A or G
  MOD_RES (24), (25), (26), (27): Xaa is A or G or is absent

SEQ ID NO: 68754 - protein, 31 aa, Artificial Sequence; identical to SEQ ID NO: 6347
  GFR-binding peptide
  MOD_RES (1), (1): Xaa is C or S

SEQ ID NO: 68755 - protein, 33 aa, Artificial Sequence
  GFR-binding peptide
  MOD_RES (2), (3): Xaa is C or S
TXXVPTRLSPISILYKDSANNVVLKYHYDMVVE

SEQ ID NO: 68756 - protein, 37 aa, Artificial Sequence
  GFR-binding peptide
  MOD_RES (34), (36): Xaa is C or S
  MOD_RES (14), (15), (16), (17), (18): Xaa is A or G
  MOD_RES (19), (20), (21), (22): Xaa is A or G or is absent
VPEKMSATSILYYXXXXXXXXXLRKHRNMTVESXAXR

SEQ ID NO: 68757 - protein, 35 aa, Artificial Sequence; identical to SEQ ID NO: 32508
  GFR-binding peptide
  MOD_RES (3), (4): Xaa is C or S

SEQ ID NO: 68758 - protein, 39 aa, Artificial Sequence
  GFR-binding peptide
  MOD_RES (3), (4), (36), (38): Xaa is C or S
PTXXVPTRLSATSILYYDSANNVVLRKHRDMVVESXGXR

SEQ ID NO: 68759 - protein, 39 aa, Artificial Sequence; identical to SEQ ID NO: 32512
  GFR-binding peptide
  MOD_RES (2), (3), (37), (39): Xaa is C or S
  MOD_RES (17), (18), (19), (20), (21): Xaa is A or G
  MOD_RES (22), (23), (24), (25): Xaa is A or G or is absent

SEQ ID NO: 68760 - protein, 33 aa, Artificial Sequence; identical to SEQ ID NO: 32513
  GFR-binding peptide
  MOD_RES (1), (2): Xaa is C or S

SEQ ID NO: 68761 - protein, 35 aa, Artificial Sequence; identical to SEQ ID NO: 32515
  GFR-binding peptide
  MOD_RES (1), (33), (35): Xaa is C or S

SEQ ID NO: 68762 - protein, 39 aa, Artificial Sequence
  GFR-binding peptide
  MOD_RES (2), (3), (36), (38): Xaa is C or S
  MOD_RES (17), (18), (19), (20), (21): Xaa is A or G
  MOD_RES (22), (23), (24), (25): Xaa is A or G or is absent
TXXAPVKTEPISMLYLXXXXXXXXXKFKYEMIVEEXGXL

SEQ ID NO: 68763 - protein, 34 aa, Artificial Sequence; identical to SEQ ID NO: 6353
  GFR-binding peptide
  MOD_RES (32), (34): Xaa is C or S

SEQ ID NO: 68764 - protein, 41 aa, Artificial Sequence; identical to SEQ ID NO: 32517
  GFR-binding peptide
  MOD_RES (6), (7), (39), (41): Xaa is C or S

SEQ ID NO: 68765 - protein, 39 aa, Artificial Sequence
  GFR-binding peptide
  MOD_RES (2), (3), (37), (39): Xaa is C or S
  MOD_RES (17), (18), (19), (20), (21): Xaa is A or G
  MOD_RES (22), (23), (24), (25): Xaa is A or G or is absent
AXXVPTKLSATSILYYXXXXXXXXXLRKHRGMAVSEXGX

SEQ ID NO: 68766 - protein, 39 aa, Artificial Sequence; identical to SEQ ID NO: 6356
  GFR-binding peptide
  MOD_RES (6), (7): Xaa is C or S
  MOD_RES (21), (22), (23), (24), (25): Xaa is A or G
  MOD_RES (26), (27), (28), (29): Xaa is A or G or is absent

SEQ ID NO: 68767 - protein, 40 aa, Artificial Sequence; identical to SEQ ID NO: 27497
  GFR-binding peptide
  MOD_RES (5), (6), (40): Xaa is C or S
  MOD_RES (20), (21), (22), (23), (24): Xaa is A or G
  MOD_RES (25), (26), (27), (28): Xaa is A or G or is absent

SEQ ID NO: 68768 - protein, 43 aa, Artificial Sequence
  GFR-binding peptide
  MOD_RES (6), (7), (41), (43): Xaa is C or S
  MOD_RES (21), (22), (23), (24), (25): Xaa is A or G
  MOD_RES (26), (27), (28), (29): Xaa is A or G or is absent
GIPEPXXVPEKMNAISILYFXXXXXXXXXLKKYRNMTVESXAX

SEQ ID NO: 68769 - protein, 42 aa, Artificial Sequence; identical to SEQ ID NO: 27499
  GFR-binding peptide
  MOD_RES (5), (6), (40), (42): Xaa is C or S
  MOD_RES (20), (21), (22), (23), (24): Xaa is A or G
  MOD_RES (25), (26), (27), (28): Xaa is A or G or is absent

SEQ ID NO: 68770 - protein, 41 aa, Artificial Sequence; identical to SEQ ID NO: 32523
  GFR-binding peptide
  MOD_RES (5), (6), (38), (40): Xaa is C or S

SEQ ID NO: 68771 - protein, 42 aa, Artificial Sequence; identical to SEQ ID NO: 27500
  GFR-binding peptide
  MOD_RES (6), (7), (41): Xaa is C or S
  MOD_RES (21), (22), (23), (24), (25): Xaa is A or G
  MOD_RES (26), (27), (28), (29): Xaa is A or G or is absent

SEQ ID NO: 68772 - protein, 37 aa, Artificial Sequence; identical to SEQ ID NO: 27501
  GFR-binding peptide
  MOD_RES (1), (35), (37): Xaa is C or S
  MOD_RES (15), (16), (17), (18), (19): Xaa is A or G
  MOD_RES (20), (21), (22), (23): Xaa is A or G or is absent

SEQ ID NO: 68773 - protein, 40 aa, Artificial Sequence; identical to SEQ ID NO: 6366
  GFR-binding peptide
  MOD_RES (2), (3), (38), (40): Xaa is C or S
  MOD_RES (17), (18), (19), (20), (21): Xaa is A or G
  MOD_RES (22), (23), (24), (25): Xaa is A or G or is absent

SEQ ID NO: 68774 - protein, 43 aa, Artificial Sequence; identical to SEQ ID NO: 6370
  GFR-binding peptide
  MOD_RES (4), (5), (40), (42): Xaa is C or S
  MOD_RES (19), (20), (21), (22), (23): Xaa is A or G
  MOD_RES (24), (25), (26), (27): Xaa is A or G or is absent

SEQ ID NO: 68775 - protein, 43 aa, Artificial Sequence; identical to SEQ ID NO: 32530
  GFR-binding peptide
  MOD_RES (6), (7), (42): Xaa is C or S
  MOD_RES (21), (22), (23), (24), (25): Xaa is A or G
  MOD_RES (26), (27), (28), (29): Xaa is A or G or is absent

SEQ ID NO: 68776 - protein, 35 aa, Artificial Sequence; identical to SEQ ID NO: 6375
  GFR-binding peptide
  MOD_RES (4), (5): Xaa is C or S

SEQ ID NO: 68777 - protein, 39 aa, Artificial Sequence
  GFR-binding peptide
  MOD_RES (4), (5), (38): Xaa is C or S
  MOD_RES (19), (20), (21), (22), (23): Xaa is A or G
  MOD_RES (24), (25), (26), (27): Xaa is A or G or is absent
PSTXXAPVKTEPISMLYLXXXXXXXXXKFKYEMIVEEXG

SEQ ID NO: 68778 - protein, 38 aa, Artificial Sequence; identical to SEQ ID NO: 27513
  GFR-binding peptide
  MOD_RES (2), (3), (37): Xaa is C or S
  MOD_RES (17), (18), (19), (20), (21): Xaa is A or G
  MOD_RES (22), (23), (24), (25): Xaa is A or G or is absent

SEQ ID NO: 68779 - protein, 35 aa, Artificial Sequence; identical to SEQ ID NO: 27514
  GFR-binding peptide
  MOD_RES (1), (35): Xaa is C or S
  MOD_RES (15), (16), (17), (18), (19): Xaa is A or G
  MOD_RES (20), (21), (22), (23): Xaa is A or G or is absent

SEQ ID NO: 68780 - protein, 36 aa, Artificial Sequence; identical to SEQ ID NO: 6376
  GFR-binding peptide
  MOD_RES (3), (4): Xaa is C or S
  MOD_RES (18), (19), (20), (21), (22): Xaa is A or G
  MOD_RES (23), (24), (25), (26): Xaa is A or G or is absent

SEQ ID NO: 68781 - protein, 37 aa, Artificial Sequence
  GFR-binding peptide
  MOD_RES (3), (4), (36): Xaa is C or S
EPXXVPEKMSPISILYKDENKNVVLKYHYNMTVESXA

SEQ ID NO: 68782 - protein, 41 aa, Artificial Sequence; identical to SEQ ID NO: 32540
  GFR-binding peptide
  MOD_RES (6), (7), (41): Xaa is C or S
  MOD_RES (21), (22), (23), (24), (25): Xaa is A or G
  MOD_RES (26), (27), (28), (29): Xaa is A or G or is absent

SEQ ID NO: 68783 - protein, 33 aa, Artificial Sequence; identical to SEQ ID NO: 27520
  GFR-binding peptide
  MOD_RES (32), (32): Xaa is C or S

SEQ ID NO: 68784 - protein, 33 aa, Artificial Sequence; identical to SEQ ID NO: 32541
  GFR-binding peptide
  MOD_RES (1), (33): Xaa is C or S

SEQ ID NO: 68785 - protein, 42 aa, Artificial Sequence; identical to SEQ ID NO: 32550
  GFR-binding peptide
  MOD_RES (5), (6), (40), (42): Xaa is C or S
  MOD_RES (20), (21), (22), (23), (24): Xaa is A or G
  MOD_RES (25), (26), (27), (28): Xaa is A or G or is absent

SEQ ID NO: 68786 - protein, 30 aa, Artificial Sequence; identical to SEQ ID NO: 27528
  GFR-binding peptide

SEQ ID NO: 68787 - protein, 34 aa, Artificial Sequence; identical to SEQ ID NO: 6389
  GFR-binding peptide
  MOD_RES (2), (3), (34): Xaa is C or S

SEQ ID NO: 68788 - protein, 41 aa, Artificial Sequence; identical to SEQ ID NO: 13777
  GFR-binding peptide
  MOD_RES (5), (6), (38), (40): Xaa is C or S

SEQ ID NO: 68789 - protein, 38 aa, Artificial Sequence; identical to SEQ ID NO: 32558
  GFR-binding peptide
  MOD_RES (2), (3), (35), (37): Xaa is C or S

SEQ ID NO: 68790 - protein, 34 aa, Artificial Sequence; identical to SEQ ID NO: 6396
  GFR-binding peptide
  MOD_RES (31), (33): Xaa is C or S

SEQ ID NO: 68791 - protein, 34 aa, Artificial Sequence; identical to SEQ ID NO: 6397
  GFR-binding peptide
  MOD_RES (1), (1): Xaa is C or S
  MOD_RES (15), (16), (17), (18), (19): Xaa is A or G
  MOD_RES (20), (21), (22), (23): Xaa is A or G or is absent

SEQ ID NO: 68792 - protein, 35 aa, Artificial Sequence; identical to SEQ ID NO: 27540
  GFR-binding peptide
  MOD_RES (1), (33), (35): Xaa is C or S

SEQ ID NO: 68793 - protein, 36 aa, Artificial Sequence
  GFR-binding peptide
  MOD_RES (1), (35): Xaa is C or S
  MOD_RES (15), (16), (17), (18), (19): Xaa is A or G
  MOD_RES (20), (21), (22), (23): Xaa is A or G or is absent
XVPTRLSATSILYYXXXXXXXXXLRKHRDMVVESXG

SEQ ID NO: 68794 - protein, 41 aa, Artificial Sequence
  GFR-binding peptide
  MOD_RES (6), (7), (40): Xaa is C or S
  MOD_RES (21), (22), (23), (24), (25): Xaa is A or G
  MOD_RES (26), (27), (28), (29): Xaa is A or G or is absent
ASASPXXVSQDLSPINILYFXXXXXXXXXYGKIPMIVKSXK

SEQ ID NO: 68795 - protein, 38 aa, Artificial Sequence; identical to SEQ ID NO: 27544
  GFR-binding peptide
  MOD_RES (3), (4), (37): Xaa is C or S
  MOD_RES (18), (19), (20), (21), (22): Xaa is A or G
  MOD_RES (23), (24), (25), (26): Xaa is A or G or is absent

SEQ ID NO: 68796 - protein, 39 aa, Artificial Sequence; identical to SEQ ID NO: 27547
  GFR-binding peptide
  MOD_RES (1), (2), (36), (38): Xaa is C or S
  MOD_RES (16), (17), (18), (19), (20): Xaa is A or G
  MOD_RES (21), (22), (23), (24): Xaa is A or G or is absent

SEQ ID NO: 68797 - protein, 39 aa, Artificial Sequence; identical to SEQ ID NO: 32568
  GFR-binding peptide
  MOD_RES (1), (2), (36), (38): Xaa is C or S
  MOD_RES (16), (17), (18), (19), (20): Xaa is A or G
  MOD_RES (21), (22), (23), (24): Xaa is A or G or is absent

SEQ ID NO: 68798 - protein, 37 aa, Artificial Sequence
  GFR-binding peptide
  MOD_RES (5), (6): Xaa is C or S
TPPTXXVPTRLSATSILYYDSANNVVLRKHRDMVVES

SEQ ID NO: 68799 - protein, 38 aa, Artificial Sequence; identical to SEQ ID NO: 6412
  GFR-binding peptide
  MOD_RES (4), (5): Xaa is C or S
  MOD_RES (19), (20), (21), (22), (23): Xaa is A or G
  MOD_RES (24), (25), (26), (27): Xaa is A or G or is absent

SEQ ID NO: 68800 - protein, 39 aa, Artificial Sequence
  GFR-binding peptide
  MOD_RES (5), (6): Xaa is C or S
  MOD_RES (20), (21), (22), (23), (24): Xaa is A or G
  MOD_RES (25), (26), (27), (28): Xaa is A or G or is absent
IPEPXXVPEKMEPISILYLXXXXXXXXXKFKYENMTVES

SEQ ID NO: 68801 - protein, 41 aa, Artificial Sequence
  GFR-binding peptide
  MOD_RES (6), (7), (41): Xaa is C or S
  MOD_RES (21), (22), (23), (24), (25): Xaa is A or G
  MOD_RES (26), (27), (28), (29): Xaa is A or G or is absent
STPPTXXVPTRLSPISILYKXXXXXXXXXLKYHYDMVVESX

SEQ ID NO: 68802 - protein, 35 aa, Artificial Sequence
  GFR-binding peptide
  MOD_RES (2), (3): Xaa is C or S
  MOD_RES (17), (18), (19), (20), (21): Xaa is A or G
  MOD_RES (22), (23), (24), (25): Xaa is A or G or is absent
PXXVSQDLSPINILYFXXXXXXXXXYGKIPMIVKS

SEQ ID NO: 68803 - protein, 36 aa, Artificial Sequence; identical to SEQ ID NO: 6416
  GFR-binding peptide
  MOD_RES (1), (35): Xaa is C or S
  MOD_RES (15), (16), (17), (18), (19): Xaa is A or G
  MOD_RES (20), (21), (22), (23): Xaa is A or G or is absent

SEQ ID NO: 68804 - protein, 34 aa, Artificial Sequence; identical to SEQ ID NO: 13795
  GFR-binding peptide
  MOD_RES (32), (34): Xaa is C or S

SEQ ID NO: 68805 - protein, 40 aa, Artificial Sequence
  GFR-binding peptide
  MOD_RES (5), (6), (40): Xaa is C or S
  MOD_RES (20), (21), (22), (23), (24): Xaa is A or G
  MOD_RES (25), (26), (27), (28): Xaa is A or G or is absent
IPEPXXVPEKMSATSILYYXXXXXXXXXLRKHRNMTVESX

SEQ ID NO: 68806 - protein, 36 aa, Artificial Sequence; identical to SEQ ID NO: 32585
  GFR-binding peptide
  MOD_RES (1), (35): Xaa is C or S
  MOD_RES (15), (16), (17), (18), (19): Xaa is A or G
  MOD_RES (20), (21), (22), (23): Xaa is A or G or is absent

SEQ ID NO: 68807 - protein, 33 aa, Artificial Sequence; identical to SEQ ID NO: 27561
  GFR-binding peptide
  MOD_RES (33), (33): Xaa is C or S
  MOD_RES (14), (15), (16), (17), (18): Xaa is A or G
  MOD_RES (19), (20), (21), (22): Xaa is A or G or is absent

SEQ ID NO: 68808 - protein, 35 aa, Artificial Sequence
  GFR-binding peptide
  MOD_RES (32), (34): Xaa is C or S
VPEKMEPISILYLDENKNVVKFKYENMTVESXAXR

SEQ ID NO: 68809 - protein, 38 aa, Artificial Sequence; identical to SEQ ID NO: 27562
  GFR-binding peptide
  MOD_RES (3), (4), (36), (38): Xaa is C or S

SEQ ID NO: 68810 - protein, 37 aa, Artificial Sequence
  GFR-binding peptide
  MOD_RES (2), (3), (34), (36): Xaa is C or S
TXXAPVKTEPISMLYLDNGRVLLKFKYEMIVEEXGXL

SEQ ID NO: 68811 - protein, 35 aa, Artificial Sequence
  GFR-binding peptide
  MOD_RES (32), (34): Xaa is C or S
TPTKMSATSMLYYNDKQQIILRKHRGMVVDRXGXS

SEQ ID NO: 68812 - protein, 32 aa, Artificial Sequence; identical to SEQ ID NO: 32590
  GFR-binding peptide
  MOD_RES (14), (15), (16), (17), (18): Xaa is A or G
  MOD_RES (19), (20), (21), (22): Xaa is A or G or is absent

SEQ ID NO: 68813 - protein, 41 aa, Artificial Sequence; identical to SEQ ID NO: 27567
  GFR-binding peptide
  MOD_RES (6), (7), (41): Xaa is C or S
  MOD_RES (21), (22), (23), (24), (25): Xaa is A or G
  MOD_RES (26), (27), (28), (29): Xaa is A or G or is absent

SEQ ID NO: 68814 - protein, 38 aa, Artificial Sequence; identical to SEQ ID NO: 27570
  GFR-binding peptide
  MOD_RES (3), (4), (36), (38): Xaa is C or S

SEQ ID NO: 68815 - protein, 39 aa, Artificial Sequence; identical to SEQ ID NO: 32594
  GFR-binding peptide
  MOD_RES (5), (6), (39): Xaa is C or S
  MOD_RES (20), (21), (22), (23), (24): Xaa is A or G
  MOD_RES (25), (26), (27), (28): Xaa is A or G or is absent

SEQ ID NO: 68816 - protein, 41 aa, Artificial Sequence
  GFR-binding peptide
  MOD_RES (5), (6), (38), (40): Xaa is C or S
SAGPXXTPTKMSATSMLYYNDKQQIILRKHRGMVVDRXGXS

SEQ ID NO: 68817 - protein, 43 aa, Artificial Sequence; identical to SEQ ID NO: 27572
  GFR-binding peptide
  MOD_RES (6), (7), (40), (42): Xaa is C or S
  MOD_RES (21), (22), (23), (24), (25): Xaa is A or G
  MOD_RES (26), (27), (28), (29): Xaa is A or G or is absent

SEQ ID NO: 68818 - protein, 34 aa, Artificial Sequence
  GFR-binding peptide
  MOD_RES (1), (1): Xaa is C or S
  MOD_RES (15), (16), (17), (18), (19): Xaa is A or G
  MOD_RES (20), (21), (22), (23): Xaa is A or G or is absent
XVPEKMSPINILYFXXXXXXXXXYGKIPNMTVES

SEQ ID NO: 68819 - protein, 41 aa, Artificial Sequence; identical to SEQ ID NO: 27574
  GFR-binding peptide
  MOD_RES (5), (6), (40): Xaa is C or S
  MOD_RES (20), (21), (22), (23), (24): Xaa is A or G
  MOD_RES (25), (26), (27), (28): Xaa is A or G or is absent

SEQ ID NO: 68820 - protein, 36 aa, Artificial Sequence; identical to SEQ ID NO: 27578
  GFR-binding peptide
  MOD_RES (4), (5), (36): Xaa is C or S

SEQ ID NO: 68821 - protein, 32 aa, Artificial Sequence; identical to SEQ ID NO: 13813
  GFR-binding peptide
  MOD_RES (1), (2): Xaa is C or S

SEQ ID NO: 68822 - protein, 37 aa, Artificial Sequence; identical to SEQ ID NO: 32603
  GFR-binding peptide
  MOD_RES (1), (34), (36): Xaa is C or S

SEQ ID NO: 68823 - protein, 41 aa, Artificial Sequence; identical to SEQ ID NO: 6435
  GFR-binding peptide
  MOD_RES (4), (5), (39), (41): Xaa is C or S
  MOD_RES (19), (20), (21), (22), (23): Xaa is A or G
  MOD_RES (24), (25), (26), (27): Xaa is A or G or is absent

SEQ ID NO: 68824 - protein, 40 aa, Artificial Sequence
  GFR-binding peptide
  MOD_RES (5), (6), (39): Xaa is C or S
  MOD_RES (20), (21), (22), (23), (24): Xaa is A or G
  MOD_RES (25), (26), (27), (28): Xaa is A or G or is absent
SAAPXXVPQALSPINILYFXXXXXXXXXYGKIPMIVRSXK

SEQ ID NO: 68825 - protein, 41 aa, Artificial Sequence; identical to SEQ ID NO: 6436
  GFR-binding peptide
  MOD_RES (5), (6), (38), (40): Xaa is C or S

SEQ ID NO: 68826 - protein, 35 aa, Artificial Sequence; identical to SEQ ID NO: 27582
  GFR-binding peptide
  MOD_RES (4), (5): Xaa is C or S

SEQ ID NO: 68827 - protein, 40 aa, Artificial Sequence; identical to SEQ ID NO: 27583
  GFR-binding peptide
  MOD_RES (2), (3), (37), (39): Xaa is C or S
  MOD_RES (17), (18), (19), (20), (21): Xaa is A or G
  MOD_RES (22), (23), (24), (25): Xaa is A or G or is absent

SEQ ID NO: 68828 - protein, 35 aa, Artificial Sequence; identical to SEQ ID NO: 6439
  GFR-binding peptide
  MOD_RES (1), (2), (34): Xaa is C or S

SEQ ID NO: 68829 - protein, 35 aa, Artificial Sequence; identical to SEQ ID NO: 6440
  GFR-binding peptide
  MOD_RES (3), (4): Xaa is C or S

SEQ ID NO: 68830 - protein, 40 aa, Artificial Sequence
  GFR-binding peptide
  MOD_RES (4), (5), (37), (39): Xaa is C or S
PEPXXVPEKMEPISILYLDENKNVVKFKYENMTVESXAXR

SEQ ID NO: 68831 - protein, 33 aa, Artificial Sequence
  GFR-binding peptide
  MOD_RES (1), (32): Xaa is C or S
XAPVKTEPISMLYLDNGRVLLKFKYEMIVEEXG

SEQ ID NO: 68832 - protein, 41 aa, Artificial Sequence; identical to SEQ ID NO: 32612
  GFR-binding peptide
  MOD_RES (5), (39), (41): Xaa is C or S
  MOD_RES (19), (20), (21), (22), (23): Xaa is A or G
  MOD_RES (24), (25), (26), (27): Xaa is A or G or is absent

SEQ ID NO: 68833 - protein, 40 aa, Artificial Sequence; identical to SEQ ID NO: 27590
  GFR-binding peptide
  MOD_RES (6), (40): Xaa is C or S
  MOD_RES (20), (21), (22), (23), (24): Xaa is A or G
  MOD_RES (25), (26), (27), (28): Xaa is A or G or is absent

SEQ ID NO: 68834 - protein, 43 aa, Artificial Sequence
  GFR-binding peptide
  MOD_RES (6), (7), (41), (43): Xaa is C or S
  MOD_RES (21), (22), (23), (24), (25): Xaa is A or G
  MOD_RES (26), (27), (28), (29): Xaa is A or G or is absent
HVPKPXXAPTKLEPISVLYLXXXXXXXXXKFKYENMVVRSXGX

SEQ ID NO: 68835 - protein, 35 aa, Artificial Sequence; identical to SEQ ID NO: 6447
  GFR-binding peptide
  MOD_RES (33), (35): Xaa is C or S
  MOD_RES (14), (15), (16), (17), (18): Xaa is A or G
  MOD_RES (19), (20), (21), (22): Xaa is A or G or is absent

SEQ ID NO: 68836 - protein, 35 aa, Artificial Sequence
  GFR-binding peptide
  MOD_RES (2), (3), (35): Xaa is C or S
PXXVPEKMSATSILYYDENKNVVLRKHRNMTVESX

SEQ ID NO: 68837 - protein, 43 aa, Artificial Sequence; identical to SEQ ID NO: 32617
  GFR-binding peptide
  MOD_RES (6), (40), (42): Xaa is C or S
  MOD_RES (20), (21), (22), (23), (24): Xaa is A or G
  MOD_RES (25), (26), (27), (28): Xaa is A or G or is absent

SEQ ID NO: 68838 - protein, 34 aa, Artificial Sequence; identical to SEQ ID NO: 6449
  GFR-binding peptide
  MOD_RES (31), (33): Xaa is C or S

SEQ ID NO: 68839 - protein, 33 aa, Artificial Sequence; identical to SEQ ID NO: 32619
  GFR-binding peptide
  MOD_RES (1), (1): Xaa is C or S
  MOD_RES (15), (16), (17), (18), (19): Xaa is A or G
  MOD_RES (20), (21), (22), (23): Xaa is A or G or is absent

SEQ ID NO: 68840 - protein, 36 aa, Artificial Sequence; identical to SEQ ID NO: 6451
  GFR-binding peptide
  MOD_RES (1), (34), (36): Xaa is C or S
  MOD_RES (15), (16), (17), (18), (19): Xaa is A or G
  MOD_RES (20), (21), (22), (23): Xaa is A or G or is absent

SEQ ID NO: 68841 - protein, 37 aa, Artificial Sequence; identical to SEQ ID NO: 27598
  GFR-binding peptide
  MOD_RES (4), (36): Xaa is C or S

SEQ ID NO: 68842 - protein, 38 aa, Artificial Sequence; identical to SEQ ID NO: 6452
  GFR-binding peptide
  MOD_RES (3), (4), (36), (38): Xaa is C or S

SEQ ID NO: 68843 - protein, 38 aa, Artificial Sequence
  GFR-binding peptide
  MOD_RES (3), (4), (35), (37): Xaa is C or S
STXXAPVKTSPISMLYKDNGRVLLLKYHYMIVEEXGXL

SEQ ID NO: 68844 - protein, 41 aa, Artificial Sequence
  GFR-binding peptide
  MOD_RES (6), (7), (38), (40): Xaa is C or S
ASASPXXVSQDLSPINILYFIGKTPKIYGKIPMIVKSXKXS

SEQ ID NO: 68845 - protein, 33 aa, Artificial Sequence; identical to SEQ ID NO: 32623
  GFR-binding peptide
  MOD_RES (1), (1): Xaa is C or S
  MOD_RES (15), (16), (17), (18), (19): Xaa is A or G
  MOD_RES (20), (21), (22), (23): Xaa is A or G or is absent

SEQ ID NO: 68846 - protein, 41 aa, Artificial Sequence; identical to SEQ ID NO: 32626
  GFR-binding peptide
  MOD_RES (5), (6), (40): Xaa is C or S
  MOD_RES (20), (21), (22), (23), (24): Xaa is A or G
  MOD_RES (25), (26), (27), (28): Xaa is A or G or is absent

SEQ ID NO: 68847 - protein, 36 aa, Artificial Sequence
  GFR-binding peptide
  MOD_RES (4), (5): Xaa is C or S
PASXXVPARLSATSILYYDAANNVVLRKHRDMVVEA

SEQ ID NO: 68848 - protein, 36 aa, Artificial Sequence; identical to SEQ ID NO: 6455
  GFR-binding peptide
  MOD_RES (1), (34), (36): Xaa is C or S
  MOD_RES (15), (16), (17), (18), (19): Xaa is A or G
  MOD_RES (20), (21), (22), (23): Xaa is A or G or is absent

SEQ ID NO: 68849 - protein, 40 aa, Artificial Sequence; identical to SEQ ID NO: 27607
  GFR-binding peptide
  MOD_RES (2), (3), (37), (39): Xaa is C or S
  MOD_RES (17), (18), (19), (20), (21): Xaa is A or G
  MOD_RES (22), (23), (24), (25): Xaa is A or G or is absent

SEQ ID NO: 68850 - protein, 38 aa, Artificial Sequence
  GFR-binding peptide
  MOD_RES (6), (7), (38): Xaa is C or S
RVPSTXXAPVKTSPISMLYKDNGRVLLLKYHYMIVEEX

SEQ ID NO: 68851 - protein, 42 aa, Artificial Sequence
  GFR-binding peptide
  MOD_RES (6), (7), (41): Xaa is C or S
  MOD_RES (21), (22), (23), (24), (25): Xaa is A or G
  MOD_RES (26), (27), (28), (29): Xaa is A or G or is absent
GIPEPXXVPEKMNAISILYFXXXXXXXXXLKKYRNMTVESXA

SEQ ID NO: 68852 - protein, 39 aa, Artificial Sequence; identical to SEQ ID NO: 27611
  GFR-binding peptide
  MOD_RES (3), (4), (36), (38): Xaa is C or S

SEQ ID NO: 68853 - protein, 37 aa, Artificial Sequence; identical to SEQ ID NO: 27612
  GFR-binding peptide
  MOD_RES (1), (35), (37): Xaa is C or S
  MOD_RES (15), (16), (17), (18), (19): Xaa is A or G
  MOD_RES (20), (21), (22), (23): Xaa is A or G or is absent

SEQ ID NO: 68854 - protein, 34 aa, Artificial Sequence; identical to SEQ ID NO: 6459
  GFR-binding peptide
  MOD_RES (33), (33): Xaa is C or S
  MOD_RES (14), (15), (16), (17), (18): Xaa is A or G
  MOD_RES (19), (20), (21), (22): Xaa is A or G or is absent

SEQ ID NO: 68855 - protein, 40 aa, Artificial Sequence
  GFR-binding peptide
  MOD_RES (5), (6), (38), (40): Xaa is C or S
TPPTXXVPTRLEPISILYLDSANNVVKFKYEDMVVESXGX

SEQ ID NO: 68856 - protein, 35 aa, Artificial Sequence; identical to SEQ ID NO: 6462
  GFR-binding peptide
  MOD_RES (33), (35): Xaa is C or S
  MOD_RES (14), (15), (16), (17), (18): Xaa is A or G
  MOD_RES (19), (20), (21), (22): Xaa is A or G or is absent

SEQ ID NO: 68857 - protein, 32 aa, Artificial Sequence; identical to SEQ ID NO: 27617
  GFR-binding peptide
  MOD_RES (14), (15), (16), (17), (18): Xaa is A or G
  MOD_RES (19), (20), (21), (22): Xaa is A or G or is absent

SEQ ID NO: 68858 - protein, 37 aa, Artificial Sequence; identical to SEQ ID NO: 27620
  GFR-binding peptide
  MOD_RES (3), (4): Xaa is C or S
  MOD_RES (18), (19), (20), (21), (22): Xaa is A or G
  MOD_RES (23), (24), (25), (26): Xaa is A or G or is absent

SEQ ID NO: 68859 - protein, 42 aa, Artificial Sequence; identical to SEQ ID NO: 6466
  GFR-binding peptide
  MOD_RES (4), (5), (39), (41): Xaa is C or S
  MOD_RES (19), (20), (21), (22), (23): Xaa is A or G
  MOD_RES (24), (25), (26), (27): Xaa is A or G or is absent

SEQ ID NO: 68860 - protein, 37 aa, Artificial Sequence
  GFR-binding peptide
  MOD_RES (3), (4): Xaa is C or S
  MOD_RES (18), (19), (20), (21), (22): Xaa is A or G
  MOD_RES (23), (24), (25), (26): Xaa is A or G or is absent
GPXXTPTKMSPISMLYKXXXXXXXXXLKYHYGMVVDR

SEQ ID NO: 68861 - protein, 38 aa, Artificial Sequence; identical to SEQ ID NO: 6467
  GFR-binding peptide
  MOD_RES (2), (3), (36), (38): Xaa is C or S
  MOD_RES (17), (18), (19), (20), (21): Xaa is A or G
  MOD_RES (22), (23), (24), (25): Xaa is A or G or is absent

SEQ ID NO: 68862 - protein, 41 aa, Artificial Sequence; identical to SEQ ID NO: 32648
  GFR-binding peptide
  MOD_RES (6), (7): Xaa is C or S
  MOD_RES (21), (22), (23), (24), (25): Xaa is A or G
  MOD_RES (26), (27), (28), (29): Xaa is A or G or is absent

SEQ ID NO: 68863 - protein, 38 aa, Artificial Sequence; identical to SEQ ID NO: 6474
  GFR-binding peptide
  MOD_RES (4), (5), (38): Xaa is C or S
  MOD_RES (19), (20), (21), (22), (23): Xaa is A or G
  MOD_RES (24), (25), (26), (27): Xaa is A or G or is absent

SEQ ID NO: 68864 - protein, 38 aa, Artificial Sequence
  GFR-binding peptide
  MOD_RES (5), (6): Xaa is C or S
  MOD_RES (20), (21), (22), (23), (24): Xaa is A or G
  MOD_RES (25), (26), (27), (28): Xaa is A or G or is absent
IPEPXXVPEKMSPINILYFXXXXXXXXXYGKIPNMTVE

SEQ ID NO: 68865 - protein, 38 aa, Artificial Sequence
  GFR-binding peptide
  MOD_RES (6), (7), (38): Xaa is C or S
ASASPXXVSQDLSPINILYFIGKTPKIYGKIPMIVKSX

SEQ ID NO: 68866 - protein, 38 aa, Artificial Sequence; identical to SEQ ID NO: 27635
  GFR-binding peptide
  MOD_RES (4), (5), (37): Xaa is C or S

SEQ ID NO: 68867 - protein, 36 aa, Artificial Sequence
  GFR-binding peptide
  MOD_RES (1), (2), (36): Xaa is C or S
  MOD_RES (16), (17), (18), (19), (20): Xaa is A or G
  MOD_RES (21), (22), (23), (24): Xaa is A or G or is absent
XXVPEKMSATSILYYXXXXXXXXXLRKHRNMTVESX

SEQ ID NO: 68868 - protein, 32 aa, Artificial Sequence
  GFR-binding peptide
  MOD_RES (32), (32): Xaa is C or S
TPTKMSPISMLYKNDKQQIILKYHYGMVVDRX

SEQ ID NO: 68869 - protein, 40 aa, Artificial Sequence
  GFR-binding peptide
  MOD_RES (6), (7), (38), (40): Xaa is C or S
RVPSTXXAPVKTSATSMLYYDNGRVLLLRKHRMIVEEXGX

SEQ ID NO: 68870 - protein, 36 aa, Artificial Sequence
  GFR-binding peptide
  MOD_RES (3), (4), (36): Xaa is C or S
GPXXTPTKMSPISMLYKNDKQQIILKYHYGMVVDRX

SEQ ID NO: 68871 - protein, 35 aa, Artificial Sequence; identical to SEQ ID NO: 27643
  GFR-binding peptide
  MOD_RES (3), (4): Xaa is C or S

SEQ ID NO: 68872 - protein, 41 aa, Artificial Sequence; identical to SEQ ID NO: 6485
  GFR-binding peptide
  MOD_RES (5), (6), (40): Xaa is C or S
  MOD_RES (20), (21), (22), (23), (24): Xaa is A or G
  MOD_RES (25), (26), (27), (28): Xaa is A or G or is absent

SEQ ID NO: 68873 - protein, 39 aa, Artificial Sequence; identical to SEQ ID NO: 27645
  GFR-binding peptide
  MOD_RES (5), (6): Xaa is C or S
  MOD_RES (20), (21), (22), (23), (24): Xaa is A or G
  MOD_RES (25), (26), (27), (28): Xaa is A or G or is absent

SEQ ID NO: 68874 - protein, 40 aa, Artificial Sequence; identical to SEQ ID NO: 32662
  GFR-binding peptide
  MOD_RES (3), (4), (38), (40): Xaa is C or S
  MOD_RES (18), (19), (20), (21), (22): Xaa is A or G
  MOD_RES (23), (24), (25), (26): Xaa is A or G or is absent

SEQ ID NO: 68875 - protein, 40 aa, Artificial Sequence; identical to SEQ ID NO: 32663
  GFR-binding peptide
  MOD_RES (5), (6), (39): Xaa is C or S

SEQ ID NO: 68876 - protein, 36 aa, Artificial Sequence; identical to SEQ ID NO: 6488
  GFR-binding peptide
  MOD_RES (4), (5): Xaa is C or S

SEQ ID NO: 68877 - protein, 33 aa, Artificial Sequence
  GFR-binding peptide
  MOD_RES (1), (1): Xaa is C or S
  MOD_RES (15), (16), (17), (18), (19): Xaa is A or G
  MOD_RES (20), (21), (22), (23): Xaa is A or G or is absent
XVPEKMSATSILYYXXXXXXXXXLRKHRNMTVE

SEQ ID NO: 68878 - protein, 41 aa, Artificial Sequence
  GFR-binding peptide
  MOD_RES (6), (7), (41): Xaa is C or S
  MOD_RES (21), (22), (23), (24), (25): Xaa is A or G
  MOD_RES (26), (27), (28), (29): Xaa is A or G or is absent
GIPEPXXVPEKMEPISILYLXXXXXXXXXKFKYENMTVESX

SEQ ID NO: 68879 - protein, 41 aa, Artificial Sequence; identical to SEQ ID NO: 27651
  GFR-binding peptide
  MOD_RES (5), (6), (38), (40): Xaa is C or S

SEQ ID NO: 68880 - protein, 38 aa, Artificial Sequence; identical to SEQ ID NO: 27652
  GFR-binding peptide
  MOD_RES (2), (3), (36), (38): Xaa is C or S

SEQ ID NO: 68881 - protein, 36 aa, Artificial Sequence; identical to SEQ ID NO: 27653
  GFR-binding peptide
  MOD_RES (1), (2), (35): Xaa is C or S
  MOD_RES (16), (17), (18), (19), (20): Xaa is A or G
  MOD_RES (21), (22), (23), (24): Xaa is A or G or is absent

SEQ ID NO: 68882 - protein, 33 aa, Artificial Sequence; identical to SEQ ID NO: 32670
  GFR-binding peptide
  MOD_RES (2), (3): Xaa is C or S

SEQ ID NO: 68883 - protein, 40 aa, Artificial Sequence; identical to SEQ ID NO: 27654
  GFR-binding peptide
  MOD_RES (4), (5), (37), (39): Xaa is C or S

SEQ ID NO: 68884 - protein, 32 aa, Artificial Sequence; identical to SEQ ID NO: 6491
  GFR-binding peptide
  MOD_RES (14), (15), (16), (17), (18): Xaa is A or G
  MOD_RES (19), (20), (21), (22): Xaa is A or G or is absent

SEQ ID NO: 68885 - protein, 38 aa, Artificial Sequence; identical to SEQ ID NO: 27659
  GFR-binding peptide
  MOD_RES (2), (3), (37): Xaa is C or S
  MOD_RES (17), (18), (19), (20), (21): Xaa is A or G
  MOD_RES (22), (23), (24), (25): Xaa is A or G or is absent

SEQ ID NO: 68886 - protein, 35 aa, Artificial Sequence; identical to SEQ ID NO: 32672
  GFR-binding peptide
  MOD_RES (34), (34): Xaa is C or S
  MOD_RES (14), (15), (16), (17), (18): Xaa is A or G
  MOD_RES (19), (20), (21), (22): Xaa is A or G or is absent

SEQ ID NO: 68887 - protein, 40 aa, Artificial Sequence; identical to SEQ ID NO: 32675
  GFR-binding peptide
  MOD_RES (3), (4), (37), (39): Xaa is C or S
  MOD_RES (18), (19), (20), (21), (22): Xaa is A or G
  MOD_RES (23), (24), (25), (26): Xaa is A or G or is absent

SEQ ID NO: 68888 - protein, 37 aa, Artificial Sequence; identical to SEQ ID NO: 32676
  GFR-binding peptide
  MOD_RES (1), (2), (36): Xaa is C or S
  MOD_RES (16), (17), (18), (19), (20): Xaa is A or G
  MOD_RES (21), (22), (23), (24): Xaa is A or G or is absent

SEQ ID NO: 68889 - protein, 41 aa, Artificial Sequence; identical to SEQ ID NO: 57579
  GFR-binding peptide
  MOD_RES (4), (5), (38), (40): Xaa is C or S
  MOD_RES (19), (20), (21), (22), (23): Xaa is A or G
  MOD_RES (24), (25), (26), (27): Xaa is A or G or is absent

SEQ ID NO: 68890 - protein, 35 aa, Artificial Sequence; identical to SEQ ID NO: 6494
  GFR-binding peptide
  MOD_RES (1), (32), (34): Xaa is C or S

SEQ ID NO: 68891 - protein, 42 aa, Artificial Sequence
  GFR-binding peptide
  MOD_RES (4), (5), (39), (41): Xaa is C or S
  MOD_RES (19), (20), (21), (22), (23): Xaa is A or G
  MOD_RES (24), (25), (26), (27): Xaa is A or G or is absent
PEPXXVPEKMSPINILYFXXXXXXXXXYGKIPNMTVESXAXR

SEQ ID NO: 68892 - protein, 36 aa, Artificial Sequence; identical to SEQ ID NO: 6495
  GFR-binding peptide
  MOD_RES (3), (35): Xaa is C or S

SEQ ID NO: 68893 - protein, 32 aa, Artificial Sequence
  GFR-binding peptide
  MOD_RES (1), (1): Xaa is C or S
XVPEKMNAISILYFDENKNVVLKKYRNMTVES

SEQ ID NO: 68894 - protein, 32 aa, Artificial Sequence; identical to SEQ ID NO: 6496
  GFR-binding peptide
  MOD_RES (14), (15), (16), (17), (18): Xaa is A or G
  MOD_RES (19), (20), (21), (22): Xaa is A or G or is absent

SEQ ID NO: 68895 - protein, 39 aa, Artificial Sequence; identical to SEQ ID NO: 6497
  GFR-binding peptide
  MOD_RES (1), (2), (37), (39): Xaa is C or S
  MOD_RES (16), (17), (18), (19), (20): Xaa is A or G
  MOD_RES (21), (22), (23), (24): Xaa is A or G or is absent

SEQ ID NO: 68896 - protein, 33 aa, Artificial Sequence
  GFR-binding peptide
  MOD_RES (1), (2), (33): Xaa is C or S
XXVSQDLSPINILYFIGKTPKIYGKIPMIVKSX

SEQ ID NO: 68897 - protein, 32 aa, Artificial Sequence
  GFR-binding peptide
  MOD_RES (1), (2): Xaa is C or S
XXVPQDLSPINILYFVGRTPKVYGKIPMVVKS

SEQ ID NO: 68898 - protein, 38 aa, Artificial Sequence
  GFR-binding peptide
  MOD_RES (1), (2), (35), (37): Xaa is C or S
  MOD_RES (16), (17), (18), (19), (20): Xaa is A or G
  MOD_RES (21), (22), (23), (24): Xaa is A or G or is absent
XXVPQDLSPINILYFXXXXXXXXXYGKIPMVVKSXKXS

SEQ ID NO: 68899 - protein, 43 aa, Artificial Sequence; identical to SEQ ID NO: 6499
  GFR-binding peptide
  MOD_RES (5), (6), (40), (42): Xaa is C or S
  MOD_RES (20), (21), (22), (23), (24): Xaa is A or G
  MOD_RES (25), (26), (27), (28): Xaa is A or G or is absent

SEQ ID NO: 68900 - protein, 35 aa, Artificial Sequence; identical to SEQ ID NO: 6500
  GFR-binding peptide
  MOD_RES (2), (3): Xaa is C or S
  MOD_RES (17), (18), (19), (20), (21): Xaa is A or G
  MOD_RES (22), (23), (24), (25): Xaa is A or G or is absent

SEQ ID NO: 68901 - protein, 36 aa, Artificial Sequence; identical to SEQ ID NO: 27666
  GFR-binding peptide
  MOD_RES (1), (33), (35): Xaa is C or S

SEQ ID NO: 68902 - protein, 30 aa, Artificial Sequence; identical to SEQ ID NO: 27667
  GFR-binding peptide

SEQ ID NO: 68903 - protein, 36 aa, Artificial Sequence
  GFR-binding peptide
  MOD_RES (2), (3), (35): Xaa is C or S
PXXVPEKMEPISILYLDENKNVVKFKYENMTVESXA

SEQ ID NO: 68904 - protein, 39 aa, Artificial Sequence; identical to SEQ ID NO: 32691
  GFR-binding peptide
  MOD_RES (4), (5), (39): Xaa is C or S
  MOD_RES (19), (20), (21), (22), (23): Xaa is A or G
  MOD_RES (24), (25), (26), (27): Xaa is A or G or is absent

SEQ ID NO: 68905 - protein, 42 aa, Artificial Sequence; identical to SEQ ID NO: 6509
  GFR-binding peptide
  MOD_RES (5), (6), (39), (41): Xaa is C or S
  MOD_RES (20), (21), (22), (23), (24): Xaa is A or G
  MOD_RES (25), (26), (27), (28): Xaa is A or G or is absent

SEQ ID NO: 68906 - protein, 33 aa, Artificial Sequence; identical to SEQ ID NO: 6510
  GFR-binding peptide
  MOD_RES (2), (3): Xaa is C or S

SEQ ID NO: 68907 - protein, 33 aa, Artificial Sequence; identical to SEQ ID NO: 27674
  GFR-binding peptide
  MOD_RES (1), (2): Xaa is C or S

SEQ ID NO: 68908 - protein, 36 aa, Artificial Sequence; identical to SEQ ID NO: 6516
  GFR-binding peptide
  MOD_RES (3), (4): Xaa is C or S
  MOD_RES (18), (19), (20), (21), (22): Xaa is A or G
  MOD_RES (23), (24), (25), (26): Xaa is A or G or is absent

SEQ ID NO: 68909 - protein, 38 aa, Artificial Sequence
  GFR-binding peptide
  MOD_RES (1), (35), (37): Xaa is C or S
  MOD_RES (15), (16), (17), (18), (19): Xaa is A or G
  MOD_RES (20), (21), (22), (23): Xaa is A or G or is absent
XVPEKMSPISILYKXXXXXXXXXLKYHYNMTVESXAXR

SEQ ID NO: 68910 - protein, 38 aa, Artificial Sequence
  GFR-binding peptide
  MOD_RES (2), (3), (35), (37): Xaa is C or S
SXXVPARLSATSILYYDAANNVVLRKHRDMVVEAXGXR

SEQ ID NO: 68911 - protein, 40 aa, Artificial Sequence; identical to SEQ ID NO: 32697
  GFR-binding peptide
  MOD_RES (5), (6), (38), (40): Xaa is C or S

SEQ ID NO: 68912 - protein, 37 aa, Artificial Sequence; identical to SEQ ID NO: 27679
  GFR-binding peptide
  MOD_RES (3), (4): Xaa is C or S
  MOD_RES (18), (19), (20), (21), (22): Xaa is A or G
  MOD_RES (23), (24), (25), (26): Xaa is A or G or is absent

SEQ ID NO: 68913 - protein, 39 aa, Artificial Sequence; identical to SEQ ID NO: 6521
  GFR-binding peptide
  MOD_RES (2), (3), (36), (38): Xaa is C or S
  MOD_RES (17), (18), (19), (20), (21): Xaa is A or G
  MOD_RES (22), (23), (24), (25): Xaa is A or G or is absent

SEQ ID NO: 68914 - protein, 34 aa, Artificial Sequence; identical to SEQ ID NO: 27683
  GFR-binding peptide
  MOD_RES (3), (4): Xaa is C or S

SEQ ID NO: 68915 - protein, 39 aa, Artificial Sequence; identical to SEQ ID NO: 6524
  GFR-binding peptide
  MOD_RES (4), (38): Xaa is C or S
  MOD_RES (18), (19), (20), (21), (22): Xaa is A or G
  MOD_RES (23), (24), (25), (26): Xaa is A or G or is absent

SEQ ID NO: 68916 - protein, 37 aa, Artificial Sequence; identical to SEQ ID NO: 6525
  GFR-binding peptide
  MOD_RES (5), (6): Xaa is C or S

SEQ ID NO: 68917 - protein, 38 aa, Artificial Sequence; identical to SEQ ID NO: 27685
  GFR-binding peptide
  MOD_RES (1), (35), (37): Xaa is C or S
  MOD_RES (15), (16), (17), (18), (19): Xaa is A or G
  MOD_RES (20), (21), (22), (23): Xaa is A or G or is absent

SEQ ID NO: 68918 - protein, 37 aa, Artificial Sequence
  GFR-binding peptide
  MOD_RES (6), (7): Xaa is C or S
GIPEPXXVPEKMSPINILYFDENKNVVYGKIPNMTVE

SEQ ID NO: 68919 - protein, 37 aa, Artificial Sequence; identical to SEQ ID NO: 6526
  GFR-binding peptide
  MOD_RES (6), (7): Xaa is C or S

SEQ ID NO: 68920 - protein, 37 aa, Artificial Sequence; identical to SEQ ID NO: 27690
  GFR-binding peptide
  MOD_RES (4), (5), (37): Xaa is C or S

SEQ ID NO: 68921 - protein, 39 aa, Artificial Sequence; identical to SEQ ID NO: 27691
  GFR-binding peptide
  MOD_RES (4), (5), (39): Xaa is C or S
  MOD_RES (19), (20), (21), (22), (23): Xaa is A or G
  MOD_RES (24), (25), (26), (27): Xaa is A or G or is absent

SEQ ID NO: 68922 - protein, 42 aa, Artificial Sequence
  GFR-binding peptide
  MOD_RES (5), (6), (39), (41): Xaa is C or S
  MOD_RES (20), (21), (22), (23), (24): Xaa is A or G
  MOD_RES (25), (26), (27), (28): Xaa is A or G or is absent
SASPXXVSQDLSPINILYFXXXXXXXXXYGKIPMIVKSXKXS

SEQ ID NO: 68923 - protein, 39 aa, Artificial Sequence; identical to SEQ ID NO: 6532
  GFR-binding peptide
  MOD_RES (5), (6), (38): Xaa is C or S

SEQ ID NO: 68924 - protein, 33 aa, Artificial Sequence
  GFR-binding peptide
  MOD_RES (1), (2), (33): Xaa is C or S
XXAPVKTEPISMLYLDNGRVLLKFKYEMIVEEX

SEQ ID NO: 68925 - protein, 39 aa, Artificial Sequence; identical to SEQ ID NO: 6533
  GFR-binding peptide
  MOD_RES (1), (2), (36), (38): Xaa is C or S
  MOD_RES (16), (17), (18), (19), (20): Xaa is A or G
  MOD_RES (21), (22), (23), (24): Xaa is A or G or is absent

SEQ ID NO: 68926 - protein, 35 aa, Artificial Sequence; identical to SEQ ID NO: 32711
  GFR-binding peptide
  MOD_RES (1), (2), (34): Xaa is C or S

SEQ ID NO: 68927 - protein, 42 aa, Artificial Sequence; identical to SEQ ID NO: 32713
  GFR-binding peptide
  MOD_RES (5), (39), (41): Xaa is C or S
  MOD_RES (19), (20), (21), (22), (23): Xaa is A or G
  MOD_RES (24), (25), (26), (27): Xaa is A or G or is absent

SEQ ID NO: 68928 - protein, 38 aa, Artificial Sequence
  GFR-binding peptide
  MOD_RES (1), (2), (36), (38): Xaa is C or S
  MOD_RES (16), (17), (18), (19), (20): Xaa is A or G
  MOD_RES (21), (22), (23), (24): Xaa is A or G or is absent
XXVPEKMSATSILYYXXXXXXXXXLRKHRNMTVESXAX

SEQ ID NO: 68929 - protein, 39 aa, Artificial Sequence; identical to SEQ ID NO: 6537
  GFR-binding peptide
  MOD_RES (4), (5), (38): Xaa is C or S
  MOD_RES (19), (20), (21), (22), (23): Xaa is A or G
  MOD_RES (24), (25), (26), (27): Xaa is A or G or is absent

SEQ ID NO: 68930 - protein, 35 aa, Artificial Sequence; identical to SEQ ID NO: 27698
  GFR-binding peptide
  MOD_RES (4), (5): Xaa is C or S

SEQ ID NO: 68931 - protein, 40 aa, Artificial Sequence; identical to SEQ ID NO: 32720
  GFR-binding peptide
  MOD_RES (6), (7): Xaa is C or S
  MOD_RES (21), (22), (23), (24), (25): Xaa is A or G
  MOD_RES (26), (27), (28), (29): Xaa is A or G or is absent

SEQ ID NO: 68932 - protein, 38 aa, Artificial Sequence; identical to SEQ ID NO: 27700
  GFR-binding peptide
  MOD_RES (3), (4), (38): Xaa is C or S
  MOD_RES (18), (19), (20), (21), (22): Xaa is A or G
  MOD_RES (23), (24), (25), (26): Xaa is A or G or is absent

SEQ ID NO: 68933 - protein, 36 aa, Artificial Sequence; identical to SEQ ID NO: 57619
  GFR-binding peptide
  MOD_RES (34), (36): Xaa is C or S
  MOD_RES (14), (15), (16), (17), (18): Xaa is A or G
  MOD_RES (19), (20), (21), (22): Xaa is A or G or is absent

SEQ ID NO: 68934 - protein, 41 aa, Artificial Sequence; identical to SEQ ID NO: 27704
  GFR-binding peptide
  MOD_RES (4), (5), (39), (41): Xaa is C or S
  MOD_RES (19), (20), (21), (22), (23): Xaa is A or G
  MOD_RES (24), (25), (26), (27): Xaa is A or G or is absent

SEQ ID NO: 68935 - protein, 37 aa, Artificial Sequence; identical to SEQ ID NO: 6546
  GFR-binding peptide
  MOD_RES (4), (5): Xaa is C or S
  MOD_RES (19), (20), (21), (22), (23): Xaa is A or G
  MOD_RES (24), (25), (26), (27): Xaa is A or G or is absent

SEQ ID NO: 68936 - protein, 36 aa, Artificial Sequence; identical to SEQ ID NO: 32727
  GFR-binding peptide
  MOD_RES (1), (2), (34), (36): Xaa is C or S

SEQ ID NO: 68937 - protein, 35 aa, Artificial Sequence; identical to SEQ ID NO: 13917
  GFR-binding peptide
  MOD_RES (1), (35): Xaa is C or S
  MOD_RES (15), (16), (17), (18), (19): Xaa is A or G
  MOD_RES (20), (21), (22), (23): Xaa is A or G or is absent

SEQ ID NO: 68938 - protein, 38 aa, Artificial Sequence
  GFR-binding peptide
  MOD_RES (6), (7): Xaa is C or S
GIPEPXXVPEKMSATSILYYDENKNVVLRKHRNMTVES

SEQ ID NO: 68939 - protein, 39 aa, Artificial Sequence
  GFR-binding peptide
  MOD_RES (4), (5), (36), (38): Xaa is C or S
PSTXXAPVKTSATSMLYYDNGRVLLLRKHRMIVEEXGXL

SEQ ID NO: 68940 - protein, 39 aa, Artificial Sequence; identical to SEQ ID NO: 27710
  GFR-binding peptide
  MOD_RES (6), (7): Xaa is C or S
  MOD_RES (21), (22), (23), (24), (25): Xaa is A or G
  MOD_RES (26), (27), (28), (29): Xaa is A or G or is absent

SEQ ID NO: 68941 - protein, 31 aa, Artificial Sequence; identical to SEQ ID NO: 6553
  GFR-binding peptide
  MOD_RES (1), (1): Xaa is C or S

SEQ ID NO: 68942 - protein, 35 aa, Artificial Sequence; identical to SEQ ID NO: 27712
  GFR-binding peptide
  MOD_RES (1), (35): Xaa is C or S
  MOD_RES (15), (16), (17), (18), (19): Xaa is A or G
  MOD_RES (20), (21), (22), (23): Xaa is A or G or is absent

SEQ ID NO: 68943 - protein, 38 aa, Artificial Sequence
  GFR-binding peptide
  MOD_RES (4), (5), (37): Xaa is C or S
PEPXXVPEKMSPISILYKDENKNVVLKYHYNMTVESXA

SEQ ID NO: 68944 - protein, 38 aa, Artificial Sequence
  GFR-binding peptide
  MOD_RES (2), (3), (36), (38): Xaa is C or S
  MOD_RES (17), (18), (19), (20), (21): Xaa is A or G
  MOD_RES (22), (23), (24), (25): Xaa is A or G or is absent
PXXVSQDLSPINILYFXXXXXXXXXYGKIPMIVKSXKX

SEQ ID NO: 68945 - protein, 42 aa, Artificial Sequence; identical to SEQ ID NO: 27714
  GFR-binding peptide
  MOD_RES (5), (6), (40), (42): Xaa is C or S
  MOD_RES (20), (21), (22), (23), (24): Xaa is A or G
  MOD_RES (25), (26), (27), (28): Xaa is A or G or is absent

SEQ ID NO: 68946 - protein, 38 aa, Artificial Sequence; identical to SEQ ID NO: 6555
  GFR-binding peptide
  MOD_RES (2), (3), (37): Xaa is C or S
  MOD_RES (17), (18), (19), (20), (21): Xaa is A or G
  MOD_RES (22), (23), (24), (25): Xaa is A or G or is absent

SEQ ID NO: 68947 - protein, 38 aa, Artificial Sequence; identical to SEQ ID NO: 6556
  GFR-binding peptide
  MOD_RES (1), (35), (37): Xaa is C or S
  MOD_RES (15), (16), (17), (18), (19): Xaa is A or G
  MOD_RES (20), (21), (22), (23): Xaa is A or G or is absent

SEQ ID NO: 68948 - protein, 35 aa, Artificial Sequence; identical to SEQ ID NO: 27717
  GFR-binding peptide
  MOD_RES (32), (34): Xaa is C or S

SEQ ID NO: 68949 - protein, 39 aa, Artificial Sequence; identical to SEQ ID NO: 32735
  GFR-binding peptide
  MOD_RES (3), (4), (38): Xaa is C or S
  MOD_RES (18), (19), (20), (21), (22): Xaa is A or G
  MOD_RES (23), (24), (25), (26): Xaa is A or G or is absent

SEQ ID NO: 68950 - protein, 38 aa, Artificial Sequence; identical to SEQ ID NO: 32736
  GFR-binding peptide
  MOD_RES (1), (35), (37): Xaa is C or S
  MOD_RES (15), (16), (17), (18), (19): Xaa is A or G
  MOD_RES (20), (21), (22), (23): Xaa is A or G or is absent

SEQ ID NO: 68951 - protein, 40 aa, Artificial Sequence; identical to SEQ ID NO: 27718
  GFR-binding peptide
  MOD_RES (5), (6), (38), (40): Xaa is C or S

SEQ ID NO: 68952 - protein, 35 aa, Artificial Sequence; identical to SEQ ID NO: 6560
  GFR-binding peptide
  MOD_RES (35), (35): Xaa is C or S
  MOD_RES (14), (15), (16), (17), (18): Xaa is A or G
  MOD_RES (19), (20), (21), (22): Xaa is A or G or is absent

SEQ ID NO: 68953 - protein, 41 aa, Artificial Sequence; identical to SEQ ID NO: 32741
  GFR-binding peptide
  MOD_RES (4), (5), (39), (41): Xaa is C or S
  MOD_RES (19), (20), (21), (22), (23): Xaa is A or G
  MOD_RES (24), (25), (26), (27): Xaa is A or G or is absent

SEQ ID NO: 68954 - protein, 34 aa, Artificial Sequence; identical to SEQ ID NO: 57651
  GFR-binding peptide
  MOD_RES (1), (1): Xaa is C or S
  MOD_RES (15), (16), (17), (18), (19): Xaa is A or G
  MOD_RES (20), (21), (22), (23): Xaa is A or G or is absent

SEQ ID NO: 68955 - protein, 39 aa, Artificial Sequence
  GFR-binding peptide
  MOD_RES (4), (5), (36), (38): Xaa is C or S
AAPXXVPQALSPINILYFVGRKPKVYGKIPMIVRSXKXS

SEQ ID NO: 68956 - protein, 42 aa, Artificial Sequence; identical to SEQ ID NO: 6563
  GFR-binding peptide
  MOD_RES (7), (41): Xaa is C or S
  MOD_RES (21), (22), (23), (24), (25): Xaa is A or G
  MOD_RES (26), (27), (28), (29): Xaa is A or G or is absent

SEQ ID NO: 68957 - protein, 36 aa, Artificial Sequence; identical to SEQ ID NO: 6564
  GFR-binding peptide
  MOD_RES (2), (34), (36): Xaa is C or S

SEQ ID NO: 68958 - protein, 38 aa, Artificial Sequence; identical to SEQ ID NO: 6566
  GFR-binding peptide
  MOD_RES (4), (5): Xaa is C or S
  MOD_RES (19), (20), (21), (22), (23): Xaa is A or G
  MOD_RES (24), (25), (26), (27): Xaa is A or G or is absent

SEQ ID NO: 68959 - protein, 37 aa, Artificial Sequence
  GFR-binding peptide
  MOD_RES (4), (5), (37): Xaa is C or S
SKAXXVPTKLSATSILYYDKGVVTYLRKHRGMAVSEX

SEQ ID NO: 68960 - protein, 38 aa, Artificial Sequence; identical to SEQ ID NO: 6568
  GFR-binding peptide
  MOD_RES (1), (2), (35), (37): Xaa is C or S
  MOD_RES (16), (17), (18), (19), (20): Xaa is A or G
  MOD_RES (21), (22), (23), (24): Xaa is A or G or is absent

SEQ ID NO: 68961 - protein, 35 aa, Artificial Sequence; identical to SEQ ID NO: 27726
  GFR-binding peptide
  MOD_RES (3), (4): Xaa is C or S

SEQ ID NO: 68962 - protein, 33 aa, Artificial Sequence; identical to SEQ ID NO: 27727
  GFR-binding peptide
  MOD_RES (1), (1): Xaa is C or S
  MOD_RES (15), (16), (17), (18), (19): Xaa is A or G
  MOD_RES (20), (21), (22), (23): Xaa is A or G or is absent

SEQ ID NO: 68963 - protein, 34 aa, Artificial Sequence; identical to SEQ ID NO: 6570
  GFR-binding peptide
  MOD_RES (1), (1): Xaa is C or S
  MOD_RES (15), (16), (17), (18), (19): Xaa is A or G
  MOD_RES (20), (21), (22), (23): Xaa is A or G or is absent

SEQ ID NO: 68964 - protein, 34 aa, Artificial Sequence; identical to SEQ ID NO: 27732
  GFR-binding peptide
  MOD_RES (1), (34): Xaa is C or S
  MOD_RES (15), (16), (17), (18), (19): Xaa is A or G
  MOD_RES (20), (21), (22), (23): Xaa is A or G or is absent

SEQ ID NO: 68965 - protein, 38 aa, Artificial Sequence; identical to SEQ ID NO: 27733
  GFR-binding peptide
  MOD_RES (2), (3), (35), (37): Xaa is C or S

SEQ ID NO: 68966 - protein, 41 aa, Artificial Sequence; identical to SEQ ID NO: 27734
  GFR-binding peptide
  MOD_RES (2), (3), (38), (40): Xaa is C or S
  MOD_RES (17), (18), (19), (20), (21): Xaa is A or G
  MOD_RES (22), (23), (24), (25): Xaa is A or G or is absent

SEQ ID NO: 68967 - protein, 36 aa, Artificial Sequence
  GFR-binding peptide
  MOD_RES (2), (3), (35): Xaa is C or S
PXXTPTKMEPISMLYLNDKQQIIKFKYEGMVVDRXG

SEQ ID NO: 68968 - protein, 43 aa, Artificial Sequence; identical to SEQ ID NO: 27735
  GFR-binding peptide
  MOD_RES (5), (6), (40), (42): Xaa is C or S
  MOD_RES (20), (21), (22), (23), (24): Xaa is A or G
  MOD_RES (25), (26), (27), (28): Xaa is A or G or is absent

SEQ ID NO: 68969 - protein, 36 aa, Artificial Sequence; identical to SEQ ID NO: 6572
  GFR-binding peptide
  MOD_RES (4), (5): Xaa is C or S

SEQ ID NO: 68970 - protein, 36 aa, Artificial Sequence
  GFR-binding peptide
  MOD_RES (2), (3): Xaa is C or S
  MOD_RES (17), (18), (19), (20), (21): Xaa is A or G
  MOD_RES (22), (23), (24), (25): Xaa is A or G or is absent
AXXVPTKLSATSILYYXXXXXXXXXLRKHRGMAVSE

SEQ ID NO: 68971 - protein, 41 aa, Artificial Sequence; identical to SEQ ID NO: 27738
  GFR-binding peptide
  MOD_RES (4), (5), (38), (40): Xaa is C or S

SEQ ID NO: 68972 - protein, 36 aa, Artificial Sequence; identical to SEQ ID NO: 32754
  GFR-binding peptide
  MOD_RES (3), (4): Xaa is C or S
  MOD_RES (18), (19), (20), (21), (22): Xaa is A or G
  MOD_RES (23), (24), (25), (26): Xaa is A or G or is absent

SEQ ID NO: 68973 - protein, 34 aa, Artificial Sequence
  GFR-binding peptide
  MOD_RES (1), (33): Xaa is C or S
XVPEKMSPISILYKDENKNVVLKYHYNMTVESXA

SEQ ID NO: 68974 - protein, 36 aa, Artificial Sequence; identical to SEQ ID NO: 6576
  GFR-binding peptide
  MOD_RES (1), (2), (35): Xaa is C or S
  MOD_RES (16), (17), (18), (19), (20): Xaa is A or G
  MOD_RES (21), (22), (23), (24): Xaa is A or G or is absent

SEQ ID NO: 68975 - protein, 42 aa, Artificial Sequence; identical to SEQ ID NO: 27741
  GFR-binding peptide
  MOD_RES (4), (5), (40), (42): Xaa is C or S
  MOD_RES (19), (20), (21), (22), (23): Xaa is A or G
  MOD_RES (24), (25), (26), (27): Xaa is A or G or is absent

SEQ ID NO: 68976 - protein, 34 aa, Artificial Sequence; identical to SEQ ID NO: 6579
  GFR-binding peptide
  MOD_RES (1), (2), (33): Xaa is C or S

SEQ ID NO: 68977 - protein, 31 aa, Artificial Sequence
  GFR-binding peptide
  MOD_RES (1), (1): Xaa is C or S
XVPTRLSATSILYYDSANNVVLRKHRDMVVE

SEQ ID NO: 68978 - protein, 40 aa, Artificial Sequence; identical to SEQ ID NO: 27747
  GFR-binding peptide
  MOD_RES (3), (4), (38), (40): Xaa is C or S
  MOD_RES (18), (19), (20), (21), (22): Xaa is A or G
  MOD_RES (23), (24), (25), (26): Xaa is A or G or is absent

SEQ ID NO: 68979 - protein, 37 aa, Artificial Sequence; identical to SEQ ID NO: 6583
  GFR-binding peptide
  MOD_RES (4), (5): Xaa is C or S
  MOD_RES (19), (20), (21), (22), (23): Xaa is A or G
  MOD_RES (24), (25), (26), (27): Xaa is A or G or is absent

SEQ ID NO: 68980 - protein, 33 aa, Artificial Sequence; identical to SEQ ID NO: 6586
  GFR-binding peptide
  MOD_RES (1), (1): Xaa is C or S
  MOD_RES (15), (16), (17), (18), (19): Xaa is A or G
  MOD_RES (20), (21), (22), (23): Xaa is A or G or is absent

SEQ ID NO: 68981 - protein, 43 aa, Artificial Sequence; identical to SEQ ID NO: 27749
  GFR-binding peptide
  MOD_RES (5), (6), (40), (42): Xaa is C or S
  MOD_RES (20), (21), (22), (23), (24): Xaa is A or G
  MOD_RES (25), (26), (27), (28): Xaa is A or G or is absent

SEQ ID NO: 68982 - protein, 32 aa, Artificial Sequence; identical to SEQ ID NO: 6588
  GFR-binding peptide
  MOD_RES (14), (15), (16), (17), (18): Xaa is A or G
  MOD_RES (19), (20), (21), (22): Xaa is A or G or is absent

SEQ ID NO: 68983 - protein, 33 aa, Artificial Sequence
  GFR-binding peptide
  MOD_RES (14), (15), (16), (17), (18): Xaa is A or G
  MOD_RES (19), (20), (21), (22): Xaa is A or G or is absent
TPTKMSPISMLYKXXXXXXXXXLKYHYGMVVDR

SEQ ID NO: 68984 - protein, 35 aa, Artificial Sequence; identical to SEQ ID NO: 32769
  GFR-binding peptide
  MOD_RES (4), (5): Xaa is C or S

SEQ ID NO: 68985 - protein, 38 aa, Artificial Sequence
  GFR-binding peptide
  MOD_RES (5), (6): Xaa is C or S
  MOD_RES (20), (21), (22), (23), (24): Xaa is A or G
  MOD_RES (25), (26), (27), (28): Xaa is A or G or is absent
TPPTXXVPTRLSATSILYYXXXXXXXXXLRKHRDMVVE

SEQ ID NO: 68986 - protein, 34 aa, Artificial Sequence
  GFR-binding peptide
  MOD_RES (34), (34): Xaa is C or S
  MOD_RES (14), (15), (16), (17), (18): Xaa is A or G
  MOD_RES (19), (20), (21), (22): Xaa is A or G or is absent
VPEKMSPISILYKXXXXXXXXXLKYHYNMTVESX

SEQ ID NO: 68987 - protein, 40 aa, Artificial Sequence
  GFR-binding peptide
  MOD_RES (3), (4), (38), (40): Xaa is C or S
  MOD_RES (18), (19), (20), (21), (22): Xaa is A or G
  MOD_RES (23), (24), (25), (26): Xaa is A or G or is absent
KAXXVPTKLSATSILYYXXXXXXXXXLRKHRGMAVSEXGX

SEQ ID NO: 68988 - protein, 41 aa, Artificial Sequence
  GFR-binding peptide
  MOD_RES (4), (5), (39), (41): Xaa is C or S
  MOD_RES (19), (20), (21), (22), (23): Xaa is A or G
  MOD_RES (24), (25), (26), (27): Xaa is A or G or is absent
PPTXXVPTRLSPISILYKXXXXXXXXXLKYHYDMVVESXGX

SEQ ID NO: 68989 - protein, 39 aa, Artificial Sequence; identical to SEQ ID NO: 32773
  GFR-binding peptide
  MOD_RES (5), (6), (38): Xaa is C or S

SEQ ID NO: 68990 - protein, 35 aa, Artificial Sequence; identical to SEQ ID NO: 6596
  GFR-binding peptide
  MOD_RES (1), (34): Xaa is C or S
  MOD_RES (15), (16), (17), (18), (19): Xaa is A or G
  MOD_RES (20), (21), (22), (23): Xaa is A or G or is absent

SEQ ID NO: 68991 - protein, 39 aa, Artificial Sequence; identical to SEQ ID NO: 32777
  GFR-binding peptide
  MOD_RES (2), (3), (38): Xaa is C or S
  MOD_RES (17), (18), (19), (20), (21): Xaa is A or G
  MOD_RES (22), (23), (24), (25): Xaa is A or G or is absent

SEQ ID NO: 68992 - protein, 34 aa, Artificial Sequence; identical to SEQ ID NO: 32779
  GFR-binding peptide
  MOD_RES (33), (33): Xaa is C or S
  MOD_RES (14), (15), (16), (17), (18): Xaa is A or G
  MOD_RES (19), (20), (21), (22): Xaa is A or G or is absent

SEQ ID NO: 68993 - protein, 37 aa, Artificial Sequence; identical to SEQ ID NO: 6597
  GFR-binding peptide
  MOD_RES (2), (3), (37): Xaa is C or S
  MOD_RES (17), (18), (19), (20), (21): Xaa is A or G
  MOD_RES (22), (23), (24), (25): Xaa is A or G or is absent

SEQ ID NO: 68994 - protein, 43 aa, Artificial Sequence; identical to SEQ ID NO: 27756
  GFR-binding peptide
  MOD_RES (6), (7), (41), (43): Xaa is C or S
  MOD_RES (21), (22), (23), (24), (25): Xaa is A or G
  MOD_RES (26), (27), (28), (29): Xaa is A or G or is absent

SEQ ID NO: 68995 - protein, 39 aa, Artificial Sequence; identical to SEQ ID NO: 6601
  GFR-binding peptide
  MOD_RES (5), (37), (39): Xaa is C or S

SEQ ID NO: 68996 - protein, 39 aa, Artificial Sequence; identical to SEQ ID NO: 27758
  GFR-binding peptide
  MOD_RES (6), (7): Xaa is C or S
  MOD_RES (21), (22), (23), (24), (25): Xaa is A or G
  MOD_RES (26), (27), (28), (29): Xaa is A or G or is absent

SEQ ID NO: 68997 - protein, 40 aa, Artificial Sequence; identical to SEQ ID NO: 27759
  GFR-binding peptide
  MOD_RES (6), (7), (38), (40): Xaa is C or S

SEQ ID NO: 68998 - protein, 34 aa, Artificial Sequence; identical to SEQ ID NO: 6604
  GFR-binding peptide
  MOD_RES (1), (1): Xaa is C or S
  MOD_RES (15), (16), (17), (18), (19): Xaa is A or G
  MOD_RES (20), (21), (22), (23): Xaa is A or G or is absent

SEQ ID NO: 68999 - protein, 38 aa, Artificial Sequence
  GFR-binding peptide
  MOD_RES (6), (7): Xaa is C or S
GSAGPXXTPTKMSATSMLYYNDKQQIILRKHRGMVVDR

SEQ ID NO: 69000 - protein, 35 aa, Artificial Sequence; identical to SEQ ID NO: 27762
  GFR-binding peptide
  MOD_RES (1), (33), (35): Xaa is C or S

SEQ ID NO: 69001 - protein, 37 aa, Artificial Sequence; identical to SEQ ID NO: 6607
  GFR-binding peptide
  MOD_RES (4), (5): Xaa is C or S
  MOD_RES (19), (20), (21), (22), (23): Xaa is A or G
  MOD_RES (24), (25), (26), (27): Xaa is A or G or is absent

SEQ ID NO: 69002 - protein, 39 aa, Artificial Sequence
  GFR-binding peptide
  MOD_RES (3), (4), (36), (38): Xaa is C or S
EPXXVPEKMSATSILYYDENKNVVLRKHRNMTVESXAXR

SEQ ID NO: 69003 - protein, 32 aa, Artificial Sequence; identical to SEQ ID NO: 13978
  GFR-binding peptide
  MOD_RES (14), (15), (16), (17), (18): Xaa is A or G
  MOD_RES (19), (20), (21), (22): Xaa is A or G or is absent

SEQ ID NO: 69004 - protein, 36 aa, Artificial Sequence; identical to SEQ ID NO: 27765
  GFR-binding peptide
  MOD_RES (5), (6): Xaa is C or S

SEQ ID NO: 69005 - protein, 35 aa, Artificial Sequence
  GFR-binding peptide
  MOD_RES (1), (35): Xaa is C or S
  MOD_RES (15), (16), (17), (18), (19): Xaa is A or G
  MOD_RES (20), (21), (22), (23): Xaa is A or G or is absent
XVPEKMSPISILYKXXXXXXXXXLKYHYNMTVESX

SEQ ID NO: 69006 - protein, 35 aa, Artificial Sequence; identical to SEQ ID NO: 27766
  GFR-binding peptide
  MOD_RES (34), (34): Xaa is C or S
  MOD_RES (14), (15), (16), (17), (18): Xaa is A or G
  MOD_RES (19), (20), (21), (22): Xaa is A or G or is absent

SEQ ID NO: 69007 - protein, 31 aa, Artificial Sequence; identical to SEQ ID NO: 6616
  GFR-binding peptide
  MOD_RES (31), (31): Xaa is C or S

SEQ ID NO: 69008 - protein, 38 aa, Artificial Sequence; identical to SEQ ID NO: 27769
  GFR-binding peptide
  MOD_RES (2), (36), (38): Xaa is C or S
  MOD_RES (16), (17), (18), (19), (20): Xaa is A or G
  MOD_RES (21), (22), (23), (24): Xaa is A or G or is absent

SEQ ID NO: 69009 - protein, 38 aa, Artificial Sequence
  GFR-binding peptide
  MOD_RES (3), (4), (35), (37): Xaa is C or S
SPXXVSQDLSPINILYFIGKTPKIYGKIPMIVKSXKXS

SEQ ID NO: 69010 - protein, 35 aa, Artificial Sequence
  GFR-binding peptide
  MOD_RES (1), (2): Xaa is C or S
  MOD_RES (16), (17), (18), (19), (20): Xaa is A or G
  MOD_RES (21), (22), (23), (24): Xaa is A or G or is absent
XXVPTRLEPISILYLXXXXXXXXXKFKYEDMVVES

SEQ ID NO: 69011 - protein, 38 aa, Artificial Sequence
  GFR-binding peptide
  MOD_RES (4), (5), (38): Xaa is C or S
  MOD_RES (19), (20), (21), (22), (23): Xaa is A or G
  MOD_RES (24), (25), (26), (27): Xaa is A or G or is absent
PSTXXAPVKTSATSMLYYXXXXXXXXXLRKHRMIVEEX

SEQ ID NO: 69012 - protein, 40 aa, Artificial Sequence
  GFR-binding peptide
  MOD_RES (3), (4), (37), (39): Xaa is C or S
  MOD_RES (18), (19), (20), (21), (22): Xaa is A or G
  MOD_RES (23), (24), (25), (26): Xaa is A or G or is absent
APXXVPQALSPINILYFXXXXXXXXXYGKIPMIVRSXKXS

SEQ ID NO: 69013 - protein, 36 aa, Artificial Sequence; identical to SEQ ID NO: 6618
  GFR-binding peptide
  MOD_RES (2), (3), (34), (36): Xaa is C or S

SEQ ID NO: 69014 - protein, 41 aa, Artificial Sequence; identical to SEQ ID NO: 32815
  GFR-binding peptide
  MOD_RES (4), (5), (38), (40): Xaa is C or S

SEQ ID NO: 69015 - protein, 36 aa, Artificial Sequence
  GFR-binding peptide
  MOD_RES (1), (2), (33), (35): Xaa is C or S
XXAPVKTSATSMLYYDNGRVLLLRKHRMIVEEXGXL

SEQ ID NO: 69016 - protein, 39 aa, Artificial Sequence; identical to SEQ ID NO: 57721
  GFR-binding peptide
  MOD_RES (1), (2), (36), (38): Xaa is C or S
  MOD_RES (16), (17), (18), (19), (20): Xaa is A or G
  MOD_RES (21), (22), (23), (24): Xaa is A or G or is absent

SEQ ID NO: 69017 - protein, 33 aa, Artificial Sequence; identical to SEQ ID NO: 6619
  GFR-binding peptide
  MOD_RES (1), (1): Xaa is C or S
  MOD_RES (15), (16), (17), (18), (19): Xaa is A or G
  MOD_RES (20), (21), (22), (23): Xaa is A or G or is absent

SEQ ID NO: 69018 - protein, 41 aa, Artificial Sequence; identical to SEQ ID NO: 6621
  GFR-binding peptide
  MOD_RES (4), (5), (38), (40): Xaa is C or S
  MOD_RES (19), (20), (21), (22), (23): Xaa is A or G
  MOD_RES (24), (25), (26), (27): Xaa is A or G or is absent

SEQ ID NO: 69019 - protein, 41 aa, Artificial Sequence; identical to SEQ ID NO: 32817
  GFR-binding peptide
  MOD_RES (5), (6), (38), (40): Xaa is C or S

SEQ ID NO: 69020 - protein, 38 aa, Artificial Sequence
  GFR-binding peptide
  MOD_RES (1), (2), (35), (37): Xaa is C or S
  MOD_RES (16), (17), (18), (19), (20): Xaa is A or G
  MOD_RES (21), (22), (23), (24): Xaa is A or G or is absent
XXVPQALSPINILYFXXXXXXXXXYGKIPMIVRSXKXS

SEQ ID NO: 69021 - protein, 37 aa, Artificial Sequence; identical to SEQ ID NO: 6625
  GFR-binding peptide
  MOD_RES (2), (3), (36): Xaa is C or S

SEQ ID NO: 69022 - protein, 35 aa, Artificial Sequence; identical to SEQ ID NO: 27780
  GFR-binding peptide
  MOD_RES (4), (5): Xaa is C or S

SEQ ID NO: 69023 - protein, 43 aa, Artificial Sequence; identical to SEQ ID NO: 27781
  GFR-binding peptide
  MOD_RES (6), (7), (41), (43): Xaa is C or S
  MOD_RES (21), (22), (23), (24), (25): Xaa is A or G
  MOD_RES (26), (27), (28), (29): Xaa is A or G or is absent

SEQ ID NO: 69024 - protein, 40 aa, Artificial Sequence; identical to SEQ ID NO: 6626
  GFR-binding peptide
  MOD_RES (3), (4), (38), (40): Xaa is C or S
  MOD_RES (18), (19), (20), (21), (22): Xaa is A or G
  MOD_RES (23), (24), (25), (26): Xaa is A or G or is absent

SEQ ID NO: 69025 - protein, 39 aa, Artificial Sequence
  GFR-binding peptide
  MOD_RES (1), (2), (36), (38): Xaa is C or S
  MOD_RES (16), (17), (18), (19), (20): Xaa is A or G
  MOD_RES (21), (22), (23), (24): Xaa is A or G or is absent
XXTPTKMEPISMLYLXXXXXXXXXKFKYEGMVVDRXGXS

SEQ ID NO: 69026 - protein, 34 aa, Artificial Sequence
  GFR-binding peptide
  MOD_RES (2), (3): Xaa is C or S
PXXVPEKMSPISILYKDENKNVVLKYHYNMTVES

SEQ ID NO: 69027 - protein, 35 aa, Artificial Sequence; identical to SEQ ID NO: 32823
  GFR-binding peptide
  MOD_RES (4), (5): Xaa is C or S

SEQ ID NO: 69028 - protein, 42 aa, Artificial Sequence; identical to SEQ ID NO: 32825
  GFR-binding peptide
  MOD_RES (3), (4), (39), (41): Xaa is C or S
  MOD_RES (18), (19), (20), (21), (22): Xaa is A or G
  MOD_RES (23), (24), (25), (26): Xaa is A or G or is absent

SEQ ID NO: 69029 - protein, 39 aa, Artificial Sequence
  GFR-binding peptide
  MOD_RES (6), (7), (39): Xaa is C or S
GIPEPXXVPEKMSPINILYFDENKNVVYGKIPNMTVESX

SEQ ID NO: 69030 - protein, 37 aa, Artificial Sequence; identical to SEQ ID NO: 6628
  GFR-binding peptide
  MOD_RES (2), (3), (37): Xaa is C or S
  MOD_RES (17), (18), (19), (20), (21): Xaa is A or G
  MOD_RES (22), (23), (24), (25): Xaa is A or G or is absent

SEQ ID NO: 69031 - protein, 40 aa, Artificial Sequence
  GFR-binding peptide
  MOD_RES (5), (6), (38), (40): Xaa is C or S
APASXXVPARLSATSILYYDAANNVVLRKHRDMVVEAXGX

SEQ ID NO: 69032 - protein, 34 aa, Artificial Sequence
  GFR-binding peptide
  MOD_RES (1), (33): Xaa is C or S
XTPTKMSPISMLYKNDKQQIILKYHYGMVVDRXG

SEQ ID NO: 69033 - protein, 32 aa, Artificial Sequence
  GFR-binding peptide
  MOD_RES (1), (2): Xaa is C or S
XXVPTKLSATSILYYDKGVVTYLRKHRGMAVS

SEQ ID NO: 69034 - protein, 41 aa, Artificial Sequence; identical to SEQ ID NO: 27793
  GFR-binding peptide
  MOD_RES (6), (7), (41): Xaa is C or S
  MOD_RES (21), (22), (23), (24), (25): Xaa is A or G
  MOD_RES (26), (27), (28), (29): Xaa is A or G or is absent

SEQ ID NO: 69035 - protein, 35 aa, Artificial Sequence; identical to SEQ ID NO: 57738
  GFR-binding peptide
  MOD_RES (4), (5): Xaa is C or S

SEQ ID NO: 69036 - protein, 34 aa, Artificial Sequence; identical to SEQ ID NO: 32838
  GFR-binding peptide
  MOD_RES (1), (2): Xaa is C or S

SEQ ID NO: 69037 - protein, 35 aa, Artificial Sequence; identical to SEQ ID NO: 32840
  GFR-binding peptide
  MOD_RES (2), (3), (35): Xaa is C or S

SEQ ID NO: 69038 - protein, 39 aa, Artificial Sequence; identical to SEQ ID NO: 27798
  GFR-binding peptide
  MOD_RES (3), (4), (36), (38): Xaa is C or S

SEQ ID NO: 69039 - protein, 33 aa, Artificial Sequence; identical to SEQ ID NO: 57746
  GFR-binding peptide
  MOD_RES (1), (32): Xaa is C or S

SEQ ID NO: 69040 - protein, 35 aa, Artificial Sequence
  GFR-binding peptide
  MOD_RES (2), (3), (35): Xaa is C or S
PXXTPTKMEPISMLYLNDKQQIIKFKYEGMVVDRX

SEQ ID NO: 69041 - protein, 37 aa, Artificial Sequence; identical to SEQ ID NO: 6633
  GFR-binding peptide
  MOD_RES (34), (36): Xaa is C or S
  MOD_RES (14), (15), (16), (17), (18): Xaa is A or G
  MOD_RES (19), (20), (21), (22): Xaa is A or G or is absent

SEQ ID NO: 69042 - protein, 41 aa, Artificial Sequence; identical to SEQ ID NO: 6634
  GFR-binding peptide
  MOD_RES (6), (7), (39), (41): Xaa is C or S

SEQ ID NO: 69043 - protein, 39 aa, Artificial Sequence
  GFR-binding peptide
  MOD_RES (5), (6), (38): Xaa is C or S
IPEPXXVPEKMEPISILYLDENKNVVKFKYENMTVESXA

SEQ ID NO: 69044 - protein, 33 aa, Artificial Sequence; identical to SEQ ID NO: 27803
  GFR-binding peptide
  MOD_RES (14), (15), (16), (17), (18): Xaa is A or G
  MOD_RES (19), (20), (21), (22): Xaa is A or G or is absent

SEQ ID NO: 69045 - protein, 37 aa, Artificial Sequence; identical to SEQ ID NO: 6638
  GFR-binding peptide
  MOD_RES (4), (5), (37): Xaa is C or S

SEQ ID NO: 69046 - protein, 44 aa, Artificial Sequence; identical to SEQ ID NO: 6639
  GFR-binding peptide
  MOD_RES (6), (7), (41), (43): Xaa is C or S
  MOD_RES (21), (22), (23), (24), (25): Xaa is A or G
  MOD_RES (26), (27), (28), (29): Xaa is A or G or is absent

SEQ ID NO: 69047 - protein, 33 aa, Artificial Sequence; identical to SEQ ID NO: 6640
  GFR-binding peptide
  MOD_RES (31), (33): Xaa is C or S

SEQ ID NO: 69048 - protein, 34 aa, Artificial Sequence; identical to SEQ ID NO: 27806
  GFR-binding peptide
  MOD_RES (3), (4): Xaa is C or S

SEQ ID NO: 69049 - protein, 40 aa, Artificial Sequence; identical to SEQ ID NO: 57756
  GFR-binding peptide
  MOD_RES (4), (5), (38), (40): Xaa is C or S
  MOD_RES (19), (20), (21), (22), (23): Xaa is A or G
  MOD_RES (24), (25), (26), (27): Xaa is A or G or is absent

SEQ ID NO: 69050 - protein, 34 aa, Artificial Sequence
  GFR-binding peptide
  MOD_RES (3), (4): Xaa is C or S
STXXAPVKTSATSMLYYDNGRVLLLRKHRMIVEE

SEQ ID NO: 69051 - protein, 37 aa, Artificial Sequence; identical to SEQ ID NO: 6645
  GFR-binding peptide
  MOD_RES (3), (4), (37): Xaa is C or S
  MOD_RES (18), (19), (20), (21), (22): Xaa is A or G
  MOD_RES (23), (24), (25), (26): Xaa is A or G or is absent

SEQ ID NO: 69052 - protein, 32 aa, Artificial Sequence; identical to SEQ ID NO: 32851
  GFR-binding peptide

SEQ ID NO: 69053 - protein, 32 aa, Artificial Sequence
  GFR-binding peptide
  MOD_RES (31), (31): Xaa is C or S
VPQALSPINILYFVGRKPKVYGKIPMIVRSXK

SEQ ID NO: 69054 - protein, 37 aa, Artificial Sequence; identical to SEQ ID NO: 27812
  GFR-binding peptide
  MOD_RES (34), (36): Xaa is C or S
  MOD_RES (14), (15), (16), (17), (18): Xaa is A or G
  MOD_RES (19), (20), (21), (22): Xaa is A or G or is absent

SEQ ID NO: 69055 - protein, 39 aa, Artificial Sequence; identical to SEQ ID NO: 27813
  GFR-binding peptide
  MOD_RES (5), (6): Xaa is C or S
  MOD_RES (20), (21), (22), (23), (24): Xaa is A or G
  MOD_RES (25), (26), (27), (28): Xaa is A or G or is absent

SEQ ID NO: 69056 - protein, 32 aa, Artificial Sequence
  GFR-binding peptide
  MOD_RES (1), (2): Xaa is C or S
XXAPVKTSPISMLYKDNGRVLLLKYHYMIVEE

SEQ ID NO: 69057 - protein, 35 aa, Artificial Sequence; identical to SEQ ID NO: 32855
  GFR-binding peptide
  MOD_RES (1), (2), (34): Xaa is C or S

SEQ ID NO: 69058 - protein, 42 aa, Artificial Sequence; identical to SEQ ID NO: 6648
  GFR-binding peptide
  MOD_RES (5), (6), (41): Xaa is C or S
  MOD_RES (20), (21), (22), (23), (24): Xaa is A or G
  MOD_RES (25), (26), (27), (28): Xaa is A or G or is absent

SEQ ID NO: 69059 - protein, 33 aa, Artificial Sequence; identical to SEQ ID NO: 6650
  GFR-binding peptide
  MOD_RES (1), (2): Xaa is C or S

SEQ ID NO: 69060 - protein, 38 aa, Artificial Sequence
  GFR-binding peptide
  MOD_RES (3), (4), (38): Xaa is C or S
  MOD_RES (18), (19), (20), (21), (22): Xaa is A or G
  MOD_RES (23), (24), (25), (26): Xaa is A or G or is absent
PTXXVPTRLEPISILYLXXXXXXXXXKFKYEDMVVESX

SEQ ID NO: 69061 - protein, 36 aa, Artificial Sequence; identical to SEQ ID NO: 6655
  GFR-binding peptide
  MOD_RES (4), (5): Xaa is C or S

SEQ ID NO: 69062 - protein, 34 aa, Artificial Sequence; identical to SEQ ID NO: 6659
  GFR-binding peptide
  MOD_RES (3), (4): Xaa is C or S

SEQ ID NO: 69063 - protein, 39 aa, Artificial Sequence; identical to SEQ ID NO: 6661
  GFR-binding peptide
  MOD_RES (6), (7), (39): Xaa is C or S

SEQ ID NO: 69064 - protein, 42 aa, Artificial Sequence; identical to SEQ ID NO: 6662
  GFR-binding peptide
  MOD_RES (5), (6), (40), (42): Xaa is C or S
  MOD_RES (20), (21), (22), (23), (24): Xaa is A or G
  MOD_RES (25), (26), (27), (28): Xaa is A or G or is absent

SEQ ID NO: 69065 - protein, 40 aa, Artificial Sequence; identical to SEQ ID NO: 6663
  GFR-binding peptide
  MOD_RES (3), (4), (37), (39): Xaa is C or S
  MOD_RES (18), (19), (20), (21), (22): Xaa is A or G
  MOD_RES (23), (24), (25), (26): Xaa is A or G or is absent

SEQ ID NO: 69066 - protein, 35 aa, Artificial Sequence
  GFR-binding peptide
  MOD_RES (1), (2): Xaa is C or S
  MOD_RES (16), (17), (18), (19), (20): Xaa is A or G
  MOD_RES (21), (22), (23), (24): Xaa is A or G or is absent
XXVPTRLSPISILYKXXXXXXXXXLKYHYDMVVES

SEQ ID NO: 69067 - protein, 32 aa, Artificial Sequence
  GFR-binding peptide
  MOD_RES (14), (15), (16), (17), (18): Xaa is A or G
  MOD_RES (19), (20), (21), (22): Xaa is A or G or is absent
VPQALSPINILYFXXXXXXXXXYGKIPMIVRS

SEQ ID NO: 69068 - protein, 37 aa, Artificial Sequence; identical to SEQ ID NO: 32871
  GFR-binding peptide
  MOD_RES (2), (3), (35), (37): Xaa is C or S

SEQ ID NO: 69069 - protein, 37 aa, Artificial Sequence; identical to SEQ ID NO: 6664
  GFR-binding peptide
  MOD_RES (4), (5): Xaa is C or S

SEQ ID NO: 69070 - protein, 34 aa, Artificial Sequence; identical to SEQ ID NO: 6665
  GFR-binding peptide
  MOD_RES (1), (2), (34): Xaa is C or S

SEQ ID NO: 69071 - protein, 36 aa, Artificial Sequence; identical to SEQ ID NO: 6666
  GFR-binding peptide
  MOD_RES (3), (4), (35): Xaa is C or S

SEQ ID NO: 69072 - protein, 32 aa, Artificial Sequence; identical to SEQ ID NO: 27829
  GFR-binding peptide
  MOD_RES (1), (2): Xaa is C or S

SEQ ID NO: 69073 - protein, 41 aa, Artificial Sequence; identical to SEQ ID NO: 6667
  GFR-binding peptide
  MOD_RES (5), (39), (41): Xaa is C or S
  MOD_RES (19), (20), (21), (22), (23): Xaa is A or G
  MOD_RES (24), (25), (26), (27): Xaa is A or G or is absent

SEQ ID NO: 69074 - protein, 36 aa, Artificial Sequence; identical to SEQ ID NO: 6668
  GFR-binding peptide
  MOD_RES (4), (36): Xaa is C or S

SEQ ID NO: 69075 - protein, 41 aa, Artificial Sequence
  GFR-binding peptide
  MOD_RES (5), (6), (38), (40): Xaa is C or S
IPEPXXVPEKMSPISILYKDENKNVVLKYHYNMTVESXAXR

SEQ ID NO: 69076 - protein, 33 aa, Artificial Sequence; identical to SEQ ID NO: 27836
  GFR-binding peptide
  MOD_RES (1), (2): Xaa is C or S

SEQ ID NO: 69077 - protein, 40 aa, Artificial Sequence; identical to SEQ ID NO: 6669
  GFR-binding peptide
  MOD_RES (5), (6), (40): Xaa is C or S
  MOD_RES (20), (21), (22), (23), (24): Xaa is A or G
  MOD_RES (25), (26), (27), (28): Xaa is A or G or is absent

SEQ ID NO: 69078 - protein, 45 aa, Artificial Sequence; identical to SEQ ID NO: 32877
  GFR-binding peptide
  MOD_RES (6), (7), (42), (44): Xaa is C or S
  MOD_RES (21), (22), (23), (24), (25): Xaa is A or G
  MOD_RES (26), (27), (28), (29): Xaa is A or G or is absent

SEQ ID NO: 69079 - protein, 35 aa, Artificial Sequence; identical to SEQ ID NO: 6670
  GFR-binding peptide
  MOD_RES (3), (4): Xaa is C or S

SEQ ID NO: 69080 - protein, 35 aa, Artificial Sequence
  GFR-binding peptide
  MOD_RES (1), (32), (34): Xaa is C or S
XVPQALSPINILYFVGRKPKVYGKIPMIVRSXKXS

SEQ ID NO: 69081 - protein, 36 aa, Artificial Sequence; identical to SEQ ID NO: 6671
  GFR-binding peptide
  MOD_RES (1), (35): Xaa is C or S
  MOD_RES (15), (16), (17), (18), (19): Xaa is A or G
  MOD_RES (20), (21), (22), (23): Xaa is A or G or is absent

SEQ ID NO: 69082 - protein, 33 aa, Artificial Sequence; identical to SEQ ID NO: 6672
  GFR-binding peptide
  MOD_RES (33), (33): Xaa is C or S
  MOD_RES (14), (15), (16), (17), (18): Xaa is A or G
  MOD_RES (19), (20), (21), (22): Xaa is A or G or is absent

SEQ ID NO: 69083 - protein, 34 aa, Artificial Sequence; identical to SEQ ID NO: 6673
  GFR-binding peptide
  MOD_RES (1), (2): Xaa is C or S
  MOD_RES (16), (17), (18), (19), (20): Xaa is A or G
  MOD_RES (21), (22), (23), (24): Xaa is A or G or is absent

SEQ ID NO: 69084 - protein, 36 aa, Artificial Sequence; identical to SEQ ID NO: 32879
  GFR-binding peptide
  MOD_RES (1), (33), (35): Xaa is C or S

SEQ ID NO: 69085 - protein, 39 aa, Artificial Sequence; identical to SEQ ID NO: 27841
  GFR-binding peptide
  MOD_RES (4), (5), (39): Xaa is C or S
  MOD_RES (19), (20), (21), (22), (23): Xaa is A or G
  MOD_RES (24), (25), (26), (27): Xaa is A or G or is absent

SEQ ID NO: 69086 - protein, 32 aa, Artificial Sequence; identical to SEQ ID NO: 32885
  GFR-binding peptide
  MOD_RES (14), (15), (16), (17), (18): Xaa is A or G
  MOD_RES (19), (20), (21), (22): Xaa is A or G or is absent

SEQ ID NO: 69087 - protein, 34 aa, Artificial Sequence
  GFR-binding peptide
  MOD_RES (1), (34): Xaa is C or S
  MOD_RES (15), (16), (17), (18), (19): Xaa is A or G
  MOD_RES (20), (21), (22), (23): Xaa is A or G or is absent
XAPVKTSPISMLYKXXXXXXXXXLKYHYMIVEEX

SEQ ID NO: 69088 - protein, 40 aa, Artificial Sequence; identical to SEQ ID NO: 27842
  GFR-binding peptide
  MOD_RES (4), (5), (39): Xaa is C or S
  MOD_RES (19), (20), (21), (22), (23): Xaa is A or G
  MOD_RES (24), (25), (26), (27): Xaa is A or G or is absent

SEQ ID NO: 69089 - protein, 34 aa, Artificial Sequence; identical to SEQ ID NO: 6676
  GFR-binding peptide
  MOD_RES (1), (32), (34): Xaa is C or S

SEQ ID NO: 69090 - protein, 36 aa, Artificial Sequence; identical to SEQ ID NO: 32886
  GFR-binding peptide
  MOD_RES (1), (33), (35): Xaa is C or S

SEQ ID NO: 69091 - protein, 36 aa, Artificial Sequence; identical to SEQ ID NO: 57806
  GFR-binding peptide
  MOD_RES (2), (3): Xaa is C or S
  MOD_RES (17), (18), (19), (20), (21): Xaa is A or G
  MOD_RES (22), (23), (24), (25): Xaa is A or G or is absent

SEQ ID NO: 69092 - protein, 39 aa, Artificial Sequence
  GFR-binding peptide
  MOD_RES (3), (4), (36), (38): Xaa is C or S
GPXXTPTKMEPISMLYLNDKQQIIKFKYEGMVVDRXGXS

SEQ ID NO: 69093 - protein, 33 aa, Artificial Sequence; identical to SEQ ID NO: 6679
  GFR-binding peptide
  MOD_RES (1), (2): Xaa is C or S

SEQ ID NO: 69094 - protein, 41 aa, Artificial Sequence; identical to SEQ ID NO: 6680
  GFR-binding peptide
  MOD_RES (3), (4), (38), (40): Xaa is C or S
  MOD_RES (18), (19), (20), (21), (22): Xaa is A or G
  MOD_RES (23), (24), (25), (26): Xaa is A or G or is absent

SEQ ID NO: 69095 - protein, 42 aa, Artificial Sequence; identical to SEQ ID NO: 27844
  GFR-binding peptide
  MOD_RES (6), (7), (40), (42): Xaa is C or S

SEQ ID NO: 69096 - protein, 40 aa, Artificial Sequence; identical to SEQ ID NO: 32893
  GFR-binding peptide
  MOD_RES (6), (7), (39): Xaa is C or S

SEQ ID NO: 69097 - protein, 36 aa, Artificial Sequence; identical to SEQ ID NO: 6682
  GFR-binding peptide
  MOD_RES (2), (3), (34), (36): Xaa is C or S

SEQ ID NO: 69098 - protein, 33 aa, Artificial Sequence; identical to SEQ ID NO: 6684
  GFR-binding peptide
  MOD_RES (2), (3): Xaa is C or S

SEQ ID NO: 69099 - protein, 35 aa, Artificial Sequence
  GFR-binding peptide
  MOD_RES (1), (33), (35): Xaa is C or S
XTPTKMSATSMLYYNDKQQIILRKHRGMVVDRXGX

SEQ ID NO: 69100 - protein, 32 aa, Artificial Sequence; identical to SEQ ID NO: 6687
  GFR-binding peptide
  MOD_RES (1), (32): Xaa is C or S

SEQ ID NO: 69101 - protein, 32 aa, Artificial Sequence; identical to SEQ ID NO: 6688
  GFR-binding peptide
  MOD_RES (1), (2): Xaa is C or S

SEQ ID NO: 69102 - protein, 34 aa, Artificial Sequence; identical to SEQ ID NO: 27860
  GFR-binding peptide
  MOD_RES (1), (33): Xaa is C or S

SEQ ID NO: 69103 - protein, 38 aa, Artificial Sequence; identical to SEQ ID NO: 27861
  GFR-binding peptide
  MOD_RES (3), (4), (37): Xaa is C or S
  MOD_RES (18), (19), (20), (21), (22): Xaa is A or G
  MOD_RES (23), (24), (25), (26): Xaa is A or G or is absent

SEQ ID NO: 69104 - protein, 42 aa, Artificial Sequence; identical to SEQ ID NO: 6696
  GFR-binding peptide
  MOD_RES (5), (6), (40), (42): Xaa is C or S
  MOD_RES (20), (21), (22), (23), (24): Xaa is A or G
  MOD_RES (25), (26), (27), (28): Xaa is A or G or is absent

SEQ ID NO: 69105 - protein, 39 aa, Artificial Sequence; identical to SEQ ID NO: 6698
  GFR-binding peptide
  MOD_RES (1), (36), (38): Xaa is C or S
  MOD_RES (15), (16), (17), (18), (19): Xaa is A or G
  MOD_RES (20), (21), (22), (23): Xaa is A or G or is absent

SEQ ID NO: 69106 - protein, 43 aa, Artificial Sequence; identical to SEQ ID NO: 32908
  GFR-binding peptide
  MOD_RES (4), (5), (40), (42): Xaa is C or S
  MOD_RES (19), (20), (21), (22), (23): Xaa is A or G
  MOD_RES (24), (25), (26), (27): Xaa is A or G or is absent

SEQ ID NO: 69107 - protein, 35 aa, Artificial Sequence; identical to SEQ ID NO: 32913
  GFR-binding peptide
  MOD_RES (1), (2), (34): Xaa is C or S

SEQ ID NO: 69108 - protein, 36 aa, Artificial Sequence
  GFR-binding peptide
  MOD_RES (3), (4), (36): Xaa is C or S
EPXXVPEKMNAISILYFDENKNVVLKKYRNMTVESX

SEQ ID NO: 69109 - protein, 35 aa, Artificial Sequence; identical to SEQ ID NO: 6700
  GFR-binding peptide
  MOD_RES (1), (2): Xaa is C or S
  MOD_RES (16), (17), (18), (19), (20): Xaa is A or G
  MOD_RES (21), (22), (23), (24): Xaa is A or G or is absent

SEQ ID NO: 69110 - protein, 33 aa, Artificial Sequence
  GFR-binding peptide
  MOD_RES (32), (32): Xaa is C or S
VPEKMEPISILYLDENKNVVKFKYENMTVESXA

SEQ ID NO: 69111 - protein, 33 aa, Artificial Sequence; identical to SEQ ID NO: 27866
  GFR-binding peptide
  MOD_RES (1), (1): Xaa is C or S
  MOD_RES (15), (16), (17), (18), (19): Xaa is A or G
  MOD_RES (20), (21), (22), (23): Xaa is A or G or is absent

SEQ ID NO: 69112 - protein, 34 aa, Artificial Sequence; identical to SEQ ID NO: 6701
  GFR-binding peptide
  MOD_RES (1), (2): Xaa is C or S
  MOD_RES (16), (17), (18), (19), (20): Xaa is A or G
  MOD_RES (21), (22), (23), (24): Xaa is A or G or is absent

SEQ ID NO: 69113 - protein, 37 aa, Artificial Sequence; identical to SEQ ID NO: 27869
  GFR-binding peptide
  MOD_RES (4), (5), (37): Xaa is C or S

SEQ ID NO: 69114 - protein, 41 aa, Artificial Sequence
  GFR-binding peptide
  MOD_RES (3), (4), (38), (40): Xaa is C or S
  MOD_RES (18), (19), (20), (21), (22): Xaa is A or G
  MOD_RES (23), (24), (25), (26): Xaa is A or G or is absent
PTXXVPTRLSATSILYYXXXXXXXXXLRKHRDMVVESXGXR

SEQ ID NO: 69115 - protein, 34 aa, Artificial Sequence; identical to SEQ ID NO: 6707
  GFR-binding peptide
  MOD_RES (34), (34): Xaa is C or S
  MOD_RES (14), (15), (16), (17), (18): Xaa is A or G
  MOD_RES (19), (20), (21), (22): Xaa is A or G or is absent

SEQ ID NO: 69116 - protein, 38 aa, Artificial Sequence; identical to SEQ ID NO: 32924
  GFR-binding peptide
  MOD_RES (4), (5), (37): Xaa is C or S

SEQ ID NO: 69117 - protein, 40 aa, Artificial Sequence; identical to SEQ ID NO: 32927
  GFR-binding peptide
  MOD_RES (5), (6), (37), (39): Xaa is C or S

SEQ ID NO: 69118 - protein, 38 aa, Artificial Sequence; identical to SEQ ID NO: 6713
  GFR-binding peptide
  MOD_RES (2), (3), (35), (37): Xaa is C or S

SEQ ID NO: 69119 - protein, 38 aa, Artificial Sequence
  GFR-binding peptide
  MOD_RES (1), (2), (36), (38): Xaa is C or S
  MOD_RES (16), (17), (18), (19), (20): Xaa is A or G
  MOD_RES (21), (22), (23), (24): Xaa is A or G or is absent
XXVPTRLSATSILYYXXXXXXXXXLRKHRDMVVESXGX

SEQ ID NO: 69120 - protein, 41 aa, Artificial Sequence; identical to SEQ ID NO: 32933
  GFR-binding peptide
  MOD_RES (5), (6), (40): Xaa is C or S
  MOD_RES (20), (21), (22), (23), (24): Xaa is A or G
  MOD_RES (25), (26), (27), (28): Xaa is A or G or is absent

SEQ ID NO: 69121 - protein, 40 aa, Artificial Sequence
  GFR-binding peptide
  MOD_RES (5), (6), (39): Xaa is C or S
  MOD_RES (20), (21), (22), (23), (24): Xaa is A or G
  MOD_RES (25), (26), (27), (28): Xaa is A or G or is absent
SASPXXVSQDLSPINILYFXXXXXXXXXYGKIPMIVKSXK

SEQ ID NO: 69122 - protein, 37 aa, Artificial Sequence
  GFR-binding peptide
  MOD_RES (34), (36): Xaa is C or S
  MOD_RES (14), (15), (16), (17), (18): Xaa is A or G
  MOD_RES (19), (20), (21), (22): Xaa is A or G or is absent
TPTKMSPISMLYKXXXXXXXXXLKYHYGMVVDRXGXS

SEQ ID NO: 69123 - protein, 39 aa, Artificial Sequence; identical to SEQ ID NO: 6724
  GFR-binding peptide
  MOD_RES (6), (7): Xaa is C or S
  MOD_RES (21), (22), (23), (24), (25): Xaa is A or G
  MOD_RES (26), (27), (28), (29): Xaa is A or G or is absent

SEQ ID NO: 69124 - protein, 38 aa, Artificial Sequence; identical to SEQ ID NO: 6725
  GFR-binding peptide
  MOD_RES (2), (3), (38): Xaa is C or S
  MOD_RES (17), (18), (19), (20), (21): Xaa is A or G
  MOD_RES (22), (23), (24), (25): Xaa is A or G or is absent

SEQ ID NO: 69125 - protein, 31 aa, Artificial Sequence; identical to SEQ ID NO: 27887
  GFR-binding peptide
  MOD_RES (1), (1): Xaa is C or S

SEQ ID NO: 69126 - protein, 39 aa, Artificial Sequence; identical to SEQ ID NO: 6726
  GFR-binding peptide
  MOD_RES (5), (6), (39): Xaa is C or S
  MOD_RES (20), (21), (22), (23), (24): Xaa is A or G
  MOD_RES (25), (26), (27), (28): Xaa is A or G or is absent

SEQ ID NO: 69127 - protein, 33 aa, Artificial Sequence; identical to SEQ ID NO: 6728
  GFR-binding peptide
  MOD_RES (1), (1): Xaa is C or S
  MOD_RES (15), (16), (17), (18), (19): Xaa is A or G
  MOD_RES (20), (21), (22), (23): Xaa is A or G or is absent

SEQ ID NO: 69128 - protein, 39 aa, Artificial Sequence; identical to SEQ ID NO: 6730
  GFR-binding peptide
  MOD_RES (5), (6), (39): Xaa is C or S
  MOD_RES (20), (21), (22), (23), (24): Xaa is A or G
  MOD_RES (25), (26), (27), (28): Xaa is A or G or is absent

SEQ ID NO: 69129 - protein, 34 aa, Artificial Sequence; identical to SEQ ID NO: 6731
  GFR-binding peptide
  MOD_RES (2), (3), (34): Xaa is C or S

SEQ ID NO: 69130 - protein, 34 aa, Artificial Sequence; identical to SEQ ID NO: 6732
  GFR-binding peptide
  MOD_RES (2), (3): Xaa is C or S

SEQ ID NO: 69131 - protein, 35 aa, Artificial Sequence; identical to SEQ ID NO: 32951
  GFR-binding peptide
  MOD_RES (5), (5): Xaa is C or S

SEQ ID NO: 69132 - protein, 33 aa, Artificial Sequence; identical to SEQ ID NO: 6734
  GFR-binding peptide
  MOD_RES (32), (32): Xaa is C or S

SEQ ID NO: 69133 - protein, 33 aa, Artificial Sequence
  GFR-binding peptide
  MOD_RES (2), (3): Xaa is C or S
TXXVPTRLSATSILYYDSANNVVLRKHRDMVVE

SEQ ID NO: 69134 - protein, 33 aa, Artificial Sequence
  GFR-binding peptide
  MOD_RES (1), (2): Xaa is C or S
XXVPTKLSATSILYYDKGVVTYLRKHRGMAVSE

SEQ ID NO: 69135 - protein, 33 aa, Artificial Sequence; identical to SEQ ID NO: 27900
  GFR-binding peptide
  MOD_RES (1), (2): Xaa is C or S

SEQ ID NO: 69136 - protein, 39 aa, Artificial Sequence; identical to SEQ ID NO: 27901
  GFR-binding peptide
  MOD_RES (5), (6), (37), (39): Xaa is C or S

SEQ ID NO: 69137 - protein, 35 aa, Artificial Sequence; identical to SEQ ID NO: 32954
  GFR-binding peptide
  MOD_RES (32), (34): Xaa is C or S

SEQ ID NO: 69138 - protein, 34 aa, Artificial Sequence
  GFR-binding peptide
  MOD_RES (3), (4): Xaa is C or S
EPXXVPEKMEPISILYLDENKNVVKFKYENMTVE

SEQ ID NO: 69139 - protein, 37 aa, Artificial Sequence; identical to SEQ ID NO: 6738
  GFR-binding peptide
  MOD_RES (4), (5), (36): Xaa is C or S

SEQ ID NO: 69140 - protein, 35 aa, Artificial Sequence; identical to SEQ ID NO: 32957
  GFR-binding peptide
  MOD_RES (2), (3), (35): Xaa is C or S

SEQ ID NO: 69141 - protein, 43 aa, Artificial Sequence
  GFR-binding peptide
  MOD_RES (6), (7), (41), (43): Xaa is C or S
  MOD_RES (21), (22), (23), (24), (25): Xaa is A or G
  MOD_RES (26), (27), (28), (29): Xaa is A or G or is absent
GSAGPXXTPTKMEPISMLYLXXXXXXXXXKFKYEGMVVDRXGX

SEQ ID NO: 69142 - protein, 39 aa, Artificial Sequence; identical to SEQ ID NO: 32960
  GFR-binding peptide
  MOD_RES (4), (38): Xaa is C or S
  MOD_RES (18), (19), (20), (21), (22): Xaa is A or G
  MOD_RES (23), (24), (25), (26): Xaa is A or G or is absent

SEQ ID NO: 69143 - protein, 43 aa, Artificial Sequence; identical to SEQ ID NO: 6740
  GFR-binding peptide
  MOD_RES (6), (7), (40), (42): Xaa is C or S
  MOD_RES (21), (22), (23), (24), (25): Xaa is A or G
  MOD_RES (26), (27), (28), (29): Xaa is A or G or is absent

SEQ ID NO: 69144 - protein, 37 aa, Artificial Sequence; identical to SEQ ID NO: 27905
  GFR-binding peptide
  MOD_RES (6), (7): Xaa is C or S

SEQ ID NO: 69145 - protein, 40 aa, Artificial Sequence; identical to SEQ ID NO: 32961
  GFR-binding peptide
  MOD_RES (5), (6), (38), (40): Xaa is C or S

SEQ ID NO: 69146 - protein, 38 aa, Artificial Sequence; identical to SEQ ID NO: 32966
  GFR-binding peptide
  MOD_RES (6), (7): Xaa is C or S

SEQ ID NO: 69147 - protein, 36 aa, Artificial Sequence; identical to SEQ ID NO: 32967
  GFR-binding peptide
  MOD_RES (1), (33), (35): Xaa is C or S

SEQ ID NO: 69148 - protein, 40 aa, Artificial Sequence; identical to SEQ ID NO: 6742
  GFR-binding peptide
  MOD_RES (2), (3), (37), (39): Xaa is C or S
  MOD_RES (17), (18), (19), (20), (21): Xaa is A or G
  MOD_RES (22), (23), (24), (25): Xaa is A or G or is absent

SEQ ID NO: 69149 - protein, 34 aa, Artificial Sequence; identical to SEQ ID NO: 27909
  GFR-binding peptide
  MOD_RES (34), (34): Xaa is C or S
  MOD_RES (14), (15), (16), (17), (18): Xaa is A or G
  MOD_RES (19), (20), (21), (22): Xaa is A or G or is absent

SEQ ID NO: 69150 - protein, 34 aa, Artificial Sequence; identical to SEQ ID NO: 6743
  GFR-binding peptide
  MOD_RES (32), (34): Xaa is C or S

SEQ ID NO: 69151 - protein, 38 aa, Artificial Sequence; identical to SEQ ID NO: 27911
  GFR-binding peptide
  MOD_RES (3), (35), (37): Xaa is C or S

SEQ ID NO: 69152 - protein, 38 aa, Artificial Sequence
  GFR-binding peptide
  MOD_RES (6), (7), (38): Xaa is C or S
RVPSTXXAPVKTEPISMLYLDNGRVLLKFKYEMIVEEX

SEQ ID NO: 69153 - protein, 39 aa, Artificial Sequence; identical to SEQ ID NO: 32968
  GFR-binding peptide
  MOD_RES (3), (4), (38): Xaa is C or S
  MOD_RES (18), (19), (20), (21), (22): Xaa is A or G
  MOD_RES (23), (24), (25), (26): Xaa is A or G or is absent

SEQ ID NO: 69154 - protein, 37 aa, Artificial Sequence; identical to SEQ ID NO: 27913
  GFR-binding peptide
  MOD_RES (1), (35), (37): Xaa is C or S
  MOD_RES (15), (16), (17), (18), (19): Xaa is A or G
  MOD_RES (20), (21), (22), (23): Xaa is A or G or is absent

SEQ ID NO: 69155 - protein, 33 aa, Artificial Sequence
  GFR-binding peptide
  MOD_RES (32), (32): Xaa is C or S
VPTKLSATSILYYDKGVVTYLRKHRGMAVSEXG

SEQ ID NO: 69156 - protein, 39 aa, Artificial Sequence; identical to SEQ ID NO: 6747
  GFR-binding peptide
  MOD_RES (4), (5), (38): Xaa is C or S
  MOD_RES (19), (20), (21), (22), (23): Xaa is A or G
  MOD_RES (24), (25), (26), (27): Xaa is A or G or is absent

SEQ ID NO: 69157 - protein, 37 aa, Artificial Sequence; identical to SEQ ID NO: 6748
  GFR-binding peptide
  MOD_RES (2), (3), (36): Xaa is C or S
  MOD_RES (17), (18), (19), (20), (21): Xaa is A or G
  MOD_RES (22), (23), (24), (25): Xaa is A or G or is absent

SEQ ID NO: 69158 - protein, 39 aa, Artificial Sequence; identical to SEQ ID NO: 6749
  GFR-binding peptide
  MOD_RES (3), (4), (39): Xaa is C or S
  MOD_RES (18), (19), (20), (21), (22): Xaa is A or G
  MOD_RES (23), (24), (25), (26): Xaa is A or G or is absent

SEQ ID NO: 69159 - protein, 35 aa, Artificial Sequence; identical to SEQ ID NO: 32978
  GFR-binding peptide
  MOD_RES (3), (4): Xaa is C or S

SEQ ID NO: 69160 - protein, 33 aa, Artificial Sequence
  GFR-binding peptide
  MOD_RES (14), (15), (16), (17), (18): Xaa is A or G
  MOD_RES (19), (20), (21), (22): Xaa is A or G or is absent
VPTRLSATSILYYXXXXXXXXXLRKHRDMVVES

SEQ ID NO: 69161 - protein, 37 aa, Artificial Sequence
  GFR-binding peptide
  MOD_RES (4), (5), (36): Xaa is C or S
PSTXXAPVKTEPISMLYLDNGRVLLKFKYEMIVEEXG

SEQ ID NO: 69162 - protein, 36 aa, Artificial Sequence; identical to SEQ ID NO: 6751
  GFR-binding peptide
  MOD_RES (1), (2), (36): Xaa is C or S
  MOD_RES (16), (17), (18), (19), (20): Xaa is A or G
  MOD_RES (21), (22), (23), (24): Xaa is A or G or is absent

SEQ ID NO: 69163 - protein, 34 aa, Artificial Sequence; identical to SEQ ID NO: 6752
  GFR-binding peptide
  MOD_RES (34), (34): Xaa is C or S
  MOD_RES (14), (15), (16), (17), (18): Xaa is A or G
  MOD_RES (19), (20), (21), (22): Xaa is A or G or is absent

SEQ ID NO: 69164 - protein, 35 aa, Artificial Sequence; identical to SEQ ID NO: 27925
  GFR-binding peptide
  MOD_RES (3), (4): Xaa is C or S

SEQ ID NO: 69165 - protein, 40 aa, Artificial Sequence
  GFR-binding peptide
  MOD_RES (3), (4), (38), (40): Xaa is C or S
  MOD_RES (18), (19), (20), (21), (22): Xaa is A or G
  MOD_RES (23), (24), (25), (26): Xaa is A or G or is absent
EPXXVPEKMNAISILYFXXXXXXXXXLKKYRNMTVESXAX

SEQ ID NO: 69166 - protein, 38 aa, Artificial Sequence
  GFR-binding peptide
  MOD_RES (1), (2), (35), (37): Xaa is C or S
  MOD_RES (16), (17), (18), (19), (20): Xaa is A or G
  MOD_RES (21), (22), (23), (24): Xaa is A or G or is absent
XXAPVKTSATSMLYYXXXXXXXXXLRKHRMIVEEXGXL

SEQ ID NO: 69167 - protein, 31 aa, Artificial Sequence
  GFR-binding peptide
  MOD_RES (31), (31): Xaa is C or S
APVKTEPISMLYLDNGRVLLKFKYEMIVEEX

SEQ ID NO: 69168 - protein, 42 aa, Artificial Sequence; identical to SEQ ID NO: 27933
  GFR-binding peptide
  MOD_RES (4), (5), (39), (41): Xaa is C or S
  MOD_RES (19), (20), (21), (22), (23): Xaa is A or G
  MOD_RES (24), (25), (26), (27): Xaa is A or G or is absent

SEQ ID NO: 69169 - protein, 36 aa, Artificial Sequence; identical to SEQ ID NO: 32990
  GFR-binding peptide
  MOD_RES (4), (5): Xaa is C or S

SEQ ID NO: 69170 - protein, 38 aa, Artificial Sequence; identical to SEQ ID NO: 27934
  GFR-binding peptide
  MOD_RES (5), (6): Xaa is C or S
  MOD_RES (20), (21), (22), (23), (24): Xaa is A or G
  MOD_RES (25), (26), (27), (28): Xaa is A or G or is absent

SEQ ID NO: 69171 - protein, 31 aa, Artificial Sequence; identical to SEQ ID NO: 6759
  GFR-binding peptide
  MOD_RES (1), (1): Xaa is C or S

SEQ ID NO: 69172 - protein, 34 aa, Artificial Sequence; identical to SEQ ID NO: 27937
  GFR-binding peptide
  MOD_RES (2), (34): Xaa is C or S

SEQ ID NO: 69173 - protein, 35 aa, Artificial Sequence
  GFR-binding peptide
  MOD_RES (4), (5): Xaa is C or S
ASPXXVSQDLSPINILYFIGKTPKIYGKIPMIVKS

SEQ ID NO: 69174 - protein, 36 aa, Artificial Sequence; identical to SEQ ID NO: 6762
  GFR-binding peptide
  MOD_RES (33), (35): Xaa is C or S
  MOD_RES (14), (15), (16), (17), (18): Xaa is A or G
  MOD_RES (19), (20), (21), (22): Xaa is A or G or is absent

SEQ ID NO: 69175 - protein, 39 aa, Artificial Sequence; identical to SEQ ID NO: 27939
  GFR-binding peptide
  MOD_RES (3), (4), (38): Xaa is C or S
  MOD_RES (18), (19), (20), (21), (22): Xaa is A or G
  MOD_RES (23), (24), (25), (26): Xaa is A or G or is absent

SEQ ID NO: 69176 - protein, 36 aa, Artificial Sequence; identical to SEQ ID NO: 32995
  GFR-binding peptide
  MOD_RES (1), (2), (36): Xaa is C or S
  MOD_RES (16), (17), (18), (19), (20): Xaa is A or G
  MOD_RES (21), (22), (23), (24): Xaa is A or G or is absent

SEQ ID NO: 69177 - protein, 32 aa, Artificial Sequence
  GFR-binding peptide
  MOD_RES (1), (1): Xaa is C or S
XVPEKMSPINILYFDENKNVVYGKIPNMTVES

SEQ ID NO: 69178 - protein, 35 aa, Artificial Sequence; identical to SEQ ID NO: 14123
  GFR-binding peptide
  MOD_RES (34), (34): Xaa is C or S
  MOD_RES (14), (15), (16), (17), (18): Xaa is A or G
  MOD_RES (19), (20), (21), (22): Xaa is A or G or is absent

SEQ ID NO: 69179 - protein, 39 aa, Artificial Sequence; identical to SEQ ID NO: 27946
  GFR-binding peptide
  MOD_RES (5), (6), (38): Xaa is C or S

SEQ ID NO: 69180 - protein, 35 aa, Artificial Sequence; identical to SEQ ID NO: 6770
  GFR-binding peptide
  MOD_RES (2), (3): Xaa is C or S
  MOD_RES (17), (18), (19), (20), (21): Xaa is A or G
  MOD_RES (22), (23), (24), (25): Xaa is A or G or is absent

SEQ ID NO: 69181 - protein, 40 aa, Artificial Sequence; identical to SEQ ID NO: 27949
  GFR-binding peptide
  MOD_RES (4), (5), (37), (39): Xaa is C or S

SEQ ID NO: 69182 - protein, 38 aa, Artificial Sequence; identical to SEQ ID NO: 32999
  GFR-binding peptide
  MOD_RES (5), (6), (38): Xaa is C or S

SEQ ID NO: 69183 - protein, 39 aa, Artificial Sequence; identical to SEQ ID NO: 6773
  GFR-binding peptide
  MOD_RES (1), (2), (36), (38): Xaa is C or S
  MOD_RES (16), (17), (18), (19), (20): Xaa is A or G
  MOD_RES (21), (22), (23), (24): Xaa is A or G or is absent

SEQ ID NO: 69184 - protein, 39 aa, Artificial Sequence; identical to SEQ ID NO: 27951
  GFR-binding peptide
  MOD_RES (5), (6): Xaa is C or S
  MOD_RES (20), (21), (22), (23), (24): Xaa is A or G
  MOD_RES (25), (26), (27), (28): Xaa is A or G or is absent

SEQ ID NO: 69185 - protein, 36 aa, Artificial Sequence; identical to SEQ ID NO: 33003
  GFR-binding peptide
  MOD_RES (1), (2), (34), (36): Xaa is C or S

SEQ ID NO: 69186 - protein, 39 aa, Artificial Sequence; identical to SEQ ID NO: 6777
  GFR-binding peptide
  MOD_RES (3), (4), (38): Xaa is C or S
  MOD_RES (18), (19), (20), (21), (22): Xaa is A or G
  MOD_RES (23), (24), (25), (26): Xaa is A or G or is absent

SEQ ID NO: 69187 - protein, 36 aa, Artificial Sequence; identical to SEQ ID NO: 27958
  GFR-binding peptide
  MOD_RES (1), (2), (34), (36): Xaa is C or S

SEQ ID NO: 69188 - protein, 40 aa, Artificial Sequence; identical to SEQ ID NO: 6779
  GFR-binding peptide
  MOD_RES (5), (6), (37), (39): Xaa is C or S

SEQ ID NO: 69189 - protein, 41 aa, Artificial Sequence; identical to SEQ ID NO: 27961
  GFR-binding peptide
  MOD_RES (5), (6), (40): Xaa is C or S
  MOD_RES (20), (21), (22), (23), (24): Xaa is A or G
  MOD_RES (25), (26), (27), (28): Xaa is A or G or is absent

SEQ ID NO: 69190 - protein, 40 aa, Artificial Sequence
  GFR-binding peptide
  MOD_RES (6), (7): Xaa is C or S
  MOD_RES (21), (22), (23), (24), (25): Xaa is A or G
  MOD_RES (26), (27), (28), (29): Xaa is A or G or is absent
KASKAXXVPTKLSATSILYYXXXXXXXXXLRKHRGMAVSE

SEQ ID NO: 69191 - protein, 40 aa, Artificial Sequence
  GFR-binding peptide
  MOD_RES (6), (7): Xaa is C or S
  MOD_RES (21), (22), (23), (24), (25): Xaa is A or G
  MOD_RES (26), (27), (28), (29): Xaa is A or G or is absent
STPPTXXVPTRLEPISILYLXXXXXXXXXKFKYEDMVVES

SEQ ID NO: 69192 - protein, 38 aa, Artificial Sequence; identical to SEQ ID NO: 6785
  GFR-binding peptide
  MOD_RES (4), (5), (37): Xaa is C or S

SEQ ID NO: 69193 - protein, 36 aa, Artificial Sequence; identical to SEQ ID NO: 6787
  GFR-binding peptide
  MOD_RES (2), (3): Xaa is C or S
  MOD_RES (17), (18), (19), (20), (21): Xaa is A or G
  MOD_RES (22), (23), (24), (25): Xaa is A or G or is absent

SEQ ID NO: 69194 - protein, 41 aa, Artificial Sequence; identical to SEQ ID NO: 6788
  GFR-binding peptide
  MOD_RES (6), (7), (39), (41): Xaa is C or S

SEQ ID NO: 69195 - protein, 36 aa, Artificial Sequence
  GFR-binding peptide
  MOD_RES (2), (3): Xaa is C or S
  MOD_RES (17), (18), (19), (20), (21): Xaa is A or G
  MOD_RES (22), (23), (24), (25): Xaa is A or G or is absent
PXXVPEKMSPINILYFXXXXXXXXXYGKIPNMTVES

SEQ ID NO: 69196 - protein, 38 aa, Artificial Sequence
  GFR-binding peptide
  MOD_RES (2), (3), (37): Xaa is C or S
  MOD_RES (17), (18), (19), (20), (21): Xaa is A or G
  MOD_RES (22), (23), (24), (25): Xaa is A or G or is absent
TXXVPTRLEPISILYLXXXXXXXXXKFKYEDMVVESXG

SEQ ID NO: 69197 - protein, 37 aa, Artificial Sequence; identical to SEQ ID NO: 6789
  GFR-binding peptide
  MOD_RES (4), (5), (37): Xaa is C or S

SEQ ID NO: 69198 - protein, 36 aa, Artificial Sequence
  GFR-binding peptide
  MOD_RES (1), (33), (35): Xaa is C or S
XVPTRLSPISILYKDSANNVVLKYHYDMVVESXGXR

SEQ ID NO: 69199 - protein, 35 aa, Artificial Sequence; identical to SEQ ID NO: 6790
  GFR-binding peptide
  MOD_RES (1), (2), (33), (35): Xaa is C or S

SEQ ID NO: 69200 - protein, 38 aa, Artificial Sequence
  GFR-binding peptide
  MOD_RES (5), (6): Xaa is C or S
  MOD_RES (20), (21), (22), (23), (24): Xaa is A or G
  MOD_RES (25), (26), (27), (28): Xaa is A or G or is absent
TPPTXXVPTRLEPISILYLXXXXXXXXXKFKYEDMVVE

SEQ ID NO: 69201 - protein, 38 aa, Artificial Sequence; identical to SEQ ID NO: 6791
  GFR-binding peptide
  MOD_RES (4), (5), (37): Xaa is C or S

SEQ ID NO: 69202 - protein, 38 aa, Artificial Sequence; identical to SEQ ID NO: 6792
  GFR-binding peptide
  MOD_RES (4), (5): Xaa is C or S
  MOD_RES (19), (20), (21), (22), (23): Xaa is A or G
  MOD_RES (24), (25), (26), (27): Xaa is A or G or is absent

SEQ ID NO: 69203 - protein, 40 aa, Artificial Sequence; identical to SEQ ID NO: 6793
  GFR-binding peptide
  MOD_RES (2), (3), (37), (39): Xaa is C or S
  MOD_RES (17), (18), (19), (20), (21): Xaa is A or G
  MOD_RES (22), (23), (24), (25): Xaa is A or G or is absent

SEQ ID NO: 69204 - protein, 38 aa, Artificial Sequence; identical to SEQ ID NO: 6796
  GFR-binding peptide
  MOD_RES (35), (37): Xaa is C or S
  MOD_RES (14), (15), (16), (17), (18): Xaa is A or G
  MOD_RES (19), (20), (21), (22): Xaa is A or G or is absent

SEQ ID NO: 69205 - protein, 33 aa, Artificial Sequence
  GFR-binding peptide
  MOD_RES (32), (32): Xaa is C or S
VPEKMNAISILYFDENKNVVLKKYRNMTVESXA

SEQ ID NO: 69206 - protein, 39 aa, Artificial Sequence; identical to SEQ ID NO: 27979
  GFR-binding peptide
  MOD_RES (3), (4), (37), (39): Xaa is C or S
  MOD_RES (18), (19), (20), (21), (22): Xaa is A or G
  MOD_RES (23), (24), (25), (26): Xaa is A or G or is absent

SEQ ID NO: 69207 - protein, 42 aa, Artificial Sequence; identical to SEQ ID NO: 33031
  GFR-binding peptide
  MOD_RES (4), (5), (39), (41): Xaa is C or S
  MOD_RES (19), (20), (21), (22), (23): Xaa is A or G
  MOD_RES (24), (25), (26), (27): Xaa is A or G or is absent

SEQ ID NO: 69208 - protein, 38 aa, Artificial Sequence; identical to SEQ ID NO: 6799
  GFR-binding peptide
  MOD_RES (3), (4), (35), (37): Xaa is C or S

SEQ ID NO: 69209 - protein, 41 aa, Artificial Sequence
  GFR-binding peptide
  MOD_RES (6), (7), (40): Xaa is C or S
  MOD_RES (21), (22), (23), (24), (25): Xaa is A or G
  MOD_RES (26), (27), (28), (29): Xaa is A or G or is absent
ASAAPXXVPQALSPINILYFXXXXXXXXXYGKIPMIVRSXK

SEQ ID NO: 69210 - protein, 38 aa, Artificial Sequence; identical to SEQ ID NO: 6801
  GFR-binding peptide
  MOD_RES (4), (5), (38): Xaa is C or S
  MOD_RES (19), (20), (21), (22), (23): Xaa is A or G
  MOD_RES (24), (25), (26), (27): Xaa is A or G or is absent

SEQ ID NO: 69211 - protein, 41 aa, Artificial Sequence; identical to SEQ ID NO: 6803
  GFR-binding peptide
  MOD_RES (7), (39), (41): Xaa is C or S

SEQ ID NO: 69212 - protein, 41 aa, Artificial Sequence; identical to SEQ ID NO: 6806
  GFR-binding peptide
  MOD_RES (6), (7), (39), (41): Xaa is C or S

SEQ ID NO: 69213 - protein, 38 aa, Artificial Sequence; identical to SEQ ID NO: 27989
  GFR-binding peptide
  MOD_RES (4), (36), (38): Xaa is C or S

SEQ ID NO: 69214 - protein, 41 aa, Artificial Sequence; identical to SEQ ID NO: 6809
  GFR-binding peptide
  MOD_RES (6), (38), (40): Xaa is C or S

SEQ ID NO: 69215 - protein, 35 aa, Artificial Sequence; identical to SEQ ID NO: 6810
  GFR-binding peptide
  MOD_RES (4), (5): Xaa is C or S

SEQ ID NO: 69216 - protein, 37 aa, Artificial Sequence; identical to SEQ ID NO: 6812
  GFR-binding peptide
  MOD_RES (3), (37): Xaa is C or S
  MOD_RES (17), (18), (19), (20), (21): Xaa is A or G
  MOD_RES (22), (23), (24), (25): Xaa is A or G or is absent

SEQ ID NO: 69217 - protein, 36 aa, Artificial Sequence; identical to SEQ ID NO: 6814
  GFR-binding peptide
  MOD_RES (34), (36): Xaa is C or S
  MOD_RES (14), (15), (16), (17), (18): Xaa is A or G
  MOD_RES (19), (20), (21), (22): Xaa is A or G or is absent

SEQ ID NO: 69218 - protein, 42 aa, Artificial Sequence
  GFR-binding peptide
  MOD_RES (6), (7), (40), (42): Xaa is C or S
  MOD_RES (21), (22), (23), (24), (25): Xaa is A or G
  MOD_RES (26), (27), (28), (29): Xaa is A or G or is absent
RVPSTXXAPVKTEPISMLYLXXXXXXXXXKFKYEMIVEEXGX

SEQ ID NO: 69219 - protein, 31 aa, Artificial Sequence
  GFR-binding peptide
VPEKMEPISILYLDENKNVVKFKYENMTVES

SEQ ID NO: 69220 - protein, 36 aa, Artificial Sequence
  GFR-binding peptide
  MOD_RES (33), (35): Xaa is C or S
  MOD_RES (14), (15), (16), (17), (18): Xaa is A or G
  MOD_RES (19), (20), (21), (22): Xaa is A or G or is absent
VPQDLSPINILYFXXXXXXXXXYGKIPMVVKSXKXS

SEQ ID NO: 69221 - protein, 38 aa, Artificial Sequence
  GFR-binding peptide
  MOD_RES (2), (3), (35), (37): Xaa is C or S
TXXVPTRLEPISILYLDSANNVVKFKYEDMVVESXGXR

SEQ ID NO: 69222 - protein, 38 aa, Artificial Sequence
  GFR-binding peptide
  MOD_RES (5), (6): Xaa is C or S
  MOD_RES (20), (21), (22), (23), (24): Xaa is A or G
  MOD_RES (25), (26), (27), (28): Xaa is A or G or is absent
TPPTXXVPTRLSPISILYKXXXXXXXXXLKYHYDMVVE

SEQ ID NO: 69223 - protein, 43 aa, Artificial Sequence
  GFR-binding peptide
  MOD_RES (5), (6), (40), (42): Xaa is C or S
  MOD_RES (20), (21), (22), (23), (24): Xaa is A or G
  MOD_RES (25), (26), (27), (28): Xaa is A or G or is absent
SAGPXXTPTKMEPISMLYLXXXXXXXXXKFKYEGMVVDRXGXS

SEQ ID NO: 69224 - protein, 32 aa, Artificial Sequence; identical to SEQ ID NO: 6822
  GFR-binding peptide
  MOD_RES (1), (2): Xaa is C or S

SEQ ID NO: 69225 - protein, 40 aa, Artificial Sequence; identical to SEQ ID NO: 33057
  GFR-binding peptide
  MOD_RES (6), (7): Xaa is C or S
  MOD_RES (21), (22), (23), (24), (25): Xaa is A or G
  MOD_RES (26), (27), (28), (29): Xaa is A or G or is absent

SEQ ID NO: 69226 - protein, 37 aa, Artificial Sequence
  GFR-binding peptide
  MOD_RES (3), (4), (37): Xaa is C or S
  MOD_RES (18), (19), (20), (21), (22): Xaa is A or G
  MOD_RES (23), (24), (25), (26): Xaa is A or G or is absent
APXXVPQALSPINILYFXXXXXXXXXYGKIPMIVRSX

SEQ ID NO: 69227 - protein, 36 aa, Artificial Sequence; identical to SEQ ID NO: 28000
  GFR-binding peptide
  MOD_RES (2), (3): Xaa is C or S
  MOD_RES (17), (18), (19), (20), (21): Xaa is A or G
  MOD_RES (22), (23), (24), (25): Xaa is A or G or is absent

SEQ ID NO: 69228 - protein, 33 aa, Artificial Sequence; identical to SEQ ID NO: 6824
  GFR-binding peptide
  MOD_RES (1), (1): Xaa is C or S
  MOD_RES (15), (16), (17), (18), (19): Xaa is A or G
  MOD_RES (20), (21), (22), (23): Xaa is A or G or is absent

SEQ ID NO: 69229 - protein, 37 aa, Artificial Sequence
  GFR-binding peptide
  MOD_RES (1), (2), (34), (36): Xaa is C or S
XXVPTRLEPISILYLDSANNVVKFKYEDMVVESXGXR

SEQ ID NO: 69230 - protein, 31 aa, Artificial Sequence
  GFR-binding peptide
VPARLSATSILYYDAANNVVLRKHRDMVVEA

SEQ ID NO: 69231 - protein, 37 aa, Artificial Sequence
  GFR-binding peptide
  MOD_RES (34), (36): Xaa is C or S
  MOD_RES (14), (15), (16), (17), (18): Xaa is A or G
  MOD_RES (19), (20), (21), (22): Xaa is A or G or is absent
VPTRLEPISILYLXXXXXXXXXKFKYEDMVVESXGXR

SEQ ID NO: 69232 - protein, 39 aa, Artificial Sequence; identical to SEQ ID NO: 6830
  GFR-binding peptide
  MOD_RES (3), (4), (37), (39): Xaa is C or S
  MOD_RES (18), (19), (20), (21), (22): Xaa is A or G
  MOD_RES (23), (24), (25), (26): Xaa is A or G or is absent

SEQ ID NO: 69233 - protein, 35 aa, Artificial Sequence
  GFR-binding peptide
  MOD_RES (4), (5): Xaa is C or S
PEPXXVPEKMSPISILYKDENKNVVLKYHYNMTVE

SEQ ID NO: 69234 - protein, 36 aa, Artificial Sequence; identical to SEQ ID NO: 6833
  GFR-binding peptide
  MOD_RES (4), (5), (36): Xaa is C or S

SEQ ID NO: 69235 - protein, 36 aa, Artificial Sequence; identical to SEQ ID NO: 14179
  GFR-binding peptide
  MOD_RES (1), (2), (36): Xaa is C or S
  MOD_RES (16), (17), (18), (19), (20): Xaa is A or G
  MOD_RES (21), (22), (23), (24): Xaa is A or G or is absent

SEQ ID NO: 69236 - protein, 36 aa, Artificial Sequence; identical to SEQ ID NO: 57961
  GFR-binding peptide
  MOD_RES (2), (3), (35): Xaa is C or S

SEQ ID NO: 69237 - protein, 37 aa, Artificial Sequence; identical to SEQ ID NO: 6837
  GFR-binding peptide
  MOD_RES (1), (2), (36): Xaa is C or S
  MOD_RES (16), (17), (18), (19), (20): Xaa is A or G
  MOD_RES (21), (22), (23), (24): Xaa is A or G or is absent

SEQ ID NO: 69238 - protein, 34 aa, Artificial Sequence; identical to SEQ ID NO: 14180
  GFR-binding peptide
  MOD_RES (1), (2): Xaa is C or S
  MOD_RES (16), (17), (18), (19), (20): Xaa is A or G
  MOD_RES (21), (22), (23), (24): Xaa is A or G or is absent

SEQ ID NO: 69239 - protein, 36 aa, Artificial Sequence; identical to SEQ ID NO: 28018
  GFR-binding peptide
  MOD_RES (3), (4): Xaa is C or S

SEQ ID NO: 69240 - protein, 33 aa, Artificial Sequence; identical to SEQ ID NO: 6840
  GFR-binding peptide
  MOD_RES (1), (2), (33): Xaa is C or S

SEQ ID NO: 69241 - protein, 34 aa, Artificial Sequence
  GFR-binding peptide
  MOD_RES (3), (4): Xaa is C or S
EPXXVPEKMSATSILYYDENKNVVLRKHRNMTVE

SEQ ID NO: 69242 - protein, 38 aa, Artificial Sequence; identical to SEQ ID NO: 6841
  GFR-binding peptide
  MOD_RES (5), (6): Xaa is C or S
  MOD_RES (20), (21), (22), (23), (24): Xaa is A or G
  MOD_RES (25), (26), (27), (28): Xaa is A or G or is absent

SEQ ID NO: 69243 - protein, 36 aa, Artificial Sequence
  GFR-binding peptide
  MOD_RES (2), (3), (36): Xaa is C or S
  MOD_RES (17), (18), (19), (20), (21): Xaa is A or G
  MOD_RES (22), (23), (24), (25): Xaa is A or G or is absent
TXXAPVKTSPISMLYKXXXXXXXXXLKYHYMIVEEX

SEQ ID NO: 69244 - protein, 36 aa, Artificial Sequence; identical to SEQ ID NO: 33077
  GFR-binding peptide
  MOD_RES (2), (3), (35): Xaa is C or S

SEQ ID NO: 69245 - protein, 35 aa, Artificial Sequence; identical to SEQ ID NO: 33082
  GFR-binding peptide
  MOD_RES (4), (5): Xaa is C or S

SEQ ID NO: 69246 - protein, 37 aa, Artificial Sequence; identical to SEQ ID NO: 6847
  GFR-binding peptide
  MOD_RES (3), (4), (36): Xaa is C or S

SEQ ID NO: 69247 - protein, 39 aa, Artificial Sequence; identical to SEQ ID NO: 6848
  GFR-binding peptide
  MOD_RES (5), (6), (38): Xaa is C or S

SEQ ID NO: 69248 - protein, 35 aa, Artificial Sequence; identical to SEQ ID NO: 6849
  GFR-binding peptide
  MOD_RES (1), (2), (35): Xaa is C or S
  MOD_RES (16), (17), (18), (19), (20): Xaa is A or G
  MOD_RES (21), (22), (23), (24): Xaa is A or G or is absent

SEQ ID NO: 69249 - protein, 38 aa, Artificial Sequence; identical to SEQ ID NO: 57976
  GFR-binding peptide
  MOD_RES (1), (35), (37): Xaa is C or S
  MOD_RES (15), (16), (17), (18), (19): Xaa is A or G
  MOD_RES (20), (21), (22), (23): Xaa is A or G or is absent

SEQ ID NO: 69250 - protein, 36 aa, Artificial Sequence; identical to SEQ ID NO: 33093
  GFR-binding peptide
  MOD_RES (2), (3), (35): Xaa is C or S

SEQ ID NO: 69251 - protein, 36 aa, Artificial Sequence; identical to SEQ ID NO: 6851
  GFR-binding peptide
  MOD_RES (1), (33), (35): Xaa is C or S

SEQ ID NO: 69252 - protein, 39 aa, Artificial Sequence; identical to SEQ ID NO: 6852
  GFR-binding peptide
  MOD_RES (4), (5), (37), (39): Xaa is C or S

SEQ ID NO: 69253 - protein, 41 aa, Artificial Sequence; identical to SEQ ID NO: 28029
  GFR-binding peptide
  MOD_RES (6), (40): Xaa is C or S
  MOD_RES (20), (21), (22), (23), (24): Xaa is A or G
  MOD_RES (25), (26), (27), (28): Xaa is A or G or is absent

SEQ ID NO: 69254 - protein, 41 aa, Artificial Sequence; identical to SEQ ID NO: 28030
  GFR-binding peptide
  MOD_RES (3), (4), (38), (40): Xaa is C or S
  MOD_RES (18), (19), (20), (21), (22): Xaa is A or G
  MOD_RES (23), (24), (25), (26): Xaa is A or G or is absent

SEQ ID NO: 69255 - protein, 41 aa, Artificial Sequence; identical to SEQ ID NO: 6854
  GFR-binding peptide
  MOD_RES (4), (5), (39), (41): Xaa is C or S
  MOD_RES (19), (20), (21), (22), (23): Xaa is A or G
  MOD_RES (24), (25), (26), (27): Xaa is A or G or is absent

SEQ ID NO: 69256 - protein, 36 aa, Artificial Sequence
  GFR-binding peptide
  MOD_RES (1), (2), (36): Xaa is C or S
  MOD_RES (16), (17), (18), (19), (20): Xaa is A or G
  MOD_RES (21), (22), (23), (24): Xaa is A or G or is absent
XXVPEKMSPISILYKXXXXXXXXXLKYHYNMTVESX

SEQ ID NO: 69257 - protein, 34 aa, Artificial Sequence; identical to SEQ ID NO: 6855
  GFR-binding peptide
  MOD_RES (33), (33): Xaa is C or S

SEQ ID NO: 69258 - protein, 38 aa, Artificial Sequence; identical to SEQ ID NO: 28031
  GFR-binding peptide
  MOD_RES (4), (5), (38): Xaa is C or S
  MOD_RES (19), (20), (21), (22), (23): Xaa is A or G
  MOD_RES (24), (25), (26), (27): Xaa is A or G or is absent

SEQ ID NO: 69259 - protein, 33 aa, Artificial Sequence; identical to SEQ ID NO: 28032
  GFR-binding peptide
  MOD_RES (1), (1): Xaa is C or S
  MOD_RES (15), (16), (17), (18), (19): Xaa is A or G
  MOD_RES (20), (21), (22), (23): Xaa is A or G or is absent

SEQ ID NO: 69260 - protein, 41 aa, Artificial Sequence
  GFR-binding peptide
  MOD_RES (3), (4), (38), (40): Xaa is C or S
  MOD_RES (18), (19), (20), (21), (22): Xaa is A or G
  MOD_RES (23), (24), (25), (26): Xaa is A or G or is absent
PTXXVPTRLEPISILYLXXXXXXXXXKFKYEDMVVESXGXR

SEQ ID NO: 69261 - protein, 40 aa, Artificial Sequence
  GFR-binding peptide
  MOD_RES (4), (5), (37), (39): Xaa is C or S
PPTXXVPTRLSATSILYYDSANNVVLRKHRDMVVESXGXR

SEQ ID NO: 69262 - protein, 41 aa, Artificial Sequence; identical to SEQ ID NO: 33105
  GFR-binding peptide
  MOD_RES (7), (41): Xaa is C or S
  MOD_RES (21), (22), (23), (24), (25): Xaa is A or G
  MOD_RES (26), (27), (28), (29): Xaa is A or G or is absent

SEQ ID NO: 69263 - protein, 39 aa, Artificial Sequence; identical to SEQ ID NO: 33109
  GFR-binding peptide
  MOD_RES (4), (5), (37), (39): Xaa is C or S

SEQ ID NO: 69264 - protein, 35 aa, Artificial Sequence; identical to SEQ ID NO: 6860
  GFR-binding peptide
  MOD_RES (3), (4), (35): Xaa is C or S

SEQ ID NO: 69265 - protein, 34 aa, Artificial Sequence; identical to SEQ ID NO: 6861
  GFR-binding peptide
  MOD_RES (2), (3): Xaa is C or S

SEQ ID NO: 69266 - protein, 40 aa, Artificial Sequence
  GFR-binding peptide
  MOD_RES (5), (6), (37), (39): Xaa is C or S
SASPXXVPQDLSPINILYFVGRTPKVYGKIPMVVKSXKXS

SEQ ID NO: 69267 - protein, 36 aa, Artificial Sequence; identical to SEQ ID NO: 28040
  GFR-binding peptide
  MOD_RES (4), (5): Xaa is C or S

SEQ ID NO: 69268 - protein, 37 aa, Artificial Sequence; identical to SEQ ID NO: 6863
  GFR-binding peptide
  MOD_RES (4), (5): Xaa is C or S
  MOD_RES (19), (20), (21), (22), (23): Xaa is A or G
  MOD_RES (24), (25), (26), (27): Xaa is A or G or is absent

SEQ ID NO: 69269 - protein, 34 aa, Artificial Sequence; identical to SEQ ID NO: 28042
  GFR-binding peptide
  MOD_RES (33), (33): Xaa is C or S
  MOD_RES (14), (15), (16), (17), (18): Xaa is A or G
  MOD_RES (19), (20), (21), (22): Xaa is A or G or is absent

SEQ ID NO: 69270 - protein, 32 aa, Artificial Sequence; identical to SEQ ID NO: 28043
  GFR-binding peptide
  MOD_RES (1), (2): Xaa is C or S

SEQ ID NO: 69271 - protein, 35 aa, Artificial Sequence; identical to SEQ ID NO: 6865
  GFR-binding peptide
  MOD_RES (1), (2), (35): Xaa is C or S
  MOD_RES (16), (17), (18), (19), (20): Xaa is A or G
  MOD_RES (21), (22), (23), (24): Xaa is A or G or is absent

SEQ ID NO: 69272 - protein, 40 aa, Artificial Sequence
  GFR-binding peptide
  MOD_RES (2), (3), (37), (39): Xaa is C or S
  MOD_RES (17), (18), (19), (20), (21): Xaa is A or G
  MOD_RES (22), (23), (24), (25): Xaa is A or G or is absent
PXXVPEKMSPISILYKXXXXXXXXXLKYHYNMTVESXAXR

SEQ ID NO: 69273 - protein, 37 aa, Artificial Sequence; identical to SEQ ID NO: 6868
  GFR-binding peptide
  MOD_RES (6), (6): Xaa is C or S

SEQ ID NO: 69274 - protein, 36 aa, Artificial Sequence; identical to SEQ ID NO: 28046
  GFR-binding peptide
  MOD_RES (5), (6): Xaa is C or S

SEQ ID NO: 69275 - protein, 40 aa, Artificial Sequence; identical to SEQ ID NO: 6869
  GFR-binding peptide
  MOD_RES (3), (4), (37), (39): Xaa is C or S
  MOD_RES (18), (19), (20), (21), (22): Xaa is A or G
  MOD_RES (23), (24), (25), (26): Xaa is A or G or is absent

SEQ ID NO: 69276 - protein, 35 aa, Artificial Sequence; identical to SEQ ID NO: 6871
  GFR-binding peptide
  MOD_RES (1), (2): Xaa is C or S
  MOD_RES (16), (17), (18), (19), (20): Xaa is A or G
  MOD_RES (21), (22), (23), (24): Xaa is A or G or is absent

SEQ ID NO: 69277 - protein, 37 aa, Artificial Sequence; identical to SEQ ID NO: 28050
  GFR-binding peptide
  MOD_RES (4), (5): Xaa is C or S
  MOD_RES (19), (20), (21), (22), (23): Xaa is A or G
  MOD_RES (24), (25), (26), (27): Xaa is A or G or is absent

SEQ ID NO: 69278 - protein, 34 aa, Artificial Sequence; identical to SEQ ID NO: 33119
  GFR-binding peptide
  MOD_RES (1), (2), (34): Xaa is C or S

SEQ ID NO: 69279 - protein, 40 aa, Artificial Sequence; identical to SEQ ID NO: 33121
  GFR-binding peptide
  MOD_RES (5), (6), (40): Xaa is C or S
  MOD_RES (20), (21), (22), (23), (24): Xaa is A or G
  MOD_RES (25), (26), (27), (28): Xaa is A or G or is absent

SEQ ID NO: 69280 - protein, 34 aa, Artificial Sequence
  GFR-binding peptide
  MOD_RES (34), (34): Xaa is C or S
  MOD_RES (14), (15), (16), (17), (18): Xaa is A or G
  MOD_RES (19), (20), (21), (22): Xaa is A or G or is absent
VPEKMSATSILYYXXXXXXXXXLRKHRNMTVESX

SEQ ID NO: 69281 - protein, 38 aa, Artificial Sequence; identical to SEQ ID NO: 6878
  GFR-binding peptide
  MOD_RES (3), (4): Xaa is C or S
  MOD_RES (18), (19), (20), (21), (22): Xaa is A or G
  MOD_RES (23), (24), (25), (26): Xaa is A or G or is absent

SEQ ID NO: 69282 - protein, 40 aa, Artificial Sequence; identical to SEQ ID NO: 33136
  GFR-binding peptide
  MOD_RES (4), (5), (37), (39): Xaa is C or S

SEQ ID NO: 69283 - protein, 32 aa, Artificial Sequence
  GFR-binding peptide
  MOD_RES (1), (1): Xaa is C or S
XVPEKMEPISILYLDENKNVVKFKYENMTVES

SEQ ID NO: 69284 - protein, 40 aa, Artificial Sequence
  GFR-binding peptide
  MOD_RES (4), (5), (39): Xaa is C or S
  MOD_RES (19), (20), (21), (22), (23): Xaa is A or G
  MOD_RES (24), (25), (26), (27): Xaa is A or G or is absent
AGPXXTPTKMSPISMLYKXXXXXXXXXLKYHYGMVVDRXG

SEQ ID NO: 69285 - protein, 35 aa, Artificial Sequence; identical to SEQ ID NO: 28057
  GFR-binding peptide
  MOD_RES (34), (34): Xaa is C or S
  MOD_RES (14), (15), (16), (17), (18): Xaa is A or G
  MOD_RES (19), (20), (21), (22): Xaa is A or G or is absent

SEQ ID NO: 69286 - protein, 42 aa, Artificial Sequence; identical to SEQ ID NO: 28061
  GFR-binding peptide
  MOD_RES (5), (6), (39), (41): Xaa is C or S

SEQ ID NO: 69287 - protein, 35 aa, Artificial Sequence; identical to SEQ ID NO: 28062
  GFR-binding peptide
  MOD_RES (32), (34): Xaa is C or S

SEQ ID NO: 69288 - protein, 37 aa, Artificial Sequence
  GFR-binding peptide
  MOD_RES (3), (4): Xaa is C or S
  MOD_RES (18), (19), (20), (21), (22): Xaa is A or G
  MOD_RES (23), (24), (25), (26): Xaa is A or G or is absent
EPXXVPEKMSPINILYFXXXXXXXXXYGKIPNMTVES

SEQ ID NO: 69289 - protein, 42 aa, Artificial Sequence; identical to SEQ ID NO: 6881
  GFR-binding peptide
  MOD_RES (6), (7), (39), (41): Xaa is C or S

SEQ ID NO: 69290 - protein, 36 aa, Artificial Sequence; identical to SEQ ID NO: 6882
  GFR-binding peptide
  MOD_RES (2), (3), (36): Xaa is C or S
  MOD_RES (17), (18), (19), (20), (21): Xaa is A or G
  MOD_RES (22), (23), (24), (25): Xaa is A or G or is absent

SEQ ID NO: 69291 - protein, 33 aa, Artificial Sequence
  GFR-binding peptide
  MOD_RES (32), (32): Xaa is C or S
VPARLSATSILYYDAANNVVLRKHRDMVVEAXG

SEQ ID NO: 69292 - protein, 37 aa, Artificial Sequence; identical to SEQ ID NO: 6888
  GFR-binding peptide
  MOD_RES (4), (5), (36): Xaa is C or S

SEQ ID NO: 69293 - protein, 34 aa, Artificial Sequence; identical to SEQ ID NO: 28067
  GFR-binding peptide
  MOD_RES (2), (3), (34): Xaa is C or S

SEQ ID NO: 69294 - protein, 44 aa, Artificial Sequence; identical to SEQ ID NO: 33144
  GFR-binding peptide
  MOD_RES (6), (7), (41), (43): Xaa is C or S
  MOD_RES (21), (22), (23), (24), (25): Xaa is A or G
  MOD_RES (26), (27), (28), (29): Xaa is A or G or is absent

SEQ ID NO: 69295 - protein, 35 aa, Artificial Sequence; identical to SEQ ID NO: 6891
  GFR-binding peptide
  MOD_RES (1), (1): Xaa is C or S
  MOD_RES (15), (16), (17), (18), (19): Xaa is A or G
  MOD_RES (20), (21), (22), (23): Xaa is A or G or is absent

SEQ ID NO: 69296 - protein, 33 aa, Artificial Sequence; identical to SEQ ID NO: 28071
  GFR-binding peptide
  MOD_RES (1), (1): Xaa is C or S
  MOD_RES (15), (16), (17), (18), (19): Xaa is A or G
  MOD_RES (20), (21), (22), (23): Xaa is A or G or is absent

SEQ ID NO: 69297 - protein, 32 aa, Artificial Sequence; identical to SEQ ID NO: 58016
  GFR-binding peptide
  MOD_RES (1), (32): Xaa is C or S

SEQ ID NO: 69298 - protein, 38 aa, Artificial Sequence
  GFR-binding peptide
  MOD_RES (4), (5): Xaa is C or S
  MOD_RES (19), (20), (21), (22), (23): Xaa is A or G
  MOD_RES (24), (25), (26), (27): Xaa is A or G or is absent
PEPXXVPEKMSPINILYFXXXXXXXXXYGKIPNMTVES

SEQ ID NO: 69299 - protein, 37 aa, Artificial Sequence; identical to SEQ ID NO: 28074
  GFR-binding peptide
  MOD_RES (1), (2), (36): Xaa is C or S
  MOD_RES (16), (17), (18), (19), (20): Xaa is A or G
  MOD_RES (21), (22), (23), (24): Xaa is A or G or is absent

SEQ ID NO: 69300 - protein, 38 aa, Artificial Sequence; identical to SEQ ID NO: 6898
  GFR-binding peptide
  MOD_RES (2), (3), (36), (38): Xaa is C or S
  MOD_RES (17), (18), (19), (20), (21): Xaa is A or G
  MOD_RES (22), (23), (24), (25): Xaa is A or G or is absent

SEQ ID NO: 69301 - protein, 35 aa, Artificial Sequence; identical to SEQ ID NO: 28082
  GFR-binding peptide
  MOD_RES (3), (4): Xaa is C or S

SEQ ID NO: 69302 - protein, 33 aa, Artificial Sequence; identical to SEQ ID NO: 6899
  GFR-binding peptide
  MOD_RES (1), (2): Xaa is C or S

SEQ ID NO: 69303 - protein, 37 aa, Artificial Sequence
  GFR-binding peptide
  MOD_RES (2), (3), (35), (37): Xaa is C or S
PXXVPEKMSPISILYKDENKNVVLKYHYNMTVESXAX

SEQ ID NO: 69304 - protein, 33 aa, Artificial Sequence
  GFR-binding peptide
  MOD_RES (1), (2), (33): Xaa is C or S
XXAPVKTSATSMLYYDNGRVLLLRKHRMIVEEX

SEQ ID NO: 69305 - protein, 40 aa, Artificial Sequence; identical to SEQ ID NO: 6902
  GFR-binding peptide
  MOD_RES (2), (3), (37), (39): Xaa is C or S
  MOD_RES (17), (18), (19), (20), (21): Xaa is A or G
  MOD_RES (22), (23), (24), (25): Xaa is A or G or is absent

SEQ ID NO: 69306 - protein, 31 aa, Artificial Sequence; identical to SEQ ID NO: 33166
  GFR-binding peptide
  MOD_RES (1), (1): Xaa is C or S

SEQ ID NO: 69307 - protein, 36 aa, Artificial Sequence
  GFR-binding peptide
  MOD_RES (1), (33), (35): Xaa is C or S
XVPEKMEPISILYLDENKNVVKFKYENMTVESXAXR

SEQ ID NO: 69308 - protein, 36 aa, Artificial Sequence; identical to SEQ ID NO: 33169
  GFR-binding peptide
  MOD_RES (2), (36): Xaa is C or S
  MOD_RES (16), (17), (18), (19), (20): Xaa is A or G
  MOD_RES (21), (22), (23), (24): Xaa is A or G or is absent

SEQ ID NO: 69309 - protein, 32 aa, Artificial Sequence; identical to SEQ ID NO: 6905
  GFR-binding peptide
  MOD_RES (14), (15), (16), (17), (18): Xaa is A or G
  MOD_RES (19), (20), (21), (22): Xaa is A or G or is absent

SEQ ID NO: 69310 - protein, 34 aa, Artificial Sequence; identical to SEQ ID NO: 28093
  GFR-binding peptide
  MOD_RES (1), (1): Xaa is C or S
  MOD_RES (15), (16), (17), (18), (19): Xaa is A or G
  MOD_RES (20), (21), (22), (23): Xaa is A or G or is absent

SEQ ID NO: 69311 - protein, 35 aa, Artificial Sequence; identical to SEQ ID NO: 58037
  GFR-binding peptide
  MOD_RES (1), (32), (34): Xaa is C or S

SEQ ID NO: 69312 - protein, 41 aa, Artificial Sequence
  GFR-binding peptide
  MOD_RES (6), (7), (41): Xaa is C or S
  MOD_RES (21), (22), (23), (24), (25): Xaa is A or G
  MOD_RES (26), (27), (28), (29): Xaa is A or G or is absent
STPPTXXVPTRLSATSILYYXXXXXXXXXLRKHRDMVVESX

SEQ ID NO: 69313 - protein, 40 aa, Artificial Sequence; identical to SEQ ID NO: 6908
  GFR-binding peptide
  MOD_RES (6), (7), (39): Xaa is C or S

SEQ ID NO: 69314 - protein, 41 aa, Artificial Sequence; identical to SEQ ID NO: 58039
  GFR-binding peptide
  MOD_RES (4), (5), (39), (41): Xaa is C or S
  MOD_RES (19), (20), (21), (22), (23): Xaa is A or G
  MOD_RES (24), (25), (26), (27): Xaa is A or G or is absent

SEQ ID NO: 69315 - protein, 42 aa, Artificial Sequence; identical to SEQ ID NO: 28097
  GFR-binding peptide
  MOD_RES (6), (7), (39), (41): Xaa is C or S

SEQ ID NO: 69316 - protein, 36 aa, Artificial Sequence; identical to SEQ ID NO: 6912
  GFR-binding peptide
  MOD_RES (34), (36): Xaa is C or S
  MOD_RES (14), (15), (16), (17), (18): Xaa is A or G
  MOD_RES (19), (20), (21), (22): Xaa is A or G or is absent

SEQ ID NO: 69317 - protein, 37 aa, Artificial Sequence
  GFR-binding peptide
  MOD_RES (2), (3), (37): Xaa is C or S
  MOD_RES (17), (18), (19), (20), (21): Xaa is A or G
  MOD_RES (22), (23), (24), (25): Xaa is A or G or is absent
TXXVPTRLEPISILYLXXXXXXXXXKFKYEDMVVESX

SEQ ID NO: 69318 - protein, 36 aa, Artificial Sequence
  GFR-binding peptide
  MOD_RES (1), (2), (33), (35): Xaa is C or S
XXAPVKTEPISMLYLDNGRVLLKFKYEMIVEEXGXL

SEQ ID NO: 69319 - protein, 39 aa, Artificial Sequence; identical to SEQ ID NO: 6914
  GFR-binding peptide
  MOD_RES (6), (7), (39): Xaa is C or S

SEQ ID NO: 69320 - protein, 35 aa, Artificial Sequence; identical to SEQ ID NO: 6915
  GFR-binding peptide
  MOD_RES (34), (34): Xaa is C or S
  MOD_RES (14), (15), (16), (17), (18): Xaa is A or G
  MOD_RES (19), (20), (21), (22): Xaa is A or G or is absent

SEQ ID NO: 69321 - protein, 31 aa, Artificial Sequence; identical to SEQ ID NO: 6916
  GFR-binding peptide
  MOD_RES (1), (1): Xaa is C or S

SEQ ID NO: 69322 - protein, 40 aa, Artificial Sequence; identical to SEQ ID NO: 33183
  GFR-binding peptide
  MOD_RES (5), (6), (40): Xaa is C or S
  MOD_RES (20), (21), (22), (23), (24): Xaa is A or G
  MOD_RES (25), (26), (27), (28): Xaa is A or G or is absent

SEQ ID NO: 69323 - protein, 37 aa, Artificial Sequence; identical to SEQ ID NO: 14258
  GFR-binding peptide
  MOD_RES (3), (4): Xaa is C or S
  MOD_RES (18), (19), (20), (21), (22): Xaa is A or G
  MOD_RES (23), (24), (25), (26): Xaa is A or G or is absent

SEQ ID NO: 69324 - protein, 35 aa, Artificial Sequence
  GFR-binding peptide
  MOD_RES (1), (2), (34): Xaa is C or S
XXVPTRLSPISILYKDSANNVVLKYHYDMVVESXG

SEQ ID NO: 69325 - protein, 40 aa, Artificial Sequence; identical to SEQ ID NO: 6918
  GFR-binding peptide
  MOD_RES (4), (5), (38), (40): Xaa is C or S
  MOD_RES (19), (20), (21), (22), (23): Xaa is A or G
  MOD_RES (24), (25), (26), (27): Xaa is A or G or is absent

SEQ ID NO: 69326 - protein, 35 aa, Artificial Sequence
  GFR-binding peptide
  MOD_RES (4), (5): Xaa is C or S
PSTXXAPVKTSPISMLYKDNGRVLLLKYHYMIVEE

SEQ ID NO: 69327 - protein, 38 aa, Artificial Sequence; identical to SEQ ID NO: 33191
  GFR-binding peptide
  MOD_RES (1), (2), (35), (37): Xaa is C or S

SEQ ID NO: 69328 - protein, 39 aa, Artificial Sequence; identical to SEQ ID NO: 28107
  GFR-binding peptide
  MOD_RES (6), (7): Xaa is C or S
  MOD_RES (21), (22), (23), (24), (25): Xaa is A or G
  MOD_RES (26), (27), (28), (29): Xaa is A or G or is absent

SEQ ID NO: 69329 - protein, 37 aa, Artificial Sequence
  GFR-binding peptide
  MOD_RES (1), (34), (36): Xaa is C or S
  MOD_RES (15), (16), (17), (18), (19): Xaa is A or G
  MOD_RES (20), (21), (22), (23): Xaa is A or G or is absent
XVPQALSPINILYFXXXXXXXXXYGKIPMIVRSXKXS

SEQ ID NO: 69330 - protein, 40 aa, Artificial Sequence; identical to SEQ ID NO: 6925
  GFR-binding peptide
  MOD_RES (2), (3), (37), (39): Xaa is C or S
  MOD_RES (17), (18), (19), (20), (21): Xaa is A or G
  MOD_RES (22), (23), (24), (25): Xaa is A or G or is absent

SEQ ID NO: 69331 - protein, 38 aa, Artificial Sequence; identical to SEQ ID NO: 28112
  GFR-binding peptide
  MOD_RES (4), (5): Xaa is C or S
  MOD_RES (19), (20), (21), (22), (23): Xaa is A or G
  MOD_RES (24), (25), (26), (27): Xaa is A or G or is absent

SEQ ID NO: 69332 - protein, 38 aa, Artificial Sequence; identical to SEQ ID NO: 6930
  GFR-binding peptide
  MOD_RES (6), (7), (38): Xaa is C or S

SEQ ID NO: 69333 - protein, 32 aa, Artificial Sequence
  GFR-binding peptide
  MOD_RES (1), (2): Xaa is C or S
XXAPVKTSATSMLYYDNGRVLLLRKHRMIVEE

SEQ ID NO: 69334 - protein, 38 aa, Artificial Sequence; identical to SEQ ID NO: 6932
  GFR-binding peptide
  MOD_RES (1), (35), (37): Xaa is C or S
  MOD_RES (15), (16), (17), (18), (19): Xaa is A or G
  MOD_RES (20), (21), (22), (23): Xaa is A or G or is absent

SEQ ID NO: 69335 - protein, 35 aa, Artificial Sequence
  GFR-binding peptide
  MOD_RES (4), (5): Xaa is C or S
PEPXXVPEKMSPINILYFDENKNVVYGKIPNMTVE

SEQ ID NO: 69336 - protein, 36 aa, Artificial Sequence
  GFR-binding peptide
  MOD_RES (1), (33), (35): Xaa is C or S
XTPTKMSATSMLYYNDKQQIILRKHRGMVVDRXGXS

SEQ ID NO: 69337 - protein, 35 aa, Artificial Sequence; identical to SEQ ID NO: 33209
  GFR-binding peptide
  MOD_RES (2), (3): Xaa is C or S
  MOD_RES (17), (18), (19), (20), (21): Xaa is A or G
  MOD_RES (22), (23), (24), (25): Xaa is A or G or is absent

SEQ ID NO: 69338 - protein, 32 aa, Artificial Sequence; identical to SEQ ID NO: 6938
  GFR-binding peptide
  MOD_RES (14), (15), (16), (17), (18): Xaa is A or G
  MOD_RES (19), (20), (21), (22): Xaa is A or G or is absent

SEQ ID NO: 69339 - protein, 40 aa, Artificial Sequence; identical to SEQ ID NO: 28121
  GFR-binding peptide
  MOD_RES (6), (7), (40): Xaa is C or S

SEQ ID NO: 69340 - protein, 39 aa, Artificial Sequence; identical to SEQ ID NO: 6939
  GFR-binding peptide
  MOD_RES (4), (5), (38): Xaa is C or S
  MOD_RES (19), (20), (21), (22), (23): Xaa is A or G
  MOD_RES (24), (25), (26), (27): Xaa is A or G or is absent

SEQ ID NO: 69341 - protein, 42 aa, Artificial Sequence; identical to SEQ ID NO: 58061
  GFR-binding peptide
  MOD_RES (5), (6), (39), (41): Xaa is C or S
  MOD_RES (20), (21), (22), (23), (24): Xaa is A or G
  MOD_RES (25), (26), (27), (28): Xaa is A or G or is absent

SEQ ID NO: 69342 - protein, 39 aa, Artificial Sequence; identical to SEQ ID NO: 28123
  GFR-binding peptide
  MOD_RES (3), (4), (36), (38): Xaa is C or S

SEQ ID NO: 69343 - protein, 38 aa, Artificial Sequence; identical to SEQ ID NO: 28124
  GFR-binding peptide
  MOD_RES (1), (2), (37): Xaa is C or S
  MOD_RES (16), (17), (18), (19), (20): Xaa is A or G
  MOD_RES (21), (22), (23), (24): Xaa is A or G or is absent

SEQ ID NO: 69344 - protein, 37 aa, Artificial Sequence; identical to SEQ ID NO: 6941
  GFR-binding peptide
  MOD_RES (2), (3), (35), (37): Xaa is C or S

SEQ ID NO: 69345 - protein, 38 aa, Artificial Sequence; identical to SEQ ID NO: 28126
  GFR-binding peptide
  MOD_RES (3), (4), (37): Xaa is C or S
  MOD_RES (18), (19), (20), (21), (22): Xaa is A or G
  MOD_RES (23), (24), (25), (26): Xaa is A or G or is absent

SEQ ID NO: 69346 - protein, 39 aa, Artificial Sequence
  GFR-binding peptide
  MOD_RES (5), (6), (39): Xaa is C or S
  MOD_RES (20), (21), (22), (23), (24): Xaa is A or G
  MOD_RES (25), (26), (27), (28): Xaa is A or G or is absent
SAAPXXVPQALSPINILYFXXXXXXXXXYGKIPMIVRSX

SEQ ID NO: 69347 - protein, 41 aa, Artificial Sequence; identical to SEQ ID NO: 33217
  GFR-binding peptide
  MOD_RES (6), (7), (41): Xaa is C or S
  MOD_RES (21), (22), (23), (24), (25): Xaa is A or G
  MOD_RES (26), (27), (28), (29): Xaa is A or G or is absent

SEQ ID NO: 69348 - protein, 42 aa, Artificial Sequence; identical to SEQ ID NO: 33218
  GFR-binding peptide
  MOD_RES (5), (6), (40), (42): Xaa is C or S
  MOD_RES (20), (21), (22), (23), (24): Xaa is A or G
  MOD_RES (25), (26), (27), (28): Xaa is A or G or is absent

SEQ ID NO: 69349 - protein, 40 aa, Artificial Sequence; identical to SEQ ID NO: 6948
  GFR-binding peptide
  MOD_RES (6), (7), (40): Xaa is C or S
  MOD_RES (21), (22), (23), (24), (25): Xaa is A or G
  MOD_RES (26), (27), (28), (29): Xaa is A or G or is absent

SEQ ID NO: 69350 - protein, 35 aa, Artificial Sequence; identical to SEQ ID NO: 6950
  GFR-binding peptide
  MOD_RES (33), (35): Xaa is C or S
  MOD_RES (14), (15), (16), (17), (18): Xaa is A or G
  MOD_RES (19), (20), (21), (22): Xaa is A or G or is absent

SEQ ID NO: 69351 - protein, 40 aa, Artificial Sequence
  GFR-binding peptide
  MOD_RES (5), (6), (39): Xaa is C or S
  MOD_RES (20), (21), (22), (23), (24): Xaa is A or G
  MOD_RES (25), (26), (27), (28): Xaa is A or G or is absent
SASPXXVPQDLSPINILYFXXXXXXXXXYGKIPMVVKSXK

SEQ ID NO: 69352 - protein, 41 aa, Artificial Sequence; identical to SEQ ID NO: 6953
  GFR-binding peptide
  MOD_RES (5), (6), (40): Xaa is C or S
  MOD_RES (20), (21), (22), (23), (24): Xaa is A or G
  MOD_RES (25), (26), (27), (28): Xaa is A or G or is absent

SEQ ID NO: 69353 - protein, 34 aa, Artificial Sequence; identical to SEQ ID NO: 6956
  GFR-binding peptide
  MOD_RES (3), (4): Xaa is C or S

SEQ ID NO: 69354 - protein, 37 aa, Artificial Sequence; identical to SEQ ID NO: 28140
  GFR-binding peptide
  MOD_RES (4), (5), (37): Xaa is C or S

SEQ ID NO: 69355 - protein, 33 aa, Artificial Sequence; identical to SEQ ID NO: 33227
  GFR-binding peptide
  MOD_RES (33), (33): Xaa is C or S

SEQ ID NO: 69356 - protein, 34 aa, Artificial Sequence; identical to SEQ ID NO: 6959
  GFR-binding peptide
  MOD_RES (3), (3): Xaa is C or S

SEQ ID NO: 69357 - protein, 37 aa, Artificial Sequence; identical to SEQ ID NO: 6961
  GFR-binding peptide
  MOD_RES (1), (34), (36): Xaa is C or S
  MOD_RES (15), (16), (17), (18), (19): Xaa is A or G
  MOD_RES (20), (21), (22), (23): Xaa is A or G or is absent

SEQ ID NO: 69358 - protein, 43 aa, Artificial Sequence; identical to SEQ ID NO: 28146
  GFR-binding peptide
  MOD_RES (6), (7), (41), (43): Xaa is C or S
  MOD_RES (21), (22), (23), (24), (25): Xaa is A or G
  MOD_RES (26), (27), (28), (29): Xaa is A or G or is absent

SEQ ID NO: 69359 - protein, 41 aa, Artificial Sequence; identical to SEQ ID NO: 6964
  GFR-binding peptide
  MOD_RES (6), (40): Xaa is C or S
  MOD_RES (20), (21), (22), (23), (24): Xaa is A or G
  MOD_RES (25), (26), (27), (28): Xaa is A or G or is absent

SEQ ID NO: 69360 - protein, 40 aa, Artificial Sequence; identical to SEQ ID NO: 6967
  GFR-binding peptide
  MOD_RES (4), (5), (38), (40): Xaa is C or S
  MOD_RES (19), (20), (21), (22), (23): Xaa is A or G
  MOD_RES (24), (25), (26), (27): Xaa is A or G or is absent

SEQ ID NO: 69361 - protein, 37 aa, Artificial Sequence; identical to SEQ ID NO: 6968
  GFR-binding peptide
  MOD_RES (3), (4), (36): Xaa is C or S

SEQ ID NO: 69362 - protein, 37 aa, Artificial Sequence
  GFR-binding peptide
  MOD_RES (4), (5): Xaa is C or S
  MOD_RES (19), (20), (21), (22), (23): Xaa is A or G
  MOD_RES (24), (25), (26), (27): Xaa is A or G or is absent
AAPXXVPQALSPINILYFXXXXXXXXXYGKIPMIVRS

SEQ ID NO: 69363 - protein, 34 aa, Artificial Sequence; identical to SEQ ID NO: 33232
  GFR-binding peptide
  MOD_RES (1), (33): Xaa is C or S

SEQ ID NO: 69364 - protein, 38 aa, Artificial Sequence; identical to SEQ ID NO: 6977
  GFR-binding peptide
  MOD_RES (5), (6), (37): Xaa is C or S

SEQ ID NO: 69365 - protein, 37 aa, Artificial Sequence; identical to SEQ ID NO: 33237
  GFR-binding peptide
  MOD_RES (4), (5), (37): Xaa is C or S

SEQ ID NO: 69366 - protein, 33 aa, Artificial Sequence
  GFR-binding peptide
  MOD_RES (1), (1): Xaa is C or S
  MOD_RES (15), (16), (17), (18), (19): Xaa is A or G
  MOD_RES (20), (21), (22), (23): Xaa is A or G or is absent
XAPVKTSATSMLYYXXXXXXXXXLRKHRMIVEE

SEQ ID NO: 69367 - protein, 37 aa, Artificial Sequence
  GFR-binding peptide
  MOD_RES (2), (3), (35), (37): Xaa is C or S
AXXVPTKLSATSILYYDKGVVTYLRKHRGMAVSEXGX

SEQ ID NO: 69368 - protein, 33 aa, Artificial Sequence; identical to SEQ ID NO: 6985
  GFR-binding peptide
  MOD_RES (31), (33): Xaa is C or S

SEQ ID NO: 69369 - protein, 35 aa, Artificial Sequence
  GFR-binding peptide
  MOD_RES (1), (2), (34): Xaa is C or S
XXVPEKMSATSILYYDENKNVVLRKHRNMTVESXA

SEQ ID NO: 69370 - protein, 42 aa, Artificial Sequence
  GFR-binding peptide
  MOD_RES (6), (7), (40), (42): Xaa is C or S
  MOD_RES (21), (22), (23), (24), (25): Xaa is A or G
  MOD_RES (26), (27), (28), (29): Xaa is A or G or is absent
RVPSTXXAPVKTSPISMLYKXXXXXXXXXLKYHYMIVEEXGX

SEQ ID NO: 69371 - protein, 31 aa, Artificial Sequence; identical to SEQ ID NO: 6986
  GFR-binding peptide
  MOD_RES (1), (1): Xaa is C or S

SEQ ID NO: 69372 - protein, 35 aa, Artificial Sequence
  GFR-binding peptide
  MOD_RES (32), (34): Xaa is C or S
VPTRLSPISILYKDSANNVVLKYHYDMVVESXGXR

SEQ ID NO: 69373 - protein, 33 aa, Artificial Sequence; identical to SEQ ID NO: 28166
  GFR-binding peptide
  MOD_RES (32), (32): Xaa is C or S

SEQ ID NO: 69374 - protein, 36 aa, Artificial Sequence
  GFR-binding peptide
  MOD_RES (3), (4): Xaa is C or S
  MOD_RES (18), (19), (20), (21), (22): Xaa is A or G
  MOD_RES (23), (24), (25), (26): Xaa is A or G or is absent
EPXXVPEKMNAISILYFXXXXXXXXXLKKYRNMTVE

SEQ ID NO: 69375 - protein, 38 aa, Artificial Sequence; identical to SEQ ID NO: 6989
  GFR-binding peptide
  MOD_RES (4), (5), (37): Xaa is C or S

SEQ ID NO: 69376 - protein, 40 aa, Artificial Sequence; identical to SEQ ID NO: 28170
  GFR-binding peptide
  MOD_RES (4), (5), (39): Xaa is C or S
  MOD_RES (19), (20), (21), (22), (23): Xaa is A or G
  MOD_RES (24), (25), (26), (27): Xaa is A or G or is absent

SEQ ID NO: 69377 - protein, 41 aa, Artificial Sequence; identical to SEQ ID NO: 33256
  GFR-binding peptide
  MOD_RES (6), (7), (41): Xaa is C or S
  MOD_RES (21), (22), (23), (24), (25): Xaa is A or G
  MOD_RES (26), (27), (28), (29): Xaa is A or G or is absent

SEQ ID NO: 69378 - protein, 34 aa, Artificial Sequence; identical to SEQ ID NO: 7001
  GFR-binding peptide
  MOD_RES (1), (32), (34): Xaa is C or S

SEQ ID NO: 69379 - protein, 37 aa, Artificial Sequence; identical to SEQ ID NO: 7003
  GFR-binding peptide
  MOD_RES (3), (4), (36): Xaa is C or S

SEQ ID NO: 69380 - protein, 38 aa, Artificial Sequence; identical to SEQ ID NO: 28180
  GFR-binding peptide
  MOD_RES (2), (3), (37): Xaa is C or S
  MOD_RES (17), (18), (19), (20), (21): Xaa is A or G
  MOD_RES (22), (23), (24), (25): Xaa is A or G or is absent

SEQ ID NO: 69381 - protein, 35 aa, Artificial Sequence
  GFR-binding peptide
  MOD_RES (4), (5): Xaa is C or S
PPTXXVPTRLSPISILYKDSANNVVLKYHYDMVVE

SEQ ID NO: 69382 - protein, 36 aa, Artificial Sequence; identical to SEQ ID NO: 33264
  GFR-binding peptide
  MOD_RES (4), (5), (36): Xaa is C or S

SEQ ID NO: 69383 - protein, 36 aa, Artificial Sequence
  GFR-binding peptide
  MOD_RES (4), (5): Xaa is C or S
SKAXXVPTKLSATSILYYDKGVVTYLRKHRGMAVSE

SEQ ID NO: 69384 - protein, 35 aa, Artificial Sequence; identical to SEQ ID NO: 33265
  GFR-binding peptide
  MOD_RES (2), (3), (35): Xaa is C or S

SEQ ID NO: 69385 - protein, 33 aa, Artificial Sequence
  GFR-binding peptide
  MOD_RES (1), (2), (33): Xaa is C or S
XXAPVKTSPISMLYKDNGRVLLLKYHYMIVEEX

SEQ ID NO: 69386 - protein, 31 aa, Artificial Sequence; identical to SEQ ID NO: 33267
  GFR-binding peptide
  MOD_RES (1), (1): Xaa is C or S

SEQ ID NO: 69387 - protein, 38 aa, Artificial Sequence; identical to SEQ ID NO: 7004
  GFR-binding peptide
  MOD_RES (5), (6): Xaa is C or S
  MOD_RES (20), (21), (22), (23), (24): Xaa is A or G
  MOD_RES (25), (26), (27), (28): Xaa is A or G or is absent

SEQ ID NO: 69388 - protein, 33 aa, Artificial Sequence; identical to SEQ ID NO: 33269
  GFR-binding peptide
  MOD_RES (1), (33): Xaa is C or S

SEQ ID NO: 69389 - protein, 37 aa, Artificial Sequence; identical to SEQ ID NO: 28189
  GFR-binding peptide
  MOD_RES (4), (5), (36): Xaa is C or S

SEQ ID NO: 69390 - protein, 37 aa, Artificial Sequence
  GFR-binding peptide
  MOD_RES (1), (2), (36): Xaa is C or S
  MOD_RES (16), (17), (18), (19), (20): Xaa is A or G
  MOD_RES (21), (22), (23), (24): Xaa is A or G or is absent
XXVPTRLSPISILYKXXXXXXXXXLKYHYDMVVESXG

SEQ ID NO: 69391 - protein, 34 aa, Artificial Sequence; identical to SEQ ID NO: 33270
  GFR-binding peptide
  MOD_RES (1), (1): Xaa is C or S
  MOD_RES (15), (16), (17), (18), (19): Xaa is A or G
  MOD_RES (20), (21), (22), (23): Xaa is A or G or is absent

SEQ ID NO: 69392 - protein, 38 aa, Artificial Sequence; identical to SEQ ID NO: 7012
  GFR-binding peptide
  MOD_RES (3), (4), (35), (37): Xaa is C or S

SEQ ID NO: 69393 - protein, 34 aa, Artificial Sequence; identical to SEQ ID NO: 28191
  GFR-binding peptide
  MOD_RES (1), (2), (34): Xaa is C or S

SEQ ID NO: 69394 - protein, 34 aa, Artificial Sequence; identical to SEQ ID NO: 7014
  GFR-binding peptide
  MOD_RES (1), (34): Xaa is C or S
  MOD_RES (15), (16), (17), (18), (19): Xaa is A or G
  MOD_RES (20), (21), (22), (23): Xaa is A or G or is absent

SEQ ID NO: 69395 - protein, 32 aa, Artificial Sequence
  GFR-binding peptide
  MOD_RES (1), (1): Xaa is C or S
XVPARLSATSILYYDAANNVVLRKHRDMVVEA

SEQ ID NO: 69396 - protein, 34 aa, Artificial Sequence; identical to SEQ ID NO: 7016
  GFR-binding peptide
  MOD_RES (1), (33): Xaa is C or S

SEQ ID NO: 69397 - protein, 35 aa, Artificial Sequence
  GFR-binding peptide
  MOD_RES (1), (35): Xaa is C or S
  MOD_RES (15), (16), (17), (18), (19): Xaa is A or G
  MOD_RES (20), (21), (22), (23): Xaa is A or G or is absent
XVPEKMSATSILYYXXXXXXXXXLRKHRNMTVESX

SEQ ID NO: 69398 - protein, 35 aa, Artificial Sequence; identical to SEQ ID NO: 33278
  GFR-binding peptide
  MOD_RES (32), (34): Xaa is C or S

SEQ ID NO: 69399 - protein, 34 aa, Artificial Sequence; identical to SEQ ID NO: 28197
  GFR-binding peptide
  MOD_RES (1), (33): Xaa is C or S

SEQ ID NO: 69400 - protein, 34 aa, Artificial Sequence; identical to SEQ ID NO: 7020
  GFR-binding peptide
  MOD_RES (34), (34): Xaa is C or S
  MOD_RES (14), (15), (16), (17), (18): Xaa is A or G
  MOD_RES (19), (20), (21), (22): Xaa is A or G or is absent

SEQ ID NO: 69401 - protein, 36 aa, Artificial Sequence; identical to SEQ ID NO: 7023
  GFR-binding peptide
  MOD_RES (1), (35): Xaa is C or S
  MOD_RES (15), (16), (17), (18), (19): Xaa is A or G
  MOD_RES (20), (21), (22), (23): Xaa is A or G or is absent

SEQ ID NO: 69402 - protein, 34 aa, Artificial Sequence
  GFR-binding peptide
  MOD_RES (3), (4): Xaa is C or S
PTXXVPTRLSATSILYYDSANNVVLRKHRDMVVE

SEQ ID NO: 69403 - protein, 36 aa, Artificial Sequence; identical to SEQ ID NO: 7024
  GFR-binding peptide
  MOD_RES (2), (3): Xaa is C or S
  MOD_RES (17), (18), (19), (20), (21): Xaa is A or G
  MOD_RES (22), (23), (24), (25): Xaa is A or G or is absent

SEQ ID NO: 69404 - protein, 36 aa, Artificial Sequence; identical to SEQ ID NO: 7025
  GFR-binding peptide
  MOD_RES (1), (2), (34), (36): Xaa is C or S

SEQ ID NO: 69405 - protein, 42 aa, Artificial Sequence; identical to SEQ ID NO: 7026
  GFR-binding peptide
  MOD_RES (4), (5), (39), (41): Xaa is C or S
  MOD_RES (19), (20), (21), (22), (23): Xaa is A or G
  MOD_RES (24), (25), (26), (27): Xaa is A or G or is absent

SEQ ID NO: 69406 - protein, 38 aa, Artificial Sequence
  GFR-binding peptide
  MOD_RES (4), (5): Xaa is C or S
  MOD_RES (19), (20), (21), (22), (23): Xaa is A or G
  MOD_RES (24), (25), (26), (27): Xaa is A or G or is absent
PEPXXVPEKMSATSILYYXXXXXXXXXLRKHRNMTVES

SEQ ID NO: 69407 - protein, 36 aa, Artificial Sequence
  GFR-binding peptide
  MOD_RES (1), (35): Xaa is C or S
  MOD_RES (15), (16), (17), (18), (19): Xaa is A or G
  MOD_RES (20), (21), (22), (23): Xaa is A or G or is absent
XVPTKLSATSILYYXXXXXXXXXLRKHRGMAVSEXG

SEQ ID NO: 69408 - protein, 39 aa, Artificial Sequence; identical to SEQ ID NO: 7027
  GFR-binding peptide
  MOD_RES (6), (6): Xaa is C or S
  MOD_RES (20), (21), (22), (23), (24): Xaa is A or G
  MOD_RES (25), (26), (27), (28): Xaa is A or G or is absent

SEQ ID NO: 69409 - protein, 38 aa, Artificial Sequence
  GFR-binding peptide
  MOD_RES (2), (3), (37): Xaa is C or S
  MOD_RES (17), (18), (19), (20), (21): Xaa is A or G
  MOD_RES (22), (23), (24), (25): Xaa is A or G or is absent
TXXVPTRLSPISILYKXXXXXXXXXLKYHYDMVVESXG

SEQ ID NO: 69410 - protein, 41 aa, Artificial Sequence; identical to SEQ ID NO: 7031
  GFR-binding peptide
  MOD_RES (5), (6), (39), (41): Xaa is C or S
  MOD_RES (20), (21), (22), (23), (24): Xaa is A or G
  MOD_RES (25), (26), (27), (28): Xaa is A or G or is absent

SEQ ID NO: 69411 - protein, 34 aa, Artificial Sequence; identical to SEQ ID NO: 28205
  GFR-binding peptide
  MOD_RES (32), (34): Xaa is C or S

SEQ ID NO: 69412 - protein, 37 aa, Artificial Sequence; identical to SEQ ID NO: 7034
  GFR-binding peptide
  MOD_RES (2), (3), (35), (37): Xaa is C or S

SEQ ID NO: 69413 - protein, 34 aa, Artificial Sequence; identical to SEQ ID NO: 28207
  GFR-binding peptide
  MOD_RES (32), (34): Xaa is C or S

SEQ ID NO: 69414 - protein, 38 aa, Artificial Sequence; identical to SEQ ID NO: 7035
  GFR-binding peptide
  MOD_RES (1), (2), (37): Xaa is C or S
  MOD_RES (16), (17), (18), (19), (20): Xaa is A or G
  MOD_RES (21), (22), (23), (24): Xaa is A or G or is absent

SEQ ID NO: 69415 - protein, 38 aa, Artificial Sequence; identical to SEQ ID NO: 33294
  GFR-binding peptide
  MOD_RES (3), (4), (38): Xaa is C or S
  MOD_RES (18), (19), (20), (21), (22): Xaa is A or G
  MOD_RES (23), (24), (25), (26): Xaa is A or G or is absent

SEQ ID NO: 69416 - protein, 32 aa, Artificial Sequence; identical to SEQ ID NO: 28214
  GFR-binding peptide
  MOD_RES (1), (2): Xaa is C or S

SEQ ID NO: 69417 - protein, 40 aa, Artificial Sequence; identical to SEQ ID NO: 7041
  GFR-binding peptide
  MOD_RES (4), (5), (37), (39): Xaa is C or S

SEQ ID NO: 69418 - protein, 33 aa, Artificial Sequence; identical to SEQ ID NO: 7042
  GFR-binding peptide
  MOD_RES (1), (32): Xaa is C or S

SEQ ID NO: 69419 - protein, 38 aa, Artificial Sequence
  GFR-binding peptide
  MOD_RES (3), (4), (38): Xaa is C or S
  MOD_RES (18), (19), (20), (21), (22): Xaa is A or G
  MOD_RES (23), (24), (25), (26): Xaa is A or G or is absent
GPXXTPTKMSPISMLYKXXXXXXXXXLKYHYGMVVDRX

SEQ ID NO: 69420 - protein, 41 aa, Artificial Sequence; identical to SEQ ID NO: 28223
  GFR-binding peptide
  MOD_RES (3), (4), (38), (40): Xaa is C or S
  MOD_RES (18), (19), (20), (21), (22): Xaa is A or G
  MOD_RES (23), (24), (25), (26): Xaa is A or G or is absent

SEQ ID NO: 69421 - protein, 37 aa, Artificial Sequence
  GFR-binding peptide
  MOD_RES (5), (6): Xaa is C or S
ASKAXXVPTKLSATSILYYDKGVVTYLRKHRGMAVSE

SEQ ID NO: 69422 - protein, 31 aa, Artificial Sequence
  GFR-binding peptide
VPEKMSPINILYFDENKNVVYGKIPNMTVES

SEQ ID NO: 69423 - protein, 37 aa, Artificial Sequence
  GFR-binding peptide
  MOD_RES (4), (5): Xaa is C or S
  MOD_RES (19), (20), (21), (22), (23): Xaa is A or G
  MOD_RES (24), (25), (26), (27): Xaa is A or G or is absent
SKAXXVPTKLSATSILYYXXXXXXXXXLRKHRGMAVS

SEQ ID NO: 69424 - protein, 36 aa, Artificial Sequence
  GFR-binding peptide
  MOD_RES (1), (2), (34), (36): Xaa is C or S
XXTPTKMEPISMLYLNDKQQIIKFKYEGMVVDRXGX

SEQ ID NO: 69425 - protein, 43 aa, Artificial Sequence; identical to SEQ ID NO: 7049
  GFR-binding peptide
  MOD_RES (6), (7), (40), (42): Xaa is C or S
  MOD_RES (21), (22), (23), (24), (25): Xaa is A or G
  MOD_RES (26), (27), (28), (29): Xaa is A or G or is absent

SEQ ID NO: 69426 - protein, 36 aa, Artificial Sequence
  GFR-binding peptide
  MOD_RES (34), (36): Xaa is C or S
  MOD_RES (14), (15), (16), (17), (18): Xaa is A or G
  MOD_RES (19), (20), (21), (22): Xaa is A or G or is absent
VPTRLSATSILYYXXXXXXXXXLRKHRDMVVESXGX

SEQ ID NO: 69427 - protein, 39 aa, Artificial Sequence; identical to SEQ ID NO: 14375
  GFR-binding peptide
  MOD_RES (6), (7): Xaa is C or S
  MOD_RES (21), (22), (23), (24), (25): Xaa is A or G
  MOD_RES (26), (27), (28), (29): Xaa is A or G or is absent

SEQ ID NO: 69428 - protein, 33 aa, Artificial Sequence
  GFR-binding peptide
  MOD_RES (1), (33): Xaa is C or S
XVPEKMNAISILYFDENKNVVLKKYRNMTVESX

SEQ ID NO: 69429 - protein, 39 aa, Artificial Sequence; identical to SEQ ID NO: 7057
  GFR-binding peptide
  MOD_RES (4), (5), (38): Xaa is C or S
  MOD_RES (19), (20), (21), (22), (23): Xaa is A or G
  MOD_RES (24), (25), (26), (27): Xaa is A or G or is absent

SEQ ID NO: 69430 - protein, 35 aa, Artificial Sequence; identical to SEQ ID NO: 7058
  GFR-binding peptide
  MOD_RES (34), (34): Xaa is C or S
  MOD_RES (14), (15), (16), (17), (18): Xaa is A or G
  MOD_RES (19), (20), (21), (22): Xaa is A or G or is absent

SEQ ID NO: 69431 - protein, 34 aa, Artificial Sequence; identical to SEQ ID NO: 28239
  GFR-binding peptide
  MOD_RES (1), (34): Xaa is C or S

SEQ ID NO: 69432 - protein, 41 aa, Artificial Sequence; identical to SEQ ID NO: 7059
  GFR-binding peptide
  MOD_RES (6), (7), (38), (40): Xaa is C or S

SEQ ID NO: 69433 - protein, 34 aa, Artificial Sequence
  GFR-binding peptide
  MOD_RES (1), (2), (34): Xaa is C or S
XXVPEKMNAISILYFDENKNVVLKKYRNMTVESX

SEQ ID NO: 69434 - protein, 36 aa, Artificial Sequence; identical to SEQ ID NO: 7060
  GFR-binding peptide
  MOD_RES (1), (2), (35): Xaa is C or S

SEQ ID NO: 69435 - protein, 36 aa, Artificial Sequence
  GFR-binding peptide
  MOD_RES (3), (4): Xaa is C or S
  MOD_RES (18), (19), (20), (21), (22): Xaa is A or G
  MOD_RES (23), (24), (25), (26): Xaa is A or G or is absent
APXXVPQALSPINILYFXXXXXXXXXYGKIPMIVRS

SEQ ID NO: 69436 - protein, 39 aa, Artificial Sequence; identical to SEQ ID NO: 7064
  GFR-binding peptide
  MOD_RES (6), (7), (39): Xaa is C or S

SEQ ID NO: 69437 - protein, 34 aa, Artificial Sequence; identical to SEQ ID NO: 7065
  GFR-binding peptide
  MOD_RES (1), (2): Xaa is C or S
  MOD_RES (16), (17), (18), (19), (20): Xaa is A or G
  MOD_RES (21), (22), (23), (24): Xaa is A or G or is absent

SEQ ID NO: 69438 - protein, 39 aa, Artificial Sequence; identical to SEQ ID NO: 7067
  GFR-binding peptide
  MOD_RES (3), (4), (37), (39): Xaa is C or S
  MOD_RES (18), (19), (20), (21), (22): Xaa is A or G
  MOD_RES (23), (24), (25), (26): Xaa is A or G or is absent

SEQ ID NO: 69439 - protein, 39 aa, Artificial Sequence; identical to SEQ ID NO: 7068
  GFR-binding peptide
  MOD_RES (2), (36), (38): Xaa is C or S
  MOD_RES (16), (17), (18), (19), (20): Xaa is A or G
  MOD_RES (21), (22), (23), (24): Xaa is A or G or is absent

SEQ ID NO: 69440 - protein, 33 aa, Artificial Sequence; identical to SEQ ID NO: 7069
  GFR-binding peptide
  MOD_RES (1), (2): Xaa is C or S

SEQ ID NO: 69441 - protein, 36 aa, Artificial Sequence
  GFR-binding peptide
  MOD_RES (1), (2), (34), (36): Xaa is C or S
XXVPTKLSATSILYYDKGVVTYLRKHRGMAVSEXGX

SEQ ID NO: 69442 - protein, 31 aa, Artificial Sequence; identical to SEQ ID NO: 7074
  GFR-binding peptide
  MOD_RES (31), (31): Xaa is C or S

SEQ ID NO: 69443 - protein, 42 aa, Artificial Sequence
  GFR-binding peptide
  MOD_RES (6), (7), (41): Xaa is C or S
  MOD_RES (21), (22), (23), (24), (25): Xaa is A or G
  MOD_RES (26), (27), (28), (29): Xaa is A or G or is absent
GSAGPXXTPTKMSPISMLYKXXXXXXXXXLKYHYGMVVDRXG

SEQ ID NO: 69444 - protein, 39 aa, Artificial Sequence; identical to SEQ ID NO: 28253
  GFR-binding peptide
  MOD_RES (3), (4), (38): Xaa is C or S
  MOD_RES (18), (19), (20), (21), (22): Xaa is A or G
  MOD_RES (23), (24), (25), (26): Xaa is A or G or is absent

SEQ ID NO: 69445 - protein, 39 aa, Artificial Sequence
  GFR-binding peptide
  MOD_RES (5), (6): Xaa is C or S
  MOD_RES (20), (21), (22), (23), (24): Xaa is A or G
  MOD_RES (25), (26), (27), (28): Xaa is A or G or is absent
SAGPXXTPTKMSATSMLYYXXXXXXXXXLRKHRGMVVDR

SEQ ID NO: 69446 - protein, 36 aa, Artificial Sequence; identical to SEQ ID NO: 7077
  GFR-binding peptide
  MOD_RES (2), (3), (34), (36): Xaa is C or S

SEQ ID NO: 69447 - protein, 36 aa, Artificial Sequence; identical to SEQ ID NO: 28255
  GFR-binding peptide
  MOD_RES (1), (33), (35): Xaa is C or S

SEQ ID NO: 69448 - protein, 41 aa, Artificial Sequence; identical to SEQ ID NO: 28256
  GFR-binding peptide
  MOD_RES (5), (6), (40): Xaa is C or S
  MOD_RES (20), (21), (22), (23), (24): Xaa is A or G
  MOD_RES (25), (26), (27), (28): Xaa is A or G or is absent

SEQ ID NO: 69449 - protein, 34 aa, Artificial Sequence; identical to SEQ ID NO: 7081
  GFR-binding peptide
  MOD_RES (1), (2), (33): Xaa is C or S

SEQ ID NO: 69450 - protein, 36 aa, Artificial Sequence; identical to SEQ ID NO: 7083
  GFR-binding peptide
  MOD_RES (2), (3): Xaa is C or S
  MOD_RES (17), (18), (19), (20), (21): Xaa is A or G
  MOD_RES (22), (23), (24), (25): Xaa is A or G or is absent

SEQ ID NO: 69451 - protein, 41 aa, Artificial Sequence
  GFR-binding peptide
  MOD_RES (6), (7), (40): Xaa is C or S
  MOD_RES (21), (22), (23), (24), (25): Xaa is A or G
  MOD_RES (26), (27), (28), (29): Xaa is A or G or is absent
ASASPXXVPQDLSPINILYFXXXXXXXXXYGKIPMVVKSXK

SEQ ID NO: 69452 - protein, 33 aa, Artificial Sequence
  GFR-binding peptide
  MOD_RES (1), (2): Xaa is C or S
XXVPTRLSATSILYYDSANNVVLRKHRDMVVES

SEQ ID NO: 69453 - protein, 41 aa, Artificial Sequence
  GFR-binding peptide
  MOD_RES (4), (5), (39), (41): Xaa is C or S
  MOD_RES (19), (20), (21), (22), (23): Xaa is A or G
  MOD_RES (24), (25), (26), (27): Xaa is A or G or is absent
PEPXXVPEKMSATSILYYXXXXXXXXXLRKHRNMTVESXAX

SEQ ID NO: 69454 - protein, 37 aa, Artificial Sequence; identical to SEQ ID NO: 33336
  GFR-binding peptide
  MOD_RES (1), (2), (36): Xaa is C or S
  MOD_RES (16), (17), (18), (19), (20): Xaa is A or G
  MOD_RES (21), (22), (23), (24): Xaa is A or G or is absent

SEQ ID NO: 69455 - protein, 35 aa, Artificial Sequence; identical to SEQ ID NO: 7088
  GFR-binding peptide
  MOD_RES (1), (35): Xaa is C or S
  MOD_RES (15), (16), (17), (18), (19): Xaa is A or G
  MOD_RES (20), (21), (22), (23): Xaa is A or G or is absent

SEQ ID NO: 69456 - protein, 37 aa, Artificial Sequence; identical to SEQ ID NO: 7089
  GFR-binding peptide
  MOD_RES (1), (34), (36): Xaa is C or S
  MOD_RES (15), (16), (17), (18), (19): Xaa is A or G
  MOD_RES (20), (21), (22), (23): Xaa is A or G or is absent

SEQ ID NO: 69457 - protein, 34 aa, Artificial Sequence; identical to SEQ ID NO: 33340
  GFR-binding peptide
  MOD_RES (1), (33): Xaa is C or S

SEQ ID NO: 69458 - protein, 30 aa, Artificial Sequence; identical to SEQ ID NO: 33343
  GFR-binding peptide

SEQ ID NO: 69459 - protein, 40 aa, Artificial Sequence
  GFR-binding peptide
  MOD_RES (3), (4), (38), (40): Xaa is C or S
  MOD_RES (18), (19), (20), (21), (22): Xaa is A or G
  MOD_RES (23), (24), (25), (26): Xaa is A or G or is absent
PTXXVPTRLEPISILYLXXXXXXXXXKFKYEDMVVESXGX

SEQ ID NO: 69460 - protein, 39 aa, Artificial Sequence; identical to SEQ ID NO: 28271
  GFR-binding peptide
  MOD_RES (1), (2), (36), (38): Xaa is C or S
  MOD_RES (16), (17), (18), (19), (20): Xaa is A or G
  MOD_RES (21), (22), (23), (24): Xaa is A or G or is absent

SEQ ID NO: 69461 - protein, 30 aa, Artificial Sequence; identical to SEQ ID NO: 7098
  GFR-binding peptide

SEQ ID NO: 69462 - protein, 35 aa, Artificial Sequence; identical to SEQ ID NO: 7100
  GFR-binding peptide
  MOD_RES (32), (34): Xaa is C or S

SEQ ID NO: 69463 - protein, 32 aa, Artificial Sequence; identical to SEQ ID NO: 28280
  GFR-binding peptide
  MOD_RES (14), (15), (16), (17), (18): Xaa is A or G
  MOD_RES (19), (20), (21), (22): Xaa is A or G or is absent

SEQ ID NO: 69464 - protein, 38 aa, Artificial Sequence
  GFR-binding peptide
  MOD_RES (3), (4), (38): Xaa is C or S
  MOD_RES (18), (19), (20), (21), (22): Xaa is A or G
  MOD_RES (23), (24), (25), (26): Xaa is A or G or is absent
EPXXVPEKMSATSILYYXXXXXXXXXLRKHRNMTVESX

SEQ ID NO: 69465 - protein, 42 aa, Artificial Sequence; identical to SEQ ID NO: 7102
  GFR-binding peptide
  MOD_RES (6), (7), (39), (41): Xaa is C or S

SEQ ID NO: 69466 - protein, 33 aa, Artificial Sequence; identical to SEQ ID NO: 28283
  GFR-binding peptide
  MOD_RES (1), (33): Xaa is C or S

SEQ ID NO: 69467 - protein, 38 aa, Artificial Sequence; identical to SEQ ID NO: 28284
  GFR-binding peptide
  MOD_RES (1), (35), (37): Xaa is C or S
  MOD_RES (15), (16), (17), (18), (19): Xaa is A or G
  MOD_RES (20), (21), (22), (23): Xaa is A or G or is absent

SEQ ID NO: 69468 - protein, 37 aa, Artificial Sequence
  GFR-binding peptide
  MOD_RES (4), (5): Xaa is C or S
  MOD_RES (19), (20), (21), (22), (23): Xaa is A or G
  MOD_RES (24), (25), (26), (27): Xaa is A or G or is absent
PPTXXVPTRLEPISILYLXXXXXXXXXKFKYEDMVVE

SEQ ID NO: 69469 - protein, 41 aa, Artificial Sequence
  GFR-binding peptide
  MOD_RES (4), (5), (39), (41): Xaa is C or S
  MOD_RES (19), (20), (21), (22), (23): Xaa is A or G
  MOD_RES (24), (25), (26), (27): Xaa is A or G or is absent
PPTXXVPTRLEPISILYLXXXXXXXXXKFKYEDMVVESXGX

SEQ ID NO: 69470 - protein, 37 aa, Artificial Sequence; identical to SEQ ID NO: 7103
  GFR-binding peptide
  MOD_RES (5), (5): Xaa is C or S
  MOD_RES (19), (20), (21), (22), (23): Xaa is A or G
  MOD_RES (24), (25), (26), (27): Xaa is A or G or is absent

SEQ ID NO: 69471 - protein, 41 aa, Artificial Sequence
  GFR-binding peptide
  MOD_RES (6), (7), (39), (41): Xaa is C or S
HVPKPXXAPTKLSPISVLYKDDSSNVILKYHYNMVVRSXGX

SEQ ID NO: 69472 - protein, 37 aa, Artificial Sequence; identical to SEQ ID NO: 32304
  GFR-binding peptide
  MOD_RES (5), (6): Xaa is C or S

SEQ ID NO: 69473 - protein, 44 aa, Artificial Sequence
  GFR-binding peptide
  MOD_RES (6), (7), (41), (43): Xaa is C or S
  MOD_RES (21), (22), (23), (24), (25): Xaa is A or G
  MOD_RES (26), (27), (28), (29): Xaa is A or G or is absent
STPPTXXVPTRLEPISILYLXXXXXXXXXKFKYEDMVVESXGXR

SEQ ID NO: 69474 - protein, 41 aa, Artificial Sequence; identical to SEQ ID NO: 7108
  GFR-binding peptide
  MOD_RES (6), (7), (40): Xaa is C or S

SEQ ID NO: 69475 - protein, 40 aa, Artificial Sequence; identical to SEQ ID NO: 7109
  GFR-binding peptide
  MOD_RES (4), (5), (39): Xaa is C or S
  MOD_RES (19), (20), (21), (22), (23): Xaa is A or G
  MOD_RES (24), (25), (26), (27): Xaa is A or G or is absent

SEQ ID NO: 69476 - protein, 39 aa, Artificial Sequence; identical to SEQ ID NO: 28288
  GFR-binding peptide
  MOD_RES (4), (5), (38): Xaa is C or S

SEQ ID NO: 69477 - protein, 33 aa, Artificial Sequence; identical to SEQ ID NO: 7110
  GFR-binding peptide
  MOD_RES (1), (32): Xaa is C or S

SEQ ID NO: 69478 - protein, 35 aa, Artificial Sequence; identical to SEQ ID NO: 28292
  GFR-binding peptide
  MOD_RES (4), (5): Xaa is C or S

SEQ ID NO: 69479 - protein, 38 aa, Artificial Sequence; identical to SEQ ID NO: 57245
  GFR-binding peptide
  MOD_RES (6), (7): Xaa is C or S

SEQ ID NO: 69480 - protein, 37 aa, Artificial Sequence; identical to SEQ ID NO: 28293
  GFR-binding peptide
  MOD_RES (1), (2), (36): Xaa is C or S
  MOD_RES (16), (17), (18), (19), (20): Xaa is A or G
  MOD_RES (21), (22), (23), (24): Xaa is A or G or is absent

SEQ ID NO: 69481 - protein, 38 aa, Artificial Sequence; identical to SEQ ID NO: 28295
  GFR-binding peptide
  MOD_RES (7), (7): Xaa is C or S

SEQ ID NO: 69482 - protein, 39 aa, Artificial Sequence
  GFR-binding peptide
  MOD_RES (6), (7): Xaa is C or S
  MOD_RES (21), (22), (23), (24), (25): Xaa is A or G
  MOD_RES (26), (27), (28), (29): Xaa is A or G or is absent
KASKAXXVPTKLSATSILYYXXXXXXXXXLRKHRGMAVS

SEQ ID NO: 69483 - protein, 37 aa, Artificial Sequence; identical to SEQ ID NO: 7118
  GFR-binding peptide
  MOD_RES (4), (5), (37): Xaa is C or S

SEQ ID NO: 69484 - protein, 37 aa, Artificial Sequence; identical to SEQ ID NO: 28297
  GFR-binding peptide
  MOD_RES (5), (5): Xaa is C or S
  MOD_RES (19), (20), (21), (22), (23): Xaa is A or G
  MOD_RES (24), (25), (26), (27): Xaa is A or G or is absent

SEQ ID NO: 69485 - protein, 42 aa, Artificial Sequence; identical to SEQ ID NO: 7119
  GFR-binding peptide
  MOD_RES (6), (7), (41): Xaa is C or S
  MOD_RES (21), (22), (23), (24), (25): Xaa is A or G
  MOD_RES (26), (27), (28), (29): Xaa is A or G or is absent

SEQ ID NO: 69486 - protein, 36 aa, Artificial Sequence
  GFR-binding peptide
  MOD_RES (34), (36): Xaa is C or S
  MOD_RES (14), (15), (16), (17), (18): Xaa is A or G
  MOD_RES (19), (20), (21), (22): Xaa is A or G or is absent
TPTKMSPISMLYKXXXXXXXXXLKYHYGMVVDRXGX

SEQ ID NO: 69487 - protein, 34 aa, Artificial Sequence; identical to SEQ ID NO: 28298
  GFR-binding peptide
  MOD_RES (1), (1): Xaa is C or S
  MOD_RES (15), (16), (17), (18), (19): Xaa is A or G
  MOD_RES (20), (21), (22), (23): Xaa is A or G or is absent

SEQ ID NO: 69488 - protein, 36 aa, Artificial Sequence
  GFR-binding peptide
  MOD_RES (5), (6): Xaa is C or S
APASXXVPARLSATSILYYDAANNVVLRKHRDMVVE

SEQ ID NO: 69489 - protein, 41 aa, Artificial Sequence; identical to SEQ ID NO: 7121
  GFR-binding peptide
  MOD_RES (5), (6), (39), (41): Xaa is C or S
  MOD_RES (20), (21), (22), (23), (24): Xaa is A or G
  MOD_RES (25), (26), (27), (28): Xaa is A or G or is absent

SEQ ID NO: 69490 - protein, 39 aa, Artificial Sequence; identical to SEQ ID NO: 57250
  GFR-binding peptide
  MOD_RES (3), (4), (37), (39): Xaa is C or S
  MOD_RES (18), (19), (20), (21), (22): Xaa is A or G
  MOD_RES (23), (24), (25), (26): Xaa is A or G or is absent

SEQ ID NO: 69491 - protein, 33 aa, Artificial Sequence; identical to SEQ ID NO: 7123
  GFR-binding peptide
  MOD_RES (1), (32): Xaa is C or S

SEQ ID NO: 69492 - protein, 37 aa, Artificial Sequence; identical to SEQ ID NO: 28305
  GFR-binding peptide
  MOD_RES (1), (2), (36): Xaa is C or S
  MOD_RES (16), (17), (18), (19), (20): Xaa is A or G
  MOD_RES (21), (22), (23), (24): Xaa is A or G or is absent

SEQ ID NO: 69493 - protein, 42 aa, Artificial Sequence; identical to SEQ ID NO: 32329
  GFR-binding peptide
  MOD_RES (5), (6), (39), (41): Xaa is C or S

SEQ ID NO: 69494 - protein, 40 aa, Artificial Sequence; identical to SEQ ID NO: 28306
  GFR-binding peptide
  MOD_RES (6), (7): Xaa is C or S
  MOD_RES (21), (22), (23), (24), (25): Xaa is A or G
  MOD_RES (26), (27), (28), (29): Xaa is A or G or is absent

SEQ ID NO: 69495 - protein, 37 aa, Artificial Sequence
  GFR-binding peptide
  MOD_RES (3), (4), (36): Xaa is C or S
PTXXVPTRLSPISILYKDSANNVVLKYHYDMVVESXG

SEQ ID NO: 69496 - protein, 35 aa, Artificial Sequence; identical to SEQ ID NO: 28307
  GFR-binding peptide
  MOD_RES (1), (2), (35): Xaa is C or S
  MOD_RES (16), (17), (18), (19), (20): Xaa is A or G
  MOD_RES (21), (22), (23), (24): Xaa is A or G or is absent

SEQ ID NO: 69497 - protein, 38 aa, Artificial Sequence; identical to SEQ ID NO: 28309
  GFR-binding peptide
  MOD_RES (5), (6): Xaa is C or S
  MOD_RES (20), (21), (22), (23), (24): Xaa is A or G
  MOD_RES (25), (26), (27), (28): Xaa is A or G or is absent

SEQ ID NO: 69498 - protein, 40 aa, Artificial Sequence; identical to SEQ ID NO: 28310
  GFR-binding peptide
  MOD_RES (4), (5), (39): Xaa is C or S
  MOD_RES (19), (20), (21), (22), (23): Xaa is A or G
  MOD_RES (24), (25), (26), (27): Xaa is A or G or is absent

SEQ ID NO: 69499 - protein, 39 aa, Artificial Sequence; identical to SEQ ID NO: 57264
  GFR-binding peptide
  MOD_RES (4), (5), (38): Xaa is C or S
  MOD_RES (19), (20), (21), (22), (23): Xaa is A or G
  MOD_RES (24), (25), (26), (27): Xaa is A or G or is absent

SEQ ID NO: 69500 - protein, 38 aa, Artificial Sequence; identical to SEQ ID NO: 28315
  GFR-binding peptide
  MOD_RES (1), (2), (35), (37): Xaa is C or S
  MOD_RES (16), (17), (18), (19), (20): Xaa is A or G
  MOD_RES (21), (22), (23), (24): Xaa is A or G or is absent

SEQ ID NO: 69501 - protein, 31 aa, Artificial Sequence; identical to SEQ ID NO: 7134
  GFR-binding peptide
  MOD_RES (1), (1): Xaa is C or S

SEQ ID NO: 69502 - protein, 36 aa, Artificial Sequence; identical to SEQ ID NO: 7135
  GFR-binding peptide
  MOD_RES (2), (3), (34), (36): Xaa is C or S

SEQ ID NO: 69503 - protein, 36 aa, Artificial Sequence
  GFR-binding peptide
  MOD_RES (3), (4): Xaa is C or S
  MOD_RES (18), (19), (20), (21), (22): Xaa is A or G
  MOD_RES (23), (24), (25), (26): Xaa is A or G or is absent
SPXXVPQDLSPINILYFXXXXXXXXXYGKIPMVVKS

SEQ ID NO: 69504 - protein, 34 aa, Artificial Sequence; identical to SEQ ID NO: 7138
  GFR-binding peptide
  MOD_RES (1), (34): Xaa is C or S

SEQ ID NO: 69505 - protein, 37 aa, Artificial Sequence
  GFR-binding peptide
  MOD_RES (6), (7): Xaa is C or S
GIPEPXXVPEKMSPISILYKDENKNVVLKYHYNMTVE

SEQ ID NO: 69506 - protein, 37 aa, Artificial Sequence; identical to SEQ ID NO: 7140
  GFR-binding peptide
  MOD_RES (6), (7): Xaa is C or S

SEQ ID NO: 69507 - protein, 36 aa, Artificial Sequence
  GFR-binding peptide
  MOD_RES (1), (33), (35): Xaa is C or S
XTPTKMEPISMLYLNDKQQIIKFKYEGMVVDRXGXS

SEQ ID NO: 69508 - protein, 41 aa, Artificial Sequence
  GFR-binding peptide
  MOD_RES (5), (6), (39), (41): Xaa is C or S
  MOD_RES (20), (21), (22), (23), (24): Xaa is A or G
  MOD_RES (25), (26), (27), (28): Xaa is A or G or is absent
SASPXXVSQDLSPINILYFXXXXXXXXXYGKIPMIVKSXKX

SEQ ID NO: 69509 - protein, 40 aa, Artificial Sequence; identical to SEQ ID NO: 7141
  GFR-binding peptide
  MOD_RES (5), (6), (40): Xaa is C or S
  MOD_RES (20), (21), (22), (23), (24): Xaa is A or G
  MOD_RES (25), (26), (27), (28): Xaa is A or G or is absent

SEQ ID NO: 69510 - protein, 34 aa, Artificial Sequence; identical to SEQ ID NO: 7145
  GFR-binding peptide
  MOD_RES (33), (33): Xaa is C or S

SEQ ID NO: 69511 - protein, 37 aa, Artificial Sequence
  GFR-binding peptide
  MOD_RES (34), (36): Xaa is C or S
  MOD_RES (14), (15), (16), (17), (18): Xaa is A or G
  MOD_RES (19), (20), (21), (22): Xaa is A or G or is absent
VPEKMNAISILYFXXXXXXXXXLKKYRNMTVESXAXR

SEQ ID NO: 69512 - protein, 40 aa, Artificial Sequence; identical to SEQ ID NO: 57277
  GFR-binding peptide
  MOD_RES (4), (5), (37), (39): Xaa is C or S

SEQ ID NO: 69513 - protein, 37 aa, Artificial Sequence; identical to SEQ ID NO: 28324
  GFR-binding peptide
  MOD_RES (3), (4), (35), (37): Xaa is C or S

SEQ ID NO: 69514 - protein, 33 aa, Artificial Sequence; identical to SEQ ID NO: 7148
  GFR-binding peptide
  MOD_RES (33), (33): Xaa is C or S

SEQ ID NO: 69515 - protein, 35 aa, Artificial Sequence; identical to SEQ ID NO: 28326
  GFR-binding peptide
  MOD_RES (2), (3): Xaa is C or S
  MOD_RES (17), (18), (19), (20), (21): Xaa is A or G
  MOD_RES (22), (23), (24), (25): Xaa is A or G or is absent

SEQ ID NO: 69516 - protein, 40 aa, Artificial Sequence; identical to SEQ ID NO: 28329
  GFR-binding peptide
  MOD_RES (5), (37), (39): Xaa is C or S

SEQ ID NO: 69517 - protein, 40 aa, Artificial Sequence; identical to SEQ ID NO: 7150
  GFR-binding peptide
  MOD_RES (3), (4), (38), (40): Xaa is C or S
  MOD_RES (18), (19), (20), (21), (22): Xaa is A or G
  MOD_RES (23), (24), (25), (26): Xaa is A or G or is absent

SEQ ID NO: 69518 - protein, 40 aa, Artificial Sequence
  GFR-binding peptide
  MOD_RES (5), (6), (38), (40): Xaa is C or S
SAGPXXTPTKMEPISMLYLNDKQQIIKFKYEGMVVDRXGX

SEQ ID NO: 69519 - protein, 38 aa, Artificial Sequence; identical to SEQ ID NO: 7157
  GFR-binding peptide
  MOD_RES (5), (5): Xaa is C or S
  MOD_RES (19), (20), (21), (22), (23): Xaa is A or G
  MOD_RES (24), (25), (26), (27): Xaa is A or G or is absent

SEQ ID NO: 69520 - protein, 35 aa, Artificial Sequence; identical to SEQ ID NO: 7158
  GFR-binding peptide
  MOD_RES (32), (34): Xaa is C or S

SEQ ID NO: 69521 - protein, 39 aa, Artificial Sequence; identical to SEQ ID NO: 7159
  GFR-binding peptide
  MOD_RES (6), (7), (39): Xaa is C or S

SEQ ID NO: 69522 - protein, 42 aa, Artificial Sequence
  GFR-binding peptide
  MOD_RES (5), (6), (40), (42): Xaa is C or S
  MOD_RES (20), (21), (22), (23), (24): Xaa is A or G
  MOD_RES (25), (26), (27), (28): Xaa is A or G or is absent
IPEPXXVPEKMNAISILYFXXXXXXXXXLKKYRNMTVESXAX

SEQ ID NO: 69523 - protein, 40 aa, Artificial Sequence
  GFR-binding peptide
  MOD_RES (6), (7), (39): Xaa is C or S
GSAGPXXTPTKMSATSMLYYNDKQQIILRKHRGMVVDRXG

SEQ ID NO: 69524 - protein, 40 aa, Artificial Sequence
  GFR-binding peptide
  MOD_RES (3), (4), (38), (40): Xaa is C or S
  MOD_RES (18), (19), (20), (21), (22): Xaa is A or G
  MOD_RES (23), (24), (25), (26): Xaa is A or G or is absent
EPXXVPEKMSPISILYKXXXXXXXXXLKYHYNMTVESXAX

SEQ ID NO: 69525 - protein, 37 aa, Artificial Sequence
  GFR-binding peptide
  MOD_RES (4), (5), (37): Xaa is C or S
PEPXXVPEKMNAISILYFDENKNVVLKKYRNMTVESX

SEQ ID NO: 69526 - protein, 35 aa, Artificial Sequence
  GFR-binding peptide
  MOD_RES (1), (32), (34): Xaa is C or S
XAPVKTSATSMLYYDNGRVLLLRKHRMIVEEXGXL

SEQ ID NO: 69527 - protein, 39 aa, Artificial Sequence; identical to SEQ ID NO: 7163
  GFR-binding peptide
  MOD_RES (6), (7), (38): Xaa is C or S

SEQ ID NO: 69528 - protein, 36 aa, Artificial Sequence
  GFR-binding peptide
  MOD_RES (33), (35): Xaa is C or S
  MOD_RES (14), (15), (16), (17), (18): Xaa is A or G
  MOD_RES (19), (20), (21), (22): Xaa is A or G or is absent
APVKTSATSMLYYXXXXXXXXXLRKHRMIVEEXGXL

SEQ ID NO: 69529 - protein, 37 aa, Artificial Sequence; identical to SEQ ID NO: 7169
  GFR-binding peptide
  MOD_RES (1), (34), (36): Xaa is C or S
  MOD_RES (15), (16), (17), (18), (19): Xaa is A or G
  MOD_RES (20), (21), (22), (23): Xaa is A or G or is absent

SEQ ID NO: 69530 - protein, 34 aa, Artificial Sequence
  GFR-binding peptide
  MOD_RES (1), (1): Xaa is C or S
  MOD_RES (15), (16), (17), (18), (19): Xaa is A or G
  MOD_RES (20), (21), (22), (23): Xaa is A or G or is absent
XVPTRLSPISILYKXXXXXXXXXLKYHYDMVVES

SEQ ID NO: 69531 - protein, 40 aa, Artificial Sequence; identical to SEQ ID NO: 7172
  GFR-binding peptide
  MOD_RES (4), (5), (37), (39): Xaa is C or S

SEQ ID NO: 69532 - protein, 37 aa, Artificial Sequence; identical to SEQ ID NO: 32377
  GFR-binding peptide
  MOD_RES (5), (6): Xaa is C or S

SEQ ID NO: 69533 - protein, 41 aa, Artificial Sequence
  GFR-binding peptide
  MOD_RES (6), (7), (39), (41): Xaa is C or S
GSAGPXXTPTKMSPISMLYKNDKQQIILKYHYGMVVDRXGX

SEQ ID NO: 69534 - protein, 35 aa, Artificial Sequence; identical to SEQ ID NO: 7178
  GFR-binding peptide
  MOD_RES (1), (2), (33), (35): Xaa is C or S

SEQ ID NO: 69535 - protein, 40 aa, Artificial Sequence; identical to SEQ ID NO: 7180
  GFR-binding peptide
  MOD_RES (6), (7): Xaa is C or S
  MOD_RES (21), (22), (23), (24), (25): Xaa is A or G
  MOD_RES (26), (27), (28), (29): Xaa is A or G or is absent

SEQ ID NO: 69536 - protein, 34 aa, Artificial Sequence
  GFR-binding peptide
  MOD_RES (3), (4): Xaa is C or S
KAXXVPTKLSATSILYYDKGVVTYLRKHRGMAVS

SEQ ID NO: 69537 - protein, 33 aa, Artificial Sequence; identical to SEQ ID NO: 7181
  GFR-binding peptide
  MOD_RES (1), (1): Xaa is C or S
  MOD_RES (15), (16), (17), (18), (19): Xaa is A or G
  MOD_RES (20), (21), (22), (23): Xaa is A or G or is absent

SEQ ID NO: 69538 - protein, 38 aa, Artificial Sequence; identical to SEQ ID NO: 28347
  GFR-binding peptide
  MOD_RES (4), (5): Xaa is C or S
  MOD_RES (19), (20), (21), (22), (23): Xaa is A or G
  MOD_RES (24), (25), (26), (27): Xaa is A or G or is absent

SEQ ID NO: 69539 - protein, 43 aa, Artificial Sequence; identical to SEQ ID NO: 7185
  GFR-binding peptide
  MOD_RES (6), (7), (41), (43): Xaa is C or S
  MOD_RES (21), (22), (23), (24), (25): Xaa is A or G
  MOD_RES (26), (27), (28), (29): Xaa is A or G or is absent

SEQ ID NO: 69540 - protein, 35 aa, Artificial Sequence
  GFR-binding peptide
  MOD_RES (2), (3), (35): Xaa is C or S
PXXTPTKMSATSMLYYNDKQQIILRKHRGMVVDRX

SEQ ID NO: 69541 - protein, 31 aa, Artificial Sequence; identical to SEQ ID NO: 32391
  GFR-binding peptide

SEQ ID NO: 69542 - protein, 34 aa, Artificial Sequence; identical to SEQ ID NO: 28354
  GFR-binding peptide
  MOD_RES (3), (4): Xaa is C or S

SEQ ID NO: 69543 - protein, 40 aa, Artificial Sequence
  GFR-binding peptide
  MOD_RES (5), (6), (38), (40): Xaa is C or S
SAGPXXTPTKMSPISMLYKNDKQQIILKYHYGMVVDRXGX

SEQ ID NO: 69544 - protein, 34 aa, Artificial Sequence; identical to SEQ ID NO: 7189
  GFR-binding peptide
  MOD_RES (2), (3), (34): Xaa is C or S

SEQ ID NO: 69545 - protein, 39 aa, Artificial Sequence; identical to SEQ ID NO: 28356
  GFR-binding peptide
  MOD_RES (6), (7), (39): Xaa is C or S

SEQ ID NO: 69546 - protein, 36 aa, Artificial Sequence; identical to SEQ ID NO: 28357
  GFR-binding peptide
  MOD_RES (33), (35): Xaa is C or S

SEQ ID NO: 69547 - protein, 33 aa, Artificial Sequence; identical to SEQ ID NO: 7193
  GFR-binding peptide
  MOD_RES (2), (3): Xaa is C or S

SEQ ID NO: 69548 - protein, 36 aa, Artificial Sequence
  GFR-binding peptide
  MOD_RES (2), (3), (35): Xaa is C or S
PXXTPTKMSATSMLYYNDKQQIILRKHRGMVVDRXG

SEQ ID NO: 69549 - protein, 35 aa, Artificial Sequence; identical to SEQ ID NO: 32400
  GFR-binding peptide
  MOD_RES (1), (2), (34): Xaa is C or S

SEQ ID NO: 69550 - protein, 40 aa, Artificial Sequence; identical to SEQ ID NO: 28362
  GFR-binding peptide
  MOD_RES (4), (5), (39): Xaa is C or S
  MOD_RES (19), (20), (21), (22), (23): Xaa is A or G
  MOD_RES (24), (25), (26), (27): Xaa is A or G or is absent

SEQ ID NO: 69551 - protein, 37 aa, Artificial Sequence; identical to SEQ ID NO: 7196
  GFR-binding peptide
  MOD_RES (1), (2), (34), (36): Xaa is C or S

SEQ ID NO: 69552 - protein, 35 aa, Artificial Sequence; identical to SEQ ID NO: 32414
  GFR-binding peptide
  MOD_RES (3), (4), (35): Xaa is C or S

SEQ ID NO: 69553 - protein, 39 aa, Artificial Sequence; identical to SEQ ID NO: 28375
  GFR-binding peptide
  MOD_RES (5), (6), (38): Xaa is C or S

SEQ ID NO: 69554 - protein, 37 aa, Artificial Sequence; identical to SEQ ID NO: 7206
  GFR-binding peptide
  MOD_RES (4), (5), (37): Xaa is C or S

SEQ ID NO: 69555 - protein, 36 aa, Artificial Sequence; identical to SEQ ID NO: 7208
  GFR-binding peptide
  MOD_RES (1), (2), (36): Xaa is C or S
  MOD_RES (16), (17), (18), (19), (20): Xaa is A or G
  MOD_RES (21), (22), (23), (24): Xaa is A or G or is absent

SEQ ID NO: 69556 - protein, 38 aa, Artificial Sequence; identical to SEQ ID NO: 32428
  GFR-binding peptide
  MOD_RES (5), (6): Xaa is C or S
  MOD_RES (20), (21), (22), (23), (24): Xaa is A or G
  MOD_RES (25), (26), (27), (28): Xaa is A or G or is absent

SEQ ID NO: 69557 - protein, 40 aa, Artificial Sequence
  GFR-binding peptide
  MOD_RES (5), (6), (38), (40): Xaa is C or S
IPEPXXVPEKMNAISILYFDENKNVVLKKYRNMTVESXAX

SEQ ID NO: 69558 - protein, 33 aa, Artificial Sequence; identical to SEQ ID NO: 28382
  GFR-binding peptide
  MOD_RES (1), (1): Xaa is C or S

SEQ ID NO: 69559 - protein, 33 aa, Artificial Sequence
  GFR-binding peptide
  MOD_RES (32), (32): Xaa is C or S
VPEKMSATSILYYDENKNVVLRKHRNMTVESXA

SEQ ID NO: 69560 - protein, 39 aa, Artificial Sequence
  GFR-binding peptide
  MOD_RES (6), (7): Xaa is C or S
  MOD_RES (21), (22), (23), (24), (25): Xaa is A or G
  MOD_RES (26), (27), (28), (29): Xaa is A or G or is absent
ASASPXXVSQDLSPINILYFXXXXXXXXXYGKIPMIVKS

SEQ ID NO: 69561 - protein, 33 aa, Artificial Sequence; identical to SEQ ID NO: 32431
  GFR-binding peptide
  MOD_RES (1), (2): Xaa is C or S

SEQ ID NO: 69562 - protein, 36 aa, Artificial Sequence; identical to SEQ ID NO: 7216
  GFR-binding peptide
  MOD_RES (5), (6): Xaa is C or S

SEQ ID NO: 69563 - protein, 35 aa, Artificial Sequence; identical to SEQ ID NO: 32440
  GFR-binding peptide
  MOD_RES (1), (1): Xaa is C or S
  MOD_RES (15), (16), (17), (18), (19): Xaa is A or G
  MOD_RES (20), (21), (22), (23): Xaa is A or G or is absent

SEQ ID NO: 69564 - protein, 41 aa, Artificial Sequence; identical to SEQ ID NO: 7220
  GFR-binding peptide
  MOD_RES (3), (4), (38), (40): Xaa is C or S
  MOD_RES (18), (19), (20), (21), (22): Xaa is A or G
  MOD_RES (23), (24), (25), (26): Xaa is A or G or is absent

SEQ ID NO: 69565 - protein, 37 aa, Artificial Sequence
  GFR-binding peptide
  MOD_RES (4), (5), (37): Xaa is C or S
PEPXXVPEKMSPISILYKDENKNVVLKYHYNMTVESX

SEQ ID NO: 69566 - protein, 40 aa, Artificial Sequence; identical to SEQ ID NO: 7222
  GFR-binding peptide
  MOD_RES (4), (5), (39): Xaa is C or S
  MOD_RES (19), (20), (21), (22), (23): Xaa is A or G
  MOD_RES (24), (25), (26), (27): Xaa is A or G or is absent

SEQ ID NO: 69567 - protein, 39 aa, Artificial Sequence
  GFR-binding peptide
  MOD_RES (5), (6), (38): Xaa is C or S
TPPTXXVPTRLSPISILYKDSANNVVLKYHYDMVVESXG

SEQ ID NO: 69568 - protein, 40 aa, Artificial Sequence; identical to SEQ ID NO: 28389
  GFR-binding peptide
  MOD_RES (5), (6), (40): Xaa is C or S
  MOD_RES (20), (21), (22), (23), (24): Xaa is A or G
  MOD_RES (25), (26), (27), (28): Xaa is A or G or is absent

SEQ ID NO: 69569 - protein, 42 aa, Artificial Sequence; identical to SEQ ID NO: 28390
  GFR-binding peptide
  MOD_RES (6), (7), (39), (41): Xaa is C or S

SEQ ID NO: 69570 - protein, 38 aa, Artificial Sequence; identical to SEQ ID NO: 28393
  GFR-binding peptide
  MOD_RES (4), (5): Xaa is C or S
  MOD_RES (19), (20), (21), (22), (23): Xaa is A or G
  MOD_RES (24), (25), (26), (27): Xaa is A or G or is absent

SEQ ID NO: 69571 - protein, 38 aa, Artificial Sequence; identical to SEQ ID NO: 28394
  GFR-binding peptide
  MOD_RES (4), (5): Xaa is C or S
  MOD_RES (19), (20), (21), (22), (23): Xaa is A or G
  MOD_RES (24), (25), (26), (27): Xaa is A or G or is absent

SEQ ID NO: 69572 - protein, 36 aa, Artificial Sequence
  GFR-binding peptide
  MOD_RES (1), (2), (33), (35): Xaa is C or S
XXVPQALSPINILYFVGRKPKVYGKIPMIVRSXKXS

SEQ ID NO: 69573 - protein, 36 aa, Artificial Sequence
  GFR-binding peptide
  MOD_RES (2), (3), (35): Xaa is C or S
PXXVPEKMSATSILYYDENKNVVLRKHRNMTVESXA

SEQ ID NO: 69574 - protein, 41 aa, Artificial Sequence; identical to SEQ ID NO: 7230
  GFR-binding peptide
  MOD_RES (5), (6), (38), (40): Xaa is C or S

SEQ ID NO: 69575 - protein, 34 aa, Artificial Sequence; identical to SEQ ID NO: 57364
  GFR-binding peptide
  MOD_RES (3), (4): Xaa is C or S

SEQ ID NO: 69576 - protein, 40 aa, Artificial Sequence
  GFR-binding peptide
  MOD_RES (4), (5), (37), (39): Xaa is C or S
AGPXXTPTKMEPISMLYLNDKQQIIKFKYEGMVVDRXGXS

SEQ ID NO: 69577 - protein, 36 aa, Artificial Sequence; identical to SEQ ID NO: 32463
  GFR-binding peptide
  MOD_RES (2), (3), (35): Xaa is C or S

SEQ ID NO: 69578 - protein, 35 aa, Artificial Sequence
  GFR-binding peptide
  MOD_RES (4), (5): Xaa is C or S
PEPXXVPEKMSATSILYYDENKNVVLRKHRNMTVE

SEQ ID NO: 69579 - protein, 40 aa, Artificial Sequence; identical to SEQ ID NO: 7234
  GFR-binding peptide
  MOD_RES (6), (7), (40): Xaa is C or S
  MOD_RES (21), (22), (23), (24), (25): Xaa is A or G
  MOD_RES (26), (27), (28), (29): Xaa is A or G or is absent

SEQ ID NO: 69580 - protein, 39 aa, Artificial Sequence
  GFR-binding peptide
  MOD_RES (3), (4), (38): Xaa is C or S
  MOD_RES (18), (19), (20), (21), (22): Xaa is A or G
  MOD_RES (23), (24), (25), (26): Xaa is A or G or is absent
PTXXVPTRLSPISILYKXXXXXXXXXLKYHYDMVVESXG

SEQ ID NO: 69581 - protein, 41 aa, Artificial Sequence
  GFR-binding peptide
  MOD_RES (4), (5), (38), (40): Xaa is C or S
  MOD_RES (19), (20), (21), (22), (23): Xaa is A or G
  MOD_RES (24), (25), (26), (27): Xaa is A or G or is absent
ASPXXVSQDLSPINILYFXXXXXXXXXYGKIPMIVKSXKXS

SEQ ID NO: 69582 - protein, 31 aa, Artificial Sequence
  GFR-binding peptide
  MOD_RES (31), (31): Xaa is C or S
APVKTSATSMLYYDNGRVLLLRKHRMIVEEX

SEQ ID NO: 69583 - protein, 42 aa, Artificial Sequence; identical to SEQ ID NO: 7235
  GFR-binding peptide
  MOD_RES (6), (7), (41): Xaa is C or S
  MOD_RES (21), (22), (23), (24), (25): Xaa is A or G
  MOD_RES (26), (27), (28), (29): Xaa is A or G or is absent

SEQ ID NO: 69584 - protein, 39 aa, Artificial Sequence; identical to SEQ ID NO: 7236
  GFR-binding peptide
  MOD_RES (6), (7): Xaa is C or S
  MOD_RES (21), (22), (23), (24), (25): Xaa is A or G
  MOD_RES (26), (27), (28), (29): Xaa is A or G or is absent

SEQ ID NO: 69585 - protein, 34 aa, Artificial Sequence; identical to SEQ ID NO: 28409
  GFR-binding peptide
  MOD_RES (1), (33): Xaa is C or S

SEQ ID NO: 69586 - protein, 31 aa, Artificial Sequence; identical to SEQ ID NO: 7238
  GFR-binding peptide

SEQ ID NO: 69587 - protein, 36 aa, Artificial Sequence; identical to SEQ ID NO: 32467
  GFR-binding peptide
  MOD_RES (1), (2), (34), (36): Xaa is C or S

SEQ ID NO: 69588 - protein, 36 aa, Artificial Sequence; identical to SEQ ID NO: 7239
  GFR-binding peptide
  MOD_RES (3), (4): Xaa is C or S
  MOD_RES (18), (19), (20), (21), (22): Xaa is A or G
  MOD_RES (23), (24), (25), (26): Xaa is A or G or is absent

SEQ ID NO: 69589 - protein, 39 aa, Artificial Sequence; identical to SEQ ID NO: 7240
  GFR-binding peptide
  MOD_RES (4), (5), (39): Xaa is C or S
  MOD_RES (19), (20), (21), (22), (23): Xaa is A or G
  MOD_RES (24), (25), (26), (27): Xaa is A or G or is absent

SEQ ID NO: 69590 - protein, 41 aa, Artificial Sequence
  GFR-binding peptide
  MOD_RES (5), (6), (38), (40): Xaa is C or S
ASKAXXVPTKLSATSILYYDKGVVTYLRKHRGMAVSEXGXR

SEQ ID NO: 69591 - protein, 40 aa, Artificial Sequence; identical to SEQ ID NO: 32477
  GFR-binding peptide
  MOD_RES (5), (37), (39): Xaa is C or S

SEQ ID NO: 69592 - protein, 31 aa, Artificial Sequence; identical to SEQ ID NO: 7242
  GFR-binding peptide

SEQ ID NO: 69593 - protein, 39 aa, Artificial Sequence; identical to SEQ ID NO: 32480
  GFR-binding peptide
  MOD_RES (5), (6): Xaa is C or S
  MOD_RES (20), (21), (22), (23), (24): Xaa is A or G
  MOD_RES (25), (26), (27), (28): Xaa is A or G or is absent

SEQ ID NO: 69594 - protein, 39 aa, Artificial Sequence
  GFR-binding peptide
  MOD_RES (3), (4), (38): Xaa is C or S
  MOD_RES (18), (19), (20), (21), (22): Xaa is A or G
  MOD_RES (23), (24), (25), (26): Xaa is A or G or is absent
PTXXVPTRLEPISILYLXXXXXXXXXKFKYEDMVVESXG

SEQ ID NO: 69595 - protein, 40 aa, Artificial Sequence
  GFR-binding peptide
  MOD_RES (5), (6), (40): Xaa is C or S
  MOD_RES (20), (21), (22), (23), (24): Xaa is A or G
  MOD_RES (25), (26), (27), (28): Xaa is A or G or is absent
IPEPXXVPEKMSPISILYKXXXXXXXXXLKYHYNMTVESX

SEQ ID NO: 69596 - protein, 33 aa, Artificial Sequence; identical to SEQ ID NO: 7245
  GFR-binding peptide
  MOD_RES (14), (15), (16), (17), (18): Xaa is A or G
  MOD_RES (19), (20), (21), (22): Xaa is A or G or is absent

SEQ ID NO: 69597 - protein, 36 aa, Artificial Sequence; identical to SEQ ID NO: 57390
  GFR-binding peptide
  MOD_RES (33), (35): Xaa is C or S
  MOD_RES (14), (15), (16), (17), (18): Xaa is A or G
  MOD_RES (19), (20), (21), (22): Xaa is A or G or is absent

SEQ ID NO: 69598 - protein, 32 aa, Artificial Sequence; identical to SEQ ID NO: 28430
  GFR-binding peptide
  MOD_RES (1), (2): Xaa is C or S

SEQ ID NO: 69599 - protein, 35 aa, Artificial Sequence
  GFR-binding peptide
  MOD_RES (1), (2): Xaa is C or S
  MOD_RES (16), (17), (18), (19), (20): Xaa is A or G
  MOD_RES (21), (22), (23), (24): Xaa is A or G or is absent
XXTPTKMSATSMLYYXXXXXXXXXLRKHRGMVVDR

SEQ ID NO: 69600 - protein, 39 aa, Artificial Sequence; identical to SEQ ID NO: 32492
  GFR-binding peptide
  MOD_RES (4), (5), (37), (39): Xaa is C or S

SEQ ID NO: 69601 - protein, 34 aa, Artificial Sequence; identical to SEQ ID NO: 7249
  GFR-binding peptide
  MOD_RES (1), (1): Xaa is C or S
  MOD_RES (15), (16), (17), (18), (19): Xaa is A or G
  MOD_RES (20), (21), (22), (23): Xaa is A or G or is absent

SEQ ID NO: 69602 - protein, 35 aa, Artificial Sequence; identical to SEQ ID NO: 28435
  GFR-binding peptide
  MOD_RES (2), (3), (35): Xaa is C or S

SEQ ID NO: 69603 - protein, 33 aa, Artificial Sequence; identical to SEQ ID NO: 32495
  GFR-binding peptide
  MOD_RES (32), (32): Xaa is C or S

SEQ ID NO: 69604 - protein, 39 aa, Artificial Sequence; identical to SEQ ID NO: 32496
  GFR-binding peptide
  MOD_RES (2), (3), (37), (39): Xaa is C or S
  MOD_RES (17), (18), (19), (20), (21): Xaa is A or G
  MOD_RES (22), (23), (24), (25): Xaa is A or G or is absent

SEQ ID NO: 69605 - protein, 38 aa, Artificial Sequence; identical to SEQ ID NO: 7253
  GFR-binding peptide
  MOD_RES (1), (2), (36), (38): Xaa is C or S
  MOD_RES (16), (17), (18), (19), (20): Xaa is A or G
  MOD_RES (21), (22), (23), (24): Xaa is A or G or is absent

SEQ ID NO: 69606 - protein, 39 aa, Artificial Sequence
  GFR-binding peptide
  MOD_RES (4), (5), (37), (39): Xaa is C or S
AGPXXTPTKMSATSMLYYNDKQQIILRKHRGMVVDRXGX

SEQ ID NO: 69607 - protein, 36 aa, Artificial Sequence; identical to SEQ ID NO: 57397
  GFR-binding peptide
  MOD_RES (5), (6): Xaa is C or S

SEQ ID NO: 69608 - protein, 39 aa, Artificial Sequence
  GFR-binding peptide
  MOD_RES (5), (6), (38): Xaa is C or S
IPEPXXVPEKMSPISILYKDENKNVVLKYHYNMTVESXA

SEQ ID NO: 69609 - protein, 44 aa, Artificial Sequence; identical to SEQ ID NO: 14555
  GFR-binding peptide
  MOD_RES (6), (7), (41), (43): Xaa is C or S
  MOD_RES (21), (22), (23), (24), (25): Xaa is A or G
  MOD_RES (26), (27), (28), (29): Xaa is A or G or is absent

SEQ ID NO: 69610 - protein, 43 aa, Artificial Sequence
  GFR-binding peptide
  MOD_RES (5), (6), (40), (42): Xaa is C or S
  MOD_RES (20), (21), (22), (23), (24): Xaa is A or G
  MOD_RES (25), (26), (27), (28): Xaa is A or G or is absent
TPPTXXVPTRLEPISILYLXXXXXXXXXKFKYEDMVVESXGXR

SEQ ID NO: 69611 - protein, 33 aa, Artificial Sequence
  GFR-binding peptide
  MOD_RES (2), (3): Xaa is C or S
PXXTPTKMSPISMLYKNDKQQIILKYHYGMVVD

SEQ ID NO: 69612 - protein, 35 aa, Artificial Sequence; identical to SEQ ID NO: 32511
  GFR-binding peptide
  MOD_RES (2), (3): Xaa is C or S
  MOD_RES (17), (18), (19), (20), (21): Xaa is A or G
  MOD_RES (22), (23), (24), (25): Xaa is A or G or is absent

SEQ ID NO: 69613 - protein, 42 aa, Artificial Sequence; identical to SEQ ID NO: 7260
  GFR-binding peptide
  MOD_RES (4), (5), (40), (42): Xaa is C or S
  MOD_RES (19), (20), (21), (22), (23): Xaa is A or G
  MOD_RES (24), (25), (26), (27): Xaa is A or G or is absent

SEQ ID NO: 69614 - protein, 37 aa, Artificial Sequence
  GFR-binding peptide
  MOD_RES (1), (34), (36): Xaa is C or S
  MOD_RES (15), (16), (17), (18), (19): Xaa is A or G
  MOD_RES (20), (21), (22), (23): Xaa is A or G or is absent
XVPQDLSPINILYFXXXXXXXXXYGKIPMVVKSXKXS

SEQ ID NO: 69615 - protein, 38 aa, Artificial Sequence; identical to SEQ ID NO: 28445
  GFR-binding peptide
  MOD_RES (5), (6), (37): Xaa is C or S

SEQ ID NO: 69616 - protein, 38 aa, Artificial Sequence; identical to SEQ ID NO: 32514
  GFR-binding peptide
  MOD_RES (4), (5): Xaa is C or S
  MOD_RES (19), (20), (21), (22), (23): Xaa is A or G
  MOD_RES (24), (25), (26), (27): Xaa is A or G or is absent

SEQ ID NO: 69617 - protein, 40 aa, Artificial Sequence; identical to SEQ ID NO: 7265
  GFR-binding peptide
  MOD_RES (4), (5), (38), (40): Xaa is C or S

SEQ ID NO: 69618 - protein, 40 aa, Artificial Sequence
  GFR-binding peptide
  MOD_RES (5), (6), (40): Xaa is C or S
  MOD_RES (20), (21), (22), (23), (24): Xaa is A or G
  MOD_RES (25), (26), (27), (28): Xaa is A or G or is absent
TPPTXXVPTRLSPISILYKXXXXXXXXXLKYHYDMVVESX

SEQ ID NO: 69619 - protein, 36 aa, Artificial Sequence
  GFR-binding peptide
  MOD_RES (2), (3): Xaa is C or S
  MOD_RES (17), (18), (19), (20), (21): Xaa is A or G
  MOD_RES (22), (23), (24), (25): Xaa is A or G or is absent
TXXVPTRLSPISILYKXXXXXXXXXLKYHYDMVVES

SEQ ID NO: 69620 - protein, 33 aa, Artificial Sequence; identical to SEQ ID NO: 7267
  GFR-binding peptide
  MOD_RES (1), (2): Xaa is C or S

SEQ ID NO: 69621 - protein, 43 aa, Artificial Sequence; identical to SEQ ID NO: 28448
  GFR-binding peptide
  MOD_RES (5), (6), (40), (42): Xaa is C or S
  MOD_RES (20), (21), (22), (23), (24): Xaa is A or G
  MOD_RES (25), (26), (27), (28): Xaa is A or G or is absent

SEQ ID NO: 69622 - protein, 40 aa, Artificial Sequence; identical to SEQ ID NO: 7273
  GFR-binding peptide
  MOD_RES (4), (38), (40): Xaa is C or S
  MOD_RES (18), (19), (20), (21), (22): Xaa is A or G
  MOD_RES (23), (24), (25), (26): Xaa is A or G or is absent

SEQ ID NO: 69623 - protein, 40 aa, Artificial Sequence; identical to SEQ ID NO: 28451
  GFR-binding peptide
  MOD_RES (4), (5), (39): Xaa is C or S
  MOD_RES (19), (20), (21), (22), (23): Xaa is A or G
  MOD_RES (24), (25), (26), (27): Xaa is A or G or is absent

SEQ ID NO: 69624 - protein, 38 aa, Artificial Sequence
  GFR-binding peptide
  MOD_RES (4), (5), (36), (38): Xaa is C or S
PSTXXAPVKTSPISMLYKDNGRVLLLKYHYMIVEEXGX

SEQ ID NO: 69625 - protein, 33 aa, Artificial Sequence
  GFR-binding peptide
  MOD_RES (33), (33): Xaa is C or S
  MOD_RES (14), (15), (16), (17), (18): Xaa is A or G
  MOD_RES (19), (20), (21), (22): Xaa is A or G or is absent
VPQDLSPINILYFXXXXXXXXXYGKIPMVVKSX

SEQ ID NO: 69626 - protein, 33 aa, Artificial Sequence; identical to SEQ ID NO: 28454
  GFR-binding peptide
  MOD_RES (1), (1): Xaa is C or S
  MOD_RES (15), (16), (17), (18), (19): Xaa is A or G
  MOD_RES (20), (21), (22), (23): Xaa is A or G or is absent

SEQ ID NO: 69627 - protein, 36 aa, Artificial Sequence; identical to SEQ ID NO: 32524
  GFR-binding peptide
  MOD_RES (33), (35): Xaa is C or S

SEQ ID NO: 69628 - protein, 41 aa, Artificial Sequence; identical to SEQ ID NO: 7278
  GFR-binding peptide
  MOD_RES (4), (5), (38), (40): Xaa is C or S
  MOD_RES (19), (20), (21), (22), (23): Xaa is A or G
  MOD_RES (24), (25), (26), (27): Xaa is A or G or is absent

SEQ ID NO: 69629 - protein, 34 aa, Artificial Sequence; identical to SEQ ID NO: 7279
  GFR-binding peptide
  MOD_RES (3), (4): Xaa is C or S

SEQ ID NO: 69630 - protein, 39 aa, Artificial Sequence; identical to SEQ ID NO: 7281
  GFR-binding peptide
  MOD_RES (5), (6), (38): Xaa is C or S

SEQ ID NO: 69631 - protein, 36 aa, Artificial Sequence
  GFR-binding peptide
  MOD_RES (3), (4), (35): Xaa is C or S
SPXXVSQDLSPINILYFIGKTPKIYGKIPMIVKSXK

SEQ ID NO: 69632 - protein, 37 aa, Artificial Sequence
  GFR-binding peptide
  MOD_RES (4), (5), (37): Xaa is C or S
AGPXXTPTKMSPISMLYKNDKQQIILKYHYGMVVDRX

SEQ ID NO: 69633 - protein, 36 aa, Artificial Sequence; identical to SEQ ID NO: 32533
  GFR-binding peptide
  MOD_RES (34), (36): Xaa is C or S
  MOD_RES (14), (15), (16), (17), (18): Xaa is A or G
  MOD_RES (19), (20), (21), (22): Xaa is A or G or is absent

SEQ ID NO: 69634 - protein, 34 aa, Artificial Sequence; identical to SEQ ID NO: 28462
  GFR-binding peptide
  MOD_RES (2), (3): Xaa is C or S

SEQ ID NO: 69635 - protein, 39 aa, Artificial Sequence; identical to SEQ ID NO: 28464
  GFR-binding peptide
  MOD_RES (4), (5), (37), (39): Xaa is C or S

SEQ ID NO: 69636 - protein, 42 aa, Artificial Sequence; identical to SEQ ID NO: 7288
  GFR-binding peptide
  MOD_RES (5), (6), (40), (42): Xaa is C or S
  MOD_RES (20), (21), (22), (23), (24): Xaa is A or G
  MOD_RES (25), (26), (27), (28): Xaa is A or G or is absent

SEQ ID NO: 69637 - protein, 37 aa, Artificial Sequence; identical to SEQ ID NO: 28468
  GFR-binding peptide
  MOD_RES (4), (5): Xaa is C or S
  MOD_RES (19), (20), (21), (22), (23): Xaa is A or G
  MOD_RES (24), (25), (26), (27): Xaa is A or G or is absent

SEQ ID NO: 69638 - protein, 34 aa, Artificial Sequence; identical to SEQ ID NO: 7289
  GFR-binding peptide
  MOD_RES (31), (33): Xaa is C or S

SEQ ID NO: 69639 - protein, 39 aa, Artificial Sequence; identical to SEQ ID NO: 7290
  GFR-binding peptide
  MOD_RES (4), (5), (37), (39): Xaa is C or S

SEQ ID NO: 69640 - protein, 35 aa, Artificial Sequence; identical to SEQ ID NO: 7292
  GFR-binding peptide
  MOD_RES (2), (3): Xaa is C or S
  MOD_RES (17), (18), (19), (20), (21): Xaa is A or G
  MOD_RES (22), (23), (24), (25): Xaa is A or G or is absent

SEQ ID NO: 69641 - protein, 39 aa, Artificial Sequence; identical to SEQ ID NO: 32545
  GFR-binding peptide
  MOD_RES (3), (4), (37), (39): Xaa is C or S

SEQ ID NO: 69642 - protein, 34 aa, Artificial Sequence; identical to SEQ ID NO: 32546
  GFR-binding peptide
  MOD_RES (2), (3): Xaa is C or S

SEQ ID NO: 69643 - protein, 35 aa, Artificial Sequence; identical to SEQ ID NO: 7293
  GFR-binding peptide
  MOD_RES (4), (5): Xaa is C or S

SEQ ID NO: 69644 - protein, 41 aa, Artificial Sequence; identical to SEQ ID NO: 57455
  GFR-binding peptide
  MOD_RES (6), (7), (40): Xaa is C or S
  MOD_RES (21), (22), (23), (24), (25): Xaa is A or G
  MOD_RES (26), (27), (28), (29): Xaa is A or G or is absent

SEQ ID NO: 69645 - protein, 32 aa, Artificial Sequence
  GFR-binding peptide
  MOD_RES (32), (32): Xaa is C or S
VPTRLSPISILYKDSANNVVLKYHYDMVVESX

SEQ ID NO: 69646 - protein, 39 aa, Artificial Sequence; identical to SEQ ID NO: 32548
  GFR-binding peptide
  MOD_RES (4), (5), (37), (39): Xaa is C or S

SEQ ID NO: 69647 - protein, 35 aa, Artificial Sequence; identical to SEQ ID NO: 7296
  GFR-binding peptide
  MOD_RES (2), (34): Xaa is C or S

SEQ ID NO: 69648 - protein, 35 aa, Artificial Sequence; identical to SEQ ID NO: 7297
  GFR-binding peptide
  MOD_RES (1), (2): Xaa is C or S
  MOD_RES (16), (17), (18), (19), (20): Xaa is A or G
  MOD_RES (21), (22), (23), (24): Xaa is A or G or is absent

SEQ ID NO: 69649 - protein, 40 aa, Artificial Sequence; identical to SEQ ID NO: 7298
  GFR-binding peptide
  MOD_RES (4), (5), (38), (40): Xaa is C or S
  MOD_RES (19), (20), (21), (22), (23): Xaa is A or G
  MOD_RES (24), (25), (26), (27): Xaa is A or G or is absent

SEQ ID NO: 69650 - protein, 32 aa, Artificial Sequence; identical to SEQ ID NO: 14597
  GFR-binding peptide
  MOD_RES (32), (32): Xaa is C or S

SEQ ID NO: 69651 - protein, 41 aa, Artificial Sequence; identical to SEQ ID NO: 32553
  GFR-binding peptide
  MOD_RES (5), (6), (41): Xaa is C or S
  MOD_RES (20), (21), (22), (23), (24): Xaa is A or G
  MOD_RES (25), (26), (27), (28): Xaa is A or G or is absent

SEQ ID NO: 69652 - protein, 34 aa, Artificial Sequence; identical to SEQ ID NO: 32554
  GFR-binding peptide
  MOD_RES (1), (2): Xaa is C or S
  MOD_RES (16), (17), (18), (19), (20): Xaa is A or G
  MOD_RES (21), (22), (23), (24): Xaa is A or G or is absent

SEQ ID NO: 69653 - protein, 38 aa, Artificial Sequence; identical to SEQ ID NO: 7301
  GFR-binding peptide
  MOD_RES (2), (3), (36), (38): Xaa is C or S
  MOD_RES (17), (18), (19), (20), (21): Xaa is A or G
  MOD_RES (22), (23), (24), (25): Xaa is A or G or is absent

SEQ ID NO: 69654 - protein, 36 aa, Artificial Sequence; identical to SEQ ID NO: 28482
  GFR-binding peptide
  MOD_RES (34), (36): Xaa is C or S
  MOD_RES (14), (15), (16), (17), (18): Xaa is A or G
  MOD_RES (19), (20), (21), (22): Xaa is A or G or is absent

SEQ ID NO: 69655 - protein, 30 aa, Artificial Sequence; identical to SEQ ID NO: 7304
  GFR-binding peptide

SEQ ID NO: 69656 - protein, 32 aa, Artificial Sequence; identical to SEQ ID NO: 7306
  GFR-binding peptide
  MOD_RES (14), (15), (16), (17), (18): Xaa is A or G
  MOD_RES (19), (20), (21), (22): Xaa is A or G or is absent

SEQ ID NO: 69657 - protein, 33 aa, Artificial Sequence; identical to SEQ ID NO: 7307
  GFR-binding peptide
  MOD_RES (1), (1): Xaa is C or S
  MOD_RES (15), (16), (17), (18), (19): Xaa is A or G
  MOD_RES (20), (21), (22), (23): Xaa is A or G or is absent

SEQ ID NO: 69658 - protein, 35 aa, Artificial Sequence
  GFR-binding peptide
  MOD_RES (3), (4): Xaa is C or S
ASXXVPARLSATSILYYDAANNVVLRKHRDMVVEA

SEQ ID NO: 69659 - protein, 36 aa, Artificial Sequence
  GFR-binding peptide
  MOD_RES (5), (6): Xaa is C or S
SAGPXXTPTKMEPISMLYLNDKQQIIKFKYEGMVVD

SEQ ID NO: 69660 - protein, 40 aa, Artificial Sequence; identical to SEQ ID NO: 28493
  GFR-binding peptide
  MOD_RES (6), (38), (40): Xaa is C or S

SEQ ID NO: 69661 - protein, 40 aa, Artificial Sequence; identical to SEQ ID NO: 7311
  GFR-binding peptide
  MOD_RES (5), (6), (37), (39): Xaa is C or S

SEQ ID NO: 69662 - protein, 35 aa, Artificial Sequence
  GFR-binding peptide
  MOD_RES (4), (5): Xaa is C or S
PSTXXAPVKTSATSMLYYDNGRVLLLRKHRMIVEE

SEQ ID NO: 69663 - protein, 37 aa, Artificial Sequence; identical to SEQ ID NO: 28496
  GFR-binding peptide
  MOD_RES (3), (4), (37): Xaa is C or S
  MOD_RES (18), (19), (20), (21), (22): Xaa is A or G
  MOD_RES (23), (24), (25), (26): Xaa is A or G or is absent

SEQ ID NO: 69664 - protein, 38 aa, Artificial Sequence; identical to SEQ ID NO: 7312
  GFR-binding peptide
  MOD_RES (4), (5), (36), (38): Xaa is C or S

SEQ ID NO: 69665 - protein, 39 aa, Artificial Sequence
  GFR-binding peptide
  MOD_RES (2), (3), (37), (39): Xaa is C or S
  MOD_RES (17), (18), (19), (20), (21): Xaa is A or G
  MOD_RES (22), (23), (24), (25): Xaa is A or G or is absent
TXXVPTRLSPISILYKXXXXXXXXXLKYHYDMVVESXGX

SEQ ID NO: 69666 - protein, 36 aa, Artificial Sequence; identical to SEQ ID NO: 32578
  GFR-binding peptide
  MOD_RES (1), (2), (35): Xaa is C or S
  MOD_RES (16), (17), (18), (19), (20): Xaa is A or G
  MOD_RES (21), (22), (23), (24): Xaa is A or G or is absent

SEQ ID NO: 69667 - protein, 35 aa, Artificial Sequence; identical to SEQ ID NO: 7316
  GFR-binding peptide
  MOD_RES (34), (34): Xaa is C or S
  MOD_RES (14), (15), (16), (17), (18): Xaa is A or G
  MOD_RES (19), (20), (21), (22): Xaa is A or G or is absent

SEQ ID NO: 69668 - protein, 43 aa, Artificial Sequence; identical to SEQ ID NO: 7317
  GFR-binding peptide
  MOD_RES (5), (6), (41), (43): Xaa is C or S
  MOD_RES (20), (21), (22), (23), (24): Xaa is A or G
  MOD_RES (25), (26), (27), (28): Xaa is A or G or is absent

SEQ ID NO: 69669 - protein, 39 aa, Artificial Sequence; identical to SEQ ID NO: 7318
  GFR-binding peptide
  MOD_RES (5), (39): Xaa is C or S
  MOD_RES (19), (20), (21), (22), (23): Xaa is A or G
  MOD_RES (24), (25), (26), (27): Xaa is A or G or is absent

SEQ ID NO: 69670 - protein, 36 aa, Artificial Sequence; identical to SEQ ID NO: 28506
  GFR-binding peptide
  MOD_RES (34), (36): Xaa is C or S
  MOD_RES (14), (15), (16), (17), (18): Xaa is A or G
  MOD_RES (19), (20), (21), (22): Xaa is A or G or is absent

SEQ ID NO: 69671 - protein, 34 aa, Artificial Sequence; identical to SEQ ID NO: 7321
  GFR-binding peptide
  MOD_RES (1), (1): Xaa is C or S
  MOD_RES (15), (16), (17), (18), (19): Xaa is A or G
  MOD_RES (20), (21), (22), (23): Xaa is A or G or is absent

SEQ ID NO: 69672 - protein, 37 aa, Artificial Sequence; identical to SEQ ID NO: 7322
  GFR-binding peptide
  MOD_RES (2), (3), (34), (36): Xaa is C or S

SEQ ID NO: 69673 - protein, 33 aa, Artificial Sequence
  GFR-binding peptide
  MOD_RES (1), (1): Xaa is C or S
  MOD_RES (15), (16), (17), (18), (19): Xaa is A or G
  MOD_RES (20), (21), (22), (23): Xaa is A or G or is absent
XTPTKMSATSMLYYXXXXXXXXXLRKHRGMVVD

SEQ ID NO: 69674 - protein, 35 aa, Artificial Sequence; identical to SEQ ID NO: 28511
  GFR-binding peptide
  MOD_RES (1), (2), (34): Xaa is C or S

SEQ ID NO: 69675 - protein, 34 aa, Artificial Sequence
  GFR-binding peptide
  MOD_RES (34), (34): Xaa is C or S
  MOD_RES (14), (15), (16), (17), (18): Xaa is A or G
  MOD_RES (19), (20), (21), (22): Xaa is A or G or is absent
VPTKLSATSILYYXXXXXXXXXLRKHRGMAVSEX

SEQ ID NO: 69676 - protein, 35 aa, Artificial Sequence; identical to SEQ ID NO: 28513
  GFR-binding peptide
  MOD_RES (34), (34): Xaa is C or S
  MOD_RES (14), (15), (16), (17), (18): Xaa is A or G
  MOD_RES (19), (20), (21), (22): Xaa is A or G or is absent

SEQ ID NO: 69677 - protein, 40 aa, Artificial Sequence; identical to SEQ ID NO: 7328
  GFR-binding peptide
  MOD_RES (6), (7), (39): Xaa is C or S

SEQ ID NO: 69678 - protein, 32 aa, Artificial Sequence; identical to SEQ ID NO: 32588
  GFR-binding peptide
  MOD_RES (1), (2): Xaa is C or S

SEQ ID NO: 69679 - protein, 37 aa, Artificial Sequence
  GFR-binding peptide
  MOD_RES (5), (6): Xaa is C or S
TPPTXXVPTRLEPISILYLDSANNVVKFKYEDMVVES

SEQ ID NO: 69680 - protein, 35 aa, Artificial Sequence; identical to SEQ ID NO: 28517
  GFR-binding peptide
  MOD_RES (2), (3), (34): Xaa is C or S

SEQ ID NO: 69681 - protein, 32 aa, Artificial Sequence; identical to SEQ ID NO: 28521
  GFR-binding peptide
  MOD_RES (32), (32): Xaa is C or S

SEQ ID NO: 69682 - protein, 36 aa, Artificial Sequence; identical to SEQ ID NO: 7332
  GFR-binding peptide
  MOD_RES (2), (3), (34), (36): Xaa is C or S

SEQ ID NO: 69683 - protein, 38 aa, Artificial Sequence; identical to SEQ ID NO: 32592
  GFR-binding peptide
  MOD_RES (4), (5): Xaa is C or S
  MOD_RES (19), (20), (21), (22), (23): Xaa is A or G
  MOD_RES (24), (25), (26), (27): Xaa is A or G or is absent

SEQ ID NO: 69684 - protein, 34 aa, Artificial Sequence
  GFR-binding peptide
  MOD_RES (1), (1): Xaa is C or S
  MOD_RES (15), (16), (17), (18), (19): Xaa is A or G
  MOD_RES (20), (21), (22), (23): Xaa is A or G or is absent
XVPTRLEPISILYLXXXXXXXXXKFKYEDMVVES

SEQ ID NO: 69685 - protein, 35 aa, Artificial Sequence
  GFR-binding peptide
  MOD_RES (1), (33), (35): Xaa is C or S
XTPTKMEPISMLYLNDKQQIIKFKYEGMVVDRXGX

SEQ ID NO: 69686 - protein, 35 aa, Artificial Sequence; identical to SEQ ID NO: 7338
  GFR-binding peptide
  MOD_RES (1), (2), (35): Xaa is C or S
  MOD_RES (16), (17), (18), (19), (20): Xaa is A or G
  MOD_RES (21), (22), (23), (24): Xaa is A or G or is absent

SEQ ID NO: 69687 - protein, 34 aa, Artificial Sequence; identical to SEQ ID NO: 28529
  GFR-binding peptide
  MOD_RES (3), (4): Xaa is C or S

SEQ ID NO: 69688 - protein, 36 aa, Artificial Sequence; identical to SEQ ID NO: 7339
  GFR-binding peptide
  MOD_RES (1), (34), (36): Xaa is C or S
  MOD_RES (15), (16), (17), (18), (19): Xaa is A or G
  MOD_RES (20), (21), (22), (23): Xaa is A or G or is absent

SEQ ID NO: 69689 - protein, 38 aa, Artificial Sequence; identical to SEQ ID NO: 28532
  GFR-binding peptide
  MOD_RES (4), (5), (37): Xaa is C or S

SEQ ID NO: 69690 - protein, 34 aa, Artificial Sequence
  GFR-binding peptide
  MOD_RES (3), (4): Xaa is C or S
ASXXVPARLSATSILYYDAANNVVLRKHRDMVVE

SEQ ID NO: 69691 - protein, 39 aa, Artificial Sequence; identical to SEQ ID NO: 28533
  GFR-binding peptide
  MOD_RES (6), (7), (39): Xaa is C or S

SEQ ID NO: 69692 - protein, 38 aa, Artificial Sequence; identical to SEQ ID NO: 28537
  GFR-binding peptide
  MOD_RES (1), (2), (36), (38): Xaa is C or S
  MOD_RES (16), (17), (18), (19), (20): Xaa is A or G
  MOD_RES (21), (22), (23), (24): Xaa is A or G or is absent

SEQ ID NO: 69693 - protein, 38 aa, Artificial Sequence; identical to SEQ ID NO: 28538
  GFR-binding peptide
  MOD_RES (5), (6): Xaa is C or S
  MOD_RES (20), (21), (22), (23), (24): Xaa is A or G
  MOD_RES (25), (26), (27), (28): Xaa is A or G or is absent

SEQ ID NO: 69694 - protein, 43 aa, Artificial Sequence; identical to SEQ ID NO: 14637
  GFR-binding peptide
  MOD_RES (6), (7), (41), (43): Xaa is C or S
  MOD_RES (21), (22), (23), (24), (25): Xaa is A or G
  MOD_RES (26), (27), (28), (29): Xaa is A or G or is absent

SEQ ID NO: 69695 - protein, 35 aa, Artificial Sequence; identical to SEQ ID NO: 7342
  GFR-binding peptide
  MOD_RES (2), (3), (34): Xaa is C or S

SEQ ID NO: 69696 - protein, 42 aa, Artificial Sequence
  GFR-binding peptide
  MOD_RES (6), (7), (41): Xaa is C or S
  MOD_RES (21), (22), (23), (24), (25): Xaa is A or G
  MOD_RES (26), (27), (28), (29): Xaa is A or G or is absent
STPPTXXVPTRLEPISILYLXXXXXXXXXKFKYEDMVVESXG

SEQ ID NO: 69697 - protein, 37 aa, Artificial Sequence; identical to SEQ ID NO: 28539
  GFR-binding peptide
  MOD_RES (6), (7): Xaa is C or S

SEQ ID NO: 69698 - protein, 41 aa, Artificial Sequence
  GFR-binding peptide
  MOD_RES (3), (4), (38), (40): Xaa is C or S
  MOD_RES (18), (19), (20), (21), (22): Xaa is A or G
  MOD_RES (23), (24), (25), (26): Xaa is A or G or is absent
EPXXVPEKMSPINILYFXXXXXXXXXYGKIPNMTVESXAXR

SEQ ID NO: 69699 - protein, 38 aa, Artificial Sequence; identical to SEQ ID NO: 7346
  GFR-binding peptide
  MOD_RES (1), (35), (37): Xaa is C or S
  MOD_RES (15), (16), (17), (18), (19): Xaa is A or G
  MOD_RES (20), (21), (22), (23): Xaa is A or G or is absent

SEQ ID NO: 69700 - protein, 38 aa, Artificial Sequence; identical to SEQ ID NO: 7347
  GFR-binding peptide
  MOD_RES (3), (4), (36), (38): Xaa is C or S

SEQ ID NO: 69701 - protein, 38 aa, Artificial Sequence; identical to SEQ ID NO: 28544
  GFR-binding peptide
  MOD_RES (3), (4), (38): Xaa is C or S
  MOD_RES (18), (19), (20), (21), (22): Xaa is A or G
  MOD_RES (23), (24), (25), (26): Xaa is A or G or is absent

SEQ ID NO: 69702 - protein, 35 aa, Artificial Sequence; identical to SEQ ID NO: 7349
  GFR-binding peptide
  MOD_RES (1), (35): Xaa is C or S
  MOD_RES (15), (16), (17), (18), (19): Xaa is A or G
  MOD_RES (20), (21), (22), (23): Xaa is A or G or is absent

SEQ ID NO: 69703 - protein, 33 aa, Artificial Sequence; identical to SEQ ID NO: 32618
  GFR-binding peptide
  MOD_RES (1), (33): Xaa is C or S

SEQ ID NO: 69704 - protein, 37 aa, Artificial Sequence
  GFR-binding peptide
  MOD_RES (4), (5): Xaa is C or S
  MOD_RES (19), (20), (21), (22), (23): Xaa is A or G
  MOD_RES (24), (25), (26), (27): Xaa is A or G or is absent
AGPXXTPTKMSATSMLYYXXXXXXXXXLRKHRGMVVD

SEQ ID NO: 69705 - protein, 37 aa, Artificial Sequence; identical to SEQ ID NO: 28546
  GFR-binding peptide
  MOD_RES (1), (2), (34), (36): Xaa is C or S

SEQ ID NO: 69706 - protein, 38 aa, Artificial Sequence; identical to SEQ ID NO: 57529
  GFR-binding peptide
  MOD_RES (1), (2), (35), (37): Xaa is C or S
  MOD_RES (16), (17), (18), (19), (20): Xaa is A or G
  MOD_RES (21), (22), (23), (24): Xaa is A or G or is absent

SEQ ID NO: 69707 - protein, 36 aa, Artificial Sequence; identical to SEQ ID NO: 32620
  GFR-binding peptide
  MOD_RES (2), (3), (35): Xaa is C or S

SEQ ID NO: 69708 - protein, 33 aa, Artificial Sequence
  GFR-binding peptide
  MOD_RES (2), (3): Xaa is C or S
PXXVPQDLSPINILYFVGRTPKVYGKIPMVVKS

SEQ ID NO: 69709 - protein, 40 aa, Artificial Sequence
  GFR-binding peptide
  MOD_RES (2), (3), (37), (39): Xaa is C or S
  MOD_RES (17), (18), (19), (20), (21): Xaa is A or G
  MOD_RES (22), (23), (24), (25): Xaa is A or G or is absent
TXXVPTRLEPISILYLXXXXXXXXXKFKYEDMVVESXGXR

SEQ ID NO: 69710 - protein, 34 aa, Artificial Sequence; identical to SEQ ID NO: 7352
  GFR-binding peptide
  MOD_RES (33), (33): Xaa is C or S
  MOD_RES (14), (15), (16), (17), (18): Xaa is A or G
  MOD_RES (19), (20), (21), (22): Xaa is A or G or is absent

SEQ ID NO: 69711 - protein, 35 aa, Artificial Sequence
  GFR-binding peptide
  MOD_RES (1), (35): Xaa is C or S
  MOD_RES (15), (16), (17), (18), (19): Xaa is A or G
  MOD_RES (20), (21), (22), (23): Xaa is A or G or is absent
XVPTKLSATSILYYXXXXXXXXXLRKHRGMAVSEX

SEQ ID NO: 69712 - protein, 40 aa, Artificial Sequence; identical to SEQ ID NO: 28555
  GFR-binding peptide
  MOD_RES (6), (7): Xaa is C or S
  MOD_RES (21), (22), (23), (24), (25): Xaa is A or G
  MOD_RES (26), (27), (28), (29): Xaa is A or G or is absent

SEQ ID NO: 69713 - protein, 37 aa, Artificial Sequence
  GFR-binding peptide
  MOD_RES (5), (6), (37): Xaa is C or S
SAAPXXVPQALSPINILYFVGRKPKVYGKIPMIVRSX

SEQ ID NO: 69714 - protein, 36 aa, Artificial Sequence
  GFR-binding peptide
  MOD_RES (3), (4): Xaa is C or S
  MOD_RES (18), (19), (20), (21), (22): Xaa is A or G
  MOD_RES (23), (24), (25), (26): Xaa is A or G or is absent
GPXXTPTKMEPISMLYLXXXXXXXXXKFKYEGMVVD

SEQ ID NO: 69715 - protein, 39 aa, Artificial Sequence
  GFR-binding peptide
  MOD_RES (5), (6), (38): Xaa is C or S
ASKAXXVPTKLSATSILYYDKGVVTYLRKHRGMAVSEXG

SEQ ID NO: 69716 - protein, 39 aa, Artificial Sequence; identical to SEQ ID NO: 7357
  GFR-binding peptide
  MOD_RES (6), (7), (39): Xaa is C or S

SEQ ID NO: 69717 - protein, 42 aa, Artificial Sequence; identical to SEQ ID NO: 28563
  GFR-binding peptide
  MOD_RES (5), (6), (40), (42): Xaa is C or S
  MOD_RES (20), (21), (22), (23), (24): Xaa is A or G
  MOD_RES (25), (26), (27), (28): Xaa is A or G or is absent

SEQ ID NO: 69718 - protein, 40 aa, Artificial Sequence; identical to SEQ ID NO: 28565
  GFR-binding peptide
  MOD_RES (6), (7), (39): Xaa is C or S

SEQ ID NO: 69719 - protein, 38 aa, Artificial Sequence
  GFR-binding peptide
  MOD_RES (4), (5), (37): Xaa is C or S
PPTXXVPTRLSPISILYKDSANNVVLKYHYDMVVESXG

SEQ ID NO: 69720 - protein, 39 aa, Artificial Sequence; identical to SEQ ID NO: 7359
  GFR-binding peptide
  MOD_RES (6), (7), (38): Xaa is C or S

SEQ ID NO: 69721 - protein, 39 aa, Artificial Sequence; identical to SEQ ID NO: 28568
  GFR-binding peptide
  MOD_RES (4), (5), (37), (39): Xaa is C or S

SEQ ID NO: 69722 - protein, 42 aa, Artificial Sequence; identical to SEQ ID NO: 28570
  GFR-binding peptide
  MOD_RES (5), (6), (40), (42): Xaa is C or S
  MOD_RES (20), (21), (22), (23), (24): Xaa is A or G
  MOD_RES (25), (26), (27), (28): Xaa is A or G or is absent

SEQ ID NO: 69723 - protein, 33 aa, Artificial Sequence; identical to SEQ ID NO: 7361
  GFR-binding peptide
  MOD_RES (14), (15), (16), (17), (18): Xaa is A or G
  MOD_RES (19), (20), (21), (22): Xaa is A or G or is absent

SEQ ID NO: 69724 - protein, 35 aa, Artificial Sequence; identical to SEQ ID NO: 28572
  GFR-binding peptide
  MOD_RES (1), (2): Xaa is C or S
  MOD_RES (16), (17), (18), (19), (20): Xaa is A or G
  MOD_RES (21), (22), (23), (24): Xaa is A or G or is absent

SEQ ID NO: 69725 - protein, 34 aa, Artificial Sequence
  GFR-binding peptide
  MOD_RES (1), (2), (33): Xaa is C or S
XXAPVKTSATSMLYYDNGRVLLLRKHRMIVEEXG

SEQ ID NO: 69726 - protein, 33 aa, Artificial Sequence; identical to SEQ ID NO: 7364
  GFR-binding peptide
  MOD_RES (1), (33): Xaa is C or S

SEQ ID NO: 69727 - protein, 35 aa, Artificial Sequence; identical to SEQ ID NO: 7365
  GFR-binding peptide
  MOD_RES (32), (34): Xaa is C or S

SEQ ID NO: 69728 - protein, 33 aa, Artificial Sequence; identical to SEQ ID NO: 14670
  GFR-binding peptide
  MOD_RES (1), (2): Xaa is C or S

SEQ ID NO: 69729 - protein, 32 aa, Artificial Sequence; identical to SEQ ID NO: 7367
  GFR-binding peptide
  MOD_RES (14), (15), (16), (17), (18): Xaa is A or G
  MOD_RES (19), (20), (21), (22): Xaa is A or G or is absent

SEQ ID NO: 69730 - protein, 38 aa, Artificial Sequence; identical to SEQ ID NO: 57557
  GFR-binding peptide
  MOD_RES (5), (6): Xaa is C or S
  MOD_RES (20), (21), (22), (23), (24): Xaa is A or G
  MOD_RES (25), (26), (27), (28): Xaa is A or G or is absent

SEQ ID NO: 69731 - protein, 36 aa, Artificial Sequence
  GFR-binding peptide
  MOD_RES (1), (2), (34), (36): Xaa is C or S
XXVPEKMSATSILYYDENKNVVLRKHRNMTVESXAX

SEQ ID NO: 69732 - protein, 35 aa, Artificial Sequence; identical to SEQ ID NO: 7372
  GFR-binding peptide
  MOD_RES (1), (2), (34): Xaa is C or S

SEQ ID NO: 69733 - protein, 35 aa, Artificial Sequence
  GFR-binding peptide
  MOD_RES (4), (5): Xaa is C or S
PPTXXVPTRLSATSILYYDSANNVVLRKHRDMVVE

SEQ ID NO: 69734 - protein, 30 aa, Artificial Sequence; identical to SEQ ID NO: 7373
  GFR-binding peptide

SEQ ID NO: 69735 - protein, 38 aa, Artificial Sequence; identical to SEQ ID NO: 7374
  GFR-binding peptide
  MOD_RES (1), (35), (37): Xaa is C or S
  MOD_RES (15), (16), (17), (18), (19): Xaa is A or G
  MOD_RES (20), (21), (22), (23): Xaa is A or G or is absent

SEQ ID NO: 69736 - protein, 40 aa, Artificial Sequence; identical to SEQ ID NO: 32661
  GFR-binding peptide
  MOD_RES (6), (7): Xaa is C or S
  MOD_RES (21), (22), (23), (24), (25): Xaa is A or G
  MOD_RES (26), (27), (28), (29): Xaa is A or G or is absent

SEQ ID NO: 69737 - protein, 32 aa, Artificial Sequence; identical to SEQ ID NO: 7379
  GFR-binding peptide
  MOD_RES (32), (32): Xaa is C or S

SEQ ID NO: 69738 - protein, 37 aa, Artificial Sequence; identical to SEQ ID NO: 7381
  GFR-binding peptide
  MOD_RES (1), (2), (36): Xaa is C or S
  MOD_RES (16), (17), (18), (19), (20): Xaa is A or G
  MOD_RES (21), (22), (23), (24): Xaa is A or G or is absent

SEQ ID NO: 69739 - protein, 34 aa, Artificial Sequence; identical to SEQ ID NO: 28588
  GFR-binding peptide
  MOD_RES (3), (4): Xaa is C or S

SEQ ID NO: 69740 - protein, 42 aa, Artificial Sequence; identical to SEQ ID NO: 7382
  GFR-binding peptide
  MOD_RES (6), (7), (42): Xaa is C or S
  MOD_RES (21), (22), (23), (24), (25): Xaa is A or G
  MOD_RES (26), (27), (28), (29): Xaa is A or G or is absent

SEQ ID NO: 69741 - protein, 33 aa, Artificial Sequence; identical to SEQ ID NO: 28591
  GFR-binding peptide
  MOD_RES (1), (1): Xaa is C or S
  MOD_RES (15), (16), (17), (18), (19): Xaa is A or G
  MOD_RES (20), (21), (22), (23): Xaa is A or G or is absent

SEQ ID NO: 69742 - protein, 37 aa, Artificial Sequence; identical to SEQ ID NO: 7383
  GFR-binding peptide
  MOD_RES (3), (4): Xaa is C or S
  MOD_RES (18), (19), (20), (21), (22): Xaa is A or G
  MOD_RES (23), (24), (25), (26): Xaa is A or G or is absent

SEQ ID NO: 69743 - protein, 38 aa, Artificial Sequence; identical to SEQ ID NO: 7384
  GFR-binding peptide
  MOD_RES (6), (7): Xaa is C or S

SEQ ID NO: 69744 - protein, 41 aa, Artificial Sequence; identical to SEQ ID NO: 28596
  GFR-binding peptide
  MOD_RES (6), (7), (41): Xaa is C or S
  MOD_RES (21), (22), (23), (24), (25): Xaa is A or G
  MOD_RES (26), (27), (28), (29): Xaa is A or G or is absent

SEQ ID NO: 69745 - protein, 35 aa, Artificial Sequence
  GFR-binding peptide
  MOD_RES (1), (35): Xaa is C or S
  MOD_RES (15), (16), (17), (18), (19): Xaa is A or G
  MOD_RES (20), (21), (22), (23): Xaa is A or G or is absent
XVPTRLSATSILYYXXXXXXXXXLRKHRDMVVESX

SEQ ID NO: 69746 - protein, 34 aa, Artificial Sequence; identical to SEQ ID NO: 7386
  GFR-binding peptide
  MOD_RES (1), (2), (34): Xaa is C or S

SEQ ID NO: 69747 - protein, 39 aa, Artificial Sequence; identical to SEQ ID NO: 7387
  GFR-binding peptide
  MOD_RES (3), (4), (36), (38): Xaa is C or S

SEQ ID NO: 69748 - protein, 36 aa, Artificial Sequence; identical to SEQ ID NO: 7390
  GFR-binding peptide
  MOD_RES (1), (34), (36): Xaa is C or S
  MOD_RES (15), (16), (17), (18), (19): Xaa is A or G
  MOD_RES (20), (21), (22), (23): Xaa is A or G or is absent

SEQ ID NO: 69749 - protein, 41 aa, Artificial Sequence; identical to SEQ ID NO: 28601
  GFR-binding peptide
  MOD_RES (6), (7), (41): Xaa is C or S
  MOD_RES (21), (22), (23), (24), (25): Xaa is A or G
  MOD_RES (26), (27), (28), (29): Xaa is A or G or is absent

SEQ ID NO: 69750 - protein, 40 aa, Artificial Sequence; identical to SEQ ID NO: 7392
  GFR-binding peptide
  MOD_RES (3), (4), (38), (40): Xaa is C or S
  MOD_RES (18), (19), (20), (21), (22): Xaa is A or G
  MOD_RES (23), (24), (25), (26): Xaa is A or G or is absent

SEQ ID NO: 69751 - protein, 40 aa, Artificial Sequence; identical to SEQ ID NO: 7393
  GFR-binding peptide
  MOD_RES (6), (7), (38), (40): Xaa is C or S

SEQ ID NO: 69752 - protein, 41 aa, Artificial Sequence; identical to SEQ ID NO: 7394
  GFR-binding peptide
  MOD_RES (5), (6), (39), (41): Xaa is C or S

SEQ ID NO: 69753 - protein, 40 aa, Artificial Sequence; identical to SEQ ID NO: 28606
  GFR-binding peptide
  MOD_RES (2), (3), (38), (40): Xaa is C or S
  MOD_RES (17), (18), (19), (20), (21): Xaa is A or G
  MOD_RES (22), (23), (24), (25): Xaa is A or G or is absent

SEQ ID NO: 69754 - protein, 42 aa, Artificial Sequence
  GFR-binding peptide
  MOD_RES (6), (7), (41): Xaa is C or S
  MOD_RES (21), (22), (23), (24), (25): Xaa is A or G
  MOD_RES (26), (27), (28), (29): Xaa is A or G or is absent
STPPTXXVPTRLSPISILYKXXXXXXXXXLKYHYDMVVESXG

SEQ ID NO: 69755 - protein, 37 aa, Artificial Sequence
  GFR-binding peptide
  MOD_RES (1), (2), (35), (37): Xaa is C or S
  MOD_RES (16), (17), (18), (19), (20): Xaa is A or G
  MOD_RES (21), (22), (23), (24): Xaa is A or G or is absent
XXAPVKTEPISMLYLXXXXXXXXXKFKYEMIVEEXGX

SEQ ID NO: 69756 - protein, 33 aa, Artificial Sequence
  GFR-binding peptide
  MOD_RES (1), (32): Xaa is C or S
XAPVKTSATSMLYYDNGRVLLLRKHRMIVEEXG

SEQ ID NO: 69757 - protein, 37 aa, Artificial Sequence
  GFR-binding peptide
  MOD_RES (4), (5), (36): Xaa is C or S
PSTXXAPVKTSATSMLYYDNGRVLLLRKHRMIVEEXG

SEQ ID NO: 69758 - protein, 34 aa, Artificial Sequence; identical to SEQ ID NO: 32678
  GFR-binding peptide
  MOD_RES (1), (2), (34): Xaa is C or S

SEQ ID NO: 69759 - protein, 38 aa, Artificial Sequence; identical to SEQ ID NO: 32680
  GFR-binding peptide
  MOD_RES (1), (2), (36), (38): Xaa is C or S
  MOD_RES (16), (17), (18), (19), (20): Xaa is A or G
  MOD_RES (21), (22), (23), (24): Xaa is A or G or is absent

SEQ ID NO: 69760 - protein, 36 aa, Artificial Sequence; identical to SEQ ID NO: 28609
  GFR-binding peptide
  MOD_RES (4), (5): Xaa is C or S

SEQ ID NO: 69761 - protein, 38 aa, Artificial Sequence; identical to SEQ ID NO: 28611
  GFR-binding peptide
  MOD_RES (1), (2), (36), (38): Xaa is C or S
  MOD_RES (16), (17), (18), (19), (20): Xaa is A or G
  MOD_RES (21), (22), (23), (24): Xaa is A or G or is absent

SEQ ID NO: 69762 - protein, 37 aa, Artificial Sequence; identical to SEQ ID NO: 28613
  GFR-binding peptide
  MOD_RES (3), (4), (35), (37): Xaa is C or S

SEQ ID NO: 69763 - protein, 38 aa, Artificial Sequence; identical to SEQ ID NO: 7400
  GFR-binding peptide
  MOD_RES (2), (3), (36), (38): Xaa is C or S

SEQ ID NO: 69764 - protein, 35 aa, Artificial Sequence; identical to SEQ ID NO: 7403
  GFR-binding peptide
  MOD_RES (33), (35): Xaa is C or S
  MOD_RES (14), (15), (16), (17), (18): Xaa is A or G
  MOD_RES (19), (20), (21), (22): Xaa is A or G or is absent

SEQ ID NO: 69765 - protein, 39 aa, Artificial Sequence; identical to SEQ ID NO: 7404
  GFR-binding peptide
  MOD_RES (3), (4), (38): Xaa is C or S
  MOD_RES (18), (19), (20), (21), (22): Xaa is A or G
  MOD_RES (23), (24), (25), (26): Xaa is A or G or is absent

SEQ ID NO: 69766 - protein, 35 aa, Artificial Sequence
  GFR-binding peptide
  MOD_RES (2), (3), (35): Xaa is C or S
PXXVPEKMEPISILYLDENKNVVKFKYENMTVESX

SEQ ID NO: 69767 - protein, 33 aa, Artificial Sequence; identical to SEQ ID NO: 28620
  GFR-binding peptide
  MOD_RES (14), (15), (16), (17), (18): Xaa is A or G
  MOD_RES (19), (20), (21), (22): Xaa is A or G or is absent

SEQ ID NO: 69768 - protein, 38 aa, Artificial Sequence; identical to SEQ ID NO: 28621
  GFR-binding peptide
  MOD_RES (2), (3), (35), (37): Xaa is C or S

SEQ ID NO: 69769 - protein, 39 aa, Artificial Sequence
  GFR-binding peptide
  MOD_RES (4), (5), (39): Xaa is C or S
  MOD_RES (19), (20), (21), (22), (23): Xaa is A or G
  MOD_RES (24), (25), (26), (27): Xaa is A or G or is absent
PPTXXVPTRLEPISILYLXXXXXXXXXKFKYEDMVVESX

SEQ ID NO: 69770 - protein, 40 aa, Artificial Sequence; identical to SEQ ID NO: 7411
  GFR-binding peptide
  MOD_RES (2), (3), (37), (39): Xaa is C or S
  MOD_RES (17), (18), (19), (20), (21): Xaa is A or G
  MOD_RES (22), (23), (24), (25): Xaa is A or G or is absent

SEQ ID NO: 69771 - protein, 34 aa, Artificial Sequence; identical to SEQ ID NO: 32695
  GFR-binding peptide
  MOD_RES (32), (34): Xaa is C or S

SEQ ID NO: 69772 - protein, 34 aa, Artificial Sequence; identical to SEQ ID NO: 7413
  GFR-binding peptide
  MOD_RES (3), (4): Xaa is C or S

SEQ ID NO: 69773 - protein, 35 aa, Artificial Sequence; identical to SEQ ID NO: 28625
  GFR-binding peptide
  MOD_RES (34), (34): Xaa is C or S
  MOD_RES (14), (15), (16), (17), (18): Xaa is A or G
  MOD_RES (19), (20), (21), (22): Xaa is A or G or is absent

SEQ ID NO: 69774 - protein, 38 aa, Artificial Sequence; identical to SEQ ID NO: 28627
  GFR-binding peptide
  MOD_RES (1), (2), (36), (38): Xaa is C or S
  MOD_RES (16), (17), (18), (19), (20): Xaa is A or G
  MOD_RES (21), (22), (23), (24): Xaa is A or G or is absent

SEQ ID NO: 69775 - protein, 40 aa, Artificial Sequence
  GFR-binding peptide
  MOD_RES (3), (4), (37), (39): Xaa is C or S
  MOD_RES (18), (19), (20), (21), (22): Xaa is A or G
  MOD_RES (23), (24), (25), (26): Xaa is A or G or is absent
STXXAPVKTEPISMLYLXXXXXXXXXKFKYEMIVEEXGXL

SEQ ID NO: 69776 - protein, 37 aa, Artificial Sequence; identical to SEQ ID NO: 14715
  GFR-binding peptide
  MOD_RES (2), (3), (37): Xaa is C or S
  MOD_RES (17), (18), (19), (20), (21): Xaa is A or G
  MOD_RES (22), (23), (24), (25): Xaa is A or G or is absent

SEQ ID NO: 69777 - protein, 39 aa, Artificial Sequence; identical to SEQ ID NO: 7418
  GFR-binding peptide
  MOD_RES (3), (4), (36), (38): Xaa is C or S

SEQ ID NO: 69778 - protein, 36 aa, Artificial Sequence; identical to SEQ ID NO: 28631
  GFR-binding peptide
  MOD_RES (5), (6): Xaa is C or S

SEQ ID NO: 69779 - protein, 35 aa, Artificial Sequence; identical to SEQ ID NO: 7420
  GFR-binding peptide
  MOD_RES (1), (34): Xaa is C or S

SEQ ID NO: 69780 - protein, 37 aa, Artificial Sequence
  GFR-binding peptide
  MOD_RES (2), (3), (37): Xaa is C or S
  MOD_RES (17), (18), (19), (20), (21): Xaa is A or G
  MOD_RES (22), (23), (24), (25): Xaa is A or G or is absent
PXXVPEKMSPISILYKXXXXXXXXXLKYHYNMTVESX

SEQ ID NO: 69781 - protein, 37 aa, Artificial Sequence; identical to SEQ ID NO: 28634
  GFR-binding peptide
  MOD_RES (4), (5): Xaa is C or S
  MOD_RES (19), (20), (21), (22), (23): Xaa is A or G
  MOD_RES (24), (25), (26), (27): Xaa is A or G or is absent

SEQ ID NO: 69782 - protein, 38 aa, Artificial Sequence; identical to SEQ ID NO: 32710
  GFR-binding peptide
  MOD_RES (2), (3), (38): Xaa is C or S
  MOD_RES (17), (18), (19), (20), (21): Xaa is A or G
  MOD_RES (22), (23), (24), (25): Xaa is A or G or is absent

SEQ ID NO: 69783 - protein, 38 aa, Artificial Sequence; identical to SEQ ID NO: 32714
  GFR-binding peptide
  MOD_RES (3), (4), (36), (38): Xaa is C or S

SEQ ID NO: 69784 - protein, 37 aa, Artificial Sequence
  GFR-binding peptide
  MOD_RES (5), (6), (37): Xaa is C or S
SASPXXVSQDLSPINILYFIGKTPKIYGKIPMIVKSX

SEQ ID NO: 69785 - protein, 42 aa, Artificial Sequence; identical to SEQ ID NO: 32719
  GFR-binding peptide
  MOD_RES (6), (7), (41): Xaa is C or S
  MOD_RES (21), (22), (23), (24), (25): Xaa is A or G
  MOD_RES (26), (27), (28), (29): Xaa is A or G or is absent

SEQ ID NO: 69786 - protein, 37 aa, Artificial Sequence; identical to SEQ ID NO: 7426
  GFR-binding peptide
  MOD_RES (3), (4), (37): Xaa is C or S
  MOD_RES (18), (19), (20), (21), (22): Xaa is A or G
  MOD_RES (23), (24), (25), (26): Xaa is A or G or is absent

SEQ ID NO: 69787 - protein, 39 aa, Artificial Sequence; identical to SEQ ID NO: 7429
  GFR-binding peptide
  MOD_RES (6), (7): Xaa is C or S

SEQ ID NO: 69788 - protein, 35 aa, Artificial Sequence; identical to SEQ ID NO: 7430
  GFR-binding peptide
  MOD_RES (1), (2), (34): Xaa is C or S

SEQ ID NO: 69789 - protein, 37 aa, Artificial Sequence; identical to SEQ ID NO: 28646
  GFR-binding peptide
  MOD_RES (1), (35), (37): Xaa is C or S
  MOD_RES (15), (16), (17), (18), (19): Xaa is A or G
  MOD_RES (20), (21), (22), (23): Xaa is A or G or is absent

SEQ ID NO: 69790 - protein, 32 aa, Artificial Sequence; identical to SEQ ID NO: 28647
  GFR-binding peptide
  MOD_RES (14), (15), (16), (17), (18): Xaa is A or G
  MOD_RES (19), (20), (21), (22): Xaa is A or G or is absent

SEQ ID NO: 69791 - protein, 37 aa, Artificial Sequence; identical to SEQ ID NO: 32726
  GFR-binding peptide
  MOD_RES (1), (35), (37): Xaa is C or S
  MOD_RES (15), (16), (17), (18), (19): Xaa is A or G
  MOD_RES (20), (21), (22), (23): Xaa is A or G or is absent

SEQ ID NO: 69792 - protein, 41 aa, Artificial Sequence; identical to SEQ ID NO: 28650
  GFR-binding peptide
  MOD_RES (6), (7), (40): Xaa is C or S
  MOD_RES (21), (22), (23), (24), (25): Xaa is A or G
  MOD_RES (26), (27), (28), (29): Xaa is A or G or is absent

SEQ ID NO: 69793 - protein, 37 aa, Artificial Sequence; identical to SEQ ID NO: 7432
  GFR-binding peptide
  MOD_RES (2), (3), (36): Xaa is C or S
  MOD_RES (17), (18), (19), (20), (21): Xaa is A or G
  MOD_RES (22), (23), (24), (25): Xaa is A or G or is absent

SEQ ID NO: 69794 - protein, 40 aa, Artificial Sequence; identical to SEQ ID NO: 7433
  GFR-binding peptide
  MOD_RES (6), (7), (40): Xaa is C or S
  MOD_RES (21), (22), (23), (24), (25): Xaa is A or G
  MOD_RES (26), (27), (28), (29): Xaa is A or G or is absent

SEQ ID NO: 69795 - protein, 35 aa, Artificial Sequence; identical to SEQ ID NO: 7434
  GFR-binding peptide
  MOD_RES (1), (34): Xaa is C or S
  MOD_RES (15), (16), (17), (18), (19): Xaa is A or G
  MOD_RES (20), (21), (22), (23): Xaa is A or G or is absent

SEQ ID NO: 69796 - protein, 34 aa, Artificial Sequence; identical to SEQ ID NO: 7435
  GFR-binding peptide
  MOD_RES (1), (2), (34): Xaa is C or S

SEQ ID NO: 69797 - protein, 36 aa, Artificial Sequence; identical to SEQ ID NO: 7436
  GFR-binding peptide
  MOD_RES (1), (2), (33), (35): Xaa is C or S

SEQ ID NO: 69798 - protein, 40 aa, Artificial Sequence; identical to SEQ ID NO: 57635
  GFR-binding peptide
  MOD_RES (4), (5), (39): Xaa is C or S
  MOD_RES (19), (20), (21), (22), (23): Xaa is A or G
  MOD_RES (24), (25), (26), (27): Xaa is A or G or is absent

SEQ ID NO: 69799 - protein, 36 aa, Artificial Sequence; identical to SEQ ID NO: 7437
  GFR-binding peptide
  MOD_RES (1), (2), (36): Xaa is C or S
  MOD_RES (16), (17), (18), (19), (20): Xaa is A or G
  MOD_RES (21), (22), (23), (24): Xaa is A or G or is absent

SEQ ID NO: 69800 - protein, 42 aa, Artificial Sequence; identical to SEQ ID NO: 7439
  GFR-binding peptide
  MOD_RES (4), (5), (39), (41): Xaa is C or S
  MOD_RES (19), (20), (21), (22), (23): Xaa is A or G
  MOD_RES (24), (25), (26), (27): Xaa is A or G or is absent

SEQ ID NO: 69801 - protein, 33 aa, Artificial Sequence
  GFR-binding peptide
  MOD_RES (2), (3): Xaa is C or S
TXXVPTRLEPISILYLDSANNVVKFKYEDMVVE

SEQ ID NO: 69802 - protein, 37 aa, Artificial Sequence; identical to SEQ ID NO: 32731
  GFR-binding peptide
  MOD_RES (6), (7): Xaa is C or S

SEQ ID NO: 69803 - protein, 42 aa, Artificial Sequence; identical to SEQ ID NO: 7443
  GFR-binding peptide
  MOD_RES (6), (7), (41): Xaa is C or S
  MOD_RES (21), (22), (23), (24), (25): Xaa is A or G
  MOD_RES (26), (27), (28), (29): Xaa is A or G or is absent

SEQ ID NO: 69804 - protein, 43 aa, Artificial Sequence; identical to SEQ ID NO: 7444
  GFR-binding peptide
  MOD_RES (5), (6), (40), (42): Xaa is C or S
  MOD_RES (20), (21), (22), (23), (24): Xaa is A or G
  MOD_RES (25), (26), (27), (28): Xaa is A or G or is absent

SEQ ID NO: 69805 - protein, 40 aa, Artificial Sequence
  GFR-binding peptide
  MOD_RES (6), (7), (38), (40): Xaa is C or S
RVPSTXXAPVKTSPISMLYKDNGRVLLLKYHYMIVEEXGX

SEQ ID NO: 69806 - protein, 38 aa, Artificial Sequence
  GFR-binding peptide
  MOD_RES (1), (2), (36), (38): Xaa is C or S
  MOD_RES (16), (17), (18), (19), (20): Xaa is A or G
  MOD_RES (21), (22), (23), (24): Xaa is A or G or is absent
XXTPTKMSPISMLYKXXXXXXXXXLKYHYGMVVDRXGX

SEQ ID NO: 69807 - protein, 36 aa, Artificial Sequence; identical to SEQ ID NO: 32733
  GFR-binding peptide
  MOD_RES (3), (4), (36): Xaa is C or S

SEQ ID NO: 69808 - protein, 37 aa, Artificial Sequence; identical to SEQ ID NO: 57644
  GFR-binding peptide
  MOD_RES (4), (5), (36): Xaa is C or S

SEQ ID NO: 69809 - protein, 39 aa, Artificial Sequence; identical to SEQ ID NO: 7447
  GFR-binding peptide
  MOD_RES (5), (37), (39): Xaa is C or S

SEQ ID NO: 69810 - protein, 35 aa, Artificial Sequence; identical to SEQ ID NO: 7448
  GFR-binding peptide
  MOD_RES (33), (35): Xaa is C or S
  MOD_RES (14), (15), (16), (17), (18): Xaa is A or G
  MOD_RES (19), (20), (21), (22): Xaa is A or G or is absent

SEQ ID NO: 69811 - protein, 44 aa, Artificial Sequence; identical to SEQ ID NO: 7449
  GFR-binding peptide
  MOD_RES (6), (7), (42), (44): Xaa is C or S
  MOD_RES (21), (22), (23), (24), (25): Xaa is A or G
  MOD_RES (26), (27), (28), (29): Xaa is A or G or is absent

SEQ ID NO: 69812 - protein, 36 aa, Artificial Sequence; identical to SEQ ID NO: 28674
  GFR-binding peptide
  MOD_RES (2), (3): Xaa is C or S
  MOD_RES (17), (18), (19), (20), (21): Xaa is A or G
  MOD_RES (22), (23), (24), (25): Xaa is A or G or is absent

SEQ ID NO: 69813 - protein, 39 aa, Artificial Sequence; identical to SEQ ID NO: 7450
  GFR-binding peptide
  MOD_RES (1), (36), (38): Xaa is C or S
  MOD_RES (15), (16), (17), (18), (19): Xaa is A or G
  MOD_RES (20), (21), (22), (23): Xaa is A or G or is absent

SEQ ID NO: 69814 - protein, 33 aa, Artificial Sequence
  GFR-binding peptide
  MOD_RES (1), (1): Xaa is C or S
  MOD_RES (15), (16), (17), (18), (19): Xaa is A or G
  MOD_RES (20), (21), (22), (23): Xaa is A or G or is absent
XTPTKMSPISMLYKXXXXXXXXXLKYHYGMVVD

SEQ ID NO: 69815 - protein, 37 aa, Artificial Sequence
  GFR-binding peptide
  MOD_RES (4), (5): Xaa is C or S
  MOD_RES (19), (20), (21), (22), (23): Xaa is A or G
  MOD_RES (24), (25), (26), (27): Xaa is A or G or is absent
PEPXXVPEKMNAISILYFXXXXXXXXXLKKYRNMTVE

SEQ ID NO: 69816 - protein, 35 aa, Artificial Sequence; identical to SEQ ID NO: 7451
  GFR-binding peptide
  MOD_RES (3), (4): Xaa is C or S

SEQ ID NO: 69817 - protein, 39 aa, Artificial Sequence; identical to SEQ ID NO: 7453
  GFR-binding peptide
  MOD_RES (5), (6), (37), (39): Xaa is C or S

SEQ ID NO: 69818 - protein, 38 aa, Artificial Sequence
  GFR-binding peptide
  MOD_RES (3), (4), (38): Xaa is C or S
  MOD_RES (18), (19), (20), (21), (22): Xaa is A or G
  MOD_RES (23), (24), (25), (26): Xaa is A or G or is absent
EPXXVPEKMSPISILYKXXXXXXXXXLKYHYNMTVESX

SEQ ID NO: 69819 - protein, 34 aa, Artificial Sequence; identical to SEQ ID NO: 7456
  GFR-binding peptide
  MOD_RES (1), (2): Xaa is C or S
  MOD_RES (16), (17), (18), (19), (20): Xaa is A or G
  MOD_RES (21), (22), (23), (24): Xaa is A or G or is absent

SEQ ID NO: 69820 - protein, 36 aa, Artificial Sequence
  GFR-binding peptide
  MOD_RES (1), (2), (36): Xaa is C or S
  MOD_RES (16), (17), (18), (19), (20): Xaa is A or G
  MOD_RES (21), (22), (23), (24): Xaa is A or G or is absent
XXTPTKMSPISMLYKXXXXXXXXXLKYHYGMVVDRX

SEQ ID NO: 69821 - protein, 39 aa, Artificial Sequence; identical to SEQ ID NO: 7461
  GFR-binding peptide
  MOD_RES (5), (6): Xaa is C or S
  MOD_RES (20), (21), (22), (23), (24): Xaa is A or G
  MOD_RES (25), (26), (27), (28): Xaa is A or G or is absent

SEQ ID NO: 69822 - protein, 41 aa, Artificial Sequence; identical to SEQ ID NO: 7462
  GFR-binding peptide
  MOD_RES (6), (7), (39), (41): Xaa is C or S

SEQ ID NO: 69823 - protein, 34 aa, Artificial Sequence; identical to SEQ ID NO: 7463
  GFR-binding peptide
  MOD_RES (1), (2): Xaa is C or S
  MOD_RES (16), (17), (18), (19), (20): Xaa is A or G
  MOD_RES (21), (22), (23), (24): Xaa is A or G or is absent

SEQ ID NO: 69824 - protein, 34 aa, Artificial Sequence
  GFR-binding peptide
  MOD_RES (34), (34): Xaa is C or S
  MOD_RES (14), (15), (16), (17), (18): Xaa is A or G
  MOD_RES (19), (20), (21), (22): Xaa is A or G or is absent
VPTRLSATSILYYXXXXXXXXXLRKHRDMVVESX

SEQ ID NO: 69825 - protein, 34 aa, Artificial Sequence
  GFR-binding peptide
  MOD_RES (2), (3), (34): Xaa is C or S
TXXAPVKTEPISMLYLDNGRVLLKFKYEMIVEEX

SEQ ID NO: 69826 - protein, 37 aa, Artificial Sequence; identical to SEQ ID NO: 7466
  GFR-binding peptide
  MOD_RES (1), (35), (37): Xaa is C or S
  MOD_RES (15), (16), (17), (18), (19): Xaa is A or G
  MOD_RES (20), (21), (22), (23): Xaa is A or G or is absent

SEQ ID NO: 69827 - protein, 41 aa, Artificial Sequence; identical to SEQ ID NO: 7471
  GFR-binding peptide
  MOD_RES (4), (5), (39), (41): Xaa is C or S
  MOD_RES (19), (20), (21), (22), (23): Xaa is A or G
  MOD_RES (24), (25), (26), (27): Xaa is A or G or is absent

SEQ ID NO: 69828 - protein, 37 aa, Artificial Sequence; identical to SEQ ID NO: 32762
  GFR-binding peptide
  MOD_RES (1), (2), (34), (36): Xaa is C or S

SEQ ID NO: 69829 - protein, 34 aa, Artificial Sequence; identical to SEQ ID NO: 7475
  GFR-binding peptide
  MOD_RES (2), (3), (34): Xaa is C or S

SEQ ID NO: 69830 - protein, 37 aa, Artificial Sequence; identical to SEQ ID NO: 28700
  GFR-binding peptide
  MOD_RES (4), (5): Xaa is C or S
  MOD_RES (19), (20), (21), (22), (23): Xaa is A or G
  MOD_RES (24), (25), (26), (27): Xaa is A or G or is absent

SEQ ID NO: 69831 - protein, 33 aa, Artificial Sequence; identical to SEQ ID NO: 57670
  GFR-binding peptide
  MOD_RES (1), (33): Xaa is C or S

SEQ ID NO: 69832 - protein, 35 aa, Artificial Sequence; identical to SEQ ID NO: 7476
  GFR-binding peptide
  MOD_RES (2), (3): Xaa is C or S
  MOD_RES (17), (18), (19), (20), (21): Xaa is A or G
  MOD_RES (22), (23), (24), (25): Xaa is A or G or is absent

SEQ ID NO: 69833 - protein, 38 aa, Artificial Sequence; identical to SEQ ID NO: 7477
  GFR-binding peptide
  MOD_RES (5), (6), (37): Xaa is C or S

SEQ ID NO: 69834 - protein, 41 aa, Artificial Sequence; identical to SEQ ID NO: 28703
  GFR-binding peptide
  MOD_RES (4), (5), (40): Xaa is C or S
  MOD_RES (19), (20), (21), (22), (23): Xaa is A or G
  MOD_RES (24), (25), (26), (27): Xaa is A or G or is absent

SEQ ID NO: 69835 - protein, 38 aa, Artificial Sequence
  GFR-binding peptide
  MOD_RES (6), (7), (38): Xaa is C or S
RVPSTXXAPVKTSATSMLYYDNGRVLLLRKHRMIVEEX

SEQ ID NO: 69836 - protein, 39 aa, Artificial Sequence; identical to SEQ ID NO: 57678
  GFR-binding peptide
  MOD_RES (3), (4), (36), (38): Xaa is C or S

SEQ ID NO: 69837 - protein, 34 aa, Artificial Sequence; identical to SEQ ID NO: 32770
  GFR-binding peptide
  MOD_RES (1), (2), (34): Xaa is C or S

SEQ ID NO: 69838 - protein, 40 aa, Artificial Sequence
  GFR-binding peptide
  MOD_RES (4), (5), (37), (39): Xaa is C or S
PEPXXVPEKMSATSILYYDENKNVVLRKHRNMTVESXAXR

SEQ ID NO: 69839 - protein, 34 aa, Artificial Sequence; identical to SEQ ID NO: 7485
  GFR-binding peptide
  MOD_RES (1), (33): Xaa is C or S

SEQ ID NO: 69840 - protein, 38 aa, Artificial Sequence; identical to SEQ ID NO: 7486
  GFR-binding peptide
  MOD_RES (1), (2), (36), (38): Xaa is C or S
  MOD_RES (16), (17), (18), (19), (20): Xaa is A or G
  MOD_RES (21), (22), (23), (24): Xaa is A or G or is absent

SEQ ID NO: 69841 - protein, 41 aa, Artificial Sequence; identical to SEQ ID NO: 28712
  GFR-binding peptide
  MOD_RES (5), (6), (40): Xaa is C or S
  MOD_RES (20), (21), (22), (23), (24): Xaa is A or G
  MOD_RES (25), (26), (27), (28): Xaa is A or G or is absent

SEQ ID NO: 69842 - protein, 40 aa, Artificial Sequence
  GFR-binding peptide
  MOD_RES (2), (3), (37), (39): Xaa is C or S
  MOD_RES (17), (18), (19), (20), (21): Xaa is A or G
  MOD_RES (22), (23), (24), (25): Xaa is A or G or is absent
SXXVPARLSATSILYYXXXXXXXXXLRKHRDMVVEAXGXR

SEQ ID NO: 69843 - protein, 39 aa, Artificial Sequence; identical to SEQ ID NO: 32781
  GFR-binding peptide
  MOD_RES (4), (5), (39): Xaa is C or S
  MOD_RES (19), (20), (21), (22), (23): Xaa is A or G
  MOD_RES (24), (25), (26), (27): Xaa is A or G or is absent

SEQ ID NO: 69844 - protein, 39 aa, Artificial Sequence
  GFR-binding peptide
  MOD_RES (5), (6), (39): Xaa is C or S
  MOD_RES (20), (21), (22), (23), (24): Xaa is A or G
  MOD_RES (25), (26), (27), (28): Xaa is A or G or is absent
VPSTXXAPVKTSPISMLYKXXXXXXXXXLKYHYMIVEEX

SEQ ID NO: 69845 - protein, 36 aa, Artificial Sequence; identical to SEQ ID NO: 7490
  GFR-binding peptide
  MOD_RES (1), (36): Xaa is C or S
  MOD_RES (15), (16), (17), (18), (19): Xaa is A or G
  MOD_RES (20), (21), (22), (23): Xaa is A or G or is absent

SEQ ID NO: 69846 - protein, 35 aa, Artificial Sequence; identical to SEQ ID NO: 32784
  GFR-binding peptide
  MOD_RES (4), (5): Xaa is C or S

SEQ ID NO: 69847 - protein, 38 aa, Artificial Sequence
  GFR-binding peptide
  MOD_RES (3), (4), (36), (38): Xaa is C or S
ASXXVPARLSATSILYYDAANNVVLRKHRDMVVEAXGX

SEQ ID NO: 69848 - protein, 38 aa, Artificial Sequence; identical to SEQ ID NO: 28720
  GFR-binding peptide
  MOD_RES (1), (2), (36), (38): Xaa is C or S
  MOD_RES (16), (17), (18), (19), (20): Xaa is A or G
  MOD_RES (21), (22), (23), (24): Xaa is A or G or is absent

SEQ ID NO: 69849 - protein, 40 aa, Artificial Sequence; identical to SEQ ID NO: 14802
  GFR-binding peptide
  MOD_RES (2), (3), (37), (39): Xaa is C or S
  MOD_RES (17), (18), (19), (20), (21): Xaa is A or G
  MOD_RES (22), (23), (24), (25): Xaa is A or G or is absent

SEQ ID NO: 69850 - protein, 38 aa, Artificial Sequence; identical to SEQ ID NO: 28726
  GFR-binding peptide
  MOD_RES (4), (5): Xaa is C or S
  MOD_RES (19), (20), (21), (22), (23): Xaa is A or G
  MOD_RES (24), (25), (26), (27): Xaa is A or G or is absent

SEQ ID NO: 69851 - protein, 42 aa, Artificial Sequence
  GFR-binding peptide
  MOD_RES (6), (7), (39), (41): Xaa is C or S
GSAGPXXTPTKMEPISMLYLNDKQQIIKFKYEGMVVDRXGXS

SEQ ID NO: 69852 - protein, 38 aa, Artificial Sequence; identical to SEQ ID NO: 32793
  GFR-binding peptide
  MOD_RES (5), (6): Xaa is C or S
  MOD_RES (20), (21), (22), (23), (24): Xaa is A or G
  MOD_RES (25), (26), (27), (28): Xaa is A or G or is absent

SEQ ID NO: 69853 - protein, 37 aa, Artificial Sequence; identical to SEQ ID NO: 7501
  GFR-binding peptide
  MOD_RES (1), (2), (34), (36): Xaa is C or S

SEQ ID NO: 69854 - protein, 35 aa, Artificial Sequence; identical to SEQ ID NO: 28730
  GFR-binding peptide
  MOD_RES (3), (4), (35): Xaa is C or S

SEQ ID NO: 69855 - protein, 38 aa, Artificial Sequence; identical to SEQ ID NO: 7503
  GFR-binding peptide
  MOD_RES (2), (3), (35), (37): Xaa is C or S

SEQ ID NO: 69856 - protein, 35 aa, Artificial Sequence; identical to SEQ ID NO: 7505
  GFR-binding peptide
  MOD_RES (1), (2): Xaa is C or S
  MOD_RES (16), (17), (18), (19), (20): Xaa is A or G
  MOD_RES (21), (22), (23), (24): Xaa is A or G or is absent

SEQ ID NO: 69857 - protein, 37 aa, Artificial Sequence; identical to SEQ ID NO: 32799
  GFR-binding peptide
  MOD_RES (6), (7): Xaa is C or S

SEQ ID NO: 69858 - protein, 36 aa, Artificial Sequence; identical to SEQ ID NO: 7507
  GFR-binding peptide
  MOD_RES (5), (6): Xaa is C or S

SEQ ID NO: 69859 - protein, 40 aa, Artificial Sequence; identical to SEQ ID NO: 32801
  GFR-binding peptide
  MOD_RES (2), (3), (37), (39): Xaa is C or S
  MOD_RES (17), (18), (19), (20), (21): Xaa is A or G
  MOD_RES (22), (23), (24), (25): Xaa is A or G or is absent

SEQ ID NO: 69860 - protein, 34 aa, Artificial Sequence
  GFR-binding peptide
  MOD_RES (1), (33): Xaa is C or S
XVPEKMNAISILYFDENKNVVLKKYRNMTVESXA

SEQ ID NO: 69861 - protein, 38 aa, Artificial Sequence; identical to SEQ ID NO: 32809
  GFR-binding peptide
  MOD_RES (1), (35), (37): Xaa is C or S
  MOD_RES (15), (16), (17), (18), (19): Xaa is A or G
  MOD_RES (20), (21), (22), (23): Xaa is A or G or is absent

SEQ ID NO: 69862 - protein, 39 aa, Artificial Sequence; identical to SEQ ID NO: 7512
  GFR-binding peptide
  MOD_RES (5), (6), (37), (39): Xaa is C or S

SEQ ID NO: 69863 - protein, 39 aa, Artificial Sequence; identical to SEQ ID NO: 7515
  GFR-binding peptide
  MOD_RES (6), (7), (38): Xaa is C or S

SEQ ID NO: 69864 - protein, 37 aa, Artificial Sequence
  GFR-binding peptide
  MOD_RES (4), (5): Xaa is C or S
  MOD_RES (19), (20), (21), (22), (23): Xaa is A or G
  MOD_RES (24), (25), (26), (27): Xaa is A or G or is absent
ASPXXVSQDLSPINILYFXXXXXXXXXYGKIPMIVKS

SEQ ID NO: 69865 - protein, 35 aa, Artificial Sequence; identical to SEQ ID NO: 32814
  GFR-binding peptide
  MOD_RES (32), (34): Xaa is C or S

SEQ ID NO: 69866 - protein, 44 aa, Artificial Sequence
  GFR-binding peptide
  MOD_RES (6), (7), (41), (43): Xaa is C or S
  MOD_RES (21), (22), (23), (24), (25): Xaa is A or G
  MOD_RES (26), (27), (28), (29): Xaa is A or G or is absent
GSAGPXXTPTKMSPISMLYKXXXXXXXXXLKYHYGMVVDRXGXS

SEQ ID NO: 69867 - protein, 39 aa, Artificial Sequence; identical to SEQ ID NO: 7516
  GFR-binding peptide
  MOD_RES (4), (5), (38): Xaa is C or S
  MOD_RES (19), (20), (21), (22), (23): Xaa is A or G
  MOD_RES (24), (25), (26), (27): Xaa is A or G or is absent

SEQ ID NO: 69868 - protein, 34 aa, Artificial Sequence; identical to SEQ ID NO: 7517
  GFR-binding peptide
  MOD_RES (33), (33): Xaa is C or S
  MOD_RES (14), (15), (16), (17), (18): Xaa is A or G
  MOD_RES (19), (20), (21), (22): Xaa is A or G or is absent

SEQ ID NO: 69869 - protein, 38 aa, Artificial Sequence; identical to SEQ ID NO: 28748
  GFR-binding peptide
  MOD_RES (6), (7): Xaa is C or S

SEQ ID NO: 69870 - protein, 38 aa, Artificial Sequence
  GFR-binding peptide
  MOD_RES (3), (4), (35), (37): Xaa is C or S
STXXAPVKTSATSMLYYDNGRVLLLRKHRMIVEEXGXL

SEQ ID NO: 69871 - protein, 42 aa, Artificial Sequence; identical to SEQ ID NO: 7519
  GFR-binding peptide
  MOD_RES (5), (6), (41): Xaa is C or S
  MOD_RES (20), (21), (22), (23), (24): Xaa is A or G
  MOD_RES (25), (26), (27), (28): Xaa is A or G or is absent

SEQ ID NO: 69872 - protein, 34 aa, Artificial Sequence; identical to SEQ ID NO: 28751
  GFR-binding peptide
  MOD_RES (34), (34): Xaa is C or S
  MOD_RES (14), (15), (16), (17), (18): Xaa is A or G
  MOD_RES (19), (20), (21), (22): Xaa is A or G or is absent

SEQ ID NO: 69873 - protein, 36 aa, Artificial Sequence
  GFR-binding peptide
  MOD_RES (5), (6): Xaa is C or S
SAGPXXTPTKMSPISMLYKNDKQQIILKYHYGMVVD

SEQ ID NO: 69874 - protein, 39 aa, Artificial Sequence; identical to SEQ ID NO: 28755
  GFR-binding peptide
  MOD_RES (4), (5), (37), (39): Xaa is C or S

SEQ ID NO: 69875 - protein, 39 aa, Artificial Sequence; identical to SEQ ID NO: 7522
  GFR-binding peptide
  MOD_RES (6), (7): Xaa is C or S
  MOD_RES (21), (22), (23), (24), (25): Xaa is A or G
  MOD_RES (26), (27), (28), (29): Xaa is A or G or is absent

SEQ ID NO: 69876 - protein, 40 aa, Artificial Sequence; identical to SEQ ID NO: 7524
  GFR-binding peptide
  MOD_RES (4), (5), (39): Xaa is C or S
  MOD_RES (19), (20), (21), (22), (23): Xaa is A or G
  MOD_RES (24), (25), (26), (27): Xaa is A or G or is absent

SEQ ID NO: 69877 - protein, 39 aa, Artificial Sequence; identical to SEQ ID NO: 28759
  GFR-binding peptide
  MOD_RES (1), (2), (37), (39): Xaa is C or S
  MOD_RES (16), (17), (18), (19), (20): Xaa is A or G
  MOD_RES (21), (22), (23), (24): Xaa is A or G or is absent

SEQ ID NO: 69878 - protein, 39 aa, Artificial Sequence; identical to SEQ ID NO: 7527
  GFR-binding peptide
  MOD_RES (5), (6): Xaa is C or S
  MOD_RES (20), (21), (22), (23), (24): Xaa is A or G
  MOD_RES (25), (26), (27), (28): Xaa is A or G or is absent

SEQ ID NO: 69879 - protein, 35 aa, Artificial Sequence; identical to SEQ ID NO: 32831
  GFR-binding peptide
  MOD_RES (2), (3), (35): Xaa is C or S

SEQ ID NO: 69880 - protein, 37 aa, Artificial Sequence; identical to SEQ ID NO: 28764
  GFR-binding peptide
  MOD_RES (2), (3), (35), (37): Xaa is C or S

SEQ ID NO: 69881 - protein, 37 aa, Artificial Sequence
  GFR-binding peptide
  MOD_RES (1), (35), (37): Xaa is C or S
  MOD_RES (15), (16), (17), (18), (19): Xaa is A or G
  MOD_RES (20), (21), (22), (23): Xaa is A or G or is absent
XVPTRLSATSILYYXXXXXXXXXLRKHRDMVVESXGX

SEQ ID NO: 69882 - protein, 43 aa, Artificial Sequence
  GFR-binding peptide
  MOD_RES (6), (7), (41), (43): Xaa is C or S
  MOD_RES (21), (22), (23), (24), (25): Xaa is A or G
  MOD_RES (26), (27), (28), (29): Xaa is A or G or is absent
HVPKPXXAPTKLSPISVLYKXXXXXXXXXLKYHYNMVVRSXGX

SEQ ID NO: 69883 - protein, 41 aa, Artificial Sequence
  GFR-binding peptide
  MOD_RES (6), (7), (41): Xaa is C or S
  MOD_RES (21), (22), (23), (24), (25): Xaa is A or G
  MOD_RES (26), (27), (28), (29): Xaa is A or G or is absent
GSAGPXXTPTKMEPISMLYLXXXXXXXXXKFKYEGMVVDRX

SEQ ID NO: 69884 - protein, 41 aa, Artificial Sequence; identical to SEQ ID NO: 32833
  GFR-binding peptide
  MOD_RES (4), (5), (39), (41): Xaa is C or S
  MOD_RES (19), (20), (21), (22), (23): Xaa is A or G
  MOD_RES (24), (25), (26), (27): Xaa is A or G or is absent

SEQ ID NO: 69885 - protein, 37 aa, Artificial Sequence; identical to SEQ ID NO: 7532
  GFR-binding peptide
  MOD_RES (6), (7): Xaa is C or S

SEQ ID NO: 69886 - protein, 32 aa, Artificial Sequence; identical to SEQ ID NO: 7533
  GFR-binding peptide
  MOD_RES (31), (31): Xaa is C or S

SEQ ID NO: 69887 - protein, 37 aa, Artificial Sequence; identical to SEQ ID NO: 28767
  GFR-binding peptide
  MOD_RES (6), (7): Xaa is C or S

SEQ ID NO: 69888 - protein, 38 aa, Artificial Sequence; identical to SEQ ID NO: 7534
  GFR-binding peptide
  MOD_RES (6), (7): Xaa is C or S

SEQ ID NO: 69889 - protein, 41 aa, Artificial Sequence; identical to SEQ ID NO: 28769
  GFR-binding peptide
  MOD_RES (4), (5), (39), (41): Xaa is C or S
  MOD_RES (19), (20), (21), (22), (23): Xaa is A or G
  MOD_RES (24), (25), (26), (27): Xaa is A or G or is absent

SEQ ID NO: 69890 - protein, 31 aa, Artificial Sequence; identical to SEQ ID NO: 28771
  GFR-binding peptide

SEQ ID NO: 69891 - protein, 38 aa, Artificial Sequence; identical to SEQ ID NO: 7536
  GFR-binding peptide
  MOD_RES (3), (4): Xaa is C or S
  MOD_RES (18), (19), (20), (21), (22): Xaa is A or G
  MOD_RES (23), (24), (25), (26): Xaa is A or G or is absent

SEQ ID NO: 69892 - protein, 38 aa, Artificial Sequence; identical to SEQ ID NO: 28773
  GFR-binding peptide
  MOD_RES (2), (3), (35), (37): Xaa is C or S

SEQ ID NO: 69893 - protein, 40 aa, Artificial Sequence; identical to SEQ ID NO: 32844
  GFR-binding peptide
  MOD_RES (4), (5), (37), (39): Xaa is C or S

SEQ ID NO: 69894 - protein, 38 aa, Artificial Sequence; identical to SEQ ID NO: 28775
  GFR-binding peptide
  MOD_RES (3), (4), (38): Xaa is C or S
  MOD_RES (18), (19), (20), (21), (22): Xaa is A or G
  MOD_RES (23), (24), (25), (26): Xaa is A or G or is absent

SEQ ID NO: 69895 - protein, 37 aa, Artificial Sequence; identical to SEQ ID NO: 7537
  GFR-binding peptide
  MOD_RES (1), (34), (36): Xaa is C or S
  MOD_RES (15), (16), (17), (18), (19): Xaa is A or G
  MOD_RES (20), (21), (22), (23): Xaa is A or G or is absent

SEQ ID NO: 69896 - protein, 35 aa, Artificial Sequence; identical to SEQ ID NO: 28777
  GFR-binding peptide
  MOD_RES (2), (3): Xaa is C or S
  MOD_RES (17), (18), (19), (20), (21): Xaa is A or G
  MOD_RES (22), (23), (24), (25): Xaa is A or G or is absent

SEQ ID NO: 69897 - protein, 39 aa, Artificial Sequence; identical to SEQ ID NO: 7538
  GFR-binding peptide
  MOD_RES (5), (6), (37), (39): Xaa is C or S

SEQ ID NO: 69898 - protein, 40 aa, Artificial Sequence; identical to SEQ ID NO: 7545
  GFR-binding peptide
  MOD_RES (3), (4), (38), (40): Xaa is C or S
  MOD_RES (18), (19), (20), (21), (22): Xaa is A or G
  MOD_RES (23), (24), (25), (26): Xaa is A or G or is absent

SEQ ID NO: 69899 - protein, 37 aa, Artificial Sequence; identical to SEQ ID NO: 28785
  GFR-binding peptide
  MOD_RES (5), (6): Xaa is C or S

SEQ ID NO: 69900 - protein, 37 aa, Artificial Sequence; identical to SEQ ID NO: 7550
  GFR-binding peptide
  MOD_RES (3), (4): Xaa is C or S
  MOD_RES (18), (19), (20), (21), (22): Xaa is A or G
  MOD_RES (23), (24), (25), (26): Xaa is A or G or is absent

SEQ ID NO: 69901 - protein, 38 aa, Artificial Sequence; identical to SEQ ID NO: 32852
  GFR-binding peptide
  MOD_RES (2), (3), (36), (38): Xaa is C or S
  MOD_RES (17), (18), (19), (20), (21): Xaa is A or G
  MOD_RES (22), (23), (24), (25): Xaa is A or G or is absent

SEQ ID NO: 69902 - protein, 35 aa, Artificial Sequence; identical to SEQ ID NO: 7551
  GFR-binding peptide
  MOD_RES (32), (34): Xaa is C or S

SEQ ID NO: 69903 - protein, 40 aa, Artificial Sequence; identical to SEQ ID NO: 57764
  GFR-binding peptide
  MOD_RES (5), (6), (40): Xaa is C or S
  MOD_RES (20), (21), (22), (23), (24): Xaa is A or G
  MOD_RES (25), (26), (27), (28): Xaa is A or G or is absent

SEQ ID NO: 69904 - protein, 39 aa, Artificial Sequence
  GFR-binding peptide
  MOD_RES (5), (6), (39): Xaa is C or S
  MOD_RES (20), (21), (22), (23), (24): Xaa is A or G
  MOD_RES (25), (26), (27), (28): Xaa is A or G or is absent
VPSTXXAPVKTEPISMLYLXXXXXXXXXKFKYEMIVEEX

SEQ ID NO: 69905 - protein, 38 aa, Artificial Sequence; identical to SEQ ID NO: 32853
  GFR-binding peptide
  MOD_RES (3), (4), (38): Xaa is C or S
  MOD_RES (18), (19), (20), (21), (22): Xaa is A or G
  MOD_RES (23), (24), (25), (26): Xaa is A or G or is absent

SEQ ID NO: 69906 - protein, 33 aa, Artificial Sequence
  GFR-binding peptide
  MOD_RES (1), (1): Xaa is C or S
  MOD_RES (15), (16), (17), (18), (19): Xaa is A or G
  MOD_RES (20), (21), (22), (23): Xaa is A or G or is absent
XVPTKLSATSILYYXXXXXXXXXLRKHRGMAVS

SEQ ID NO: 69907 - protein, 38 aa, Artificial Sequence; identical to SEQ ID NO: 7554
  GFR-binding peptide
  MOD_RES (35), (37): Xaa is C or S
  MOD_RES (14), (15), (16), (17), (18): Xaa is A or G
  MOD_RES (19), (20), (21), (22): Xaa is A or G or is absent

SEQ ID NO: 69908 - protein, 34 aa, Artificial Sequence
  GFR-binding peptide
  MOD_RES (1), (33): Xaa is C or S
XVPEKMEPISILYLDENKNVVKFKYENMTVESXA

SEQ ID NO: 69909 - protein, 35 aa, Artificial Sequence; identical to SEQ ID NO: 7555
  GFR-binding peptide
  MOD_RES (1), (34): Xaa is C or S
  MOD_RES (15), (16), (17), (18), (19): Xaa is A or G
  MOD_RES (20), (21), (22), (23): Xaa is A or G or is absent

SEQ ID NO: 69910 - protein, 39 aa, Artificial Sequence; identical to SEQ ID NO: 28797
  GFR-binding peptide
  MOD_RES (5), (6): Xaa is C or S
  MOD_RES (20), (21), (22), (23), (24): Xaa is A or G
  MOD_RES (25), (26), (27), (28): Xaa is A or G or is absent

SEQ ID NO: 69911 - protein, 41 aa, Artificial Sequence; identical to SEQ ID NO: 32862
  GFR-binding peptide
  MOD_RES (6), (7), (39), (41): Xaa is C or S

SEQ ID NO: 69912 - protein, 34 aa, Artificial Sequence
  GFR-binding peptide
  MOD_RES (1), (2): Xaa is C or S
  MOD_RES (16), (17), (18), (19), (20): Xaa is A or G
  MOD_RES (21), (22), (23), (24): Xaa is A or G or is absent
XXVSQDLSPINILYFXXXXXXXXXYGKIPMIVKS

SEQ ID NO: 69913 - protein, 39 aa, Artificial Sequence; identical to SEQ ID NO: 28801
  GFR-binding peptide
  MOD_RES (4), (5), (39): Xaa is C or S
  MOD_RES (19), (20), (21), (22), (23): Xaa is A or G
  MOD_RES (24), (25), (26), (27): Xaa is A or G or is absent

SEQ ID NO: 69914 - protein, 36 aa, Artificial Sequence; identical to SEQ ID NO: 28803
  GFR-binding peptide
  MOD_RES (1), (2), (33), (35): Xaa is C or S

SEQ ID NO: 69915 - protein, 42 aa, Artificial Sequence; identical to SEQ ID NO: 7568
  GFR-binding peptide
  MOD_RES (6), (7), (41): Xaa is C or S
  MOD_RES (21), (22), (23), (24), (25): Xaa is A or G
  MOD_RES (26), (27), (28), (29): Xaa is A or G or is absent

SEQ ID NO: 69916 - protein, 34 aa, Artificial Sequence; identical to SEQ ID NO: 7569
  GFR-binding peptide
  MOD_RES (1), (34): Xaa is C or S

SEQ ID NO: 69917 - protein, 39 aa, Artificial Sequence
  GFR-binding peptide
  MOD_RES (5), (6), (39): Xaa is C or S
  MOD_RES (20), (21), (22), (23), (24): Xaa is A or G
  MOD_RES (25), (26), (27), (28): Xaa is A or G or is absent
SASPXXVSQDLSPINILYFXXXXXXXXXYGKIPMIVKSX

SEQ ID NO: 69918 - protein, 35 aa, Artificial Sequence; identical to SEQ ID NO: 7571
  GFR-binding peptide
  MOD_RES (1), (33), (35): Xaa is C or S

SEQ ID NO: 69919 - protein, 40 aa, Artificial Sequence; identical to SEQ ID NO: 28810
  GFR-binding peptide
  MOD_RES (6), (7): Xaa is C or S
  MOD_RES (21), (22), (23), (24), (25): Xaa is A or G
  MOD_RES (26), (27), (28), (29): Xaa is A or G or is absent

SEQ ID NO: 69920 - protein, 37 aa, Artificial Sequence; identical to SEQ ID NO: 28811
  GFR-binding peptide
  MOD_RES (3), (4), (37): Xaa is C or S
  MOD_RES (18), (19), (20), (21), (22): Xaa is A or G
  MOD_RES (23), (24), (25), (26): Xaa is A or G or is absent

SEQ ID NO: 69921 - protein, 35 aa, Artificial Sequence; identical to SEQ ID NO: 28812
  GFR-binding peptide
  MOD_RES (1), (32), (34): Xaa is C or S

SEQ ID NO: 69922 - protein, 40 aa, Artificial Sequence; identical to SEQ ID NO: 7580
  GFR-binding peptide
  MOD_RES (4), (5), (39): Xaa is C or S
  MOD_RES (19), (20), (21), (22), (23): Xaa is A or G
  MOD_RES (24), (25), (26), (27): Xaa is A or G or is absent

SEQ ID NO: 69923 - protein, 39 aa, Artificial Sequence; identical to SEQ ID NO: 32880
  GFR-binding peptide
  MOD_RES (6), (7): Xaa is C or S
  MOD_RES (21), (22), (23), (24), (25): Xaa is A or G
  MOD_RES (26), (27), (28), (29): Xaa is A or G or is absent

SEQ ID NO: 69924 - protein, 38 aa, Artificial Sequence
  GFR-binding peptide
  MOD_RES (2), (3), (35), (37): Xaa is C or S
PXXVPEKMSATSILYYDENKNVVLRKHRNMTVESXAXR

SEQ ID NO: 69925 - protein, 31 aa, Artificial Sequence; identical to SEQ ID NO: 32887
  GFR-binding peptide
  MOD_RES (1), (1): Xaa is C or S

SEQ ID NO: 69926 - protein, 38 aa, Artificial Sequence
  GFR-binding peptide
  MOD_RES (3), (4), (38): Xaa is C or S
  MOD_RES (18), (19), (20), (21), (22): Xaa is A or G
  MOD_RES (23), (24), (25), (26): Xaa is A or G or is absent
EPXXVPEKMNAISILYFXXXXXXXXXLKKYRNMTVESX

SEQ ID NO: 69927 - protein, 34 aa, Artificial Sequence; identical to SEQ ID NO: 28826
  GFR-binding peptide
  MOD_RES (34), (34): Xaa is C or S
  MOD_RES (14), (15), (16), (17), (18): Xaa is A or G
  MOD_RES (19), (20), (21), (22): Xaa is A or G or is absent

SEQ ID NO: 69928 - protein, 40 aa, Artificial Sequence; identical to SEQ ID NO: 32896
  GFR-binding peptide
  MOD_RES (6), (7), (39): Xaa is C or S

SEQ ID NO: 69929 - protein, 35 aa, Artificial Sequence; identical to SEQ ID NO: 7590
  GFR-binding peptide
  MOD_RES (3), (4), (35): Xaa is C or S

SEQ ID NO: 69930 - protein, 36 aa, Artificial Sequence; identical to SEQ ID NO: 7591
  GFR-binding peptide
  MOD_RES (2), (3), (34), (36): Xaa is C or S

SEQ ID NO: 69931 - protein, 39 aa, Artificial Sequence; identical to SEQ ID NO: 28833
  GFR-binding peptide
  MOD_RES (3), (4), (36), (38): Xaa is C or S

SEQ ID NO: 69932 - protein, 42 aa, Artificial Sequence; identical to SEQ ID NO: 32902
  GFR-binding peptide
  MOD_RES (6), (7), (41): Xaa is C or S
  MOD_RES (21), (22), (23), (24), (25): Xaa is A or G
  MOD_RES (26), (27), (28), (29): Xaa is A or G or is absent

SEQ ID NO: 69933 - protein, 33 aa, Artificial Sequence; identical to SEQ ID NO: 7593
  GFR-binding peptide
  MOD_RES (32), (32): Xaa is C or S

SEQ ID NO: 69934 - protein, 40 aa, Artificial Sequence
  GFR-binding peptide
  MOD_RES (5), (6), (40): Xaa is C or S
  MOD_RES (20), (21), (22), (23), (24): Xaa is A or G
  MOD_RES (25), (26), (27), (28): Xaa is A or G or is absent
IPEPXXVPEKMNAISILYFXXXXXXXXXLKKYRNMTVESX

SEQ ID NO: 69935 - protein, 39 aa, Artificial Sequence; identical to SEQ ID NO: 7595
  GFR-binding peptide
  MOD_RES (5), (39): Xaa is C or S
  MOD_RES (19), (20), (21), (22), (23): Xaa is A or G
  MOD_RES (24), (25), (26), (27): Xaa is A or G or is absent

SEQ ID NO: 69936 - protein, 37 aa, Artificial Sequence; identical to SEQ ID NO: 7598
  GFR-binding peptide
  MOD_RES (3), (4): Xaa is C or S
  MOD_RES (18), (19), (20), (21), (22): Xaa is A or G
  MOD_RES (23), (24), (25), (26): Xaa is A or G or is absent

SEQ ID NO: 69937 - protein, 36 aa, Artificial Sequence; identical to SEQ ID NO: 32911
  GFR-binding peptide
  MOD_RES (34), (36): Xaa is C or S
  MOD_RES (14), (15), (16), (17), (18): Xaa is A or G
  MOD_RES (19), (20), (21), (22): Xaa is A or G or is absent

SEQ ID NO: 69938 - protein, 34 aa, Artificial Sequence; identical to SEQ ID NO: 32917
  GFR-binding peptide
  MOD_RES (3), (4): Xaa is C or S

SEQ ID NO: 69939 - protein, 40 aa, Artificial Sequence; identical to SEQ ID NO: 28843
  GFR-binding peptide
  MOD_RES (5), (6), (38), (40): Xaa is C or S

SEQ ID NO: 69940 - protein, 37 aa, Artificial Sequence; identical to SEQ ID NO: 28846
  GFR-binding peptide
  MOD_RES (2), (3), (37): Xaa is C or S
  MOD_RES (17), (18), (19), (20), (21): Xaa is A or G
  MOD_RES (22), (23), (24), (25): Xaa is A or G or is absent

SEQ ID NO: 69941 - protein, 35 aa, Artificial Sequence; identical to SEQ ID NO: 7603
  GFR-binding peptide
  MOD_RES (2), (3), (34): Xaa is C or S

SEQ ID NO: 69942 - protein, 41 aa, Artificial Sequence; identical to SEQ ID NO: 32921
  GFR-binding peptide
  MOD_RES (6), (7), (39), (41): Xaa is C or S

SEQ ID NO: 69943 - protein, 31 aa, Artificial Sequence; identical to SEQ ID NO: 7604
  GFR-binding peptide

SEQ ID NO: 69944 - protein, 34 aa, Artificial Sequence; identical to SEQ ID NO: 7606
  GFR-binding peptide
  MOD_RES (32), (34): Xaa is C or S

SEQ ID NO: 69945 - protein, 35 aa, Artificial Sequence; identical to SEQ ID NO: 7608
  GFR-binding peptide
  MOD_RES (2), (3), (34): Xaa is C or S

SEQ ID NO: 69946 - protein, 35 aa, Artificial Sequence; identical to SEQ ID NO: 32923
  GFR-binding peptide
  MOD_RES (3), (3): Xaa is C or S
  MOD_RES (17), (18), (19), (20), (21): Xaa is A or G
  MOD_RES (22), (23), (24), (25): Xaa is A or G or is absent

SEQ ID NO: 69947 - protein, 36 aa, Artificial Sequence; identical to SEQ ID NO: 57825
  GFR-binding peptide
  MOD_RES (1), (34), (36): Xaa is C or S
  MOD_RES (15), (16), (17), (18), (19): Xaa is A or G
  MOD_RES (20), (21), (22), (23): Xaa is A or G or is absent

SEQ ID NO: 69948 - protein, 35 aa, Artificial Sequence; identical to SEQ ID NO: 28854
  GFR-binding peptide
  MOD_RES (4), (5): Xaa is C or S

SEQ ID NO: 69949 - protein, 37 aa, Artificial Sequence; identical to SEQ ID NO: 28855
  GFR-binding peptide
  MOD_RES (5), (37): Xaa is C or S

SEQ ID NO: 69950 - protein, 37 aa, Artificial Sequence; identical to SEQ ID NO: 28858
  GFR-binding peptide
  MOD_RES (2), (3), (35), (37): Xaa is C or S

SEQ ID NO: 69951 - protein, 37 aa, Artificial Sequence; identical to SEQ ID NO: 7610
  GFR-binding peptide
  MOD_RES (4), (5): Xaa is C or S
  MOD_RES (19), (20), (21), (22), (23): Xaa is A or G
  MOD_RES (24), (25), (26), (27): Xaa is A or G or is absent

SEQ ID NO: 69952 - protein, 32 aa, Artificial Sequence; identical to SEQ ID NO: 7611
  GFR-binding peptide
  MOD_RES (32), (32): Xaa is C or S

SEQ ID NO: 69953 - protein, 35 aa, Artificial Sequence; identical to SEQ ID NO: 7612
  GFR-binding peptide
  MOD_RES (1), (2): Xaa is C or S
  MOD_RES (16), (17), (18), (19), (20): Xaa is A or G
  MOD_RES (21), (22), (23), (24): Xaa is A or G or is absent

SEQ ID NO: 69954 - protein, 35 aa, Artificial Sequence; identical to SEQ ID NO: 7613
  GFR-binding peptide
  MOD_RES (1), (2), (34): Xaa is C or S

SEQ ID NO: 69955 - protein, 38 aa, Artificial Sequence; identical to SEQ ID NO: 28866
  GFR-binding peptide
  MOD_RES (5), (6): Xaa is C or S
  MOD_RES (20), (21), (22), (23), (24): Xaa is A or G
  MOD_RES (25), (26), (27), (28): Xaa is A or G or is absent

SEQ ID NO: 69956 - protein, 35 aa, Artificial Sequence
  GFR-binding peptide
  MOD_RES (1), (32), (34): Xaa is C or S
XVSQDLSPINILYFIGKTPKIYGKIPMIVKSXKXS

SEQ ID NO: 69957 - protein, 42 aa, Artificial Sequence
  GFR-binding peptide
  MOD_RES (5), (6), (39), (41): Xaa is C or S
  MOD_RES (20), (21), (22), (23), (24): Xaa is A or G
  MOD_RES (25), (26), (27), (28): Xaa is A or G or is absent
VPSTXXAPVKTSPISMLYKXXXXXXXXXLKYHYMIVEEXGXL

SEQ ID NO: 69958 - protein, 36 aa, Artificial Sequence; identical to SEQ ID NO: 32937
  GFR-binding peptide
  MOD_RES (1), (34), (36): Xaa is C or S

SEQ ID NO: 69959 - protein, 31 aa, Artificial Sequence; identical to SEQ ID NO: 32938
  GFR-binding peptide
  MOD_RES (1), (1): Xaa is C or S

SEQ ID NO: 69960 - protein, 40 aa, Artificial Sequence; identical to SEQ ID NO: 28868
  GFR-binding peptide
  MOD_RES (5), (6), (40): Xaa is C or S
  MOD_RES (20), (21), (22), (23), (24): Xaa is A or G
  MOD_RES (25), (26), (27), (28): Xaa is A or G or is absent

SEQ ID NO: 69961 - protein, 40 aa, Artificial Sequence; identical to SEQ ID NO: 28869
  GFR-binding peptide
  MOD_RES (5), (6), (38), (40): Xaa is C or S

SEQ ID NO: 69962 - protein, 36 aa, Artificial Sequence; identical to SEQ ID NO: 7618
  GFR-binding peptide
  MOD_RES (4), (5): Xaa is C or S

SEQ ID NO: 69963 - protein, 37 aa, Artificial Sequence
  GFR-binding peptide
  MOD_RES (2), (3), (35), (37): Xaa is C or S
PXXVPEKMSATSILYYDENKNVVLRKHRNMTVESXAX

SEQ ID NO: 69964 - protein, 42 aa, Artificial Sequence; identical to SEQ ID NO: 28875
  GFR-binding peptide
  MOD_RES (6), (7), (39), (41): Xaa is C or S

SEQ ID NO: 69965 - protein, 33 aa, Artificial Sequence
  GFR-binding peptide
  MOD_RES (32), (32): Xaa is C or S
VPTRLSPISILYKDSANNVVLKYHYDMVVESXG

SEQ ID NO: 69966 - protein, 32 aa, Artificial Sequence; identical to SEQ ID NO: 28878
  GFR-binding peptide
  MOD_RES (32), (32): Xaa is C or S

SEQ ID NO: 69967 - protein, 39 aa, Artificial Sequence; identical to SEQ ID NO: 28879
  GFR-binding peptide
  MOD_RES (2), (3), (37), (39): Xaa is C or S
  MOD_RES (17), (18), (19), (20), (21): Xaa is A or G
  MOD_RES (22), (23), (24), (25): Xaa is A or G or is absent

SEQ ID NO: 69968 - protein, 38 aa, Artificial Sequence; identical to SEQ ID NO: 28880
  GFR-binding peptide
  MOD_RES (1), (2), (36), (38): Xaa is C or S
  MOD_RES (16), (17), (18), (19), (20): Xaa is A or G
  MOD_RES (21), (22), (23), (24): Xaa is A or G or is absent

SEQ ID NO: 69969 - protein, 42 aa, Artificial Sequence; identical to SEQ ID NO: 7623
  GFR-binding peptide
  MOD_RES (6), (7), (40), (42): Xaa is C or S
  MOD_RES (21), (22), (23), (24), (25): Xaa is A or G
  MOD_RES (26), (27), (28), (29): Xaa is A or G or is absent

SEQ ID NO: 69970 - protein, 38 aa, Artificial Sequence; identical to SEQ ID NO: 28885
  GFR-binding peptide
  MOD_RES (35), (37): Xaa is C or S
  MOD_RES (14), (15), (16), (17), (18): Xaa is A or G
  MOD_RES (19), (20), (21), (22): Xaa is A or G or is absent

SEQ ID NO: 69971 - protein, 41 aa, Artificial Sequence; identical to SEQ ID NO: 28886
  GFR-binding peptide
  MOD_RES (6), (7), (41): Xaa is C or S
  MOD_RES (21), (22), (23), (24), (25): Xaa is A or G
  MOD_RES (26), (27), (28), (29): Xaa is A or G or is absent

SEQ ID NO: 69972 - protein, 37 aa, Artificial Sequence
  GFR-binding peptide
  MOD_RES (1), (2), (34), (36): Xaa is C or S
XXVPTKLSATSILYYDKGVVTYLRKHRGMAVSEXGXR

SEQ ID NO: 69973 - protein, 38 aa, Artificial Sequence; identical to SEQ ID NO: 28887
  GFR-binding peptide
  MOD_RES (5), (6): Xaa is C or S
  MOD_RES (20), (21), (22), (23), (24): Xaa is A or G
  MOD_RES (25), (26), (27), (28): Xaa is A or G or is absent

SEQ ID NO: 69974 - protein, 39 aa, Artificial Sequence; identical to SEQ ID NO: 28889
  GFR-binding peptide
  MOD_RES (6), (7), (38): Xaa is C or S

SEQ ID NO: 69975 - protein, 38 aa, Artificial Sequence; identical to SEQ ID NO: 28892
  GFR-binding peptide
  MOD_RES (3), (4), (38): Xaa is C or S
  MOD_RES (18), (19), (20), (21), (22): Xaa is A or G
  MOD_RES (23), (24), (25), (26): Xaa is A or G or is absent

SEQ ID NO: 69976 - protein, 34 aa, Artificial Sequence; identical to SEQ ID NO: 7626
  GFR-binding peptide
  MOD_RES (1), (2), (33): Xaa is C or S

SEQ ID NO: 69977 - protein, 34 aa, Artificial Sequence; identical to SEQ ID NO: 28894
  GFR-binding peptide
  MOD_RES (3), (4): Xaa is C or S

SEQ ID NO: 69978 - protein, 39 aa, Artificial Sequence; identical to SEQ ID NO: 7627
  GFR-binding peptide
  MOD_RES (3), (4), (37), (39): Xaa is C or S
  MOD_RES (18), (19), (20), (21), (22): Xaa is A or G
  MOD_RES (23), (24), (25), (26): Xaa is A or G or is absent

SEQ ID NO: 69979 - protein, 36 aa, Artificial Sequence; identical to SEQ ID NO: 28897
  GFR-binding peptide
  MOD_RES (1), (35): Xaa is C or S
  MOD_RES (15), (16), (17), (18), (19): Xaa is A or G
  MOD_RES (20), (21), (22), (23): Xaa is A or G or is absent

SEQ ID NO: 69980 - protein, 35 aa, Artificial Sequence; identical to SEQ ID NO: 28898
  GFR-binding peptide
  MOD_RES (1), (2): Xaa is C or S
  MOD_RES (16), (17), (18), (19), (20): Xaa is A or G
  MOD_RES (21), (22), (23), (24): Xaa is A or G or is absent

SEQ ID NO: 69981 - protein, 42 aa, Artificial Sequence; identical to SEQ ID NO: 7628
  GFR-binding peptide
  MOD_RES (5), (6), (40), (42): Xaa is C or S
  MOD_RES (20), (21), (22), (23), (24): Xaa is A or G
  MOD_RES (25), (26), (27), (28): Xaa is A or G or is absent

SEQ ID NO: 69982 - protein, 33 aa, Artificial Sequence; identical to SEQ ID NO: 32962
  GFR-binding peptide
  MOD_RES (1), (33): Xaa is C or S

SEQ ID NO: 69983 - protein, 38 aa, Artificial Sequence; identical to SEQ ID NO: 28903
  GFR-binding peptide
  MOD_RES (4), (5): Xaa is C or S
  MOD_RES (19), (20), (21), (22), (23): Xaa is A or G
  MOD_RES (24), (25), (26), (27): Xaa is A or G or is absent

SEQ ID NO: 69984 - protein, 38 aa, Artificial Sequence; identical to SEQ ID NO: 14940
  GFR-binding peptide
  MOD_RES (2), (3), (37): Xaa is C or S
  MOD_RES (17), (18), (19), (20), (21): Xaa is A or G
  MOD_RES (22), (23), (24), (25): Xaa is A or G or is absent

SEQ ID NO: 69985 - protein, 35 aa, Artificial Sequence
  GFR-binding peptide
  MOD_RES (1), (33), (35): Xaa is C or S
XVPEKMNAISILYFDENKNVVLKKYRNMTVESXAX

SEQ ID NO: 69986 - protein, 36 aa, Artificial Sequence; identical to SEQ ID NO: 28906
  GFR-binding peptide
  MOD_RES (1), (2), (34), (36): Xaa is C or S

SEQ ID NO: 69987 - protein, 38 aa, Artificial Sequence
  GFR-binding peptide
  MOD_RES (1), (35), (37): Xaa is C or S
  MOD_RES (15), (16), (17), (18), (19): Xaa is A or G
  MOD_RES (20), (21), (22), (23): Xaa is A or G or is absent
XTPTKMSATSMLYYXXXXXXXXXLRKHRGMVVDRXGXS

SEQ ID NO: 69988 - protein, 31 aa, Artificial Sequence; identical to SEQ ID NO: 7633
  GFR-binding peptide
  MOD_RES (1), (1): Xaa is C or S

SEQ ID NO: 69989 - protein, 37 aa, Artificial Sequence; identical to SEQ ID NO: 7634
  GFR-binding peptide
  MOD_RES (2), (3), (37): Xaa is C or S
  MOD_RES (17), (18), (19), (20), (21): Xaa is A or G
  MOD_RES (22), (23), (24), (25): Xaa is A or G or is absent

SEQ ID NO: 69990 - protein, 36 aa, Artificial Sequence; identical to SEQ ID NO: 7635
  GFR-binding peptide
  MOD_RES (2), (3), (34), (36): Xaa is C or S

SEQ ID NO: 69991 - protein, 42 aa, Artificial Sequence; identical to SEQ ID NO: 32974
  GFR-binding peptide
  MOD_RES (5), (6), (39), (41): Xaa is C or S
  MOD_RES (20), (21), (22), (23), (24): Xaa is A or G
  MOD_RES (25), (26), (27), (28): Xaa is A or G or is absent

SEQ ID NO: 69992 - protein, 39 aa, Artificial Sequence
  GFR-binding peptide
  MOD_RES (6), (7), (39): Xaa is C or S
HVPKPXXAPTKLSPISVLYKDDSSNVILKYHYNMVVRSX

SEQ ID NO: 69993 - protein, 39 aa, Artificial Sequence
  GFR-binding peptide
  MOD_RES (5), (6), (37), (39): Xaa is C or S
SASPXXVSQDLSPINILYFIGKTPKIYGKIPMIVKSXKX

SEQ ID NO: 69994 - protein, 34 aa, Artificial Sequence
  GFR-binding peptide
  MOD_RES (32), (34): Xaa is C or S
VPTKLSATSILYYDKGVVTYLRKHRGMAVSEXGX

SEQ ID NO: 69995 - protein, 38 aa, Artificial Sequence
  GFR-binding peptide
  MOD_RES (6), (7): Xaa is C or S
GIPEPXXVPEKMEPISILYLDENKNVVKFKYENMTVES

SEQ ID NO: 69996 - protein, 36 aa, Artificial Sequence
  GFR-binding peptide
  MOD_RES (2), (3), (35): Xaa is C or S
AXXVPTKLSATSILYYDKGVVTYLRKHRGMAVSEXG

SEQ ID NO: 69997 - protein, 34 aa, Artificial Sequence; identical to SEQ ID NO: 32979
  GFR-binding peptide
  MOD_RES (32), (34): Xaa is C or S

SEQ ID NO: 69998 - protein, 38 aa, Artificial Sequence; identical to SEQ ID NO: 7639
  GFR-binding peptide
  MOD_RES (4), (5): Xaa is C or S
  MOD_RES (19), (20), (21), (22), (23): Xaa is A or G
  MOD_RES (24), (25), (26), (27): Xaa is A or G or is absent

SEQ ID NO: 69999 - protein, 41 aa, Artificial Sequence; identical to SEQ ID NO: 7640
  GFR-binding peptide
  MOD_RES (3), (4), (38), (40): Xaa is C or S
  MOD_RES (18), (19), (20), (21), (22): Xaa is A or G
  MOD_RES (23), (24), (25), (26): Xaa is A or G or is absent

SEQ ID NO: 70000 - protein, 36 aa, Artificial Sequence
  GFR-binding peptide
  MOD_RES (2), (3), (34), (36): Xaa is C or S
PXXVSQDLSPINILYFIGKTPKIYGKIPMIVKSXKX

SEQ ID NO: 70001 - protein, 34 aa, Artificial Sequence; identical to SEQ ID NO: 7642
  GFR-binding peptide
  MOD_RES (3), (4): Xaa is C or S

SEQ ID NO: 70002 - protein, 42 aa, Artificial Sequence; identical to SEQ ID NO: 7643
  GFR-binding peptide
  MOD_RES (6), (7), (41): Xaa is C or S
  MOD_RES (21), (22), (23), (24), (25): Xaa is A or G
  MOD_RES (26), (27), (28), (29): Xaa is A or G or is absent

SEQ ID NO: 70003 - protein, 43 aa, Artificial Sequence; identical to SEQ ID NO: 28924
  GFR-binding peptide
  MOD_RES (6), (7), (41), (43): Xaa is C or S
  MOD_RES (21), (22), (23), (24), (25): Xaa is A or G
  MOD_RES (26), (27), (28), (29): Xaa is A or G or is absent

SEQ ID NO: 70004 - protein, 35 aa, Artificial Sequence
  GFR-binding peptide
  MOD_RES (2), (3): Xaa is C or S
  MOD_RES (17), (18), (19), (20), (21): Xaa is A or G
  MOD_RES (22), (23), (24), (25): Xaa is A or G or is absent
PXXVPQALSPINILYFXXXXXXXXXYGKIPMIVRS

SEQ ID NO: 70005 - protein, 38 aa, Artificial Sequence; identical to SEQ ID NO: 7644
  GFR-binding peptide
  MOD_RES (5), (6): Xaa is C or S
  MOD_RES (20), (21), (22), (23), (24): Xaa is A or G
  MOD_RES (25), (26), (27), (28): Xaa is A or G or is absent

SEQ ID NO: 70006 - protein, 39 aa, Artificial Sequence
  GFR-binding peptide
  MOD_RES (2), (3), (37), (39): Xaa is C or S
  MOD_RES (17), (18), (19), (20), (21): Xaa is A or G
  MOD_RES (22), (23), (24), (25): Xaa is A or G or is absent
PXXVPEKMSATSILYYXXXXXXXXXLRKHRNMTVESXAX

SEQ ID NO: 70007 - protein, 36 aa, Artificial Sequence; identical to SEQ ID NO: 28930
  GFR-binding peptide
  MOD_RES (5), (6): Xaa is C or S

SEQ ID NO: 70008 - protein, 31 aa, Artificial Sequence
  GFR-binding peptide
VPEKMNAISILYFDENKNVVLKKYRNMTVES

SEQ ID NO: 70009 - protein, 38 aa, Artificial Sequence; identical to SEQ ID NO: 28931
  GFR-binding peptide
  MOD_RES (3), (4), (38): Xaa is C or S
  MOD_RES (18), (19), (20), (21), (22): Xaa is A or G
  MOD_RES (23), (24), (25), (26): Xaa is A or G or is absent

SEQ ID NO: 70010 - protein, 34 aa, Artificial Sequence; identical to SEQ ID NO: 28934
  GFR-binding peptide
  MOD_RES (1), (33): Xaa is C or S

SEQ ID NO: 70011 - protein, 36 aa, Artificial Sequence
  GFR-binding peptide
  MOD_RES (2), (3), (35): Xaa is C or S
SXXVPARLSATSILYYDAANNVVLRKHRDMVVEAXG

SEQ ID NO: 70012 - protein, 36 aa, Artificial Sequence; identical to SEQ ID NO: 28938
  GFR-binding peptide
  MOD_RES (4), (5): Xaa is C or S

SEQ ID NO: 70013 - protein, 37 aa, Artificial Sequence; identical to SEQ ID NO: 28939
  GFR-binding peptide
  MOD_RES (3), (4): Xaa is C or S
  MOD_RES (18), (19), (20), (21), (22): Xaa is A or G
  MOD_RES (23), (24), (25), (26): Xaa is A or G or is absent

SEQ ID NO: 70014 - protein, 34 aa, Artificial Sequence; identical to SEQ ID NO: 32993
  GFR-binding peptide
  MOD_RES (2), (3): Xaa is C or S

SEQ ID NO: 70015 - protein, 36 aa, Artificial Sequence
  GFR-binding peptide
  MOD_RES (2), (3), (35): Xaa is C or S
PXXVPEKMNAISILYFDENKNVVLKKYRNMTVESXA

SEQ ID NO: 70016 - protein, 33 aa, Artificial Sequence; identical to SEQ ID NO: 28941
  GFR-binding peptide
  MOD_RES (1), (1): Xaa is C or S
  MOD_RES (15), (16), (17), (18), (19): Xaa is A or G
  MOD_RES (20), (21), (22), (23): Xaa is A or G or is absent

SEQ ID NO: 70017 - protein, 39 aa, Artificial Sequence; identical to SEQ ID NO: 32998
  GFR-binding peptide
  MOD_RES (3), (4), (38): Xaa is C or S
  MOD_RES (18), (19), (20), (21), (22): Xaa is A or G
  MOD_RES (23), (24), (25), (26): Xaa is A or G or is absent

SEQ ID NO: 70018 - protein, 36 aa, Artificial Sequence; identical to SEQ ID NO: 28943
  GFR-binding peptide
  MOD_RES (33), (35): Xaa is C or S
  MOD_RES (14), (15), (16), (17), (18): Xaa is A or G
  MOD_RES (19), (20), (21), (22): Xaa is A or G or is absent

SEQ ID NO: 70019 - protein, 38 aa, Artificial Sequence; identical to SEQ ID NO: 33000
  GFR-binding peptide
  MOD_RES (4), (5): Xaa is C or S
  MOD_RES (19), (20), (21), (22), (23): Xaa is A or G
  MOD_RES (24), (25), (26), (27): Xaa is A or G or is absent

SEQ ID NO: 70020 - protein, 41 aa, Artificial Sequence; identical to SEQ ID NO: 33001
  GFR-binding peptide
  MOD_RES (5), (6), (40): Xaa is C or S
  MOD_RES (20), (21), (22), (23), (24): Xaa is A or G
  MOD_RES (25), (26), (27), (28): Xaa is A or G or is absent

SEQ ID NO: 70021 - protein, 38 aa, Artificial Sequence; identical to SEQ ID NO: 7661
  GFR-binding peptide
  MOD_RES (3), (4), (36), (38): Xaa is C or S

SEQ ID NO: 70022 - protein, 39 aa, Artificial Sequence; identical to SEQ ID NO: 28947
  GFR-binding peptide
  MOD_RES (3), (4), (39): Xaa is C or S
  MOD_RES (18), (19), (20), (21), (22): Xaa is A or G
  MOD_RES (23), (24), (25), (26): Xaa is A or G or is absent

SEQ ID NO: 70023 - protein, 40 aa, Artificial Sequence; identical to SEQ ID NO: 7662
  GFR-binding peptide
  MOD_RES (5), (6): Xaa is C or S
  MOD_RES (20), (21), (22), (23), (24): Xaa is A or G
  MOD_RES (25), (26), (27), (28): Xaa is A or G or is absent

SEQ ID NO: 70024 - protein, 38 aa, Artificial Sequence; identical to SEQ ID NO: 7663
  GFR-binding peptide
  MOD_RES (4), (5), (36), (38): Xaa is C or S

SEQ ID NO: 70025 - protein, 35 aa, Artificial Sequence; identical to SEQ ID NO: 33008
  GFR-binding peptide
  MOD_RES (32), (34): Xaa is C or S

SEQ ID NO: 70026 - protein, 42 aa, Artificial Sequence; identical to SEQ ID NO: 28951
  GFR-binding peptide
  MOD_RES (6), (7), (40), (42): Xaa is C or S
  MOD_RES (21), (22), (23), (24), (25): Xaa is A or G
  MOD_RES (26), (27), (28), (29): Xaa is A or G or is absent

SEQ ID NO: 70027 - protein, 33 aa, Artificial Sequence
  GFR-binding peptide
  MOD_RES (1), (2): Xaa is C or S
XXVPEKMSPISILYKDENKNVVLKYHYNMTVES

SEQ ID NO: 70028 - protein, 38 aa, Artificial Sequence; identical to SEQ ID NO: 33011
  GFR-binding peptide
  MOD_RES (6), (38): Xaa is C or S

SEQ ID NO: 70029 - protein, 34 aa, Artificial Sequence; identical to SEQ ID NO: 7669
  GFR-binding peptide
  MOD_RES (1), (2): Xaa is C or S
  MOD_RES (16), (17), (18), (19), (20): Xaa is A or G
  MOD_RES (21), (22), (23), (24): Xaa is A or G or is absent

SEQ ID NO: 70030 - protein, 38 aa, Artificial Sequence; identical to SEQ ID NO: 57907
  GFR-binding peptide
  MOD_RES (4), (5), (36), (38): Xaa is C or S

SEQ ID NO: 70031 - protein, 34 aa, Artificial Sequence
  GFR-binding peptide
  MOD_RES (1), (2), (33): Xaa is C or S
XXAPVKTEPISMLYLDNGRVLLKFKYEMIVEEXG

SEQ ID NO: 70032 - protein, 35 aa, Artificial Sequence
  GFR-binding peptide
  MOD_RES (2), (3): Xaa is C or S
  MOD_RES (17), (18), (19), (20), (21): Xaa is A or G
  MOD_RES (22), (23), (24), (25): Xaa is A or G or is absent
TXXVPTRLSATSILYYXXXXXXXXXLRKHRDMVVE

SEQ ID NO: 70033 - protein, 34 aa, Artificial Sequence; identical to SEQ ID NO: 7671
  GFR-binding peptide
  MOD_RES (32), (34): Xaa is C or S

SEQ ID NO: 70034 - protein, 37 aa, Artificial Sequence; identical to SEQ ID NO: 7672
  GFR-binding peptide
  MOD_RES (5), (6): Xaa is C or S

SEQ ID NO: 70035 - protein, 38 aa, Artificial Sequence; identical to SEQ ID NO: 28963
  GFR-binding peptide
  MOD_RES (1), (2), (35), (37): Xaa is C or S

SEQ ID NO: 70036 - protein, 36 aa, Artificial Sequence
  GFR-binding peptide
  MOD_RES (4), (5): Xaa is C or S
PEPXXVPEKMSPINILYFDENKNVVYGKIPNMTVES

SEQ ID NO: 70037 - protein, 32 aa, Artificial Sequence; identical to SEQ ID NO: 28968
  GFR-binding peptide
  MOD_RES (14), (15), (16), (17), (18): Xaa is A or G
  MOD_RES (19), (20), (21), (22): Xaa is A or G or is absent

SEQ ID NO: 70038 - protein, 35 aa, Artificial Sequence; identical to SEQ ID NO: 33025
  GFR-binding peptide
  MOD_RES (3), (4): Xaa is C or S

SEQ ID NO: 70039 - protein, 35 aa, Artificial Sequence
  GFR-binding peptide
  MOD_RES (32), (34): Xaa is C or S
VPEKMSATSILYYDENKNVVLRKHRNMTVESXAXR

SEQ ID NO: 70040 - protein, 37 aa, Artificial Sequence; identical to SEQ ID NO: 57918
  GFR-binding peptide
  MOD_RES (5), (6), (37): Xaa is C or S

SEQ ID NO: 70041 - protein, 36 aa, Artificial Sequence; identical to SEQ ID NO: 7676
  GFR-binding peptide
  MOD_RES (5), (6): Xaa is C or S

SEQ ID NO: 70042 - protein, 32 aa, Artificial Sequence; identical to SEQ ID NO: 28970
  GFR-binding peptide
  MOD_RES (32), (32): Xaa is C or S

SEQ ID NO: 70043 - protein, 40 aa, Artificial Sequence; identical to SEQ ID NO: 28971
  GFR-binding peptide
  MOD_RES (3), (4), (37), (39): Xaa is C or S
  MOD_RES (18), (19), (20), (21), (22): Xaa is A or G
  MOD_RES (23), (24), (25), (26): Xaa is A or G or is absent

SEQ ID NO: 70044 - protein, 40 aa, Artificial Sequence
  GFR-binding peptide
  MOD_RES (6), (7), (38), (40): Xaa is C or S
ASASPXXVPQDLSPINILYFVGRTPKVYGKIPMVVKSXKX

SEQ ID NO: 70045 - protein, 34 aa, Artificial Sequence; identical to SEQ ID NO: 7677
  GFR-binding peptide
  MOD_RES (1), (2), (34): Xaa is C or S

SEQ ID NO: 70046 - protein, 37 aa, Artificial Sequence; identical to SEQ ID NO: 28973
  GFR-binding peptide
  MOD_RES (5), (6): Xaa is C or S

SEQ ID NO: 70047 - protein, 37 aa, Artificial Sequence; identical to SEQ ID NO: 7680
  GFR-binding peptide
  MOD_RES (1), (35), (37): Xaa is C or S
  MOD_RES (15), (16), (17), (18), (19): Xaa is A or G
  MOD_RES (20), (21), (22), (23): Xaa is A or G or is absent

SEQ ID NO: 70048 - protein, 37 aa, Artificial Sequence; identical to SEQ ID NO: 7681
  GFR-binding peptide
  MOD_RES (2), (3), (36): Xaa is C or S
  MOD_RES (17), (18), (19), (20), (21): Xaa is A or G
  MOD_RES (22), (23), (24), (25): Xaa is A or G or is absent

SEQ ID NO: 70049 - protein, 36 aa, Artificial Sequence
  GFR-binding peptide
  MOD_RES (4), (5): Xaa is C or S
PEPXXVPEKMSPISILYKDENKNVVLKYHYNMTVES

SEQ ID NO: 70050 - protein, 41 aa, Artificial Sequence; identical to SEQ ID NO: 14986
  GFR-binding peptide
  MOD_RES (3), (4), (38), (40): Xaa is C or S
  MOD_RES (18), (19), (20), (21), (22): Xaa is A or G
  MOD_RES (23), (24), (25), (26): Xaa is A or G or is absent

SEQ ID NO: 70051 - protein, 36 aa, Artificial Sequence; identical to SEQ ID NO: 33043
  GFR-binding peptide
  MOD_RES (1), (35): Xaa is C or S
  MOD_RES (15), (16), (17), (18), (19): Xaa is A or G
  MOD_RES (20), (21), (22), (23): Xaa is A or G or is absent

SEQ ID NO: 70052 - protein, 40 aa, Artificial Sequence; identical to SEQ ID NO: 7686
  GFR-binding peptide
  MOD_RES (5), (6), (39): Xaa is C or S

SEQ ID NO: 70053 - protein, 34 aa, Artificial Sequence; identical to SEQ ID NO: 7691
  GFR-binding peptide
  MOD_RES (1), (2), (33): Xaa is C or S

SEQ ID NO: 70054 - protein, 34 aa, Artificial Sequence; identical to SEQ ID NO: 28987
  GFR-binding peptide
  MOD_RES (1), (2): Xaa is C or S
  MOD_RES (16), (17), (18), (19), (20): Xaa is A or G
  MOD_RES (21), (22), (23), (24): Xaa is A or G or is absent

SEQ ID NO: 70055 - protein, 41 aa, Artificial Sequence; identical to SEQ ID NO: 7692
  GFR-binding peptide
  MOD_RES (5), (6), (41): Xaa is C or S
  MOD_RES (20), (21), (22), (23), (24): Xaa is A or G
  MOD_RES (25), (26), (27), (28): Xaa is A or G or is absent

SEQ ID NO: 70056 - protein, 34 aa, Artificial Sequence
  GFR-binding peptide
  MOD_RES (31), (33): Xaa is C or S
VPQDLSPINILYFVGRTPKVYGKIPMVVKSXKXS

SEQ ID NO: 70057 - protein, 37 aa, Artificial Sequence; identical to SEQ ID NO: 33053
  GFR-binding peptide
  MOD_RES (2), (3), (35), (37): Xaa is C or S

SEQ ID NO: 70058 - protein, 39 aa, Artificial Sequence; identical to SEQ ID NO: 28991
  GFR-binding peptide
  MOD_RES (1), (2), (36), (38): Xaa is C or S
  MOD_RES (16), (17), (18), (19), (20): Xaa is A or G
  MOD_RES (21), (22), (23), (24): Xaa is A or G or is absent

SEQ ID NO: 70059 - protein, 42 aa, Artificial Sequence; identical to SEQ ID NO: 7700
  GFR-binding peptide
  MOD_RES (5), (39), (41): Xaa is C or S
  MOD_RES (19), (20), (21), (22), (23): Xaa is A or G
  MOD_RES (24), (25), (26), (27): Xaa is A or G or is absent

SEQ ID NO: 70060 - protein, 36 aa, Artificial Sequence; identical to SEQ ID NO: 28997
  GFR-binding peptide
  MOD_RES (1), (33), (35): Xaa is C or S

SEQ ID NO: 70061 - protein, 30 aa, Artificial Sequence
  GFR-binding peptide
VPTKLSATSILYYDKGVVTYLRKHRGMAVS

SEQ ID NO: 70062 - protein, 42 aa, Artificial Sequence
  GFR-binding peptide
  MOD_RES (6), (7), (39), (41): Xaa is C or S
GIPEPXXVPEKMSATSILYYDENKNVVLRKHRNMTVESXAXR

SEQ ID NO: 70063 - protein, 32 aa, Artificial Sequence; identical to SEQ ID NO: 7707
  GFR-binding peptide
  MOD_RES (1), (2): Xaa is C or S

SEQ ID NO: 70064 - protein, 33 aa, Artificial Sequence; identical to SEQ ID NO: 29007
  GFR-binding peptide
  MOD_RES (14), (15), (16), (17), (18): Xaa is A or G
  MOD_RES (19), (20), (21), (22): Xaa is A or G or is absent

SEQ ID NO: 70065 - protein, 34 aa, Artificial Sequence; identical to SEQ ID NO: 33063
  GFR-binding peptide
  MOD_RES (3), (3): Xaa is C or S

SEQ ID NO: 70066 - protein, 33 aa, Artificial Sequence; identical to SEQ ID NO: 7711
  GFR-binding peptide
  MOD_RES (1), (2), (33): Xaa is C or S

SEQ ID NO: 70067 - protein, 40 aa, Artificial Sequence; identical to SEQ ID NO: 7715
  GFR-binding peptide
  MOD_RES (5), (6), (40): Xaa is C or S
  MOD_RES (20), (21), (22), (23), (24): Xaa is A or G
  MOD_RES (25), (26), (27), (28): Xaa is A or G or is absent

SEQ ID NO: 70068 - protein, 38 aa, Artificial Sequence
  GFR-binding peptide
  MOD_RES (1), (35), (37): Xaa is C or S
  MOD_RES (15), (16), (17), (18), (19): Xaa is A or G
  MOD_RES (20), (21), (22), (23): Xaa is A or G or is absent
XTPTKMEPISMLYLXXXXXXXXXKFKYEGMVVDRXGXS

SEQ ID NO: 70069 - protein, 40 aa, Artificial Sequence; identical to SEQ ID NO: 7717
  GFR-binding peptide
  MOD_RES (4), (5), (38), (40): Xaa is C or S
  MOD_RES (19), (20), (21), (22), (23): Xaa is A or G
  MOD_RES (24), (25), (26), (27): Xaa is A or G or is absent

SEQ ID NO: 70070 - protein, 44 aa, Artificial Sequence; identical to SEQ ID NO: 33071
  GFR-binding peptide
  MOD_RES (7), (41), (43): Xaa is C or S
  MOD_RES (21), (22), (23), (24), (25): Xaa is A or G
  MOD_RES (26), (27), (28), (29): Xaa is A or G or is absent

SEQ ID NO: 70071 - protein, 39 aa, Artificial Sequence; identical to SEQ ID NO: 7720
  GFR-binding peptide
  MOD_RES (3), (4), (38): Xaa is C or S
  MOD_RES (18), (19), (20), (21), (22): Xaa is A or G
  MOD_RES (23), (24), (25), (26): Xaa is A or G or is absent

SEQ ID NO: 70072 - protein, 35 aa, Artificial Sequence
  GFR-binding peptide
  MOD_RES (34), (34): Xaa is C or S
  MOD_RES (14), (15), (16), (17), (18): Xaa is A or G
  MOD_RES (19), (20), (21), (22): Xaa is A or G or is absent
VPTRLSPISILYKXXXXXXXXXLKYHYDMVVESXG

SEQ ID NO: 70073 - protein, 36 aa, Artificial Sequence; identical to SEQ ID NO: 7722
  GFR-binding peptide
  MOD_RES (2), (3): Xaa is C or S
  MOD_RES (17), (18), (19), (20), (21): Xaa is A or G
  MOD_RES (22), (23), (24), (25): Xaa is A or G or is absent

SEQ ID NO: 70074 - protein, 41 aa, Artificial Sequence; identical to SEQ ID NO: 33079
  GFR-binding peptide
  MOD_RES (6), (7), (41): Xaa is C or S
  MOD_RES (21), (22), (23), (24), (25): Xaa is A or G
  MOD_RES (26), (27), (28), (29): Xaa is A or G or is absent

SEQ ID NO: 70075 - protein, 34 aa, Artificial Sequence
  GFR-binding peptide
  MOD_RES (3), (4): Xaa is C or S
APXXVPQALSPINILYFVGRKPKVYGKIPMIVRS

SEQ ID NO: 70076 - protein, 34 aa, Artificial Sequence; identical to SEQ ID NO: 7724
  GFR-binding peptide
  MOD_RES (3), (4): Xaa is C or S

SEQ ID NO: 70077 - protein, 37 aa, Artificial Sequence; identical to SEQ ID NO: 7728
  GFR-binding peptide
  MOD_RES (34), (36): Xaa is C or S
  MOD_RES (14), (15), (16), (17), (18): Xaa is A or G
  MOD_RES (19), (20), (21), (22): Xaa is A or G or is absent

SEQ ID NO: 70078 - protein, 37 aa, Artificial Sequence; identical to SEQ ID NO: 15027
  GFR-binding peptide
  MOD_RES (34), (36): Xaa is C or S
  MOD_RES (14), (15), (16), (17), (18): Xaa is A or G
  MOD_RES (19), (20), (21), (22): Xaa is A or G or is absent

SEQ ID NO: 70079 - protein, 35 aa, Artificial Sequence; identical to SEQ ID NO: 33088
  GFR-binding peptide
  MOD_RES (2), (3), (35): Xaa is C or S

SEQ ID NO: 70080 - protein, 35 aa, Artificial Sequence; identical to SEQ ID NO: 29024
  GFR-binding peptide
  MOD_RES (2), (3): Xaa is C or S
  MOD_RES (17), (18), (19), (20), (21): Xaa is A or G
  MOD_RES (22), (23), (24), (25): Xaa is A or G or is absent

SEQ ID NO: 70081 - protein, 41 aa, Artificial Sequence; identical to SEQ ID NO: 7729
  GFR-binding peptide
  MOD_RES (6), (7), (39), (41): Xaa is C or S

SEQ ID NO: 70082 - protein, 34 aa, Artificial Sequence; identical to SEQ ID NO: 33091
  GFR-binding peptide
  MOD_RES (1), (2), (34): Xaa is C or S

SEQ ID NO: 70083 - protein, 35 aa, Artificial Sequence
  GFR-binding peptide
  MOD_RES (3), (4): Xaa is C or S
EPXXVPEKMSPISILYKDENKNVVLKYHYNMTVES

SEQ ID NO: 70084 - protein, 39 aa, Artificial Sequence; identical to SEQ ID NO: 29027
  GFR-binding peptide
  MOD_RES (4), (5), (39): Xaa is C or S
  MOD_RES (19), (20), (21), (22), (23): Xaa is A or G
  MOD_RES (24), (25), (26), (27): Xaa is A or G or is absent

SEQ ID NO: 70085 - protein, 34 aa, Artificial Sequence
  GFR-binding peptide
  MOD_RES (2), (3): Xaa is C or S
PXXVPEKMNAISILYFDENKNVVLKKYRNMTVES

SEQ ID NO: 70086 - protein, 32 aa, Artificial Sequence; identical to SEQ ID NO: 29030
  GFR-binding peptide
  MOD_RES (31), (31): Xaa is C or S

SEQ ID NO: 70087 - protein, 36 aa, Artificial Sequence; identical to SEQ ID NO: 29036
  GFR-binding peptide
  MOD_RES (3), (4): Xaa is C or S
  MOD_RES (18), (19), (20), (21), (22): Xaa is A or G
  MOD_RES (23), (24), (25), (26): Xaa is A or G or is absent

SEQ ID NO: 70088 - protein, 39 aa, Artificial Sequence; identical to SEQ ID NO: 7738
  GFR-binding peptide
  MOD_RES (2), (3), (37), (39): Xaa is C or S
  MOD_RES (17), (18), (19), (20), (21): Xaa is A or G
  MOD_RES (22), (23), (24), (25): Xaa is A or G or is absent

SEQ ID NO: 70089 - protein, 36 aa, Artificial Sequence
  GFR-binding peptide
  MOD_RES (2), (3), (34), (36): Xaa is C or S
PXXVPQDLSPINILYFVGRTPKVYGKIPMVVKSXKX

SEQ ID NO: 70090 - protein, 39 aa, Artificial Sequence; identical to SEQ ID NO: 33106
  GFR-binding peptide
  MOD_RES (3), (4), (36), (38): Xaa is C or S

SEQ ID NO: 70091 - protein, 41 aa, Artificial Sequence; identical to SEQ ID NO: 7739
  GFR-binding peptide
  MOD_RES (4), (5), (38), (40): Xaa is C or S
  MOD_RES (19), (20), (21), (22), (23): Xaa is A or G
  MOD_RES (24), (25), (26), (27): Xaa is A or G or is absent

SEQ ID NO: 70092 - protein, 37 aa, Artificial Sequence; identical to SEQ ID NO: 7742
  GFR-binding peptide
  MOD_RES (1), (34), (36): Xaa is C or S
  MOD_RES (15), (16), (17), (18), (19): Xaa is A or G
  MOD_RES (20), (21), (22), (23): Xaa is A or G or is absent

SEQ ID NO: 70093 - protein, 36 aa, Artificial Sequence; identical to SEQ ID NO: 7745
  GFR-binding peptide
  MOD_RES (2), (3), (34), (36): Xaa is C or S

SEQ ID NO: 70094 - protein, 39 aa, Artificial Sequence; identical to SEQ ID NO: 57991
  GFR-binding peptide
  MOD_RES (5), (6), (38): Xaa is C or S

SEQ ID NO: 70095 - protein, 39 aa, Artificial Sequence; identical to SEQ ID NO: 7749
  GFR-binding peptide
  MOD_RES (4), (5), (38): Xaa is C or S
  MOD_RES (19), (20), (21), (22), (23): Xaa is A or G
  MOD_RES (24), (25), (26), (27): Xaa is A or G or is absent

SEQ ID NO: 70096 - protein, 38 aa, Artificial Sequence; identical to SEQ ID NO: 7751
  GFR-binding peptide
  MOD_RES (5), (6): Xaa is C or S
  MOD_RES (20), (21), (22), (23), (24): Xaa is A or G
  MOD_RES (25), (26), (27), (28): Xaa is A or G or is absent

SEQ ID NO: 70097 - protein, 36 aa, Artificial Sequence; identical to SEQ ID NO: 7752
  GFR-binding peptide
  MOD_RES (2), (3), (36): Xaa is C or S
  MOD_RES (17), (18), (19), (20), (21): Xaa is A or G
  MOD_RES (22), (23), (24), (25): Xaa is A or G or is absent

SEQ ID NO: 70098 - protein, 40 aa, Artificial Sequence; identical to SEQ ID NO: 7754
  GFR-binding peptide
  MOD_RES (3), (4), (38), (40): Xaa is C or S
  MOD_RES (18), (19), (20), (21), (22): Xaa is A or G
  MOD_RES (23), (24), (25), (26): Xaa is A or G or is absent

SEQ ID NO: 70099 - protein, 36 aa, Artificial Sequence
  GFR-binding peptide
  MOD_RES (2), (3), (34), (36): Xaa is C or S
TXXAPVKTEPISMLYLDNGRVLLKFKYEMIVEEXGX

SEQ ID NO: 70100 - protein, 38 aa, Artificial Sequence; identical to SEQ ID NO: 33130
  GFR-binding peptide
  MOD_RES (3), (4), (38): Xaa is C or S
  MOD_RES (18), (19), (20), (21), (22): Xaa is A or G
  MOD_RES (23), (24), (25), (26): Xaa is A or G or is absent

SEQ ID NO: 70101 - protein, 38 aa, Artificial Sequence; identical to SEQ ID NO: 7757
  GFR-binding peptide
  MOD_RES (3), (4), (35), (37): Xaa is C or S

SEQ ID NO: 70102 - protein, 37 aa, Artificial Sequence; identical to SEQ ID NO: 33133
  GFR-binding peptide
  MOD_RES (2), (3), (37): Xaa is C or S
  MOD_RES (17), (18), (19), (20), (21): Xaa is A or G
  MOD_RES (22), (23), (24), (25): Xaa is A or G or is absent

SEQ ID NO: 70103 - protein, 41 aa, Artificial Sequence; identical to SEQ ID NO: 29059
  GFR-binding peptide
  MOD_RES (6), (38), (40): Xaa is C or S

SEQ ID NO: 70104 - protein, 35 aa, Artificial Sequence; identical to SEQ ID NO: 58002
  GFR-binding peptide
  MOD_RES (2), (3), (35): Xaa is C or S

SEQ ID NO: 70105 - protein, 41 aa, Artificial Sequence
  GFR-binding peptide
  MOD_RES (4), (5), (38), (40): Xaa is C or S
  MOD_RES (19), (20), (21), (22), (23): Xaa is A or G
  MOD_RES (24), (25), (26), (27): Xaa is A or G or is absent
PSTXXAPVKTSPISMLYKXXXXXXXXXLKYHYMIVEEXGXL

SEQ ID NO: 70106 - protein, 36 aa, Artificial Sequence; identical to SEQ ID NO: 29063
  GFR-binding peptide
  MOD_RES (34), (36): Xaa is C or S
  MOD_RES (14), (15), (16), (17), (18): Xaa is A or G
  MOD_RES (19), (20), (21), (22): Xaa is A or G or is absent

SEQ ID NO: 70107 - protein, 35 aa, Artificial Sequence
  GFR-binding peptide
  MOD_RES (1), (32), (34): Xaa is C or S
XAPVKTSPISMLYKDNGRVLLLKYHYMIVEEXGXL

SEQ ID NO: 70108 - protein, 32 aa, Artificial Sequence
  GFR-binding peptide
  MOD_RES (14), (15), (16), (17), (18): Xaa is A or G
  MOD_RES (19), (20), (21), (22): Xaa is A or G or is absent
VPTKLSATSILYYXXXXXXXXXLRKHRGMAVS

SEQ ID NO: 70109 - protein, 38 aa, Artificial Sequence; identical to SEQ ID NO: 7764
  GFR-binding peptide
  MOD_RES (4), (5), (36), (38): Xaa is C or S

SEQ ID NO: 70110 - protein, 34 aa, Artificial Sequence
  GFR-binding peptide
  MOD_RES (1), (2), (34): Xaa is C or S
XXVPEKMSATSILYYDENKNVVLRKHRNMTVESX

SEQ ID NO: 70111 - protein, 41 aa, Artificial Sequence; identical to SEQ ID NO: 7765
  GFR-binding peptide
  MOD_RES (6), (7), (38), (40): Xaa is C or S

SEQ ID NO: 70112 - protein, 37 aa, Artificial Sequence; identical to SEQ ID NO: 7766
  GFR-binding peptide
  MOD_RES (34), (36): Xaa is C or S
  MOD_RES (14), (15), (16), (17), (18): Xaa is A or G
  MOD_RES (19), (20), (21), (22): Xaa is A or G or is absent

SEQ ID NO: 70113 - protein, 37 aa, Artificial Sequence; identical to SEQ ID NO: 7769
  GFR-binding peptide
  MOD_RES (4), (5): Xaa is C or S
  MOD_RES (19), (20), (21), (22), (23): Xaa is A or G
  MOD_RES (24), (25), (26), (27): Xaa is A or G or is absent

SEQ ID NO: 70114 - protein, 31 aa, Artificial Sequence
  GFR-binding peptide
  MOD_RES (31), (31): Xaa is C or S
APVKTSPISMLYKDNGRVLLLKYHYMIVEEX

SEQ ID NO: 70115 - protein, 35 aa, Artificial Sequence; identical to SEQ ID NO: 33141
  GFR-binding peptide
  MOD_RES (1), (35): Xaa is C or S
  MOD_RES (15), (16), (17), (18), (19): Xaa is A or G
  MOD_RES (20), (21), (22), (23): Xaa is A or G or is absent

SEQ ID NO: 70116 - protein, 43 aa, Artificial Sequence
  GFR-binding peptide
  MOD_RES (6), (7), (41), (43): Xaa is C or S
  MOD_RES (21), (22), (23), (24), (25): Xaa is A or G
  MOD_RES (26), (27), (28), (29): Xaa is A or G or is absent
GIPEPXXVPEKMSATSILYYXXXXXXXXXLRKHRNMTVESXAX

SEQ ID NO: 70117 - protein, 39 aa, Artificial Sequence; identical to SEQ ID NO: 29068
  GFR-binding peptide
  MOD_RES (3), (4), (37), (39): Xaa is C or S

SEQ ID NO: 70118 - protein, 41 aa, Artificial Sequence; identical to SEQ ID NO: 33145
  GFR-binding peptide
  MOD_RES (4), (5), (39), (41): Xaa is C or S
  MOD_RES (19), (20), (21), (22), (23): Xaa is A or G
  MOD_RES (24), (25), (26), (27): Xaa is A or G or is absent

SEQ ID NO: 70119 - protein, 42 aa, Artificial Sequence; identical to SEQ ID NO: 33147
  GFR-binding peptide
  MOD_RES (6), (7), (39), (41): Xaa is C or S

SEQ ID NO: 70120 - protein, 42 aa, Artificial Sequence; identical to SEQ ID NO: 33148
  GFR-binding peptide
  MOD_RES (7), (41): Xaa is C or S
  MOD_RES (21), (22), (23), (24), (25): Xaa is A or G
  MOD_RES (26), (27), (28), (29): Xaa is A or G or is absent

SEQ ID NO: 70121 - protein, 36 aa, Artificial Sequence; identical to SEQ ID NO: 7771
  GFR-binding peptide
  MOD_RES (4), (5), (36): Xaa is C or S

SEQ ID NO: 70122 - protein, 38 aa, Artificial Sequence
  GFR-binding peptide
  MOD_RES (3), (4), (37): Xaa is C or S
  MOD_RES (18), (19), (20), (21), (22): Xaa is A or G
  MOD_RES (23), (24), (25), (26): Xaa is A or G or is absent
SPXXVPQDLSPINILYFXXXXXXXXXYGKIPMVVKSXK

SEQ ID NO: 70123 - protein, 42 aa, Artificial Sequence; identical to SEQ ID NO: 7772
  GFR-binding peptide
  MOD_RES (6), (7), (40), (42): Xaa is C or S

SEQ ID NO: 70124 - protein, 35 aa, Artificial Sequence; identical to SEQ ID NO: 33149
  GFR-binding peptide
  MOD_RES (1), (33), (35): Xaa is C or S

SEQ ID NO: 70125 - protein, 40 aa, Artificial Sequence
  GFR-binding peptide
  MOD_RES (6), (7): Xaa is C or S
  MOD_RES (21), (22), (23), (24), (25): Xaa is A or G
  MOD_RES (26), (27), (28), (29): Xaa is A or G or is absent
GSAGPXXTPTKMSATSMLYYXXXXXXXXXLRKHRGMVVDR

SEQ ID NO: 70126 - protein, 39 aa, Artificial Sequence
  GFR-binding peptide
  MOD_RES (6), (7): Xaa is C or S
  MOD_RES (21), (22), (23), (24), (25): Xaa is A or G
  MOD_RES (26), (27), (28), (29): Xaa is A or G or is absent
RVPSTXXAPVKTEPISMLYLXXXXXXXXXKFKYEMIVEE

SEQ ID NO: 70127 - protein, 38 aa, Artificial Sequence
  GFR-binding peptide
  MOD_RES (3), (4), (36), (38): Xaa is C or S
EPXXVPEKMNAISILYFDENKNVVLKKYRNMTVESXAX

SEQ ID NO: 70128 - protein, 34 aa, Artificial Sequence; identical to SEQ ID NO: 33159
  GFR-binding peptide
  MOD_RES (34), (34): Xaa is C or S
  MOD_RES (14), (15), (16), (17), (18): Xaa is A or G
  MOD_RES (19), (20), (21), (22): Xaa is A or G or is absent

SEQ ID NO: 70129 - protein, 32 aa, Artificial Sequence; identical to SEQ ID NO: 33161
  GFR-binding peptide
  MOD_RES (32), (32): Xaa is C or S

SEQ ID NO: 70130 - protein, 33 aa, Artificial Sequence; identical to SEQ ID NO: 33162
  GFR-binding peptide
  MOD_RES (32), (32): Xaa is C or S

SEQ ID NO: 70131 - protein, 41 aa, Artificial Sequence; identical to SEQ ID NO: 29077
  GFR-binding peptide
  MOD_RES (3), (4), (38), (40): Xaa is C or S
  MOD_RES (18), (19), (20), (21), (22): Xaa is A or G
  MOD_RES (23), (24), (25), (26): Xaa is A or G or is absent

SEQ ID NO: 70132 - protein, 39 aa, Artificial Sequence; identical to SEQ ID NO: 7779
  GFR-binding peptide
  MOD_RES (6), (7): Xaa is C or S
  MOD_RES (21), (22), (23), (24), (25): Xaa is A or G
  MOD_RES (26), (27), (28), (29): Xaa is A or G or is absent

SEQ ID NO: 70133 - protein, 35 aa, Artificial Sequence
  GFR-binding peptide
  MOD_RES (1), (2), (35): Xaa is C or S
  MOD_RES (16), (17), (18), (19), (20): Xaa is A or G
  MOD_RES (21), (22), (23), (24): Xaa is A or G or is absent
XXVPQALSPINILYFXXXXXXXXXYGKIPMIVRSX

SEQ ID NO: 70134 - protein, 42 aa, Artificial Sequence; identical to SEQ ID NO: 33165
  GFR-binding peptide
  MOD_RES (6), (7), (41): Xaa is C or S
  MOD_RES (21), (22), (23), (24), (25): Xaa is A or G
  MOD_RES (26), (27), (28), (29): Xaa is A or G or is absent

SEQ ID NO: 70135 - protein, 40 aa, Artificial Sequence
  GFR-binding peptide
  MOD_RES (6), (7): Xaa is C or S
  MOD_RES (21), (22), (23), (24), (25): Xaa is A or G
  MOD_RES (26), (27), (28), (29): Xaa is A or G or is absent
GIPEPXXVPEKMNAISILYFXXXXXXXXXLKKYRNMTVES

SEQ ID NO: 70136 - protein, 37 aa, Artificial Sequence; identical to SEQ ID NO: 33170
  GFR-binding peptide
  MOD_RES (34), (36): Xaa is C or S
  MOD_RES (14), (15), (16), (17), (18): Xaa is A or G
  MOD_RES (19), (20), (21), (22): Xaa is A or G or is absent

SEQ ID NO: 70137 - protein, 36 aa, Artificial Sequence; identical to SEQ ID NO: 7786
  GFR-binding peptide
  MOD_RES (1), (2), (36): Xaa is C or S
  MOD_RES (16), (17), (18), (19), (20): Xaa is A or G
  MOD_RES (21), (22), (23), (24): Xaa is A or G or is absent

SEQ ID NO: 70138 - protein, 37 aa, Artificial Sequence
  GFR-binding peptide
  MOD_RES (3), (4), (37): Xaa is C or S
  MOD_RES (18), (19), (20), (21), (22): Xaa is A or G
  MOD_RES (23), (24), (25), (26): Xaa is A or G or is absent
SPXXVSQDLSPINILYFXXXXXXXXXYGKIPMIVKSX

SEQ ID NO: 70139 - protein, 36 aa, Artificial Sequence; identical to SEQ ID NO: 29080
  GFR-binding peptide
  MOD_RES (1), (34), (36): Xaa is C or S

SEQ ID NO: 70140 - protein, 36 aa, Artificial Sequence
  GFR-binding peptide
  MOD_RES (1), (33), (35): Xaa is C or S
XVPEKMNAISILYFDENKNVVLKKYRNMTVESXAXR

SEQ ID NO: 70141 - protein, 44 aa, Artificial Sequence; identical to SEQ ID NO: 33173
  GFR-binding peptide
  MOD_RES (6), (7), (41), (43): Xaa is C or S
  MOD_RES (21), (22), (23), (24), (25): Xaa is A or G
  MOD_RES (26), (27), (28), (29): Xaa is A or G or is absent

SEQ ID NO: 70142 - protein, 36 aa, Artificial Sequence; identical to SEQ ID NO: 29084
  GFR-binding peptide
  MOD_RES (5), (6): Xaa is C or S

SEQ ID NO: 70143 - protein, 39 aa, Artificial Sequence; identical to SEQ ID NO: 29086
  GFR-binding peptide
  MOD_RES (2), (3), (37), (39): Xaa is C or S
  MOD_RES (17), (18), (19), (20), (21): Xaa is A or G
  MOD_RES (22), (23), (24), (25): Xaa is A or G or is absent

SEQ ID NO: 70144 - protein, 32 aa, Artificial Sequence
  GFR-binding peptide
  MOD_RES (1), (1): Xaa is C or S
XTPTKMSPISMLYKNDKQQIILKYHYGMVVDR

SEQ ID NO: 70145 - protein, 34 aa, Artificial Sequence; identical to SEQ ID NO: 7792
  GFR-binding peptide
  MOD_RES (1), (33): Xaa is C or S

SEQ ID NO: 70146 - protein, 32 aa, Artificial Sequence
  GFR-binding peptide
  MOD_RES (1), (1): Xaa is C or S
XVPEKMSPISILYKDENKNVVLKYHYNMTVES

SEQ ID NO: 70147 - protein, 34 aa, Artificial Sequence; identical to SEQ ID NO: 33189
  GFR-binding peptide
  MOD_RES (34), (34): Xaa is C or S
  MOD_RES (14), (15), (16), (17), (18): Xaa is A or G
  MOD_RES (19), (20), (21), (22): Xaa is A or G or is absent

SEQ ID NO: 70148 - protein, 41 aa, Artificial Sequence; identical to SEQ ID NO: 33195
  GFR-binding peptide
  MOD_RES (5), (6), (39), (41): Xaa is C or S
  MOD_RES (20), (21), (22), (23), (24): Xaa is A or G
  MOD_RES (25), (26), (27), (28): Xaa is A or G or is absent

SEQ ID NO: 70149 - protein, 37 aa, Artificial Sequence; identical to SEQ ID NO: 7796
  GFR-binding peptide
  MOD_RES (2), (3), (36): Xaa is C or S
  MOD_RES (17), (18), (19), (20), (21): Xaa is A or G
  MOD_RES (22), (23), (24), (25): Xaa is A or G or is absent

SEQ ID NO: 70150 - protein, 39 aa, Artificial Sequence; identical to SEQ ID NO: 29093
  GFR-binding peptide
  MOD_RES (5), (6), (39): Xaa is C or S
  MOD_RES (20), (21), (22), (23), (24): Xaa is A or G
  MOD_RES (25), (26), (27), (28): Xaa is A or G or is absent

SEQ ID NO: 70151 - protein, 37 aa, Artificial Sequence
  GFR-binding peptide
  MOD_RES (6), (7): Xaa is C or S
GIPEPXXVPEKMSATSILYYDENKNVVLRKHRNMTVE

SEQ ID NO: 70152 - protein, 44 aa, Artificial Sequence; identical to SEQ ID NO: 7797
  GFR-binding peptide
  MOD_RES (6), (7), (41), (43): Xaa is C or S
  MOD_RES (21), (22), (23), (24), (25): Xaa is A or G
  MOD_RES (26), (27), (28), (29): Xaa is A or G or is absent

SEQ ID NO: 70153 - protein, 35 aa, Artificial Sequence
  GFR-binding peptide
  MOD_RES (1), (33), (35): Xaa is C or S
XTPTKMSPISMLYKNDKQQIILKYHYGMVVDRXGX

SEQ ID NO: 70154 - protein, 39 aa, Artificial Sequence
  GFR-binding peptide
  MOD_RES (4), (5), (37), (39): Xaa is C or S
PEPXXVPEKMNAISILYFDENKNVVLKKYRNMTVESXAX

SEQ ID NO: 70155 - protein, 33 aa, Artificial Sequence; identical to SEQ ID NO: 7803
  GFR-binding peptide
  MOD_RES (1), (2), (33): Xaa is C or S

SEQ ID NO: 70156 - protein, 34 aa, Artificial Sequence
  GFR-binding peptide
  MOD_RES (1), (2), (34): Xaa is C or S
XXVPEKMEPISILYLDENKNVVKFKYENMTVESX

SEQ ID NO: 70157 - protein, 33 aa, Artificial Sequence
  GFR-binding peptide
  MOD_RES (2), (3): Xaa is C or S
PXXTPTKMEPISMLYLNDKQQIIKFKYEGMVVD

SEQ ID NO: 70158 - protein, 36 aa, Artificial Sequence
  GFR-binding peptide
  MOD_RES (3), (4): Xaa is C or S
  MOD_RES (18), (19), (20), (21), (22): Xaa is A or G
  MOD_RES (23), (24), (25), (26): Xaa is A or G or is absent
EPXXVPEKMSPINILYFXXXXXXXXXYGKIPNMTVE

SEQ ID NO: 70159 - protein, 42 aa, Artificial Sequence; identical to SEQ ID NO: 7814
  GFR-binding peptide
  MOD_RES (6), (7), (42): Xaa is C or S
  MOD_RES (21), (22), (23), (24), (25): Xaa is A or G
  MOD_RES (26), (27), (28), (29): Xaa is A or G or is absent

SEQ ID NO: 70160 - protein, 40 aa, Artificial Sequence; identical to SEQ ID NO: 7815
  GFR-binding peptide
  MOD_RES (6), (7), (40): Xaa is C or S
  MOD_RES (21), (22), (23), (24), (25): Xaa is A or G
  MOD_RES (26), (27), (28), (29): Xaa is A or G or is absent

SEQ ID NO: 70161 - protein, 39 aa, Artificial Sequence
  GFR-binding peptide
  MOD_RES (1), (2), (36), (38): Xaa is C or S
  MOD_RES (16), (17), (18), (19), (20): Xaa is A or G
  MOD_RES (21), (22), (23), (24): Xaa is A or G or is absent
XXVPEKMSPISILYKXXXXXXXXXLKYHYNMTVESXAXR

SEQ ID NO: 70162 - protein, 37 aa, Artificial Sequence; identical to SEQ ID NO: 7822
  GFR-binding peptide
  MOD_RES (3), (4), (37): Xaa is C or S
  MOD_RES (18), (19), (20), (21), (22): Xaa is A or G
  MOD_RES (23), (24), (25), (26): Xaa is A or G or is absent

SEQ ID NO: 70163 - protein, 35 aa, Artificial Sequence
  GFR-binding peptide
  MOD_RES (1), (34): Xaa is C or S
  MOD_RES (15), (16), (17), (18), (19): Xaa is A or G
  MOD_RES (20), (21), (22), (23): Xaa is A or G or is absent
XVPQALSPINILYFXXXXXXXXXYGKIPMIVRSXK

SEQ ID NO: 70164 - protein, 35 aa, Artificial Sequence; identical to SEQ ID NO: 7828
  GFR-binding peptide
  MOD_RES (2), (3): Xaa is C or S
  MOD_RES (17), (18), (19), (20), (21): Xaa is A or G
  MOD_RES (22), (23), (24), (25): Xaa is A or G or is absent

SEQ ID NO: 70165 - protein, 35 aa, Artificial Sequence; identical to SEQ ID NO: 7830
  GFR-binding peptide
  MOD_RES (3), (4): Xaa is C or S

SEQ ID NO: 70166 - protein, 37 aa, Artificial Sequence
  GFR-binding peptide
  MOD_RES (1), (35), (37): Xaa is C or S
  MOD_RES (15), (16), (17), (18), (19): Xaa is A or G
  MOD_RES (20), (21), (22), (23): Xaa is A or G or is absent
XTPTKMSATSMLYYXXXXXXXXXLRKHRGMVVDRXGX

SEQ ID NO: 70167 - protein, 38 aa, Artificial Sequence; identical to SEQ ID NO: 29120
  GFR-binding peptide
  MOD_RES (5), (5): Xaa is C or S
  MOD_RES (19), (20), (21), (22), (23): Xaa is A or G
  MOD_RES (24), (25), (26), (27): Xaa is A or G or is absent

SEQ ID NO: 70168 - protein, 39 aa, Artificial Sequence; identical to SEQ ID NO: 7832
  GFR-binding peptide
  MOD_RES (4), (5), (39): Xaa is C or S
  MOD_RES (19), (20), (21), (22), (23): Xaa is A or G
  MOD_RES (24), (25), (26), (27): Xaa is A or G or is absent

SEQ ID NO: 70169 - protein, 40 aa, Artificial Sequence
  GFR-binding peptide
  MOD_RES (5), (6), (38), (40): Xaa is C or S
SAGPXXTPTKMSATSMLYYNDKQQIILRKHRGMVVDRXGX

SEQ ID NO: 70170 - protein, 35 aa, Artificial Sequence
  GFR-binding peptide
  MOD_RES (34), (34): Xaa is C or S
  MOD_RES (14), (15), (16), (17), (18): Xaa is A or G
  MOD_RES (19), (20), (21), (22): Xaa is A or G or is absent
VPTRLEPISILYLXXXXXXXXXKFKYEDMVVESXG

SEQ ID NO: 70171 - protein, 34 aa, Artificial Sequence; identical to SEQ ID NO: 33229
  GFR-binding peptide
  MOD_RES (1), (34): Xaa is C or S

SEQ ID NO: 70172 - protein, 33 aa, Artificial Sequence
  GFR-binding peptide
  MOD_RES (1), (33): Xaa is C or S
XVPEKMSATSILYYDENKNVVLRKHRNMTVESX

SEQ ID NO: 70173 - protein, 36 aa, Artificial Sequence; identical to SEQ ID NO: 29127
  GFR-binding peptide
  MOD_RES (4), (5): Xaa is C or S

SEQ ID NO: 70174 - protein, 38 aa, Artificial Sequence; identical to SEQ ID NO: 29129
  GFR-binding peptide
  MOD_RES (3), (4), (35), (37): Xaa is C or S

SEQ ID NO: 70175 - protein, 39 aa, Artificial Sequence; identical to SEQ ID NO: 7836
  GFR-binding peptide
  MOD_RES (3), (4), (37), (39): Xaa is C or S
  MOD_RES (18), (19), (20), (21), (22): Xaa is A or G
  MOD_RES (23), (24), (25), (26): Xaa is A or G or is absent

SEQ ID NO: 70176 - protein, 38 aa, Artificial Sequence; identical to SEQ ID NO: 29130
  GFR-binding peptide
  MOD_RES (2), (3), (37): Xaa is C or S
  MOD_RES (17), (18), (19), (20), (21): Xaa is A or G
  MOD_RES (22), (23), (24), (25): Xaa is A or G or is absent

SEQ ID NO: 70177 - protein, 39 aa, Artificial Sequence; identical to SEQ ID NO: 33230
  GFR-binding peptide
  MOD_RES (6), (7), (39): Xaa is C or S

SEQ ID NO: 70178 - protein, 39 aa, Artificial Sequence; identical to SEQ ID NO: 29131
  GFR-binding peptide
  MOD_RES (5), (37), (39): Xaa is C or S

SEQ ID NO: 70179 - protein, 41 aa, Artificial Sequence; identical to SEQ ID NO: 29133
  GFR-binding peptide
  MOD_RES (5), (6), (40): Xaa is C or S
  MOD_RES (20), (21), (22), (23), (24): Xaa is A or G
  MOD_RES (25), (26), (27), (28): Xaa is A or G or is absent

SEQ ID NO: 70180 - protein, 41 aa, Artificial Sequence; identical to SEQ ID NO: 7838
  GFR-binding peptide
  MOD_RES (6), (7): Xaa is C or S
  MOD_RES (21), (22), (23), (24), (25): Xaa is A or G
  MOD_RES (26), (27), (28), (29): Xaa is A or G or is absent

SEQ ID NO: 70181 - protein, 33 aa, Artificial Sequence
  GFR-binding peptide
  MOD_RES (1), (33): Xaa is C or S
XVPEKMEPISILYLDENKNVVKFKYENMTVESX

SEQ ID NO: 70182 - protein, 41 aa, Artificial Sequence; identical to SEQ ID NO: 33234
  GFR-binding peptide
  MOD_RES (6), (7), (41): Xaa is C or S
  MOD_RES (21), (22), (23), (24), (25): Xaa is A or G
  MOD_RES (26), (27), (28), (29): Xaa is A or G or is absent

SEQ ID NO: 70183 - protein, 38 aa, Artificial Sequence; identical to SEQ ID NO: 7840
  GFR-binding peptide
  MOD_RES (4), (5), (36), (38): Xaa is C or S

SEQ ID NO: 70184 - protein, 37 aa, Artificial Sequence; identical to SEQ ID NO: 7841
  GFR-binding peptide
  MOD_RES (34), (36): Xaa is C or S
  MOD_RES (14), (15), (16), (17), (18): Xaa is A or G
  MOD_RES (19), (20), (21), (22): Xaa is A or G or is absent

SEQ ID NO: 70185 - protein, 33 aa, Artificial Sequence; identical to SEQ ID NO: 7842
  GFR-binding peptide
  MOD_RES (14), (15), (16), (17), (18): Xaa is A or G
  MOD_RES (19), (20), (21), (22): Xaa is A or G or is absent

SEQ ID NO: 70186 - protein, 39 aa, Artificial Sequence; identical to SEQ ID NO: 7848
  GFR-binding peptide
  MOD_RES (6), (38): Xaa is C or S

SEQ ID NO: 70187 - protein, 38 aa, Artificial Sequence; identical to SEQ ID NO: 7850
  GFR-binding peptide
  MOD_RES (2), (3), (35), (37): Xaa is C or S

SEQ ID NO: 70188 - protein, 40 aa, Artificial Sequence; identical to SEQ ID NO: 7852
  GFR-binding peptide
  MOD_RES (4), (5), (40): Xaa is C or S
  MOD_RES (19), (20), (21), (22), (23): Xaa is A or G
  MOD_RES (24), (25), (26), (27): Xaa is A or G or is absent

SEQ ID NO: 70189 - protein, 40 aa, Artificial Sequence; identical to SEQ ID NO: 7854
  GFR-binding peptide
  MOD_RES (6), (7), (38), (40): Xaa is C or S

SEQ ID NO: 70190 - protein, 36 aa, Artificial Sequence
  GFR-binding peptide
  MOD_RES (1), (2), (36): Xaa is C or S
  MOD_RES (16), (17), (18), (19), (20): Xaa is A or G
  MOD_RES (21), (22), (23), (24): Xaa is A or G or is absent
XXTPTKMSATSMLYYXXXXXXXXXLRKHRGMVVDRX

SEQ ID NO: 70191 - protein, 38 aa, Artificial Sequence; identical to SEQ ID NO: 7857
  GFR-binding peptide
  MOD_RES (6), (7), (38): Xaa is C or S

SEQ ID NO: 70192 - protein, 40 aa, Artificial Sequence; identical to SEQ ID NO: 33244
  GFR-binding peptide
  MOD_RES (5), (6), (40): Xaa is C or S
  MOD_RES (20), (21), (22), (23), (24): Xaa is A or G
  MOD_RES (25), (26), (27), (28): Xaa is A or G or is absent

SEQ ID NO: 70193 - protein, 37 aa, Artificial Sequence; identical to SEQ ID NO: 7858
  GFR-binding peptide
  MOD_RES (1), (36): Xaa is C or S
  MOD_RES (15), (16), (17), (18), (19): Xaa is A or G
  MOD_RES (20), (21), (22), (23): Xaa is A or G or is absent

SEQ ID NO: 70194 - protein, 39 aa, Artificial Sequence; identical to SEQ ID NO: 7860
  GFR-binding peptide
  MOD_RES (5), (6), (37), (39): Xaa is C or S

SEQ ID NO: 70195 - protein, 38 aa, Artificial Sequence; identical to SEQ ID NO: 29147
  GFR-binding peptide
  MOD_RES (1), (2), (36), (38): Xaa is C or S
  MOD_RES (16), (17), (18), (19), (20): Xaa is A or G
  MOD_RES (21), (22), (23), (24): Xaa is A or G or is absent

SEQ ID NO: 70196 - protein, 36 aa, Artificial Sequence; identical to SEQ ID NO: 29148
  GFR-binding peptide
  MOD_RES (1), (2), (36): Xaa is C or S
  MOD_RES (16), (17), (18), (19), (20): Xaa is A or G
  MOD_RES (21), (22), (23), (24): Xaa is A or G or is absent

SEQ ID NO: 70197 - protein, 39 aa, Artificial Sequence; identical to SEQ ID NO: 33247
  GFR-binding peptide
  MOD_RES (6), (7), (39): Xaa is C or S

SEQ ID NO: 70198 - protein, 41 aa, Artificial Sequence; identical to SEQ ID NO: 7866
  GFR-binding peptide
  MOD_RES (5), (6), (40): Xaa is C or S
  MOD_RES (20), (21), (22), (23), (24): Xaa is A or G
  MOD_RES (25), (26), (27), (28): Xaa is A or G or is absent

SEQ ID NO: 70199 - protein, 38 aa, Artificial Sequence; identical to SEQ ID NO: 7867
  GFR-binding peptide
  MOD_RES (4), (5), (36), (38): Xaa is C or S

SEQ ID NO: 70200 - protein, 37 aa, Artificial Sequence; identical to SEQ ID NO: 33250
  GFR-binding peptide
  MOD_RES (1), (36): Xaa is C or S
  MOD_RES (15), (16), (17), (18), (19): Xaa is A or G
  MOD_RES (20), (21), (22), (23): Xaa is A or G or is absent

SEQ ID NO: 70201 - protein, 37 aa, Artificial Sequence; identical to SEQ ID NO: 7872
  GFR-binding peptide
  MOD_RES (5), (5): Xaa is C or S
  MOD_RES (19), (20), (21), (22), (23): Xaa is A or G
  MOD_RES (24), (25), (26), (27): Xaa is A or G or is absent

SEQ ID NO: 70202 - protein, 42 aa, Artificial Sequence; identical to SEQ ID NO: 33252
  GFR-binding peptide
  MOD_RES (5), (6), (40), (42): Xaa is C or S
  MOD_RES (20), (21), (22), (23), (24): Xaa is A or G
  MOD_RES (25), (26), (27), (28): Xaa is A or G or is absent

SEQ ID NO: 70203 - protein, 37 aa, Artificial Sequence; identical to SEQ ID NO: 7873
  GFR-binding peptide
  MOD_RES (5), (37): Xaa is C or S

SEQ ID NO: 70204 - protein, 36 aa, Artificial Sequence; identical to SEQ ID NO: 33253
  GFR-binding peptide
  MOD_RES (3), (4): Xaa is C or S
  MOD_RES (18), (19), (20), (21), (22): Xaa is A or G
  MOD_RES (23), (24), (25), (26): Xaa is A or G or is absent

SEQ ID NO: 70205 - protein, 35 aa, Artificial Sequence
  GFR-binding peptide
  MOD_RES (33), (35): Xaa is C or S
  MOD_RES (14), (15), (16), (17), (18): Xaa is A or G
  MOD_RES (19), (20), (21), (22): Xaa is A or G or is absent
APVKTSPISMLYKXXXXXXXXXLKYHYMIVEEXGX

SEQ ID NO: 70206 - protein, 40 aa, Artificial Sequence; identical to SEQ ID NO: 33261
  GFR-binding peptide
  MOD_RES (3), (4), (39): Xaa is C or S
  MOD_RES (18), (19), (20), (21), (22): Xaa is A or G
  MOD_RES (23), (24), (25), (26): Xaa is A or G or is absent

SEQ ID NO: 70207 - protein, 35 aa, Artificial Sequence; identical to SEQ ID NO: 7880
  GFR-binding peptide
  MOD_RES (3), (4), (35): Xaa is C or S

SEQ ID NO: 70208 - protein, 38 aa, Artificial Sequence; identical to SEQ ID NO: 7883
  GFR-binding peptide
  MOD_RES (4), (5): Xaa is C or S
  MOD_RES (19), (20), (21), (22), (23): Xaa is A or G
  MOD_RES (24), (25), (26), (27): Xaa is A or G or is absent

SEQ ID NO: 70209 - protein, 37 aa, Artificial Sequence; identical to SEQ ID NO: 7884
  GFR-binding peptide
  MOD_RES (5), (6), (37): Xaa is C or S

SEQ ID NO: 70210 - protein, 40 aa, Artificial Sequence; identical to SEQ ID NO: 7887
  GFR-binding peptide
  MOD_RES (3), (4), (37), (39): Xaa is C or S
  MOD_RES (18), (19), (20), (21), (22): Xaa is A or G
  MOD_RES (23), (24), (25), (26): Xaa is A or G or is absent

SEQ ID NO: 70211 - protein, 37 aa, Artificial Sequence; identical to SEQ ID NO: 7888
  GFR-binding peptide
  MOD_RES (4), (5), (37): Xaa is C or S

SEQ ID NO: 70212 - protein, 38 aa, Artificial Sequence; identical to SEQ ID NO: 33268
  GFR-binding peptide
  MOD_RES (1), (2), (36), (38): Xaa is C or S
  MOD_RES (16), (17), (18), (19), (20): Xaa is A or G
  MOD_RES (21), (22), (23), (24): Xaa is A or G or is absent

SEQ ID NO: 70213 - protein, 31 aa, Artificial Sequence; identical to SEQ ID NO: 29169
  GFR-binding peptide
  MOD_RES (1), (1): Xaa is C or S

SEQ ID NO: 70214 - protein, 37 aa, Artificial Sequence; identical to SEQ ID NO: 29170
  GFR-binding peptide
  MOD_RES (2), (3), (37): Xaa is C or S
  MOD_RES (17), (18), (19), (20), (21): Xaa is A or G
  MOD_RES (22), (23), (24), (25): Xaa is A or G or is absent

SEQ ID NO: 70215 - protein, 40 aa, Artificial Sequence; identical to SEQ ID NO: 7894
  GFR-binding peptide
  MOD_RES (3), (4), (39): Xaa is C or S
  MOD_RES (18), (19), (20), (21), (22): Xaa is A or G
  MOD_RES (23), (24), (25), (26): Xaa is A or G or is absent

SEQ ID NO: 70216 - protein, 40 aa, Artificial Sequence; identical to SEQ ID NO: 33272
  GFR-binding peptide
  MOD_RES (4), (5), (37), (39): Xaa is C or S

SEQ ID NO: 70217 - protein, 38 aa, Artificial Sequence; identical to SEQ ID NO: 7896
  GFR-binding peptide
  MOD_RES (4), (5), (36), (38): Xaa is C or S

SEQ ID NO: 70218 - protein, 36 aa, Artificial Sequence; identical to SEQ ID NO: 29173
  GFR-binding peptide
  MOD_RES (1), (34), (36): Xaa is C or S
  MOD_RES (15), (16), (17), (18), (19): Xaa is A or G
  MOD_RES (20), (21), (22), (23): Xaa is A or G or is absent

SEQ ID NO: 70219 - protein, 38 aa, Artificial Sequence; identical to SEQ ID NO: 7900
  GFR-binding peptide
  MOD_RES (4), (5): Xaa is C or S
  MOD_RES (19), (20), (21), (22), (23): Xaa is A or G
  MOD_RES (24), (25), (26), (27): Xaa is A or G or is absent

SEQ ID NO: 70220 - protein, 36 aa, Artificial Sequence
  GFR-binding peptide
  MOD_RES (5), (6): Xaa is C or S
SAGPXXTPTKMSATSMLYYNDKQQIILRKHRGMVVD

SEQ ID NO: 70221 - protein, 37 aa, Artificial Sequence
  GFR-binding peptide
  MOD_RES (1), (2), (36): Xaa is C or S
  MOD_RES (16), (17), (18), (19), (20): Xaa is A or G
  MOD_RES (21), (22), (23), (24): Xaa is A or G or is absent
XXVPARLSATSILYYXXXXXXXXXLRKHRDMVVEAXG

SEQ ID NO: 70222 - protein, 41 aa, Artificial Sequence
  GFR-binding peptide
  MOD_RES (6), (7), (41): Xaa is C or S
  MOD_RES (21), (22), (23), (24), (25): Xaa is A or G
  MOD_RES (26), (27), (28), (29): Xaa is A or G or is absent
GIPEPXXVPEKMSPINILYFXXXXXXXXXYGKIPNMTVESX

SEQ ID NO: 70223 - protein, 32 aa, Artificial Sequence; identical to SEQ ID NO: 29181
  GFR-binding peptide
  MOD_RES (1), (2): Xaa is C or S

SEQ ID NO: 70224 - protein, 33 aa, Artificial Sequence
  GFR-binding peptide
  MOD_RES (1), (1): Xaa is C or S
  MOD_RES (15), (16), (17), (18), (19): Xaa is A or G
  MOD_RES (20), (21), (22), (23): Xaa is A or G or is absent
XVPARLSATSILYYXXXXXXXXXLRKHRDMVVE

SEQ ID NO: 70225 - protein, 34 aa, Artificial Sequence; identical to SEQ ID NO: 7906
  GFR-binding peptide
  MOD_RES (33), (33): Xaa is C or S
  MOD_RES (14), (15), (16), (17), (18): Xaa is A or G
  MOD_RES (19), (20), (21), (22): Xaa is A or G or is absent

SEQ ID NO: 70226 - protein, 37 aa, Artificial Sequence; identical to SEQ ID NO: 29186
  GFR-binding peptide
  MOD_RES (4), (5), (37): Xaa is C or S

SEQ ID NO: 70227 - protein, 34 aa, Artificial Sequence; identical to SEQ ID NO: 29187
  GFR-binding peptide
  MOD_RES (1), (33): Xaa is C or S

SEQ ID NO: 70228 - protein, 34 aa, Artificial Sequence; identical to SEQ ID NO: 29188
  GFR-binding peptide
  MOD_RES (1), (2): Xaa is C or S
  MOD_RES (16), (17), (18), (19), (20): Xaa is A or G
  MOD_RES (21), (22), (23), (24): Xaa is A or G or is absent

SEQ ID NO: 70229 - protein, 40 aa, Artificial Sequence; identical to SEQ ID NO: 33284
  GFR-binding peptide
  MOD_RES (4), (5), (39): Xaa is C or S
  MOD_RES (19), (20), (21), (22), (23): Xaa is A or G
  MOD_RES (24), (25), (26), (27): Xaa is A or G or is absent

SEQ ID NO: 70230 - protein, 36 aa, Artificial Sequence; identical to SEQ ID NO: 29189
  GFR-binding peptide
  MOD_RES (1), (2), (34), (36): Xaa is C or S

SEQ ID NO: 70231 - protein, 38 aa, Artificial Sequence; identical to SEQ ID NO: 33285
  GFR-binding peptide
  MOD_RES (5), (6): Xaa is C or S
  MOD_RES (20), (21), (22), (23), (24): Xaa is A or G
  MOD_RES (25), (26), (27), (28): Xaa is A or G or is absent

SEQ ID NO: 70232 - protein, 36 aa, Artificial Sequence; identical to SEQ ID NO: 29190
  GFR-binding peptide
  MOD_RES (3), (4), (36): Xaa is C or S

SEQ ID NO: 70233 - protein, 39 aa, Artificial Sequence
  GFR-binding peptide
  MOD_RES (1), (2), (36), (38): Xaa is C or S
  MOD_RES (16), (17), (18), (19), (20): Xaa is A or G
  MOD_RES (21), (22), (23), (24): Xaa is A or G or is absent
XXVPTRLSPISILYKXXXXXXXXXLKYHYDMVVESXGXR

SEQ ID NO: 70234 - protein, 43 aa, Artificial Sequence; identical to SEQ ID NO: 33288
  GFR-binding peptide
  MOD_RES (5), (6), (40), (42): Xaa is C or S
  MOD_RES (20), (21), (22), (23), (24): Xaa is A or G
  MOD_RES (25), (26), (27), (28): Xaa is A or G or is absent

SEQ ID NO: 70235 - protein, 36 aa, Artificial Sequence; identical to SEQ ID NO: 29193
  GFR-binding peptide
  MOD_RES (1), (2), (34), (36): Xaa is C or S

SEQ ID NO: 70236 - protein, 34 aa, Artificial Sequence; identical to SEQ ID NO: 33289
  GFR-binding peptide
  MOD_RES (1), (2): Xaa is C or S
  MOD_RES (16), (17), (18), (19), (20): Xaa is A or G
  MOD_RES (21), (22), (23), (24): Xaa is A or G or is absent

SEQ ID NO: 70237 - protein, 40 aa, Artificial Sequence
  GFR-binding peptide
  MOD_RES (4), (5), (39): Xaa is C or S
  MOD_RES (19), (20), (21), (22), (23): Xaa is A or G
  MOD_RES (24), (25), (26), (27): Xaa is A or G or is absent
PPTXXVPTRLEPISILYLXXXXXXXXXKFKYEDMVVESXG

SEQ ID NO: 70238 - protein, 40 aa, Artificial Sequence; identical to SEQ ID NO: 7913
  GFR-binding peptide
  MOD_RES (6), (7), (39): Xaa is C or S

SEQ ID NO: 70239 - protein, 35 aa, Artificial Sequence; identical to SEQ ID NO: 7915
  GFR-binding peptide
  MOD_RES (4), (5): Xaa is C or S

SEQ ID NO: 70240 - protein, 37 aa, Artificial Sequence
  GFR-binding peptide
  MOD_RES (5), (6): Xaa is C or S
SAGPXXTPTKMSPISMLYKNDKQQIILKYHYGMVVDR

SEQ ID NO: 70241 - protein, 38 aa, Artificial Sequence; identical to SEQ ID NO: 33298
  GFR-binding peptide
  MOD_RES (1), (2), (36), (38): Xaa is C or S
  MOD_RES (16), (17), (18), (19), (20): Xaa is A or G
  MOD_RES (21), (22), (23), (24): Xaa is A or G or is absent

SEQ ID NO: 70242 - protein, 41 aa, Artificial Sequence; identical to SEQ ID NO: 29199
  GFR-binding peptide
  MOD_RES (6), (7), (39), (41): Xaa is C or S

SEQ ID NO: 70243 - protein, 35 aa, Artificial Sequence; identical to SEQ ID NO: 7923
  GFR-binding peptide
  MOD_RES (3), (4): Xaa is C or S

SEQ ID NO: 70244 - protein, 37 aa, Artificial Sequence; identical to SEQ ID NO: 33301
  GFR-binding peptide
  MOD_RES (6), (7): Xaa is C or S

SEQ ID NO: 70245 - protein, 35 aa, Artificial Sequence; identical to SEQ ID NO: 33302
  GFR-binding peptide
  MOD_RES (1), (35): Xaa is C or S
  MOD_RES (15), (16), (17), (18), (19): Xaa is A or G
  MOD_RES (20), (21), (22), (23): Xaa is A or G or is absent

SEQ ID NO: 70246 - protein, 40 aa, Artificial Sequence
  GFR-binding peptide
  MOD_RES (6), (7), (39): Xaa is C or S
STPPTXXVPTRLEPISILYLDSANNVVKFKYEDMVVESXG

SEQ ID NO: 70247 - protein, 42 aa, Artificial Sequence; identical to SEQ ID NO: 33303
  GFR-binding peptide
  MOD_RES (4), (5), (39), (41): Xaa is C or S
  MOD_RES (19), (20), (21), (22), (23): Xaa is A or G
  MOD_RES (24), (25), (26), (27): Xaa is A or G or is absent

SEQ ID NO: 70248 - protein, 34 aa, Artificial Sequence
  GFR-binding peptide
  MOD_RES (32), (34): Xaa is C or S
VPARLSATSILYYDAANNVVLRKHRDMVVEAXGX

SEQ ID NO: 70249 - protein, 37 aa, Artificial Sequence; identical to SEQ ID NO: 7927
  GFR-binding peptide
  MOD_RES (2), (3), (37): Xaa is C or S
  MOD_RES (17), (18), (19), (20), (21): Xaa is A or G
  MOD_RES (22), (23), (24), (25): Xaa is A or G or is absent

SEQ ID NO: 70250 - protein, 43 aa, Artificial Sequence; identical to SEQ ID NO: 7929
  GFR-binding peptide
  MOD_RES (5), (6), (40), (42): Xaa is C or S
  MOD_RES (20), (21), (22), (23), (24): Xaa is A or G
  MOD_RES (25), (26), (27), (28): Xaa is A or G or is absent

SEQ ID NO: 70251 - protein, 41 aa, Artificial Sequence; identical to SEQ ID NO: 7930
  GFR-binding peptide
  MOD_RES (6), (7), (41): Xaa is C or S
  MOD_RES (21), (22), (23), (24), (25): Xaa is A or G
  MOD_RES (26), (27), (28), (29): Xaa is A or G or is absent

SEQ ID NO: 70252 - protein, 39 aa, Artificial Sequence; identical to SEQ ID NO: 7931
  GFR-binding peptide
  MOD_RES (5), (6), (39): Xaa is C or S
  MOD_RES (20), (21), (22), (23), (24): Xaa is A or G
  MOD_RES (25), (26), (27), (28): Xaa is A or G or is absent

SEQ ID NO: 70253 - protein, 40 aa, Artificial Sequence
  GFR-binding peptide
  MOD_RES (3), (4), (38), (40): Xaa is C or S
  MOD_RES (18), (19), (20), (21), (22): Xaa is A or G
  MOD_RES (23), (24), (25), (26): Xaa is A or G or is absent
EPXXVPEKMSPINILYFXXXXXXXXXYGKIPNMTVESXAX

SEQ ID NO: 70254 - protein, 38 aa, Artificial Sequence; identical to SEQ ID NO: 33311
  GFR-binding peptide
  MOD_RES (4), (5), (38): Xaa is C or S

SEQ ID NO: 70255 - protein, 38 aa, Artificial Sequence; identical to SEQ ID NO: 7934
  GFR-binding peptide
  MOD_RES (6), (7), (38): Xaa is C or S

SEQ ID NO: 70256 - protein, 33 aa, Artificial Sequence; identical to SEQ ID NO: 29209
  GFR-binding peptide
  MOD_RES (1), (2): Xaa is C or S

SEQ ID NO: 70257 - protein, 44 aa, Artificial Sequence; identical to SEQ ID NO: 33314
  GFR-binding peptide
  MOD_RES (5), (6), (41), (43): Xaa is C or S
  MOD_RES (20), (21), (22), (23), (24): Xaa is A or G
  MOD_RES (25), (26), (27), (28): Xaa is A or G or is absent

SEQ ID NO: 70258 - protein, 41 aa, Artificial Sequence; identical to SEQ ID NO: 29210
  GFR-binding peptide
  MOD_RES (6), (7), (41): Xaa is C or S
  MOD_RES (21), (22), (23), (24), (25): Xaa is A or G
  MOD_RES (26), (27), (28), (29): Xaa is A or G or is absent

SEQ ID NO: 70259 - protein, 41 aa, Artificial Sequence
  GFR-binding peptide
  MOD_RES (6), (7), (38), (40): Xaa is C or S
RVPSTXXAPVKTEPISMLYLDNGRVLLKFKYEMIVEEXGXL

SEQ ID NO: 70260 - protein, 34 aa, Artificial Sequence; identical to SEQ ID NO: 7937
  GFR-binding peptide
  MOD_RES (2), (3): Xaa is C or S

SEQ ID NO: 70261 - protein, 35 aa, Artificial Sequence; identical to SEQ ID NO: 33315
  GFR-binding peptide
  MOD_RES (1), (33), (35): Xaa is C or S

SEQ ID NO: 70262 - protein, 36 aa, Artificial Sequence; identical to SEQ ID NO: 7939
  GFR-binding peptide
  MOD_RES (5), (6): Xaa is C or S

SEQ ID NO: 70263 - protein, 40 aa, Artificial Sequence
  GFR-binding peptide
  MOD_RES (6), (7), (39): Xaa is C or S
HVPKPXXAPTKLSATSVLYYDDSSNVILRKHRNMVVRSXG

SEQ ID NO: 70264 - protein, 41 aa, Artificial Sequence; identical to SEQ ID NO: 7941
  GFR-binding peptide
  MOD_RES (4), (5), (39), (41): Xaa is C or S
  MOD_RES (19), (20), (21), (22), (23): Xaa is A or G
  MOD_RES (24), (25), (26), (27): Xaa is A or G or is absent

SEQ ID NO: 70265 - protein, 42 aa, Artificial Sequence
  GFR-binding peptide
  MOD_RES (5), (6), (40), (42): Xaa is C or S
  MOD_RES (20), (21), (22), (23), (24): Xaa is A or G
  MOD_RES (25), (26), (27), (28): Xaa is A or G or is absent
SAGPXXTPTKMSPISMLYKXXXXXXXXXLKYHYGMVVDRXGX

SEQ ID NO: 70266 - protein, 38 aa, Artificial Sequence; identical to SEQ ID NO: 7944
  GFR-binding peptide
  MOD_RES (4), (36), (38): Xaa is C or S

SEQ ID NO: 70267 - protein, 38 aa, Artificial Sequence; identical to SEQ ID NO: 29220
  GFR-binding peptide
  MOD_RES (4), (5), (38): Xaa is C or S
  MOD_RES (19), (20), (21), (22), (23): Xaa is A or G
  MOD_RES (24), (25), (26), (27): Xaa is A or G or is absent

SEQ ID NO: 70268 - protein, 35 aa, Artificial Sequence
  GFR-binding peptide
  MOD_RES (4), (5): Xaa is C or S
PASXXVPARLSATSILYYDAANNVVLRKHRDMVVE

SEQ ID NO: 70269 - protein, 41 aa, Artificial Sequence; identical to SEQ ID NO: 33327
  GFR-binding peptide
  MOD_RES (4), (5), (38), (40): Xaa is C or S
  MOD_RES (19), (20), (21), (22), (23): Xaa is A or G
  MOD_RES (24), (25), (26), (27): Xaa is A or G or is absent

SEQ ID NO: 70270 - protein, 41 aa, Artificial Sequence; identical to SEQ ID NO: 7948
  GFR-binding peptide
  MOD_RES (6), (7), (38), (40): Xaa is C or S

SEQ ID NO: 70271 - protein, 33 aa, Artificial Sequence
  GFR-binding peptide
  MOD_RES (14), (15), (16), (17), (18): Xaa is A or G
  MOD_RES (19), (20), (21), (22): Xaa is A or G or is absent
TPTKMEPISMLYLXXXXXXXXXKFKYEGMVVDR

SEQ ID NO: 70272 - protein, 38 aa, Artificial Sequence; identical to SEQ ID NO: 7950
  GFR-binding peptide
  MOD_RES (5), (6): Xaa is C or S

SEQ ID NO: 70273 - protein, 44 aa, Artificial Sequence; identical to SEQ ID NO: 29228
  GFR-binding peptide
  MOD_RES (6), (7), (41), (43): Xaa is C or S
  MOD_RES (21), (22), (23), (24), (25): Xaa is A or G
  MOD_RES (26), (27), (28), (29): Xaa is A or G or is absent

SEQ ID NO: 70274 - protein, 37 aa, Artificial Sequence; identical to SEQ ID NO: 29229
  GFR-binding peptide
  MOD_RES (2), (3), (34), (36): Xaa is C or S

SEQ ID NO: 70275 - protein, 36 aa, Artificial Sequence; identical to SEQ ID NO: 29230
  GFR-binding peptide
  MOD_RES (4), (5): Xaa is C or S

SEQ ID NO: 70276 - protein, 39 aa, Artificial Sequence; identical to SEQ ID NO: 33334
  GFR-binding peptide
  MOD_RES (3), (4), (37), (39): Xaa is C or S
  MOD_RES (18), (19), (20), (21), (22): Xaa is A or G
  MOD_RES (23), (24), (25), (26): Xaa is A or G or is absent

SEQ ID NO: 70277 - protein, 35 aa, Artificial Sequence; identical to SEQ ID NO: 7953
  GFR-binding peptide
  MOD_RES (33), (35): Xaa is C or S
  MOD_RES (14), (15), (16), (17), (18): Xaa is A or G
  MOD_RES (19), (20), (21), (22): Xaa is A or G or is absent

SEQ ID NO: 70278 - protein, 38 aa, Artificial Sequence; identical to SEQ ID NO: 7954
  GFR-binding peptide
  MOD_RES (2), (3), (37): Xaa is C or S
  MOD_RES (17), (18), (19), (20), (21): Xaa is A or G
  MOD_RES (22), (23), (24), (25): Xaa is A or G or is absent

SEQ ID NO: 70279 - protein, 38 aa, Artificial Sequence
  GFR-binding peptide
  MOD_RES (4), (5), (36), (38): Xaa is C or S
AAPXXVPQALSPINILYFVGRKPKVYGKIPMIVRSXKX

SEQ ID NO: 70280 - protein, 36 aa, Artificial Sequence; identical to SEQ ID NO: 7955
  GFR-binding peptide
  MOD_RES (1), (2): Xaa is C or S
  MOD_RES (16), (17), (18), (19), (20): Xaa is A or G
  MOD_RES (21), (22), (23), (24): Xaa is A or G or is absent

SEQ ID NO: 70281 - protein, 36 aa, Artificial Sequence; identical to SEQ ID NO: 33337
  GFR-binding peptide
  MOD_RES (3), (4): Xaa is C or S
  MOD_RES (18), (19), (20), (21), (22): Xaa is A or G
  MOD_RES (23), (24), (25), (26): Xaa is A or G or is absent

SEQ ID NO: 70282 - protein, 32 aa, Artificial Sequence; identical to SEQ ID NO: 29237
  GFR-binding peptide
  MOD_RES (1), (32): Xaa is C or S

SEQ ID NO: 70283 - protein, 41 aa, Artificial Sequence
  GFR-binding peptide
  MOD_RES (4), (5), (39), (41): Xaa is C or S
  MOD_RES (19), (20), (21), (22), (23): Xaa is A or G
  MOD_RES (24), (25), (26), (27): Xaa is A or G or is absent
PEPXXVPEKMNAISILYFXXXXXXXXXLKKYRNMTVESXAX

SEQ ID NO: 70284 - protein, 33 aa, Artificial Sequence; identical to SEQ ID NO: 7958
  GFR-binding peptide
  MOD_RES (1), (1): Xaa is C or S
  MOD_RES (15), (16), (17), (18), (19): Xaa is A or G
  MOD_RES (20), (21), (22), (23): Xaa is A or G or is absent

SEQ ID NO: 70285 - protein, 35 aa, Artificial Sequence
  GFR-binding peptide
  MOD_RES (34), (34): Xaa is C or S
  MOD_RES (14), (15), (16), (17), (18): Xaa is A or G
  MOD_RES (19), (20), (21), (22): Xaa is A or G or is absent
VPEKMEPISILYLXXXXXXXXXKFKYENMTVESXA

SEQ ID NO: 70286 - protein, 33 aa, Artificial Sequence; identical to SEQ ID NO: 29241
  GFR-binding peptide
  MOD_RES (1), (32): Xaa is C or S

SEQ ID NO: 70287 - protein, 36 aa, Artificial Sequence; identical to SEQ ID NO: 7960
  GFR-binding peptide
  MOD_RES (1), (2), (35): Xaa is C or S
  MOD_RES (16), (17), (18), (19), (20): Xaa is A or G
  MOD_RES (21), (22), (23), (24): Xaa is A or G or is absent

SEQ ID NO: 70288 - protein, 40 aa, Artificial Sequence
  GFR-binding peptide
  MOD_RES (6), (7), (39): Xaa is C or S
STPPTXXVPTRLSATSILYYDSANNVVLRKHRDMVVESXG

SEQ ID NO: 70289 - protein, 33 aa, Artificial Sequence
  GFR-binding peptide
  MOD_RES (1), (1): Xaa is C or S
  MOD_RES (15), (16), (17), (18), (19): Xaa is A or G
  MOD_RES (20), (21), (22), (23): Xaa is A or G or is absent
XTPTKMEPISMLYLXXXXXXXXXKFKYEGMVVD

SEQ ID NO: 70290 - protein, 32 aa, Artificial Sequence; identical to SEQ ID NO: 7966
  GFR-binding peptide
  MOD_RES (1), (32): Xaa is C or S

SEQ ID NO: 70291 - protein, 31 aa, Artificial Sequence; identical to SEQ ID NO: 7967
  GFR-binding peptide
  MOD_RES (31), (31): Xaa is C or S

SEQ ID NO: 70292 - protein, 36 aa, Artificial Sequence; identical to SEQ ID NO: 29250
  GFR-binding peptide
  MOD_RES (34), (36): Xaa is C or S
  MOD_RES (14), (15), (16), (17), (18): Xaa is A or G
  MOD_RES (19), (20), (21), (22): Xaa is A or G or is absent

SEQ ID NO: 70293 - protein, 40 aa, Artificial Sequence; identical to SEQ ID NO: 7972
  GFR-binding peptide
  MOD_RES (6), (7), (38), (40): Xaa is C or S

SEQ ID NO: 70294 - protein, 39 aa, Artificial Sequence; identical to SEQ ID NO: 32301
  GFR-binding peptide
  MOD_RES (6), (7), (39): Xaa is C or S

SEQ ID NO: 70295 - protein, 37 aa, Artificial Sequence; identical to SEQ ID NO: 29256
  GFR-binding peptide
  MOD_RES (34), (36): Xaa is C or S
  MOD_RES (14), (15), (16), (17), (18): Xaa is A or G
  MOD_RES (19), (20), (21), (22): Xaa is A or G or is absent

SEQ ID NO: 70296 - protein, 41 aa, Artificial Sequence
  GFR-binding peptide
  MOD_RES (4), (5), (38), (40): Xaa is C or S
  MOD_RES (19), (20), (21), (22), (23): Xaa is A or G
  MOD_RES (24), (25), (26), (27): Xaa is A or G or is absent
PSTXXAPVKTSATSMLYYXXXXXXXXXLRKHRMIVEEXGXL

SEQ ID NO: 70297 - protein, 38 aa, Artificial Sequence; identical to SEQ ID NO: 29257
  GFR-binding peptide
  MOD_RES (1), (35), (37): Xaa is C or S
  MOD_RES (15), (16), (17), (18), (19): Xaa is A or G
  MOD_RES (20), (21), (22), (23): Xaa is A or G or is absent

SEQ ID NO: 70298 - protein, 39 aa, Artificial Sequence; identical to SEQ ID NO: 29260
  GFR-binding peptide
  MOD_RES (5), (6), (39): Xaa is C or S
  MOD_RES (20), (21), (22), (23), (24): Xaa is A or G
  MOD_RES (25), (26), (27), (28): Xaa is A or G or is absent

SEQ ID NO: 70299 - protein, 34 aa, Artificial Sequence
  GFR-binding peptide
  MOD_RES (32), (34): Xaa is C or S
VPEKMSPINILYFDENKNVVYGKIPNMTVESXAX

SEQ ID NO: 70300 - protein, 37 aa, Artificial Sequence; identical to SEQ ID NO: 32316
  GFR-binding peptide
  MOD_RES (3), (4): Xaa is C or S
  MOD_RES (18), (19), (20), (21), (22): Xaa is A or G
  MOD_RES (23), (24), (25), (26): Xaa is A or G or is absent

SEQ ID NO: 70301 - protein, 34 aa, Artificial Sequence
  GFR-binding peptide
  MOD_RES (1), (2): Xaa is C or S
  MOD_RES (16), (17), (18), (19), (20): Xaa is A or G
  MOD_RES (21), (22), (23), (24): Xaa is A or G or is absent
XXVPEKMSPISILYKXXXXXXXXXLKYHYNMTVE

SEQ ID NO: 70302 - protein, 36 aa, Artificial Sequence; identical to SEQ ID NO: 7978
  GFR-binding peptide
  MOD_RES (1), (33), (35): Xaa is C or S

SEQ ID NO: 70303 - protein, 39 aa, Artificial Sequence; identical to SEQ ID NO: 7980
  GFR-binding peptide
  MOD_RES (3), (37), (39): Xaa is C or S
  MOD_RES (17), (18), (19), (20), (21): Xaa is A or G
  MOD_RES (22), (23), (24), (25): Xaa is A or G or is absent

SEQ ID NO: 70304 - protein, 42 aa, Artificial Sequence
  GFR-binding peptide
  MOD_RES (4), (5), (39), (41): Xaa is C or S
  MOD_RES (19), (20), (21), (22), (23): Xaa is A or G
  MOD_RES (24), (25), (26), (27): Xaa is A or G or is absent
PPTXXVPTRLSATSILYYXXXXXXXXXLRKHRDMVVESXGXR

SEQ ID NO: 70305 - protein, 39 aa, Artificial Sequence; identical to SEQ ID NO: 32322
  GFR-binding peptide
  MOD_RES (1), (2), (36), (38): Xaa is C or S
  MOD_RES (16), (17), (18), (19), (20): Xaa is A or G
  MOD_RES (21), (22), (23), (24): Xaa is A or G or is absent

SEQ ID NO: 70306 - protein, 38 aa, Artificial Sequence
  GFR-binding peptide
  MOD_RES (6), (7): Xaa is C or S
STPPTXXVPTRLSPISILYKDSANNVVLKYHYDMVVES

SEQ ID NO: 70307 - protein, 34 aa, Artificial Sequence
  GFR-binding peptide
  MOD_RES (1), (2): Xaa is C or S
  MOD_RES (16), (17), (18), (19), (20): Xaa is A or G
  MOD_RES (21), (22), (23), (24): Xaa is A or G or is absent
XXVPEKMEPISILYLXXXXXXXXXKFKYENMTVE

SEQ ID NO: 70308 - protein, 41 aa, Artificial Sequence; identical to SEQ ID NO: 7987
  GFR-binding peptide
  MOD_RES (3), (4), (39), (41): Xaa is C or S
  MOD_RES (18), (19), (20), (21), (22): Xaa is A or G
  MOD_RES (23), (24), (25), (26): Xaa is A or G or is absent

SEQ ID NO: 70309 - protein, 35 aa, Artificial Sequence; identical to SEQ ID NO: 32331
  GFR-binding peptide
  MOD_RES (1), (33), (35): Xaa is C or S

SEQ ID NO: 70310 - protein, 31 aa, Artificial Sequence; identical to SEQ ID NO: 7991
  GFR-binding peptide
  MOD_RES (1), (1): Xaa is C or S

SEQ ID NO: 70311 - protein, 35 aa, Artificial Sequence; identical to SEQ ID NO: 32333
  GFR-binding peptide
  MOD_RES (1), (2), (35): Xaa is C or S

SEQ ID NO: 70312 - protein, 39 aa, Artificial Sequence
  GFR-binding peptide
  MOD_RES (5), (6): Xaa is C or S
  MOD_RES (20), (21), (22), (23), (24): Xaa is A or G
  MOD_RES (25), (26), (27), (28): Xaa is A or G or is absent
IPEPXXVPEKMSPINILYFXXXXXXXXXYGKIPNMTVES

SEQ ID NO: 70313 - protein, 38 aa, Artificial Sequence; identical to SEQ ID NO: 7992
  GFR-binding peptide
  MOD_RES (6), (38): Xaa is C or S

SEQ ID NO: 70314 - protein, 35 aa, Artificial Sequence; identical to SEQ ID NO: 29269
  GFR-binding peptide
  MOD_RES (1), (33), (35): Xaa is C or S

SEQ ID NO: 70315 - protein, 38 aa, Artificial Sequence; identical to SEQ ID NO: 32334
  GFR-binding peptide
  MOD_RES (5), (6), (37): Xaa is C or S

SEQ ID NO: 70316 - protein, 34 aa, Artificial Sequence; identical to SEQ ID NO: 29271
  GFR-binding peptide
  MOD_RES (1), (2), (34): Xaa is C or S

SEQ ID NO: 70317 - protein, 35 aa, Artificial Sequence; identical to SEQ ID NO: 7995
  GFR-binding peptide
  MOD_RES (1), (33), (35): Xaa is C or S

SEQ ID NO: 70318 - protein, 33 aa, Artificial Sequence
  GFR-binding peptide
  MOD_RES (33), (33): Xaa is C or S
  MOD_RES (14), (15), (16), (17), (18): Xaa is A or G
  MOD_RES (19), (20), (21), (22): Xaa is A or G or is absent
APVKTSATSMLYYXXXXXXXXXLRKHRMIVEEX

SEQ ID NO: 70319 - protein, 39 aa, Artificial Sequence; identical to SEQ ID NO: 29273
  GFR-binding peptide
  MOD_RES (2), (3), (37), (39): Xaa is C or S
  MOD_RES (17), (18), (19), (20), (21): Xaa is A or G
  MOD_RES (22), (23), (24), (25): Xaa is A or G or is absent

SEQ ID NO: 70320 - protein, 33 aa, Artificial Sequence; identical to SEQ ID NO: 29274
  GFR-binding peptide
  MOD_RES (14), (15), (16), (17), (18): Xaa is A or G
  MOD_RES (19), (20), (21), (22): Xaa is A or G or is absent

SEQ ID NO: 70321 - protein, 37 aa, Artificial Sequence
  GFR-binding peptide
  MOD_RES (2), (3), (36): Xaa is C or S
  MOD_RES (17), (18), (19), (20), (21): Xaa is A or G
  MOD_RES (22), (23), (24), (25): Xaa is A or G or is absent
PXXVPQDLSPINILYFXXXXXXXXXYGKIPMVVKSXK

SEQ ID NO: 70322 - protein, 41 aa, Artificial Sequence; identical to SEQ ID NO: 7999
  GFR-binding peptide
  MOD_RES (5), (6), (38), (40): Xaa is C or S

SEQ ID NO: 70323 - protein, 41 aa, Artificial Sequence
  GFR-binding peptide
  MOD_RES (4), (5), (39), (41): Xaa is C or S
  MOD_RES (19), (20), (21), (22), (23): Xaa is A or G
  MOD_RES (24), (25), (26), (27): Xaa is A or G or is absent
AGPXXTPTKMSATSMLYYXXXXXXXXXLRKHRGMVVDRXGX

SEQ ID NO: 70324 - protein, 32 aa, Artificial Sequence; identical to SEQ ID NO: 29279
  GFR-binding peptide
  MOD_RES (14), (15), (16), (17), (18): Xaa is A or G
  MOD_RES (19), (20), (21), (22): Xaa is A or G or is absent

SEQ ID NO: 70325 - protein, 42 aa, Artificial Sequence
  GFR-binding peptide
  MOD_RES (6), (7), (41): Xaa is C or S
  MOD_RES (21), (22), (23), (24), (25): Xaa is A or G
  MOD_RES (26), (27), (28), (29): Xaa is A or G or is absent
AAPASXXVPARLSATSILYYXXXXXXXXXLRKHRDMVVEAXG

SEQ ID NO: 70326 - protein, 44 aa, Artificial Sequence
  GFR-binding peptide
  MOD_RES (6), (7), (41), (43): Xaa is C or S
  MOD_RES (21), (22), (23), (24), (25): Xaa is A or G
  MOD_RES (26), (27), (28), (29): Xaa is A or G or is absent
STPPTXXVPTRLSATSILYYXXXXXXXXXLRKHRDMVVESXGXR

SEQ ID NO: 70327 - protein, 33 aa, Artificial Sequence; identical to SEQ ID NO: 15294
  GFR-binding peptide
  MOD_RES (1), (33): Xaa is C or S

SEQ ID NO: 70328 - protein, 40 aa, Artificial Sequence; identical to SEQ ID NO: 29283
  GFR-binding peptide
  MOD_RES (2), (3), (37), (39): Xaa is C or S
  MOD_RES (17), (18), (19), (20), (21): Xaa is A or G
  MOD_RES (22), (23), (24), (25): Xaa is A or G or is absent

SEQ ID NO: 70329 - protein, 39 aa, Artificial Sequence; identical to SEQ ID NO: 8004
  GFR-binding peptide
  MOD_RES (7), (7): Xaa is C or S
  MOD_RES (21), (22), (23), (24), (25): Xaa is A or G
  MOD_RES (26), (27), (28), (29): Xaa is A or G or is absent

SEQ ID NO: 70330 - protein, 34 aa, Artificial Sequence; identical to SEQ ID NO: 8006
  GFR-binding peptide
  MOD_RES (1), (32), (34): Xaa is C or S

SEQ ID NO: 70331 - protein, 40 aa, Artificial Sequence; identical to SEQ ID NO: 29289
  GFR-binding peptide
  MOD_RES (2), (3), (37), (39): Xaa is C or S
  MOD_RES (17), (18), (19), (20), (21): Xaa is A or G
  MOD_RES (22), (23), (24), (25): Xaa is A or G or is absent

SEQ ID NO: 70332 - protein, 41 aa, Artificial Sequence
  GFR-binding peptide
  MOD_RES (4), (5), (39), (41): Xaa is C or S
  MOD_RES (19), (20), (21), (22), (23): Xaa is A or G
  MOD_RES (24), (25), (26), (27): Xaa is A or G or is absent
SKAXXVPTKLSATSILYYXXXXXXXXXLRKHRGMAVSEXGX

SEQ ID NO: 70333 - protein, 35 aa, Artificial Sequence; identical to SEQ ID NO: 57292
  GFR-binding peptide
  MOD_RES (1), (2), (34): Xaa is C or S

SEQ ID NO: 70334 - protein, 36 aa, Artificial Sequence; identical to SEQ ID NO: 32360
  GFR-binding peptide
  MOD_RES (5), (6): Xaa is C or S

SEQ ID NO: 70335 - protein, 31 aa, Artificial Sequence; identical to SEQ ID NO: 15316
  GFR-binding peptide
  MOD_RES (1), (1): Xaa is C or S

SEQ ID NO: 70336 - protein, 37 aa, Artificial Sequence; identical to SEQ ID NO: 8021
  GFR-binding peptide
  MOD_RES (2), (34), (36): Xaa is C or S

SEQ ID NO: 70337 - protein, 36 aa, Artificial Sequence
  GFR-binding peptide
  MOD_RES (1), (35): Xaa is C or S
  MOD_RES (15), (16), (17), (18), (19): Xaa is A or G
  MOD_RES (20), (21), (22), (23): Xaa is A or G or is absent
XVPTRLEPISILYLXXXXXXXXXKFKYEDMVVESXG

SEQ ID NO: 70338 - protein, 38 aa, Artificial Sequence
  GFR-binding peptide
  MOD_RES (4), (5), (38): Xaa is C or S
  MOD_RES (19), (20), (21), (22), (23): Xaa is A or G
  MOD_RES (24), (25), (26), (27): Xaa is A or G or is absent
PSTXXAPVKTEPISMLYLXXXXXXXXXKFKYEMIVEEX

SEQ ID NO: 70339 - protein, 36 aa, Artificial Sequence
  GFR-binding peptide
  MOD_RES (5), (6): Xaa is C or S
TPPTXXVPTRLSATSILYYDSANNVVLRKHRDMVVE

SEQ ID NO: 70340 - protein, 37 aa, Artificial Sequence
  GFR-binding peptide
  MOD_RES (6), (7): Xaa is C or S
ASAAPXXVPQALSPINILYFVGRKPKVYGKIPMIVRS

SEQ ID NO: 70341 - protein, 37 aa, Artificial Sequence
  GFR-binding peptide
  MOD_RES (3), (4): Xaa is C or S
  MOD_RES (18), (19), (20), (21), (22): Xaa is A or G
  MOD_RES (23), (24), (25), (26): Xaa is A or G or is absent
PTXXVPTRLSATSILYYXXXXXXXXXLRKHRDMVVES

SEQ ID NO: 70342 - protein, 34 aa, Artificial Sequence; identical to SEQ ID NO: 32380
  GFR-binding peptide
  MOD_RES (3), (4): Xaa is C or S

SEQ ID NO: 70343 - protein, 41 aa, Artificial Sequence
  GFR-binding peptide
  MOD_RES (4), (5), (39), (41): Xaa is C or S
  MOD_RES (19), (20), (21), (22), (23): Xaa is A or G
  MOD_RES (24), (25), (26), (27): Xaa is A or G or is absent
PEPXXVPEKMSPINILYFXXXXXXXXXYGKIPNMTVESXAX

SEQ ID NO: 70344 - protein, 35 aa, Artificial Sequence; identical to SEQ ID NO: 8026
  GFR-binding peptide
  MOD_RES (1), (2), (33), (35): Xaa is C or S

SEQ ID NO: 70345 - protein, 42 aa, Artificial Sequence; identical to SEQ ID NO: 32394
  GFR-binding peptide
  MOD_RES (6), (7), (41): Xaa is C or S
  MOD_RES (21), (22), (23), (24), (25): Xaa is A or G
  MOD_RES (26), (27), (28), (29): Xaa is A or G or is absent

SEQ ID NO: 70346 - protein, 41 aa, Artificial Sequence
  GFR-binding peptide
  MOD_RES (6), (7), (38), (40): Xaa is C or S
RVPSTXXAPVKTSATSMLYYDNGRVLLLRKHRMIVEEXGXL

SEQ ID NO: 70347 - protein, 44 aa, Artificial Sequence; identical to SEQ ID NO: 8027
  GFR-binding peptide
  MOD_RES (6), (7), (41), (43): Xaa is C or S
  MOD_RES (21), (22), (23), (24), (25): Xaa is A or G
  MOD_RES (26), (27), (28), (29): Xaa is A or G or is absent

SEQ ID NO: 70348 - protein, 39 aa, Artificial Sequence; identical to SEQ ID NO: 29300
  GFR-binding peptide
  MOD_RES (6), (7), (39): Xaa is C or S

SEQ ID NO: 70349 - protein, 40 aa, Artificial Sequence
  GFR-binding peptide
  MOD_RES (4), (5), (37), (39): Xaa is C or S
AGPXXTPTKMSATSMLYYNDKQQIILRKHRGMVVDRXGXS

SEQ ID NO: 70350 - protein, 36 aa, Artificial Sequence
  GFR-binding peptide
  MOD_RES (1), (34), (36): Xaa is C or S
  MOD_RES (15), (16), (17), (18), (19): Xaa is A or G
  MOD_RES (20), (21), (22), (23): Xaa is A or G or is absent
XAPVKTSPISMLYKXXXXXXXXXLKYHYMIVEEXGX

SEQ ID NO: 70351 - protein, 36 aa, Artificial Sequence
  GFR-binding peptide
  MOD_RES (2), (3): Xaa is C or S
  MOD_RES (17), (18), (19), (20), (21): Xaa is A or G
  MOD_RES (22), (23), (24), (25): Xaa is A or G or is absent
PXXTPTKMSATSMLYYXXXXXXXXXLRKHRGMVVDR

SEQ ID NO: 70352 - protein, 42 aa, Artificial Sequence; identical to SEQ ID NO: 57318
  GFR-binding peptide
  MOD_RES (6), (7), (41): Xaa is C or S
  MOD_RES (21), (22), (23), (24), (25): Xaa is A or G
  MOD_RES (26), (27), (28), (29): Xaa is A or G or is absent

SEQ ID NO: 70353 - protein, 35 aa, Artificial Sequence
  GFR-binding peptide
  MOD_RES (4), (5): Xaa is C or S
AGPXXTPTKMSATSMLYYNDKQQIILRKHRGMVVD

SEQ ID NO: 70354 - protein, 40 aa, Artificial Sequence; identical to SEQ ID NO: 8032
  GFR-binding peptide
  MOD_RES (5), (6), (39): Xaa is C or S
  MOD_RES (20), (21), (22), (23), (24): Xaa is A or G
  MOD_RES (25), (26), (27), (28): Xaa is A or G or is absent

SEQ ID NO: 70355 - protein, 35 aa, Artificial Sequence; identical to SEQ ID NO: 29308
  GFR-binding peptide
  MOD_RES (4), (5): Xaa is C or S

SEQ ID NO: 70356 - protein, 37 aa, Artificial Sequence; identical to SEQ ID NO: 8034
  GFR-binding peptide
  MOD_RES (3), (4): Xaa is C or S
  MOD_RES (18), (19), (20), (21), (22): Xaa is A or G
  MOD_RES (23), (24), (25), (26): Xaa is A or G or is absent

SEQ ID NO: 70357 - protein, 38 aa, Artificial Sequence; identical to SEQ ID NO: 32402
  GFR-binding peptide
  MOD_RES (2), (3), (35), (37): Xaa is C or S

SEQ ID NO: 70358 - protein, 39 aa, Artificial Sequence; identical to SEQ ID NO: 8038
  GFR-binding peptide
  MOD_RES (1), (2), (36), (38): Xaa is C or S
  MOD_RES (16), (17), (18), (19), (20): Xaa is A or G
  MOD_RES (21), (22), (23), (24): Xaa is A or G or is absent

SEQ ID NO: 70359 - protein, 43 aa, Artificial Sequence; identical to SEQ ID NO: 29315
  GFR-binding peptide
  MOD_RES (5), (6), (40), (42): Xaa is C or S
  MOD_RES (20), (21), (22), (23), (24): Xaa is A or G
  MOD_RES (25), (26), (27), (28): Xaa is A or G or is absent

SEQ ID NO: 70360 - protein, 35 aa, Artificial Sequence; identical to SEQ ID NO: 32411
  GFR-binding peptide
  MOD_RES (1), (33), (35): Xaa is C or S

SEQ ID NO: 70361 - protein, 37 aa, Artificial Sequence; identical to SEQ ID NO: 29317
  GFR-binding peptide
  MOD_RES (1), (2), (35), (37): Xaa is C or S
  MOD_RES (16), (17), (18), (19), (20): Xaa is A or G
  MOD_RES (21), (22), (23), (24): Xaa is A or G or is absent

SEQ ID NO: 70362 - protein, 33 aa, Artificial Sequence; identical to SEQ ID NO: 29321
  GFR-binding peptide
  MOD_RES (2), (3): Xaa is C or S

SEQ ID NO: 70363 - protein, 36 aa, Artificial Sequence; identical to SEQ ID NO: 8041
  GFR-binding peptide
  MOD_RES (3), (4), (35): Xaa is C or S

SEQ ID NO: 70364 - protein, 40 aa, Artificial Sequence; identical to SEQ ID NO: 8042
  GFR-binding peptide
  MOD_RES (7), (39): Xaa is C or S

SEQ ID NO: 70365 - protein, 36 aa, Artificial Sequence; identical to SEQ ID NO: 32415
  GFR-binding peptide
  MOD_RES (6), (6): Xaa is C or S

SEQ ID NO: 70366 - protein, 36 aa, Artificial Sequence; identical to SEQ ID NO: 8043
  GFR-binding peptide
  MOD_RES (2), (3): Xaa is C or S
  MOD_RES (17), (18), (19), (20), (21): Xaa is A or G
  MOD_RES (22), (23), (24), (25): Xaa is A or G or is absent

SEQ ID NO: 70367 - protein, 39 aa, Artificial Sequence; identical to SEQ ID NO: 32416
  GFR-binding peptide
  MOD_RES (6), (7), (39): Xaa is C or S

SEQ ID NO: 70368 - protein, 40 aa, Artificial Sequence; identical to SEQ ID NO: 8045
  GFR-binding peptide
  MOD_RES (4), (5), (37), (39): Xaa is C or S

SEQ ID NO: 70369 - protein, 32 aa, Artificial Sequence; identical to SEQ ID NO: 8048
  GFR-binding peptide
  MOD_RES (1), (2): Xaa is C or S

SEQ ID NO: 70370 - protein, 36 aa, Artificial Sequence; identical to SEQ ID NO: 32420
  GFR-binding peptide
  MOD_RES (2), (3): Xaa is C or S
  MOD_RES (17), (18), (19), (20), (21): Xaa is A or G
  MOD_RES (22), (23), (24), (25): Xaa is A or G or is absent

SEQ ID NO: 70371 - protein, 36 aa, Artificial Sequence; identical to SEQ ID NO: 32421
  GFR-binding peptide
  MOD_RES (3), (4), (35): Xaa is C or S

SEQ ID NO: 70372 - protein, 36 aa, Artificial Sequence; identical to SEQ ID NO: 8052
  GFR-binding peptide
  MOD_RES (2), (3), (36): Xaa is C or S

SEQ ID NO: 70373 - protein, 32 aa, Artificial Sequence; identical to SEQ ID NO: 8053
  GFR-binding peptide
  MOD_RES (32), (32): Xaa is C or S

SEQ ID NO: 70374 - protein, 38 aa, Artificial Sequence
  GFR-binding peptide
  MOD_RES (2), (3), (36), (38): Xaa is C or S
  MOD_RES (17), (18), (19), (20), (21): Xaa is A or G
  MOD_RES (22), (23), (24), (25): Xaa is A or G or is absent
TXXAPVKTSPISMLYKXXXXXXXXXLKYHYMIVEEXGX

SEQ ID NO: 70375 - protein, 35 aa, Artificial Sequence; identical to SEQ ID NO: 32424
  GFR-binding peptide
  MOD_RES (1), (35): Xaa is C or S
  MOD_RES (15), (16), (17), (18), (19): Xaa is A or G
  MOD_RES (20), (21), (22), (23): Xaa is A or G or is absent

SEQ ID NO: 70376 - protein, 39 aa, Artificial Sequence; identical to SEQ ID NO: 29330
  GFR-binding peptide
  MOD_RES (1), (2), (36), (38): Xaa is C or S
  MOD_RES (16), (17), (18), (19), (20): Xaa is A or G
  MOD_RES (21), (22), (23), (24): Xaa is A or G or is absent

SEQ ID NO: 70377 - protein, 38 aa, Artificial Sequence; identical to SEQ ID NO: 8055
  GFR-binding peptide
  MOD_RES (3), (4), (36), (38): Xaa is C or S

SEQ ID NO: 70378 - protein, 42 aa, Artificial Sequence; identical to SEQ ID NO: 29332
  GFR-binding peptide
  MOD_RES (4), (5), (39), (41): Xaa is C or S
  MOD_RES (19), (20), (21), (22), (23): Xaa is A or G
  MOD_RES (24), (25), (26), (27): Xaa is A or G or is absent

SEQ ID NO: 70379 - protein, 41 aa, Artificial Sequence; identical to SEQ ID NO: 8057
  GFR-binding peptide
  MOD_RES (7), (41): Xaa is C or S
  MOD_RES (21), (22), (23), (24), (25): Xaa is A or G
  MOD_RES (26), (27), (28), (29): Xaa is A or G or is absent

SEQ ID NO: 70380 - protein, 38 aa, Artificial Sequence; identical to SEQ ID NO: 29337
  GFR-binding peptide
  MOD_RES (3), (4), (38): Xaa is C or S
  MOD_RES (18), (19), (20), (21), (22): Xaa is A or G
  MOD_RES (23), (24), (25), (26): Xaa is A or G or is absent

SEQ ID NO: 70381 - protein, 37 aa, Artificial Sequence; identical to SEQ ID NO: 32434
  GFR-binding peptide
  MOD_RES (1), (2), (37): Xaa is C or S
  MOD_RES (16), (17), (18), (19), (20): Xaa is A or G
  MOD_RES (21), (22), (23), (24): Xaa is A or G or is absent

SEQ ID NO: 70382 - protein, 36 aa, Artificial Sequence; identical to SEQ ID NO: 8059
  GFR-binding peptide
  MOD_RES (1), (35): Xaa is C or S
  MOD_RES (15), (16), (17), (18), (19): Xaa is A or G
  MOD_RES (20), (21), (22), (23): Xaa is A or G or is absent

SEQ ID NO: 70383 - protein, 32 aa, Artificial Sequence; identical to SEQ ID NO: 29340
  GFR-binding peptide
  MOD_RES (1), (2): Xaa is C or S

SEQ ID NO: 70384 - protein, 38 aa, Artificial Sequence; identical to SEQ ID NO: 8060
  GFR-binding peptide
  MOD_RES (4), (38): Xaa is C or S
  MOD_RES (18), (19), (20), (21), (22): Xaa is A or G
  MOD_RES (23), (24), (25), (26): Xaa is A or G or is absent

SEQ ID NO: 70385 - protein, 39 aa, Artificial Sequence; identical to SEQ ID NO: 29343
  GFR-binding peptide
  MOD_RES (5), (6): Xaa is C or S
  MOD_RES (20), (21), (22), (23), (24): Xaa is A or G
  MOD_RES (25), (26), (27), (28): Xaa is A or G or is absent

SEQ ID NO: 70386 - protein, 34 aa, Artificial Sequence; identical to SEQ ID NO: 8062
  GFR-binding peptide
  MOD_RES (1), (33): Xaa is C or S

SEQ ID NO: 70387 - protein, 37 aa, Artificial Sequence; identical to SEQ ID NO: 29347
  GFR-binding peptide
  MOD_RES (4), (5), (37): Xaa is C or S

SEQ ID NO: 70388 - protein, 35 aa, Artificial Sequence
  GFR-binding peptide
  MOD_RES (34), (34): Xaa is C or S
  MOD_RES (14), (15), (16), (17), (18): Xaa is A or G
  MOD_RES (19), (20), (21), (22): Xaa is A or G or is absent
VPEKMSPISILYKXXXXXXXXXLKYHYNMTVESXA

SEQ ID NO: 70389 - protein, 35 aa, Artificial Sequence
  GFR-binding peptide
  MOD_RES (1), (33), (35): Xaa is C or S
XVPEKMSATSILYYDENKNVVLRKHRNMTVESXAX

SEQ ID NO: 70390 - protein, 37 aa, Artificial Sequence
  GFR-binding peptide
  MOD_RES (4), (5): Xaa is C or S
  MOD_RES (19), (20), (21), (22), (23): Xaa is A or G
  MOD_RES (24), (25), (26), (27): Xaa is A or G or is absent
PSTXXAPVKTSPISMLYKXXXXXXXXXLKYHYMIVEE

SEQ ID NO: 70391 - protein, 39 aa, Artificial Sequence; identical to SEQ ID NO: 29356
  GFR-binding peptide
  MOD_RES (5), (6): Xaa is C or S
  MOD_RES (20), (21), (22), (23), (24): Xaa is A or G
  MOD_RES (25), (26), (27), (28): Xaa is A or G or is absent

SEQ ID NO: 70392 - protein, 37 aa, Artificial Sequence; identical to SEQ ID NO: 29358
  GFR-binding peptide
  MOD_RES (3), (4): Xaa is C or S
  MOD_RES (18), (19), (20), (21), (22): Xaa is A or G
  MOD_RES (23), (24), (25), (26): Xaa is A or G or is absent

SEQ ID NO: 70393 - protein, 34 aa, Artificial Sequence; identical to SEQ ID NO: 32454
  GFR-binding peptide
  MOD_RES (2), (3), (34): Xaa is C or S

SEQ ID NO: 70394 - protein, 33 aa, Artificial Sequence; identical to SEQ ID NO: 8073
  GFR-binding peptide
  MOD_RES (33), (33): Xaa is C or S
  MOD_RES (14), (15), (16), (17), (18): Xaa is A or G
  MOD_RES (19), (20), (21), (22): Xaa is A or G or is absent

SEQ ID NO: 70395 - protein, 36 aa, Artificial Sequence; identical to SEQ ID NO: 29361
  GFR-binding peptide
  MOD_RES (3), (4), (36): Xaa is C or S

SEQ ID NO: 70396 - protein, 34 aa, Artificial Sequence; identical to SEQ ID NO: 8076
  GFR-binding peptide
  MOD_RES (1), (34): Xaa is C or S
  MOD_RES (15), (16), (17), (18), (19): Xaa is A or G
  MOD_RES (20), (21), (22), (23): Xaa is A or G or is absent

SEQ ID NO: 70397 - protein, 36 aa, Artificial Sequence; identical to SEQ ID NO: 8077
  GFR-binding peptide
  MOD_RES (4), (5): Xaa is C or S

SEQ ID NO: 70398 - protein, 36 aa, Artificial Sequence; identical to SEQ ID NO: 8080
  GFR-binding peptide
  MOD_RES (2), (3), (35): Xaa is C or S

SEQ ID NO: 70399 - protein, 34 aa, Artificial Sequence; identical to SEQ ID NO: 32464
  GFR-binding peptide
  MOD_RES (3), (4): Xaa is C or S

SEQ ID NO: 70400 - protein, 35 aa, Artificial Sequence
  GFR-binding peptide
  MOD_RES (1), (2), (34): Xaa is C or S
XXVPEKMNAISILYFDENKNVVLKKYRNMTVESXA

SEQ ID NO: 70401 - protein, 31 aa, Artificial Sequence; identical to SEQ ID NO: 29369
  GFR-binding peptide
  MOD_RES (1), (1): Xaa is C or S

SEQ ID NO: 70402 - protein, 38 aa, Artificial Sequence
  GFR-binding peptide
  MOD_RES (3), (4), (36), (38): Xaa is C or S
EPXXVPEKMSPINILYFDENKNVVYGKIPNMTVESXAX

SEQ ID NO: 70403 - protein, 32 aa, Artificial Sequence; identical to SEQ ID NO: 32466
  GFR-binding peptide
  MOD_RES (1), (2): Xaa is C or S

SEQ ID NO: 70404 - protein, 40 aa, Artificial Sequence
  GFR-binding peptide
  MOD_RES (5), (6), (38), (40): Xaa is C or S
TPPTXXVPTRLSPISILYKDSANNVVLKYHYDMVVESXGX

SEQ ID NO: 70405 - protein, 39 aa, Artificial Sequence
  GFR-binding peptide
  MOD_RES (4), (5), (39): Xaa is C or S
  MOD_RES (19), (20), (21), (22), (23): Xaa is A or G
  MOD_RES (24), (25), (26), (27): Xaa is A or G or is absent
PPTXXVPTRLSATSILYYXXXXXXXXXLRKHRDMVVESX

SEQ ID NO: 70406 - protein, 37 aa, Artificial Sequence; identical to SEQ ID NO: 8094
  GFR-binding peptide
  MOD_RES (34), (36): Xaa is C or S
  MOD_RES (14), (15), (16), (17), (18): Xaa is A or G
  MOD_RES (19), (20), (21), (22): Xaa is A or G or is absent

SEQ ID NO: 70407 - protein, 39 aa, Artificial Sequence
  GFR-binding peptide
  MOD_RES (6), (7), (39): Xaa is C or S
HVPKPXXAPTKLEPISVLYLDDSSNVIKFKYENMVVRSX

SEQ ID NO: 70408 - protein, 40 aa, Artificial Sequence
  GFR-binding peptide
  MOD_RES (6), (7): Xaa is C or S
  MOD_RES (21), (22), (23), (24), (25): Xaa is A or G
  MOD_RES (26), (27), (28), (29): Xaa is A or G or is absent
GIPEPXXVPEKMEPISILYLXXXXXXXXXKFKYENMTVES

SEQ ID NO: 70409 - protein, 40 aa, Artificial Sequence; identical to SEQ ID NO: 8100
  GFR-binding peptide
  MOD_RES (5), (6), (38), (40): Xaa is C or S

SEQ ID NO: 70410 - protein, 36 aa, Artificial Sequence; identical to SEQ ID NO: 57379
  GFR-binding peptide
  MOD_RES (5), (6): Xaa is C or S

SEQ ID NO: 70411 - protein, 36 aa, Artificial Sequence; identical to SEQ ID NO: 29383
  GFR-binding peptide
  MOD_RES (2), (3), (35): Xaa is C or S

SEQ ID NO: 70412 - protein, 35 aa, Artificial Sequence
  GFR-binding peptide
  MOD_RES (3), (4), (35): Xaa is C or S
STXXAPVKTEPISMLYLDNGRVLLKFKYEMIVEEX

SEQ ID NO: 70413 - protein, 41 aa, Artificial Sequence; identical to SEQ ID NO: 29385
  GFR-binding peptide
  MOD_RES (5), (6), (40): Xaa is C or S
  MOD_RES (20), (21), (22), (23), (24): Xaa is A or G
  MOD_RES (25), (26), (27), (28): Xaa is A or G or is absent

SEQ ID NO: 70414 - protein, 38 aa, Artificial Sequence; identical to SEQ ID NO: 32484
  GFR-binding peptide
  MOD_RES (2), (3), (35), (37): Xaa is C or S

SEQ ID NO: 70415 - protein, 38 aa, Artificial Sequence
  GFR-binding peptide
  MOD_RES (3), (4), (35), (37): Xaa is C or S
STXXAPVKTEPISMLYLDNGRVLLKFKYEMIVEEXGXL

SEQ ID NO: 70416 - protein, 37 aa, Artificial Sequence; identical to SEQ ID NO: 32488
  GFR-binding peptide
  MOD_RES (2), (3), (37): Xaa is C or S
  MOD_RES (17), (18), (19), (20), (21): Xaa is A or G
  MOD_RES (22), (23), (24), (25): Xaa is A or G or is absent

SEQ ID NO: 70417 - protein, 33 aa, Artificial Sequence
  GFR-binding peptide
  MOD_RES (2), (3): Xaa is C or S
PXXVPEKMSPINILYFDENKNVVYGKIPNMTVE

SEQ ID NO: 70418 - protein, 37 aa, Artificial Sequence
  GFR-binding peptide
  MOD_RES (2), (3), (37): Xaa is C or S
  MOD_RES (17), (18), (19), (20), (21): Xaa is A or G
  MOD_RES (22), (23), (24), (25): Xaa is A or G or is absent
PXXVPEKMSATSILYYXXXXXXXXXLRKHRNMTVESX

SEQ ID NO: 70419 - protein, 35 aa, Artificial Sequence; identical to SEQ ID NO: 8106
  GFR-binding peptide
  MOD_RES (2), (3): Xaa is C or S
  MOD_RES (17), (18), (19), (20), (21): Xaa is A or G
  MOD_RES (22), (23), (24), (25): Xaa is A or G or is absent

SEQ ID NO: 70420 - protein, 35 aa, Artificial Sequence; identical to SEQ ID NO: 29394
  GFR-binding peptide
  MOD_RES (1), (2): Xaa is C or S
  MOD_RES (16), (17), (18), (19), (20): Xaa is A or G
  MOD_RES (21), (22), (23), (24): Xaa is A or G or is absent

SEQ ID NO: 70421 - protein, 37 aa, Artificial Sequence
  GFR-binding peptide
  MOD_RES (34), (36): Xaa is C or S
  MOD_RES (14), (15), (16), (17), (18): Xaa is A or G
  MOD_RES (19), (20), (21), (22): Xaa is A or G or is absent
VPEKMSPINILYFXXXXXXXXXYGKIPNMTVESXAXR

SEQ ID NO: 70422 - protein, 41 aa, Artificial Sequence; identical to SEQ ID NO: 29396
  GFR-binding peptide
  MOD_RES (3), (4), (38), (40): Xaa is C or S
  MOD_RES (18), (19), (20), (21), (22): Xaa is A or G
  MOD_RES (23), (24), (25), (26): Xaa is A or G or is absent

SEQ ID NO: 70423 - protein, 36 aa, Artificial Sequence
  GFR-binding peptide
  MOD_RES (34), (36): Xaa is C or S
  MOD_RES (14), (15), (16), (17), (18): Xaa is A or G
  MOD_RES (19), (20), (21), (22): Xaa is A or G or is absent
VPEKMNAISILYFXXXXXXXXXLKKYRNMTVESXAX

SEQ ID NO: 70424 - protein, 37 aa, Artificial Sequence
  GFR-binding peptide
  MOD_RES (2), (3), (35), (37): Xaa is C or S
PXXTPTKMSATSMLYYNDKQQIILRKHRGMVVDRXGX

SEQ ID NO: 70425 - protein, 35 aa, Artificial Sequence; identical to SEQ ID NO: 15410
  GFR-binding peptide
  MOD_RES (32), (34): Xaa is C or S

SEQ ID NO: 70426 - protein, 35 aa, Artificial Sequence; identical to SEQ ID NO: 8109
  GFR-binding peptide
  MOD_RES (1), (1): Xaa is C or S
  MOD_RES (15), (16), (17), (18), (19): Xaa is A or G
  MOD_RES (20), (21), (22), (23): Xaa is A or G or is absent

SEQ ID NO: 70427 - protein, 39 aa, Artificial Sequence
  GFR-binding peptide
  MOD_RES (3), (4), (38): Xaa is C or S
  MOD_RES (18), (19), (20), (21), (22): Xaa is A or G
  MOD_RES (23), (24), (25), (26): Xaa is A or G or is absent
EPXXVPEKMSPISILYKXXXXXXXXXLKYHYNMTVESXA

SEQ ID NO: 70428 - protein, 35 aa, Artificial Sequence; identical to SEQ ID NO: 29400
  GFR-binding peptide
  MOD_RES (35), (35): Xaa is C or S
  MOD_RES (14), (15), (16), (17), (18): Xaa is A or G
  MOD_RES (19), (20), (21), (22): Xaa is A or G or is absent

SEQ ID NO: 70429 - protein, 39 aa, Artificial Sequence; identical to SEQ ID NO: 8113
  GFR-binding peptide
  MOD_RES (3), (4), (37), (39): Xaa is C or S

SEQ ID NO: 70430 - protein, 39 aa, Artificial Sequence; identical to SEQ ID NO: 8115
  GFR-binding peptide
  MOD_RES (4), (5), (36), (38): Xaa is C or S

SEQ ID NO: 70431 - protein, 40 aa, Artificial Sequence; identical to SEQ ID NO: 29402
  GFR-binding peptide
  MOD_RES (6), (7), (38), (40): Xaa is C or S

SEQ ID NO: 70432 - protein, 35 aa, Artificial Sequence
  GFR-binding peptide
  MOD_RES (2), (3), (34): Xaa is C or S
PXXVPQALSPINILYFVGRKPKVYGKIPMIVRSXK

SEQ ID NO: 70433 - protein, 30 aa, Artificial Sequence; identical to SEQ ID NO: 29405
  GFR-binding peptide

SEQ ID NO: 70434 - protein, 39 aa, Artificial Sequence
  GFR-binding peptide
  MOD_RES (5), (6), (38): Xaa is C or S
APASXXVPARLSATSILYYDAANNVVLRKHRDMVVEAXG

SEQ ID NO: 70435 - protein, 32 aa, Artificial Sequence; identical to SEQ ID NO: 32518
  GFR-binding peptide
  MOD_RES (1), (2): Xaa is C or S

SEQ ID NO: 70436 - protein, 42 aa, Artificial Sequence; identical to SEQ ID NO: 8123
  GFR-binding peptide
  MOD_RES (4), (5), (39), (41): Xaa is C or S
  MOD_RES (19), (20), (21), (22), (23): Xaa is A or G
  MOD_RES (24), (25), (26), (27): Xaa is A or G or is absent

SEQ ID NO: 70437 - protein, 38 aa, Artificial Sequence; identical to SEQ ID NO: 29411
  GFR-binding peptide
  MOD_RES (3), (4), (36), (38): Xaa is C or S

SEQ ID NO: 70438 - protein, 37 aa, Artificial Sequence; identical to SEQ ID NO: 29412
  GFR-binding peptide
  MOD_RES (1), (2), (36): Xaa is C or S
  MOD_RES (16), (17), (18), (19), (20): Xaa is A or G
  MOD_RES (21), (22), (23), (24): Xaa is A or G or is absent

SEQ ID NO: 70439 - protein, 39 aa, Artificial Sequence
  GFR-binding peptide
  MOD_RES (6), (7), (38): Xaa is C or S
RVPSTXXAPVKTSATSMLYYDNGRVLLLRKHRMIVEEXG

SEQ ID NO: 70440 - protein, 43 aa, Artificial Sequence; identical to SEQ ID NO: 32519
  GFR-binding peptide
  MOD_RES (6), (7), (41), (43): Xaa is C or S
  MOD_RES (21), (22), (23), (24), (25): Xaa is A or G
  MOD_RES (26), (27), (28), (29): Xaa is A or G or is absent

SEQ ID NO: 70441 - protein, 40 aa, Artificial Sequence
  GFR-binding peptide
  MOD_RES (3), (4), (37), (39): Xaa is C or S
  MOD_RES (18), (19), (20), (21), (22): Xaa is A or G
  MOD_RES (23), (24), (25), (26): Xaa is A or G or is absent
SPXXVPQDLSPINILYFXXXXXXXXXYGKIPMVVKSXKXS

SEQ ID NO: 70442 - protein, 41 aa, Artificial Sequence; identical to SEQ ID NO: 8133
  GFR-binding peptide
  MOD_RES (5), (6), (38), (40): Xaa is C or S

SEQ ID NO: 70443 - protein, 36 aa, Artificial Sequence
  GFR-binding peptide
  MOD_RES (2), (3): Xaa is C or S
  MOD_RES (17), (18), (19), (20), (21): Xaa is A or G
  MOD_RES (22), (23), (24), (25): Xaa is A or G or is absent
SXXVPARLSATSILYYXXXXXXXXXLRKHRDMVVEA

SEQ ID NO: 70444 - protein, 38 aa, Artificial Sequence; identical to SEQ ID NO: 8136
  GFR-binding peptide
  MOD_RES (4), (5), (36), (38): Xaa is C or S

SEQ ID NO: 70445 - protein, 39 aa, Artificial Sequence; identical to SEQ ID NO: 29422
  GFR-binding peptide
  MOD_RES (5), (6): Xaa is C or S
  MOD_RES (20), (21), (22), (23), (24): Xaa is A or G
  MOD_RES (25), (26), (27), (28): Xaa is A or G or is absent

SEQ ID NO: 70446 - protein, 35 aa, Artificial Sequence; identical to SEQ ID NO: 32527
  GFR-binding peptide
  MOD_RES (2), (3), (34): Xaa is C or S

SEQ ID NO: 70447 - protein, 34 aa, Artificial Sequence; identical to SEQ ID NO: 32528
  GFR-binding peptide
  MOD_RES (1), (2), (34): Xaa is C or S

SEQ ID NO: 70448 - protein, 35 aa, Artificial Sequence; identical to SEQ ID NO: 32529
  GFR-binding peptide
  MOD_RES (3), (4): Xaa is C or S

SEQ ID NO: 70449 - protein, 39 aa, Artificial Sequence; identical to SEQ ID NO: 29424
  GFR-binding peptide
  MOD_RES (2), (3), (36), (38): Xaa is C or S
  MOD_RES (17), (18), (19), (20), (21): Xaa is A or G
  MOD_RES (22), (23), (24), (25): Xaa is A or G or is absent

SEQ ID NO: 70450 - protein, 43 aa, Artificial Sequence; identical to SEQ ID NO: 8140
  GFR-binding peptide
  MOD_RES (6), (7), (42): Xaa is C or S
  MOD_RES (21), (22), (23), (24), (25): Xaa is A or G
  MOD_RES (26), (27), (28), (29): Xaa is A or G or is absent

SEQ ID NO: 70451 - protein, 33 aa, Artificial Sequence; identical to SEQ ID NO: 32534
  GFR-binding peptide
  MOD_RES (1), (1): Xaa is C or S

SEQ ID NO: 70452 - protein, 42 aa, Artificial Sequence; identical to SEQ ID NO: 29427
  GFR-binding peptide
  MOD_RES (5), (6), (41): Xaa is C or S
  MOD_RES (20), (21), (22), (23), (24): Xaa is A or G
  MOD_RES (25), (26), (27), (28): Xaa is A or G or is absent

SEQ ID NO: 70453 - protein, 35 aa, Artificial Sequence; identical to SEQ ID NO: 29428
  GFR-binding peptide
  MOD_RES (2), (3), (34): Xaa is C or S

SEQ ID NO: 70454 - protein, 40 aa, Artificial Sequence
  GFR-binding peptide
  MOD_RES (5), (6), (38), (40): Xaa is C or S
IPEPXXVPEKMEPISILYLDENKNVVKFKYENMTVESXAX

SEQ ID NO: 70455 - protein, 39 aa, Artificial Sequence
  GFR-binding peptide
  MOD_RES (6), (7): Xaa is C or S
  MOD_RES (21), (22), (23), (24), (25): Xaa is A or G
  MOD_RES (26), (27), (28), (29): Xaa is A or G or is absent
GIPEPXXVPEKMSPINILYFXXXXXXXXXYGKIPNMTVE

SEQ ID NO: 70456 - protein, 38 aa, Artificial Sequence
  GFR-binding peptide
  MOD_RES (5), (6), (38): Xaa is C or S
SAGPXXTPTKMSATSMLYYNDKQQIILRKHRGMVVDRX

SEQ ID NO: 70457 - protein, 41 aa, Artificial Sequence; identical to SEQ ID NO: 32539
  GFR-binding peptide
  MOD_RES (6), (7), (41): Xaa is C or S
  MOD_RES (21), (22), (23), (24), (25): Xaa is A or G
  MOD_RES (26), (27), (28), (29): Xaa is A or G or is absent

SEQ ID NO: 70458 - protein, 41 aa, Artificial Sequence; identical to SEQ ID NO: 29433
  GFR-binding peptide
  MOD_RES (5), (6), (38), (40): Xaa is C or S

SEQ ID NO: 70459 - protein, 35 aa, Artificial Sequence; identical to SEQ ID NO: 8147
  GFR-binding peptide
  MOD_RES (1), (2), (33), (35): Xaa is C or S

SEQ ID NO: 70460 - protein, 35 aa, Artificial Sequence; identical to SEQ ID NO: 29435
  GFR-binding peptide
  MOD_RES (34), (34): Xaa is C or S
  MOD_RES (14), (15), (16), (17), (18): Xaa is A or G
  MOD_RES (19), (20), (21), (22): Xaa is A or G or is absent

SEQ ID NO: 70461 - protein, 40 aa, Artificial Sequence
  GFR-binding peptide
  MOD_RES (3), (4), (38), (40): Xaa is C or S
  MOD_RES (18), (19), (20), (21), (22): Xaa is A or G
  MOD_RES (23), (24), (25), (26): Xaa is A or G or is absent
EPXXVPEKMEPISILYLXXXXXXXXXKFKYENMTVESXAX

SEQ ID NO: 70462 - protein, 37 aa, Artificial Sequence; identical to SEQ ID NO: 29438
  GFR-binding peptide
  MOD_RES (1), (34), (36): Xaa is C or S
  MOD_RES (15), (16), (17), (18), (19): Xaa is A or G
  MOD_RES (20), (21), (22), (23): Xaa is A or G or is absent

SEQ ID NO: 70463 - protein, 37 aa, Artificial Sequence
  GFR-binding peptide
  MOD_RES (1), (2), (36): Xaa is C or S
  MOD_RES (16), (17), (18), (19), (20): Xaa is A or G
  MOD_RES (21), (22), (23), (24): Xaa is A or G or is absent
XXTPTKMSATSMLYYXXXXXXXXXLRKHRGMVVDRXG

SEQ ID NO: 70464 - protein, 40 aa, Artificial Sequence; identical to SEQ ID NO: 8149
  GFR-binding peptide
  MOD_RES (5), (6): Xaa is C or S
  MOD_RES (20), (21), (22), (23), (24): Xaa is A or G
  MOD_RES (25), (26), (27), (28): Xaa is A or G or is absent

SEQ ID NO: 70465 - protein, 34 aa, Artificial Sequence; identical to SEQ ID NO: 57452
  GFR-binding peptide
  MOD_RES (3), (4): Xaa is C or S

SEQ ID NO: 70466 - protein, 36 aa, Artificial Sequence; identical to SEQ ID NO: 8151
  GFR-binding peptide
  MOD_RES (1), (2), (35): Xaa is C or S
  MOD_RES (16), (17), (18), (19), (20): Xaa is A or G
  MOD_RES (21), (22), (23), (24): Xaa is A or G or is absent

SEQ ID NO: 70467 - protein, 34 aa, Artificial Sequence; identical to SEQ ID NO: 8154
  GFR-binding peptide
  MOD_RES (31), (33): Xaa is C or S

SEQ ID NO: 70468 - protein, 39 aa, Artificial Sequence; identical to SEQ ID NO: 29445
  GFR-binding peptide
  MOD_RES (6), (7): Xaa is C or S
  MOD_RES (21), (22), (23), (24), (25): Xaa is A or G
  MOD_RES (26), (27), (28), (29): Xaa is A or G or is absent

SEQ ID NO: 70469 - protein, 36 aa, Artificial Sequence
  GFR-binding peptide
  MOD_RES (3), (4), (35): Xaa is C or S
STXXAPVKTEPISMLYLDNGRVLLKFKYEMIVEEXG

SEQ ID NO: 70470 - protein, 41 aa, Artificial Sequence; identical to SEQ ID NO: 8157
  GFR-binding peptide
  MOD_RES (4), (5), (39), (41): Xaa is C or S
  MOD_RES (19), (20), (21), (22), (23): Xaa is A or G
  MOD_RES (24), (25), (26), (27): Xaa is A or G or is absent

SEQ ID NO: 70471 - protein, 37 aa, Artificial Sequence
  GFR-binding peptide
  MOD_RES (6), (7): Xaa is C or S
ASASPXXVPQDLSPINILYFVGRTPKVYGKIPMVVKS

SEQ ID NO: 70472 - protein, 34 aa, Artificial Sequence; identical to SEQ ID NO: 29451
  GFR-binding peptide
  MOD_RES (3), (4): Xaa is C or S

SEQ ID NO: 70473 - protein, 38 aa, Artificial Sequence; identical to SEQ ID NO: 29452
  GFR-binding peptide
  MOD_RES (3), (4), (35), (37): Xaa is C or S

SEQ ID NO: 70474 - protein, 36 aa, Artificial Sequence; identical to SEQ ID NO: 8162
  GFR-binding peptide
  MOD_RES (2), (3), (36): Xaa is C or S
  MOD_RES (17), (18), (19), (20), (21): Xaa is A or G
  MOD_RES (22), (23), (24), (25): Xaa is A or G or is absent

SEQ ID NO: 70475 - protein, 38 aa, Artificial Sequence
  GFR-binding peptide
  MOD_RES (1), (2), (36), (38): Xaa is C or S
  MOD_RES (16), (17), (18), (19), (20): Xaa is A or G
  MOD_RES (21), (22), (23), (24): Xaa is A or G or is absent
XXTPTKMSATSMLYYXXXXXXXXXLRKHRGMVVDRXGX

SEQ ID NO: 70476 - protein, 35 aa, Artificial Sequence; identical to SEQ ID NO: 8164
  GFR-binding peptide
  MOD_RES (32), (34): Xaa is C or S

SEQ ID NO: 70477 - protein, 39 aa, Artificial Sequence
  GFR-binding peptide
  MOD_RES (4), (5), (37), (39): Xaa is C or S
PPTXXVPTRLSPISILYKDSANNVVLKYHYDMVVESXGX

SEQ ID NO: 70478 - protein, 39 aa, Artificial Sequence; identical to SEQ ID NO: 57465
  GFR-binding peptide
  MOD_RES (4), (5), (39): Xaa is C or S
  MOD_RES (19), (20), (21), (22), (23): Xaa is A or G
  MOD_RES (24), (25), (26), (27): Xaa is A or G or is absent

SEQ ID NO: 70479 - protein, 34 aa, Artificial Sequence; identical to SEQ ID NO: 8165
  GFR-binding peptide
  MOD_RES (33), (33): Xaa is C or S
  MOD_RES (14), (15), (16), (17), (18): Xaa is A or G
  MOD_RES (19), (20), (21), (22): Xaa is A or G or is absent

SEQ ID NO: 70480 - protein, 43 aa, Artificial Sequence; identical to SEQ ID NO: 29461
  GFR-binding peptide
  MOD_RES (6), (7), (40), (42): Xaa is C or S

SEQ ID NO: 70481 - protein, 33 aa, Artificial Sequence; identical to SEQ ID NO: 8168
  GFR-binding peptide
  MOD_RES (1), (2), (33): Xaa is C or S

SEQ ID NO: 70482 - protein, 40 aa, Artificial Sequence; identical to SEQ ID NO: 32563
  GFR-binding peptide
  MOD_RES (3), (4), (38), (40): Xaa is C or S
  MOD_RES (18), (19), (20), (21), (22): Xaa is A or G
  MOD_RES (23), (24), (25), (26): Xaa is A or G or is absent

SEQ ID NO: 70483 - protein, 38 aa, Artificial Sequence; identical to SEQ ID NO: 8170
  GFR-binding peptide
  MOD_RES (2), (3), (36), (38): Xaa is C or S

SEQ ID NO: 70484 - protein, 36 aa, Artificial Sequence; identical to SEQ ID NO: 8172
  GFR-binding peptide
  MOD_RES (4), (5): Xaa is C or S

SEQ ID NO: 70485 - protein, 39 aa, Artificial Sequence; identical to SEQ ID NO: 8173
  GFR-binding peptide
  MOD_RES (5), (6), (38): Xaa is C or S

SEQ ID NO: 70486 - protein, 35 aa, Artificial Sequence; identical to SEQ ID NO: 8174
  GFR-binding peptide
  MOD_RES (2), (3): Xaa is C or S
  MOD_RES (17), (18), (19), (20), (21): Xaa is A or G
  MOD_RES (22), (23), (24), (25): Xaa is A or G or is absent

SEQ ID NO: 70487 - protein, 40 aa, Artificial Sequence; identical to SEQ ID NO: 29477
  GFR-binding peptide
  MOD_RES (5), (6), (38), (40): Xaa is C or S

SEQ ID NO: 70488 - protein, 35 aa, Artificial Sequence
  GFR-binding peptide
  MOD_RES (1), (32), (34): Xaa is C or S
XAPVKTEPISMLYLDNGRVLLKFKYEMIVEEXGXL

SEQ ID NO: 70489 - protein, 38 aa, Artificial Sequence; identical to SEQ ID NO: 8178
  GFR-binding peptide
  MOD_RES (4), (5): Xaa is C or S
  MOD_RES (19), (20), (21), (22), (23): Xaa is A or G
  MOD_RES (24), (25), (26), (27): Xaa is A or G or is absent

SEQ ID NO: 70490 - protein, 35 aa, Artificial Sequence; identical to SEQ ID NO: 29483
  GFR-binding peptide
  MOD_RES (33), (35): Xaa is C or S
  MOD_RES (14), (15), (16), (17), (18): Xaa is A or G
  MOD_RES (19), (20), (21), (22): Xaa is A or G or is absent

SEQ ID NO: 70491 - protein, 43 aa, Artificial Sequence; identical to SEQ ID NO: 32582
  GFR-binding peptide
  MOD_RES (6), (7), (41), (43): Xaa is C or S
  MOD_RES (21), (22), (23), (24), (25): Xaa is A or G
  MOD_RES (26), (27), (28), (29): Xaa is A or G or is absent

SEQ ID NO: 70492 - protein, 36 aa, Artificial Sequence; identical to SEQ ID NO: 29484
  GFR-binding peptide
  MOD_RES (2), (3), (36): Xaa is C or S
  MOD_RES (17), (18), (19), (20), (21): Xaa is A or G
  MOD_RES (22), (23), (24), (25): Xaa is A or G or is absent

SEQ ID NO: 70493 - protein, 33 aa, Artificial Sequence; identical to SEQ ID NO: 8184
  GFR-binding peptide
  MOD_RES (2), (3): Xaa is C or S

SEQ ID NO: 70494 - protein, 32 aa, Artificial Sequence; identical to SEQ ID NO: 8185
  GFR-binding peptide
  MOD_RES (14), (15), (16), (17), (18): Xaa is A or G
  MOD_RES (19), (20), (21), (22): Xaa is A or G or is absent

SEQ ID NO: 70495 - protein, 42 aa, Artificial Sequence
  GFR-binding peptide
  MOD_RES (6), (7), (41): Xaa is C or S
  MOD_RES (21), (22), (23), (24), (25): Xaa is A or G
  MOD_RES (26), (27), (28), (29): Xaa is A or G or is absent
GIPEPXXVPEKMEPISILYLXXXXXXXXXKFKYENMTVESXA

SEQ ID NO: 70496 - protein, 36 aa, Artificial Sequence
  GFR-binding peptide
  MOD_RES (1), (2), (34), (36): Xaa is C or S
XXVPEKMEPISILYLDENKNVVKFKYENMTVESXAX

SEQ ID NO: 70497 - protein, 40 aa, Artificial Sequence; identical to SEQ ID NO: 32589
  GFR-binding peptide
  MOD_RES (4), (5), (40): Xaa is C or S
  MOD_RES (19), (20), (21), (22), (23): Xaa is A or G
  MOD_RES (24), (25), (26), (27): Xaa is A or G or is absent

SEQ ID NO: 70498 - protein, 35 aa, Artificial Sequence; identical to SEQ ID NO: 29492
  GFR-binding peptide
  MOD_RES (4), (5): Xaa is C or S

SEQ ID NO: 70499 - protein, 31 aa, Artificial Sequence; identical to SEQ ID NO: 29495
  GFR-binding peptide
  MOD_RES (1), (1): Xaa is C or S

SEQ ID NO: 70500 - protein, 32 aa, Artificial Sequence; identical to SEQ ID NO: 29496
  GFR-binding peptide
  MOD_RES (14), (15), (16), (17), (18): Xaa is A or G
  MOD_RES (19), (20), (21), (22): Xaa is A or G or is absent

SEQ ID NO: 70501 - protein, 31 aa, Artificial Sequence
  GFR-binding peptide
  MOD_RES (1), (1): Xaa is C or S
XAPVKTEPISMLYLDNGRVLLKFKYEMIVEE

SEQ ID NO: 70502 - protein, 36 aa, Artificial Sequence; identical to SEQ ID NO: 29498
  GFR-binding peptide
  MOD_RES (3), (4): Xaa is C or S
  MOD_RES (18), (19), (20), (21), (22): Xaa is A or G
  MOD_RES (23), (24), (25), (26): Xaa is A or G or is absent

SEQ ID NO: 70503 - protein, 33 aa, Artificial Sequence; identical to SEQ ID NO: 29499
  GFR-binding peptide
  MOD_RES (1), (2): Xaa is C or S

SEQ ID NO: 70504 - protein, 37 aa, Artificial Sequence; identical to SEQ ID NO: 29500
  GFR-binding peptide
  MOD_RES (5), (6): Xaa is C or S

SEQ ID NO: 70505 - protein, 34 aa, Artificial Sequence; identical to SEQ ID NO: 8193
  GFR-binding peptide
  MOD_RES (1), (32), (34): Xaa is C or S

SEQ ID NO: 70506 - protein, 37 aa, Artificial Sequence; identical to SEQ ID NO: 29502
  GFR-binding peptide
  MOD_RES (1), (2), (34), (36): Xaa is C or S

SEQ ID NO: 70507 - protein, 38 aa, Artificial Sequence; identical to SEQ ID NO: 29504
  GFR-binding peptide
  MOD_RES (6), (7): Xaa is C or S

SEQ ID NO: 70508 - protein, 41 aa, Artificial Sequence; identical to SEQ ID NO: 29505
  GFR-binding peptide
  MOD_RES (4), (5), (38), (40): Xaa is C or S
  MOD_RES (19), (20), (21), (22), (23): Xaa is A or G
  MOD_RES (24), (25), (26), (27): Xaa is A or G or is absent

SEQ ID NO: 70509 - protein, 43 aa, Artificial Sequence; identical to SEQ ID NO: 32595
  GFR-binding peptide
  MOD_RES (6), (7), (41), (43): Xaa is C or S
  MOD_RES (21), (22), (23), (24), (25): Xaa is A or G
  MOD_RES (26), (27), (28), (29): Xaa is A or G or is absent

SEQ ID NO: 70510 - protein, 35 aa, Artificial Sequence; identical to SEQ ID NO: 32598
  GFR-binding peptide
  MOD_RES (1), (2): Xaa is C or S
  MOD_RES (16), (17), (18), (19), (20): Xaa is A or G
  MOD_RES (21), (22), (23), (24): Xaa is A or G or is absent

SEQ ID NO: 70511 - protein, 37 aa, Artificial Sequence; identical to SEQ ID NO: 32601
  GFR-binding peptide
  MOD_RES (6), (7): Xaa is C or S

SEQ ID NO: 70512 - protein, 35 aa, Artificial Sequence; identical to SEQ ID NO: 8196
  GFR-binding peptide
  MOD_RES (2), (3), (35): Xaa is C or S

SEQ ID NO: 70513 - protein, 34 aa, Artificial Sequence
  GFR-binding peptide
  MOD_RES (2), (3): Xaa is C or S
PXXTPTKMSPISMLYKNDKQQIILKYHYGMVVDR

SEQ ID NO: 70514 - protein, 39 aa, Artificial Sequence; identical to SEQ ID NO: 29509
  GFR-binding peptide
  MOD_RES (3), (4), (37), (39): Xaa is C or S
  MOD_RES (18), (19), (20), (21), (22): Xaa is A or G
  MOD_RES (23), (24), (25), (26): Xaa is A or G or is absent

SEQ ID NO: 70515 - protein, 35 aa, Artificial Sequence; identical to SEQ ID NO: 29510
  GFR-binding peptide
  MOD_RES (1), (2), (35): Xaa is C or S
  MOD_RES (16), (17), (18), (19), (20): Xaa is A or G
  MOD_RES (21), (22), (23), (24): Xaa is A or G or is absent

SEQ ID NO: 70516 - protein, 39 aa, Artificial Sequence; identical to SEQ ID NO: 57510
  GFR-binding peptide
  MOD_RES (4), (5), (36), (38): Xaa is C or S

SEQ ID NO: 70517 - protein, 34 aa, Artificial Sequence; identical to SEQ ID NO: 8198
  GFR-binding peptide
  MOD_RES (14), (15), (16), (17), (18): Xaa is A or G
  MOD_RES (19), (20), (21), (22): Xaa is A or G or is absent

SEQ ID NO: 70518 - protein, 38 aa, Artificial Sequence; identical to SEQ ID NO: 8199
  GFR-binding peptide
  MOD_RES (3), (4), (37): Xaa is C or S
  MOD_RES (18), (19), (20), (21), (22): Xaa is A or G
  MOD_RES (23), (24), (25), (26): Xaa is A or G or is absent

SEQ ID NO: 70519 - protein, 39 aa, Artificial Sequence; identical to SEQ ID NO: 8200
  GFR-binding peptide
  MOD_RES (5), (6): Xaa is C or S
  MOD_RES (20), (21), (22), (23), (24): Xaa is A or G
  MOD_RES (25), (26), (27), (28): Xaa is A or G or is absent

SEQ ID NO: 70520 - protein, 40 aa, Artificial Sequence; identical to SEQ ID NO: 8203
  GFR-binding peptide
  MOD_RES (1), (2), (37), (39): Xaa is C or S
  MOD_RES (16), (17), (18), (19), (20): Xaa is A or G
  MOD_RES (21), (22), (23), (24): Xaa is A or G or is absent

SEQ ID NO: 70521 - protein, 42 aa, Artificial Sequence; identical to SEQ ID NO: 29515
  GFR-binding peptide
  MOD_RES (4), (5), (39), (41): Xaa is C or S
  MOD_RES (19), (20), (21), (22), (23): Xaa is A or G
  MOD_RES (24), (25), (26), (27): Xaa is A or G or is absent

SEQ ID NO: 70522 - protein, 38 aa, Artificial Sequence; identical to SEQ ID NO: 29516
  GFR-binding peptide
  MOD_RES (4), (5), (37): Xaa is C or S

SEQ ID NO: 70523 - protein, 39 aa, Artificial Sequence; identical to SEQ ID NO: 8204
  GFR-binding peptide
  MOD_RES (5), (6), (39): Xaa is C or S
  MOD_RES (20), (21), (22), (23), (24): Xaa is A or G
  MOD_RES (25), (26), (27), (28): Xaa is A or G or is absent

SEQ ID NO: 70524 - protein, 32 aa, Artificial Sequence; identical to SEQ ID NO: 29518
  GFR-binding peptide
  MOD_RES (1), (2): Xaa is C or S

SEQ ID NO: 70525 - protein, 36 aa, Artificial Sequence; identical to SEQ ID NO: 8205
  GFR-binding peptide
  MOD_RES (3), (4): Xaa is C or S
  MOD_RES (18), (19), (20), (21), (22): Xaa is A or G
  MOD_RES (23), (24), (25), (26): Xaa is A or G or is absent

SEQ ID NO: 70526 - protein, 40 aa, Artificial Sequence; identical to SEQ ID NO: 29521
  GFR-binding peptide
  MOD_RES (5), (6), (40): Xaa is C or S
  MOD_RES (20), (21), (22), (23), (24): Xaa is A or G
  MOD_RES (25), (26), (27), (28): Xaa is A or G or is absent

SEQ ID NO: 70527 - protein, 40 aa, Artificial Sequence
  GFR-binding peptide
  MOD_RES (6), (7): Xaa is C or S
  MOD_RES (21), (22), (23), (24), (25): Xaa is A or G
  MOD_RES (26), (27), (28), (29): Xaa is A or G or is absent
AAPASXXVPARLSATSILYYXXXXXXXXXLRKHRDMVVEA

SEQ ID NO: 70528 - protein, 35 aa, Artificial Sequence
  GFR-binding peptide
  MOD_RES (2), (3), (35): Xaa is C or S
TXXVPTRLSPISILYKDSANNVVLKYHYDMVVESX

SEQ ID NO: 70529 - protein, 36 aa, Artificial Sequence; identical to SEQ ID NO: 57526
  GFR-binding peptide
  MOD_RES (3), (4): Xaa is C or S
  MOD_RES (18), (19), (20), (21), (22): Xaa is A or G
  MOD_RES (23), (24), (25), (26): Xaa is A or G or is absent

SEQ ID NO: 70530 - protein, 38 aa, Artificial Sequence; identical to SEQ ID NO: 8206
  GFR-binding peptide
  MOD_RES (1), (35), (37): Xaa is C or S
  MOD_RES (15), (16), (17), (18), (19): Xaa is A or G
  MOD_RES (20), (21), (22), (23): Xaa is A or G or is absent

SEQ ID NO: 70531 - protein, 42 aa, Artificial Sequence
  GFR-binding peptide
  MOD_RES (5), (6), (40), (42): Xaa is C or S
  MOD_RES (20), (21), (22), (23), (24): Xaa is A or G
  MOD_RES (25), (26), (27), (28): Xaa is A or G or is absent
ASKAXXVPTKLSATSILYYXXXXXXXXXLRKHRGMAVSEXGX

SEQ ID NO: 70532 - protein, 37 aa, Artificial Sequence; identical to SEQ ID NO: 32614
  GFR-binding peptide
  MOD_RES (2), (3), (34), (36): Xaa is C or S

SEQ ID NO: 70533 - protein, 39 aa, Artificial Sequence; identical to SEQ ID NO: 32615
  GFR-binding peptide
  MOD_RES (3), (4), (36), (38): Xaa is C or S

SEQ ID NO: 70534 - protein, 38 aa, Artificial Sequence; identical to SEQ ID NO: 15515
  GFR-binding peptide
  MOD_RES (3), (4), (36), (38): Xaa is C or S

SEQ ID NO: 70535 - protein, 39 aa, Artificial Sequence; identical to SEQ ID NO: 29524
  GFR-binding peptide
  MOD_RES (5), (6): Xaa is C or S
  MOD_RES (20), (21), (22), (23), (24): Xaa is A or G
  MOD_RES (25), (26), (27), (28): Xaa is A or G or is absent

SEQ ID NO: 70536 - protein, 40 aa, Artificial Sequence
  GFR-binding peptide
  MOD_RES (3), (4), (38), (40): Xaa is C or S
  MOD_RES (18), (19), (20), (21), (22): Xaa is A or G
  MOD_RES (23), (24), (25), (26): Xaa is A or G or is absent
EPXXVPEKMSATSILYYXXXXXXXXXLRKHRNMTVESXAX

SEQ ID NO: 70537 - protein, 32 aa, Artificial Sequence
  GFR-binding peptide
  MOD_RES (14), (15), (16), (17), (18): Xaa is A or G
  MOD_RES (19), (20), (21), (22): Xaa is A or G or is absent
APVKTEPISMLYLXXXXXXXXXKFKYEMIVEE

SEQ ID NO: 70538 - protein, 42 aa, Artificial Sequence; identical to SEQ ID NO: 29526
  GFR-binding peptide
  MOD_RES (4), (5), (39), (41): Xaa is C or S
  MOD_RES (19), (20), (21), (22), (23): Xaa is A or G
  MOD_RES (24), (25), (26), (27): Xaa is A or G or is absent

SEQ ID NO: 70539 - protein, 40 aa, Artificial Sequence; identical to SEQ ID NO: 8211
  GFR-binding peptide
  MOD_RES (5), (6), (39): Xaa is C or S
  MOD_RES (20), (21), (22), (23), (24): Xaa is A or G
  MOD_RES (25), (26), (27), (28): Xaa is A or G or is absent

SEQ ID NO: 70540 - protein, 39 aa, Artificial Sequence; identical to SEQ ID NO: 8213
  GFR-binding peptide
  MOD_RES (6), (7): Xaa is C or S
  MOD_RES (21), (22), (23), (24), (25): Xaa is A or G
  MOD_RES (26), (27), (28), (29): Xaa is A or G or is absent

SEQ ID NO: 70541 - protein, 40 aa, Artificial Sequence; identical to SEQ ID NO: 29531
  GFR-binding peptide
  MOD_RES (5), (6), (37), (39): Xaa is C or S

SEQ ID NO: 70542 - protein, 36 aa, Artificial Sequence; identical to SEQ ID NO: 8216
  GFR-binding peptide
  MOD_RES (3), (4): Xaa is C or S
  MOD_RES (18), (19), (20), (21), (22): Xaa is A or G
  MOD_RES (23), (24), (25), (26): Xaa is A or G or is absent

SEQ ID NO: 70543 - protein, 39 aa, Artificial Sequence
  GFR-binding peptide
  MOD_RES (5), (6), (37), (39): Xaa is C or S
SAAPXXVPQALSPINILYFVGRKPKVYGKIPMIVRSXKX

SEQ ID NO: 70544 - protein, 36 aa, Artificial Sequence; identical to SEQ ID NO: 57533
  GFR-binding peptide
  MOD_RES (3), (4), (36): Xaa is C or S

SEQ ID NO: 70545 - protein, 38 aa, Artificial Sequence; identical to SEQ ID NO: 32629
  GFR-binding peptide
  MOD_RES (5), (6), (38): Xaa is C or S

SEQ ID NO: 70546 - protein, 39 aa, Artificial Sequence
  GFR-binding peptide
  MOD_RES (6), (7): Xaa is C or S
  MOD_RES (21), (22), (23), (24), (25): Xaa is A or G
  MOD_RES (26), (27), (28), (29): Xaa is A or G or is absent
RVPSTXXAPVKTSPISMLYKXXXXXXXXXLKYHYMIVEE

SEQ ID NO: 70547 - protein, 42 aa, Artificial Sequence; identical to SEQ ID NO: 32631
  GFR-binding peptide
  MOD_RES (5), (6), (40), (42): Xaa is C or S
  MOD_RES (20), (21), (22), (23), (24): Xaa is A or G
  MOD_RES (25), (26), (27), (28): Xaa is A or G or is absent

SEQ ID NO: 70548 - protein, 36 aa, Artificial Sequence; identical to SEQ ID NO: 32632
  GFR-binding peptide
  MOD_RES (1), (35): Xaa is C or S
  MOD_RES (15), (16), (17), (18), (19): Xaa is A or G
  MOD_RES (20), (21), (22), (23): Xaa is A or G or is absent

SEQ ID NO: 70549 - protein, 42 aa, Artificial Sequence
  GFR-binding peptide
  MOD_RES (4), (5), (39), (41): Xaa is C or S
  MOD_RES (19), (20), (21), (22), (23): Xaa is A or G
  MOD_RES (24), (25), (26), (27): Xaa is A or G or is absent
AGPXXTPTKMEPISMLYLXXXXXXXXXKFKYEGMVVDRXGXS

SEQ ID NO: 70550 - protein, 41 aa, Artificial Sequence; identical to SEQ ID NO: 29538
  GFR-binding peptide
  MOD_RES (5), (6), (39), (41): Xaa is C or S
  MOD_RES (20), (21), (22), (23), (24): Xaa is A or G
  MOD_RES (25), (26), (27), (28): Xaa is A or G or is absent

SEQ ID NO: 70551 - protein, 41 aa, Artificial Sequence
  GFR-binding peptide
  MOD_RES (5), (6), (38), (40): Xaa is C or S
IPEPXXVPEKMNAISILYFDENKNVVLKKYRNMTVESXAXR

SEQ ID NO: 70552 - protein, 36 aa, Artificial Sequence; identical to SEQ ID NO: 29542
  GFR-binding peptide
  MOD_RES (2), (3): Xaa is C or S
  MOD_RES (17), (18), (19), (20), (21): Xaa is A or G
  MOD_RES (22), (23), (24), (25): Xaa is A or G or is absent

SEQ ID NO: 70553 - protein, 34 aa, Artificial Sequence; identical to SEQ ID NO: 29545
  GFR-binding peptide
  MOD_RES (2), (3): Xaa is C or S

SEQ ID NO: 70554 - protein, 36 aa, Artificial Sequence
  GFR-binding peptide
  MOD_RES (34), (36): Xaa is C or S
  MOD_RES (14), (15), (16), (17), (18): Xaa is A or G
  MOD_RES (19), (20), (21), (22): Xaa is A or G or is absent
TPTKMEPISMLYLXXXXXXXXXKFKYEGMVVDRXGX

SEQ ID NO: 70555 - protein, 37 aa, Artificial Sequence; identical to SEQ ID NO: 8227
  GFR-binding peptide
  MOD_RES (3), (4), (36): Xaa is C or S

SEQ ID NO: 70556 - protein, 38 aa, Artificial Sequence
  GFR-binding peptide
  MOD_RES (1), (2), (36), (38): Xaa is C or S
  MOD_RES (16), (17), (18), (19), (20): Xaa is A or G
  MOD_RES (21), (22), (23), (24): Xaa is A or G or is absent
XXVPEKMNAISILYFXXXXXXXXXLKKYRNMTVESXAX

SEQ ID NO: 70557 - protein, 38 aa, Artificial Sequence; identical to SEQ ID NO: 32645
  GFR-binding peptide
  MOD_RES (2), (3), (37): Xaa is C or S
  MOD_RES (17), (18), (19), (20), (21): Xaa is A or G
  MOD_RES (22), (23), (24), (25): Xaa is A or G or is absent

SEQ ID NO: 70558 - protein, 34 aa, Artificial Sequence; identical to SEQ ID NO: 8229
  GFR-binding peptide
  MOD_RES (33), (33): Xaa is C or S
  MOD_RES (14), (15), (16), (17), (18): Xaa is A or G
  MOD_RES (19), (20), (21), (22): Xaa is A or G or is absent

SEQ ID NO: 70559 - protein, 39 aa, Artificial Sequence
  GFR-binding peptide
  MOD_RES (5), (6), (38): Xaa is C or S
SAGPXXTPTKMEPISMLYLNDKQQIIKFKYEGMVVDRXG

SEQ ID NO: 70560 - protein, 36 aa, Artificial Sequence; identical to SEQ ID NO: 32647
  GFR-binding peptide
  MOD_RES (2), (3), (36): Xaa is C or S

SEQ ID NO: 70561 - protein, 40 aa, Artificial Sequence; identical to SEQ ID NO: 29553
  GFR-binding peptide
  MOD_RES (4), (5), (37), (39): Xaa is C or S

SEQ ID NO: 70562 - protein, 39 aa, Artificial Sequence; identical to SEQ ID NO: 32650
  GFR-binding peptide
  MOD_RES (2), (3), (37), (39): Xaa is C or S
  MOD_RES (17), (18), (19), (20), (21): Xaa is A or G
  MOD_RES (22), (23), (24), (25): Xaa is A or G or is absent

SEQ ID NO: 70563 - protein, 37 aa, Artificial Sequence
  GFR-binding peptide
  MOD_RES (2), (3), (37): Xaa is C or S
  MOD_RES (17), (18), (19), (20), (21): Xaa is A or G
  MOD_RES (22), (23), (24), (25): Xaa is A or G or is absent
PXXTPTKMEPISMLYLXXXXXXXXXKFKYEGMVVDRX

SEQ ID NO: 70564 - protein, 34 aa, Artificial Sequence; identical to SEQ ID NO: 32652
  GFR-binding peptide
  MOD_RES (1), (33): Xaa is C or S

SEQ ID NO: 70565 - protein, 35 aa, Artificial Sequence
  GFR-binding peptide
  MOD_RES (1), (33), (35): Xaa is C or S
XVPTRLEPISILYLDSANNVVKFKYEDMVVESXGX

SEQ ID NO: 70566 - protein, 41 aa, Artificial Sequence; identical to SEQ ID NO: 8234
  GFR-binding peptide
  MOD_RES (6), (7), (39), (41): Xaa is C or S

SEQ ID NO: 70567 - protein, 36 aa, Artificial Sequence; identical to SEQ ID NO: 32653
  GFR-binding peptide
  MOD_RES (3), (4), (36): Xaa is C or S

SEQ ID NO: 70568 - protein, 42 aa, Artificial Sequence; identical to SEQ ID NO: 8235
  GFR-binding peptide
  MOD_RES (5), (6), (40), (42): Xaa is C or S
  MOD_RES (20), (21), (22), (23), (24): Xaa is A or G
  MOD_RES (25), (26), (27), (28): Xaa is A or G or is absent

SEQ ID NO: 70569 - protein, 38 aa, Artificial Sequence; identical to SEQ ID NO: 32654
  GFR-binding peptide
  MOD_RES (4), (5): Xaa is C or S
  MOD_RES (19), (20), (21), (22), (23): Xaa is A or G
  MOD_RES (24), (25), (26), (27): Xaa is A or G or is absent

SEQ ID NO: 70570 - protein, 35 aa, Artificial Sequence; identical to SEQ ID NO: 8240
  GFR-binding peptide
  MOD_RES (1), (2): Xaa is C or S
  MOD_RES (16), (17), (18), (19), (20): Xaa is A or G
  MOD_RES (21), (22), (23), (24): Xaa is A or G or is absent

SEQ ID NO: 70571 - protein, 37 aa, Artificial Sequence; identical to SEQ ID NO: 8242
  GFR-binding peptide
  MOD_RES (4), (36): Xaa is C or S

SEQ ID NO: 70572 - protein, 37 aa, Artificial Sequence; identical to SEQ ID NO: 8243
  GFR-binding peptide
  MOD_RES (4), (5): Xaa is C or S
  MOD_RES (19), (20), (21), (22), (23): Xaa is A or G
  MOD_RES (24), (25), (26), (27): Xaa is A or G or is absent

SEQ ID NO: 70573 - protein, 43 aa, Artificial Sequence; identical to SEQ ID NO: 8244
  GFR-binding peptide
  MOD_RES (6), (40), (42): Xaa is C or S
  MOD_RES (20), (21), (22), (23), (24): Xaa is A or G
  MOD_RES (25), (26), (27), (28): Xaa is A or G or is absent

SEQ ID NO: 70574 - protein, 37 aa, Artificial Sequence; identical to SEQ ID NO: 8245
  GFR-binding peptide
  MOD_RES (2), (3), (35), (37): Xaa is C or S

SEQ ID NO: 70575 - protein, 36 aa, Artificial Sequence; identical to SEQ ID NO: 29565
  GFR-binding peptide
  MOD_RES (34), (36): Xaa is C or S
  MOD_RES (14), (15), (16), (17), (18): Xaa is A or G
  MOD_RES (19), (20), (21), (22): Xaa is A or G or is absent

SEQ ID NO: 70576 - protein, 36 aa, Artificial Sequence; identical to SEQ ID NO: 32668
  GFR-binding peptide
  MOD_RES (2), (3): Xaa is C or S
  MOD_RES (17), (18), (19), (20), (21): Xaa is A or G
  MOD_RES (22), (23), (24), (25): Xaa is A or G or is absent

SEQ ID NO: 70577 - protein, 38 aa, Artificial Sequence
  GFR-binding peptide
  MOD_RES (2), (3), (37): Xaa is C or S
  MOD_RES (17), (18), (19), (20), (21): Xaa is A or G
  MOD_RES (22), (23), (24), (25): Xaa is A or G or is absent
PXXVPEKMSPINILYFXXXXXXXXXYGKIPNMTVESXA

SEQ ID NO: 70578 - protein, 33 aa, Artificial Sequence
  GFR-binding peptide
  MOD_RES (32), (32): Xaa is C or S
VPEKMSPISILYKDENKNVVLKYHYNMTVESXA

SEQ ID NO: 70579 - protein, 35 aa, Artificial Sequence; identical to SEQ ID NO: 8252
  GFR-binding peptide
  MOD_RES (3), (4): Xaa is C or S

SEQ ID NO: 70580 - protein, 37 aa, Artificial Sequence; identical to SEQ ID NO: 8253
  GFR-binding peptide
  MOD_RES (1), (35), (37): Xaa is C or S
  MOD_RES (15), (16), (17), (18), (19): Xaa is A or G
  MOD_RES (20), (21), (22), (23): Xaa is A or G or is absent

SEQ ID NO: 70581 - protein, 36 aa, Artificial Sequence; identical to SEQ ID NO: 29570
  GFR-binding peptide
  MOD_RES (1), (35): Xaa is C or S
  MOD_RES (15), (16), (17), (18), (19): Xaa is A or G
  MOD_RES (20), (21), (22), (23): Xaa is A or G or is absent

SEQ ID NO: 70582 - protein, 37 aa, Artificial Sequence
  GFR-binding peptide
  MOD_RES (2), (3), (34), (36): Xaa is C or S
PXXVSQDLSPINILYFIGKTPKIYGKIPMIVKSXKXS

SEQ ID NO: 70583 - protein, 36 aa, Artificial Sequence; identical to SEQ ID NO: 29572
  GFR-binding peptide
  MOD_RES (5), (6): Xaa is C or S

SEQ ID NO: 70584 - protein, 36 aa, Artificial Sequence
  GFR-binding peptide
  MOD_RES (34), (36): Xaa is C or S
  MOD_RES (14), (15), (16), (17), (18): Xaa is A or G
  MOD_RES (19), (20), (21), (22): Xaa is A or G or is absent
TPTKMSATSMLYYXXXXXXXXXLRKHRGMVVDRXGX

SEQ ID NO: 70585 - protein, 38 aa, Artificial Sequence; identical to SEQ ID NO: 32679
  GFR-binding peptide
  MOD_RES (6), (7): Xaa is C or S

SEQ ID NO: 70586 - protein, 38 aa, Artificial Sequence; identical to SEQ ID NO: 8254
  GFR-binding peptide
  MOD_RES (2), (3), (35), (37): Xaa is C or S

SEQ ID NO: 70587 - protein, 34 aa, Artificial Sequence; identical to SEQ ID NO: 32681
  GFR-binding peptide
  MOD_RES (1), (2): Xaa is C or S
  MOD_RES (16), (17), (18), (19), (20): Xaa is A or G
  MOD_RES (21), (22), (23), (24): Xaa is A or G or is absent

SEQ ID NO: 70588 - protein, 34 aa, Artificial Sequence; identical to SEQ ID NO: 32682
  GFR-binding peptide
  MOD_RES (1), (2): Xaa is C or S
  MOD_RES (16), (17), (18), (19), (20): Xaa is A or G
  MOD_RES (21), (22), (23), (24): Xaa is A or G or is absent

SEQ ID NO: 70589 - protein, 35 aa, Artificial Sequence; identical to SEQ ID NO: 29576
  GFR-binding peptide
  MOD_RES (1), (1): Xaa is C or S
  MOD_RES (15), (16), (17), (18), (19): Xaa is A or G
  MOD_RES (20), (21), (22), (23): Xaa is A or G or is absent

SEQ ID NO: 70590 - protein, 39 aa, Artificial Sequence; identical to SEQ ID NO: 29577
  GFR-binding peptide
  MOD_RES (2), (3), (36), (38): Xaa is C or S
  MOD_RES (17), (18), (19), (20), (21): Xaa is A or G
  MOD_RES (22), (23), (24), (25): Xaa is A or G or is absent

SEQ ID NO: 70591 - protein, 41 aa, Artificial Sequence; identical to SEQ ID NO: 29578
  GFR-binding peptide
  MOD_RES (5), (39), (41): Xaa is C or S
  MOD_RES (19), (20), (21), (22), (23): Xaa is A or G
  MOD_RES (24), (25), (26), (27): Xaa is A or G or is absent

SEQ ID NO: 70592 - protein, 38 aa, Artificial Sequence; identical to SEQ ID NO: 29582
  GFR-binding peptide
  MOD_RES (3), (4), (36), (38): Xaa is C or S

SEQ ID NO: 70593 - protein, 35 aa, Artificial Sequence; identical to SEQ ID NO: 8261
  GFR-binding peptide
  MOD_RES (32), (34): Xaa is C or S

SEQ ID NO: 70594 - protein, 34 aa, Artificial Sequence; identical to SEQ ID NO: 8263
  GFR-binding peptide
  MOD_RES (2), (3): Xaa is C or S

SEQ ID NO: 70595 - protein, 37 aa, Artificial Sequence; identical to SEQ ID NO: 8265
  GFR-binding peptide
  MOD_RES (4), (4): Xaa is C or S
  MOD_RES (18), (19), (20), (21), (22): Xaa is A or G
  MOD_RES (23), (24), (25), (26): Xaa is A or G or is absent

SEQ ID NO: 70596 - protein, 34 aa, Artificial Sequence
  GFR-binding peptide
  MOD_RES (2), (3): Xaa is C or S
PXXVPEKMEPISILYLDENKNVVKFKYENMTVES

SEQ ID NO: 70597 - protein, 38 aa, Artificial Sequence; identical to SEQ ID NO: 29589
  GFR-binding peptide
  MOD_RES (2), (3), (35), (37): Xaa is C or S

SEQ ID NO: 70598 - protein, 38 aa, Artificial Sequence; identical to SEQ ID NO: 29592
  GFR-binding peptide
  MOD_RES (1), (2), (36), (38): Xaa is C or S
  MOD_RES (16), (17), (18), (19), (20): Xaa is A or G
  MOD_RES (21), (22), (23), (24): Xaa is A or G or is absent

SEQ ID NO: 70599 - protein, 39 aa, Artificial Sequence; identical to SEQ ID NO: 29595
  GFR-binding peptide
  MOD_RES (4), (5), (37), (39): Xaa is C or S

SEQ ID NO: 70600 - protein, 38 aa, Artificial Sequence; identical to SEQ ID NO: 8272
  GFR-binding peptide
  MOD_RES (3), (4), (38): Xaa is C or S
  MOD_RES (18), (19), (20), (21), (22): Xaa is A or G
  MOD_RES (23), (24), (25), (26): Xaa is A or G or is absent

SEQ ID NO: 70601 - protein, 34 aa, Artificial Sequence; identical to SEQ ID NO: 8274
  GFR-binding peptide
  MOD_RES (3), (4): Xaa is C or S

SEQ ID NO: 70602 - protein, 40 aa, Artificial Sequence; identical to SEQ ID NO: 8275
  GFR-binding peptide
  MOD_RES (6), (7): Xaa is C or S
  MOD_RES (21), (22), (23), (24), (25): Xaa is A or G
  MOD_RES (26), (27), (28), (29): Xaa is A or G or is absent

SEQ ID NO: 70603 - protein, 36 aa, Artificial Sequence
  GFR-binding peptide
  MOD_RES (2), (3), (36): Xaa is C or S
  MOD_RES (17), (18), (19), (20), (21): Xaa is A or G
  MOD_RES (22), (23), (24), (25): Xaa is A or G or is absent
PXXVPQALSPINILYFXXXXXXXXXYGKIPMIVRSX

SEQ ID NO: 70604 - protein, 38 aa, Artificial Sequence; identical to SEQ ID NO: 8279
  GFR-binding peptide
  MOD_RES (2), (3), (36), (38): Xaa is C or S
  MOD_RES (17), (18), (19), (20), (21): Xaa is A or G
  MOD_RES (22), (23), (24), (25): Xaa is A or G or is absent

SEQ ID NO: 70605 - protein, 39 aa, Artificial Sequence; identical to SEQ ID NO: 8280
  GFR-binding peptide
  MOD_RES (2), (3), (36), (38): Xaa is C or S
  MOD_RES (17), (18), (19), (20), (21): Xaa is A or G
  MOD_RES (22), (23), (24), (25): Xaa is A or G or is absent

SEQ ID NO: 70606 - protein, 41 aa, Artificial Sequence
  GFR-binding peptide
  MOD_RES (5), (6), (38), (40): Xaa is C or S
TPPTXXVPTRLEPISILYLDSANNVVKFKYEDMVVESXGXR

SEQ ID NO: 70607 - protein, 36 aa, Artificial Sequence
  GFR-binding peptide
  MOD_RES (33), (35): Xaa is C or S
  MOD_RES (14), (15), (16), (17), (18): Xaa is A or G
  MOD_RES (19), (20), (21), (22): Xaa is A or G or is absent
VSQDLSPINILYFXXXXXXXXXYGKIPMIVKSXKXS

SEQ ID NO: 70608 - protein, 41 aa, Artificial Sequence; identical to SEQ ID NO: 29603
  GFR-binding peptide
  MOD_RES (6), (7), (41): Xaa is C or S
  MOD_RES (21), (22), (23), (24), (25): Xaa is A or G
  MOD_RES (26), (27), (28), (29): Xaa is A or G or is absent

SEQ ID NO: 70609 - protein, 36 aa, Artificial Sequence; identical to SEQ ID NO: 32701
  GFR-binding peptide
  MOD_RES (34), (36): Xaa is C or S
  MOD_RES (14), (15), (16), (17), (18): Xaa is A or G
  MOD_RES (19), (20), (21), (22): Xaa is A or G or is absent

SEQ ID NO: 70610 - protein, 38 aa, Artificial Sequence; identical to SEQ ID NO: 8281
  GFR-binding peptide
  MOD_RES (5), (6), (38): Xaa is C or S

SEQ ID NO: 70611 - protein, 36 aa, Artificial Sequence; identical to SEQ ID NO: 8285
  GFR-binding peptide
  MOD_RES (3), (3): Xaa is C or S
  MOD_RES (17), (18), (19), (20), (21): Xaa is A or G
  MOD_RES (22), (23), (24), (25): Xaa is A or G or is absent

SEQ ID NO: 70612 - protein, 33 aa, Artificial Sequence
  GFR-binding peptide
  MOD_RES (2), (3): Xaa is C or S
PXXVSQDLSPINILYFIGKTPKIYGKIPMIVKS

SEQ ID NO: 70613 - protein, 37 aa, Artificial Sequence; identical to SEQ ID NO: 32706
  GFR-binding peptide
  MOD_RES (3), (4), (36): Xaa is C or S

SEQ ID NO: 70614 - protein, 36 aa, Artificial Sequence; identical to SEQ ID NO: 8288
  GFR-binding peptide
  MOD_RES (3), (4), (35): Xaa is C or S

SEQ ID NO: 70615 - protein, 36 aa, Artificial Sequence; identical to SEQ ID NO: 32709
  GFR-binding peptide
  MOD_RES (4), (5): Xaa is C or S

SEQ ID NO: 70616 - protein, 37 aa, Artificial Sequence; identical to SEQ ID NO: 8292
  GFR-binding peptide
  MOD_RES (34), (36): Xaa is C or S
  MOD_RES (14), (15), (16), (17), (18): Xaa is A or G
  MOD_RES (19), (20), (21), (22): Xaa is A or G or is absent

SEQ ID NO: 70617 - protein, 36 aa, Artificial Sequence; identical to SEQ ID NO: 29614
  GFR-binding peptide
  MOD_RES (5), (6): Xaa is C or S

SEQ ID NO: 70618 - protein, 32 aa, Artificial Sequence; identical to SEQ ID NO: 8300
  GFR-binding peptide
  MOD_RES (14), (15), (16), (17), (18): Xaa is A or G
  MOD_RES (19), (20), (21), (22): Xaa is A or G or is absent

SEQ ID NO: 70619 - protein, 38 aa, Artificial Sequence; identical to SEQ ID NO: 29616
  GFR-binding peptide
  MOD_RES (5), (6), (38): Xaa is C or S

SEQ ID NO: 70620 - protein, 40 aa, Artificial Sequence
  GFR-binding peptide
  MOD_RES (4), (5), (37), (39): Xaa is C or S
PEPXXVPEKMNAISILYFDENKNVVLKKYRNMTVESXAXR

SEQ ID NO: 70621 - protein, 42 aa, Artificial Sequence; identical to SEQ ID NO: 29618
  GFR-binding peptide
  MOD_RES (4), (5), (39), (41): Xaa is C or S
  MOD_RES (19), (20), (21), (22), (23): Xaa is A or G
  MOD_RES (24), (25), (26), (27): Xaa is A or G or is absent

SEQ ID NO: 70622 - protein, 43 aa, Artificial Sequence; identical to SEQ ID NO: 32725
  GFR-binding peptide
  MOD_RES (5), (6), (40), (42): Xaa is C or S
  MOD_RES (20), (21), (22), (23), (24): Xaa is A or G
  MOD_RES (25), (26), (27), (28): Xaa is A or G or is absent

SEQ ID NO: 70623 - protein, 41 aa, Artificial Sequence; identical to SEQ ID NO: 29619
  GFR-binding peptide
  MOD_RES (5), (6), (38), (40): Xaa is C or S

SEQ ID NO: 70624 - protein, 39 aa, Artificial Sequence; identical to SEQ ID NO: 32728
  GFR-binding peptide
  MOD_RES (1), (36), (38): Xaa is C or S
  MOD_RES (15), (16), (17), (18), (19): Xaa is A or G
  MOD_RES (20), (21), (22), (23): Xaa is A or G or is absent

SEQ ID NO: 70625 - protein, 36 aa, Artificial Sequence; identical to SEQ ID NO: 29625
  GFR-binding peptide
  MOD_RES (1), (2), (36): Xaa is C or S
  MOD_RES (16), (17), (18), (19), (20): Xaa is A or G
  MOD_RES (21), (22), (23), (24): Xaa is A or G or is absent

SEQ ID NO: 70626 - protein, 38 aa, Artificial Sequence; identical to SEQ ID NO: 8307
  GFR-binding peptide
  MOD_RES (1), (35), (37): Xaa is C or S
  MOD_RES (15), (16), (17), (18), (19): Xaa is A or G
  MOD_RES (20), (21), (22), (23): Xaa is A or G or is absent

SEQ ID NO: 70627 - protein, 35 aa, Artificial Sequence; identical to SEQ ID NO: 8308
  GFR-binding peptide
  MOD_RES (1), (34): Xaa is C or S
  MOD_RES (15), (16), (17), (18), (19): Xaa is A or G
  MOD_RES (20), (21), (22), (23): Xaa is A or G or is absent

SEQ ID NO: 70628 - protein, 39 aa, Artificial Sequence
  GFR-binding peptide
  MOD_RES (6), (7): Xaa is C or S
  MOD_RES (21), (22), (23), (24), (25): Xaa is A or G
  MOD_RES (26), (27), (28), (29): Xaa is A or G or is absent
HVPKPXXAPTKLSPISVLYKXXXXXXXXXLKYHYNMVVR

SEQ ID NO: 70629 - protein, 44 aa, Artificial Sequence
  GFR-binding peptide
  MOD_RES (6), (7), (41), (43): Xaa is C or S
  MOD_RES (21), (22), (23), (24), (25): Xaa is A or G
  MOD_RES (26), (27), (28), (29): Xaa is A or G or is absent
STPPTXXVPTRLSPISILYKXXXXXXXXXLKYHYDMVVESXGXR

SEQ ID NO: 70630 - protein, 37 aa, Artificial Sequence; identical to SEQ ID NO: 8309
  GFR-binding peptide
  MOD_RES (2), (3), (37): Xaa is C or S
  MOD_RES (17), (18), (19), (20), (21): Xaa is A or G
  MOD_RES (22), (23), (24), (25): Xaa is A or G or is absent

SEQ ID NO: 70631 - protein, 35 aa, Artificial Sequence
  GFR-binding peptide
  MOD_RES (3), (4), (35): Xaa is C or S
SPXXVSQDLSPINILYFIGKTPKIYGKIPMIVKSX

SEQ ID NO: 70632 - protein, 38 aa, Artificial Sequence
  GFR-binding peptide
  MOD_RES (5), (6), (38): Xaa is C or S
SAGPXXTPTKMEPISMLYLNDKQQIIKFKYEGMVVDRX

SEQ ID NO: 70633 - protein, 37 aa, Artificial Sequence; identical to SEQ ID NO: 8313
  GFR-binding peptide
  MOD_RES (1), (2), (36): Xaa is C or S
  MOD_RES (16), (17), (18), (19), (20): Xaa is A or G
  MOD_RES (21), (22), (23), (24): Xaa is A or G or is absent

SEQ ID NO: 70634 - protein, 42 aa, Artificial Sequence; identical to SEQ ID NO: 57645
  GFR-binding peptide
  MOD_RES (4), (5), (39), (41): Xaa is C or S
  MOD_RES (19), (20), (21), (22), (23): Xaa is A or G
  MOD_RES (24), (25), (26), (27): Xaa is A or G or is absent

SEQ ID NO: 70635 - protein, 41 aa, Artificial Sequence
  GFR-binding peptide
  MOD_RES (5), (6), (40): Xaa is C or S
  MOD_RES (20), (21), (22), (23), (24): Xaa is A or G
  MOD_RES (25), (26), (27), (28): Xaa is A or G or is absent
SAGPXXTPTKMSPISMLYKXXXXXXXXXLKYHYGMVVDRXG

SEQ ID NO: 70636 - protein, 37 aa, Artificial Sequence; identical to SEQ ID NO: 57646
  GFR-binding peptide
  MOD_RES (1), (2), (36): Xaa is C or S
  MOD_RES (16), (17), (18), (19), (20): Xaa is A or G
  MOD_RES (21), (22), (23), (24): Xaa is A or G or is absent

SEQ ID NO: 70637 - protein, 36 aa, Artificial Sequence; identical to SEQ ID NO: 8317
  GFR-binding peptide
  MOD_RES (3), (4): Xaa is C or S
  MOD_RES (18), (19), (20), (21), (22): Xaa is A or G
  MOD_RES (23), (24), (25), (26): Xaa is A or G or is absent

SEQ ID NO: 70638 - protein, 40 aa, Artificial Sequence; identical to SEQ ID NO: 29637
  GFR-binding peptide
  MOD_RES (6), (7), (40): Xaa is C or S
  MOD_RES (21), (22), (23), (24), (25): Xaa is A or G
  MOD_RES (26), (27), (28), (29): Xaa is A or G or is absent

SEQ ID NO: 70639 - protein, 36 aa, Artificial Sequence; identical to SEQ ID NO: 32740
  GFR-binding peptide
  MOD_RES (1), (33), (35): Xaa is C or S

SEQ ID NO: 70640 - protein, 35 aa, Artificial Sequence
  GFR-binding peptide
  MOD_RES (3), (4): Xaa is C or S
GPXXTPTKMSATSMLYYNDKQQIILRKHRGMVVDR

SEQ ID NO: 70641 - protein, 38 aa, Artificial Sequence; identical to SEQ ID NO: 8321
  GFR-binding peptide
  MOD_RES (3), (4), (38): Xaa is C or S
  MOD_RES (18), (19), (20), (21), (22): Xaa is A or G
  MOD_RES (23), (24), (25), (26): Xaa is A or G or is absent

SEQ ID NO: 70642 - protein, 36 aa, Artificial Sequence; identical to SEQ ID NO: 8325
  GFR-binding peptide
  MOD_RES (1), (2), (33), (35): Xaa is C or S

SEQ ID NO: 70643 - protein, 34 aa, Artificial Sequence; identical to SEQ ID NO: 8327
  GFR-binding peptide
  MOD_RES (3), (4): Xaa is C or S

SEQ ID NO: 70644 - protein, 40 aa, Artificial Sequence; identical to SEQ ID NO: 8330
  GFR-binding peptide
  MOD_RES (6), (38), (40): Xaa is C or S

SEQ ID NO: 70645 - protein, 35 aa, Artificial Sequence; identical to SEQ ID NO: 29649
  GFR-binding peptide
  MOD_RES (1), (2), (34): Xaa is C or S

SEQ ID NO: 70646 - protein, 33 aa, Artificial Sequence; identical to SEQ ID NO: 15627
  GFR-binding peptide
  MOD_RES (1), (1): Xaa is C or S
  MOD_RES (15), (16), (17), (18), (19): Xaa is A or G
  MOD_RES (20), (21), (22), (23): Xaa is A or G or is absent

SEQ ID NO: 70647 - protein, 43 aa, Artificial Sequence; identical to SEQ ID NO: 8332
  GFR-binding peptide
  MOD_RES (7), (41), (43): Xaa is C or S
  MOD_RES (21), (22), (23), (24), (25): Xaa is A or G
  MOD_RES (26), (27), (28), (29): Xaa is A or G or is absent

SEQ ID NO: 70648 - protein, 37 aa, Artificial Sequence
  GFR-binding peptide
  MOD_RES (4), (5): Xaa is C or S
  MOD_RES (19), (20), (21), (22), (23): Xaa is A or G
  MOD_RES (24), (25), (26), (27): Xaa is A or G or is absent
PEPXXVPEKMEPISILYLXXXXXXXXXKFKYENMTVE

SEQ ID NO: 70649 - protein, 37 aa, Artificial Sequence; identical to SEQ ID NO: 29652
  GFR-binding peptide
  MOD_RES (34), (36): Xaa is C or S
  MOD_RES (14), (15), (16), (17), (18): Xaa is A or G
  MOD_RES (19), (20), (21), (22): Xaa is A or G or is absent

SEQ ID NO: 70650 - protein, 40 aa, Artificial Sequence; identical to SEQ ID NO: 8335
  GFR-binding peptide
  MOD_RES (5), (6), (40): Xaa is C or S
  MOD_RES (20), (21), (22), (23), (24): Xaa is A or G
  MOD_RES (25), (26), (27), (28): Xaa is A or G or is absent

SEQ ID NO: 70651 - protein, 33 aa, Artificial Sequence; identical to SEQ ID NO: 8336
  GFR-binding peptide
  MOD_RES (1), (33): Xaa is C or S

SEQ ID NO: 70652 - protein, 31 aa, Artificial Sequence; identical to SEQ ID NO: 8338
  GFR-binding peptide
  MOD_RES (31), (31): Xaa is C or S

SEQ ID NO: 70653 - protein, 41 aa, Artificial Sequence
  GFR-binding peptide
  MOD_RES (6), (7), (39), (41): Xaa is C or S
GIPEPXXVPEKMSPINILYFDENKNVVYGKIPNMTVESXAX

SEQ ID NO: 70654 - protein, 34 aa, Artificial Sequence
  GFR-binding peptide
  MOD_RES (1), (1): Xaa is C or S
  MOD_RES (15), (16), (17), (18), (19): Xaa is A or G
  MOD_RES (20), (21), (22), (23): Xaa is A or G or is absent
XVPEKMEPISILYLXXXXXXXXXKFKYENMTVES

SEQ ID NO: 70655 - protein, 41 aa, Artificial Sequence; identical to SEQ ID NO: 8340
  GFR-binding peptide
  MOD_RES (3), (4), (38), (40): Xaa is C or S
  MOD_RES (18), (19), (20), (21), (22): Xaa is A or G
  MOD_RES (23), (24), (25), (26): Xaa is A or G or is absent

SEQ ID NO: 70656 - protein, 38 aa, Artificial Sequence; identical to SEQ ID NO: 32758
  GFR-binding peptide
  MOD_RES (5), (6): Xaa is C or S

SEQ ID NO: 70657 - protein, 43 aa, Artificial Sequence; identical to SEQ ID NO: 32759
  GFR-binding peptide
  MOD_RES (6), (7), (41), (43): Xaa is C or S
  MOD_RES (21), (22), (23), (24), (25): Xaa is A or G
  MOD_RES (26), (27), (28), (29): Xaa is A or G or is absent

SEQ ID NO: 70658 - protein, 38 aa, Artificial Sequence; identical to SEQ ID NO: 57669
  GFR-binding peptide
  MOD_RES (4), (5), (38): Xaa is C or S
  MOD_RES (19), (20), (21), (22), (23): Xaa is A or G
  MOD_RES (24), (25), (26), (27): Xaa is A or G or is absent

SEQ ID NO: 70659 - protein, 33 aa, Artificial Sequence; identical to SEQ ID NO: 8344
  GFR-binding peptide
  MOD_RES (31), (33): Xaa is C or S

SEQ ID NO: 70660 - protein, 33 aa, Artificial Sequence
  GFR-binding peptide
  MOD_RES (1), (33): Xaa is C or S
XTPTKMSATSMLYYNDKQQIILRKHRGMVVDRX

SEQ ID NO: 70661 - protein, 37 aa, Artificial Sequence
  GFR-binding peptide
  MOD_RES (3), (4), (36): Xaa is C or S
KAXXVPTKLSATSILYYDKGVVTYLRKHRGMAVSEXG

SEQ ID NO: 70662 - protein, 38 aa, Artificial Sequence
  GFR-binding peptide
  MOD_RES (6), (7), (38): Xaa is C or S
ASAAPXXVPQALSPINILYFVGRKPKVYGKIPMIVRSX

SEQ ID NO: 70663 - protein, 42 aa, Artificial Sequence; identical to SEQ ID NO: 8349
  GFR-binding peptide
  MOD_RES (5), (6), (40), (42): Xaa is C or S
  MOD_RES (20), (21), (22), (23), (24): Xaa is A or G
  MOD_RES (25), (26), (27), (28): Xaa is A or G or is absent

SEQ ID NO: 70664 - protein, 34 aa, Artificial Sequence; identical to SEQ ID NO: 29666
  GFR-binding peptide
  MOD_RES (1), (2): Xaa is C or S
  MOD_RES (16), (17), (18), (19), (20): Xaa is A or G
  MOD_RES (21), (22), (23), (24): Xaa is A or G or is absent

SEQ ID NO: 70665 - protein, 41 aa, Artificial Sequence
  GFR-binding peptide
  MOD_RES (6), (7), (39), (41): Xaa is C or S
GSAGPXXTPTKMSATSMLYYNDKQQIILRKHRGMVVDRXGX

SEQ ID NO: 70666 - protein, 35 aa, Artificial Sequence; identical to SEQ ID NO: 8352
  GFR-binding peptide
  MOD_RES (3), (4): Xaa is C or S

SEQ ID NO: 70667 - protein, 39 aa, Artificial Sequence
  GFR-binding peptide
  MOD_RES (3), (4), (36), (38): Xaa is C or S
GPXXTPTKMSATSMLYYNDKQQIILRKHRGMVVDRXGXS

SEQ ID NO: 70668 - protein, 38 aa, Artificial Sequence; identical to SEQ ID NO: 8353
  GFR-binding peptide
  MOD_RES (6), (6): Xaa is C or S
  MOD_RES (20), (21), (22), (23), (24): Xaa is A or G
  MOD_RES (25), (26), (27), (28): Xaa is A or G or is absent

SEQ ID NO: 70669 - protein, 35 aa, Artificial Sequence; identical to SEQ ID NO: 29671
  GFR-binding peptide
  MOD_RES (2), (3): Xaa is C or S
  MOD_RES (17), (18), (19), (20), (21): Xaa is A or G
  MOD_RES (22), (23), (24), (25): Xaa is A or G or is absent

SEQ ID NO: 70670 - protein, 41 aa, Artificial Sequence
  GFR-binding peptide
  MOD_RES (6), (7), (39), (41): Xaa is C or S
HVPKPXXAPTKLSATSVLYYDDSSNVILRKHRNMVVRSXGX

SEQ ID NO: 70671 - protein, 34 aa, Artificial Sequence
  GFR-binding peptide
  MOD_RES (1), (1): Xaa is C or S
  MOD_RES (15), (16), (17), (18), (19): Xaa is A or G
  MOD_RES (20), (21), (22), (23): Xaa is A or G or is absent
XVPEKMSATSILYYXXXXXXXXXLRKHRNMTVES

SEQ ID NO: 70672 - protein, 41 aa, Artificial Sequence; identical to SEQ ID NO: 8355
  GFR-binding peptide
  MOD_RES (5), (6), (38), (40): Xaa is C or S

SEQ ID NO: 70673 - protein, 33 aa, Artificial Sequence; identical to SEQ ID NO: 8356
  GFR-binding peptide
  MOD_RES (32), (32): Xaa is C or S

SEQ ID NO: 70674 - protein, 35 aa, Artificial Sequence; identical to SEQ ID NO: 32778
  GFR-binding peptide
  MOD_RES (4), (5): Xaa is C or S

SEQ ID NO: 70675 - protein, 38 aa, Artificial Sequence; identical to SEQ ID NO: 8357
  GFR-binding peptide
  MOD_RES (4), (5), (36), (38): Xaa is C or S

SEQ ID NO: 70676 - protein, 41 aa, Artificial Sequence; identical to SEQ ID NO: 32782
  GFR-binding peptide
  MOD_RES (6), (7), (39), (41): Xaa is C or S

SEQ ID NO: 70677 - protein, 38 aa, Artificial Sequence; identical to SEQ ID NO: 57687
  GFR-binding peptide
  MOD_RES (5), (6), (37): Xaa is C or S

SEQ ID NO: 70678 - protein, 34 aa, Artificial Sequence
  GFR-binding peptide
  MOD_RES (1), (2), (34): Xaa is C or S
XXTPTKMSATSMLYYNDKQQIILRKHRGMVVDRX

SEQ ID NO: 70679 - protein, 34 aa, Artificial Sequence; identical to SEQ ID NO: 29678
  GFR-binding peptide
  MOD_RES (3), (4): Xaa is C or S

SEQ ID NO: 70680 - protein, 40 aa, Artificial Sequence; identical to SEQ ID NO: 8360
  GFR-binding peptide
  MOD_RES (5), (6), (38), (40): Xaa is C or S

SEQ ID NO: 70681 - protein, 33 aa, Artificial Sequence; identical to SEQ ID NO: 29680
  GFR-binding peptide
  MOD_RES (1), (32): Xaa is C or S

SEQ ID NO: 70682 - protein, 37 aa, Artificial Sequence; identical to SEQ ID NO: 29681
  GFR-binding peptide
  MOD_RES (4), (5): Xaa is C or S

SEQ ID NO: 70683 - protein, 33 aa, Artificial Sequence; identical to SEQ ID NO: 29682
  GFR-binding peptide
  MOD_RES (1), (33): Xaa is C or S

SEQ ID NO: 70684 - protein, 36 aa, Artificial Sequence; identical to SEQ ID NO: 8362
  GFR-binding peptide
  MOD_RES (3), (4), (36): Xaa is C or S

SEQ ID NO: 70685 - protein, 31 aa, Artificial Sequence
  GFR-binding peptide
  MOD_RES (1), (1): Xaa is C or S
XVPEKMEPISILYLDENKNVVKFKYENMTVE

SEQ ID NO: 70686 - protein, 41 aa, Artificial Sequence; identical to SEQ ID NO: 8364
  GFR-binding peptide
  MOD_RES (4), (5), (38), (40): Xaa is C or S
  MOD_RES (19), (20), (21), (22), (23): Xaa is A or G
  MOD_RES (24), (25), (26), (27): Xaa is A or G or is absent

SEQ ID NO: 70687 - protein, 40 aa, Artificial Sequence
  GFR-binding peptide
  MOD_RES (3), (4), (38), (40): Xaa is C or S
  MOD_RES (18), (19), (20), (21), (22): Xaa is A or G
  MOD_RES (23), (24), (25), (26): Xaa is A or G or is absent
GPXXTPTKMSATSMLYYXXXXXXXXXLRKHRGMVVDRXGX

SEQ ID NO: 70688 - protein, 37 aa, Artificial Sequence; identical to SEQ ID NO: 8366
  GFR-binding peptide
  MOD_RES (4), (5), (36): Xaa is C or S

SEQ ID NO: 70689 - protein, 37 aa, Artificial Sequence; identical to SEQ ID NO: 8367
  GFR-binding peptide
  MOD_RES (6), (6): Xaa is C or S

SEQ ID NO: 70690 - protein, 37 aa, Artificial Sequence; identical to SEQ ID NO: 29686
  GFR-binding peptide
  MOD_RES (3), (4): Xaa is C or S
  MOD_RES (18), (19), (20), (21), (22): Xaa is A or G
  MOD_RES (23), (24), (25), (26): Xaa is A or G or is absent

SEQ ID NO: 70691 - protein, 39 aa, Artificial Sequence; identical to SEQ ID NO: 8369
  GFR-binding peptide
  MOD_RES (5), (6), (37), (39): Xaa is C or S

SEQ ID NO: 70692 - protein, 37 aa, Artificial Sequence; identical to SEQ ID NO: 8370
  GFR-binding peptide
  MOD_RES (3), (35), (37): Xaa is C or S

SEQ ID NO: 70693 - protein, 36 aa, Artificial Sequence; identical to SEQ ID NO: 29693
  GFR-binding peptide
  MOD_RES (1), (2), (36): Xaa is C or S
  MOD_RES (16), (17), (18), (19), (20): Xaa is A or G
  MOD_RES (21), (22), (23), (24): Xaa is A or G or is absent

SEQ ID NO: 70694 - protein, 37 aa, Artificial Sequence; identical to SEQ ID NO: 29694
  GFR-binding peptide
  MOD_RES (3), (4): Xaa is C or S
  MOD_RES (18), (19), (20), (21), (22): Xaa is A or G
  MOD_RES (23), (24), (25), (26): Xaa is A or G or is absent

SEQ ID NO: 70695 - protein, 38 aa, Artificial Sequence; identical to SEQ ID NO: 8372
  GFR-binding peptide
  MOD_RES (4), (5), (38): Xaa is C or S
  MOD_RES (19), (20), (21), (22), (23): Xaa is A or G
  MOD_RES (24), (25), (26), (27): Xaa is A or G or is absent

SEQ ID NO: 70696 - protein, 43 aa, Artificial Sequence
  GFR-binding peptide
  MOD_RES (5), (6), (40), (42): Xaa is C or S
  MOD_RES (20), (21), (22), (23), (24): Xaa is A or G
  MOD_RES (25), (26), (27), (28): Xaa is A or G or is absent
TPPTXXVPTRLSPISILYKXXXXXXXXXLKYHYDMVVESXGXR

SEQ ID NO: 70697 - protein, 34 aa, Artificial Sequence; identical to SEQ ID NO: 8374
  GFR-binding peptide
  MOD_RES (1), (1): Xaa is C or S
  MOD_RES (15), (16), (17), (18), (19): Xaa is A or G
  MOD_RES (20), (21), (22), (23): Xaa is A or G or is absent

SEQ ID NO: 70698 - protein, 39 aa, Artificial Sequence; identical to SEQ ID NO: 8375
  GFR-binding peptide
  MOD_RES (2), (3), (38): Xaa is C or S
  MOD_RES (17), (18), (19), (20), (21): Xaa is A or G
  MOD_RES (22), (23), (24), (25): Xaa is A or G or is absent

SEQ ID NO: 70699 - protein, 43 aa, Artificial Sequence; identical to SEQ ID NO: 8377
  GFR-binding peptide
  MOD_RES (6), (40), (42): Xaa is C or S
  MOD_RES (20), (21), (22), (23), (24): Xaa is A or G
  MOD_RES (25), (26), (27), (28): Xaa is A or G or is absent

SEQ ID NO: 70700 - protein, 32 aa, Artificial Sequence
  GFR-binding peptide
  MOD_RES (32), (32): Xaa is C or S
TPTKMEPISMLYLNDKQQIIKFKYEGMVVDRX

SEQ ID NO: 70701 - protein, 38 aa, Artificial Sequence; identical to SEQ ID NO: 8380
  GFR-binding peptide
  MOD_RES (2), (3), (37): Xaa is C or S
  MOD_RES (17), (18), (19), (20), (21): Xaa is A or G
  MOD_RES (22), (23), (24), (25): Xaa is A or G or is absent

SEQ ID NO: 70702 - protein, 40 aa, Artificial Sequence; identical to SEQ ID NO: 8381
  GFR-binding peptide
  MOD_RES (6), (7): Xaa is C or S
  MOD_RES (21), (22), (23), (24), (25): Xaa is A or G
  MOD_RES (26), (27), (28), (29): Xaa is A or G or is absent

SEQ ID NO: 70703 - protein, 34 aa, Artificial Sequence
  GFR-binding peptide
  MOD_RES (3), (4): Xaa is C or S
EPXXVPEKMSPINILYFDENKNVVYGKIPNMTVE

SEQ ID NO: 70704 - protein, 36 aa, Artificial Sequence
  GFR-binding peptide
  MOD_RES (5), (6): Xaa is C or S
TPPTXXVPTRLSPISILYKDSANNVVLKYHYDMVVE

SEQ ID NO: 70705 - protein, 34 aa, Artificial Sequence; identical to SEQ ID NO: 29706
  GFR-binding peptide
  MOD_RES (1), (2), (33): Xaa is C or S

SEQ ID NO: 70706 - protein, 36 aa, Artificial Sequence; identical to SEQ ID NO: 32811
  GFR-binding peptide
  MOD_RES (1), (2), (36): Xaa is C or S
  MOD_RES (16), (17), (18), (19), (20): Xaa is A or G
  MOD_RES (21), (22), (23), (24): Xaa is A or G or is absent

SEQ ID NO: 70707 - protein, 39 aa, Artificial Sequence; identical to SEQ ID NO: 32813
  GFR-binding peptide
  MOD_RES (5), (39): Xaa is C or S
  MOD_RES (19), (20), (21), (22), (23): Xaa is A or G
  MOD_RES (24), (25), (26), (27): Xaa is A or G or is absent

SEQ ID NO: 70708 - protein, 35 aa, Artificial Sequence
  GFR-binding peptide
  MOD_RES (1), (33), (35): Xaa is C or S
XVPTKLSATSILYYDKGVVTYLRKHRGMAVSEXGX

SEQ ID NO: 70709 - protein, 38 aa, Artificial Sequence
  GFR-binding peptide
  MOD_RES (2), (3), (37): Xaa is C or S
  MOD_RES (17), (18), (19), (20), (21): Xaa is A or G
  MOD_RES (22), (23), (24), (25): Xaa is A or G or is absent
AXXVPTKLSATSILYYXXXXXXXXXLRKHRGMAVSEXG

SEQ ID NO: 70710 - protein, 36 aa, Artificial Sequence; identical to SEQ ID NO: 29709
  GFR-binding peptide
  MOD_RES (3), (4), (36): Xaa is C or S

SEQ ID NO: 70711 - protein, 38 aa, Artificial Sequence
  GFR-binding peptide
  MOD_RES (5), (6): Xaa is C or S
  MOD_RES (20), (21), (22), (23), (24): Xaa is A or G
  MOD_RES (25), (26), (27), (28): Xaa is A or G or is absent
IPEPXXVPEKMNAISILYFXXXXXXXXXLKKYRNMTVE

SEQ ID NO: 70712 - protein, 35 aa, Artificial Sequence
  GFR-binding peptide
  MOD_RES (1), (2): Xaa is C or S
  MOD_RES (16), (17), (18), (19), (20): Xaa is A or G
  MOD_RES (21), (22), (23), (24): Xaa is A or G or is absent
XXVPEKMSATSILYYXXXXXXXXXLRKHRNMTVES

SEQ ID NO: 70713 - protein, 38 aa, Artificial Sequence; identical to SEQ ID NO: 32820
  GFR-binding peptide
  MOD_RES (5), (6), (38): Xaa is C or S

SEQ ID NO: 70714 - protein, 35 aa, Artificial Sequence; identical to SEQ ID NO: 32828
  GFR-binding peptide
  MOD_RES (2), (3), (35): Xaa is C or S

SEQ ID NO: 70715 - protein, 37 aa, Artificial Sequence; identical to SEQ ID NO: 15702
  GFR-binding peptide
  MOD_RES (1), (35), (37): Xaa is C or S
  MOD_RES (15), (16), (17), (18), (19): Xaa is A or G
  MOD_RES (20), (21), (22), (23): Xaa is A or G or is absent

SEQ ID NO: 70716 - protein, 41 aa, Artificial Sequence; identical to SEQ ID NO: 29720
  GFR-binding peptide
  MOD_RES (6), (7), (40): Xaa is C or S
  MOD_RES (21), (22), (23), (24), (25): Xaa is A or G
  MOD_RES (26), (27), (28), (29): Xaa is A or G or is absent

SEQ ID NO: 70717 - protein, 36 aa, Artificial Sequence; identical to SEQ ID NO: 8403
  GFR-binding peptide
  MOD_RES (1), (35): Xaa is C or S
  MOD_RES (15), (16), (17), (18), (19): Xaa is A or G
  MOD_RES (20), (21), (22), (23): Xaa is A or G or is absent

SEQ ID NO: 70718 - protein, 40 aa, Artificial Sequence; identical to SEQ ID NO: 29723
  GFR-binding peptide
  MOD_RES (4), (5), (38), (40): Xaa is C or S
  MOD_RES (19), (20), (21), (22), (23): Xaa is A or G
  MOD_RES (24), (25), (26), (27): Xaa is A or G or is absent

SEQ ID NO: 70719 - protein, 39 aa, Artificial Sequence; identical to SEQ ID NO: 32841
  GFR-binding peptide
  MOD_RES (2), (36), (38): Xaa is C or S
  MOD_RES (16), (17), (18), (19), (20): Xaa is A or G
  MOD_RES (21), (22), (23), (24): Xaa is A or G or is absent

SEQ ID NO: 70720 - protein, 40 aa, Artificial Sequence; identical to SEQ ID NO: 32842
  GFR-binding peptide
  MOD_RES (4), (5), (37), (39): Xaa is C or S

SEQ ID NO: 70721 - protein, 34 aa, Artificial Sequence; identical to SEQ ID NO: 8407
  GFR-binding peptide
  MOD_RES (1), (2): Xaa is C or S
  MOD_RES (16), (17), (18), (19), (20): Xaa is A or G
  MOD_RES (21), (22), (23), (24): Xaa is A or G or is absent

SEQ ID NO: 70722 - protein, 36 aa, Artificial Sequence
  GFR-binding peptide
  MOD_RES (1), (2), (33), (35): Xaa is C or S
XXVPQDLSPINILYFVGRTPKVYGKIPMVVKSXKXS

SEQ ID NO: 70723 - protein, 33 aa, Artificial Sequence; identical to SEQ ID NO: 8409
  GFR-binding peptide
  MOD_RES (1), (1): Xaa is C or S
  MOD_RES (15), (16), (17), (18), (19): Xaa is A or G
  MOD_RES (20), (21), (22), (23): Xaa is A or G or is absent

SEQ ID NO: 70724 - protein, 39 aa, Artificial Sequence; identical to SEQ ID NO: 8410
  GFR-binding peptide
  MOD_RES (6), (7), (39): Xaa is C or S

SEQ ID NO: 70725 - protein, 36 aa, Artificial Sequence
  GFR-binding peptide
  MOD_RES (1), (33), (35): Xaa is C or S
XVPTKLSATSILYYDKGVVTYLRKHRGMAVSEXGXR

SEQ ID NO: 70726 - protein, 37 aa, Artificial Sequence
  GFR-binding peptide
  MOD_RES (6), (7): Xaa is C or S
RVPSTXXAPVKTSATSMLYYDNGRVLLLRKHRMIVEE

SEQ ID NO: 70727 - protein, 36 aa, Artificial Sequence
  GFR-binding peptide
  MOD_RES (3), (4): Xaa is C or S
  MOD_RES (18), (19), (20), (21), (22): Xaa is A or G
  MOD_RES (23), (24), (25), (26): Xaa is A or G or is absent
PTXXVPTRLSPISILYKXXXXXXXXXLKYHYDMVVE

SEQ ID NO: 70728 - protein, 38 aa, Artificial Sequence
  GFR-binding peptide
  MOD_RES (5), (6), (38): Xaa is C or S
IPEPXXVPEKMSPINILYFDENKNVVYGKIPNMTVESX

SEQ ID NO: 70729 - protein, 39 aa, Artificial Sequence; identical to SEQ ID NO: 29730
  GFR-binding peptide
  MOD_RES (3), (4), (38): Xaa is C or S
  MOD_RES (18), (19), (20), (21), (22): Xaa is A or G
  MOD_RES (23), (24), (25), (26): Xaa is A or G or is absent

SEQ ID NO: 70730 - protein, 36 aa, Artificial Sequence; identical to SEQ ID NO: 8417
  GFR-binding peptide
  MOD_RES (1), (2), (36): Xaa is C or S
  MOD_RES (16), (17), (18), (19), (20): Xaa is A or G
  MOD_RES (21), (22), (23), (24): Xaa is A or G or is absent

SEQ ID NO: 70731 - protein, 40 aa, Artificial Sequence
  GFR-binding peptide
  MOD_RES (2), (3), (37), (39): Xaa is C or S
  MOD_RES (17), (18), (19), (20), (21): Xaa is A or G
  MOD_RES (22), (23), (24), (25): Xaa is A or G or is absent
PXXTPTKMSPISMLYKXXXXXXXXXLKYHYGMVVDRXGXS

SEQ ID NO: 70732 - protein, 38 aa, Artificial Sequence; identical to SEQ ID NO: 8420
  GFR-binding peptide
  MOD_RES (3), (4), (35), (37): Xaa is C or S

SEQ ID NO: 70733 - protein, 40 aa, Artificial Sequence; identical to SEQ ID NO: 32854
  GFR-binding peptide
  MOD_RES (4), (5), (38), (40): Xaa is C or S
  MOD_RES (19), (20), (21), (22), (23): Xaa is A or G
  MOD_RES (24), (25), (26), (27): Xaa is A or G or is absent

SEQ ID NO: 70734 - protein, 31 aa, Artificial Sequence; identical to SEQ ID NO: 57770
  GFR-binding peptide
  MOD_RES (1), (1): Xaa is C or S

SEQ ID NO: 70735 - protein, 36 aa, Artificial Sequence; identical to SEQ ID NO: 32856
  GFR-binding peptide
  MOD_RES (5), (6): Xaa is C or S

SEQ ID NO: 70736 - protein, 32 aa, Artificial Sequence
  GFR-binding peptide
  MOD_RES (32), (32): Xaa is C or S
TPTKMSATSMLYYNDKQQIILRKHRGMVVDRX

SEQ ID NO: 70737 - protein, 41 aa, Artificial Sequence; identical to SEQ ID NO: 8429
  GFR-binding peptide
  MOD_RES (4), (5), (39), (41): Xaa is C or S
  MOD_RES (19), (20), (21), (22), (23): Xaa is A or G
  MOD_RES (24), (25), (26), (27): Xaa is A or G or is absent

SEQ ID NO: 70738 - protein, 38 aa, Artificial Sequence; identical to SEQ ID NO: 8431
  GFR-binding peptide
  MOD_RES (1), (35), (37): Xaa is C or S
  MOD_RES (15), (16), (17), (18), (19): Xaa is A or G
  MOD_RES (20), (21), (22), (23): Xaa is A or G or is absent

SEQ ID NO: 70739 - protein, 37 aa, Artificial Sequence; identical to SEQ ID NO: 29744
  GFR-binding peptide
  MOD_RES (6), (7): Xaa is C or S

SEQ ID NO: 70740 - protein, 33 aa, Artificial Sequence; identical to SEQ ID NO: 8433
  GFR-binding peptide
  MOD_RES (1), (1): Xaa is C or S
  MOD_RES (15), (16), (17), (18), (19): Xaa is A or G
  MOD_RES (20), (21), (22), (23): Xaa is A or G or is absent

SEQ ID NO: 70741 - protein, 40 aa, Artificial Sequence; identical to SEQ ID NO: 32867
  GFR-binding peptide
  MOD_RES (5), (6), (40): Xaa is C or S
  MOD_RES (20), (21), (22), (23), (24): Xaa is A or G
  MOD_RES (25), (26), (27), (28): Xaa is A or G or is absent

SEQ ID NO: 70742 - protein, 43 aa, Artificial Sequence; identical to SEQ ID NO: 8437
  GFR-binding peptide
  MOD_RES (6), (7), (40), (42): Xaa is C or S
  MOD_RES (21), (22), (23), (24), (25): Xaa is A or G
  MOD_RES (26), (27), (28), (29): Xaa is A or G or is absent

SEQ ID NO: 70743 - protein, 39 aa, Artificial Sequence; identical to SEQ ID NO: 8439
  GFR-binding peptide
  MOD_RES (4), (5), (37), (39): Xaa is C or S

SEQ ID NO: 70744 - protein, 39 aa, Artificial Sequence; identical to SEQ ID NO: 29750
  GFR-binding peptide
  MOD_RES (2), (3), (37), (39): Xaa is C or S
  MOD_RES (17), (18), (19), (20), (21): Xaa is A or G
  MOD_RES (22), (23), (24), (25): Xaa is A or G or is absent

SEQ ID NO: 70745 - protein, 36 aa, Artificial Sequence; identical to SEQ ID NO: 29751
  GFR-binding peptide
  MOD_RES (1), (35): Xaa is C or S
  MOD_RES (15), (16), (17), (18), (19): Xaa is A or G
  MOD_RES (20), (21), (22), (23): Xaa is A or G or is absent

SEQ ID NO: 70746 - protein, 34 aa, Artificial Sequence; identical to SEQ ID NO: 29752
  GFR-binding peptide
  MOD_RES (32), (34): Xaa is C or S

SEQ ID NO: 70747 - protein, 38 aa, Artificial Sequence; identical to SEQ ID NO: 8442
  GFR-binding peptide
  MOD_RES (1), (2), (35), (37): Xaa is C or S
  MOD_RES (16), (17), (18), (19), (20): Xaa is A or G
  MOD_RES (21), (22), (23), (24): Xaa is A or G or is absent

SEQ ID NO: 70748 - protein, 33 aa, Artificial Sequence; identical to SEQ ID NO: 29755
  GFR-binding peptide
  MOD_RES (1), (2): Xaa is C or S

SEQ ID NO: 70749 - protein, 33 aa, Artificial Sequence; identical to SEQ ID NO: 8443
  GFR-binding peptide
  MOD_RES (2), (3): Xaa is C or S

SEQ ID NO: 70750 - protein, 34 aa, Artificial Sequence
  GFR-binding peptide
  MOD_RES (1), (2), (34): Xaa is C or S
XXVPEKMSPISILYKDENKNVVLKYHYNMTVESX

SEQ ID NO: 70751 - protein, 37 aa, Artificial Sequence; identical to SEQ ID NO: 32875
  GFR-binding peptide
  MOD_RES (34), (36): Xaa is C or S
  MOD_RES (14), (15), (16), (17), (18): Xaa is A or G
  MOD_RES (19), (20), (21), (22): Xaa is A or G or is absent

SEQ ID NO: 70752 - protein, 35 aa, Artificial Sequence; identical to SEQ ID NO: 8445
  GFR-binding peptide
  MOD_RES (33), (35): Xaa is C or S

SEQ ID NO: 70753 - protein, 41 aa, Artificial Sequence
  GFR-binding peptide
  MOD_RES (5), (6), (38), (40): Xaa is C or S
APASXXVPARLSATSILYYDAANNVVLRKHRDMVVEAXGXR

SEQ ID NO: 70754 - protein, 31 aa, Artificial Sequence
  GFR-binding peptide
  MOD_RES (1), (1): Xaa is C or S
XAPVKTSATSMLYYDNGRVLLLRKHRMIVEE

SEQ ID NO: 70755 - protein, 38 aa, Artificial Sequence; identical to SEQ ID NO: 15745
  GFR-binding peptide
  MOD_RES (3), (4), (38): Xaa is C or S
  MOD_RES (18), (19), (20), (21), (22): Xaa is A or G
  MOD_RES (23), (24), (25), (26): Xaa is A or G or is absent

SEQ ID NO: 70756 - protein, 41 aa, Artificial Sequence; identical to SEQ ID NO: 29762
  GFR-binding peptide
  MOD_RES (5), (6), (40): Xaa is C or S
  MOD_RES (20), (21), (22), (23), (24): Xaa is A or G
  MOD_RES (25), (26), (27), (28): Xaa is A or G or is absent

SEQ ID NO: 70757 - protein, 33 aa, Artificial Sequence
  GFR-binding peptide
  MOD_RES (1), (2): Xaa is C or S
XXVPEKMSPINILYFDENKNVVYGKIPNMTVES

SEQ ID NO: 70758 - protein, 37 aa, Artificial Sequence
  GFR-binding peptide
  MOD_RES (2), (3), (37): Xaa is C or S
  MOD_RES (17), (18), (19), (20), (21): Xaa is A or G
  MOD_RES (22), (23), (24), (25): Xaa is A or G or is absent
PXXTPTKMSPISMLYKXXXXXXXXXLKYHYGMVVDRX

SEQ ID NO: 70759 - protein, 37 aa, Artificial Sequence
  GFR-binding peptide
  MOD_RES (3), (4): Xaa is C or S
  MOD_RES (18), (19), (20), (21), (22): Xaa is A or G
  MOD_RES (23), (24), (25), (26): Xaa is A or G or is absent
EPXXVPEKMSPISILYKXXXXXXXXXLKYHYNMTVES

SEQ ID NO: 70760 - protein, 37 aa, Artificial Sequence
  GFR-binding peptide
  MOD_RES (3), (4), (36): Xaa is C or S
EPXXVPEKMEPISILYLDENKNVVKFKYENMTVESXA

SEQ ID NO: 70761 - protein, 35 aa, Artificial Sequence; identical to SEQ ID NO: 29764
  GFR-binding peptide
  MOD_RES (1), (32), (34): Xaa is C or S

SEQ ID NO: 70762 - protein, 41 aa, Artificial Sequence; identical to SEQ ID NO: 29765
  GFR-binding peptide
  MOD_RES (5), (6), (40): Xaa is C or S
  MOD_RES (20), (21), (22), (23), (24): Xaa is A or G
  MOD_RES (25), (26), (27), (28): Xaa is A or G or is absent

SEQ ID NO: 70763 - protein, 37 aa, Artificial Sequence; identical to SEQ ID NO: 8453
  GFR-binding peptide
  MOD_RES (1), (2), (36): Xaa is C or S
  MOD_RES (16), (17), (18), (19), (20): Xaa is A or G
  MOD_RES (21), (22), (23), (24): Xaa is A or G or is absent

SEQ ID NO: 70764 - protein, 36 aa, Artificial Sequence; identical to SEQ ID NO: 32899
  GFR-binding peptide
  MOD_RES (2), (3): Xaa is C or S
  MOD_RES (17), (18), (19), (20), (21): Xaa is A or G
  MOD_RES (22), (23), (24), (25): Xaa is A or G or is absent

SEQ ID NO: 70765 - protein, 32 aa, Artificial Sequence; identical to SEQ ID NO: 29770
  GFR-binding peptide
  MOD_RES (14), (15), (16), (17), (18): Xaa is A or G
  MOD_RES (19), (20), (21), (22): Xaa is A or G or is absent

SEQ ID NO: 70766 - protein, 38 aa, Artificial Sequence; identical to SEQ ID NO: 32903
  GFR-binding peptide
  MOD_RES (3), (4), (38): Xaa is C or S
  MOD_RES (18), (19), (20), (21), (22): Xaa is A or G
  MOD_RES (23), (24), (25), (26): Xaa is A or G or is absent

SEQ ID NO: 70767 - protein, 33 aa, Artificial Sequence; identical to SEQ ID NO: 8459
  GFR-binding peptide
  MOD_RES (1), (1): Xaa is C or S
  MOD_RES (15), (16), (17), (18), (19): Xaa is A or G
  MOD_RES (20), (21), (22), (23): Xaa is A or G or is absent

SEQ ID NO: 70768 - protein, 39 aa, Artificial Sequence; identical to SEQ ID NO: 29774
  GFR-binding peptide
  MOD_RES (6), (7), (38): Xaa is C or S

SEQ ID NO: 70769 - protein, 34 aa, Artificial Sequence
  GFR-binding peptide
  MOD_RES (2), (3), (34): Xaa is C or S
PXXVPQALSPINILYFVGRKPKVYGKIPMIVRSX

SEQ ID NO: 70770 - protein, 33 aa, Artificial Sequence; identical to SEQ ID NO: 8460
  GFR-binding peptide
  MOD_RES (2), (3): Xaa is C or S

SEQ ID NO: 70771 - protein, 41 aa, Artificial Sequence
  GFR-binding peptide
  MOD_RES (6), (7), (39), (41): Xaa is C or S
STPPTXXVPTRLEPISILYLDSANNVVKFKYEDMVVESXGX

SEQ ID NO: 70772 - protein, 30 aa, Artificial Sequence; identical to SEQ ID NO: 32912
  GFR-binding peptide

SEQ ID NO: 70773 - protein, 38 aa, Artificial Sequence
  GFR-binding peptide
  MOD_RES (5), (6), (38): Xaa is C or S
IPEPXXVPEKMEPISILYLDENKNVVKFKYENMTVESX

SEQ ID NO: 70774 - protein, 38 aa, Artificial Sequence; identical to SEQ ID NO: 29782
  GFR-binding peptide
  MOD_RES (5), (6): Xaa is C or S
  MOD_RES (20), (21), (22), (23), (24): Xaa is A or G
  MOD_RES (25), (26), (27), (28): Xaa is A or G or is absent

SEQ ID NO: 70775 - protein, 43 aa, Artificial Sequence; identical to SEQ ID NO: 29783
  GFR-binding peptide
  MOD_RES (4), (5), (40), (42): Xaa is C or S
  MOD_RES (19), (20), (21), (22), (23): Xaa is A or G
  MOD_RES (24), (25), (26), (27): Xaa is A or G or is absent

SEQ ID NO: 70776 - protein, 34 aa, Artificial Sequence; identical to SEQ ID NO: 8464
  GFR-binding peptide
  MOD_RES (3), (4): Xaa is C or S

SEQ ID NO: 70777 - protein, 37 aa, Artificial Sequence; identical to SEQ ID NO: 8465
  GFR-binding peptide
  MOD_RES (1), (35), (37): Xaa is C or S
  MOD_RES (15), (16), (17), (18), (19): Xaa is A or G
  MOD_RES (20), (21), (22), (23): Xaa is A or G or is absent

SEQ ID NO: 70778 - protein, 36 aa, Artificial Sequence
  GFR-binding peptide
  MOD_RES (3), (4): Xaa is C or S
  MOD_RES (18), (19), (20), (21), (22): Xaa is A or G
  MOD_RES (23), (24), (25), (26): Xaa is A or G or is absent
GPXXTPTKMSATSMLYYXXXXXXXXXLRKHRGMVVD

SEQ ID NO: 70779 - protein, 38 aa, Artificial Sequence; identical to SEQ ID NO: 8466
  GFR-binding peptide
  MOD_RES (3), (4), (36), (38): Xaa is C or S

SEQ ID NO: 70780 - protein, 37 aa, Artificial Sequence; identical to SEQ ID NO: 8467
  GFR-binding peptide
  MOD_RES (3), (4): Xaa is C or S
  MOD_RES (18), (19), (20), (21), (22): Xaa is A or G
  MOD_RES (23), (24), (25), (26): Xaa is A or G or is absent

SEQ ID NO: 70781 - protein, 38 aa, Artificial Sequence; identical to SEQ ID NO: 8470
  GFR-binding peptide
  MOD_RES (6), (7): Xaa is C or S

SEQ ID NO: 70782 - protein, 40 aa, Artificial Sequence; identical to SEQ ID NO: 29792
  GFR-binding peptide
  MOD_RES (5), (6), (39): Xaa is C or S
  MOD_RES (20), (21), (22), (23), (24): Xaa is A or G
  MOD_RES (25), (26), (27), (28): Xaa is A or G or is absent

SEQ ID NO: 70783 - protein, 39 aa, Artificial Sequence; identical to SEQ ID NO: 8472
  GFR-binding peptide
  MOD_RES (5), (6): Xaa is C or S
  MOD_RES (20), (21), (22), (23), (24): Xaa is A or G
  MOD_RES (25), (26), (27), (28): Xaa is A or G or is absent

SEQ ID NO: 70784 - protein, 33 aa, Artificial Sequence; identical to SEQ ID NO: 29794
  GFR-binding peptide
  MOD_RES (32), (32): Xaa is C or S

SEQ ID NO: 70785 - protein, 36 aa, Artificial Sequence
  GFR-binding peptide
  MOD_RES (3), (4), (36): Xaa is C or S
PTXXVPTRLSATSILYYDSANNVVLRKHRDMVVESX

SEQ ID NO: 70786 - protein, 33 aa, Artificial Sequence; identical to SEQ ID NO: 8478
  GFR-binding peptide
  MOD_RES (31), (33): Xaa is C or S

SEQ ID NO: 70787 - protein, 41 aa, Artificial Sequence; identical to SEQ ID NO: 8479
  GFR-binding peptide
  MOD_RES (6), (7), (39), (41): Xaa is C or S

SEQ ID NO: 70788 - protein, 35 aa, Artificial Sequence
  GFR-binding peptide
  MOD_RES (1), (2): Xaa is C or S
  MOD_RES (16), (17), (18), (19), (20): Xaa is A or G
  MOD_RES (21), (22), (23), (24): Xaa is A or G or is absent
XXVPEKMEPISILYLXXXXXXXXXKFKYENMTVES

SEQ ID NO: 70789 - protein, 41 aa, Artificial Sequence; identical to SEQ ID NO: 29799
  GFR-binding peptide
  MOD_RES (3), (4), (38), (40): Xaa is C or S
  MOD_RES (18), (19), (20), (21), (22): Xaa is A or G
  MOD_RES (23), (24), (25), (26): Xaa is A or G or is absent

SEQ ID NO: 70790 - protein, 40 aa, Artificial Sequence; identical to SEQ ID NO: 8480
  GFR-binding peptide
  MOD_RES (5), (6), (37), (39): Xaa is C or S

SEQ ID NO: 70791 - protein, 41 aa, Artificial Sequence; identical to SEQ ID NO: 8481
  GFR-binding peptide
  MOD_RES (5), (6), (39), (41): Xaa is C or S
  MOD_RES (20), (21), (22), (23), (24): Xaa is A or G
  MOD_RES (25), (26), (27), (28): Xaa is A or G or is absent

SEQ ID NO: 70792 - protein, 35 aa, Artificial Sequence; identical to SEQ ID NO: 29802
  GFR-binding peptide
  MOD_RES (2), (3): Xaa is C or S
  MOD_RES (17), (18), (19), (20), (21): Xaa is A or G
  MOD_RES (22), (23), (24), (25): Xaa is A or G or is absent

SEQ ID NO: 70793 - protein, 41 aa, Artificial Sequence
  GFR-binding peptide
  MOD_RES (6), (7), (39), (41): Xaa is C or S
GIPEPXXVPEKMSATSILYYDENKNVVLRKHRNMTVESXAX

SEQ ID NO: 70794 - protein, 39 aa, Artificial Sequence
  GFR-binding peptide
  MOD_RES (4), (5), (39): Xaa is C or S
  MOD_RES (19), (20), (21), (22), (23): Xaa is A or G
  MOD_RES (24), (25), (26), (27): Xaa is A or G or is absent
PPTXXVPTRLSPISILYKXXXXXXXXXLKYHYDMVVESX

SEQ ID NO: 70795 - protein, 38 aa, Artificial Sequence; identical to SEQ ID NO: 8486
  GFR-binding peptide
  MOD_RES (5), (6), (38): Xaa is C or S

SEQ ID NO: 70796 - protein, 34 aa, Artificial Sequence; identical to SEQ ID NO: 29805
  GFR-binding peptide
  MOD_RES (32), (34): Xaa is C or S

SEQ ID NO: 70797 - protein, 37 aa, Artificial Sequence; identical to SEQ ID NO: 8487
  GFR-binding peptide
  MOD_RES (1), (2), (37): Xaa is C or S
  MOD_RES (16), (17), (18), (19), (20): Xaa is A or G
  MOD_RES (21), (22), (23), (24): Xaa is A or G or is absent

SEQ ID NO: 70798 - protein, 30 aa, Artificial Sequence; identical to SEQ ID NO: 8488
  GFR-binding peptide

SEQ ID NO: 70799 - protein, 35 aa, Artificial Sequence
  GFR-binding peptide
  MOD_RES (3), (4): Xaa is C or S
EPXXVPEKMSPINILYFDENKNVVYGKIPNMTVES

SEQ ID NO: 70800 - protein, 35 aa, Artificial Sequence; identical to SEQ ID NO: 8491
  GFR-binding peptide
  MOD_RES (1), (2), (35): Xaa is C or S
  MOD_RES (16), (17), (18), (19), (20): Xaa is A or G
  MOD_RES (21), (22), (23), (24): Xaa is A or G or is absent

SEQ ID NO: 70801 - protein, 40 aa, Artificial Sequence
  GFR-binding peptide
  MOD_RES (6), (7), (39): Xaa is C or S
GIPEPXXVPEKMSPISILYKDENKNVVLKYHYNMTVESXA

SEQ ID NO: 70802 - protein, 34 aa, Artificial Sequence
  GFR-binding peptide
  MOD_RES (1), (2): Xaa is C or S
  MOD_RES (16), (17), (18), (19), (20): Xaa is A or G
  MOD_RES (21), (22), (23), (24): Xaa is A or G or is absent
XXVPTKLSATSILYYXXXXXXXXXLRKHRGMAVS

SEQ ID NO: 70803 - protein, 37 aa, Artificial Sequence
  GFR-binding peptide
  MOD_RES (34), (36): Xaa is C or S
  MOD_RES (14), (15), (16), (17), (18): Xaa is A or G
  MOD_RES (19), (20), (21), (22): Xaa is A or G or is absent
VPTRLSATSILYYXXXXXXXXXLRKHRDMVVESXGXR

SEQ ID NO: 70804 - protein, 38 aa, Artificial Sequence; identical to SEQ ID NO: 29814
  GFR-binding peptide
  MOD_RES (1), (35), (37): Xaa is C or S
  MOD_RES (15), (16), (17), (18), (19): Xaa is A or G
  MOD_RES (20), (21), (22), (23): Xaa is A or G or is absent

SEQ ID NO: 70805 - protein, 36 aa, Artificial Sequence; identical to SEQ ID NO: 32949
  GFR-binding peptide
  MOD_RES (3), (4), (36): Xaa is C or S

SEQ ID NO: 70806 - protein, 39 aa, Artificial Sequence
  GFR-binding peptide
  MOD_RES (3), (4), (37), (39): Xaa is C or S
  MOD_RES (18), (19), (20), (21), (22): Xaa is A or G
  MOD_RES (23), (24), (25), (26): Xaa is A or G or is absent
STXXAPVKTSATSMLYYXXXXXXXXXLRKHRMIVEEXGX

SEQ ID NO: 70807 - protein, 37 aa, Artificial Sequence; identical to SEQ ID NO: 32950
  GFR-binding peptide
  MOD_RES (2), (3), (36): Xaa is C or S
  MOD_RES (17), (18), (19), (20), (21): Xaa is A or G
  MOD_RES (22), (23), (24), (25): Xaa is A or G or is absent

SEQ ID NO: 70808 - protein, 33 aa, Artificial Sequence; identical to SEQ ID NO: 8503
  GFR-binding peptide
  MOD_RES (31), (33): Xaa is C or S

SEQ ID NO: 70809 - protein, 34 aa, Artificial Sequence; identical to SEQ ID NO: 29820
  GFR-binding peptide
  MOD_RES (1), (34): Xaa is C or S
  MOD_RES (15), (16), (17), (18), (19): Xaa is A or G
  MOD_RES (20), (21), (22), (23): Xaa is A or G or is absent

SEQ ID NO: 70810 - protein, 41 aa, Artificial Sequence; identical to SEQ ID NO: 8508
  GFR-binding peptide
  MOD_RES (5), (6), (39), (41): Xaa is C or S
  MOD_RES (20), (21), (22), (23), (24): Xaa is A or G
  MOD_RES (25), (26), (27), (28): Xaa is A or G or is absent

SEQ ID NO: 70811 - protein, 36 aa, Artificial Sequence
  GFR-binding peptide
  MOD_RES (5), (6): Xaa is C or S
SASPXXVSQDLSPINILYFIGKTPKIYGKIPMIVKS

SEQ ID NO: 70812 - protein, 34 aa, Artificial Sequence
  GFR-binding peptide
  MOD_RES (1), (33): Xaa is C or S
XVPTRLSATSILYYDSANNVVLRKHRDMVVESXG

SEQ ID NO: 70813 - protein, 33 aa, Artificial Sequence
  GFR-binding peptide
  MOD_RES (2), (3): Xaa is C or S
AXXVPTKLSATSILYYDKGVVTYLRKHRGMAVS

SEQ ID NO: 70814 - protein, 38 aa, Artificial Sequence
  GFR-binding peptide
  MOD_RES (2), (3), (37): Xaa is C or S
  MOD_RES (17), (18), (19), (20), (21): Xaa is A or G
  MOD_RES (22), (23), (24), (25): Xaa is A or G or is absent
PXXVPEKMSATSILYYXXXXXXXXXLRKHRNMTVESXA

SEQ ID NO: 70815 - protein, 37 aa, Artificial Sequence; identical to SEQ ID NO: 29837
  GFR-binding peptide
  MOD_RES (34), (36): Xaa is C or S
  MOD_RES (14), (15), (16), (17), (18): Xaa is A or G
  MOD_RES (19), (20), (21), (22): Xaa is A or G or is absent

SEQ ID NO: 70816 - protein, 37 aa, Artificial Sequence
  GFR-binding peptide
  MOD_RES (2), (3), (34), (36): Xaa is C or S
TXXAPVKTSATSMLYYDNGRVLLLRKHRMIVEEXGXL

SEQ ID NO: 70817 - protein, 40 aa, Artificial Sequence; identical to SEQ ID NO: 8520
  GFR-binding peptide
  MOD_RES (3), (37), (39): Xaa is C or S
  MOD_RES (17), (18), (19), (20), (21): Xaa is A or G
  MOD_RES (22), (23), (24), (25): Xaa is A or G or is absent

SEQ ID NO: 70818 - protein, 36 aa, Artificial Sequence; identical to SEQ ID NO: 8522
  GFR-binding peptide
  MOD_RES (3), (4): Xaa is C or S
  MOD_RES (18), (19), (20), (21), (22): Xaa is A or G
  MOD_RES (23), (24), (25), (26): Xaa is A or G or is absent

SEQ ID NO: 70819 - protein, 40 aa, Artificial Sequence; identical to SEQ ID NO: 8523
  GFR-binding peptide
  MOD_RES (4), (5), (40): Xaa is C or S
  MOD_RES (19), (20), (21), (22), (23): Xaa is A or G
  MOD_RES (24), (25), (26), (27): Xaa is A or G or is absent

SEQ ID NO: 70820 - protein, 33 aa, Artificial Sequence; identical to SEQ ID NO: 8526
  GFR-binding peptide
  MOD_RES (1), (2), (33): Xaa is C or S

SEQ ID NO: 70821 - protein, 37 aa, Artificial Sequence; identical to SEQ ID NO: 32976
  GFR-binding peptide
  MOD_RES (34), (36): Xaa is C or S
  MOD_RES (14), (15), (16), (17), (18): Xaa is A or G
  MOD_RES (19), (20), (21), (22): Xaa is A or G or is absent

SEQ ID NO: 70822 - protein, 39 aa, Artificial Sequence
  GFR-binding peptide
  MOD_RES (6), (7), (38): Xaa is C or S
ASAAPXXVPQALSPINILYFVGRKPKVYGKIPMIVRSXK

SEQ ID NO: 70823 - protein, 35 aa, Artificial Sequence; identical to SEQ ID NO: 8532
  GFR-binding peptide
  MOD_RES (1), (2), (33), (35): Xaa is C or S

SEQ ID NO: 70824 - protein, 40 aa, Artificial Sequence; identical to SEQ ID NO: 29847
  GFR-binding peptide
  MOD_RES (5), (6), (40): Xaa is C or S
  MOD_RES (20), (21), (22), (23), (24): Xaa is A or G
  MOD_RES (25), (26), (27), (28): Xaa is A or G or is absent

SEQ ID NO: 70825 - protein, 36 aa, Artificial Sequence
  GFR-binding peptide
  MOD_RES (1), (2), (34), (36): Xaa is C or S
XXTPTKMSPISMLYKNDKQQIILKYHYGMVVDRXGX

SEQ ID NO: 70826 - protein, 41 aa, Artificial Sequence
  GFR-binding peptide
  MOD_RES (4), (5), (39), (41): Xaa is C or S
  MOD_RES (19), (20), (21), (22), (23): Xaa is A or G
  MOD_RES (24), (25), (26), (27): Xaa is A or G or is absent
AGPXXTPTKMEPISMLYLXXXXXXXXXKFKYEGMVVDRXGX

SEQ ID NO: 70827 - protein, 38 aa, Artificial Sequence; identical to SEQ ID NO: 29849
  GFR-binding peptide
  MOD_RES (5), (6), (38): Xaa is C or S

SEQ ID NO: 70828 - protein, 38 aa, Artificial Sequence; identical to SEQ ID NO: 8542
  GFR-binding peptide
  MOD_RES (2), (3), (35), (37): Xaa is C or S

SEQ ID NO: 70829 - protein, 35 aa, Artificial Sequence; identical to SEQ ID NO: 29858
  GFR-binding peptide
  MOD_RES (32), (34): Xaa is C or S

SEQ ID NO: 70830 - protein, 32 aa, Artificial Sequence
  GFR-binding peptide
  MOD_RES (31), (31): Xaa is C or S
APVKTSATSMLYYDNGRVLLLRKHRMIVEEXG

SEQ ID NO: 70831 - protein, 38 aa, Artificial Sequence
  GFR-binding peptide
  MOD_RES (2), (3), (35), (37): Xaa is C or S
PXXTPTKMSATSMLYYNDKQQIILRKHRGMVVDRXGXS

SEQ ID NO: 70832 - protein, 41 aa, Artificial Sequence; identical to SEQ ID NO: 29859
  GFR-binding peptide
  MOD_RES (4), (5), (39), (41): Xaa is C or S
  MOD_RES (19), (20), (21), (22), (23): Xaa is A or G
  MOD_RES (24), (25), (26), (27): Xaa is A or G or is absent

SEQ ID NO: 70833 - protein, 36 aa, Artificial Sequence; identical to SEQ ID NO: 29860
  GFR-binding peptide
  MOD_RES (34), (36): Xaa is C or S
  MOD_RES (14), (15), (16), (17), (18): Xaa is A or G
  MOD_RES (19), (20), (21), (22): Xaa is A or G or is absent

SEQ ID NO: 70834 - protein, 37 aa, Artificial Sequence
  GFR-binding peptide
  MOD_RES (1), (2), (36): Xaa is C or S
  MOD_RES (16), (17), (18), (19), (20): Xaa is A or G
  MOD_RES (21), (22), (23), (24): Xaa is A or G or is absent
XXVPTRLSATSILYYXXXXXXXXXLRKHRDMVVESXG

SEQ ID NO: 70835 - protein, 40 aa, Artificial Sequence; identical to SEQ ID NO: 29863
  GFR-binding peptide
  MOD_RES (2), (3), (37), (39): Xaa is C or S
  MOD_RES (17), (18), (19), (20), (21): Xaa is A or G
  MOD_RES (22), (23), (24), (25): Xaa is A or G or is absent

SEQ ID NO: 70836 - protein, 38 aa, Artificial Sequence; identical to SEQ ID NO: 29864
  GFR-binding peptide
  MOD_RES (5), (6), (38): Xaa is C or S

SEQ ID NO: 70837 - protein, 32 aa, Artificial Sequence; identical to SEQ ID NO: 32994
  GFR-binding peptide
  MOD_RES (32), (32): Xaa is C or S

SEQ ID NO: 70838 - protein, 40 aa, Artificial Sequence; identical to SEQ ID NO: 32996
  GFR-binding peptide
  MOD_RES (6), (7), (40): Xaa is C or S
  MOD_RES (21), (22), (23), (24), (25): Xaa is A or G
  MOD_RES (26), (27), (28), (29): Xaa is A or G or is absent

SEQ ID NO: 70839 - protein, 35 aa, Artificial Sequence; identical to SEQ ID NO: 29866
  GFR-binding peptide
  MOD_RES (1), (2): Xaa is C or S
  MOD_RES (16), (17), (18), (19), (20): Xaa is A or G
  MOD_RES (21), (22), (23), (24): Xaa is A or G or is absent

SEQ ID NO: 70840 - protein, 36 aa, Artificial Sequence; identical to SEQ ID NO: 29873
  GFR-binding peptide
  MOD_RES (2), (34), (36): Xaa is C or S

SEQ ID NO: 70841 - protein, 36 aa, Artificial Sequence; identical to SEQ ID NO: 8565
  GFR-binding peptide
  MOD_RES (1), (34), (36): Xaa is C or S

SEQ ID NO: 70842 - protein, 39 aa, Artificial Sequence; identical to SEQ ID NO: 29878
  GFR-binding peptide
  MOD_RES (6), (7): Xaa is C or S
  MOD_RES (21), (22), (23), (24), (25): Xaa is A or G
  MOD_RES (26), (27), (28), (29): Xaa is A or G or is absent

SEQ ID NO: 70843 - protein, 34 aa, Artificial Sequence; identical to SEQ ID NO: 33006
  GFR-binding peptide
  MOD_RES (2), (3): Xaa is C or S

SEQ ID NO: 70844 - protein, 37 aa, Artificial Sequence; identical to SEQ ID NO: 29881
  GFR-binding peptide
  MOD_RES (2), (3), (37): Xaa is C or S
  MOD_RES (17), (18), (19), (20), (21): Xaa is A or G
  MOD_RES (22), (23), (24), (25): Xaa is A or G or is absent

SEQ ID NO: 70845 - protein, 34 aa, Artificial Sequence
  GFR-binding peptide
  MOD_RES (3), (4): Xaa is C or S
EPXXVPEKMNAISILYFDENKNVVLKKYRNMTVE

SEQ ID NO: 70846 - protein, 41 aa, Artificial Sequence; identical to SEQ ID NO: 29883
  GFR-binding peptide
  MOD_RES (5), (6), (38), (40): Xaa is C or S

SEQ ID NO: 70847 - protein, 38 aa, Artificial Sequence
  GFR-binding peptide
  MOD_RES (2), (3), (37): Xaa is C or S
  MOD_RES (17), (18), (19), (20), (21): Xaa is A or G
  MOD_RES (22), (23), (24), (25): Xaa is A or G or is absent
TXXVPTRLSATSILYYXXXXXXXXXLRKHRDMVVESXG

SEQ ID NO: 70848 - protein, 36 aa, Artificial Sequence; identical to SEQ ID NO: 29888
  GFR-binding peptide
  MOD_RES (3), (4), (35): Xaa is C or S

SEQ ID NO: 70849 - protein, 37 aa, Artificial Sequence
  GFR-binding peptide
  MOD_RES (1), (35), (37): Xaa is C or S
  MOD_RES (15), (16), (17), (18), (19): Xaa is A or G
  MOD_RES (20), (21), (22), (23): Xaa is A or G or is absent
XVPTKLSATSILYYXXXXXXXXXLRKHRGMAVSEXGX

SEQ ID NO: 70850 - protein, 39 aa, Artificial Sequence; identical to SEQ ID NO: 33022
  GFR-binding peptide
  MOD_RES (4), (5), (38): Xaa is C or S

SEQ ID NO: 70851 - protein, 37 aa, Artificial Sequence
  GFR-binding peptide
  MOD_RES (3), (4), (36): Xaa is C or S
ASXXVPARLSATSILYYDAANNVVLRKHRDMVVEAXG

SEQ ID NO: 70852 - protein, 41 aa, Artificial Sequence; identical to SEQ ID NO: 8571
  GFR-binding peptide
  MOD_RES (6), (7), (39), (41): Xaa is C or S

SEQ ID NO: 70853 - protein, 38 aa, Artificial Sequence
  GFR-binding peptide
  MOD_RES (1), (2), (36), (38): Xaa is C or S
  MOD_RES (16), (17), (18), (19), (20): Xaa is A or G
  MOD_RES (21), (22), (23), (24): Xaa is A or G or is absent
XXTPTKMEPISMLYLXXXXXXXXXKFKYEGMVVDRXGX

SEQ ID NO: 70854 - protein, 36 aa, Artificial Sequence; identical to SEQ ID NO: 8572
  GFR-binding peptide
  MOD_RES (5), (6): Xaa is C or S

SEQ ID NO: 70855 - protein, 40 aa, Artificial Sequence; identical to SEQ ID NO: 8573
  GFR-binding peptide
  MOD_RES (4), (5), (37), (39): Xaa is C or S

SEQ ID NO: 70856 - protein, 40 aa, Artificial Sequence; identical to SEQ ID NO: 8578
  GFR-binding peptide
  MOD_RES (1), (2), (37), (39): Xaa is C or S
  MOD_RES (16), (17), (18), (19), (20): Xaa is A or G
  MOD_RES (21), (22), (23), (24): Xaa is A or G or is absent

SEQ ID NO: 70857 - protein, 41 aa, Artificial Sequence
  GFR-binding peptide
  MOD_RES (4), (5), (38), (40): Xaa is C or S
  MOD_RES (19), (20), (21), (22), (23): Xaa is A or G
  MOD_RES (24), (25), (26), (27): Xaa is A or G or is absent
PSTXXAPVKTEPISMLYLXXXXXXXXXKFKYEMIVEEXGXL

SEQ ID NO: 70858 - protein, 32 aa, Artificial Sequence
  GFR-binding peptide
  MOD_RES (14), (15), (16), (17), (18): Xaa is A or G
  MOD_RES (19), (20), (21), (22): Xaa is A or G or is absent
VPEKMSPISILYKXXXXXXXXXLKYHYNMTVE

SEQ ID NO: 70859 - protein, 34 aa, Artificial Sequence; identical to SEQ ID NO: 8582
  GFR-binding peptide
  MOD_RES (2), (3): Xaa is C or S

SEQ ID NO: 70860 - protein, 34 aa, Artificial Sequence; identical to SEQ ID NO: 33039
  GFR-binding peptide
  MOD_RES (32), (34): Xaa is C or S

SEQ ID NO: 70861 - protein, 38 aa, Artificial Sequence; identical to SEQ ID NO: 33040
  GFR-binding peptide
  MOD_RES (5), (6), (38): Xaa is C or S

SEQ ID NO: 70862 - protein, 37 aa, Artificial Sequence; identical to SEQ ID NO: 8584
  GFR-binding peptide
  MOD_RES (1), (35), (37): Xaa is C or S
  MOD_RES (15), (16), (17), (18), (19): Xaa is A or G
  MOD_RES (20), (21), (22), (23): Xaa is A or G or is absent

SEQ ID NO: 70863 - protein, 36 aa, Artificial Sequence
  GFR-binding peptide
  MOD_RES (1), (2), (36): Xaa is C or S
  MOD_RES (16), (17), (18), (19), (20): Xaa is A or G
  MOD_RES (21), (22), (23), (24): Xaa is A or G or is absent
XXVPTRLEPISILYLXXXXXXXXXKFKYEDMVVESX

SEQ ID NO: 70864 - protein, 38 aa, Artificial Sequence; identical to SEQ ID NO: 29909
  GFR-binding peptide
  MOD_RES (6), (7): Xaa is C or S

SEQ ID NO: 70865 - protein, 34 aa, Artificial Sequence; identical to SEQ ID NO: 29911
  GFR-binding peptide
  MOD_RES (34), (34): Xaa is C or S
  MOD_RES (14), (15), (16), (17), (18): Xaa is A or G
  MOD_RES (19), (20), (21), (22): Xaa is A or G or is absent

SEQ ID NO: 70866 - protein, 31 aa, Artificial Sequence; identical to SEQ ID NO: 8589
  GFR-binding peptide
  MOD_RES (1), (1): Xaa is C or S

SEQ ID NO: 70867 - protein, 41 aa, Artificial Sequence; identical to SEQ ID NO: 33046
  GFR-binding peptide
  MOD_RES (6), (7), (39), (41): Xaa is C or S

SEQ ID NO: 70868 - protein, 39 aa, Artificial Sequence; identical to SEQ ID NO: 33047
  GFR-binding peptide
  MOD_RES (6), (7): Xaa is C or S
  MOD_RES (21), (22), (23), (24), (25): Xaa is A or G
  MOD_RES (26), (27), (28), (29): Xaa is A or G or is absent

SEQ ID NO: 70869 - protein, 37 aa, Artificial Sequence; identical to SEQ ID NO: 8590
  GFR-binding peptide
  MOD_RES (3), (4), (35), (37): Xaa is C or S

SEQ ID NO: 70870 - protein, 41 aa, Artificial Sequence
  GFR-binding peptide
  MOD_RES (6), (7), (41): Xaa is C or S
  MOD_RES (21), (22), (23), (24), (25): Xaa is A or G
  MOD_RES (26), (27), (28), (29): Xaa is A or G or is absent
GIPEPXXVPEKMNAISILYFXXXXXXXXXLKKYRNMTVESX

SEQ ID NO: 70871 - protein, 41 aa, Artificial Sequence; identical to SEQ ID NO: 29918
  GFR-binding peptide
  MOD_RES (4), (5), (39), (41): Xaa is C or S
  MOD_RES (19), (20), (21), (22), (23): Xaa is A or G
  MOD_RES (24), (25), (26), (27): Xaa is A or G or is absent

SEQ ID NO: 70872 - protein, 34 aa, Artificial Sequence
  GFR-binding peptide
  MOD_RES (1), (33): Xaa is C or S
XTPTKMEPISMLYLNDKQQIIKFKYEGMVVDRXG

SEQ ID NO: 70873 - protein, 39 aa, Artificial Sequence; identical to SEQ ID NO: 8592
  GFR-binding peptide
  MOD_RES (2), (3), (36), (38): Xaa is C or S
  MOD_RES (17), (18), (19), (20), (21): Xaa is A or G
  MOD_RES (22), (23), (24), (25): Xaa is A or G or is absent

SEQ ID NO: 70874 - protein, 35 aa, Artificial Sequence; identical to SEQ ID NO: 8594
  GFR-binding peptide
  MOD_RES (1), (34): Xaa is C or S
  MOD_RES (15), (16), (17), (18), (19): Xaa is A or G
  MOD_RES (20), (21), (22), (23): Xaa is A or G or is absent

SEQ ID NO: 70875 - protein, 33 aa, Artificial Sequence
  GFR-binding peptide
  MOD_RES (1), (1): Xaa is C or S
  MOD_RES (15), (16), (17), (18), (19): Xaa is A or G
  MOD_RES (20), (21), (22), (23): Xaa is A or G or is absent
XVPTRLSATSILYYXXXXXXXXXLRKHRDMVVE

SEQ ID NO: 70876 - protein, 37 aa, Artificial Sequence; identical to SEQ ID NO: 33054
  GFR-binding peptide
  MOD_RES (1), (2), (36): Xaa is C or S
  MOD_RES (16), (17), (18), (19), (20): Xaa is A or G
  MOD_RES (21), (22), (23), (24): Xaa is A or G or is absent

SEQ ID NO: 70877 - protein, 30 aa, Artificial Sequence
  GFR-binding peptide
VPTRLSPISILYKDSANNVVLKYHYDMVVE

SEQ ID NO: 70878 - protein, 42 aa, Artificial Sequence; identical to SEQ ID NO: 8599
  GFR-binding peptide
  MOD_RES (6), (7), (41): Xaa is C or S
  MOD_RES (21), (22), (23), (24), (25): Xaa is A or G
  MOD_RES (26), (27), (28), (29): Xaa is A or G or is absent

SEQ ID NO: 70879 - protein, 39 aa, Artificial Sequence
  GFR-binding peptide
  MOD_RES (4), (5), (38): Xaa is C or S
  MOD_RES (19), (20), (21), (22), (23): Xaa is A or G
  MOD_RES (24), (25), (26), (27): Xaa is A or G or is absent
PSTXXAPVKTSATSMLYYXXXXXXXXXLRKHRMIVEEXG

SEQ ID NO: 70880 - protein, 40 aa, Artificial Sequence; identical to SEQ ID NO: 8600
  GFR-binding peptide
  MOD_RES (6), (7): Xaa is C or S
  MOD_RES (21), (22), (23), (24), (25): Xaa is A or G
  MOD_RES (26), (27), (28), (29): Xaa is A or G or is absent

SEQ ID NO: 70881 - protein, 36 aa, Artificial Sequence; identical to SEQ ID NO: 29931
  GFR-binding peptide
  MOD_RES (3), (3): Xaa is C or S
  MOD_RES (17), (18), (19), (20), (21): Xaa is A or G
  MOD_RES (22), (23), (24), (25): Xaa is A or G or is absent

SEQ ID NO: 70882 - protein, 35 aa, Artificial Sequence; identical to SEQ ID NO: 29932
  GFR-binding peptide
  MOD_RES (1), (35): Xaa is C or S
  MOD_RES (15), (16), (17), (18), (19): Xaa is A or G
  MOD_RES (20), (21), (22), (23): Xaa is A or G or is absent

SEQ ID NO: 70883 - protein, 38 aa, Artificial Sequence; identical to SEQ ID NO: 8602
  GFR-binding peptide
  MOD_RES (1), (35), (37): Xaa is C or S
  MOD_RES (15), (16), (17), (18), (19): Xaa is A or G
  MOD_RES (20), (21), (22), (23): Xaa is A or G or is absent

SEQ ID NO: 70884 - protein, 40 aa, Artificial Sequence; identical to SEQ ID NO: 8603
  GFR-binding peptide
  MOD_RES (4), (5), (39): Xaa is C or S
  MOD_RES (19), (20), (21), (22), (23): Xaa is A or G
  MOD_RES (24), (25), (26), (27): Xaa is A or G or is absent

SEQ ID NO: 70885 - protein, 36 aa, Artificial Sequence; identical to SEQ ID NO: 29935
  GFR-binding peptide
  MOD_RES (1), (35): Xaa is C or S
  MOD_RES (15), (16), (17), (18), (19): Xaa is A or G
  MOD_RES (20), (21), (22), (23): Xaa is A or G or is absent

SEQ ID NO: 70886 - protein, 42 aa, Artificial Sequence; identical to SEQ ID NO: 33060
  GFR-binding peptide
  MOD_RES (6), (7), (39), (41): Xaa is C or S

SEQ ID NO: 70887 - protein, 32 aa, Artificial Sequence
  GFR-binding peptide
  MOD_RES (14), (15), (16), (17), (18): Xaa is A or G
  MOD_RES (19), (20), (21), (22): Xaa is A or G or is absent
APVKTSPISMLYKXXXXXXXXXLKYHYMIVEE

SEQ ID NO: 70888 - protein, 42 aa, Artificial Sequence; identical to SEQ ID NO: 57953
  GFR-binding peptide
  MOD_RES (5), (6), (40), (42): Xaa is C or S
  MOD_RES (20), (21), (22), (23), (24): Xaa is A or G
  MOD_RES (25), (26), (27), (28): Xaa is A or G or is absent

SEQ ID NO: 70889 - protein, 39 aa, Artificial Sequence; identical to SEQ ID NO: 8610
  GFR-binding peptide
  MOD_RES (6), (7), (38): Xaa is C or S

SEQ ID NO: 70890 - protein, 38 aa, Artificial Sequence; identical to SEQ ID NO: 8613
  GFR-binding peptide
  MOD_RES (3), (4), (37): Xaa is C or S
  MOD_RES (18), (19), (20), (21), (22): Xaa is A or G
  MOD_RES (23), (24), (25), (26): Xaa is A or G or is absent

SEQ ID NO: 70891 - protein, 34 aa, Artificial Sequence; identical to SEQ ID NO: 33067
  GFR-binding peptide
  MOD_RES (1), (1): Xaa is C or S
  MOD_RES (15), (16), (17), (18), (19): Xaa is A or G
  MOD_RES (20), (21), (22), (23): Xaa is A or G or is absent

SEQ ID NO: 70892 - protein, 33 aa, Artificial Sequence
  GFR-binding peptide
  MOD_RES (14), (15), (16), (17), (18): Xaa is A or G
  MOD_RES (19), (20), (21), (22): Xaa is A or G or is absent
VPEKMSATSILYYXXXXXXXXXLRKHRNMTVES

SEQ ID NO: 70893 - protein, 43 aa, Artificial Sequence; identical to SEQ ID NO: 29947
  GFR-binding peptide
  MOD_RES (6), (40), (42): Xaa is C or S
  MOD_RES (20), (21), (22), (23), (24): Xaa is A or G
  MOD_RES (25), (26), (27), (28): Xaa is A or G or is absent

SEQ ID NO: 70894 - protein, 42 aa, Artificial Sequence
  GFR-binding peptide
  MOD_RES (6), (7), (39), (41): Xaa is C or S
GSAGPXXTPTKMSPISMLYKNDKQQIILKYHYGMVVDRXGXS

SEQ ID NO: 70895 - protein, 38 aa, Artificial Sequence; identical to SEQ ID NO: 8616
  GFR-binding peptide
  MOD_RES (2), (36), (38): Xaa is C or S
  MOD_RES (16), (17), (18), (19), (20): Xaa is A or G
  MOD_RES (21), (22), (23), (24): Xaa is A or G or is absent

SEQ ID NO: 70896 - protein, 36 aa, Artificial Sequence; identical to SEQ ID NO: 8617
  GFR-binding peptide
  MOD_RES (3), (4), (36): Xaa is C or S

SEQ ID NO: 70897 - protein, 38 aa, Artificial Sequence; identical to SEQ ID NO: 29951
  GFR-binding peptide
  MOD_RES (5), (6), (38): Xaa is C or S

SEQ ID NO: 70898 - protein, 36 aa, Artificial Sequence; identical to SEQ ID NO: 8619
  GFR-binding peptide
  MOD_RES (5), (6): Xaa is C or S

SEQ ID NO: 70899 - protein, 37 aa, Artificial Sequence; identical to SEQ ID NO: 29954
  GFR-binding peptide
  MOD_RES (4), (5): Xaa is C or S
  MOD_RES (19), (20), (21), (22), (23): Xaa is A or G
  MOD_RES (24), (25), (26), (27): Xaa is A or G or is absent

SEQ ID NO: 70900 - protein, 32 aa, Artificial Sequence; identical to SEQ ID NO: 29955
  GFR-binding peptide
  MOD_RES (1), (1): Xaa is C or S

SEQ ID NO: 70901 - protein, 38 aa, Artificial Sequence; identical to SEQ ID NO: 8621
  GFR-binding peptide
  MOD_RES (5), (6): Xaa is C or S
  MOD_RES (20), (21), (22), (23), (24): Xaa is A or G
  MOD_RES (25), (26), (27), (28): Xaa is A or G or is absent

SEQ ID NO: 70902 - protein, 35 aa, Artificial Sequence; identical to SEQ ID NO: 29958
  GFR-binding peptide
  MOD_RES (1), (35): Xaa is C or S
  MOD_RES (15), (16), (17), (18), (19): Xaa is A or G
  MOD_RES (20), (21), (22), (23): Xaa is A or G or is absent

SEQ ID NO: 70903 - protein, 44 aa, Artificial Sequence; identical to SEQ ID NO: 33074
  GFR-binding peptide
  MOD_RES (6), (7), (41), (43): Xaa is C or S
  MOD_RES (21), (22), (23), (24), (25): Xaa is A or G
  MOD_RES (26), (27), (28), (29): Xaa is A or G or is absent

SEQ ID NO: 70904 - protein, 38 aa, Artificial Sequence; identical to SEQ ID NO: 33075
  GFR-binding peptide
  MOD_RES (1), (2), (36), (38): Xaa is C or S
  MOD_RES (16), (17), (18), (19), (20): Xaa is A or G
  MOD_RES (21), (22), (23), (24): Xaa is A or G or is absent

SEQ ID NO: 70905 - protein, 34 aa, Artificial Sequence; identical to SEQ ID NO: 8626
  GFR-binding peptide
  MOD_RES (1), (2), (33): Xaa is C or S

SEQ ID NO: 70906 - protein, 37 aa, Artificial Sequence; identical to SEQ ID NO: 57969
  GFR-binding peptide
  MOD_RES (1), (34), (36): Xaa is C or S
  MOD_RES (15), (16), (17), (18), (19): Xaa is A or G
  MOD_RES (20), (21), (22), (23): Xaa is A or G or is absent

SEQ ID NO: 70907 - protein, 31 aa, Artificial Sequence; identical to SEQ ID NO: 33081
  GFR-binding peptide
  MOD_RES (1), (1): Xaa is C or S

SEQ ID NO: 70908 - protein, 34 aa, Artificial Sequence
  GFR-binding peptide
  MOD_RES (34), (34): Xaa is C or S
  MOD_RES (14), (15), (16), (17), (18): Xaa is A or G
  MOD_RES (19), (20), (21), (22): Xaa is A or G or is absent
VPEKMSPINILYFXXXXXXXXXYGKIPNMTVESX

SEQ ID NO: 70909 - protein, 33 aa, Artificial Sequence; identical to SEQ ID NO: 33090
  GFR-binding peptide
  MOD_RES (1), (2): Xaa is C or S

SEQ ID NO: 70910 - protein, 38 aa, Artificial Sequence; identical to SEQ ID NO: 8628
  GFR-binding peptide
  MOD_RES (1), (36), (38): Xaa is C or S
  MOD_RES (15), (16), (17), (18), (19): Xaa is A or G
  MOD_RES (20), (21), (22), (23): Xaa is A or G or is absent

SEQ ID NO: 70911 - protein, 37 aa, Artificial Sequence
  GFR-binding peptide
  MOD_RES (3), (4), (36): Xaa is C or S
EPXXVPEKMNAISILYFDENKNVVLKKYRNMTVESXA

SEQ ID NO: 70912 - protein, 36 aa, Artificial Sequence; identical to SEQ ID NO: 8629
  GFR-binding peptide
  MOD_RES (34), (36): Xaa is C or S
  MOD_RES (14), (15), (16), (17), (18): Xaa is A or G
  MOD_RES (19), (20), (21), (22): Xaa is A or G or is absent

SEQ ID NO: 70913 - protein, 38 aa, Artificial Sequence; identical to SEQ ID NO: 8630
  GFR-binding peptide
  MOD_RES (1), (2), (36), (38): Xaa is C or S
  MOD_RES (16), (17), (18), (19), (20): Xaa is A or G
  MOD_RES (21), (22), (23), (24): Xaa is A or G or is absent

SEQ ID NO: 70914 - protein, 37 aa, Artificial Sequence; identical to SEQ ID NO: 8631
  GFR-binding peptide
  MOD_RES (1), (34), (36): Xaa is C or S
  MOD_RES (15), (16), (17), (18), (19): Xaa is A or G
  MOD_RES (20), (21), (22), (23): Xaa is A or G or is absent

SEQ ID NO: 70915 - protein, 39 aa, Artificial Sequence; identical to SEQ ID NO: 33095
  GFR-binding peptide
  MOD_RES (6), (7): Xaa is C or S
  MOD_RES (21), (22), (23), (24), (25): Xaa is A or G
  MOD_RES (26), (27), (28), (29): Xaa is A or G or is absent

SEQ ID NO: 70916 - protein, 36 aa, Artificial Sequence; identical to SEQ ID NO: 29969
  GFR-binding peptide
  MOD_RES (3), (4), (36): Xaa is C or S

SEQ ID NO: 70917 - protein, 40 aa, Artificial Sequence; identical to SEQ ID NO: 8635
  GFR-binding peptide
  MOD_RES (4), (5), (39): Xaa is C or S
  MOD_RES (19), (20), (21), (22), (23): Xaa is A or G
  MOD_RES (24), (25), (26), (27): Xaa is A or G or is absent

SEQ ID NO: 70918 - protein, 36 aa, Artificial Sequence; identical to SEQ ID NO: 33100
  GFR-binding peptide
  MOD_RES (1), (2), (34), (36): Xaa is C or S

SEQ ID NO: 70919 - protein, 36 aa, Artificial Sequence; identical to SEQ ID NO: 33102
  GFR-binding peptide
  MOD_RES (1), (33), (35): Xaa is C or S

SEQ ID NO: 70920 - protein, 35 aa, Artificial Sequence; identical to SEQ ID NO: 8637
  GFR-binding peptide
  MOD_RES (2), (3), (35): Xaa is C or S

SEQ ID NO: 70921 - protein, 41 aa, Artificial Sequence; identical to SEQ ID NO: 8638
  GFR-binding peptide
  MOD_RES (6), (7): Xaa is C or S
  MOD_RES (21), (22), (23), (24), (25): Xaa is A or G
  MOD_RES (26), (27), (28), (29): Xaa is A or G or is absent

SEQ ID NO: 70922 - protein, 37 aa, Artificial Sequence; identical to SEQ ID NO: 8639
  GFR-binding peptide
  MOD_RES (1), (34), (36): Xaa is C or S
  MOD_RES (15), (16), (17), (18), (19): Xaa is A or G
  MOD_RES (20), (21), (22), (23): Xaa is A or G or is absent

SEQ ID NO: 70923 - protein, 36 aa, Artificial Sequence
  GFR-binding peptide
  MOD_RES (3), (4), (36): Xaa is C or S
EPXXVPEKMSPISILYKDENKNVVLKYHYNMTVESX

SEQ ID NO: 70924 - protein, 32 aa, Artificial Sequence; identical to SEQ ID NO: 29973
  GFR-binding peptide
  MOD_RES (31), (31): Xaa is C or S

SEQ ID NO: 70925 - protein, 42 aa, Artificial Sequence
  GFR-binding peptide
  MOD_RES (5), (6), (40), (42): Xaa is C or S
  MOD_RES (20), (21), (22), (23), (24): Xaa is A or G
  MOD_RES (25), (26), (27), (28): Xaa is A or G or is absent
SAGPXXTPTKMEPISMLYLXXXXXXXXXKFKYEGMVVDRXGX

SEQ ID NO: 70926 - protein, 33 aa, Artificial Sequence; identical to SEQ ID NO: 29976
  GFR-binding peptide
  MOD_RES (1), (2), (33): Xaa is C or S

SEQ ID NO: 70927 - protein, 37 aa, Artificial Sequence; identical to SEQ ID NO: 29979
  GFR-binding peptide
  MOD_RES (1), (34), (36): Xaa is C or S
  MOD_RES (15), (16), (17), (18), (19): Xaa is A or G
  MOD_RES (20), (21), (22), (23): Xaa is A or G or is absent

SEQ ID NO: 70928 - protein, 31 aa, Artificial Sequence; identical to SEQ ID NO: 8641
  GFR-binding peptide

SEQ ID NO: 70929 - protein, 42 aa, Artificial Sequence; identical to SEQ ID NO: 8642
  GFR-binding peptide
  MOD_RES (5), (6), (40), (42): Xaa is C or S
  MOD_RES (20), (21), (22), (23), (24): Xaa is A or G
  MOD_RES (25), (26), (27), (28): Xaa is A or G or is absent

SEQ ID NO: 70930 - protein, 33 aa, Artificial Sequence; identical to SEQ ID NO: 8643
  GFR-binding peptide
  MOD_RES (1), (32): Xaa is C or S

SEQ ID NO: 70931 - protein, 33 aa, Artificial Sequence; identical to SEQ ID NO: 8645
  GFR-binding peptide
  MOD_RES (1), (2): Xaa is C or S

SEQ ID NO: 70932 - protein, 37 aa, Artificial Sequence; identical to SEQ ID NO: 29986
  GFR-binding peptide
  MOD_RES (3), (4): Xaa is C or S
  MOD_RES (18), (19), (20), (21), (22): Xaa is A or G
  MOD_RES (23), (24), (25), (26): Xaa is A or G or is absent

SEQ ID NO: 70933 - protein, 43 aa, Artificial Sequence; identical to SEQ ID NO: 29987
  GFR-binding peptide
  MOD_RES (6), (7), (42): Xaa is C or S
  MOD_RES (21), (22), (23), (24), (25): Xaa is A or G
  MOD_RES (26), (27), (28), (29): Xaa is A or G or is absent

SEQ ID NO: 70934 - protein, 40 aa, Artificial Sequence; identical to SEQ ID NO: 15943
  GFR-binding peptide
  MOD_RES (4), (5), (39): Xaa is C or S
  MOD_RES (19), (20), (21), (22), (23): Xaa is A or G
  MOD_RES (24), (25), (26), (27): Xaa is A or G or is absent

SEQ ID NO: 70935 - protein, 38 aa, Artificial Sequence; identical to SEQ ID NO: 33112
  GFR-binding peptide
  MOD_RES (3), (4), (38): Xaa is C or S
  MOD_RES (18), (19), (20), (21), (22): Xaa is A or G
  MOD_RES (23), (24), (25), (26): Xaa is A or G or is absent

SEQ ID NO: 70936 - protein, 37 aa, Artificial Sequence; identical to SEQ ID NO: 8647
  GFR-binding peptide
  MOD_RES (3), (4), (36): Xaa is C or S

SEQ ID NO: 70937 - protein, 36 aa, Artificial Sequence; identical to SEQ ID NO: 8648
  GFR-binding peptide
  MOD_RES (2), (3), (35): Xaa is C or S

SEQ ID NO: 70938 - protein, 41 aa, Artificial Sequence; identical to SEQ ID NO: 33114
  GFR-binding peptide
  MOD_RES (6), (7), (41): Xaa is C or S
  MOD_RES (21), (22), (23), (24), (25): Xaa is A or G
  MOD_RES (26), (27), (28), (29): Xaa is A or G or is absent

SEQ ID NO: 70939 - protein, 37 aa, Artificial Sequence; identical to SEQ ID NO: 33116
  GFR-binding peptide
  MOD_RES (1), (2), (36): Xaa is C or S
  MOD_RES (16), (17), (18), (19), (20): Xaa is A or G
  MOD_RES (21), (22), (23), (24): Xaa is A or G or is absent

SEQ ID NO: 70940 - protein, 41 aa, Artificial Sequence; identical to SEQ ID NO: 57997
  GFR-binding peptide
  MOD_RES (6), (7), (41): Xaa is C or S
  MOD_RES (21), (22), (23), (24), (25): Xaa is A or G
  MOD_RES (26), (27), (28), (29): Xaa is A or G or is absent

SEQ ID NO: 70941 - protein, 36 aa, Artificial Sequence; identical to SEQ ID NO: 8653
  GFR-binding peptide
  MOD_RES (3), (4): Xaa is C or S
  MOD_RES (18), (19), (20), (21), (22): Xaa is A or G
  MOD_RES (23), (24), (25), (26): Xaa is A or G or is absent

SEQ ID NO: 70942 - protein, 35 aa, Artificial Sequence; identical to SEQ ID NO: 15950
  GFR-binding peptide
  MOD_RES (1), (2), (34): Xaa is C or S

SEQ ID NO: 70943 - protein, 34 aa, Artificial Sequence
  GFR-binding peptide
  MOD_RES (32), (34): Xaa is C or S
VPEKMSATSILYYDENKNVVLRKHRNMTVESXAX

SEQ ID NO: 70944 - protein, 32 aa, Artificial Sequence; identical to SEQ ID NO: 8655
  GFR-binding peptide
  MOD_RES (14), (15), (16), (17), (18): Xaa is A or G
  MOD_RES (19), (20), (21), (22): Xaa is A or G or is absent

SEQ ID NO: 70945 - protein, 38 aa, Artificial Sequence; identical to SEQ ID NO: 8657
  GFR-binding peptide
  MOD_RES (6), (7), (38): Xaa is C or S

SEQ ID NO: 70946 - protein, 38 aa, Artificial Sequence; identical to SEQ ID NO: 33125
  GFR-binding peptide
  MOD_RES (3), (4), (36), (38): Xaa is C or S

SEQ ID NO: 70947 - protein, 31 aa, Artificial Sequence; identical to SEQ ID NO: 33129
  GFR-binding peptide

SEQ ID NO: 70948 - protein, 36 aa, Artificial Sequence; identical to SEQ ID NO: 8663
  GFR-binding peptide
  MOD_RES (1), (2), (33), (35): Xaa is C or S

SEQ ID NO: 70949 - protein, 37 aa, Artificial Sequence; identical to SEQ ID NO: 30003
  GFR-binding peptide
  MOD_RES (3), (4), (36): Xaa is C or S

SEQ ID NO: 70950 - protein, 36 aa, Artificial Sequence; identical to SEQ ID NO: 30005
  GFR-binding peptide
  MOD_RES (2), (3): Xaa is C or S
  MOD_RES (17), (18), (19), (20), (21): Xaa is A or G
  MOD_RES (22), (23), (24), (25): Xaa is A or G or is absent

SEQ ID NO: 70951 - protein, 43 aa, Artificial Sequence; identical to SEQ ID NO: 8670
  GFR-binding peptide
  MOD_RES (6), (7), (41), (43): Xaa is C or S
  MOD_RES (21), (22), (23), (24), (25): Xaa is A or G
  MOD_RES (26), (27), (28), (29): Xaa is A or G or is absent

SEQ ID NO: 70952 - protein, 35 aa, Artificial Sequence; identical to SEQ ID NO: 58007
  GFR-binding peptide
  MOD_RES (2), (3), (34): Xaa is C or S

SEQ ID NO: 70953 - protein, 38 aa, Artificial Sequence; identical to SEQ ID NO: 8673
  GFR-binding peptide
  MOD_RES (2), (3), (37): Xaa is C or S
  MOD_RES (17), (18), (19), (20), (21): Xaa is A or G
  MOD_RES (22), (23), (24), (25): Xaa is A or G or is absent

SEQ ID NO: 70954 - protein, 38 aa, Artificial Sequence; identical to SEQ ID NO: 8674
  GFR-binding peptide
  MOD_RES (3), (4), (35), (37): Xaa is C or S

SEQ ID NO: 70955 - protein, 37 aa, Artificial Sequence
  GFR-binding peptide
  MOD_RES (1), (2), (34), (36): Xaa is C or S
XXVPEKMSATSILYYDENKNVVLRKHRNMTVESXAXR

SEQ ID NO: 70956 - protein, 36 aa, Artificial Sequence; identical to SEQ ID NO: 33142
  GFR-binding peptide
  MOD_RES (4), (5): Xaa is C or S

SEQ ID NO: 70957 - protein, 39 aa, Artificial Sequence; identical to SEQ ID NO: 33146
  GFR-binding peptide
  MOD_RES (2), (3), (37), (39): Xaa is C or S
  MOD_RES (17), (18), (19), (20), (21): Xaa is A or G
  MOD_RES (22), (23), (24), (25): Xaa is A or G or is absent

SEQ ID NO: 70958 - protein, 38 aa, Artificial Sequence
  GFR-binding peptide
  MOD_RES (3), (4), (38): Xaa is C or S
  MOD_RES (18), (19), (20), (21), (22): Xaa is A or G
  MOD_RES (23), (24), (25), (26): Xaa is A or G or is absent
KAXXVPTKLSATSILYYXXXXXXXXXLRKHRGMAVSEX

SEQ ID NO: 70959 - protein, 36 aa, Artificial Sequence
  GFR-binding peptide
  MOD_RES (5), (6): Xaa is C or S
SAAPXXVPQALSPINILYFVGRKPKVYGKIPMIVRS

SEQ ID NO: 70960 - protein, 38 aa, Artificial Sequence
  GFR-binding peptide
  MOD_RES (2), (3), (36), (38): Xaa is C or S
  MOD_RES (17), (18), (19), (20), (21): Xaa is A or G
  MOD_RES (22), (23), (24), (25): Xaa is A or G or is absent
TXXAPVKTEPISMLYLXXXXXXXXXKFKYEMIVEEXGX

SEQ ID NO: 70961 - protein, 39 aa, Artificial Sequence; identical to SEQ ID NO: 8676
  GFR-binding peptide
  MOD_RES (3), (4), (38): Xaa is C or S
  MOD_RES (18), (19), (20), (21), (22): Xaa is A or G
  MOD_RES (23), (24), (25), (26): Xaa is A or G or is absent

SEQ ID NO: 70962 - protein, 38 aa, Artificial Sequence; identical to SEQ ID NO: 30015
  GFR-binding peptide
  MOD_RES (4), (5): Xaa is C or S
  MOD_RES (19), (20), (21), (22), (23): Xaa is A or G
  MOD_RES (24), (25), (26), (27): Xaa is A or G or is absent

SEQ ID NO: 70963 - protein, 36 aa, Artificial Sequence; identical to SEQ ID NO: 8677
  GFR-binding peptide
  MOD_RES (1), (2): Xaa is C or S
  MOD_RES (16), (17), (18), (19), (20): Xaa is A or G
  MOD_RES (21), (22), (23), (24): Xaa is A or G or is absent

SEQ ID NO: 70964 - protein, 35 aa, Artificial Sequence; identical to SEQ ID NO: 33154
  GFR-binding peptide
  MOD_RES (2), (3): Xaa is C or S
  MOD_RES (17), (18), (19), (20), (21): Xaa is A or G
  MOD_RES (22), (23), (24), (25): Xaa is A or G or is absent

SEQ ID NO: 70965 - protein, 37 aa, Artificial Sequence
  GFR-binding peptide
  MOD_RES (3), (4): Xaa is C or S
  MOD_RES (18), (19), (20), (21), (22): Xaa is A or G
  MOD_RES (23), (24), (25), (26): Xaa is A or G or is absent
EPXXVPEKMSATSILYYXXXXXXXXXLRKHRNMTVES

SEQ ID NO: 70966 - protein, 40 aa, Artificial Sequence; identical to SEQ ID NO: 33160
  GFR-binding peptide
  MOD_RES (6), (7): Xaa is C or S
  MOD_RES (21), (22), (23), (24), (25): Xaa is A or G
  MOD_RES (26), (27), (28), (29): Xaa is A or G or is absent

SEQ ID NO: 70967 - protein, 39 aa, Artificial Sequence; identical to SEQ ID NO: 15982
  GFR-binding peptide
  MOD_RES (3), (4), (38): Xaa is C or S
  MOD_RES (18), (19), (20), (21), (22): Xaa is A or G
  MOD_RES (23), (24), (25), (26): Xaa is A or G or is absent

SEQ ID NO: 70968 - protein, 42 aa, Artificial Sequence; identical to SEQ ID NO: 30019
  GFR-binding peptide
  MOD_RES (5), (6), (39), (41): Xaa is C or S
  MOD_RES (20), (21), (22), (23), (24): Xaa is A or G
  MOD_RES (25), (26), (27), (28): Xaa is A or G or is absent

SEQ ID NO: 70969 - protein, 39 aa, Artificial Sequence; identical to SEQ ID NO: 15985
  GFR-binding peptide
  MOD_RES (4), (5), (37), (39): Xaa is C or S

SEQ ID NO: 70970 - protein, 36 aa, Artificial Sequence; identical to SEQ ID NO: 8681
  GFR-binding peptide
  MOD_RES (3), (4): Xaa is C or S
  MOD_RES (18), (19), (20), (21), (22): Xaa is A or G
  MOD_RES (23), (24), (25), (26): Xaa is A or G or is absent

SEQ ID NO: 70971 - protein, 42 aa, Artificial Sequence; identical to SEQ ID NO: 8682
  GFR-binding peptide
  MOD_RES (6), (7), (40), (42): Xaa is C or S
  MOD_RES (21), (22), (23), (24), (25): Xaa is A or G
  MOD_RES (26), (27), (28), (29): Xaa is A or G or is absent

SEQ ID NO: 70972 - protein, 38 aa, Artificial Sequence
  GFR-binding peptide
  MOD_RES (2), (3), (36), (38): Xaa is C or S
  MOD_RES (17), (18), (19), (20), (21): Xaa is A or G
  MOD_RES (22), (23), (24), (25): Xaa is A or G or is absent
PXXVPQDLSPINILYFXXXXXXXXXYGKIPMVVKSXKX

SEQ ID NO: 70973 - protein, 43 aa, Artificial Sequence
  GFR-binding peptide
  MOD_RES (5), (6), (40), (42): Xaa is C or S
  MOD_RES (20), (21), (22), (23), (24): Xaa is A or G
  MOD_RES (25), (26), (27), (28): Xaa is A or G or is absent
SAGPXXTPTKMSATSMLYYXXXXXXXXXLRKHRGMVVDRXGXS

SEQ ID NO: 70974 - protein, 43 aa, Artificial Sequence; identical to SEQ ID NO: 8683
  GFR-binding peptide
  MOD_RES (6), (7), (41), (43): Xaa is C or S
  MOD_RES (21), (22), (23), (24), (25): Xaa is A or G
  MOD_RES (26), (27), (28), (29): Xaa is A or G or is absent

SEQ ID NO: 70975 - protein, 39 aa, Artificial Sequence; identical to SEQ ID NO: 33171
  GFR-binding peptide
  MOD_RES (5), (6), (38): Xaa is C or S

SEQ ID NO: 70976 - protein, 36 aa, Artificial Sequence
  GFR-binding peptide
  MOD_RES (33), (35): Xaa is C or S
  MOD_RES (14), (15), (16), (17), (18): Xaa is A or G
  MOD_RES (19), (20), (21), (22): Xaa is A or G or is absent
APVKTSPISMLYKXXXXXXXXXLKYHYMIVEEXGXL

SEQ ID NO: 70977 - protein, 35 aa, Artificial Sequence; identical to SEQ ID NO: 8688
  GFR-binding peptide
  MOD_RES (1), (2), (34): Xaa is C or S

SEQ ID NO: 70978 - protein, 34 aa, Artificial Sequence; identical to SEQ ID NO: 30029
  GFR-binding peptide
  MOD_RES (1), (1): Xaa is C or S
  MOD_RES (15), (16), (17), (18), (19): Xaa is A or G
  MOD_RES (20), (21), (22), (23): Xaa is A or G or is absent

SEQ ID NO: 70979 - protein, 39 aa, Artificial Sequence; identical to SEQ ID NO: 8689
  GFR-binding peptide
  MOD_RES (3), (4), (36), (38): Xaa is C or S

SEQ ID NO: 70980 - protein, 37 aa, Artificial Sequence; identical to SEQ ID NO: 33175
  GFR-binding peptide
  MOD_RES (35), (37): Xaa is C or S
  MOD_RES (14), (15), (16), (17), (18): Xaa is A or G
  MOD_RES (19), (20), (21), (22): Xaa is A or G or is absent

SEQ ID NO: 70981 - protein, 44 aa, Artificial Sequence
  GFR-binding peptide
  MOD_RES (6), (7), (41), (43): Xaa is C or S
  MOD_RES (21), (22), (23), (24), (25): Xaa is A or G
  MOD_RES (26), (27), (28), (29): Xaa is A or G or is absent
GIPEPXXVPEKMNAISILYFXXXXXXXXXLKKYRNMTVESXAXR

SEQ ID NO: 70982 - protein, 33 aa, Artificial Sequence; identical to SEQ ID NO: 33181
  GFR-binding peptide
  MOD_RES (1), (2): Xaa is C or S

SEQ ID NO: 70983 - protein, 40 aa, Artificial Sequence
  GFR-binding peptide
  MOD_RES (6), (7): Xaa is C or S
  MOD_RES (21), (22), (23), (24), (25): Xaa is A or G
  MOD_RES (26), (27), (28), (29): Xaa is A or G or is absent
HVPKPXXAPTKLEPISVLYLXXXXXXXXXKFKYENMVVRS

SEQ ID NO: 70984 - protein, 39 aa, Artificial Sequence; identical to SEQ ID NO: 33186
  GFR-binding peptide
  MOD_RES (2), (3), (36), (38): Xaa is C or S
  MOD_RES (17), (18), (19), (20), (21): Xaa is A or G
  MOD_RES (22), (23), (24), (25): Xaa is A or G or is absent

SEQ ID NO: 70985 - protein, 36 aa, Artificial Sequence; identical to SEQ ID NO: 30035
  GFR-binding peptide
  MOD_RES (3), (35): Xaa is C or S

SEQ ID NO: 70986 - protein, 38 aa, Artificial Sequence; identical to SEQ ID NO: 33190
  GFR-binding peptide
  MOD_RES (5), (6): Xaa is C or S
  MOD_RES (20), (21), (22), (23), (24): Xaa is A or G
  MOD_RES (25), (26), (27), (28): Xaa is A or G or is absent

SEQ ID NO: 70987 - protein, 40 aa, Artificial Sequence; identical to SEQ ID NO: 33193
  GFR-binding peptide
  MOD_RES (4), (5), (39): Xaa is C or S
  MOD_RES (19), (20), (21), (22), (23): Xaa is A or G
  MOD_RES (24), (25), (26), (27): Xaa is A or G or is absent

SEQ ID NO: 70988 - protein, 37 aa, Artificial Sequence; identical to SEQ ID NO: 8698
  GFR-binding peptide
  MOD_RES (5), (6), (37): Xaa is C or S

SEQ ID NO: 70989 - protein, 39 aa, Artificial Sequence; identical to SEQ ID NO: 30038
  GFR-binding peptide
  MOD_RES (7), (39): Xaa is C or S

SEQ ID NO: 70990 - protein, 34 aa, Artificial Sequence
  GFR-binding peptide
  MOD_RES (2), (3): Xaa is C or S
TXXVPTRLSPISILYKDSANNVVLKYHYDMVVES

SEQ ID NO: 70991 - protein, 37 aa, Artificial Sequence; identical to SEQ ID NO: 30041
  GFR-binding peptide
  MOD_RES (1), (2), (36): Xaa is C or S
  MOD_RES (16), (17), (18), (19), (20): Xaa is A or G
  MOD_RES (21), (22), (23), (24): Xaa is A or G or is absent

SEQ ID NO: 70992 - protein, 35 aa, Artificial Sequence; identical to SEQ ID NO: 33197
  GFR-binding peptide
  MOD_RES (2), (3): Xaa is C or S
  MOD_RES (17), (18), (19), (20), (21): Xaa is A or G
  MOD_RES (22), (23), (24), (25): Xaa is A or G or is absent

SEQ ID NO: 70993 - protein, 43 aa, Artificial Sequence; identical to SEQ ID NO: 30042
  GFR-binding peptide
  MOD_RES (5), (6), (40), (42): Xaa is C or S
  MOD_RES (20), (21), (22), (23), (24): Xaa is A or G
  MOD_RES (25), (26), (27), (28): Xaa is A or G or is absent

SEQ ID NO: 70994 - protein, 37 aa, Artificial Sequence; identical to SEQ ID NO: 30043
  GFR-binding peptide
  MOD_RES (1), (2), (36): Xaa is C or S
  MOD_RES (16), (17), (18), (19), (20): Xaa is A or G
  MOD_RES (21), (22), (23), (24): Xaa is A or G or is absent

SEQ ID NO: 70995 - protein, 35 aa, Artificial Sequence
  GFR-binding peptide
  MOD_RES (33), (35): Xaa is C or S
  MOD_RES (14), (15), (16), (17), (18): Xaa is A or G
  MOD_RES (19), (20), (21), (22): Xaa is A or G or is absent
VPQDLSPINILYFXXXXXXXXXYGKIPMVVKSXKX

SEQ ID NO: 70996 - protein, 40 aa, Artificial Sequence; identical to SEQ ID NO: 8707
  GFR-binding peptide
  MOD_RES (4), (5), (39): Xaa is C or S
  MOD_RES (19), (20), (21), (22), (23): Xaa is A or G
  MOD_RES (24), (25), (26), (27): Xaa is A or G or is absent

SEQ ID NO: 70997 - protein, 42 aa, Artificial Sequence; identical to SEQ ID NO: 8708
  GFR-binding peptide
  MOD_RES (4), (5), (39), (41): Xaa is C or S
  MOD_RES (19), (20), (21), (22), (23): Xaa is A or G
  MOD_RES (24), (25), (26), (27): Xaa is A or G or is absent

SEQ ID NO: 70998 - protein, 34 aa, Artificial Sequence; identical to SEQ ID NO: 33203
  GFR-binding peptide
  MOD_RES (3), (4): Xaa is C or S

SEQ ID NO: 70999 - protein, 40 aa, Artificial Sequence
  GFR-binding peptide
  MOD_RES (4), (5), (39): Xaa is C or S
  MOD_RES (19), (20), (21), (22), (23): Xaa is A or G
  MOD_RES (24), (25), (26), (27): Xaa is A or G or is absent
PEPXXVPEKMSATSILYYXXXXXXXXXLRKHRNMTVESXA

SEQ ID NO: 71000 - protein, 34 aa, Artificial Sequence; identical to SEQ ID NO: 8710
  GFR-binding peptide
  MOD_RES (2), (34): Xaa is C or S

SEQ ID NO: 71001 - protein, 38 aa, Artificial Sequence; identical to SEQ ID NO: 33206
  GFR-binding peptide
  MOD_RES (1), (35), (37): Xaa is C or S
  MOD_RES (15), (16), (17), (18), (19): Xaa is A or G
  MOD_RES (20), (21), (22), (23): Xaa is A or G or is absent

SEQ ID NO: 71002 - protein, 36 aa, Artificial Sequence; identical to SEQ ID NO: 8711
  GFR-binding peptide
  MOD_RES (1), (2), (35): Xaa is C or S
  MOD_RES (16), (17), (18), (19), (20): Xaa is A or G
  MOD_RES (21), (22), (23), (24): Xaa is A or G or is absent

SEQ ID NO: 71003 - protein, 32 aa, Artificial Sequence; identical to SEQ ID NO: 30050
  GFR-binding peptide
  MOD_RES (1), (1): Xaa is C or S

SEQ ID NO: 71004 - protein, 33 aa, Artificial Sequence; identical to SEQ ID NO: 8712
  GFR-binding peptide
  MOD_RES (2), (2): Xaa is C or S

SEQ ID NO: 71005 - protein, 33 aa, Artificial Sequence
  GFR-binding peptide
  MOD_RES (1), (1): Xaa is C or S
  MOD_RES (15), (16), (17), (18), (19): Xaa is A or G
  MOD_RES (20), (21), (22), (23): Xaa is A or G or is absent
XVPQALSPINILYFXXXXXXXXXYGKIPMIVRS

SEQ ID NO: 71006 - protein, 31 aa, Artificial Sequence
  GFR-binding peptide
VPTRLSATSILYYDSANNVVLRKHRDMVVES

SEQ ID NO: 71007 - protein, 39 aa, Artificial Sequence
  GFR-binding peptide
  MOD_RES (4), (5), (39): Xaa is C or S
  MOD_RES (19), (20), (21), (22), (23): Xaa is A or G
  MOD_RES (24), (25), (26), (27): Xaa is A or G or is absent
PEPXXVPEKMNAISILYFXXXXXXXXXLKKYRNMTVESX

SEQ ID NO: 71008 - protein, 36 aa, Artificial Sequence; identical to SEQ ID NO: 8717
  GFR-binding peptide
  MOD_RES (5), (5): Xaa is C or S

SEQ ID NO: 71009 - protein, 34 aa, Artificial Sequence; identical to SEQ ID NO: 8718
  GFR-binding peptide
  MOD_RES (1), (34): Xaa is C or S
  MOD_RES (15), (16), (17), (18), (19): Xaa is A or G
  MOD_RES (20), (21), (22), (23): Xaa is A or G or is absent

SEQ ID NO: 71010 - protein, 35 aa, Artificial Sequence; identical to SEQ ID NO: 8722
  GFR-binding peptide
  MOD_RES (1), (33), (35): Xaa is C or S

SEQ ID NO: 71011 - protein, 36 aa, Artificial Sequence; identical to SEQ ID NO: 30062
  GFR-binding peptide
  MOD_RES (1), (33), (35): Xaa is C or S

SEQ ID NO: 71012 - protein, 34 aa, Artificial Sequence; identical to SEQ ID NO: 33219
  GFR-binding peptide
  MOD_RES (1), (2): Xaa is C or S
  MOD_RES (16), (17), (18), (19), (20): Xaa is A or G
  MOD_RES (21), (22), (23), (24): Xaa is A or G or is absent

SEQ ID NO: 71013 - protein, 39 aa, Artificial Sequence; identical to SEQ ID NO: 33220
  GFR-binding peptide
  MOD_RES (6), (7): Xaa is C or S
  MOD_RES (21), (22), (23), (24), (25): Xaa is A or G
  MOD_RES (26), (27), (28), (29): Xaa is A or G or is absent

SEQ ID NO: 71014 - protein, 39 aa, Artificial Sequence; identical to SEQ ID NO: 8727
  GFR-binding peptide
  MOD_RES (2), (3), (37), (39): Xaa is C or S
  MOD_RES (17), (18), (19), (20), (21): Xaa is A or G
  MOD_RES (22), (23), (24), (25): Xaa is A or G or is absent

SEQ ID NO: 71015 - protein, 41 aa, Artificial Sequence; identical to SEQ ID NO: 33223
  GFR-binding peptide
  MOD_RES (5), (6), (38), (40): Xaa is C or S

SEQ ID NO: 71016 - protein, 39 aa, Artificial Sequence; identical to SEQ ID NO: 30068
  GFR-binding peptide
  MOD_RES (4), (5), (37), (39): Xaa is C or S

SEQ ID NO: 71017 - protein, 42 aa, Artificial Sequence; identical to SEQ ID NO: 30070
  GFR-binding peptide
  MOD_RES (5), (6), (40), (42): Xaa is C or S
  MOD_RES (20), (21), (22), (23), (24): Xaa is A or G
  MOD_RES (25), (26), (27), (28): Xaa is A or G or is absent

SEQ ID NO: 71018 - protein, 39 aa, Artificial Sequence; identical to SEQ ID NO: 8731
  GFR-binding peptide
  MOD_RES (5), (6): Xaa is C or S
  MOD_RES (20), (21), (22), (23), (24): Xaa is A or G
  MOD_RES (25), (26), (27), (28): Xaa is A or G or is absent

SEQ ID NO: 71019 - protein, 34 aa, Artificial Sequence; identical to SEQ ID NO: 30075
  GFR-binding peptide
  MOD_RES (3), (4): Xaa is C or S

SEQ ID NO: 71020 - protein, 42 aa, Artificial Sequence; identical to SEQ ID NO: 8733
  GFR-binding peptide
  MOD_RES (6), (7), (39), (41): Xaa is C or S

SEQ ID NO: 71021 - protein, 41 aa, Artificial Sequence; identical to SEQ ID NO: 8735
  GFR-binding peptide
  MOD_RES (4), (5), (38), (40): Xaa is C or S
  MOD_RES (19), (20), (21), (22), (23): Xaa is A or G
  MOD_RES (24), (25), (26), (27): Xaa is A or G or is absent

SEQ ID NO: 71022 - protein, 35 aa, Artificial Sequence; identical to SEQ ID NO: 30082
  GFR-binding peptide
  MOD_RES (2), (2): Xaa is C or S
  MOD_RES (16), (17), (18), (19), (20): Xaa is A or G
  MOD_RES (21), (22), (23), (24): Xaa is A or G or is absent

SEQ ID NO: 71023 - protein, 33 aa, Artificial Sequence; identical to SEQ ID NO: 33231
  GFR-binding peptide
  MOD_RES (32), (32): Xaa is C or S

SEQ ID NO: 71024 - protein, 39 aa, Artificial Sequence; identical to SEQ ID NO: 8742
  GFR-binding peptide
  MOD_RES (3), (4), (38): Xaa is C or S
  MOD_RES (18), (19), (20), (21), (22): Xaa is A or G
  MOD_RES (23), (24), (25), (26): Xaa is A or G or is absent

SEQ ID NO: 71025 - protein, 36 aa, Artificial Sequence
  GFR-binding peptide
  MOD_RES (1), (35): Xaa is C or S
  MOD_RES (15), (16), (17), (18), (19): Xaa is A or G
  MOD_RES (20), (21), (22), (23): Xaa is A or G or is absent
XTPTKMEPISMLYLXXXXXXXXXKFKYEGMVVDRXG

SEQ ID NO: 71026 - protein, 40 aa, Artificial Sequence; identical to SEQ ID NO: 16037
  GFR-binding peptide
  MOD_RES (4), (5), (37), (39): Xaa is C or S

SEQ ID NO: 71027 - protein, 43 aa, Artificial Sequence
  GFR-binding peptide
  MOD_RES (6), (7), (40), (42): Xaa is C or S
  MOD_RES (21), (22), (23), (24), (25): Xaa is A or G
  MOD_RES (26), (27), (28), (29): Xaa is A or G or is absent
RVPSTXXAPVKTEPISMLYLXXXXXXXXXKFKYEMIVEEXGXL

SEQ ID NO: 71028 - protein, 36 aa, Artificial Sequence; identical to SEQ ID NO: 8744
  GFR-binding peptide
  MOD_RES (5), (6): Xaa is C or S

SEQ ID NO: 71029 - protein, 40 aa, Artificial Sequence; identical to SEQ ID NO: 8745
  GFR-binding peptide
  MOD_RES (6), (7), (40): Xaa is C or S

SEQ ID NO: 71030 - protein, 43 aa, Artificial Sequence; identical to SEQ ID NO: 30092
  GFR-binding peptide
  MOD_RES (6), (7), (41), (43): Xaa is C or S
  MOD_RES (21), (22), (23), (24), (25): Xaa is A or G
  MOD_RES (26), (27), (28), (29): Xaa is A or G or is absent

SEQ ID NO: 71031 - protein, 41 aa, Artificial Sequence; identical to SEQ ID NO: 8747
  GFR-binding peptide
  MOD_RES (6), (40): Xaa is C or S
  MOD_RES (20), (21), (22), (23), (24): Xaa is A or G
  MOD_RES (25), (26), (27), (28): Xaa is A or G or is absent

SEQ ID NO: 71032 - protein, 37 aa, Artificial Sequence; identical to SEQ ID NO: 8748
  GFR-binding peptide
  MOD_RES (1), (36): Xaa is C or S
  MOD_RES (15), (16), (17), (18), (19): Xaa is A or G
  MOD_RES (20), (21), (22), (23): Xaa is A or G or is absent

SEQ ID NO: 71033 - protein, 35 aa, Artificial Sequence; identical to SEQ ID NO: 30093
  GFR-binding peptide
  MOD_RES (3), (35): Xaa is C or S

SEQ ID NO: 71034 - protein, 32 aa, Artificial Sequence
  GFR-binding peptide
  MOD_RES (14), (15), (16), (17), (18): Xaa is A or G
  MOD_RES (19), (20), (21), (22): Xaa is A or G or is absent
VPEKMSPINILYFXXXXXXXXXYGKIPNMTVE

SEQ ID NO: 71035 - protein, 39 aa, Artificial Sequence
  GFR-binding peptide
  MOD_RES (6), (7), (38): Xaa is C or S
RVPSTXXAPVKTEPISMLYLDNGRVLLKFKYEMIVEEXG

SEQ ID NO: 71036 - protein, 38 aa, Artificial Sequence
  GFR-binding peptide
  MOD_RES (5), (6), (38): Xaa is C or S
IPEPXXVPEKMSATSILYYDENKNVVLRKHRNMTVESX

SEQ ID NO: 71037 - protein, 36 aa, Artificial Sequence; identical to SEQ ID NO: 58090
  GFR-binding peptide
  MOD_RES (1), (33), (35): Xaa is C or S

SEQ ID NO: 71038 - protein, 34 aa, Artificial Sequence; identical to SEQ ID NO: 16051
  GFR-binding peptide
  MOD_RES (1), (2), (34): Xaa is C or S

SEQ ID NO: 71039 - protein, 38 aa, Artificial Sequence
  GFR-binding peptide
  MOD_RES (2), (3), (35), (37): Xaa is C or S
PXXVPEKMEPISILYLDENKNVVKFKYENMTVESXAXR

SEQ ID NO: 71040 - protein, 38 aa, Artificial Sequence
  GFR-binding peptide
  MOD_RES (1), (2), (35), (37): Xaa is C or S
  MOD_RES (16), (17), (18), (19), (20): Xaa is A or G
  MOD_RES (21), (22), (23), (24): Xaa is A or G or is absent
XXAPVKTSPISMLYKXXXXXXXXXLKYHYMIVEEXGXL

SEQ ID NO: 71041 - protein, 31 aa, Artificial Sequence; identical to SEQ ID NO: 8756
  GFR-binding peptide
  MOD_RES (1), (1): Xaa is C or S

SEQ ID NO: 71042 - protein, 34 aa, Artificial Sequence; identical to SEQ ID NO: 30108
  GFR-binding peptide
  MOD_RES (1), (2): Xaa is C or S
  MOD_RES (16), (17), (18), (19), (20): Xaa is A or G
  MOD_RES (21), (22), (23), (24): Xaa is A or G or is absent

SEQ ID NO: 71043 - protein, 38 aa, Artificial Sequence; identical to SEQ ID NO: 30115
  GFR-binding peptide
  MOD_RES (4), (5), (38): Xaa is C or S

SEQ ID NO: 71044 - protein, 32 aa, Artificial Sequence
  GFR-binding peptide
  MOD_RES (14), (15), (16), (17), (18): Xaa is A or G
  MOD_RES (19), (20), (21), (22): Xaa is A or G or is absent
VPEKMEPISILYLXXXXXXXXXKFKYENMTVE

SEQ ID NO: 71045 - protein, 38 aa, Artificial Sequence; identical to SEQ ID NO: 8763
  GFR-binding peptide
  MOD_RES (6), (7): Xaa is C or S

SEQ ID NO: 71046 - protein, 37 aa, Artificial Sequence; identical to SEQ ID NO: 8765
  GFR-binding peptide
  MOD_RES (6), (7): Xaa is C or S

SEQ ID NO: 71047 - protein, 38 aa, Artificial Sequence; identical to SEQ ID NO: 8766
  GFR-binding peptide
  MOD_RES (3), (37): Xaa is C or S
  MOD_RES (17), (18), (19), (20), (21): Xaa is A or G
  MOD_RES (22), (23), (24), (25): Xaa is A or G or is absent

SEQ ID NO: 71048 - protein, 41 aa, Artificial Sequence; identical to SEQ ID NO: 8769
  GFR-binding peptide
  MOD_RES (6), (7), (41): Xaa is C or S
  MOD_RES (21), (22), (23), (24), (25): Xaa is A or G
  MOD_RES (26), (27), (28), (29): Xaa is A or G or is absent

SEQ ID NO: 71049 - protein, 37 aa, Artificial Sequence
  GFR-binding peptide
  MOD_RES (3), (4): Xaa is C or S
  MOD_RES (18), (19), (20), (21), (22): Xaa is A or G
  MOD_RES (23), (24), (25), (26): Xaa is A or G or is absent
ASXXVPARLSATSILYYXXXXXXXXXLRKHRDMVVEA

SEQ ID NO: 71050 - protein, 38 aa, Artificial Sequence; identical to SEQ ID NO: 8775
  GFR-binding peptide
  MOD_RES (5), (6): Xaa is C or S
  MOD_RES (20), (21), (22), (23), (24): Xaa is A or G
  MOD_RES (25), (26), (27), (28): Xaa is A or G or is absent

SEQ ID NO: 71051 - protein, 40 aa, Artificial Sequence; identical to SEQ ID NO: 8777
  GFR-binding peptide
  MOD_RES (5), (6), (39): Xaa is C or S
  MOD_RES (20), (21), (22), (23), (24): Xaa is A or G
  MOD_RES (25), (26), (27), (28): Xaa is A or G or is absent

SEQ ID NO: 71052 - protein, 33 aa, Artificial Sequence
  GFR-binding peptide
  MOD_RES (1), (1): Xaa is C or S
  MOD_RES (15), (16), (17), (18), (19): Xaa is A or G
  MOD_RES (20), (21), (22), (23): Xaa is A or G or is absent
XVPQDLSPINILYFXXXXXXXXXYGKIPMVVKS

SEQ ID NO: 71053 - protein, 36 aa, Artificial Sequence; identical to SEQ ID NO: 8778
  GFR-binding peptide
  MOD_RES (4), (5), (36): Xaa is C or S

SEQ ID NO: 71054 - protein, 38 aa, Artificial Sequence
  GFR-binding peptide
  MOD_RES (4), (5), (37): Xaa is C or S
PPTXXVPTRLEPISILYLDSANNVVKFKYEDMVVESXG

SEQ ID NO: 71055 - protein, 32 aa, Artificial Sequence; identical to SEQ ID NO: 33263
  GFR-binding peptide
  MOD_RES (1), (2): Xaa is C or S

SEQ ID NO: 71056 - protein, 35 aa, Artificial Sequence; identical to SEQ ID NO: 58107
  GFR-binding peptide
  MOD_RES (1), (33), (35): Xaa is C or S

SEQ ID NO: 71057 - protein, 31 aa, Artificial Sequence; identical to SEQ ID NO: 8779
  GFR-binding peptide

SEQ ID NO: 71058 - protein, 35 aa, Artificial Sequence
  GFR-binding peptide
  MOD_RES (1), (2), (34): Xaa is C or S
XXVPEKMEPISILYLDENKNVVKFKYENMTVESXA

SEQ ID NO: 71059 - protein, 40 aa, Artificial Sequence; identical to SEQ ID NO: 58114
  GFR-binding peptide
  MOD_RES (6), (7), (38), (40): Xaa is C or S

SEQ ID NO: 71060 - protein, 38 aa, Artificial Sequence; identical to SEQ ID NO: 8782
  GFR-binding peptide
  MOD_RES (3), (4), (38): Xaa is C or S
  MOD_RES (18), (19), (20), (21), (22): Xaa is A or G
  MOD_RES (23), (24), (25), (26): Xaa is A or G or is absent

SEQ ID NO: 71061 - protein, 32 aa, Artificial Sequence
  GFR-binding peptide
  MOD_RES (1), (1): Xaa is C or S
XTPTKMEPISMLYLNDKQQIIKFKYEGMVVDR

SEQ ID NO: 71062 - protein, 38 aa, Artificial Sequence; identical to SEQ ID NO: 8783
  GFR-binding peptide
  MOD_RES (5), (6): Xaa is C or S
  MOD_RES (20), (21), (22), (23), (24): Xaa is A or G
  MOD_RES (25), (26), (27), (28): Xaa is A or G or is absent

SEQ ID NO: 71063 - protein, 32 aa, Artificial Sequence
  GFR-binding peptide
  MOD_RES (14), (15), (16), (17), (18): Xaa is A or G
  MOD_RES (19), (20), (21), (22): Xaa is A or G or is absent
VSQDLSPINILYFXXXXXXXXXYGKIPMIVKS

SEQ ID NO: 71064 - protein, 39 aa, Artificial Sequence; identical to SEQ ID NO: 30138
  GFR-binding peptide
  MOD_RES (4), (5), (37), (39): Xaa is C or S

SEQ ID NO: 71065 - protein, 35 aa, Artificial Sequence; identical to SEQ ID NO: 8786
  GFR-binding peptide
  MOD_RES (3), (4), (35): Xaa is C or S

SEQ ID NO: 71066 - protein, 38 aa, Artificial Sequence
  GFR-binding peptide
  MOD_RES (4), (5): Xaa is C or S
  MOD_RES (19), (20), (21), (22), (23): Xaa is A or G
  MOD_RES (24), (25), (26), (27): Xaa is A or G or is absent
AGPXXTPTKMEPISMLYLXXXXXXXXXKFKYEGMVVDR

SEQ ID NO: 71067 - protein, 36 aa, Artificial Sequence; identical to SEQ ID NO: 30139
  GFR-binding peptide
  MOD_RES (2), (3), (35): Xaa is C or S

SEQ ID NO: 71068 - protein, 41 aa, Artificial Sequence; identical to SEQ ID NO: 8787
  GFR-binding peptide
  MOD_RES (7), (41): Xaa is C or S
  MOD_RES (21), (22), (23), (24), (25): Xaa is A or G
  MOD_RES (26), (27), (28), (29): Xaa is A or G or is absent

SEQ ID NO: 71069 - protein, 35 aa, Artificial Sequence; identical to SEQ ID NO: 8792
  GFR-binding peptide
  MOD_RES (33), (35): Xaa is C or S

SEQ ID NO: 71070 - protein, 31 aa, Artificial Sequence; identical to SEQ ID NO: 30144
  GFR-binding peptide
  MOD_RES (1), (1): Xaa is C or S

SEQ ID NO: 71071 - protein, 38 aa, Artificial Sequence; identical to SEQ ID NO: 30145
  GFR-binding peptide
  MOD_RES (2), (3), (37): Xaa is C or S
  MOD_RES (17), (18), (19), (20), (21): Xaa is A or G
  MOD_RES (22), (23), (24), (25): Xaa is A or G or is absent

SEQ ID NO: 71072 - protein, 41 aa, Artificial Sequence; identical to SEQ ID NO: 8798
  GFR-binding peptide
  MOD_RES (5), (6), (38), (40): Xaa is C or S

SEQ ID NO: 71073 - protein, 36 aa, Artificial Sequence; identical to SEQ ID NO: 8800
  GFR-binding peptide
  MOD_RES (3), (4): Xaa is C or S
  MOD_RES (18), (19), (20), (21), (22): Xaa is A or G
  MOD_RES (23), (24), (25), (26): Xaa is A or G or is absent

SEQ ID NO: 71074 - protein, 39 aa, Artificial Sequence; identical to SEQ ID NO: 30153
  GFR-binding peptide
  MOD_RES (3), (4), (36), (38): Xaa is C or S

SEQ ID NO: 71075 - protein, 37 aa, Artificial Sequence; identical to SEQ ID NO: 8803
  GFR-binding peptide
  MOD_RES (3), (4), (36): Xaa is C or S

SEQ ID NO: 71076 - protein, 34 aa, Artificial Sequence
  GFR-binding peptide
  MOD_RES (2), (3), (34): Xaa is C or S
PXXVSQDLSPINILYFIGKTPKIYGKIPMIVKSX

SEQ ID NO: 71077 - protein, 34 aa, Artificial Sequence; identical to SEQ ID NO: 8805
  GFR-binding peptide
  MOD_RES (1), (2): Xaa is C or S

SEQ ID NO: 71078 - protein, 36 aa, Artificial Sequence; identical to SEQ ID NO: 30155
  GFR-binding peptide
  MOD_RES (1), (2), (36): Xaa is C or S
  MOD_RES (16), (17), (18), (19), (20): Xaa is A or G
  MOD_RES (21), (22), (23), (24): Xaa is A or G or is absent

SEQ ID NO: 71079 - protein, 38 aa, Artificial Sequence
  GFR-binding peptide
  MOD_RES (6), (7): Xaa is C or S
GIPEPXXVPEKMSPISILYKDENKNVVLKYHYNMTVES

SEQ ID NO: 71080 - protein, 33 aa, Artificial Sequence
  GFR-binding peptide
  MOD_RES (1), (33): Xaa is C or S
XVPEKMSPISILYKDENKNVVLKYHYNMTVESX

SEQ ID NO: 71081 - protein, 42 aa, Artificial Sequence; identical to SEQ ID NO: 8809
  GFR-binding peptide
  MOD_RES (5), (6), (39), (41): Xaa is C or S
  MOD_RES (20), (21), (22), (23), (24): Xaa is A or G
  MOD_RES (25), (26), (27), (28): Xaa is A or G or is absent

SEQ ID NO: 71082 - protein, 40 aa, Artificial Sequence; identical to SEQ ID NO: 8811
  GFR-binding peptide
  MOD_RES (6), (7): Xaa is C or S
  MOD_RES (21), (22), (23), (24), (25): Xaa is A or G
  MOD_RES (26), (27), (28), (29): Xaa is A or G or is absent

SEQ ID NO: 71083 - protein, 33 aa, Artificial Sequence; identical to SEQ ID NO: 8812
  GFR-binding peptide
  MOD_RES (33), (33): Xaa is C or S
  MOD_RES (14), (15), (16), (17), (18): Xaa is A or G
  MOD_RES (19), (20), (21), (22): Xaa is A or G or is absent

SEQ ID NO: 71084 - protein, 38 aa, Artificial Sequence
  GFR-binding peptide
  MOD_RES (3), (4), (37): Xaa is C or S
  MOD_RES (18), (19), (20), (21), (22): Xaa is A or G
  MOD_RES (23), (24), (25), (26): Xaa is A or G or is absent
STXXAPVKTEPISMLYLXXXXXXXXXKFKYEMIVEEXG

SEQ ID NO: 71085 - protein, 40 aa, Artificial Sequence
  GFR-binding peptide
  MOD_RES (6), (7), (39): Xaa is C or S
KASKAXXVPTKLSATSILYYDKGVVTYLRKHRGMAVSEXG

SEQ ID NO: 71086 - protein, 36 aa, Artificial Sequence
  GFR-binding peptide
  MOD_RES (4), (5): Xaa is C or S
PEPXXVPEKMNAISILYFDENKNVVLKKYRNMTVES

SEQ ID NO: 71087 - protein, 31 aa, Artificial Sequence
  GFR-binding peptide
VPEKMSATSILYYDENKNVVLRKHRNMTVES

SEQ ID NO: 71088 - protein, 33 aa, Artificial Sequence; identical to SEQ ID NO: 33306
  GFR-binding peptide
  MOD_RES (1), (2): Xaa is C or S

SEQ ID NO: 71089 - protein, 41 aa, Artificial Sequence; identical to SEQ ID NO: 30177
  GFR-binding peptide
  MOD_RES (3), (4), (38), (40): Xaa is C or S
  MOD_RES (18), (19), (20), (21), (22): Xaa is A or G
  MOD_RES (23), (24), (25), (26): Xaa is A or G or is absent

SEQ ID NO: 71090 - protein, 33 aa, Artificial Sequence; identical to SEQ ID NO: 30178
  GFR-binding peptide
  MOD_RES (14), (15), (16), (17), (18): Xaa is A or G
  MOD_RES (19), (20), (21), (22): Xaa is A or G or is absent

SEQ ID NO: 71091 - protein, 36 aa, Artificial Sequence; identical to SEQ ID NO: 30182
  GFR-binding peptide
  MOD_RES (1), (33), (35): Xaa is C or S

SEQ ID NO: 71092 - protein, 36 aa, Artificial Sequence; identical to SEQ ID NO: 8824
  GFR-binding peptide
  MOD_RES (1), (2), (33), (35): Xaa is C or S

SEQ ID NO: 71093 - protein, 39 aa, Artificial Sequence
  GFR-binding peptide
  MOD_RES (6), (7), (39): Xaa is C or S
HVPKPXXAPTKLSATSVLYYDDSSNVILRKHRNMVVRSX

SEQ ID NO: 71094 - protein, 44 aa, Artificial Sequence; identical to SEQ ID NO: 30187
  GFR-binding peptide
  MOD_RES (6), (7), (41), (43): Xaa is C or S
  MOD_RES (21), (22), (23), (24), (25): Xaa is A or G
  MOD_RES (26), (27), (28), (29): Xaa is A or G or is absent

SEQ ID NO: 71095 - protein, 36 aa, Artificial Sequence; identical to SEQ ID NO: 8830
  GFR-binding peptide
  MOD_RES (2), (3), (35): Xaa is C or S

SEQ ID NO: 71096 - protein, 36 aa, Artificial Sequence; identical to SEQ ID NO: 8831
  GFR-binding peptide
  MOD_RES (3), (4), (36): Xaa is C or S

SEQ ID NO: 71097 - protein, 35 aa, Artificial Sequence; identical to SEQ ID NO: 33321
  GFR-binding peptide
  MOD_RES (3), (35): Xaa is C or S

SEQ ID NO: 71098 - protein, 35 aa, Artificial Sequence; identical to SEQ ID NO: 8833
  GFR-binding peptide
  MOD_RES (1), (33), (35): Xaa is C or S

SEQ ID NO: 71099 - protein, 38 aa, Artificial Sequence; identical to SEQ ID NO: 33323
  GFR-binding peptide
  MOD_RES (2), (3), (37): Xaa is C or S
  MOD_RES (17), (18), (19), (20), (21): Xaa is A or G
  MOD_RES (22), (23), (24), (25): Xaa is A or G or is absent

SEQ ID NO: 71100 - protein, 35 aa, Artificial Sequence; identical to SEQ ID NO: 8835
  GFR-binding peptide
  MOD_RES (32), (34): Xaa is C or S

SEQ ID NO: 71101 - protein, 36 aa, Artificial Sequence; identical to SEQ ID NO: 30195
  GFR-binding peptide
  MOD_RES (1), (2), (34), (36): Xaa is C or S

SEQ ID NO: 71102 - protein, 40 aa, Artificial Sequence; identical to SEQ ID NO: 33325
  GFR-binding peptide
  MOD_RES (6), (7): Xaa is C or S
  MOD_RES (21), (22), (23), (24), (25): Xaa is A or G
  MOD_RES (26), (27), (28), (29): Xaa is A or G or is absent

SEQ ID NO: 71103 - protein, 39 aa, Artificial Sequence; identical to SEQ ID NO: 33326
  GFR-binding peptide
  MOD_RES (4), (5), (39): Xaa is C or S
  MOD_RES (19), (20), (21), (22), (23): Xaa is A or G
  MOD_RES (24), (25), (26), (27): Xaa is A or G or is absent

SEQ ID NO: 71104 - protein, 36 aa, Artificial Sequence
  GFR-binding peptide
  MOD_RES (1), (33), (35): Xaa is C or S
XVPEKMSPINILYFDENKNVVYGKIPNMTVESXAXR

SEQ ID NO: 71105 - protein, 39 aa, Artificial Sequence; identical to SEQ ID NO: 30197
  GFR-binding peptide
  MOD_RES (5), (6), (38): Xaa is C or S

SEQ ID NO: 71106 - protein, 37 aa, Artificial Sequence; identical to SEQ ID NO: 30198
  GFR-binding peptide
  MOD_RES (3), (4), (36): Xaa is C or S

SEQ ID NO: 71107 - protein, 39 aa, Artificial Sequence
  GFR-binding peptide
  MOD_RES (4), (5), (37), (39): Xaa is C or S
AGPXXTPTKMEPISMLYLNDKQQIIKFKYEGMVVDRXGX

SEQ ID NO: 71108 - protein, 37 aa, Artificial Sequence; identical to SEQ ID NO: 8842
  GFR-binding peptide
  MOD_RES (3), (4): Xaa is C or S
  MOD_RES (18), (19), (20), (21), (22): Xaa is A or G
  MOD_RES (23), (24), (25), (26): Xaa is A or G or is absent

SEQ ID NO: 71109 - protein, 39 aa, Artificial Sequence; identical to SEQ ID NO: 33330
  GFR-binding peptide
  MOD_RES (6), (7): Xaa is C or S
  MOD_RES (21), (22), (23), (24), (25): Xaa is A or G
  MOD_RES (26), (27), (28), (29): Xaa is A or G or is absent

SEQ ID NO: 71110 - protein, 38 aa, Artificial Sequence; identical to SEQ ID NO: 58177
  GFR-binding peptide
  MOD_RES (2), (3), (35), (37): Xaa is C or S

SEQ ID NO: 71111 - protein, 37 aa, Artificial Sequence; identical to SEQ ID NO: 8844
  GFR-binding peptide
  MOD_RES (5), (6), (37): Xaa is C or S

SEQ ID NO: 71112 - protein, 32 aa, Artificial Sequence; identical to SEQ ID NO: 8845
  GFR-binding peptide
  MOD_RES (1), (2): Xaa is C or S

SEQ ID NO: 71113 - protein, 35 aa, Artificial Sequence; identical to SEQ ID NO: 8848
  GFR-binding peptide
  MOD_RES (1), (2), (34): Xaa is C or S

SEQ ID NO: 71114 - protein, 38 aa, Artificial Sequence; identical to SEQ ID NO: 8850
  GFR-binding peptide
  MOD_RES (4), (5), (38): Xaa is C or S

SEQ ID NO: 71115 - protein, 37 aa, Artificial Sequence
  GFR-binding peptide
  MOD_RES (4), (5): Xaa is C or S
  MOD_RES (19), (20), (21), (22), (23): Xaa is A or G
  MOD_RES (24), (25), (26), (27): Xaa is A or G or is absent
PEPXXVPEKMSPISILYKXXXXXXXXXLKYHYNMTVE

SEQ ID NO: 71116 - protein, 38 aa, Artificial Sequence; identical to SEQ ID NO: 30210
  GFR-binding peptide
  MOD_RES (2), (3), (38): Xaa is C or S
  MOD_RES (17), (18), (19), (20), (21): Xaa is A or G
  MOD_RES (22), (23), (24), (25): Xaa is A or G or is absent

SEQ ID NO: 71117 - protein, 34 aa, Artificial Sequence; identical to SEQ ID NO: 8851
  GFR-binding peptide
  MOD_RES (1), (2): Xaa is C or S
  MOD_RES (16), (17), (18), (19), (20): Xaa is A or G
  MOD_RES (21), (22), (23), (24): Xaa is A or G or is absent

SEQ ID NO: 71118 - protein, 33 aa, Artificial Sequence
  GFR-binding peptide
  MOD_RES (1), (1): Xaa is C or S
  MOD_RES (15), (16), (17), (18), (19): Xaa is A or G
  MOD_RES (20), (21), (22), (23): Xaa is A or G or is absent
XVPEKMSPINILYFXXXXXXXXXYGKIPNMTVE

SEQ ID NO: 71119 - protein, 39 aa, Artificial Sequence; identical to SEQ ID NO: 33341
  GFR-binding peptide
  MOD_RES (6), (7): Xaa is C or S
  MOD_RES (21), (22), (23), (24), (25): Xaa is A or G
  MOD_RES (26), (27), (28), (29): Xaa is A or G or is absent

SEQ ID NO: 71120 - protein, 41 aa, Artificial Sequence; identical to SEQ ID NO: 30215
  GFR-binding peptide
  MOD_RES (5), (6), (40): Xaa is C or S
  MOD_RES (20), (21), (22), (23), (24): Xaa is A or G
  MOD_RES (25), (26), (27), (28): Xaa is A or G or is absent

SEQ ID NO: 71121 - protein, 40 aa, Artificial Sequence
  GFR-binding peptide
  MOD_RES (5), (6), (37), (39): Xaa is C or S
SAAPXXVPQALSPINILYFVGRKPKVYGKIPMIVRSXKXS

SEQ ID NO: 71122 - protein, 38 aa, Artificial Sequence; identical to SEQ ID NO: 8856
  GFR-binding peptide
  MOD_RES (6), (7), (38): Xaa is C or S

SEQ ID NO: 71123 - protein, 41 aa, Artificial Sequence; identical to SEQ ID NO: 58194
  GFR-binding peptide
  MOD_RES (3), (4), (38), (40): Xaa is C or S
  MOD_RES (18), (19), (20), (21), (22): Xaa is A or G
  MOD_RES (23), (24), (25), (26): Xaa is A or G or is absent

SEQ ID NO: 71124 - protein, 32 aa, Artificial Sequence; identical to SEQ ID NO: 33346
  GFR-binding peptide
  MOD_RES (1), (1): Xaa is C or S

SEQ ID NO: 71125 - protein, 38 aa, Artificial Sequence; identical to SEQ ID NO: 8859
  GFR-binding peptide
  MOD_RES (3), (4), (38): Xaa is C or S
  MOD_RES (18), (19), (20), (21), (22): Xaa is A or G
  MOD_RES (23), (24), (25), (26): Xaa is A or G or is absent

SEQ ID NO: 71126 - protein, 33 aa, Artificial Sequence; identical to SEQ ID NO: 30226
  GFR-binding peptide
  MOD_RES (1), (1): Xaa is C or S
  MOD_RES (15), (16), (17), (18), (19): Xaa is A or G
  MOD_RES (20), (21), (22), (23): Xaa is A or G or is absent

SEQ ID NO: 71127 - protein, 33 aa, Artificial Sequence; identical to SEQ ID NO: 33348
  GFR-binding peptide
  MOD_RES (14), (15), (16), (17), (18): Xaa is A or G
  MOD_RES (19), (20), (21), (22): Xaa is A or G or is absent

SEQ ID NO: 71128 - protein, 44 aa, Artificial Sequence; identical to SEQ ID NO: 8862
  GFR-binding peptide
  MOD_RES (6), (7), (41), (43): Xaa is C or S
  MOD_RES (21), (22), (23), (24), (25): Xaa is A or G
  MOD_RES (26), (27), (28), (29): Xaa is A or G or is absent

SEQ ID NO: 71129 - protein, 37 aa, Artificial Sequence; identical to SEQ ID NO: 33350
  GFR-binding peptide
  MOD_RES (1), (2), (35), (37): Xaa is C or S

SEQ ID NO: 71130 - protein, 39 aa, Artificial Sequence
  GFR-binding peptide
  MOD_RES (6), (7): Xaa is C or S
  MOD_RES (21), (22), (23), (24), (25): Xaa is A or G
  MOD_RES (26), (27), (28), (29): Xaa is A or G or is absent
HVPKPXXAPTKLEPISVLYLXXXXXXXXXKFKYENMVVR

SEQ ID NO: 71131 - protein, 37 aa, Artificial Sequence
  GFR-binding peptide
  MOD_RES (3), (4), (35), (37): Xaa is C or S
SPXXVPQDLSPINILYFVGRTPKVYGKIPMVVKSXKX

SEQ ID NO: 71132 - protein, 36 aa, Artificial Sequence
  GFR-binding peptide
  MOD_RES (5), (6): Xaa is C or S
ASKAXXVPTKLSATSILYYDKGVVTYLRKHRGMAVS

SEQ ID NO: 71133 - protein, 38 aa, Artificial Sequence; identical to SEQ ID NO: 8869
  GFR-binding peptide
  MOD_RES (3), (4), (36), (38): Xaa is C or S

SEQ ID NO: 71134 - protein, 39 aa, Artificial Sequence; identical to SEQ ID NO: 8870
  GFR-binding peptide
  MOD_RES (2), (3), (37), (39): Xaa is C or S
  MOD_RES (17), (18), (19), (20), (21): Xaa is A or G
  MOD_RES (22), (23), (24), (25): Xaa is A or G or is absent

SEQ ID NO: 71135 - protein, 33 aa, Artificial Sequence; identical to SEQ ID NO: 30235
  GFR-binding peptide
  MOD_RES (2), (3): Xaa is C or S

SEQ ID NO: 71136 - protein, 36 aa, Artificial Sequence; identical to SEQ ID NO: 8874
  GFR-binding peptide
  MOD_RES (3), (4): Xaa is C or S

SEQ ID NO: 71137 - protein, 36 aa, Artificial Sequence; identical to SEQ ID NO: 8876
  GFR-binding peptide
  MOD_RES (1), (36): Xaa is C or S
  MOD_RES (15), (16), (17), (18), (19): Xaa is A or G
  MOD_RES (20), (21), (22), (23): Xaa is A or G or is absent

SEQ ID NO: 71138 - protein, 41 aa, Artificial Sequence; identical to SEQ ID NO: 30240
  GFR-binding peptide
  MOD_RES (6), (7): Xaa is C or S
  MOD_RES (21), (22), (23), (24), (25): Xaa is A or G
  MOD_RES (26), (27), (28), (29): Xaa is A or G or is absent

SEQ ID NO: 71139 - protein, 31 aa, Artificial Sequence; identical to SEQ ID NO: 8880
  GFR-binding peptide
  MOD_RES (31), (31): Xaa is C or S

SEQ ID NO: 71140 - protein, 35 aa, Artificial Sequence
  GFR-binding peptide
  MOD_RES (33), (35): Xaa is C or S
  MOD_RES (14), (15), (16), (17), (18): Xaa is A or G
  MOD_RES (19), (20), (21), (22): Xaa is A or G or is absent
APVKTSATSMLYYXXXXXXXXXLRKHRMIVEEXGX

SEQ ID NO: 71141 - protein, 38 aa, Artificial Sequence
  GFR-binding peptide
  MOD_RES (4), (5), (38): Xaa is C or S
  MOD_RES (19), (20), (21), (22), (23): Xaa is A or G
  MOD_RES (24), (25), (26), (27): Xaa is A or G or is absent
ASPXXVPQDLSPINILYFXXXXXXXXXYGKIPMVVKSX

SEQ ID NO: 71142 - protein, 36 aa, Artificial Sequence
  GFR-binding peptide
  MOD_RES (4), (5): Xaa is C or S
PEPXXVPEKMSATSILYYDENKNVVLRKHRNMTVES

SEQ ID NO: 71143 - protein, 33 aa, Artificial Sequence; identical to SEQ ID NO: 30247
  GFR-binding peptide
  MOD_RES (1), (1): Xaa is C or S
  MOD_RES (15), (16), (17), (18), (19): Xaa is A or G
  MOD_RES (20), (21), (22), (23): Xaa is A or G or is absent

SEQ ID NO: 71144 - protein, 36 aa, Artificial Sequence
  GFR-binding peptide
  MOD_RES (2), (3): Xaa is C or S
  MOD_RES (17), (18), (19), (20), (21): Xaa is A or G
  MOD_RES (22), (23), (24), (25): Xaa is A or G or is absent
TXXVPTRLEPISILYLXXXXXXXXXKFKYEDMVVES

SEQ ID NO: 71145 - protein, 36 aa, Artificial Sequence; identical to SEQ ID NO: 32321
  GFR-binding peptide
  MOD_RES (5), (6): Xaa is C or S

SEQ ID NO: 71146 - protein, 34 aa, Artificial Sequence
  GFR-binding peptide
  MOD_RES (32), (34): Xaa is C or S
VPTRLSPISILYKDSANNVVLKYHYDMVVESXGX

SEQ ID NO: 71147 - protein, 35 aa, Artificial Sequence
  GFR-binding peptide
  MOD_RES (1), (35): Xaa is C or S
  MOD_RES (15), (16), (17), (18), (19): Xaa is A or G
  MOD_RES (20), (21), (22), (23): Xaa is A or G or is absent
XVPEKMSPINILYFXXXXXXXXXYGKIPNMTVESX

SEQ ID NO: 71148 - protein, 33 aa, Artificial Sequence; identical to SEQ ID NO: 30249
  GFR-binding peptide
  MOD_RES (1), (1): Xaa is C or S
  MOD_RES (15), (16), (17), (18), (19): Xaa is A or G
  MOD_RES (20), (21), (22), (23): Xaa is A or G or is absent

SEQ ID NO: 71149 - protein, 39 aa, Artificial Sequence; identical to SEQ ID NO: 32325
  GFR-binding peptide
  MOD_RES (3), (37), (39): Xaa is C or S
  MOD_RES (17), (18), (19), (20), (21): Xaa is A or G
  MOD_RES (22), (23), (24), (25): Xaa is A or G or is absent

SEQ ID NO: 71150 - protein, 42 aa, Artificial Sequence; identical to SEQ ID NO: 30255
  GFR-binding peptide
  MOD_RES (6), (40), (42): Xaa is C or S
  MOD_RES (20), (21), (22), (23), (24): Xaa is A or G
  MOD_RES (25), (26), (27), (28): Xaa is A or G or is absent

SEQ ID NO: 71151 - protein, 36 aa, Artificial Sequence; identical to SEQ ID NO: 32328
  GFR-binding peptide
  MOD_RES (2), (3), (35): Xaa is C or S

SEQ ID NO: 71152 - protein, 37 aa, Artificial Sequence; identical to SEQ ID NO: 8895
  GFR-binding peptide
  MOD_RES (6), (7): Xaa is C or S

SEQ ID NO: 71153 - protein, 36 aa, Artificial Sequence; identical to SEQ ID NO: 30262
  GFR-binding peptide
  MOD_RES (2), (3), (35): Xaa is C or S

SEQ ID NO: 71154 - protein, 41 aa, Artificial Sequence; identical to SEQ ID NO: 8899
  GFR-binding peptide
  MOD_RES (5), (6), (41): Xaa is C or S
  MOD_RES (20), (21), (22), (23), (24): Xaa is A or G
  MOD_RES (25), (26), (27), (28): Xaa is A or G or is absent

SEQ ID NO: 71155 - protein, 34 aa, Artificial Sequence; identical to SEQ ID NO: 8903
  GFR-binding peptide
  MOD_RES (34), (34): Xaa is C or S
  MOD_RES (14), (15), (16), (17), (18): Xaa is A or G
  MOD_RES (19), (20), (21), (22): Xaa is A or G or is absent

SEQ ID NO: 71156 - protein, 36 aa, Artificial Sequence
  GFR-binding peptide
  MOD_RES (4), (5), (36): Xaa is C or S
ASPXXVPQDLSPINILYFVGRTPKVYGKIPMVVKSX

SEQ ID NO: 71157 - protein, 44 aa, Artificial Sequence; identical to SEQ ID NO: 32340
  GFR-binding peptide
  MOD_RES (6), (7), (41), (43): Xaa is C or S
  MOD_RES (21), (22), (23), (24), (25): Xaa is A or G
  MOD_RES (26), (27), (28), (29): Xaa is A or G or is absent

SEQ ID NO: 71158 - protein, 38 aa, Artificial Sequence
  GFR-binding peptide
  MOD_RES (5), (6): Xaa is C or S
  MOD_RES (20), (21), (22), (23), (24): Xaa is A or G
  MOD_RES (25), (26), (27), (28): Xaa is A or G or is absent
VPSTXXAPVKTSATSMLYYXXXXXXXXXLRKHRMIVEE

SEQ ID NO: 71159 - protein, 34 aa, Artificial Sequence; identical to SEQ ID NO: 32343
  GFR-binding peptide
  MOD_RES (2), (3): Xaa is C or S

SEQ ID NO: 71160 - protein, 36 aa, Artificial Sequence
  GFR-binding peptide
  MOD_RES (1), (2), (34), (36): Xaa is C or S
XXVPEKMNAISILYFDENKNVVLKKYRNMTVESXAX

SEQ ID NO: 71161 - protein, 36 aa, Artificial Sequence; identical to SEQ ID NO: 30275
  GFR-binding peptide
  MOD_RES (5), (6): Xaa is C or S

SEQ ID NO: 71162 - protein, 37 aa, Artificial Sequence
  GFR-binding peptide
  MOD_RES (6), (7): Xaa is C or S
HVPKPXXAPTKLSPISVLYKDDSSNVILKYHYNMVVR

SEQ ID NO: 71163 - protein, 34 aa, Artificial Sequence
  GFR-binding peptide
  MOD_RES (32), (34): Xaa is C or S
VPTRLEPISILYLDSANNVVKFKYEDMVVESXGX

SEQ ID NO: 71164 - protein, 39 aa, Artificial Sequence; identical to SEQ ID NO: 32346
  GFR-binding peptide
  MOD_RES (3), (4), (36), (38): Xaa is C or S

SEQ ID NO: 71165 - protein, 37 aa, Artificial Sequence
  GFR-binding peptide
  MOD_RES (34), (36): Xaa is C or S
  MOD_RES (14), (15), (16), (17), (18): Xaa is A or G
  MOD_RES (19), (20), (21), (22): Xaa is A or G or is absent
VPTKLSATSILYYXXXXXXXXXLRKHRGMAVSEXGXR

SEQ ID NO: 71166 - protein, 35 aa, Artificial Sequence; identical to SEQ ID NO: 30277
  GFR-binding peptide
  MOD_RES (1), (33), (35): Xaa is C or S

SEQ ID NO: 71167 - protein, 40 aa, Artificial Sequence; identical to SEQ ID NO: 32353
  GFR-binding peptide
  MOD_RES (3), (4), (38), (40): Xaa is C or S
  MOD_RES (18), (19), (20), (21), (22): Xaa is A or G
  MOD_RES (23), (24), (25), (26): Xaa is A or G or is absent

SEQ ID NO: 71168 - protein, 36 aa, Artificial Sequence; identical to SEQ ID NO: 30281
  GFR-binding peptide
  MOD_RES (1), (33), (35): Xaa is C or S

SEQ ID NO: 71169 - protein, 43 aa, Artificial Sequence; identical to SEQ ID NO: 30282
  GFR-binding peptide
  MOD_RES (6), (7), (41), (43): Xaa is C or S
  MOD_RES (21), (22), (23), (24), (25): Xaa is A or G
  MOD_RES (26), (27), (28), (29): Xaa is A or G or is absent

SEQ ID NO: 71170 - protein, 34 aa, Artificial Sequence; identical to SEQ ID NO: 8911
  GFR-binding peptide
  MOD_RES (1), (32), (34): Xaa is C or S

SEQ ID NO: 71171 - protein, 36 aa, Artificial Sequence; identical to SEQ ID NO: 30285
  GFR-binding peptide
  MOD_RES (3), (4): Xaa is C or S
  MOD_RES (18), (19), (20), (21), (22): Xaa is A or G
  MOD_RES (23), (24), (25), (26): Xaa is A or G or is absent

SEQ ID NO: 71172 - protein, 30 aa, Artificial Sequence
  GFR-binding peptide
VPEKMNAISILYFDENKNVVLKKYRNMTVE

SEQ ID NO: 71173 - protein, 36 aa, Artificial Sequence
  GFR-binding peptide
  MOD_RES (2), (3), (36): Xaa is C or S
  MOD_RES (17), (18), (19), (20), (21): Xaa is A or G
  MOD_RES (22), (23), (24), (25): Xaa is A or G or is absent
TXXAPVKTEPISMLYLXXXXXXXXXKFKYEMIVEEX

SEQ ID NO: 71174 - protein, 36 aa, Artificial Sequence; identical to SEQ ID NO: 16218
  GFR-binding peptide
  MOD_RES (34), (36): Xaa is C or S
  MOD_RES (14), (15), (16), (17), (18): Xaa is A or G
  MOD_RES (19), (20), (21), (22): Xaa is A or G or is absent

SEQ ID NO: 71175 - protein, 36 aa, Artificial Sequence; identical to SEQ ID NO: 8917
  GFR-binding peptide
  MOD_RES (3), (4), (35): Xaa is C or S

SEQ ID NO: 71176 - protein, 35 aa, Artificial Sequence; identical to SEQ ID NO: 32358
  GFR-binding peptide
  MOD_RES (1), (33), (35): Xaa is C or S

SEQ ID NO: 71177 - protein, 33 aa, Artificial Sequence; identical to SEQ ID NO: 16220
  GFR-binding peptide
  MOD_RES (32), (32): Xaa is C or S

SEQ ID NO: 71178 - protein, 39 aa, Artificial Sequence; identical to SEQ ID NO: 8919
  GFR-binding peptide
  MOD_RES (2), (3), (36), (38): Xaa is C or S

SEQ ID NO: 71179 - protein, 38 aa, Artificial Sequence; identical to SEQ ID NO: 8920
  GFR-binding peptide
  MOD_RES (3), (4), (36), (38): Xaa is C or S

SEQ ID NO: 71180 - protein, 35 aa, Artificial Sequence
  GFR-binding peptide
  MOD_RES (2), (3), (34): Xaa is C or S
PXXVSQDLSPINILYFIGKTPKIYGKIPMIVKSXK

SEQ ID NO: 71181 - protein, 35 aa, Artificial Sequence; identical to SEQ ID NO: 8921
  GFR-binding peptide
  MOD_RES (1), (2), (35): Xaa is C or S
  MOD_RES (16), (17), (18), (19), (20): Xaa is A or G
  MOD_RES (21), (22), (23), (24): Xaa is A or G or is absent

SEQ ID NO: 71182 - protein, 45 aa, Artificial Sequence; identical to SEQ ID NO: 8922
  GFR-binding peptide
  MOD_RES (6), (7), (42), (44): Xaa is C or S
  MOD_RES (21), (22), (23), (24), (25): Xaa is A or G
  MOD_RES (26), (27), (28), (29): Xaa is A or G or is absent

SEQ ID NO: 71183 - protein, 42 aa, Artificial Sequence
  GFR-binding peptide
  MOD_RES (6), (7), (41): Xaa is C or S
  MOD_RES (21), (22), (23), (24), (25): Xaa is A or G
  MOD_RES (26), (27), (28), (29): Xaa is A or G or is absent
KASKAXXVPTKLSATSILYYXXXXXXXXXLRKHRGMAVSEXG

SEQ ID NO: 71184 - protein, 36 aa, Artificial Sequence; identical to SEQ ID NO: 8924
  GFR-binding peptide
  MOD_RES (1), (33), (35): Xaa is C or S

SEQ ID NO: 71185 - protein, 40 aa, Artificial Sequence; identical to SEQ ID NO: 8926
  GFR-binding peptide
  MOD_RES (5), (6), (38), (40): Xaa is C or S

SEQ ID NO: 71186 - protein, 38 aa, Artificial Sequence; identical to SEQ ID NO: 32368
  GFR-binding peptide
  MOD_RES (3), (4), (38): Xaa is C or S
  MOD_RES (18), (19), (20), (21), (22): Xaa is A or G
  MOD_RES (23), (24), (25), (26): Xaa is A or G or is absent

SEQ ID NO: 71187 - protein, 34 aa, Artificial Sequence; identical to SEQ ID NO: 32369
  GFR-binding peptide
  MOD_RES (14), (15), (16), (17), (18): Xaa is A or G
  MOD_RES (19), (20), (21), (22): Xaa is A or G or is absent

SEQ ID NO: 71188 - protein, 34 aa, Artificial Sequence; identical to SEQ ID NO: 30302
  GFR-binding peptide
  MOD_RES (1), (2): Xaa is C or S
  MOD_RES (16), (17), (18), (19), (20): Xaa is A or G
  MOD_RES (21), (22), (23), (24): Xaa is A or G or is absent

SEQ ID NO: 71189 - protein, 41 aa, Artificial Sequence; identical to SEQ ID NO: 32373
  GFR-binding peptide
  MOD_RES (4), (5), (39), (41): Xaa is C or S
  MOD_RES (19), (20), (21), (22), (23): Xaa is A or G
  MOD_RES (24), (25), (26), (27): Xaa is A or G or is absent

SEQ ID NO: 71190 - protein, 43 aa, Artificial Sequence; identical to SEQ ID NO: 8929
  GFR-binding peptide
  MOD_RES (6), (7), (41), (43): Xaa is C or S
  MOD_RES (21), (22), (23), (24), (25): Xaa is A or G
  MOD_RES (26), (27), (28), (29): Xaa is A or G or is absent

SEQ ID NO: 71191 - protein, 42 aa, Artificial Sequence; identical to SEQ ID NO: 8930
  GFR-binding peptide
  MOD_RES (4), (5), (39), (41): Xaa is C or S
  MOD_RES (19), (20), (21), (22), (23): Xaa is A or G
  MOD_RES (24), (25), (26), (27): Xaa is A or G or is absent

SEQ ID NO: 71192 - protein, 39 aa, Artificial Sequence; identical to SEQ ID NO: 30305
  GFR-binding peptide
  MOD_RES (6), (7), (39): Xaa is C or S

SEQ ID NO: 71193 - protein, 34 aa, Artificial Sequence; identical to SEQ ID NO: 32376
  GFR-binding peptide
  MOD_RES (1), (33): Xaa is C or S

SEQ ID NO: 71194 - protein, 32 aa, Artificial Sequence; identical to SEQ ID NO: 8933
  GFR-binding peptide
  MOD_RES (14), (15), (16), (17), (18): Xaa is A or G
  MOD_RES (19), (20), (21), (22): Xaa is A or G or is absent

SEQ ID NO: 71195 - protein, 31 aa, Artificial Sequence
  GFR-binding peptide
  MOD_RES (1), (1): Xaa is C or S
XVSQDLSPINILYFIGKTPKIYGKIPMIVKS

SEQ ID NO: 71196 - protein, 39 aa, Artificial Sequence; identical to SEQ ID NO: 8935
  GFR-binding peptide
  MOD_RES (3), (4), (37), (39): Xaa is C or S
  MOD_RES (18), (19), (20), (21), (22): Xaa is A or G
  MOD_RES (23), (24), (25), (26): Xaa is A or G or is absent

SEQ ID NO: 71197 - protein, 41 aa, Artificial Sequence; identical to SEQ ID NO: 32381
  GFR-binding peptide
  MOD_RES (7), (39), (41): Xaa is C or S

SEQ ID NO: 71198 - protein, 33 aa, Artificial Sequence
  GFR-binding peptide
  MOD_RES (32), (32): Xaa is C or S
VPTRLEPISILYLDSANNVVKFKYEDMVVESXG

SEQ ID NO: 71199 - protein, 38 aa, Artificial Sequence; identical to SEQ ID NO: 8940
  GFR-binding peptide
  MOD_RES (6), (7): Xaa is C or S

SEQ ID NO: 71200 - protein, 37 aa, Artificial Sequence; identical to SEQ ID NO: 8942
  GFR-binding peptide
  MOD_RES (2), (3), (37): Xaa is C or S
  MOD_RES (17), (18), (19), (20), (21): Xaa is A or G
  MOD_RES (22), (23), (24), (25): Xaa is A or G or is absent

SEQ ID NO: 71201 - protein, 34 aa, Artificial Sequence
  GFR-binding peptide
  MOD_RES (1), (2), (34): Xaa is C or S
XXVPTKLSATSILYYDKGVVTYLRKHRGMAVSEX

SEQ ID NO: 71202 - protein, 39 aa, Artificial Sequence; identical to SEQ ID NO: 8944
  GFR-binding peptide
  MOD_RES (1), (2), (36), (38): Xaa is C or S
  MOD_RES (16), (17), (18), (19), (20): Xaa is A or G
  MOD_RES (21), (22), (23), (24): Xaa is A or G or is absent

SEQ ID NO: 71203 - protein, 37 aa, Artificial Sequence; identical to SEQ ID NO: 30316
  GFR-binding peptide
  MOD_RES (5), (6), (37): Xaa is C or S

SEQ ID NO: 71204 - protein, 32 aa, Artificial Sequence; identical to SEQ ID NO: 32395
  GFR-binding peptide
  MOD_RES (14), (15), (16), (17), (18): Xaa is A or G
  MOD_RES (19), (20), (21), (22): Xaa is A or G or is absent

SEQ ID NO: 71205 - protein, 33 aa, Artificial Sequence
  GFR-binding peptide
  MOD_RES (14), (15), (16), (17), (18): Xaa is A or G
  MOD_RES (19), (20), (21), (22): Xaa is A or G or is absent
VPEKMSPINILYFXXXXXXXXXYGKIPNMTVES

SEQ ID NO: 71206 - protein, 38 aa, Artificial Sequence
  GFR-binding peptide
  MOD_RES (5), (6), (38): Xaa is C or S
TPPTXXVPTRLSATSILYYDSANNVVLRKHRDMVVESX

SEQ ID NO: 71207 - protein, 35 aa, Artificial Sequence
  GFR-binding peptide
  MOD_RES (32), (34): Xaa is C or S
TPTKMEPISMLYLNDKQQIIKFKYEGMVVDRXGXS

SEQ ID NO: 71208 - protein, 41 aa, Artificial Sequence; identical to SEQ ID NO: 8949
  GFR-binding peptide
  MOD_RES (5), (6), (38), (40): Xaa is C or S

SEQ ID NO: 71209 - protein, 39 aa, Artificial Sequence; identical to SEQ ID NO: 8952
  GFR-binding peptide
  MOD_RES (5), (6), (38): Xaa is C or S

SEQ ID NO: 71210 - protein, 31 aa, Artificial Sequence; identical to SEQ ID NO: 8956
  GFR-binding peptide
  MOD_RES (1), (1): Xaa is C or S

SEQ ID NO: 71211 - protein, 34 aa, Artificial Sequence; identical to SEQ ID NO: 30330
  GFR-binding peptide
  MOD_RES (2), (3): Xaa is C or S

SEQ ID NO: 71212 - protein, 40 aa, Artificial Sequence
  GFR-binding peptide
  MOD_RES (5), (6), (40): Xaa is C or S
  MOD_RES (20), (21), (22), (23), (24): Xaa is A or G
  MOD_RES (25), (26), (27), (28): Xaa is A or G or is absent
APASXXVPARLSATSILYYXXXXXXXXXLRKHRDMVVEAX

SEQ ID NO: 71213 - protein, 37 aa, Artificial Sequence; identical to SEQ ID NO: 8965
  GFR-binding peptide
  MOD_RES (5), (6): Xaa is C or S

SEQ ID NO: 71214 - protein, 35 aa, Artificial Sequence; identical to SEQ ID NO: 30340
  GFR-binding peptide
  MOD_RES (34), (34): Xaa is C or S
  MOD_RES (14), (15), (16), (17), (18): Xaa is A or G
  MOD_RES (19), (20), (21), (22): Xaa is A or G or is absent

SEQ ID NO: 71215 - protein, 40 aa, Artificial Sequence
  GFR-binding peptide
  MOD_RES (4), (5), (39): Xaa is C or S
  MOD_RES (19), (20), (21), (22), (23): Xaa is A or G
  MOD_RES (24), (25), (26), (27): Xaa is A or G or is absent
PEPXXVPEKMSPISILYKXXXXXXXXXLKYHYNMTVESXA

SEQ ID NO: 71216 - protein, 39 aa, Artificial Sequence; identical to SEQ ID NO: 8969
  GFR-binding peptide
  MOD_RES (2), (3), (36), (38): Xaa is C or S
  MOD_RES (17), (18), (19), (20), (21): Xaa is A or G
  MOD_RES (22), (23), (24), (25): Xaa is A or G or is absent

SEQ ID NO: 71217 - protein, 41 aa, Artificial Sequence
  GFR-binding peptide
  MOD_RES (5), (6), (38), (40): Xaa is C or S
TPPTXXVPTRLSATSILYYDSANNVVLRKHRDMVVESXGXR

SEQ ID NO: 71218 - protein, 41 aa, Artificial Sequence; identical to SEQ ID NO: 8972
  GFR-binding peptide
  MOD_RES (4), (5), (38), (40): Xaa is C or S
  MOD_RES (19), (20), (21), (22), (23): Xaa is A or G
  MOD_RES (24), (25), (26), (27): Xaa is A or G or is absent

SEQ ID NO: 71219 - protein, 35 aa, Artificial Sequence
  GFR-binding peptide
  MOD_RES (32), (34): Xaa is C or S
TPTKMSPISMLYKNDKQQIILKYHYGMVVDRXGXS

SEQ ID NO: 71220 - protein, 39 aa, Artificial Sequence
  GFR-binding peptide
  MOD_RES (3), (4), (37), (39): Xaa is C or S
  MOD_RES (18), (19), (20), (21), (22): Xaa is A or G
  MOD_RES (23), (24), (25), (26): Xaa is A or G or is absent
APXXVPQALSPINILYFXXXXXXXXXYGKIPMIVRSXKX

SEQ ID NO: 71221 - protein, 37 aa, Artificial Sequence; identical to SEQ ID NO: 57342
  GFR-binding peptide
  MOD_RES (1), (35), (37): Xaa is C or S
  MOD_RES (15), (16), (17), (18), (19): Xaa is A or G
  MOD_RES (20), (21), (22), (23): Xaa is A or G or is absent

SEQ ID NO: 71222 - protein, 39 aa, Artificial Sequence; identical to SEQ ID NO: 32426
  GFR-binding peptide
  MOD_RES (6), (7): Xaa is C or S
  MOD_RES (21), (22), (23), (24), (25): Xaa is A or G
  MOD_RES (26), (27), (28), (29): Xaa is A or G or is absent

SEQ ID NO: 71223 - protein, 31 aa, Artificial Sequence; identical to SEQ ID NO: 8975
  GFR-binding peptide
  MOD_RES (1), (1): Xaa is C or S

SEQ ID NO: 71224 - protein, 35 aa, Artificial Sequence; identical to SEQ ID NO: 30350
  GFR-binding peptide
  MOD_RES (1), (33), (35): Xaa is C or S

SEQ ID NO: 71225 - protein, 44 aa, Artificial Sequence; identical to SEQ ID NO: 8976
  GFR-binding peptide
  MOD_RES (5), (6), (41), (43): Xaa is C or S
  MOD_RES (20), (21), (22), (23), (24): Xaa is A or G
  MOD_RES (25), (26), (27), (28): Xaa is A or G or is absent

SEQ ID NO: 71226 - protein, 34 aa, Artificial Sequence; identical to SEQ ID NO: 30353
  GFR-binding peptide
  MOD_RES (3), (4): Xaa is C or S

SEQ ID NO: 71227 - protein, 44 aa, Artificial Sequence; identical to SEQ ID NO: 8978
  GFR-binding peptide
  MOD_RES (6), (7), (41), (43): Xaa is C or S
  MOD_RES (21), (22), (23), (24), (25): Xaa is A or G
  MOD_RES (26), (27), (28), (29): Xaa is A or G or is absent

SEQ ID NO: 71228 - protein, 39 aa, Artificial Sequence
  GFR-binding peptide
  MOD_RES (5), (6), (37), (39): Xaa is C or S
VPSTXXAPVKTSPISMLYKDNGRVLLLKYHYMIVEEXGX

SEQ ID NO: 71229 - protein, 31 aa, Artificial Sequence
  GFR-binding peptide
  MOD_RES (1), (1): Xaa is C or S
XVPARLSATSILYYDAANNVVLRKHRDMVVE

SEQ ID NO: 71230 - protein, 37 aa, Artificial Sequence; identical to SEQ ID NO: 32433
  GFR-binding peptide
  MOD_RES (3), (4), (36): Xaa is C or S

SEQ ID NO: 71231 - protein, 36 aa, Artificial Sequence; identical to SEQ ID NO: 30357
  GFR-binding peptide
  MOD_RES (1), (2), (33), (35): Xaa is C or S

SEQ ID NO: 71232 - protein, 39 aa, Artificial Sequence; identical to SEQ ID NO: 57351
  GFR-binding peptide
  MOD_RES (2), (3), (37), (39): Xaa is C or S
  MOD_RES (17), (18), (19), (20), (21): Xaa is A or G
  MOD_RES (22), (23), (24), (25): Xaa is A or G or is absent

SEQ ID NO: 71233 - protein, 42 aa, Artificial Sequence; identical to SEQ ID NO: 8984
  GFR-binding peptide
  MOD_RES (4), (5), (39), (41): Xaa is C or S
  MOD_RES (19), (20), (21), (22), (23): Xaa is A or G
  MOD_RES (24), (25), (26), (27): Xaa is A or G or is absent

SEQ ID NO: 71234 - protein, 42 aa, Artificial Sequence
  GFR-binding peptide
  MOD_RES (4), (5), (39), (41): Xaa is C or S
  MOD_RES (19), (20), (21), (22), (23): Xaa is A or G
  MOD_RES (24), (25), (26), (27): Xaa is A or G or is absent
PPTXXVPTRLEPISILYLXXXXXXXXXKFKYEDMVVESXGXR

SEQ ID NO: 71235 - protein, 36 aa, Artificial Sequence; identical to SEQ ID NO: 16277
  GFR-binding peptide
  MOD_RES (3), (4): Xaa is C or S
  MOD_RES (18), (19), (20), (21), (22): Xaa is A or G
  MOD_RES (23), (24), (25), (26): Xaa is A or G or is absent

SEQ ID NO: 71236 - protein, 38 aa, Artificial Sequence
  GFR-binding peptide
  MOD_RES (3), (4), (36), (38): Xaa is C or S
PTXXVPTRLEPISILYLDSANNVVKFKYEDMVVESXGX

SEQ ID NO: 71237 - protein, 36 aa, Artificial Sequence; identical to SEQ ID NO: 32445
  GFR-binding peptide
  MOD_RES (5), (6): Xaa is C or S

SEQ ID NO: 71238 - protein, 37 aa, Artificial Sequence; identical to SEQ ID NO: 32447
  GFR-binding peptide
  MOD_RES (4), (5): Xaa is C or S
  MOD_RES (19), (20), (21), (22), (23): Xaa is A or G
  MOD_RES (24), (25), (26), (27): Xaa is A or G or is absent

SEQ ID NO: 71239 - protein, 38 aa, Artificial Sequence; identical to SEQ ID NO: 8989
  GFR-binding peptide
  MOD_RES (5), (6): Xaa is C or S
  MOD_RES (20), (21), (22), (23), (24): Xaa is A or G
  MOD_RES (25), (26), (27), (28): Xaa is A or G or is absent

SEQ ID NO: 71240 - protein, 39 aa, Artificial Sequence; identical to SEQ ID NO: 8990
  GFR-binding peptide
  MOD_RES (1), (36), (38): Xaa is C or S
  MOD_RES (15), (16), (17), (18), (19): Xaa is A or G
  MOD_RES (20), (21), (22), (23): Xaa is A or G or is absent

SEQ ID NO: 71241 - protein, 33 aa, Artificial Sequence; identical to SEQ ID NO: 8997
  GFR-binding peptide
  MOD_RES (1), (33): Xaa is C or S

SEQ ID NO: 71242 - protein, 36 aa, Artificial Sequence
  GFR-binding peptide
  MOD_RES (1), (34), (36): Xaa is C or S
  MOD_RES (15), (16), (17), (18), (19): Xaa is A or G
  MOD_RES (20), (21), (22), (23): Xaa is A or G or is absent
XVPQDLSPINILYFXXXXXXXXXYGKIPMVVKSXKX

SEQ ID NO: 71243 - protein, 32 aa, Artificial Sequence; identical to SEQ ID NO: 30376
  GFR-binding peptide
  MOD_RES (1), (32): Xaa is C or S

SEQ ID NO: 71244 - protein, 40 aa, Artificial Sequence; identical to SEQ ID NO: 8999
  GFR-binding peptide
  MOD_RES (6), (7), (38), (40): Xaa is C or S

SEQ ID NO: 71245 - protein, 39 aa, Artificial Sequence; identical to SEQ ID NO: 9000
  GFR-binding peptide
  MOD_RES (7), (39): Xaa is C or S

SEQ ID NO: 71246 - protein, 35 aa, Artificial Sequence
  GFR-binding peptide
  MOD_RES (2), (3), (35): Xaa is C or S
AXXVPTKLSATSILYYDKGVVTYLRKHRGMAVSEX

SEQ ID NO: 71247 - protein, 39 aa, Artificial Sequence; identical to SEQ ID NO: 30378
  GFR-binding peptide
  MOD_RES (2), (3), (38): Xaa is C or S
  MOD_RES (17), (18), (19), (20), (21): Xaa is A or G
  MOD_RES (22), (23), (24), (25): Xaa is A or G or is absent

SEQ ID NO: 71248 - protein, 42 aa, Artificial Sequence
  GFR-binding peptide
  MOD_RES (5), (6), (40), (42): Xaa is C or S
  MOD_RES (20), (21), (22), (23), (24): Xaa is A or G
  MOD_RES (25), (26), (27), (28): Xaa is A or G or is absent
SAGPXXTPTKMSATSMLYYXXXXXXXXXLRKHRGMVVDRXGX

SEQ ID NO: 71249 - protein, 38 aa, Artificial Sequence
  GFR-binding peptide
  MOD_RES (4), (5): Xaa is C or S
  MOD_RES (19), (20), (21), (22), (23): Xaa is A or G
  MOD_RES (24), (25), (26), (27): Xaa is A or G or is absent
SKAXXVPTKLSATSILYYXXXXXXXXXLRKHRGMAVSE

SEQ ID NO: 71250 - protein, 31 aa, Artificial Sequence; identical to SEQ ID NO: 9003
  GFR-binding peptide
  MOD_RES (1), (1): Xaa is C or S

SEQ ID NO: 71251 - protein, 37 aa, Artificial Sequence
  GFR-binding peptide
  MOD_RES (2), (3), (34), (36): Xaa is C or S
PXXVPQALSPINILYFVGRKPKVYGKIPMIVRSXKXS

SEQ ID NO: 71252 - protein, 42 aa, Artificial Sequence; identical to SEQ ID NO: 16301
  GFR-binding peptide
  MOD_RES (4), (5), (39), (41): Xaa is C or S
  MOD_RES (19), (20), (21), (22), (23): Xaa is A or G
  MOD_RES (24), (25), (26), (27): Xaa is A or G or is absent

SEQ ID NO: 71253 - protein, 32 aa, Artificial Sequence; identical to SEQ ID NO: 9010
  GFR-binding peptide
  MOD_RES (1), (2): Xaa is C or S

SEQ ID NO: 71254 - protein, 39 aa, Artificial Sequence; identical to SEQ ID NO: 30390
  GFR-binding peptide
  MOD_RES (4), (5), (39): Xaa is C or S
  MOD_RES (19), (20), (21), (22), (23): Xaa is A or G
  MOD_RES (24), (25), (26), (27): Xaa is A or G or is absent

SEQ ID NO: 71255 - protein, 31 aa, Artificial Sequence; identical to SEQ ID NO: 16304
  GFR-binding peptide

SEQ ID NO: 71256 - protein, 34 aa, Artificial Sequence
  GFR-binding peptide
  MOD_RES (31), (33): Xaa is C or S
APVKTSPISMLYKDNGRVLLLKYHYMIVEEXGXL

SEQ ID NO: 71257 - protein, 33 aa, Artificial Sequence; identical to SEQ ID NO: 9011
  GFR-binding peptide
  MOD_RES (1), (2): Xaa is C or S

SEQ ID NO: 71258 - protein, 32 aa, Artificial Sequence; identical to SEQ ID NO: 9012
  GFR-binding peptide
  MOD_RES (1), (2): Xaa is C or S

SEQ ID NO: 71259 - protein, 32 aa, Artificial Sequence; identical to SEQ ID NO: 30396
  GFR-binding peptide
  MOD_RES (1), (2): Xaa is C or S

SEQ ID NO: 71260 - protein, 39 aa, Artificial Sequence
  GFR-binding peptide
  MOD_RES (4), (5), (37), (39): Xaa is C or S
PEPXXVPEKMSPINILYFDENKNVVYGKIPNMTVESXAX

SEQ ID NO: 71261 - protein, 41 aa, Artificial Sequence; identical to SEQ ID NO: 32490
  GFR-binding peptide
  MOD_RES (3), (4), (38), (40): Xaa is C or S
  MOD_RES (18), (19), (20), (21), (22): Xaa is A or G
  MOD_RES (23), (24), (25), (26): Xaa is A or G or is absent

SEQ ID NO: 71262 - protein, 41 aa, Artificial Sequence; identical to SEQ ID NO: 9021
  GFR-binding peptide
  MOD_RES (3), (4), (38), (40): Xaa is C or S
  MOD_RES (18), (19), (20), (21), (22): Xaa is A or G
  MOD_RES (23), (24), (25), (26): Xaa is A or G or is absent

SEQ ID NO: 71263 - protein, 40 aa, Artificial Sequence; identical to SEQ ID NO: 30402
  GFR-binding peptide
  MOD_RES (7), (7): Xaa is C or S
  MOD_RES (21), (22), (23), (24), (25): Xaa is A or G
  MOD_RES (26), (27), (28), (29): Xaa is A or G or is absent

SEQ ID NO: 71264 - protein, 38 aa, Artificial Sequence
  GFR-binding peptide
  MOD_RES (3), (4), (36), (38): Xaa is C or S
EPXXVPEKMSATSILYYDENKNVVLRKHRNMTVESXAX

SEQ ID NO: 71265 - protein, 34 aa, Artificial Sequence; identical to SEQ ID NO: 9022
  GFR-binding peptide
  MOD_RES (1), (2): Xaa is C or S
  MOD_RES (16), (17), (18), (19), (20): Xaa is A or G
  MOD_RES (21), (22), (23), (24): Xaa is A or G or is absent

SEQ ID NO: 71266 - protein, 36 aa, Artificial Sequence; identical to SEQ ID NO: 9023
  GFR-binding peptide
  MOD_RES (3), (4): Xaa is C or S
  MOD_RES (18), (19), (20), (21), (22): Xaa is A or G
  MOD_RES (23), (24), (25), (26): Xaa is A or G or is absent

SEQ ID NO: 71267 - protein, 41 aa, Artificial Sequence; identical to SEQ ID NO: 30405
  GFR-binding peptide
  MOD_RES (4), (5), (39), (41): Xaa is C or S
  MOD_RES (19), (20), (21), (22), (23): Xaa is A or G
  MOD_RES (24), (25), (26), (27): Xaa is A or G or is absent

SEQ ID NO: 71268 - protein, 41 aa, Artificial Sequence
  GFR-binding peptide
  MOD_RES (5), (6), (40): Xaa is C or S
  MOD_RES (20), (21), (22), (23), (24): Xaa is A or G
  MOD_RES (25), (26), (27), (28): Xaa is A or G or is absent
ASKAXXVPTKLSATSILYYXXXXXXXXXLRKHRGMAVSEXG

SEQ ID NO: 71269 - protein, 37 aa, Artificial Sequence
  GFR-binding peptide
  MOD_RES (6), (7): Xaa is C or S
RVPSTXXAPVKTSPISMLYKDNGRVLLLKYHYMIVEE

SEQ ID NO: 71270 - protein, 38 aa, Artificial Sequence; identical to SEQ ID NO: 30409
  GFR-binding peptide
  MOD_RES (4), (5), (36), (38): Xaa is C or S

SEQ ID NO: 71271 - protein, 37 aa, Artificial Sequence; identical to SEQ ID NO: 9026
  GFR-binding peptide
  MOD_RES (2), (3), (35), (37): Xaa is C or S

SEQ ID NO: 71272 - protein, 37 aa, Artificial Sequence; identical to SEQ ID NO: 32505
  GFR-binding peptide
  MOD_RES (1), (2), (36): Xaa is C or S
  MOD_RES (16), (17), (18), (19), (20): Xaa is A or G
  MOD_RES (21), (22), (23), (24): Xaa is A or G or is absent

SEQ ID NO: 71273 - protein, 33 aa, Artificial Sequence
  GFR-binding peptide
  MOD_RES (1), (33): Xaa is C or S
XTPTKMEPISMLYLNDKQQIIKFKYEGMVVDRX

SEQ ID NO: 71274 - protein, 33 aa, Artificial Sequence; identical to SEQ ID NO: 32507
  GFR-binding peptide
  MOD_RES (32), (32): Xaa is C or S

SEQ ID NO: 71275 - protein, 37 aa, Artificial Sequence; identical to SEQ ID NO: 9028
  GFR-binding peptide
  MOD_RES (3), (37): Xaa is C or S
  MOD_RES (17), (18), (19), (20), (21): Xaa is A or G
  MOD_RES (22), (23), (24), (25): Xaa is A or G or is absent

SEQ ID NO: 71276 - protein, 37 aa, Artificial Sequence; identical to SEQ ID NO: 30415
  GFR-binding peptide
  MOD_RES (1), (2), (36): Xaa is C or S
  MOD_RES (16), (17), (18), (19), (20): Xaa is A or G
  MOD_RES (21), (22), (23), (24): Xaa is A or G or is absent

SEQ ID NO: 71277 - protein, 40 aa, Artificial Sequence; identical to SEQ ID NO: 9033
  GFR-binding peptide
  MOD_RES (6), (7): Xaa is C or S
  MOD_RES (21), (22), (23), (24), (25): Xaa is A or G
  MOD_RES (26), (27), (28), (29): Xaa is A or G or is absent

SEQ ID NO: 71278 - protein, 37 aa, Artificial Sequence; identical to SEQ ID NO: 9034
  GFR-binding peptide
  MOD_RES (3), (4): Xaa is C or S
  MOD_RES (18), (19), (20), (21), (22): Xaa is A or G
  MOD_RES (23), (24), (25), (26): Xaa is A or G or is absent

SEQ ID NO: 71279 - protein, 32 aa, Artificial Sequence
  GFR-binding peptide
  MOD_RES (32), (32): Xaa is C or S
VPEKMSPISILYKDENKNVVLKYHYNMTVESX

SEQ ID NO: 71280 - protein, 33 aa, Artificial Sequence; identical to SEQ ID NO: 30420
  GFR-binding peptide
  MOD_RES (1), (33): Xaa is C or S

SEQ ID NO: 71281 - protein, 42 aa, Artificial Sequence; identical to SEQ ID NO: 30421
  GFR-binding peptide
  MOD_RES (6), (7), (41): Xaa is C or S
  MOD_RES (21), (22), (23), (24), (25): Xaa is A or G
  MOD_RES (26), (27), (28), (29): Xaa is A or G or is absent

SEQ ID NO: 71282 - protein, 35 aa, Artificial Sequence
  GFR-binding peptide
  MOD_RES (4), (5): Xaa is C or S
PPTXXVPTRLEPISILYLDSANNVVKFKYEDMVVE

SEQ ID NO: 71283 - protein, 37 aa, Artificial Sequence
  GFR-binding peptide
  MOD_RES (4), (5): Xaa is C or S
  MOD_RES (19), (20), (21), (22), (23): Xaa is A or G
  MOD_RES (24), (25), (26), (27): Xaa is A or G or is absent
PPTXXVPTRLSATSILYYXXXXXXXXXLRKHRDMVVE

SEQ ID NO: 71284 - protein, 36 aa, Artificial Sequence; identical to SEQ ID NO: 9037
  GFR-binding peptide
  MOD_RES (34), (36): Xaa is C or S
  MOD_RES (14), (15), (16), (17), (18): Xaa is A or G
  MOD_RES (19), (20), (21), (22): Xaa is A or G or is absent

SEQ ID NO: 71285 - protein, 36 aa, Artificial Sequence; identical to SEQ ID NO: 9038
  GFR-binding peptide
  MOD_RES (1), (34), (36): Xaa is C or S
  MOD_RES (15), (16), (17), (18), (19): Xaa is A or G
  MOD_RES (20), (21), (22), (23): Xaa is A or G or is absent

SEQ ID NO: 71286 - protein, 36 aa, Artificial Sequence; identical to SEQ ID NO: 9040
  GFR-binding peptide
  MOD_RES (33), (35): Xaa is C or S
  MOD_RES (14), (15), (16), (17), (18): Xaa is A or G
  MOD_RES (19), (20), (21), (22): Xaa is A or G or is absent

SEQ ID NO: 71287 - protein, 43 aa, Artificial Sequence
  GFR-binding peptide
  MOD_RES (5), (6), (40), (42): Xaa is C or S
  MOD_RES (20), (21), (22), (23), (24): Xaa is A or G
  MOD_RES (25), (26), (27), (28): Xaa is A or G or is absent
ASKAXXVPTKLSATSILYYXXXXXXXXXLRKHRGMAVSEXGXR

SEQ ID NO: 71288 - protein, 36 aa, Artificial Sequence
  GFR-binding peptide
  MOD_RES (34), (36): Xaa is C or S
  MOD_RES (14), (15), (16), (17), (18): Xaa is A or G
  MOD_RES (19), (20), (21), (22): Xaa is A or G or is absent
VPTKLSATSILYYXXXXXXXXXLRKHRGMAVSEXGX

SEQ ID NO: 71289 - protein, 39 aa, Artificial Sequence; identical to SEQ ID NO: 9041
  GFR-binding peptide
  MOD_RES (3), (4), (37), (39): Xaa is C or S
  MOD_RES (18), (19), (20), (21), (22): Xaa is A or G
  MOD_RES (23), (24), (25), (26): Xaa is A or G or is absent

SEQ ID NO: 71290 - protein, 41 aa, Artificial Sequence
  GFR-binding peptide
  MOD_RES (5), (6), (38), (40): Xaa is C or S
IPEPXXVPEKMSATSILYYDENKNVVLRKHRNMTVESXAXR

SEQ ID NO: 71291 - protein, 39 aa, Artificial Sequence
  GFR-binding peptide
  MOD_RES (4), (5), (39): Xaa is C or S
  MOD_RES (19), (20), (21), (22), (23): Xaa is A or G
  MOD_RES (24), (25), (26), (27): Xaa is A or G or is absent
AGPXXTPTKMEPISMLYLXXXXXXXXXKFKYEGMVVDRX

SEQ ID NO: 71292 - protein, 38 aa, Artificial Sequence
  GFR-binding peptide
  MOD_RES (6), (7): Xaa is C or S
AAPASXXVPARLSATSILYYDAANNVVLRKHRDMVVEA

SEQ ID NO: 71293 - protein, 34 aa, Artificial Sequence; identical to SEQ ID NO: 30432
  GFR-binding peptide
  MOD_RES (34), (34): Xaa is C or S
  MOD_RES (14), (15), (16), (17), (18): Xaa is A or G
  MOD_RES (19), (20), (21), (22): Xaa is A or G or is absent

SEQ ID NO: 71294 - protein, 43 aa, Artificial Sequence; identical to SEQ ID NO: 9053
  GFR-binding peptide
  MOD_RES (5), (6), (40), (42): Xaa is C or S
  MOD_RES (20), (21), (22), (23), (24): Xaa is A or G
  MOD_RES (25), (26), (27), (28): Xaa is A or G or is absent

SEQ ID NO: 71295 - protein, 42 aa, Artificial Sequence; identical to SEQ ID NO: 9056
  GFR-binding peptide
  MOD_RES (6), (7), (41): Xaa is C or S
  MOD_RES (21), (22), (23), (24), (25): Xaa is A or G
  MOD_RES (26), (27), (28), (29): Xaa is A or G or is absent

SEQ ID NO: 71296 - protein, 43 aa, Artificial Sequence; identical to SEQ ID NO: 9057
  GFR-binding peptide
  MOD_RES (7), (41), (43): Xaa is C or S
  MOD_RES (21), (22), (23), (24), (25): Xaa is A or G
  MOD_RES (26), (27), (28), (29): Xaa is A or G or is absent

SEQ ID NO: 71297 - protein, 36 aa, Artificial Sequence; identical to SEQ ID NO: 9058
  GFR-binding peptide
  MOD_RES (5), (6): Xaa is C or S

SEQ ID NO: 71298 - protein, 37 aa, Artificial Sequence
  GFR-binding peptide
  MOD_RES (2), (3), (37): Xaa is C or S
  MOD_RES (17), (18), (19), (20), (21): Xaa is A or G
  MOD_RES (22), (23), (24), (25): Xaa is A or G or is absent
TXXVPTRLSATSILYYXXXXXXXXXLRKHRDMVVESX

SEQ ID NO: 71299 - protein, 36 aa, Artificial Sequence
  GFR-binding peptide
  MOD_RES (1), (34), (36): Xaa is C or S
  MOD_RES (15), (16), (17), (18), (19): Xaa is A or G
  MOD_RES (20), (21), (22), (23): Xaa is A or G or is absent
XAPVKTSATSMLYYXXXXXXXXXLRKHRMIVEEXGX

SEQ ID NO: 71300 - protein, 35 aa, Artificial Sequence; identical to SEQ ID NO: 57439
  GFR-binding peptide
  MOD_RES (32), (34): Xaa is C or S

SEQ ID NO: 71301 - protein, 44 aa, Artificial Sequence; identical to SEQ ID NO: 32536
  GFR-binding peptide
  MOD_RES (6), (7), (42), (44): Xaa is C or S
  MOD_RES (21), (22), (23), (24), (25): Xaa is A or G
  MOD_RES (26), (27), (28), (29): Xaa is A or G or is absent

SEQ ID NO: 71302 - protein, 40 aa, Artificial Sequence; identical to SEQ ID NO: 30440
  GFR-binding peptide
  MOD_RES (3), (4), (38), (40): Xaa is C or S
  MOD_RES (18), (19), (20), (21), (22): Xaa is A or G
  MOD_RES (23), (24), (25), (26): Xaa is A or G or is absent

SEQ ID NO: 71303 - protein, 43 aa, Artificial Sequence; identical to SEQ ID NO: 9064
  GFR-binding peptide
  MOD_RES (5), (6), (40), (42): Xaa is C or S
  MOD_RES (20), (21), (22), (23), (24): Xaa is A or G
  MOD_RES (25), (26), (27), (28): Xaa is A or G or is absent

SEQ ID NO: 71304 - protein, 38 aa, Artificial Sequence
  GFR-binding peptide
  MOD_RES (4), (5): Xaa is C or S
  MOD_RES (19), (20), (21), (22), (23): Xaa is A or G
  MOD_RES (24), (25), (26), (27): Xaa is A or G or is absent
PPTXXVPTRLSPISILYKXXXXXXXXXLKYHYDMVVES

SEQ ID NO: 71305 - protein, 32 aa, Artificial Sequence; identical to SEQ ID NO: 32547
  GFR-binding peptide
  MOD_RES (1), (1): Xaa is C or S

SEQ ID NO: 71306 - protein, 41 aa, Artificial Sequence; identical to SEQ ID NO: 9065
  GFR-binding peptide
  MOD_RES (3), (4), (38), (40): Xaa is C or S
  MOD_RES (18), (19), (20), (21), (22): Xaa is A or G
  MOD_RES (23), (24), (25), (26): Xaa is A or G or is absent

SEQ ID NO: 71307 - protein, 39 aa, Artificial Sequence; identical to SEQ ID NO: 9066
  GFR-binding peptide
  MOD_RES (1), (2), (36), (38): Xaa is C or S
  MOD_RES (16), (17), (18), (19), (20): Xaa is A or G
  MOD_RES (21), (22), (23), (24): Xaa is A or G or is absent

SEQ ID NO: 71308 - protein, 30 aa, Artificial Sequence; identical to SEQ ID NO: 57457
  GFR-binding peptide

SEQ ID NO: 71309 - protein, 41 aa, Artificial Sequence; identical to SEQ ID NO: 9067
  GFR-binding peptide
  MOD_RES (5), (6), (40): Xaa is C or S
  MOD_RES (20), (21), (22), (23), (24): Xaa is A or G
  MOD_RES (25), (26), (27), (28): Xaa is A or G or is absent

SEQ ID NO: 71310 - protein, 35 aa, Artificial Sequence; identical to SEQ ID NO: 9068
  GFR-binding peptide
  MOD_RES (3), (4): Xaa is C or S

SEQ ID NO: 71311 - protein, 39 aa, Artificial Sequence
  GFR-binding peptide
  MOD_RES (3), (4), (37), (39): Xaa is C or S
  MOD_RES (18), (19), (20), (21), (22): Xaa is A or G
  MOD_RES (23), (24), (25), (26): Xaa is A or G or is absent
SPXXVPQDLSPINILYFXXXXXXXXXYGKIPMVVKSXKX

SEQ ID NO: 71312 - protein, 35 aa, Artificial Sequence; identical to SEQ ID NO: 9072
  GFR-binding peptide
  MOD_RES (1), (35): Xaa is C or S
  MOD_RES (15), (16), (17), (18), (19): Xaa is A or G
  MOD_RES (20), (21), (22), (23): Xaa is A or G or is absent

SEQ ID NO: 71313 - protein, 39 aa, Artificial Sequence
  GFR-binding peptide
  MOD_RES (4), (5), (38): Xaa is C or S
  MOD_RES (19), (20), (21), (22), (23): Xaa is A or G
  MOD_RES (24), (25), (26), (27): Xaa is A or G or is absent
ASPXXVSQDLSPINILYFXXXXXXXXXYGKIPMIVKSXK

SEQ ID NO: 71314 - protein, 36 aa, Artificial Sequence
  GFR-binding peptide
  MOD_RES (2), (3), (36): Xaa is C or S
  MOD_RES (17), (18), (19), (20), (21): Xaa is A or G
  MOD_RES (22), (23), (24), (25): Xaa is A or G or is absent
PXXVPQDLSPINILYFXXXXXXXXXYGKIPMVVKSX

SEQ ID NO: 71315 - protein, 40 aa, Artificial Sequence; identical to SEQ ID NO: 57462
  GFR-binding peptide
  MOD_RES (5), (6), (39): Xaa is C or S
  MOD_RES (20), (21), (22), (23), (24): Xaa is A or G
  MOD_RES (25), (26), (27), (28): Xaa is A or G or is absent

SEQ ID NO: 71316 - protein, 37 aa, Artificial Sequence; identical to SEQ ID NO: 32559
  GFR-binding peptide
  MOD_RES (1), (2), (36): Xaa is C or S
  MOD_RES (16), (17), (18), (19), (20): Xaa is A or G
  MOD_RES (21), (22), (23), (24): Xaa is A or G or is absent

SEQ ID NO: 71317 - protein, 36 aa, Artificial Sequence; identical to SEQ ID NO: 32560
  GFR-binding peptide
  MOD_RES (4), (5): Xaa is C or S

SEQ ID NO: 71318 - protein, 39 aa, Artificial Sequence; identical to SEQ ID NO: 9073
  GFR-binding peptide
  MOD_RES (4), (5), (36), (38): Xaa is C or S

SEQ ID NO: 71319 - protein, 39 aa, Artificial Sequence
  GFR-binding peptide
  MOD_RES (6), (7), (39): Xaa is C or S
KASKAXXVPTKLSATSILYYDKGVVTYLRKHRGMAVSEX

SEQ ID NO: 71320 - protein, 35 aa, Artificial Sequence; identical to SEQ ID NO: 30460
  GFR-binding peptide
  MOD_RES (1), (2): Xaa is C or S
  MOD_RES (16), (17), (18), (19), (20): Xaa is A or G
  MOD_RES (21), (22), (23), (24): Xaa is A or G or is absent

SEQ ID NO: 71321 - protein, 31 aa, Artificial Sequence; identical to SEQ ID NO: 9080
  GFR-binding peptide
  MOD_RES (1), (1): Xaa is C or S

SEQ ID NO: 71322 - protein, 34 aa, Artificial Sequence; identical to SEQ ID NO: 9084
  GFR-binding peptide
  MOD_RES (31), (33): Xaa is C or S

SEQ ID NO: 71323 - protein, 35 aa, Artificial Sequence; identical to SEQ ID NO: 32565
  GFR-binding peptide
  MOD_RES (2), (3): Xaa is C or S
  MOD_RES (17), (18), (19), (20), (21): Xaa is A or G
  MOD_RES (22), (23), (24), (25): Xaa is A or G or is absent

SEQ ID NO: 71324 - protein, 40 aa, Artificial Sequence
  GFR-binding peptide
  MOD_RES (2), (3), (37), (39): Xaa is C or S
  MOD_RES (17), (18), (19), (20), (21): Xaa is A or G
  MOD_RES (22), (23), (24), (25): Xaa is A or G or is absent
PXXVPEKMSPINILYFXXXXXXXXXYGKIPNMTVESXAXR

SEQ ID NO: 71325 - protein, 39 aa, Artificial Sequence; identical to SEQ ID NO: 9088
  GFR-binding peptide
  MOD_RES (4), (5), (37), (39): Xaa is C or S

SEQ ID NO: 71326 - protein, 42 aa, Artificial Sequence; identical to SEQ ID NO: 32566
  GFR-binding peptide
  MOD_RES (6), (7), (39), (41): Xaa is C or S

SEQ ID NO: 71327 - protein, 36 aa, Artificial Sequence; identical to SEQ ID NO: 9090
  GFR-binding peptide
  MOD_RES (35), (35): Xaa is C or S
  MOD_RES (14), (15), (16), (17), (18): Xaa is A or G
  MOD_RES (19), (20), (21), (22): Xaa is A or G or is absent

SEQ ID NO: 71328 - protein, 33 aa, Artificial Sequence; identical to SEQ ID NO: 9091
  GFR-binding peptide
  MOD_RES (1), (1): Xaa is C or S
  MOD_RES (15), (16), (17), (18), (19): Xaa is A or G
  MOD_RES (20), (21), (22), (23): Xaa is A or G or is absent

SEQ ID NO: 71329 - protein, 39 aa, Artificial Sequence
  GFR-binding peptide
  MOD_RES (4), (5), (36), (38): Xaa is C or S
PSTXXAPVKTEPISMLYLDNGRVLLKFKYEMIVEEXGXL

SEQ ID NO: 71330 - protein, 35 aa, Artificial Sequence; identical to SEQ ID NO: 57483
  GFR-binding peptide
  MOD_RES (2), (3): Xaa is C or S
  MOD_RES (17), (18), (19), (20), (21): Xaa is A or G
  MOD_RES (22), (23), (24), (25): Xaa is A or G or is absent

SEQ ID NO: 71331 - protein, 33 aa, Artificial Sequence; identical to SEQ ID NO: 9094
  GFR-binding peptide
  MOD_RES (1), (1): Xaa is C or S
  MOD_RES (15), (16), (17), (18), (19): Xaa is A or G
  MOD_RES (20), (21), (22), (23): Xaa is A or G or is absent

SEQ ID NO: 71332 - protein, 40 aa, Artificial Sequence
  GFR-binding peptide
  MOD_RES (4), (5), (37), (39): Xaa is C or S
PPTXXVPTRLEPISILYLDSANNVVKFKYEDMVVESXGXR

SEQ ID NO: 71333 - protein, 32 aa, Artificial Sequence
  GFR-binding peptide
  MOD_RES (32), (32): Xaa is C or S
VPEKMNAISILYFDENKNVVLKKYRNMTVESX

SEQ ID NO: 71334 - protein, 41 aa, Artificial Sequence; identical to SEQ ID NO: 30472
  GFR-binding peptide
  MOD_RES (4), (5), (39), (41): Xaa is C or S
  MOD_RES (19), (20), (21), (22), (23): Xaa is A or G
  MOD_RES (24), (25), (26), (27): Xaa is A or G or is absent

SEQ ID NO: 71335 - protein, 33 aa, Artificial Sequence; identical to SEQ ID NO: 16389
  GFR-binding peptide
  MOD_RES (14), (15), (16), (17), (18): Xaa is A or G
  MOD_RES (19), (20), (21), (22): Xaa is A or G or is absent

SEQ ID NO: 71336 - protein, 39 aa, Artificial Sequence; identical to SEQ ID NO: 30477
  GFR-binding peptide
  MOD_RES (6), (7): Xaa is C or S
  MOD_RES (21), (22), (23), (24), (25): Xaa is A or G
  MOD_RES (26), (27), (28), (29): Xaa is A or G or is absent

SEQ ID NO: 71337 - protein, 33 aa, Artificial Sequence; identical to SEQ ID NO: 9107
  GFR-binding peptide
  MOD_RES (14), (15), (16), (17), (18): Xaa is A or G
  MOD_RES (19), (20), (21), (22): Xaa is A or G or is absent

SEQ ID NO: 71338 - protein, 34 aa, Artificial Sequence
  GFR-binding peptide
  MOD_RES (1), (32), (34): Xaa is C or S
XVPQDLSPINILYFVGRTPKVYGKIPMVVKSXKX

SEQ ID NO: 71339 - protein, 31 aa, Artificial Sequence; identical to SEQ ID NO: 9111
  GFR-binding peptide
  MOD_RES (31), (31): Xaa is C or S

SEQ ID NO: 71340 - protein, 37 aa, Artificial Sequence; identical to SEQ ID NO: 30482
  GFR-binding peptide
  MOD_RES (2), (34), (36): Xaa is C or S

SEQ ID NO: 71341 - protein, 39 aa, Artificial Sequence
  GFR-binding peptide
  MOD_RES (6), (7), (38): Xaa is C or S
ASASPXXVSQDLSPINILYFIGKTPKIYGKIPMIVKSXK

SEQ ID NO: 71342 - protein, 42 aa, Artificial Sequence; identical to SEQ ID NO: 32593
  GFR-binding peptide
  MOD_RES (5), (6), (40), (42): Xaa is C or S
  MOD_RES (20), (21), (22), (23), (24): Xaa is A or G
  MOD_RES (25), (26), (27), (28): Xaa is A or G or is absent

SEQ ID NO: 71343 - protein, 36 aa, Artificial Sequence; identical to SEQ ID NO: 30483
  GFR-binding peptide
  MOD_RES (1), (35): Xaa is C or S
  MOD_RES (15), (16), (17), (18), (19): Xaa is A or G
  MOD_RES (20), (21), (22), (23): Xaa is A or G or is absent

SEQ ID NO: 71344 - protein, 43 aa, Artificial Sequence; identical to SEQ ID NO: 32596
  GFR-binding peptide
  MOD_RES (5), (6), (40), (42): Xaa is C or S
  MOD_RES (20), (21), (22), (23), (24): Xaa is A or G
  MOD_RES (25), (26), (27), (28): Xaa is A or G or is absent

SEQ ID NO: 71345 - protein, 35 aa, Artificial Sequence; identical to SEQ ID NO: 30486
  GFR-binding peptide
  MOD_RES (3), (4): Xaa is C or S

SEQ ID NO: 71346 - protein, 38 aa, Artificial Sequence; identical to SEQ ID NO: 57505
  GFR-binding peptide
  MOD_RES (3), (4), (35), (37): Xaa is C or S

SEQ ID NO: 71347 - protein, 33 aa, Artificial Sequence; identical to SEQ ID NO: 32600
  GFR-binding peptide
  MOD_RES (1), (1): Xaa is C or S
  MOD_RES (15), (16), (17), (18), (19): Xaa is A or G
  MOD_RES (20), (21), (22), (23): Xaa is A or G or is absent

SEQ ID NO: 71348 - protein, 41 aa, Artificial Sequence; identical to SEQ ID NO: 32602
  GFR-binding peptide
  MOD_RES (6), (40): Xaa is C or S
  MOD_RES (20), (21), (22), (23), (24): Xaa is A or G
  MOD_RES (25), (26), (27), (28): Xaa is A or G or is absent

SEQ ID NO: 71349 - protein, 34 aa, Artificial Sequence; identical to SEQ ID NO: 30489
  GFR-binding peptide
  MOD_RES (1), (2), (34): Xaa is C or S

SEQ ID NO: 71350 - protein, 38 aa, Artificial Sequence; identical to SEQ ID NO: 9119
  GFR-binding peptide
  MOD_RES (1), (36), (38): Xaa is C or S
  MOD_RES (15), (16), (17), (18), (19): Xaa is A or G
  MOD_RES (20), (21), (22), (23): Xaa is A or G or is absent

SEQ ID NO: 71351 - protein, 40 aa, Artificial Sequence; identical to SEQ ID NO: 32604
  GFR-binding peptide
  MOD_RES (3), (4), (38), (40): Xaa is C or S
  MOD_RES (18), (19), (20), (21), (22): Xaa is A or G
  MOD_RES (23), (24), (25), (26): Xaa is A or G or is absent

SEQ ID NO: 71352 - protein, 37 aa, Artificial Sequence; identical to SEQ ID NO: 9123
  GFR-binding peptide
  MOD_RES (6), (7): Xaa is C or S

SEQ ID NO: 71353 - protein, 37 aa, Artificial Sequence
  GFR-binding peptide
  MOD_RES (1), (2), (34), (36): Xaa is C or S
XXVPTRLSATSILYYDSANNVVLRKHRDMVVESXGXR

SEQ ID NO: 71354 - protein, 36 aa, Artificial Sequence; identical to SEQ ID NO: 30493
  GFR-binding peptide
  MOD_RES (1), (2), (36): Xaa is C or S
  MOD_RES (16), (17), (18), (19), (20): Xaa is A or G
  MOD_RES (21), (22), (23), (24): Xaa is A or G or is absent

SEQ ID NO: 71355 - protein, 42 aa, Artificial Sequence
  GFR-binding peptide
  MOD_RES (4), (5), (39), (41): Xaa is C or S
  MOD_RES (19), (20), (21), (22), (23): Xaa is A or G
  MOD_RES (24), (25), (26), (27): Xaa is A or G or is absent
AGPXXTPTKMSATSMLYYXXXXXXXXXLRKHRGMVVDRXGXS

SEQ ID NO: 71356 - protein, 40 aa, Artificial Sequence; identical to SEQ ID NO: 16402
  GFR-binding peptide
  MOD_RES (6), (7): Xaa is C or S
  MOD_RES (21), (22), (23), (24), (25): Xaa is A or G
  MOD_RES (26), (27), (28), (29): Xaa is A or G or is absent

SEQ ID NO: 71357 - protein, 37 aa, Artificial Sequence; identical to SEQ ID NO: 30494
  GFR-binding peptide
  MOD_RES (6), (6): Xaa is C or S

SEQ ID NO: 71358 - protein, 33 aa, Artificial Sequence; identical to SEQ ID NO: 32606
  GFR-binding peptide
  MOD_RES (2), (3): Xaa is C or S

SEQ ID NO: 71359 - protein, 39 aa, Artificial Sequence; identical to SEQ ID NO: 9125
  GFR-binding peptide
  MOD_RES (3), (4), (39): Xaa is C or S
  MOD_RES (18), (19), (20), (21), (22): Xaa is A or G
  MOD_RES (23), (24), (25), (26): Xaa is A or G or is absent

SEQ ID NO: 71360 - protein, 38 aa, Artificial Sequence
  GFR-binding peptide
  MOD_RES (2), (3), (35), (37): Xaa is C or S
PXXVPEKMSPISILYKDENKNVVLKYHYNMTVESXAXR

SEQ ID NO: 71361 - protein, 38 aa, Artificial Sequence; identical to SEQ ID NO: 32609
  GFR-binding peptide
  MOD_RES (4), (38): Xaa is C or S
  MOD_RES (18), (19), (20), (21), (22): Xaa is A or G
  MOD_RES (23), (24), (25), (26): Xaa is A or G or is absent

SEQ ID NO: 71362 - protein, 35 aa, Artificial Sequence; identical to SEQ ID NO: 30498
  GFR-binding peptide
  MOD_RES (3), (4): Xaa is C or S

SEQ ID NO: 71363 - protein, 38 aa, Artificial Sequence; identical to SEQ ID NO: 32610
  GFR-binding peptide
  MOD_RES (3), (35), (37): Xaa is C or S

SEQ ID NO: 71364 - protein, 32 aa, Artificial Sequence; identical to SEQ ID NO: 9130
  GFR-binding peptide
  MOD_RES (1), (2): Xaa is C or S

SEQ ID NO: 71365 - protein, 42 aa, Artificial Sequence; identical to SEQ ID NO: 32611
  GFR-binding peptide
  MOD_RES (6), (7), (41): Xaa is C or S
  MOD_RES (21), (22), (23), (24), (25): Xaa is A or G
  MOD_RES (26), (27), (28), (29): Xaa is A or G or is absent

SEQ ID NO: 71366 - protein, 39 aa, Artificial Sequence
  GFR-binding peptide
  MOD_RES (2), (3), (37), (39): Xaa is C or S
  MOD_RES (17), (18), (19), (20), (21): Xaa is A or G
  MOD_RES (22), (23), (24), (25): Xaa is A or G or is absent
PXXVPEKMNAISILYFXXXXXXXXXLKKYRNMTVESXAX

SEQ ID NO: 71367 - protein, 39 aa, Artificial Sequence; identical to SEQ ID NO: 9138
  GFR-binding peptide
  MOD_RES (4), (5), (38): Xaa is C or S
  MOD_RES (19), (20), (21), (22), (23): Xaa is A or G
  MOD_RES (24), (25), (26), (27): Xaa is A or G or is absent

SEQ ID NO: 71368 - protein, 38 aa, Artificial Sequence; identical to SEQ ID NO: 9142
  GFR-binding peptide
  MOD_RES (4), (5), (37): Xaa is C or S

SEQ ID NO: 71369 - protein, 36 aa, Artificial Sequence; identical to SEQ ID NO: 9143
  GFR-binding peptide
  MOD_RES (5), (6): Xaa is C or S

SEQ ID NO: 71370 - protein, 33 aa, Artificial Sequence
  GFR-binding peptide
  MOD_RES (32), (32): Xaa is C or S
VPEKMSPINILYFDENKNVVYGKIPNMTVESXA

SEQ ID NO: 71371 - protein, 36 aa, Artificial Sequence; identical to SEQ ID NO: 9144
  GFR-binding peptide
  MOD_RES (4), (5): Xaa is C or S

SEQ ID NO: 71372 - protein, 37 aa, Artificial Sequence
  GFR-binding peptide
  MOD_RES (5), (6), (37): Xaa is C or S
VPSTXXAPVKTEPISMLYLDNGRVLLKFKYEMIVEEX

SEQ ID NO: 71373 - protein, 40 aa, Artificial Sequence
  GFR-binding peptide
  MOD_RES (4), (5), (38), (40): Xaa is C or S
  MOD_RES (19), (20), (21), (22), (23): Xaa is A or G
  MOD_RES (24), (25), (26), (27): Xaa is A or G or is absent
ASPXXVPQDLSPINILYFXXXXXXXXXYGKIPMVVKSXKX

SEQ ID NO: 71374 - protein, 34 aa, Artificial Sequence; identical to SEQ ID NO: 9150
  GFR-binding peptide
  MOD_RES (3), (4): Xaa is C or S

SEQ ID NO: 71375 - protein, 39 aa, Artificial Sequence; identical to SEQ ID NO: 9155
  GFR-binding peptide
  MOD_RES (4), (5), (39): Xaa is C or S
  MOD_RES (19), (20), (21), (22), (23): Xaa is A or G
  MOD_RES (24), (25), (26), (27): Xaa is A or G or is absent

SEQ ID NO: 71376 - protein, 34 aa, Artificial Sequence; identical to SEQ ID NO: 30515
  GFR-binding peptide
  MOD_RES (1), (33): Xaa is C or S

SEQ ID NO: 71377 - protein, 33 aa, Artificial Sequence; identical to SEQ ID NO: 32637
  GFR-binding peptide
  MOD_RES (1), (33): Xaa is C or S

SEQ ID NO: 71378 - protein, 40 aa, Artificial Sequence; identical to SEQ ID NO: 9156
  GFR-binding peptide
  MOD_RES (2), (3), (38), (40): Xaa is C or S
  MOD_RES (17), (18), (19), (20), (21): Xaa is A or G
  MOD_RES (22), (23), (24), (25): Xaa is A or G or is absent

SEQ ID NO: 71379 - protein, 35 aa, Artificial Sequence; identical to SEQ ID NO: 32639
  GFR-binding peptide
  MOD_RES (2), (3), (35): Xaa is C or S

SEQ ID NO: 71380 - protein, 35 aa, Artificial Sequence; identical to SEQ ID NO: 9157
  GFR-binding peptide
  MOD_RES (34), (34): Xaa is C or S
  MOD_RES (14), (15), (16), (17), (18): Xaa is A or G
  MOD_RES (19), (20), (21), (22): Xaa is A or G or is absent

SEQ ID NO: 71381 - protein, 34 aa, Artificial Sequence; identical to SEQ ID NO: 30519
  GFR-binding peptide
  MOD_RES (2), (3), (34): Xaa is C or S

SEQ ID NO: 71382 - protein, 36 aa, Artificial Sequence
  GFR-binding peptide
  MOD_RES (1), (34), (36): Xaa is C or S
  MOD_RES (15), (16), (17), (18), (19): Xaa is A or G
  MOD_RES (20), (21), (22), (23): Xaa is A or G or is absent
XAPVKTEPISMLYLXXXXXXXXXKFKYEMIVEEXGX

SEQ ID NO: 71383 - protein, 38 aa, Artificial Sequence; identical to SEQ ID NO: 30520
  GFR-binding peptide
  MOD_RES (1), (2), (35), (37): Xaa is C or S
  MOD_RES (16), (17), (18), (19), (20): Xaa is A or G
  MOD_RES (21), (22), (23), (24): Xaa is A or G or is absent

SEQ ID NO: 71384 - protein, 43 aa, Artificial Sequence; identical to SEQ ID NO: 9160
  GFR-binding peptide
  MOD_RES (5), (6), (41), (43): Xaa is C or S
  MOD_RES (20), (21), (22), (23), (24): Xaa is A or G
  MOD_RES (25), (26), (27), (28): Xaa is A or G or is absent

SEQ ID NO: 71385 - protein, 40 aa, Artificial Sequence; identical to SEQ ID NO: 9161
  GFR-binding peptide
  MOD_RES (4), (5), (38), (40): Xaa is C or S
  MOD_RES (19), (20), (21), (22), (23): Xaa is A or G
  MOD_RES (24), (25), (26), (27): Xaa is A or G or is absent

SEQ ID NO: 71386 - protein, 40 aa, Artificial Sequence
  GFR-binding peptide
  MOD_RES (4), (5), (39): Xaa is C or S
  MOD_RES (19), (20), (21), (22), (23): Xaa is A or G
  MOD_RES (24), (25), (26), (27): Xaa is A or G or is absent
SKAXXVPTKLSATSILYYXXXXXXXXXLRKHRGMAVSEXG

SEQ ID NO: 71387 - protein, 41 aa, Artificial Sequence; identical to SEQ ID NO: 9163
  GFR-binding peptide
  MOD_RES (6), (7), (41): Xaa is C or S
  MOD_RES (21), (22), (23), (24), (25): Xaa is A or G
  MOD_RES (26), (27), (28), (29): Xaa is A or G or is absent

SEQ ID NO: 71388 - protein, 34 aa, Artificial Sequence; identical to SEQ ID NO: 9164
  GFR-binding peptide
  MOD_RES (2), (3): Xaa is C or S

SEQ ID NO: 71389 - protein, 38 aa, Artificial Sequence; identical to SEQ ID NO: 30529
  GFR-binding peptide
  MOD_RES (4), (38): Xaa is C or S
  MOD_RES (18), (19), (20), (21), (22): Xaa is A or G
  MOD_RES (23), (24), (25), (26): Xaa is A or G or is absent

SEQ ID NO: 71390 - protein, 33 aa, Artificial Sequence; identical to SEQ ID NO: 30531
  GFR-binding peptide
  MOD_RES (2), (3): Xaa is C or S

SEQ ID NO: 71391 - protein, 39 aa, Artificial Sequence; identical to SEQ ID NO: 32649
  GFR-binding peptide
  MOD_RES (1), (2), (36), (38): Xaa is C or S
  MOD_RES (16), (17), (18), (19), (20): Xaa is A or G
  MOD_RES (21), (22), (23), (24): Xaa is A or G or is absent

SEQ ID NO: 71392 - protein, 34 aa, Artificial Sequence
  GFR-binding peptide
  MOD_RES (1), (34): Xaa is C or S
  MOD_RES (15), (16), (17), (18), (19): Xaa is A or G
  MOD_RES (20), (21), (22), (23): Xaa is A or G or is absent
XVSQDLSPINILYFXXXXXXXXXYGKIPMIVKSX

SEQ ID NO: 71393 - protein, 32 aa, Artificial Sequence
  GFR-binding peptide
  MOD_RES (1), (2): Xaa is C or S
XXVPARLSATSILYYDAANNVVLRKHRDMVVE

SEQ ID NO: 71394 - protein, 31 aa, Artificial Sequence
  GFR-binding peptide
  MOD_RES (1), (1): Xaa is C or S
XAPVKTSPISMLYKDNGRVLLLKYHYMIVEE

SEQ ID NO: 71395 - protein, 32 aa, Artificial Sequence; identical to SEQ ID NO: 57558
  GFR-binding peptide
  MOD_RES (1), (2): Xaa is C or S

SEQ ID NO: 71396 - protein, 39 aa, Artificial Sequence; identical to SEQ ID NO: 57560
  GFR-binding peptide
  MOD_RES (4), (5), (37), (39): Xaa is C or S

SEQ ID NO: 71397 - protein, 37 aa, Artificial Sequence
  GFR-binding peptide
  MOD_RES (3), (4), (36): Xaa is C or S
EPXXVPEKMSPINILYFDENKNVVYGKIPNMTVESXA

SEQ ID NO: 71398 - protein, 41 aa, Artificial Sequence; identical to SEQ ID NO: 9173
  GFR-binding peptide
  MOD_RES (5), (6), (38), (40): Xaa is C or S

SEQ ID NO: 71399 - protein, 41 aa, Artificial Sequence
  GFR-binding peptide
  MOD_RES (4), (5), (39), (41): Xaa is C or S
  MOD_RES (19), (20), (21), (22), (23): Xaa is A or G
  MOD_RES (24), (25), (26), (27): Xaa is A or G or is absent
AGPXXTPTKMSPISMLYKXXXXXXXXXLKYHYGMVVDRXGX

SEQ ID NO: 71400 - protein, 32 aa, Artificial Sequence; identical to SEQ ID NO: 30539
  GFR-binding peptide
  MOD_RES (14), (15), (16), (17), (18): Xaa is A or G
  MOD_RES (19), (20), (21), (22): Xaa is A or G or is absent

SEQ ID NO: 71401 - protein, 36 aa, Artificial Sequence
  GFR-binding peptide
  MOD_RES (3), (4): Xaa is C or S
  MOD_RES (18), (19), (20), (21), (22): Xaa is A or G
  MOD_RES (23), (24), (25), (26): Xaa is A or G or is absent
SPXXVSQDLSPINILYFXXXXXXXXXYGKIPMIVKS

SEQ ID NO: 71402 - protein, 35 aa, Artificial Sequence; identical to SEQ ID NO: 9175
  GFR-binding peptide
  MOD_RES (1), (34): Xaa is C or S
  MOD_RES (15), (16), (17), (18), (19): Xaa is A or G
  MOD_RES (20), (21), (22), (23): Xaa is A or G or is absent

SEQ ID NO: 71403 - protein, 41 aa, Artificial Sequence; identical to SEQ ID NO: 32655
  GFR-binding peptide
  MOD_RES (5), (6), (39), (41): Xaa is C or S

SEQ ID NO: 71404 - protein, 41 aa, Artificial Sequence; identical to SEQ ID NO: 32658
  GFR-binding peptide
  MOD_RES (5), (6), (40): Xaa is C or S
  MOD_RES (20), (21), (22), (23), (24): Xaa is A or G
  MOD_RES (25), (26), (27), (28): Xaa is A or G or is absent

SEQ ID NO: 71405 - protein, 34 aa, Artificial Sequence; identical to SEQ ID NO: 32660
  GFR-binding peptide
  MOD_RES (1), (2): Xaa is C or S
  MOD_RES (16), (17), (18), (19), (20): Xaa is A or G
  MOD_RES (21), (22), (23), (24): Xaa is A or G or is absent

SEQ ID NO: 71406 - protein, 32 aa, Artificial Sequence; identical to SEQ ID NO: 30542
  GFR-binding peptide
  MOD_RES (14), (15), (16), (17), (18): Xaa is A or G
  MOD_RES (19), (20), (21), (22): Xaa is A or G or is absent

SEQ ID NO: 71407 - protein, 36 aa, Artificial Sequence; identical to SEQ ID NO: 30545
  GFR-binding peptide
  MOD_RES (2), (3), (34), (36): Xaa is C or S

SEQ ID NO: 71408 - protein, 37 aa, Artificial Sequence
  GFR-binding peptide
  MOD_RES (4), (5): Xaa is C or S
  MOD_RES (19), (20), (21), (22), (23): Xaa is A or G
  MOD_RES (24), (25), (26), (27): Xaa is A or G or is absent
PEPXXVPEKMSPINILYFXXXXXXXXXYGKIPNMTVE

SEQ ID NO: 71409 - protein, 38 aa, Artificial Sequence
  GFR-binding peptide
  MOD_RES (1), (2), (36), (38): Xaa is C or S
  MOD_RES (16), (17), (18), (19), (20): Xaa is A or G
  MOD_RES (21), (22), (23), (24): Xaa is A or G or is absent
XXVPTKLSATSILYYXXXXXXXXXLRKHRGMAVSEXGX

SEQ ID NO: 71410 - protein, 38 aa, Artificial Sequence; identical to SEQ ID NO: 16459
  GFR-binding peptide
  MOD_RES (4), (5), (37): Xaa is C or S

SEQ ID NO: 71411 - protein, 42 aa, Artificial Sequence; identical to SEQ ID NO: 30547
  GFR-binding peptide
  MOD_RES (7), (41): Xaa is C or S
  MOD_RES (21), (22), (23), (24), (25): Xaa is A or G
  MOD_RES (26), (27), (28), (29): Xaa is A or G or is absent

SEQ ID NO: 71412 - protein, 31 aa, Artificial Sequence; identical to SEQ ID NO: 30548
  GFR-binding peptide
  MOD_RES (31), (31): Xaa is C or S

SEQ ID NO: 71413 - protein, 32 aa, Artificial Sequence; identical to SEQ ID NO: 9180
  GFR-binding peptide
  MOD_RES (1), (2): Xaa is C or S

SEQ ID NO: 71414 - protein, 33 aa, Artificial Sequence; identical to SEQ ID NO: 30550
  GFR-binding peptide
  MOD_RES (1), (2), (33): Xaa is C or S

SEQ ID NO: 71415 - protein, 35 aa, Artificial Sequence; identical to SEQ ID NO: 9181
  GFR-binding peptide
  MOD_RES (2), (3): Xaa is C or S
  MOD_RES (17), (18), (19), (20), (21): Xaa is A or G
  MOD_RES (22), (23), (24), (25): Xaa is A or G or is absent

SEQ ID NO: 71416 - protein, 34 aa, Artificial Sequence; identical to SEQ ID NO: 32669
  GFR-binding peptide
  MOD_RES (1), (2): Xaa is C or S
  MOD_RES (16), (17), (18), (19), (20): Xaa is A or G
  MOD_RES (21), (22), (23), (24): Xaa is A or G or is absent

SEQ ID NO: 71417 - protein, 32 aa, Artificial Sequence; identical to SEQ ID NO: 9185
  GFR-binding peptide
  MOD_RES (1), (32): Xaa is C or S

SEQ ID NO: 71418 - protein, 38 aa, Artificial Sequence
  GFR-binding peptide
  MOD_RES (3), (4), (36), (38): Xaa is C or S
PTXXVPTRLSPISILYKDSANNVVLKYHYDMVVESXGX

SEQ ID NO: 71419 - protein, 32 aa, Artificial Sequence; identical to SEQ ID NO: 32673
  GFR-binding peptide
  MOD_RES (1), (1): Xaa is C or S

SEQ ID NO: 71420 - protein, 41 aa, Artificial Sequence; identical to SEQ ID NO: 30557
  GFR-binding peptide
  MOD_RES (4), (5), (38), (40): Xaa is C or S
  MOD_RES (19), (20), (21), (22), (23): Xaa is A or G
  MOD_RES (24), (25), (26), (27): Xaa is A or G or is absent

SEQ ID NO: 71421 - protein, 38 aa, Artificial Sequence; identical to SEQ ID NO: 30558
  GFR-binding peptide
  MOD_RES (4), (5): Xaa is C or S
  MOD_RES (19), (20), (21), (22), (23): Xaa is A or G
  MOD_RES (24), (25), (26), (27): Xaa is A or G or is absent

SEQ ID NO: 71422 - protein, 36 aa, Artificial Sequence; identical to SEQ ID NO: 32683
  GFR-binding peptide
  MOD_RES (35), (35): Xaa is C or S
  MOD_RES (14), (15), (16), (17), (18): Xaa is A or G
  MOD_RES (19), (20), (21), (22): Xaa is A or G or is absent

SEQ ID NO: 71423 - protein, 42 aa, Artificial Sequence; identical to SEQ ID NO: 9190
  GFR-binding peptide
  MOD_RES (5), (6), (40), (42): Xaa is C or S
  MOD_RES (20), (21), (22), (23), (24): Xaa is A or G
  MOD_RES (25), (26), (27), (28): Xaa is A or G or is absent

SEQ ID NO: 71424 - protein, 35 aa, Artificial Sequence
  GFR-binding peptide
  MOD_RES (1), (2): Xaa is C or S
  MOD_RES (16), (17), (18), (19), (20): Xaa is A or G
  MOD_RES (21), (22), (23), (24): Xaa is A or G or is absent
XXVPEKMSPINILYFXXXXXXXXXYGKIPNMTVES

SEQ ID NO: 71425 - protein, 35 aa, Artificial Sequence; identical to SEQ ID NO: 9191
  GFR-binding peptide
  MOD_RES (34), (34): Xaa is C or S
  MOD_RES (14), (15), (16), (17), (18): Xaa is A or G
  MOD_RES (19), (20), (21), (22): Xaa is A or G or is absent

SEQ ID NO: 71426 - protein, 35 aa, Artificial Sequence; identical to SEQ ID NO: 9193
  GFR-binding peptide
  MOD_RES (4), (5): Xaa is C or S

SEQ ID NO: 71427 - protein, 39 aa, Artificial Sequence; identical to SEQ ID NO: 32690
  GFR-binding peptide
  MOD_RES (6), (7): Xaa is C or S
  MOD_RES (21), (22), (23), (24), (25): Xaa is A or G
  MOD_RES (26), (27), (28), (29): Xaa is A or G or is absent

SEQ ID NO: 71428 - protein, 39 aa, Artificial Sequence; identical to SEQ ID NO: 9200
  GFR-binding peptide
  MOD_RES (6), (7): Xaa is C or S
  MOD_RES (21), (22), (23), (24), (25): Xaa is A or G
  MOD_RES (26), (27), (28), (29): Xaa is A or G or is absent

SEQ ID NO: 71429 - protein, 41 aa, Artificial Sequence; identical to SEQ ID NO: 9203
  GFR-binding peptide
  MOD_RES (4), (38), (40): Xaa is C or S
  MOD_RES (18), (19), (20), (21), (22): Xaa is A or G
  MOD_RES (23), (24), (25), (26): Xaa is A or G or is absent

SEQ ID NO: 71430 - protein, 37 aa, Artificial Sequence; identical to SEQ ID NO: 30576
  GFR-binding peptide
  MOD_RES (34), (36): Xaa is C or S
  MOD_RES (14), (15), (16), (17), (18): Xaa is A or G
  MOD_RES (19), (20), (21), (22): Xaa is A or G or is absent

SEQ ID NO: 71431 - protein, 38 aa, Artificial Sequence
  GFR-binding peptide
  MOD_RES (3), (4), (38): Xaa is C or S
  MOD_RES (18), (19), (20), (21), (22): Xaa is A or G
  MOD_RES (23), (24), (25), (26): Xaa is A or G or is absent
GPXXTPTKMSATSMLYYXXXXXXXXXLRKHRGMVVDRX

SEQ ID NO: 71432 - protein, 34 aa, Artificial Sequence; identical to SEQ ID NO: 32698
  GFR-binding peptide
  MOD_RES (1), (2), (34): Xaa is C or S

SEQ ID NO: 71433 - protein, 39 aa, Artificial Sequence
  GFR-binding peptide
  MOD_RES (2), (3), (37), (39): Xaa is C or S
  MOD_RES (17), (18), (19), (20), (21): Xaa is A or G
  MOD_RES (22), (23), (24), (25): Xaa is A or G or is absent
PXXTPTKMSATSMLYYXXXXXXXXXLRKHRGMVVDRXGX

SEQ ID NO: 71434 - protein, 37 aa, Artificial Sequence; identical to SEQ ID NO: 9206
  GFR-binding peptide
  MOD_RES (4), (5), (37): Xaa is C or S

SEQ ID NO: 71435 - protein, 36 aa, Artificial Sequence; identical to SEQ ID NO: 30581
  GFR-binding peptide
  MOD_RES (3), (4), (35): Xaa is C or S

SEQ ID NO: 71436 - protein, 37 aa, Artificial Sequence; identical to SEQ ID NO: 30582
  GFR-binding peptide
  MOD_RES (4), (5), (37): Xaa is C or S

SEQ ID NO: 71437 - protein, 35 aa, Artificial Sequence; identical to SEQ ID NO: 9208
  GFR-binding peptide
  MOD_RES (1), (35): Xaa is C or S
  MOD_RES (15), (16), (17), (18), (19): Xaa is A or G
  MOD_RES (20), (21), (22), (23): Xaa is A or G or is absent

SEQ ID NO: 71438 - protein, 37 aa, Artificial Sequence; identical to SEQ ID NO: 9209
  GFR-binding peptide
  MOD_RES (35), (37): Xaa is C or S
  MOD_RES (14), (15), (16), (17), (18): Xaa is A or G
  MOD_RES (19), (20), (21), (22): Xaa is A or G or is absent

SEQ ID NO: 71439 - protein, 42 aa, Artificial Sequence; identical to SEQ ID NO: 9210
  GFR-binding peptide
  MOD_RES (3), (4), (39), (41): Xaa is C or S
  MOD_RES (18), (19), (20), (21), (22): Xaa is A or G
  MOD_RES (23), (24), (25), (26): Xaa is A or G or is absent

SEQ ID NO: 71440 - protein, 40 aa, Artificial Sequence; identical to SEQ ID NO: 9212
  GFR-binding peptide
  MOD_RES (5), (6), (38), (40): Xaa is C or S

SEQ ID NO: 71441 - protein, 39 aa, Artificial Sequence; identical to SEQ ID NO: 32702
  GFR-binding peptide
  MOD_RES (4), (5), (39): Xaa is C or S
  MOD_RES (19), (20), (21), (22), (23): Xaa is A or G
  MOD_RES (24), (25), (26), (27): Xaa is A or G or is absent

SEQ ID NO: 71442 - protein, 37 aa, Artificial Sequence; identical to SEQ ID NO: 32703
  GFR-binding peptide
  MOD_RES (1), (2), (34), (36): Xaa is C or S

SEQ ID NO: 71443 - protein, 35 aa, Artificial Sequence
  GFR-binding peptide
  MOD_RES (1), (2), (35): Xaa is C or S
  MOD_RES (16), (17), (18), (19), (20): Xaa is A or G
  MOD_RES (21), (22), (23), (24): Xaa is A or G or is absent
XXAPVKTSATSMLYYXXXXXXXXXLRKHRMIVEEX

SEQ ID NO: 71444 - protein, 32 aa, Artificial Sequence
  GFR-binding peptide
  MOD_RES (1), (2): Xaa is C or S
XXVSQDLSPINILYFIGKTPKIYGKIPMIVKS

SEQ ID NO: 71445 - protein, 38 aa, Artificial Sequence; identical to SEQ ID NO: 9217
  GFR-binding peptide
  MOD_RES (4), (5): Xaa is C or S
  MOD_RES (19), (20), (21), (22), (23): Xaa is A or G
  MOD_RES (24), (25), (26), (27): Xaa is A or G or is absent

SEQ ID NO: 71446 - protein, 38 aa, Artificial Sequence; identical to SEQ ID NO: 32715
  GFR-binding peptide
  MOD_RES (7), (7): Xaa is C or S

SEQ ID NO: 71447 - protein, 34 aa, Artificial Sequence; identical to SEQ ID NO: 32717
  GFR-binding peptide
  MOD_RES (32), (34): Xaa is C or S

SEQ ID NO: 71448 - protein, 39 aa, Artificial Sequence; identical to SEQ ID NO: 9219
  GFR-binding peptide
  MOD_RES (2), (3), (37), (39): Xaa is C or S
  MOD_RES (17), (18), (19), (20), (21): Xaa is A or G
  MOD_RES (22), (23), (24), (25): Xaa is A or G or is absent

SEQ ID NO: 71449 - protein, 34 aa, Artificial Sequence
  GFR-binding peptide
  MOD_RES (3), (4): Xaa is C or S
SPXXVSQDLSPINILYFIGKTPKIYGKIPMIVKS

SEQ ID NO: 71450 - protein, 32 aa, Artificial Sequence
  GFR-binding peptide
  MOD_RES (32), (32): Xaa is C or S
VPTKLSATSILYYDKGVVTYLRKHRGMAVSEX

SEQ ID NO: 71451 - protein, 30 aa, Artificial Sequence
  GFR-binding peptide
TPTKMSPISMLYKNDKQQIILKYHYGMVVD

SEQ ID NO: 71452 - protein, 36 aa, Artificial Sequence; identical to SEQ ID NO: 9224
  GFR-binding peptide
  MOD_RES (1), (2): Xaa is C or S
  MOD_RES (16), (17), (18), (19), (20): Xaa is A or G
  MOD_RES (21), (22), (23), (24): Xaa is A or G or is absent

SEQ ID NO: 71453 - protein, 42 aa, Artificial Sequence; identical to SEQ ID NO: 9225
  GFR-binding peptide
  MOD_RES (5), (6), (40), (42): Xaa is C or S
  MOD_RES (20), (21), (22), (23), (24): Xaa is A or G
  MOD_RES (25), (26), (27), (28): Xaa is A or G or is absent

SEQ ID NO: 71454 - protein, 38 aa, Artificial Sequence; identical to SEQ ID NO: 9228
  GFR-binding peptide
  MOD_RES (1), (2), (36), (38): Xaa is C or S
  MOD_RES (16), (17), (18), (19), (20): Xaa is A or G
  MOD_RES (21), (22), (23), (24): Xaa is A or G or is absent

SEQ ID NO: 71455 - protein, 34 aa, Artificial Sequence; identical to SEQ ID NO: 9229
  GFR-binding peptide
  MOD_RES (2), (3), (34): Xaa is C or S

SEQ ID NO: 71456 - protein, 39 aa, Artificial Sequence; identical to SEQ ID NO: 9231
  GFR-binding peptide
  MOD_RES (1), (2), (36), (38): Xaa is C or S
  MOD_RES (16), (17), (18), (19), (20): Xaa is A or G
  MOD_RES (21), (22), (23), (24): Xaa is A or G or is absent

SEQ ID NO: 71457 - protein, 39 aa, Artificial Sequence
  GFR-binding peptide
  MOD_RES (1), (2), (36), (38): Xaa is C or S
  MOD_RES (16), (17), (18), (19), (20): Xaa is A or G
  MOD_RES (21), (22), (23), (24): Xaa is A or G or is absent
XXTPTKMSATSMLYYXXXXXXXXXLRKHRGMVVDRXGXS

SEQ ID NO: 71458 - protein, 37 aa, Artificial Sequence; identical to SEQ ID NO: 9235
  GFR-binding peptide
  MOD_RES (2), (3), (36): Xaa is C or S
  MOD_RES (17), (18), (19), (20), (21): Xaa is A or G
  MOD_RES (22), (23), (24), (25): Xaa is A or G or is absent

SEQ ID NO: 71459 - protein, 33 aa, Artificial Sequence; identical to SEQ ID NO: 32729
  GFR-binding peptide
  MOD_RES (1), (1): Xaa is C or S
  MOD_RES (15), (16), (17), (18), (19): Xaa is A or G
  MOD_RES (20), (21), (22), (23): Xaa is A or G or is absent

SEQ ID NO: 71460 - protein, 35 aa, Artificial Sequence
  GFR-binding peptide
  MOD_RES (3), (4): Xaa is C or S
PTXXVPTRLEPISILYLDSANNVVKFKYEDMVVES

SEQ ID NO: 71461 - protein, 37 aa, Artificial Sequence; identical to SEQ ID NO: 9238
  GFR-binding peptide
  MOD_RES (1), (2), (35), (37): Xaa is C or S
  MOD_RES (16), (17), (18), (19), (20): Xaa is A or G
  MOD_RES (21), (22), (23), (24): Xaa is A or G or is absent

SEQ ID NO: 71462 - protein, 33 aa, Artificial Sequence; identical to SEQ ID NO: 9239
  GFR-binding peptide
  MOD_RES (1), (33): Xaa is C or S

SEQ ID NO: 71463 - protein, 34 aa, Artificial Sequence; identical to SEQ ID NO: 57638
  GFR-binding peptide
  MOD_RES (1), (33): Xaa is C or S

SEQ ID NO: 71464 - protein, 36 aa, Artificial Sequence
  GFR-binding peptide
  MOD_RES (1), (35): Xaa is C or S
  MOD_RES (15), (16), (17), (18), (19): Xaa is A or G
  MOD_RES (20), (21), (22), (23): Xaa is A or G or is absent
XVPEKMSPISILYKXXXXXXXXXLKYHYNMTVESXA

SEQ ID NO: 71465 - protein, 37 aa, Artificial Sequence; identical to SEQ ID NO: 32734
  GFR-binding peptide
  MOD_RES (1), (35), (37): Xaa is C or S
  MOD_RES (15), (16), (17), (18), (19): Xaa is A or G
  MOD_RES (20), (21), (22), (23): Xaa is A or G or is absent

SEQ ID NO: 71466 - protein, 33 aa, Artificial Sequence
  GFR-binding peptide
  MOD_RES (32), (32): Xaa is C or S
TPTKMEPISMLYLNDKQQIIKFKYEGMVVDRXG

SEQ ID NO: 71467 - protein, 42 aa, Artificial Sequence; identical to SEQ ID NO: 30613
  GFR-binding peptide
  MOD_RES (7), (39), (41): Xaa is C or S

SEQ ID NO: 71468 - protein, 34 aa, Artificial Sequence; identical to SEQ ID NO: 16520
  GFR-binding peptide
  MOD_RES (1), (33): Xaa is C or S

SEQ ID NO: 71469 - protein, 41 aa, Artificial Sequence; identical to SEQ ID NO: 9245
  GFR-binding peptide
  MOD_RES (3), (4), (39), (41): Xaa is C or S
  MOD_RES (18), (19), (20), (21), (22): Xaa is A or G
  MOD_RES (23), (24), (25), (26): Xaa is A or G or is absent

SEQ ID NO: 71470 - protein, 40 aa, Artificial Sequence; identical to SEQ ID NO: 9246
  GFR-binding peptide
  MOD_RES (4), (5), (37), (39): Xaa is C or S

SEQ ID NO: 71471 - protein, 33 aa, Artificial Sequence; identical to SEQ ID NO: 9247
  GFR-binding peptide
  MOD_RES (1), (1): Xaa is C or S
  MOD_RES (15), (16), (17), (18), (19): Xaa is A or G
  MOD_RES (20), (21), (22), (23): Xaa is A or G or is absent

SEQ ID NO: 71472 - protein, 39 aa, Artificial Sequence; identical to SEQ ID NO: 9248
  GFR-binding peptide
  MOD_RES (3), (4), (36), (38): Xaa is C or S

SEQ ID NO: 71473 - protein, 37 aa, Artificial Sequence
  GFR-binding peptide
  MOD_RES (2), (3), (36): Xaa is C or S
  MOD_RES (17), (18), (19), (20), (21): Xaa is A or G
  MOD_RES (22), (23), (24), (25): Xaa is A or G or is absent
TXXAPVKTSATSMLYYXXXXXXXXXLRKHRMIVEEXG

SEQ ID NO: 71474 - protein, 37 aa, Artificial Sequence; identical to SEQ ID NO: 32748
  GFR-binding peptide
  MOD_RES (4), (5): Xaa is C or S
  MOD_RES (19), (20), (21), (22), (23): Xaa is A or G
  MOD_RES (24), (25), (26), (27): Xaa is A or G or is absent

SEQ ID NO: 71475 - protein, 43 aa, Artificial Sequence; identical to SEQ ID NO: 9250
  GFR-binding peptide
  MOD_RES (6), (7), (41), (43): Xaa is C or S
  MOD_RES (21), (22), (23), (24), (25): Xaa is A or G
  MOD_RES (26), (27), (28), (29): Xaa is A or G or is absent

SEQ ID NO: 71476 - protein, 42 aa, Artificial Sequence; identical to SEQ ID NO: 30622
  GFR-binding peptide
  MOD_RES (6), (7), (41): Xaa is C or S
  MOD_RES (21), (22), (23), (24), (25): Xaa is A or G
  MOD_RES (26), (27), (28), (29): Xaa is A or G or is absent

SEQ ID NO: 71477 - protein, 35 aa, Artificial Sequence; identical to SEQ ID NO: 32749
  GFR-binding peptide
  MOD_RES (1), (35): Xaa is C or S
  MOD_RES (15), (16), (17), (18), (19): Xaa is A or G
  MOD_RES (20), (21), (22), (23): Xaa is A or G or is absent

SEQ ID NO: 71478 - protein, 36 aa, Artificial Sequence; identical to SEQ ID NO: 9254
  GFR-binding peptide
  MOD_RES (2), (3): Xaa is C or S
  MOD_RES (17), (18), (19), (20), (21): Xaa is A or G
  MOD_RES (22), (23), (24), (25): Xaa is A or G or is absent

SEQ ID NO: 71479 - protein, 39 aa, Artificial Sequence; identical to SEQ ID NO: 30626
  GFR-binding peptide
  MOD_RES (4), (5), (36), (38): Xaa is C or S

SEQ ID NO: 71480 - protein, 38 aa, Artificial Sequence; identical to SEQ ID NO: 30629
  GFR-binding peptide
  MOD_RES (5), (6): Xaa is C or S

SEQ ID NO: 71481 - protein, 36 aa, Artificial Sequence; identical to SEQ ID NO: 9257
  GFR-binding peptide
  MOD_RES (1), (33), (35): Xaa is C or S

SEQ ID NO: 71482 - protein, 36 aa, Artificial Sequence; identical to SEQ ID NO: 9259
  GFR-binding peptide
  MOD_RES (6), (6): Xaa is C or S

SEQ ID NO: 71483 - protein, 41 aa, Artificial Sequence; identical to SEQ ID NO: 9260
  GFR-binding peptide
  MOD_RES (6), (7), (41): Xaa is C or S
  MOD_RES (21), (22), (23), (24), (25): Xaa is A or G
  MOD_RES (26), (27), (28), (29): Xaa is A or G or is absent

SEQ ID NO: 71484 - protein, 44 aa, Artificial Sequence; identical to SEQ ID NO: 32755
  GFR-binding peptide
  MOD_RES (6), (7), (41), (43): Xaa is C or S
  MOD_RES (21), (22), (23), (24), (25): Xaa is A or G
  MOD_RES (26), (27), (28), (29): Xaa is A or G or is absent

SEQ ID NO: 71485 - protein, 35 aa, Artificial Sequence
  GFR-binding peptide
  MOD_RES (2), (3): Xaa is C or S
  MOD_RES (17), (18), (19), (20), (21): Xaa is A or G
  MOD_RES (22), (23), (24), (25): Xaa is A or G or is absent
AXXVPTKLSATSILYYXXXXXXXXXLRKHRGMAVS

SEQ ID NO: 71486 - protein, 44 aa, Artificial Sequence; identical to SEQ ID NO: 30638
  GFR-binding peptide
  MOD_RES (6), (7), (41), (43): Xaa is C or S
  MOD_RES (21), (22), (23), (24), (25): Xaa is A or G
  MOD_RES (26), (27), (28), (29): Xaa is A or G or is absent

SEQ ID NO: 71487 - protein, 37 aa, Artificial Sequence; identical to SEQ ID NO: 9265
  GFR-binding peptide
  MOD_RES (4), (5): Xaa is C or S
  MOD_RES (19), (20), (21), (22), (23): Xaa is A or G
  MOD_RES (24), (25), (26), (27): Xaa is A or G or is absent

SEQ ID NO: 71488 - protein, 36 aa, Artificial Sequence; identical to SEQ ID NO: 30640
  GFR-binding peptide
  MOD_RES (33), (35): Xaa is C or S
  MOD_RES (14), (15), (16), (17), (18): Xaa is A or G
  MOD_RES (19), (20), (21), (22): Xaa is A or G or is absent

SEQ ID NO: 71489 - protein, 41 aa, Artificial Sequence; identical to SEQ ID NO: 9268
  GFR-binding peptide
  MOD_RES (6), (7), (40): Xaa is C or S
  MOD_RES (21), (22), (23), (24), (25): Xaa is A or G
  MOD_RES (26), (27), (28), (29): Xaa is A or G or is absent

SEQ ID NO: 71490 - protein, 41 aa, Artificial Sequence
  GFR-binding peptide
  MOD_RES (5), (6), (38), (40): Xaa is C or S
SAGPXXTPTKMEPISMLYLNDKQQIIKFKYEGMVVDRXGXS

SEQ ID NO: 71491 - protein, 37 aa, Artificial Sequence; identical to SEQ ID NO: 32761
  GFR-binding peptide
  MOD_RES (4), (5): Xaa is C or S
  MOD_RES (19), (20), (21), (22), (23): Xaa is A or G
  MOD_RES (24), (25), (26), (27): Xaa is A or G or is absent

SEQ ID NO: 71492 - protein, 36 aa, Artificial Sequence; identical to SEQ ID NO: 30646
  GFR-binding peptide
  MOD_RES (4), (5), (36): Xaa is C or S

SEQ ID NO: 71493 - protein, 34 aa, Artificial Sequence; identical to SEQ ID NO: 30648
  GFR-binding peptide
  MOD_RES (1), (2): Xaa is C or S
  MOD_RES (16), (17), (18), (19), (20): Xaa is A or G
  MOD_RES (21), (22), (23), (24): Xaa is A or G or is absent

SEQ ID NO: 71494 - protein, 41 aa, Artificial Sequence; identical to SEQ ID NO: 9269
  GFR-binding peptide
  MOD_RES (5), (6), (39), (41): Xaa is C or S
  MOD_RES (20), (21), (22), (23), (24): Xaa is A or G
  MOD_RES (25), (26), (27), (28): Xaa is A or G or is absent

SEQ ID NO: 71495 - protein, 37 aa, Artificial Sequence; identical to SEQ ID NO: 32763
  GFR-binding peptide
  MOD_RES (2), (3), (35), (37): Xaa is C or S

SEQ ID NO: 71496 - protein, 35 aa, Artificial Sequence
  GFR-binding peptide
  MOD_RES (2), (3), (34): Xaa is C or S
PXXVPQDLSPINILYFVGRTPKVYGKIPMVVKSXK

SEQ ID NO: 71497 - protein, 33 aa, Artificial Sequence
  GFR-binding peptide
  MOD_RES (32), (32): Xaa is C or S
TPTKMSATSMLYYNDKQQIILRKHRGMVVDRXG

SEQ ID NO: 71498 - protein, 37 aa, Artificial Sequence
  GFR-binding peptide
  MOD_RES (1), (2), (36): Xaa is C or S
  MOD_RES (16), (17), (18), (19), (20): Xaa is A or G
  MOD_RES (21), (22), (23), (24): Xaa is A or G or is absent
XXVPTRLEPISILYLXXXXXXXXXKFKYEDMVVESXG

SEQ ID NO: 71499 - protein, 37 aa, Artificial Sequence
  GFR-binding peptide
  MOD_RES (1), (2), (35), (37): Xaa is C or S
  MOD_RES (16), (17), (18), (19), (20): Xaa is A or G
  MOD_RES (21), (22), (23), (24): Xaa is A or G or is absent
XXVSQDLSPINILYFXXXXXXXXXYGKIPMIVKSXKX

SEQ ID NO: 71500 - protein, 34 aa, Artificial Sequence; identical to SEQ ID NO: 30655
  GFR-binding peptide
  MOD_RES (1), (2): Xaa is C or S
  MOD_RES (16), (17), (18), (19), (20): Xaa is A or G
  MOD_RES (21), (22), (23), (24): Xaa is A or G or is absent

SEQ ID NO: 71501 - protein, 35 aa, Artificial Sequence; identical to SEQ ID NO: 9277
  GFR-binding peptide
  MOD_RES (2), (3): Xaa is C or S
  MOD_RES (17), (18), (19), (20), (21): Xaa is A or G
  MOD_RES (22), (23), (24), (25): Xaa is A or G or is absent

SEQ ID NO: 71502 - protein, 38 aa, Artificial Sequence; identical to SEQ ID NO: 30658
  GFR-binding peptide
  MOD_RES (6), (7), (38): Xaa is C or S

SEQ ID NO: 71503 - protein, 38 aa, Artificial Sequence
  GFR-binding peptide
  MOD_RES (4), (5): Xaa is C or S
  MOD_RES (19), (20), (21), (22), (23): Xaa is A or G
  MOD_RES (24), (25), (26), (27): Xaa is A or G or is absent
PEPXXVPEKMSPISILYKXXXXXXXXXLKYHYNMTVES

SEQ ID NO: 71504 - protein, 36 aa, Artificial Sequence; identical to SEQ ID NO: 30661
  GFR-binding peptide
  MOD_RES (1), (33), (35): Xaa is C or S

SEQ ID NO: 71505 - protein, 42 aa, Artificial Sequence; identical to SEQ ID NO: 9281
  GFR-binding peptide
  MOD_RES (6), (7), (41): Xaa is C or S
  MOD_RES (21), (22), (23), (24), (25): Xaa is A or G
  MOD_RES (26), (27), (28), (29): Xaa is A or G or is absent

SEQ ID NO: 71506 - protein, 34 aa, Artificial Sequence; identical to SEQ ID NO: 30662
  GFR-binding peptide
  MOD_RES (2), (3): Xaa is C or S

SEQ ID NO: 71507 - protein, 36 aa, Artificial Sequence; identical to SEQ ID NO: 32772
  GFR-binding peptide
  MOD_RES (3), (3): Xaa is C or S
  MOD_RES (17), (18), (19), (20), (21): Xaa is A or G
  MOD_RES (22), (23), (24), (25): Xaa is A or G or is absent

SEQ ID NO: 71508 - protein, 40 aa, Artificial Sequence
  GFR-binding peptide
  MOD_RES (4), (5), (37), (39): Xaa is C or S
PPTXXVPTRLSPISILYKDSANNVVLKYHYDMVVESXGXR

SEQ ID NO: 71509 - protein, 42 aa, Artificial Sequence
  GFR-binding peptide
  MOD_RES (6), (7), (40), (42): Xaa is C or S
  MOD_RES (21), (22), (23), (24), (25): Xaa is A or G
  MOD_RES (26), (27), (28), (29): Xaa is A or G or is absent
ASASPXXVPQDLSPINILYFXXXXXXXXXYGKIPMVVKSXKX

SEQ ID NO: 71510 - protein, 37 aa, Artificial Sequence; identical to SEQ ID NO: 32774
  GFR-binding peptide
  MOD_RES (34), (36): Xaa is C or S
  MOD_RES (14), (15), (16), (17), (18): Xaa is A or G
  MOD_RES (19), (20), (21), (22): Xaa is A or G or is absent

SEQ ID NO: 71511 - protein, 37 aa, Artificial Sequence
  GFR-binding peptide
  MOD_RES (6), (7): Xaa is C or S
HVPKPXXAPTKLSATSVLYYDDSSNVILRKHRNMVVR

SEQ ID NO: 71512 - protein, 37 aa, Artificial Sequence; identical to SEQ ID NO: 57686
  GFR-binding peptide
  MOD_RES (6), (7): Xaa is C or S

SEQ ID NO: 71513 - protein, 36 aa, Artificial Sequence; identical to SEQ ID NO: 30668
  GFR-binding peptide
  MOD_RES (3), (4): Xaa is C or S
  MOD_RES (18), (19), (20), (21), (22): Xaa is A or G
  MOD_RES (23), (24), (25), (26): Xaa is A or G or is absent

SEQ ID NO: 71514 - protein, 41 aa, Artificial Sequence; identical to SEQ ID NO: 30670
  GFR-binding peptide
  MOD_RES (3), (4), (39), (41): Xaa is C or S
  MOD_RES (18), (19), (20), (21), (22): Xaa is A or G
  MOD_RES (23), (24), (25), (26): Xaa is A or G or is absent

SEQ ID NO: 71515 - protein, 37 aa, Artificial Sequence; identical to SEQ ID NO: 30671
  GFR-binding peptide
  MOD_RES (1), (35), (37): Xaa is C or S
  MOD_RES (15), (16), (17), (18), (19): Xaa is A or G
  MOD_RES (20), (21), (22), (23): Xaa is A or G or is absent

SEQ ID NO: 71516 - protein, 35 aa, Artificial Sequence; identical to SEQ ID NO: 32792
  GFR-binding peptide
  MOD_RES (34), (34): Xaa is C or S
  MOD_RES (14), (15), (16), (17), (18): Xaa is A or G
  MOD_RES (19), (20), (21), (22): Xaa is A or G or is absent

SEQ ID NO: 71517 - protein, 38 aa, Artificial Sequence
  GFR-binding peptide
  MOD_RES (5), (6): Xaa is C or S
  MOD_RES (20), (21), (22), (23), (24): Xaa is A or G
  MOD_RES (25), (26), (27), (28): Xaa is A or G or is absent
IPEPXXVPEKMEPISILYLXXXXXXXXXKFKYENMTVE

SEQ ID NO: 71518 - protein, 38 aa, Artificial Sequence; identical to SEQ ID NO: 30674
  GFR-binding peptide
  MOD_RES (3), (4), (38): Xaa is C or S
  MOD_RES (18), (19), (20), (21), (22): Xaa is A or G
  MOD_RES (23), (24), (25), (26): Xaa is A or G or is absent

SEQ ID NO: 71519 - protein, 34 aa, Artificial Sequence; identical to SEQ ID NO: 16578
  GFR-binding peptide
  MOD_RES (34), (34): Xaa is C or S
  MOD_RES (14), (15), (16), (17), (18): Xaa is A or G
  MOD_RES (19), (20), (21), (22): Xaa is A or G or is absent

SEQ ID NO: 71520 - protein, 39 aa, Artificial Sequence
  GFR-binding peptide
  MOD_RES (4), (5), (36), (38): Xaa is C or S
PSTXXAPVKTSPISMLYKDNGRVLLLKYHYMIVEEXGXL

SEQ ID NO: 71521 - protein, 40 aa, Artificial Sequence; identical to SEQ ID NO: 32797
  GFR-binding peptide
  MOD_RES (6), (38), (40): Xaa is C or S

SEQ ID NO: 71522 - protein, 39 aa, Artificial Sequence; identical to SEQ ID NO: 9292
  GFR-binding peptide
  MOD_RES (6), (7): Xaa is C or S
  MOD_RES (21), (22), (23), (24), (25): Xaa is A or G
  MOD_RES (26), (27), (28), (29): Xaa is A or G or is absent

SEQ ID NO: 71523 - protein, 44 aa, Artificial Sequence; identical to SEQ ID NO: 9294
  GFR-binding peptide
  MOD_RES (6), (7), (41), (43): Xaa is C or S
  MOD_RES (21), (22), (23), (24), (25): Xaa is A or G
  MOD_RES (26), (27), (28), (29): Xaa is A or G or is absent

SEQ ID NO: 71524 - protein, 42 aa, Artificial Sequence; identical to SEQ ID NO: 30683
  GFR-binding peptide
  MOD_RES (5), (6), (40), (42): Xaa is C or S
  MOD_RES (20), (21), (22), (23), (24): Xaa is A or G
  MOD_RES (25), (26), (27), (28): Xaa is A or G or is absent

SEQ ID NO: 71525 - protein, 35 aa, Artificial Sequence; identical to SEQ ID NO: 30684
  GFR-binding peptide
  MOD_RES (3), (4), (35): Xaa is C or S

SEQ ID NO: 71526 - protein, 39 aa, Artificial Sequence; identical to SEQ ID NO: 9298
  GFR-binding peptide
  MOD_RES (1), (2), (37), (39): Xaa is C or S
  MOD_RES (16), (17), (18), (19), (20): Xaa is A or G
  MOD_RES (21), (22), (23), (24): Xaa is A or G or is absent

SEQ ID NO: 71527 - protein, 39 aa, Artificial Sequence; identical to SEQ ID NO: 9301
  GFR-binding peptide
  MOD_RES (2), (3), (38): Xaa is C or S
  MOD_RES (17), (18), (19), (20), (21): Xaa is A or G
  MOD_RES (22), (23), (24), (25): Xaa is A or G or is absent

SEQ ID NO: 71528 - protein, 42 aa, Artificial Sequence; identical to SEQ ID NO: 9302
  GFR-binding peptide
  MOD_RES (6), (7), (40), (42): Xaa is C or S
  MOD_RES (21), (22), (23), (24), (25): Xaa is A or G
  MOD_RES (26), (27), (28), (29): Xaa is A or G or is absent

SEQ ID NO: 71529 - protein, 40 aa, Artificial Sequence
  GFR-binding peptide
  MOD_RES (4), (5), (39): Xaa is C or S
  MOD_RES (19), (20), (21), (22), (23): Xaa is A or G
  MOD_RES (24), (25), (26), (27): Xaa is A or G or is absent
AGPXXTPTKMEPISMLYLXXXXXXXXXKFKYEGMVVDRXG

SEQ ID NO: 71530 - protein, 32 aa, Artificial Sequence; identical to SEQ ID NO: 32804
  GFR-binding peptide
  MOD_RES (14), (15), (16), (17), (18): Xaa is A or G
  MOD_RES (19), (20), (21), (22): Xaa is A or G or is absent

SEQ ID NO: 71531 - protein, 40 aa, Artificial Sequence; identical to SEQ ID NO: 30691
  GFR-binding peptide
  MOD_RES (5), (6), (38), (40): Xaa is C or S

SEQ ID NO: 71532 - protein, 34 aa, Artificial Sequence
  GFR-binding peptide
  MOD_RES (31), (33): Xaa is C or S
APVKTEPISMLYLDNGRVLLKFKYEMIVEEXGXL

SEQ ID NO: 71533 - protein, 43 aa, Artificial Sequence; identical to SEQ ID NO: 9303
  GFR-binding peptide
  MOD_RES (6), (7), (40), (42): Xaa is C or S
  MOD_RES (21), (22), (23), (24), (25): Xaa is A or G
  MOD_RES (26), (27), (28), (29): Xaa is A or G or is absent

SEQ ID NO: 71534 - protein, 39 aa, Artificial Sequence; identical to SEQ ID NO: 30696
  GFR-binding peptide
  MOD_RES (3), (4), (36), (38): Xaa is C or S

SEQ ID NO: 71535 - protein, 36 aa, Artificial Sequence; identical to SEQ ID NO: 30699
  GFR-binding peptide
  MOD_RES (3), (4), (36): Xaa is C or S

SEQ ID NO: 71536 - protein, 38 aa, Artificial Sequence; identical to SEQ ID NO: 30702
  GFR-binding peptide
  MOD_RES (3), (4), (36), (38): Xaa is C or S

SEQ ID NO: 71537 - protein, 37 aa, Artificial Sequence; identical to SEQ ID NO: 30703
  GFR-binding peptide
  MOD_RES (2), (3), (35), (37): Xaa is C or S

SEQ ID NO: 71538 - protein, 41 aa, Artificial Sequence; identical to SEQ ID NO: 9310
  GFR-binding peptide
  MOD_RES (3), (4), (38), (40): Xaa is C or S
  MOD_RES (18), (19), (20), (21), (22): Xaa is A or G
  MOD_RES (23), (24), (25), (26): Xaa is A or G or is absent

SEQ ID NO: 71539 - protein, 39 aa, Artificial Sequence; identical to SEQ ID NO: 32822
  GFR-binding peptide
  MOD_RES (2), (3), (37), (39): Xaa is C or S
  MOD_RES (17), (18), (19), (20), (21): Xaa is A or G
  MOD_RES (22), (23), (24), (25): Xaa is A or G or is absent

SEQ ID NO: 71540 - protein, 35 aa, Artificial Sequence
  GFR-binding peptide
  MOD_RES (1), (32), (34): Xaa is C or S
XVPQDLSPINILYFVGRTPKVYGKIPMVVKSXKXS

SEQ ID NO: 71541 - protein, 39 aa, Artificial Sequence; identical to SEQ ID NO: 9314
  GFR-binding peptide
  MOD_RES (2), (3), (36), (38): Xaa is C or S
  MOD_RES (17), (18), (19), (20), (21): Xaa is A or G
  MOD_RES (22), (23), (24), (25): Xaa is A or G or is absent

SEQ ID NO: 71542 - protein, 36 aa, Artificial Sequence; identical to SEQ ID NO: 9316
  GFR-binding peptide
  MOD_RES (3), (4): Xaa is C or S
  MOD_RES (18), (19), (20), (21), (22): Xaa is A or G
  MOD_RES (23), (24), (25), (26): Xaa is A or G or is absent

SEQ ID NO: 71543 - protein, 40 aa, Artificial Sequence
  GFR-binding peptide
  MOD_RES (6), (7), (40): Xaa is C or S
  MOD_RES (21), (22), (23), (24), (25): Xaa is A or G
  MOD_RES (26), (27), (28), (29): Xaa is A or G or is absent
ASASPXXVSQDLSPINILYFXXXXXXXXXYGKIPMIVKSX

SEQ ID NO: 71544 - protein, 37 aa, Artificial Sequence; identical to SEQ ID NO: 9317
  GFR-binding peptide
  MOD_RES (3), (4), (37): Xaa is C or S
  MOD_RES (18), (19), (20), (21), (22): Xaa is A or G
  MOD_RES (23), (24), (25), (26): Xaa is A or G or is absent

SEQ ID NO: 71545 - protein, 37 aa, Artificial Sequence
  GFR-binding peptide
  MOD_RES (1), (2), (34), (36): Xaa is C or S
XXVPARLSATSILYYDAANNVVLRKHRDMVVEAXGXR

SEQ ID NO: 71546 - protein, 38 aa, Artificial Sequence
  GFR-binding peptide
  MOD_RES (2), (3), (36), (38): Xaa is C or S
  MOD_RES (17), (18), (19), (20), (21): Xaa is A or G
  MOD_RES (22), (23), (24), (25): Xaa is A or G or is absent
TXXAPVKTSATSMLYYXXXXXXXXXLRKHRMIVEEXGX

SEQ ID NO: 71547 - protein, 38 aa, Artificial Sequence; identical to SEQ ID NO: 9318
  GFR-binding peptide
  MOD_RES (5), (6), (38): Xaa is C or S

SEQ ID NO: 71548 - protein, 40 aa, Artificial Sequence; identical to SEQ ID NO: 30712
  GFR-binding peptide
  MOD_RES (6), (7): Xaa is C or S
  MOD_RES (21), (22), (23), (24), (25): Xaa is A or G
  MOD_RES (26), (27), (28), (29): Xaa is A or G or is absent

SEQ ID NO: 71549 - protein, 34 aa, Artificial Sequence; identical to SEQ ID NO: 32830
  GFR-binding peptide
  MOD_RES (34), (34): Xaa is C or S
  MOD_RES (14), (15), (16), (17), (18): Xaa is A or G
  MOD_RES (19), (20), (21), (22): Xaa is A or G or is absent

SEQ ID NO: 71550 - protein, 42 aa, Artificial Sequence; identical to SEQ ID NO: 9321
  GFR-binding peptide
  MOD_RES (6), (40), (42): Xaa is C or S
  MOD_RES (20), (21), (22), (23), (24): Xaa is A or G
  MOD_RES (25), (26), (27), (28): Xaa is A or G or is absent

SEQ ID NO: 71551 - protein, 41 aa, Artificial Sequence
  GFR-binding peptide
  MOD_RES (6), (7), (41): Xaa is C or S
  MOD_RES (21), (22), (23), (24), (25): Xaa is A or G
  MOD_RES (26), (27), (28), (29): Xaa is A or G or is absent
AAPASXXVPARLSATSILYYXXXXXXXXXLRKHRDMVVEAX

SEQ ID NO: 71552 - protein, 35 aa, Artificial Sequence; identical to SEQ ID NO: 9324
  GFR-binding peptide
  MOD_RES (1), (33), (35): Xaa is C or S

SEQ ID NO: 71553 - protein, 34 aa, Artificial Sequence
  GFR-binding peptide
  MOD_RES (3), (4): Xaa is C or S
PTXXVPTRLSPISILYKDSANNVVLKYHYDMVVE

SEQ ID NO: 71554 - protein, 37 aa, Artificial Sequence; identical to SEQ ID NO: 30715
  GFR-binding peptide
  MOD_RES (5), (6): Xaa is C or S

SEQ ID NO: 71555 - protein, 37 aa, Artificial Sequence; identical to SEQ ID NO: 9327
  GFR-binding peptide
  MOD_RES (1), (2), (35), (37): Xaa is C or S
  MOD_RES (16), (17), (18), (19), (20): Xaa is A or G
  MOD_RES (21), (22), (23), (24): Xaa is A or G or is absent

SEQ ID NO: 71556 - protein, 37 aa, Artificial Sequence; identical to SEQ ID NO: 9329
  GFR-binding peptide
  MOD_RES (2), (3), (37): Xaa is C or S
  MOD_RES (17), (18), (19), (20), (21): Xaa is A or G
  MOD_RES (22), (23), (24), (25): Xaa is A or G or is absent

SEQ ID NO: 71557 - protein, 36 aa, Artificial Sequence
  GFR-binding peptide
  MOD_RES (3), (4): Xaa is C or S
  MOD_RES (18), (19), (20), (21), (22): Xaa is A or G
  MOD_RES (23), (24), (25), (26): Xaa is A or G or is absent
PTXXVPTRLEPISILYLXXXXXXXXXKFKYEDMVVE

SEQ ID NO: 71558 - protein, 37 aa, Artificial Sequence; identical to SEQ ID NO: 32845
  GFR-binding peptide
  MOD_RES (5), (37): Xaa is C or S

SEQ ID NO: 71559 - protein, 35 aa, Artificial Sequence; identical to SEQ ID NO: 9332
  GFR-binding peptide
  MOD_RES (3), (4), (35): Xaa is C or S

SEQ ID NO: 71560 - protein, 35 aa, Artificial Sequence; identical to SEQ ID NO: 9335
  GFR-binding peptide
  MOD_RES (2), (3), (34): Xaa is C or S

SEQ ID NO: 71561 - protein, 34 aa, Artificial Sequence; identical to SEQ ID NO: 30725
  GFR-binding peptide
  MOD_RES (1), (1): Xaa is C or S
  MOD_RES (15), (16), (17), (18), (19): Xaa is A or G
  MOD_RES (20), (21), (22), (23): Xaa is A or G or is absent

SEQ ID NO: 71562 - protein, 37 aa, Artificial Sequence; identical to SEQ ID NO: 16639
  GFR-binding peptide
  MOD_RES (6), (7): Xaa is C or S

SEQ ID NO: 71563 - protein, 31 aa, Artificial Sequence; identical to SEQ ID NO: 30727
  GFR-binding peptide

SEQ ID NO: 71564 - protein, 40 aa, Artificial Sequence
  GFR-binding peptide
  MOD_RES (5), (6), (40): Xaa is C or S
  MOD_RES (20), (21), (22), (23), (24): Xaa is A or G
  MOD_RES (25), (26), (27), (28): Xaa is A or G or is absent
SAGPXXTPTKMEPISMLYLXXXXXXXXXKFKYEGMVVDRX

SEQ ID NO: 71565 - protein, 38 aa, Artificial Sequence; identical to SEQ ID NO: 9340
  GFR-binding peptide
  MOD_RES (1), (2), (36), (38): Xaa is C or S
  MOD_RES (16), (17), (18), (19), (20): Xaa is A or G
  MOD_RES (21), (22), (23), (24): Xaa is A or G or is absent

SEQ ID NO: 71566 - protein, 31 aa, Artificial Sequence; identical to SEQ ID NO: 9343
  GFR-binding peptide

SEQ ID NO: 71567 - protein, 39 aa, Artificial Sequence; identical to SEQ ID NO: 57769
  GFR-binding peptide
  MOD_RES (2), (3), (36), (38): Xaa is C or S
  MOD_RES (17), (18), (19), (20), (21): Xaa is A or G
  MOD_RES (22), (23), (24), (25): Xaa is A or G or is absent

SEQ ID NO: 71568 - protein, 41 aa, Artificial Sequence; identical to SEQ ID NO: 30733
  GFR-binding peptide
  MOD_RES (6), (7), (41): Xaa is C or S
  MOD_RES (21), (22), (23), (24), (25): Xaa is A or G
  MOD_RES (26), (27), (28), (29): Xaa is A or G or is absent

SEQ ID NO: 71569 - protein, 40 aa, Artificial Sequence; identical to SEQ ID NO: 30734
  GFR-binding peptide
  MOD_RES (6), (7): Xaa is C or S
  MOD_RES (21), (22), (23), (24), (25): Xaa is A or G
  MOD_RES (26), (27), (28), (29): Xaa is A or G or is absent

SEQ ID NO: 71570 - protein, 35 aa, Artificial Sequence; identical to SEQ ID NO: 30735
  GFR-binding peptide
  MOD_RES (32), (34): Xaa is C or S

SEQ ID NO: 71571 - protein, 36 aa, Artificial Sequence; identical to SEQ ID NO: 32864
  GFR-binding peptide
  MOD_RES (3), (4): Xaa is C or S
  MOD_RES (18), (19), (20), (21), (22): Xaa is A or G
  MOD_RES (23), (24), (25), (26): Xaa is A or G or is absent

SEQ ID NO: 71572 - protein, 38 aa, Artificial Sequence; identical to SEQ ID NO: 9349
  GFR-binding peptide
  MOD_RES (3), (4), (35), (37): Xaa is C or S

SEQ ID NO: 71573 - protein, 34 aa, Artificial Sequence; identical to SEQ ID NO: 30739
  GFR-binding peptide
  MOD_RES (1), (33): Xaa is C or S

SEQ ID NO: 71574 - protein, 37 aa, Artificial Sequence; identical to SEQ ID NO: 9351
  GFR-binding peptide
  MOD_RES (5), (6): Xaa is C or S

SEQ ID NO: 71575 - protein, 35 aa, Artificial Sequence; identical to SEQ ID NO: 32869
  GFR-binding peptide
  MOD_RES (33), (35): Xaa is C or S
  MOD_RES (14), (15), (16), (17), (18): Xaa is A or G
  MOD_RES (19), (20), (21), (22): Xaa is A or G or is absent

SEQ ID NO: 71576 - protein, 39 aa, Artificial Sequence; identical to SEQ ID NO: 9352
  GFR-binding peptide
  MOD_RES (5), (6), (38): Xaa is C or S

SEQ ID NO: 71577 - protein, 36 aa, Artificial Sequence; identical to SEQ ID NO: 9353
  GFR-binding peptide
  MOD_RES (33), (35): Xaa is C or S
  MOD_RES (14), (15), (16), (17), (18): Xaa is A or G
  MOD_RES (19), (20), (21), (22): Xaa is A or G or is absent

SEQ ID NO: 71578 - protein, 38 aa, Artificial Sequence
  GFR-binding peptide
  MOD_RES (2), (3), (35), (37): Xaa is C or S
PXXVPEKMNAISILYFDENKNVVLKKYRNMTVESXAXR

SEQ ID NO: 71579 - protein, 33 aa, Artificial Sequence
  GFR-binding peptide
  MOD_RES (1), (33): Xaa is C or S
XVPTKLSATSILYYDKGVVTYLRKHRGMAVSEX

SEQ ID NO: 71580 - protein, 41 aa, Artificial Sequence; identical to SEQ ID NO: 9357
  GFR-binding peptide
  MOD_RES (2), (3), (38), (40): Xaa is C or S
  MOD_RES (17), (18), (19), (20), (21): Xaa is A or G
  MOD_RES (22), (23), (24), (25): Xaa is A or G or is absent

SEQ ID NO: 71581 - protein, 38 aa, Artificial Sequence; identical to SEQ ID NO: 30749
  GFR-binding peptide
  MOD_RES (6), (7), (38): Xaa is C or S

SEQ ID NO: 71582 - protein, 33 aa, Artificial Sequence; identical to SEQ ID NO: 9358
  GFR-binding peptide
  MOD_RES (1), (1): Xaa is C or S

SEQ ID NO: 71583 - protein, 35 aa, Artificial Sequence; identical to SEQ ID NO: 9359
  GFR-binding peptide
  MOD_RES (4), (5): Xaa is C or S

SEQ ID NO: 71584 - protein, 36 aa, Artificial Sequence; identical to SEQ ID NO: 9360
  GFR-binding peptide
  MOD_RES (1), (33), (35): Xaa is C or S

SEQ ID NO: 71585 - protein, 41 aa, Artificial Sequence
  GFR-binding peptide
  MOD_RES (5), (6), (38), (40): Xaa is C or S
SAGPXXTPTKMSPISMLYKNDKQQIILKYHYGMVVDRXGXS

SEQ ID NO: 71586 - protein, 43 aa, Artificial Sequence
  GFR-binding peptide
  MOD_RES (6), (7), (40), (42): Xaa is C or S
  MOD_RES (21), (22), (23), (24), (25): Xaa is A or G
  MOD_RES (26), (27), (28), (29): Xaa is A or G or is absent
ASASPXXVPQDLSPINILYFXXXXXXXXXYGKIPMVVKSXKXS

SEQ ID NO: 71587 - protein, 37 aa, Artificial Sequence; identical to SEQ ID NO: 30756
  GFR-binding peptide
  MOD_RES (2), (3), (37): Xaa is C or S
  MOD_RES (17), (18), (19), (20), (21): Xaa is A or G
  MOD_RES (22), (23), (24), (25): Xaa is A or G or is absent

SEQ ID NO: 71588 - protein, 35 aa, Artificial Sequence; identical to SEQ ID NO: 32882
  GFR-binding peptide
  MOD_RES (2), (3): Xaa is C or S
  MOD_RES (17), (18), (19), (20), (21): Xaa is A or G
  MOD_RES (22), (23), (24), (25): Xaa is A or G or is absent

SEQ ID NO: 71589 - protein, 35 aa, Artificial Sequence
  GFR-binding peptide
  MOD_RES (4), (5): Xaa is C or S
SKAXXVPTKLSATSILYYDKGVVTYLRKHRGMAVS

SEQ ID NO: 71590 - protein, 32 aa, Artificial Sequence; identical to SEQ ID NO: 30757
  GFR-binding peptide
  MOD_RES (2), (2): Xaa is C or S

SEQ ID NO: 71591 - protein, 31 aa, Artificial Sequence; identical to SEQ ID NO: 9367
  GFR-binding peptide
  MOD_RES (1), (1): Xaa is C or S

SEQ ID NO: 71592 - protein, 35 aa, Artificial Sequence; identical to SEQ ID NO: 9368
  GFR-binding peptide
  MOD_RES (1), (2): Xaa is C or S
  MOD_RES (16), (17), (18), (19), (20): Xaa is A or G
  MOD_RES (21), (22), (23), (24): Xaa is A or G or is absent

SEQ ID NO: 71593 - protein, 40 aa, Artificial Sequence
  GFR-binding peptide
  MOD_RES (6), (7): Xaa is C or S
  MOD_RES (21), (22), (23), (24), (25): Xaa is A or G
  MOD_RES (26), (27), (28), (29): Xaa is A or G or is absent
GSAGPXXTPTKMSPISMLYKXXXXXXXXXLKYHYGMVVDR

SEQ ID NO: 71594 - protein, 40 aa, Artificial Sequence; identical to SEQ ID NO: 30762
  GFR-binding peptide
  MOD_RES (3), (4), (38), (40): Xaa is C or S
  MOD_RES (18), (19), (20), (21), (22): Xaa is A or G
  MOD_RES (23), (24), (25), (26): Xaa is A or G or is absent

SEQ ID NO: 71595 - protein, 41 aa, Artificial Sequence; identical to SEQ ID NO: 32888
  GFR-binding peptide
  MOD_RES (5), (6), (40): Xaa is C or S
  MOD_RES (20), (21), (22), (23), (24): Xaa is A or G
  MOD_RES (25), (26), (27), (28): Xaa is A or G or is absent

SEQ ID NO: 71596 - protein, 34 aa, Artificial Sequence; identical to SEQ ID NO: 9369
  GFR-binding peptide
  MOD_RES (1), (2), (34): Xaa is C or S

SEQ ID NO: 71597 - protein, 31 aa, Artificial Sequence; identical to SEQ ID NO: 30766
  GFR-binding peptide
  MOD_RES (1), (1): Xaa is C or S

SEQ ID NO: 71598 - protein, 35 aa, Artificial Sequence; identical to SEQ ID NO: 57809
  GFR-binding peptide
  MOD_RES (33), (35): Xaa is C or S
  MOD_RES (14), (15), (16), (17), (18): Xaa is A or G
  MOD_RES (19), (20), (21), (22): Xaa is A or G or is absent

SEQ ID NO: 71599 - protein, 38 aa, Artificial Sequence
  GFR-binding peptide
  MOD_RES (6), (7): Xaa is C or S
GIPEPXXVPEKMNAISILYFDENKNVVLKKYRNMTVES

SEQ ID NO: 71600 - protein, 37 aa, Artificial Sequence; identical to SEQ ID NO: 9372
  GFR-binding peptide
  MOD_RES (3), (4), (37): Xaa is C or S
  MOD_RES (18), (19), (20), (21), (22): Xaa is A or G
  MOD_RES (23), (24), (25), (26): Xaa is A or G or is absent

SEQ ID NO: 71601 - protein, 36 aa, Artificial Sequence; identical to SEQ ID NO: 32900
  GFR-binding peptide
  MOD_RES (34), (36): Xaa is C or S
  MOD_RES (14), (15), (16), (17), (18): Xaa is A or G
  MOD_RES (19), (20), (21), (22): Xaa is A or G or is absent

SEQ ID NO: 71602 - protein, 36 aa, Artificial Sequence; identical to SEQ ID NO: 30769
  GFR-binding peptide
  MOD_RES (1), (2), (35): Xaa is C or S
  MOD_RES (16), (17), (18), (19), (20): Xaa is A or G
  MOD_RES (21), (22), (23), (24): Xaa is A or G or is absent

SEQ ID NO: 71603 - protein, 39 aa, Artificial Sequence; identical to SEQ ID NO: 30770
  GFR-binding peptide
  MOD_RES (1), (36), (38): Xaa is C or S
  MOD_RES (15), (16), (17), (18), (19): Xaa is A or G
  MOD_RES (20), (21), (22), (23): Xaa is A or G or is absent

SEQ ID NO: 71604 - protein, 37 aa, Artificial Sequence; identical to SEQ ID NO: 32901
  GFR-binding peptide
  MOD_RES (34), (36): Xaa is C or S
  MOD_RES (14), (15), (16), (17), (18): Xaa is A or G
  MOD_RES (19), (20), (21), (22): Xaa is A or G or is absent

SEQ ID NO: 71605 - protein, 38 aa, Artificial Sequence
  GFR-binding peptide
  MOD_RES (5), (6), (38): Xaa is C or S
ASKAXXVPTKLSATSILYYDKGVVTYLRKHRGMAVSEX

SEQ ID NO: 71606 - protein, 38 aa, Artificial Sequence; identical to SEQ ID NO: 32904
  GFR-binding peptide
  MOD_RES (2), (3), (37): Xaa is C or S
  MOD_RES (17), (18), (19), (20), (21): Xaa is A or G
  MOD_RES (22), (23), (24), (25): Xaa is A or G or is absent

SEQ ID NO: 71607 - protein, 38 aa, Artificial Sequence
  GFR-binding peptide
  MOD_RES (4), (5), (38): Xaa is C or S
  MOD_RES (19), (20), (21), (22), (23): Xaa is A or G
  MOD_RES (24), (25), (26), (27): Xaa is A or G or is absent
PSTXXAPVKTSPISMLYKXXXXXXXXXLKYHYMIVEEX

SEQ ID NO: 71608 - protein, 35 aa, Artificial Sequence; identical to SEQ ID NO: 30777
  GFR-binding peptide
  MOD_RES (33), (35): Xaa is C or S
  MOD_RES (14), (15), (16), (17), (18): Xaa is A or G
  MOD_RES (19), (20), (21), (22): Xaa is A or G or is absent

SEQ ID NO: 71609 - protein, 36 aa, Artificial Sequence; identical to SEQ ID NO: 9378
  GFR-binding peptide
  MOD_RES (4), (4): Xaa is C or S
  MOD_RES (18), (19), (20), (21), (22): Xaa is A or G
  MOD_RES (23), (24), (25), (26): Xaa is A or G or is absent

SEQ ID NO: 71610 - protein, 38 aa, Artificial Sequence; identical to SEQ ID NO: 30779
  GFR-binding peptide
  MOD_RES (1), (35), (37): Xaa is C or S
  MOD_RES (15), (16), (17), (18), (19): Xaa is A or G
  MOD_RES (20), (21), (22), (23): Xaa is A or G or is absent

SEQ ID NO: 71611 - protein, 36 aa, Artificial Sequence; identical to SEQ ID NO: 9379
  GFR-binding peptide
  MOD_RES (5), (6): Xaa is C or S

SEQ ID NO: 71612 - protein, 36 aa, Artificial Sequence; identical to SEQ ID NO: 30781
  GFR-binding peptide
  MOD_RES (2), (3), (36): Xaa is C or S

SEQ ID NO: 71613 - protein, 43 aa, Artificial Sequence; identical to SEQ ID NO: 9384
  GFR-binding peptide
  MOD_RES (6), (7), (42): Xaa is C or S
  MOD_RES (21), (22), (23), (24), (25): Xaa is A or G
  MOD_RES (26), (27), (28), (29): Xaa is A or G or is absent

SEQ ID NO: 71614 - protein, 36 aa, Artificial Sequence
  GFR-binding peptide
  MOD_RES (33), (35): Xaa is C or S
  MOD_RES (14), (15), (16), (17), (18): Xaa is A or G
  MOD_RES (19), (20), (21), (22): Xaa is A or G or is absent
APVKTEPISMLYLXXXXXXXXXKFKYEMIVEEXGXL

SEQ ID NO: 71615 - protein, 42 aa, Artificial Sequence; identical to SEQ ID NO: 57822
  GFR-binding peptide
  MOD_RES (6), (7), (39), (41): Xaa is C or S

SEQ ID NO: 71616 - protein, 34 aa, Artificial Sequence; identical to SEQ ID NO: 9391
  GFR-binding peptide
  MOD_RES (3), (4): Xaa is C or S

SEQ ID NO: 71617 - protein, 38 aa, Artificial Sequence
  GFR-binding peptide
  MOD_RES (6), (7): Xaa is C or S
STPPTXXVPTRLEPISILYLDSANNVVKFKYEDMVVES

SEQ ID NO: 71618 - protein, 31 aa, Artificial Sequence
  GFR-binding peptide
  MOD_RES (31), (31): Xaa is C or S
VSQDLSPINILYFIGKTPKIYGKIPMIVKSX

SEQ ID NO: 71619 - protein, 36 aa, Artificial Sequence; identical to SEQ ID NO: 30791
  GFR-binding peptide
  MOD_RES (1), (2): Xaa is C or S
  MOD_RES (16), (17), (18), (19), (20): Xaa is A or G
  MOD_RES (21), (22), (23), (24): Xaa is A or G or is absent

SEQ ID NO: 71620 - protein, 38 aa, Artificial Sequence; identical to SEQ ID NO: 9395
  GFR-binding peptide
  MOD_RES (3), (4), (38): Xaa is C or S
  MOD_RES (18), (19), (20), (21), (22): Xaa is A or G
  MOD_RES (23), (24), (25), (26): Xaa is A or G or is absent

SEQ ID NO: 71621 - protein, 38 aa, Artificial Sequence; identical to SEQ ID NO: 9399
  GFR-binding peptide
  MOD_RES (4), (5), (38): Xaa is C or S
  MOD_RES (19), (20), (21), (22), (23): Xaa is A or G
  MOD_RES (24), (25), (26), (27): Xaa is A or G or is absent

SEQ ID NO: 71622 - protein, 43 aa, Artificial Sequence; identical to SEQ ID NO: 30798
  GFR-binding peptide
  MOD_RES (6), (7), (41), (43): Xaa is C or S
  MOD_RES (21), (22), (23), (24), (25): Xaa is A or G
  MOD_RES (26), (27), (28), (29): Xaa is A or G or is absent

SEQ ID NO: 71623 - protein, 39 aa, Artificial Sequence
  GFR-binding peptide
  MOD_RES (1), (2), (36), (38): Xaa is C or S
  MOD_RES (16), (17), (18), (19), (20): Xaa is A or G
  MOD_RES (21), (22), (23), (24): Xaa is A or G or is absent
XXVPEKMEPISILYLXXXXXXXXXKFKYENMTVESXAXR

SEQ ID NO: 71624 - protein, 39 aa, Artificial Sequence; identical to SEQ ID NO: 30804
  GFR-binding peptide
  MOD_RES (5), (6), (38): Xaa is C or S

SEQ ID NO: 71625 - protein, 40 aa, Artificial Sequence
  GFR-binding peptide
  MOD_RES (6), (7), (40): Xaa is C or S
  MOD_RES (21), (22), (23), (24), (25): Xaa is A or G
  MOD_RES (26), (27), (28), (29): Xaa is A or G or is absent
RVPSTXXAPVKTSPISMLYKXXXXXXXXXLKYHYMIVEEX

SEQ ID NO: 71626 - protein, 35 aa, Artificial Sequence; identical to SEQ ID NO: 30805
  GFR-binding peptide
  MOD_RES (2), (3), (35): Xaa is C or S

SEQ ID NO: 71627 - protein, 30 aa, Artificial Sequence; identical to SEQ ID NO: 30808
  GFR-binding peptide

SEQ ID NO: 71628 - protein, 36 aa, Artificial Sequence; identical to SEQ ID NO: 30809
  GFR-binding peptide
  MOD_RES (3), (4), (35): Xaa is C or S

SEQ ID NO: 71629 - protein, 42 aa, Artificial Sequence
  GFR-binding peptide
  MOD_RES (6), (7), (41): Xaa is C or S
  MOD_RES (21), (22), (23), (24), (25): Xaa is A or G
  MOD_RES (26), (27), (28), (29): Xaa is A or G or is absent
GIPEPXXVPEKMSATSILYYXXXXXXXXXLRKHRNMTVESXA

SEQ ID NO: 71630 - protein, 32 aa, Artificial Sequence; identical to SEQ ID NO: 32944
  GFR-binding peptide
  MOD_RES (14), (15), (16), (17), (18): Xaa is A or G
  MOD_RES (19), (20), (21), (22): Xaa is A or G or is absent

SEQ ID NO: 71631 - protein, 36 aa, Artificial Sequence; identical to SEQ ID NO: 9403
  GFR-binding peptide
  MOD_RES (4), (5), (36): Xaa is C or S

SEQ ID NO: 71632 - protein, 34 aa, Artificial Sequence; identical to SEQ ID NO: 9404
  GFR-binding peptide
  MOD_RES (1), (2), (34): Xaa is C or S

SEQ ID NO: 71633 - protein, 38 aa, Artificial Sequence
  GFR-binding peptide
  MOD_RES (1), (2), (36), (38): Xaa is C or S
  MOD_RES (16), (17), (18), (19), (20): Xaa is A or G
  MOD_RES (21), (22), (23), (24): Xaa is A or G or is absent
XXVPEKMSPINILYFXXXXXXXXXYGKIPNMTVESXAX

SEQ ID NO: 71634 - protein, 37 aa, Artificial Sequence
  GFR-binding peptide
  MOD_RES (1), (2), (35), (37): Xaa is C or S
  MOD_RES (16), (17), (18), (19), (20): Xaa is A or G
  MOD_RES (21), (22), (23), (24): Xaa is A or G or is absent
XXVPQALSPINILYFXXXXXXXXXYGKIPMIVRSXKX

SEQ ID NO: 71635 - protein, 44 aa, Artificial Sequence; identical to SEQ ID NO: 32946
  GFR-binding peptide
  MOD_RES (6), (7), (41), (43): Xaa is C or S
  MOD_RES (21), (22), (23), (24), (25): Xaa is A or G
  MOD_RES (26), (27), (28), (29): Xaa is A or G or is absent

SEQ ID NO: 71636 - protein, 36 aa, Artificial Sequence; identical to SEQ ID NO: 9409
  GFR-binding peptide
  MOD_RES (1), (2), (35): Xaa is C or S

SEQ ID NO: 71637 - protein, 34 aa, Artificial Sequence; identical to SEQ ID NO: 9410
  GFR-binding peptide
  MOD_RES (33), (33): Xaa is C or S
  MOD_RES (14), (15), (16), (17), (18): Xaa is A or G
  MOD_RES (19), (20), (21), (22): Xaa is A or G or is absent

SEQ ID NO: 71638 - protein, 41 aa, Artificial Sequence; identical to SEQ ID NO: 9411
  GFR-binding peptide
  MOD_RES (4), (5), (38), (40): Xaa is C or S

SEQ ID NO: 71639 - protein, 42 aa, Artificial Sequence
  GFR-binding peptide
  MOD_RES (5), (6), (40), (42): Xaa is C or S
  MOD_RES (20), (21), (22), (23), (24): Xaa is A or G
  MOD_RES (25), (26), (27), (28): Xaa is A or G or is absent
APASXXVPARLSATSILYYXXXXXXXXXLRKHRDMVVEAXGX

SEQ ID NO: 71640 - protein, 36 aa, Artificial Sequence; identical to SEQ ID NO: 30818
  GFR-binding peptide
  MOD_RES (2), (3), (36): Xaa is C or S
  MOD_RES (17), (18), (19), (20), (21): Xaa is A or G
  MOD_RES (22), (23), (24), (25): Xaa is A or G or is absent

SEQ ID NO: 71641 - protein, 33 aa, Artificial Sequence
  GFR-binding peptide
  MOD_RES (32), (32): Xaa is C or S
VPTRLSATSILYYDSANNVVLRKHRDMVVESXG

SEQ ID NO: 71642 - protein, 38 aa, Artificial Sequence; identical to SEQ ID NO: 32955
  GFR-binding peptide
  MOD_RES (1), (35), (37): Xaa is C or S
  MOD_RES (15), (16), (17), (18), (19): Xaa is A or G
  MOD_RES (20), (21), (22), (23): Xaa is A or G or is absent

SEQ ID NO: 71643 - protein, 35 aa, Artificial Sequence; identical to SEQ ID NO: 9414
  GFR-binding peptide
  MOD_RES (2), (3), (34): Xaa is C or S

SEQ ID NO: 71644 - protein, 35 aa, Artificial Sequence; identical to SEQ ID NO: 32958
  GFR-binding peptide
  MOD_RES (32), (34): Xaa is C or S

SEQ ID NO: 71645 - protein, 32 aa, Artificial Sequence; identical to SEQ ID NO: 9416
  GFR-binding peptide
  MOD_RES (1), (32): Xaa is C or S

SEQ ID NO: 71646 - protein, 30 aa, Artificial Sequence
  GFR-binding peptide
VPQDLSPINILYFVGRTPKVYGKIPMVVKS

SEQ ID NO: 71647 - protein, 36 aa, Artificial Sequence; identical to SEQ ID NO: 57854
  GFR-binding peptide
  MOD_RES (1), (2), (34), (36): Xaa is C or S

SEQ ID NO: 71648 - protein, 36 aa, Artificial Sequence; identical to SEQ ID NO: 30823
  GFR-binding peptide
  MOD_RES (1), (2), (34), (36): Xaa is C or S

SEQ ID NO: 71649 - protein, 36 aa, Artificial Sequence; identical to SEQ ID NO: 9418
  GFR-binding peptide
  MOD_RES (2), (3), (35): Xaa is C or S

SEQ ID NO: 71650 - protein, 36 aa, Artificial Sequence; identical to SEQ ID NO: 9420
  GFR-binding peptide
  MOD_RES (2), (3): Xaa is C or S
  MOD_RES (17), (18), (19), (20), (21): Xaa is A or G
  MOD_RES (22), (23), (24), (25): Xaa is A or G or is absent

SEQ ID NO: 71651 - protein, 33 aa, Artificial Sequence; identical to SEQ ID NO: 30829
  GFR-binding peptide
  MOD_RES (33), (33): Xaa is C or S
  MOD_RES (14), (15), (16), (17), (18): Xaa is A or G
  MOD_RES (19), (20), (21), (22): Xaa is A or G or is absent

SEQ ID NO: 71652 - protein, 33 aa, Artificial Sequence; identical to SEQ ID NO: 9421
  GFR-binding peptide
  MOD_RES (33), (33): Xaa is C or S
  MOD_RES (14), (15), (16), (17), (18): Xaa is A or G
  MOD_RES (19), (20), (21), (22): Xaa is A or G or is absent

SEQ ID NO: 71653 - protein, 38 aa, Artificial Sequence; identical to SEQ ID NO: 30830
  GFR-binding peptide
  MOD_RES (3), (4), (35), (37): Xaa is C or S

SEQ ID NO: 71654 - protein, 39 aa, Artificial Sequence; identical to SEQ ID NO: 9425
  GFR-binding peptide
  MOD_RES (6), (7), (39): Xaa is C or S

SEQ ID NO: 71655 - protein, 39 aa, Artificial Sequence
  GFR-binding peptide
  MOD_RES (6), (7): Xaa is C or S
  MOD_RES (21), (22), (23), (24), (25): Xaa is A or G
  MOD_RES (26), (27), (28), (29): Xaa is A or G or is absent
STPPTXXVPTRLSPISILYKXXXXXXXXXLKYHYDMVVE

SEQ ID NO: 71656 - protein, 39 aa, Artificial Sequence
  GFR-binding peptide
  MOD_RES (3), (4), (36), (38): Xaa is C or S
EPXXVPEKMSPINILYFDENKNVVYGKIPNMTVESXAXR

SEQ ID NO: 71657 - protein, 38 aa, Artificial Sequence
  GFR-binding peptide
  MOD_RES (5), (6): Xaa is C or S
  MOD_RES (20), (21), (22), (23), (24): Xaa is A or G
  MOD_RES (25), (26), (27), (28): Xaa is A or G or is absent
IPEPXXVPEKMSPISILYKXXXXXXXXXLKYHYNMTVE

SEQ ID NO: 71658 - protein, 34 aa, Artificial Sequence; identical to SEQ ID NO: 9427
  GFR-binding peptide
  MOD_RES (1), (2): Xaa is C or S
  MOD_RES (16), (17), (18), (19), (20): Xaa is A or G
  MOD_RES (21), (22), (23), (24): Xaa is A or G or is absent

SEQ ID NO: 71659 - protein, 36 aa, Artificial Sequence; identical to SEQ ID NO: 32972
  GFR-binding peptide
  MOD_RES (1), (36): Xaa is C or S
  MOD_RES (15), (16), (17), (18), (19): Xaa is A or G
  MOD_RES (20), (21), (22), (23): Xaa is A or G or is absent

SEQ ID NO: 71660 - protein, 42 aa, Artificial Sequence; identical to SEQ ID NO: 30835
  GFR-binding peptide
  MOD_RES (4), (5), (39), (41): Xaa is C or S
  MOD_RES (19), (20), (21), (22), (23): Xaa is A or G
  MOD_RES (24), (25), (26), (27): Xaa is A or G or is absent

SEQ ID NO: 71661 - protein, 34 aa, Artificial Sequence; identical to SEQ ID NO: 32983
  GFR-binding peptide
  MOD_RES (32), (34): Xaa is C or S

SEQ ID NO: 71662 - protein, 41 aa, Artificial Sequence; identical to SEQ ID NO: 16738
  GFR-binding peptide
  MOD_RES (6), (7), (39), (41): Xaa is C or S

SEQ ID NO: 71663 - protein, 34 aa, Artificial Sequence; identical to SEQ ID NO: 9436
  GFR-binding peptide
  MOD_RES (32), (34): Xaa is C or S

SEQ ID NO: 71664 - protein, 39 aa, Artificial Sequence
  GFR-binding peptide
  MOD_RES (6), (7), (39): Xaa is C or S
AAPASXXVPARLSATSILYYDAANNVVLRKHRDMVVEAX

SEQ ID NO: 71665 - protein, 39 aa, Artificial Sequence
  GFR-binding peptide
  MOD_RES (1), (2), (36), (38): Xaa is C or S
  MOD_RES (16), (17), (18), (19), (20): Xaa is A or G
  MOD_RES (21), (22), (23), (24): Xaa is A or G or is absent
XXVPEKMSATSILYYXXXXXXXXXLRKHRNMTVESXAXR

SEQ ID NO: 71666 - protein, 30 aa, Artificial Sequence
  GFR-binding peptide
VPTRLSATSILYYDSANNVVLRKHRDMVVE

SEQ ID NO: 71667 - protein, 38 aa, Artificial Sequence; identical to SEQ ID NO: 9438
  GFR-binding peptide
  MOD_RES (2), (3), (36), (38): Xaa is C or S
  MOD_RES (17), (18), (19), (20), (21): Xaa is A or G
  MOD_RES (22), (23), (24), (25): Xaa is A or G or is absent

SEQ ID NO: 71668 - protein, 37 aa, Artificial Sequence; identical to SEQ ID NO: 9439
  GFR-binding peptide
  MOD_RES (4), (4): Xaa is C or S
  MOD_RES (18), (19), (20), (21), (22): Xaa is A or G
  MOD_RES (23), (24), (25), (26): Xaa is A or G or is absent

SEQ ID NO: 71669 - protein, 40 aa, Artificial Sequence; identical to SEQ ID NO: 32988
  GFR-binding peptide
  MOD_RES (5), (39): Xaa is C or S
  MOD_RES (19), (20), (21), (22), (23): Xaa is A or G
  MOD_RES (24), (25), (26), (27): Xaa is A or G or is absent

SEQ ID NO: 71670 - protein, 39 aa, Artificial Sequence; identical to SEQ ID NO: 9442
  GFR-binding peptide
  MOD_RES (6), (7), (39): Xaa is C or S

SEQ ID NO: 71671 - protein, 39 aa, Artificial Sequence
  GFR-binding peptide
  MOD_RES (3), (4), (37), (39): Xaa is C or S
  MOD_RES (18), (19), (20), (21), (22): Xaa is A or G
  MOD_RES (23), (24), (25), (26): Xaa is A or G or is absent
STXXAPVKTSPISMLYKXXXXXXXXXLKYHYMIVEEXGX

SEQ ID NO: 71672 - protein, 39 aa, Artificial Sequence
  GFR-binding peptide
  MOD_RES (6), (7), (39): Xaa is C or S
GSAGPXXTPTKMSATSMLYYNDKQQIILRKHRGMVVDRX

SEQ ID NO: 71673 - protein, 39 aa, Artificial Sequence; identical to SEQ ID NO: 9450
  GFR-binding peptide
  MOD_RES (3), (4), (38): Xaa is C or S
  MOD_RES (18), (19), (20), (21), (22): Xaa is A or G
  MOD_RES (23), (24), (25), (26): Xaa is A or G or is absent

SEQ ID NO: 71674 - protein, 42 aa, Artificial Sequence
  GFR-binding peptide
  MOD_RES (6), (7), (39), (41): Xaa is C or S
GIPEPXXVPEKMNAISILYFDENKNVVLKKYRNMTVESXAXR

SEQ ID NO: 71675 - protein, 34 aa, Artificial Sequence
  GFR-binding peptide
  MOD_RES (3), (4): Xaa is C or S
PTXXVPTRLEPISILYLDSANNVVKFKYEDMVVE

SEQ ID NO: 71676 - protein, 40 aa, Artificial Sequence; identical to SEQ ID NO: 9455
  GFR-binding peptide
  MOD_RES (4), (5), (37), (39): Xaa is C or S

SEQ ID NO: 71677 - protein, 33 aa, Artificial Sequence; identical to SEQ ID NO: 57891
  GFR-binding peptide
  MOD_RES (2), (3): Xaa is C or S

SEQ ID NO: 71678 - protein, 35 aa, Artificial Sequence; identical to SEQ ID NO: 30855
  GFR-binding peptide
  MOD_RES (1), (35): Xaa is C or S
  MOD_RES (15), (16), (17), (18), (19): Xaa is A or G
  MOD_RES (20), (21), (22), (23): Xaa is A or G or is absent

SEQ ID NO: 71679 - protein, 32 aa, Artificial Sequence
  GFR-binding peptide
  MOD_RES (1), (2): Xaa is C or S
XXVPEKMSPISILYKDENKNVVLKYHYNMTVE

SEQ ID NO: 71680 - protein, 38 aa, Artificial Sequence
  GFR-binding peptide
  MOD_RES (4), (5), (37): Xaa is C or S
AGPXXTPTKMSPISMLYKNDKQQIILKYHYGMVVDRXG

SEQ ID NO: 71681 - protein, 43 aa, Artificial Sequence; identical to SEQ ID NO: 57898
  GFR-binding peptide
  MOD_RES (5), (6), (40), (42): Xaa is C or S
  MOD_RES (20), (21), (22), (23), (24): Xaa is A or G
  MOD_RES (25), (26), (27), (28): Xaa is A or G or is absent

SEQ ID NO: 71682 - protein, 42 aa, Artificial Sequence
  GFR-binding peptide
  MOD_RES (6), (7), (41): Xaa is C or S
  MOD_RES (21), (22), (23), (24), (25): Xaa is A or G
  MOD_RES (26), (27), (28), (29): Xaa is A or G or is absent
HVPKPXXAPTKLSATSVLYYXXXXXXXXXLRKHRNMVVRSXG

SEQ ID NO: 71683 - protein, 36 aa, Artificial Sequence; identical to SEQ ID NO: 9460
  GFR-binding peptide
  MOD_RES (35), (35): Xaa is C or S
  MOD_RES (14), (15), (16), (17), (18): Xaa is A or G
  MOD_RES (19), (20), (21), (22): Xaa is A or G or is absent

SEQ ID NO: 71684 - protein, 36 aa, Artificial Sequence; identical to SEQ ID NO: 33002
  GFR-binding peptide
  MOD_RES (2), (3), (34), (36): Xaa is C or S

SEQ ID NO: 71685 - protein, 34 aa, Artificial Sequence; identical to SEQ ID NO: 9461
  GFR-binding peptide
  MOD_RES (1), (33): Xaa is C or S

SEQ ID NO: 71686 - protein, 33 aa, Artificial Sequence; identical to SEQ ID NO: 33004
  GFR-binding peptide
  MOD_RES (2), (3): Xaa is C or S

SEQ ID NO: 71687 - protein, 35 aa, Artificial Sequence; identical to SEQ ID NO: 30860
  GFR-binding peptide
  MOD_RES (3), (4): Xaa is C or S

SEQ ID NO: 71688 - protein, 30 aa, Artificial Sequence; identical to SEQ ID NO: 33010
  GFR-binding peptide

SEQ ID NO: 71689 - protein, 34 aa, Artificial Sequence; identical to SEQ ID NO: 16767
  GFR-binding peptide
  MOD_RES (1), (1): Xaa is C or S
  MOD_RES (15), (16), (17), (18), (19): Xaa is A or G
  MOD_RES (20), (21), (22), (23): Xaa is A or G or is absent

SEQ ID NO: 71690 - protein, 43 aa, Artificial Sequence; identical to SEQ ID NO: 30865
  GFR-binding peptide
  MOD_RES (7), (41), (43): Xaa is C or S
  MOD_RES (21), (22), (23), (24), (25): Xaa is A or G
  MOD_RES (26), (27), (28), (29): Xaa is A or G or is absent

SEQ ID NO: 71691 - protein, 37 aa, Artificial Sequence; identical to SEQ ID NO: 9469
  GFR-binding peptide
  MOD_RES (1), (2), (34), (36): Xaa is C or S

SEQ ID NO: 71692 - protein, 39 aa, Artificial Sequence; identical to SEQ ID NO: 16772
  GFR-binding peptide
  MOD_RES (6), (7), (39): Xaa is C or S

SEQ ID NO: 71693 - protein, 40 aa, Artificial Sequence; identical to SEQ ID NO: 33019
  GFR-binding peptide
  MOD_RES (6), (7), (40): Xaa is C or S

SEQ ID NO: 71694 - protein, 36 aa, Artificial Sequence; identical to SEQ ID NO: 30869
  GFR-binding peptide
  MOD_RES (1), (2), (34), (36): Xaa is C or S

SEQ ID NO: 71695 - protein, 36 aa, Artificial Sequence; identical to SEQ ID NO: 9470
  GFR-binding peptide
  MOD_RES (1), (2), (34), (36): Xaa is C or S

SEQ ID NO: 71696 - protein, 31 aa, Artificial Sequence
  GFR-binding peptide
  MOD_RES (1), (1): Xaa is C or S
XVPEKMSPISILYKDENKNVVLKYHYNMTVE

SEQ ID NO: 71697 - protein, 40 aa, Artificial Sequence; identical to SEQ ID NO: 30872
  GFR-binding peptide
  MOD_RES (6), (7): Xaa is C or S
  MOD_RES (21), (22), (23), (24), (25): Xaa is A or G
  MOD_RES (26), (27), (28), (29): Xaa is A or G or is absent

SEQ ID NO: 71698 - protein, 35 aa, Artificial Sequence; identical to SEQ ID NO: 9474
  GFR-binding peptide
  MOD_RES (2), (3), (34): Xaa is C or S

SEQ ID NO: 71699 - protein, 39 aa, Artificial Sequence; identical to SEQ ID NO: 9475
  GFR-binding peptide
  MOD_RES (5), (6), (38): Xaa is C or S

SEQ ID NO: 71700 - protein, 34 aa, Artificial Sequence
  GFR-binding peptide
  MOD_RES (1), (2): Xaa is C or S
  MOD_RES (16), (17), (18), (19), (20): Xaa is A or G
  MOD_RES (21), (22), (23), (24): Xaa is A or G or is absent
XXVPQDLSPINILYFXXXXXXXXXYGKIPMVVKS

SEQ ID NO: 71701 - protein, 34 aa, Artificial Sequence; identical to SEQ ID NO: 9477
  GFR-binding peptide
  MOD_RES (1), (1): Xaa is C or S
  MOD_RES (15), (16), (17), (18), (19): Xaa is A or G
  MOD_RES (20), (21), (22), (23): Xaa is A or G or is absent

SEQ ID NO: 71702 - protein, 42 aa, Artificial Sequence; identical to SEQ ID NO: 30877
  GFR-binding peptide
  MOD_RES (5), (6), (40), (42): Xaa is C or S
  MOD_RES (20), (21), (22), (23), (24): Xaa is A or G
  MOD_RES (25), (26), (27), (28): Xaa is A or G or is absent

SEQ ID NO: 71703 - protein, 35 aa, Artificial Sequence
  GFR-binding peptide
  MOD_RES (32), (34): Xaa is C or S
VPEKMNAISILYFDENKNVVLKKYRNMTVESXAXR

SEQ ID NO: 71704 - protein, 41 aa, Artificial Sequence
  GFR-binding peptide
  MOD_RES (5), (6), (38), (40): Xaa is C or S
IPEPXXVPEKMEPISILYLDENKNVVKFKYENMTVESXAXR

SEQ ID NO: 71705 - protein, 39 aa, Artificial Sequence; identical to SEQ ID NO: 33027
  GFR-binding peptide
  MOD_RES (3), (4), (38): Xaa is C or S
  MOD_RES (18), (19), (20), (21), (22): Xaa is A or G
  MOD_RES (23), (24), (25), (26): Xaa is A or G or is absent

SEQ ID NO: 71706 - protein, 33 aa, Artificial Sequence
  GFR-binding peptide
  MOD_RES (31), (33): Xaa is C or S
VPQDLSPINILYFVGRTPKVYGKIPMVVKSXKX

SEQ ID NO: 71707 - protein, 37 aa, Artificial Sequence; identical to SEQ ID NO: 9479
  GFR-binding peptide
  MOD_RES (5), (6): Xaa is C or S

SEQ ID NO: 71708 - protein, 38 aa, Artificial Sequence; identical to SEQ ID NO: 9480
  GFR-binding peptide
  MOD_RES (5), (6): Xaa is C or S
  MOD_RES (20), (21), (22), (23), (24): Xaa is A or G
  MOD_RES (25), (26), (27), (28): Xaa is A or G or is absent

SEQ ID NO: 71709 - protein, 36 aa, Artificial Sequence; identical to SEQ ID NO: 9481
  GFR-binding peptide
  MOD_RES (33), (35): Xaa is C or S
  MOD_RES (14), (15), (16), (17), (18): Xaa is A or G
  MOD_RES (19), (20), (21), (22): Xaa is A or G or is absent

SEQ ID NO: 71710 - protein, 39 aa, Artificial Sequence; identical to SEQ ID NO: 9482
  GFR-binding peptide
  MOD_RES (6), (7), (38): Xaa is C or S

SEQ ID NO: 71711 - protein, 37 aa, Artificial Sequence; identical to SEQ ID NO: 30885
  GFR-binding peptide
  MOD_RES (5), (6): Xaa is C or S

SEQ ID NO: 71712 - protein, 39 aa, Artificial Sequence; identical to SEQ ID NO: 33035
  GFR-binding peptide
  MOD_RES (6), (7): Xaa is C or S
  MOD_RES (21), (22), (23), (24), (25): Xaa is A or G
  MOD_RES (26), (27), (28), (29): Xaa is A or G or is absent

SEQ ID NO: 71713 - protein, 34 aa, Artificial Sequence
  GFR-binding peptide
  MOD_RES (2), (3), (34): Xaa is C or S
TXXAPVKTSPISMLYKDNGRVLLLKYHYMIVEEX

SEQ ID NO: 71714 - protein, 37 aa, Artificial Sequence; identical to SEQ ID NO: 9486
  GFR-binding peptide
  MOD_RES (6), (7): Xaa is C or S

SEQ ID NO: 71715 - protein, 41 aa, Artificial Sequence; identical to SEQ ID NO: 9487
  GFR-binding peptide
  MOD_RES (4), (5), (39), (41): Xaa is C or S
  MOD_RES (19), (20), (21), (22), (23): Xaa is A or G
  MOD_RES (24), (25), (26), (27): Xaa is A or G or is absent

SEQ ID NO: 71716 - protein, 34 aa, Artificial Sequence; identical to SEQ ID NO: 33038
  GFR-binding peptide
  MOD_RES (2), (2): Xaa is C or S
  MOD_RES (16), (17), (18), (19), (20): Xaa is A or G
  MOD_RES (21), (22), (23), (24): Xaa is A or G or is absent

SEQ ID NO: 71717 - protein, 37 aa, Artificial Sequence; identical to SEQ ID NO: 9489
  GFR-binding peptide
  MOD_RES (2), (3), (34), (36): Xaa is C or S

SEQ ID NO: 71718 - protein, 37 aa, Artificial Sequence; identical to SEQ ID NO: 30891
  GFR-binding peptide
  MOD_RES (4), (5): Xaa is C or S
  MOD_RES (19), (20), (21), (22), (23): Xaa is A or G
  MOD_RES (24), (25), (26), (27): Xaa is A or G or is absent

SEQ ID NO: 71719 - protein, 40 aa, Artificial Sequence; identical to SEQ ID NO: 9492
  GFR-binding peptide
  MOD_RES (2), (3), (37), (39): Xaa is C or S
  MOD_RES (17), (18), (19), (20), (21): Xaa is A or G
  MOD_RES (22), (23), (24), (25): Xaa is A or G or is absent

SEQ ID NO: 71720 - protein, 37 aa, Artificial Sequence
  GFR-binding peptide
  MOD_RES (1), (34), (36): Xaa is C or S
  MOD_RES (15), (16), (17), (18), (19): Xaa is A or G
  MOD_RES (20), (21), (22), (23): Xaa is A or G or is absent
XAPVKTSATSMLYYXXXXXXXXXLRKHRMIVEEXGXL

SEQ ID NO: 71721 - protein, 43 aa, Artificial Sequence
  GFR-binding peptide
  MOD_RES (5), (6), (40), (42): Xaa is C or S
  MOD_RES (20), (21), (22), (23), (24): Xaa is A or G
  MOD_RES (25), (26), (27), (28): Xaa is A or G or is absent
IPEPXXVPEKMSPISILYKXXXXXXXXXLKYHYNMTVESXAXR

SEQ ID NO: 71722 - protein, 33 aa, Artificial Sequence; identical to SEQ ID NO: 57932
  GFR-binding peptide
  MOD_RES (32), (32): Xaa is C or S

SEQ ID NO: 71723 - protein, 37 aa, Artificial Sequence; identical to SEQ ID NO: 30894
  GFR-binding peptide
  MOD_RES (1), (36): Xaa is C or S
  MOD_RES (15), (16), (17), (18), (19): Xaa is A or G
  MOD_RES (20), (21), (22), (23): Xaa is A or G or is absent

SEQ ID NO: 71724 - protein, 33 aa, Artificial Sequence; identical to SEQ ID NO: 30895
  GFR-binding peptide
  MOD_RES (2), (3): Xaa is C or S

SEQ ID NO: 71725 - protein, 37 aa, Artificial Sequence
  GFR-binding peptide
  MOD_RES (5), (6): Xaa is C or S
APASXXVPARLSATSILYYDAANNVVLRKHRDMVVEA

SEQ ID NO: 71726 - protein, 33 aa, Artificial Sequence; identical to SEQ ID NO: 33045
  GFR-binding peptide
  MOD_RES (14), (15), (16), (17), (18): Xaa is A or G
  MOD_RES (19), (20), (21), (22): Xaa is A or G or is absent

SEQ ID NO: 71727 - protein, 32 aa, Artificial Sequence; identical to SEQ ID NO: 9495
  GFR-binding peptide
  MOD_RES (1), (2): Xaa is C or S

SEQ ID NO: 71728 - protein, 40 aa, Artificial Sequence
  GFR-binding peptide
  MOD_RES (3), (4), (38), (40): Xaa is C or S
  MOD_RES (18), (19), (20), (21), (22): Xaa is A or G
  MOD_RES (23), (24), (25), (26): Xaa is A or G or is absent
PTXXVPTRLSPISILYKXXXXXXXXXLKYHYDMVVESXGX

SEQ ID NO: 71729 - protein, 41 aa, Artificial Sequence; identical to SEQ ID NO: 33048
  GFR-binding peptide
  MOD_RES (5), (6), (40): Xaa is C or S
  MOD_RES (20), (21), (22), (23), (24): Xaa is A or G
  MOD_RES (25), (26), (27), (28): Xaa is A or G or is absent

SEQ ID NO: 71730 - protein, 40 aa, Artificial Sequence
  GFR-binding peptide
  MOD_RES (5), (6), (40): Xaa is C or S
  MOD_RES (20), (21), (22), (23), (24): Xaa is A or G
  MOD_RES (25), (26), (27), (28): Xaa is A or G or is absent
IPEPXXVPEKMEPISILYLXXXXXXXXXKFKYENMTVESX

SEQ ID NO: 71731 - protein, 32 aa, Artificial Sequence; identical to SEQ ID NO: 30902
  GFR-binding peptide
  MOD_RES (1), (1): Xaa is C or S

SEQ ID NO: 71732 - protein, 34 aa, Artificial Sequence; identical to SEQ ID NO: 9499
  GFR-binding peptide
  MOD_RES (34), (34): Xaa is C or S
  MOD_RES (14), (15), (16), (17), (18): Xaa is A or G
  MOD_RES (19), (20), (21), (22): Xaa is A or G or is absent

SEQ ID NO: 71733 - protein, 39 aa, Artificial Sequence; identical to SEQ ID NO: 9502
  GFR-binding peptide
  MOD_RES (5), (6), (39): Xaa is C or S
  MOD_RES (20), (21), (22), (23), (24): Xaa is A or G
  MOD_RES (25), (26), (27), (28): Xaa is A or G or is absent

SEQ ID NO: 71734 - protein, 38 aa, Artificial Sequence; identical to SEQ ID NO: 33055
  GFR-binding peptide
  MOD_RES (3), (4), (37): Xaa is C or S
  MOD_RES (18), (19), (20), (21), (22): Xaa is A or G
  MOD_RES (23), (24), (25), (26): Xaa is A or G or is absent

SEQ ID NO: 71735 - protein, 36 aa, Artificial Sequence; identical to SEQ ID NO: 9507
  GFR-binding peptide
  MOD_RES (1), (33), (35): Xaa is C or S

SEQ ID NO: 71736 - protein, 41 aa, Artificial Sequence; identical to SEQ ID NO: 16810
  GFR-binding peptide
  MOD_RES (4), (5), (39), (41): Xaa is C or S
  MOD_RES (19), (20), (21), (22), (23): Xaa is A or G
  MOD_RES (24), (25), (26), (27): Xaa is A or G or is absent

SEQ ID NO: 71737 - protein, 37 aa, Artificial Sequence; identical to SEQ ID NO: 9513
  GFR-binding peptide
  MOD_RES (4), (5), (36): Xaa is C or S

SEQ ID NO: 71738 - protein, 40 aa, Artificial Sequence; identical to SEQ ID NO: 57954
  GFR-binding peptide
  MOD_RES (6), (7), (40): Xaa is C or S
  MOD_RES (21), (22), (23), (24), (25): Xaa is A or G
  MOD_RES (26), (27), (28), (29): Xaa is A or G or is absent

SEQ ID NO: 71739 - protein, 33 aa, Artificial Sequence; identical to SEQ ID NO: 9514
  GFR-binding peptide
  MOD_RES (1), (2), (33): Xaa is C or S

SEQ ID NO: 71740 - protein, 36 aa, Artificial Sequence; identical to SEQ ID NO: 30912
  GFR-binding peptide
  MOD_RES (1), (2), (36): Xaa is C or S
  MOD_RES (16), (17), (18), (19), (20): Xaa is A or G
  MOD_RES (21), (22), (23), (24): Xaa is A or G or is absent

SEQ ID NO: 71741 - protein, 44 aa, Artificial Sequence; identical to SEQ ID NO: 9516
  GFR-binding peptide
  MOD_RES (6), (7), (41), (43): Xaa is C or S
  MOD_RES (21), (22), (23), (24), (25): Xaa is A or G
  MOD_RES (26), (27), (28), (29): Xaa is A or G or is absent

SEQ ID NO: 71742 - protein, 38 aa, Artificial Sequence; identical to SEQ ID NO: 9517
  GFR-binding peptide
  MOD_RES (1), (35), (37): Xaa is C or S
  MOD_RES (15), (16), (17), (18), (19): Xaa is A or G
  MOD_RES (20), (21), (22), (23): Xaa is A or G or is absent

SEQ ID NO: 71743 - protein, 33 aa, Artificial Sequence
  GFR-binding peptide
  MOD_RES (1), (33): Xaa is C or S
XVPEKMSPINILYFDENKNVVYGKIPNMTVESX

SEQ ID NO: 71744 - protein, 40 aa, Artificial Sequence; identical to SEQ ID NO: 33066
  GFR-binding peptide
  MOD_RES (3), (4), (38), (40): Xaa is C or S
  MOD_RES (18), (19), (20), (21), (22): Xaa is A or G
  MOD_RES (23), (24), (25), (26): Xaa is A or G or is absent

SEQ ID NO: 71745 - protein, 32 aa, Artificial Sequence; identical to SEQ ID NO: 30917
  GFR-binding peptide
  MOD_RES (1), (2): Xaa is C or S

SEQ ID NO: 71746 - protein, 39 aa, Artificial Sequence; identical to SEQ ID NO: 9524
  GFR-binding peptide
  MOD_RES (2), (3), (36), (38): Xaa is C or S
  MOD_RES (17), (18), (19), (20), (21): Xaa is A or G
  MOD_RES (22), (23), (24), (25): Xaa is A or G or is absent

SEQ ID NO: 71747 - protein, 36 aa, Artificial Sequence
  GFR-binding peptide
  MOD_RES (3), (4), (36): Xaa is C or S
ASXXVPARLSATSILYYDAANNVVLRKHRDMVVEAX

SEQ ID NO: 71748 - protein, 38 aa, Artificial Sequence
  GFR-binding peptide
  MOD_RES (6), (7): Xaa is C or S
HVPKPXXAPTKLSATSVLYYDDSSNVILRKHRNMVVRS

SEQ ID NO: 71749 - protein, 36 aa, Artificial Sequence; identical to SEQ ID NO: 33073
  GFR-binding peptide
  MOD_RES (1), (2), (36): Xaa is C or S
  MOD_RES (16), (17), (18), (19), (20): Xaa is A or G
  MOD_RES (21), (22), (23), (24): Xaa is A or G or is absent

SEQ ID NO: 71750 - protein, 33 aa, Artificial Sequence; identical to SEQ ID NO: 9527
  GFR-binding peptide
  MOD_RES (33), (33): Xaa is C or S
  MOD_RES (14), (15), (16), (17), (18): Xaa is A or G
  MOD_RES (19), (20), (21), (22): Xaa is A or G or is absent

SEQ ID NO: 71751 - protein, 37 aa, Artificial Sequence; identical to SEQ ID NO: 30922
  GFR-binding peptide
  MOD_RES (1), (2), (34), (36): Xaa is C or S

SEQ ID NO: 71752 - protein, 36 aa, Artificial Sequence; identical to SEQ ID NO: 30924
  GFR-binding peptide
  MOD_RES (6), (6): Xaa is C or S

SEQ ID NO: 71753 - protein, 39 aa, Artificial Sequence; identical to SEQ ID NO: 30930
  GFR-binding peptide
  MOD_RES (5), (6), (38): Xaa is C or S

SEQ ID NO: 71754 - protein, 38 aa, Artificial Sequence; identical to SEQ ID NO: 9536
  GFR-binding peptide
  MOD_RES (6), (7): Xaa is C or S

SEQ ID NO: 71755 - protein, 39 aa, Artificial Sequence; identical to SEQ ID NO: 9537
  GFR-binding peptide
  MOD_RES (5), (6): Xaa is C or S
  MOD_RES (20), (21), (22), (23), (24): Xaa is A or G
  MOD_RES (25), (26), (27), (28): Xaa is A or G or is absent

SEQ ID NO: 71756 - protein, 34 aa, Artificial Sequence
  GFR-binding peptide
  MOD_RES (1), (2), (34): Xaa is C or S
XXTPTKMEPISMLYLNDKQQIIKFKYEGMVVDRX

SEQ ID NO: 71757 - protein, 40 aa, Artificial Sequence; identical to SEQ ID NO: 9538
  GFR-binding peptide
  MOD_RES (5), (6), (37), (39): Xaa is C or S

SEQ ID NO: 71758 - protein, 39 aa, Artificial Sequence; identical to SEQ ID NO: 33096
  GFR-binding peptide
  MOD_RES (5), (6), (38): Xaa is C or S

SEQ ID NO: 71759 - protein, 40 aa, Artificial Sequence; identical to SEQ ID NO: 9541
  GFR-binding peptide
  MOD_RES (4), (5), (39): Xaa is C or S
  MOD_RES (19), (20), (21), (22), (23): Xaa is A or G
  MOD_RES (24), (25), (26), (27): Xaa is A or G or is absent

SEQ ID NO: 71760 - protein, 36 aa, Artificial Sequence; identical to SEQ ID NO: 9542
  GFR-binding peptide
  MOD_RES (1), (34), (36): Xaa is C or S
  MOD_RES (15), (16), (17), (18), (19): Xaa is A or G
  MOD_RES (20), (21), (22), (23): Xaa is A or G or is absent

SEQ ID NO: 71761 - protein, 38 aa, Artificial Sequence; identical to SEQ ID NO: 30935
  GFR-binding peptide
  MOD_RES (1), (36), (38): Xaa is C or S
  MOD_RES (15), (16), (17), (18), (19): Xaa is A or G
  MOD_RES (20), (21), (22), (23): Xaa is A or G or is absent

SEQ ID NO: 71762 - protein, 38 aa, Artificial Sequence
  GFR-binding peptide
  MOD_RES (3), (4), (36), (38): Xaa is C or S
GPXXTPTKMSATSMLYYNDKQQIILRKHRGMVVDRXGX

SEQ ID NO: 71763 - protein, 37 aa, Artificial Sequence; identical to SEQ ID NO: 33103
  GFR-binding peptide
  MOD_RES (5), (6): Xaa is C or S

SEQ ID NO: 71764 - protein, 34 aa, Artificial Sequence; identical to SEQ ID NO: 9545
  GFR-binding peptide
  MOD_RES (1), (33): Xaa is C or S

SEQ ID NO: 71765 - protein, 39 aa, Artificial Sequence; identical to SEQ ID NO: 9546
  GFR-binding peptide
  MOD_RES (6), (7), (38): Xaa is C or S

SEQ ID NO: 71766 - protein, 37 aa, Artificial Sequence; identical to SEQ ID NO: 33104
  GFR-binding peptide
  MOD_RES (3), (4), (36): Xaa is C or S

SEQ ID NO: 71767 - protein, 37 aa, Artificial Sequence; identical to SEQ ID NO: 30941
  GFR-binding peptide
  MOD_RES (1), (35), (37): Xaa is C or S
  MOD_RES (15), (16), (17), (18), (19): Xaa is A or G
  MOD_RES (20), (21), (22), (23): Xaa is A or G or is absent

SEQ ID NO: 71768 - protein, 34 aa, Artificial Sequence
  GFR-binding peptide
  MOD_RES (1), (2): Xaa is C or S
  MOD_RES (16), (17), (18), (19), (20): Xaa is A or G
  MOD_RES (21), (22), (23), (24): Xaa is A or G or is absent
XXVPEKMSPINILYFXXXXXXXXXYGKIPNMTVE

SEQ ID NO: 71769 - protein, 35 aa, Artificial Sequence
  GFR-binding peptide
  MOD_RES (1), (2), (34): Xaa is C or S
XXVPTRLSATSILYYDSANNVVLRKHRDMVVESXG

SEQ ID NO: 71770 - protein, 35 aa, Artificial Sequence; identical to SEQ ID NO: 33110
  GFR-binding peptide
  MOD_RES (1), (2): Xaa is C or S
  MOD_RES (16), (17), (18), (19), (20): Xaa is A or G
  MOD_RES (21), (22), (23), (24): Xaa is A or G or is absent

SEQ ID NO: 71771 - protein, 34 aa, Artificial Sequence; identical to SEQ ID NO: 9550
  GFR-binding peptide
  MOD_RES (34), (34): Xaa is C or S
  MOD_RES (14), (15), (16), (17), (18): Xaa is A or G
  MOD_RES (19), (20), (21), (22): Xaa is A or G or is absent

SEQ ID NO: 71772 - protein, 37 aa, Artificial Sequence; identical to SEQ ID NO: 9551
  GFR-binding peptide
  MOD_RES (1), (36): Xaa is C or S
  MOD_RES (15), (16), (17), (18), (19): Xaa is A or G
  MOD_RES (20), (21), (22), (23): Xaa is A or G or is absent

SEQ ID NO: 71773 - protein, 40 aa, Artificial Sequence; identical to SEQ ID NO: 9553
  GFR-binding peptide
  MOD_RES (6), (7), (40): Xaa is C or S

SEQ ID NO: 71774 - protein, 32 aa, Artificial Sequence; identical to SEQ ID NO: 9556
  GFR-binding peptide
  MOD_RES (1), (1): Xaa is C or S

SEQ ID NO: 71775 - protein, 39 aa, Artificial Sequence; identical to SEQ ID NO: 9557
  GFR-binding peptide
  MOD_RES (6), (7): Xaa is C or S
  MOD_RES (21), (22), (23), (24), (25): Xaa is A or G
  MOD_RES (26), (27), (28), (29): Xaa is A or G or is absent

SEQ ID NO: 71776 - protein, 43 aa, Artificial Sequence; identical to SEQ ID NO: 33113
  GFR-binding peptide
  MOD_RES (5), (6), (40), (42): Xaa is C or S
  MOD_RES (20), (21), (22), (23), (24): Xaa is A or G
  MOD_RES (25), (26), (27), (28): Xaa is A or G or is absent

SEQ ID NO: 71777 - protein, 39 aa, Artificial Sequence; identical to SEQ ID NO: 33115
  GFR-binding peptide
  MOD_RES (5), (6), (38): Xaa is C or S

SEQ ID NO: 71778 - protein, 37 aa, Artificial Sequence
  GFR-binding peptide
  MOD_RES (3), (4), (35), (37): Xaa is C or S
STXXAPVKTSATSMLYYDNGRVLLLRKHRMIVEEXGX

SEQ ID NO: 71779 - protein, 34 aa, Artificial Sequence; identical to SEQ ID NO: 9559
  GFR-binding peptide
  MOD_RES (1), (32), (34): Xaa is C or S

SEQ ID NO: 71780 - protein, 40 aa, Artificial Sequence; identical to SEQ ID NO: 9562
  GFR-binding peptide
  MOD_RES (5), (6), (39): Xaa is C or S
  MOD_RES (20), (21), (22), (23), (24): Xaa is A or G
  MOD_RES (25), (26), (27), (28): Xaa is A or G or is absent

SEQ ID NO: 71781 - protein, 32 aa, Artificial Sequence; identical to SEQ ID NO: 9563
  GFR-binding peptide
  MOD_RES (2), (2): Xaa is C or S

SEQ ID NO: 71782 - protein, 36 aa, Artificial Sequence; identical to SEQ ID NO: 9564
  GFR-binding peptide
  MOD_RES (1), (33), (35): Xaa is C or S

SEQ ID NO: 71783 - protein, 36 aa, Artificial Sequence; identical to SEQ ID NO: 33124
  GFR-binding peptide
  MOD_RES (1), (2), (36): Xaa is C or S
  MOD_RES (16), (17), (18), (19), (20): Xaa is A or G
  MOD_RES (21), (22), (23), (24): Xaa is A or G or is absent

SEQ ID NO: 71784 - protein, 37 aa, Artificial Sequence; identical to SEQ ID NO: 9566
  GFR-binding peptide
  MOD_RES (3), (4), (36): Xaa is C or S

SEQ ID NO: 71785 - protein, 37 aa, Artificial Sequence; identical to SEQ ID NO: 33126
  GFR-binding peptide
  MOD_RES (1), (2), (36): Xaa is C or S
  MOD_RES (16), (17), (18), (19), (20): Xaa is A or G
  MOD_RES (21), (22), (23), (24): Xaa is A or G or is absent

SEQ ID NO: 71786 - protein, 36 aa, Artificial Sequence; identical to SEQ ID NO: 9567
  GFR-binding peptide
  MOD_RES (4), (5), (36): Xaa is C or S

SEQ ID NO: 71787 - protein, 33 aa, Artificial Sequence
  GFR-binding peptide
  MOD_RES (33), (33): Xaa is C or S
  MOD_RES (14), (15), (16), (17), (18): Xaa is A or G
  MOD_RES (19), (20), (21), (22): Xaa is A or G or is absent
VSQDLSPINILYFXXXXXXXXXYGKIPMIVKSX

SEQ ID NO: 71788 - protein, 35 aa, Artificial Sequence
  GFR-binding peptide
  MOD_RES (2), (3): Xaa is C or S
  MOD_RES (17), (18), (19), (20), (21): Xaa is A or G
  MOD_RES (22), (23), (24), (25): Xaa is A or G or is absent
PXXVPEKMSPINILYFXXXXXXXXXYGKIPNMTVE

SEQ ID NO: 71789 - protein, 35 aa, Artificial Sequence
  GFR-binding peptide
  MOD_RES (4), (5): Xaa is C or S
AGPXXTPTKMSPISMLYKNDKQQIILKYHYGMVVD

SEQ ID NO: 71790 - protein, 33 aa, Artificial Sequence; identical to SEQ ID NO: 9570
  GFR-binding peptide
  MOD_RES (14), (15), (16), (17), (18): Xaa is A or G
  MOD_RES (19), (20), (21), (22): Xaa is A or G or is absent

SEQ ID NO: 71791 - protein, 38 aa, Artificial Sequence; identical to SEQ ID NO: 30965
  GFR-binding peptide
  MOD_RES (5), (6), (38): Xaa is C or S

SEQ ID NO: 71792 - protein, 35 aa, Artificial Sequence; identical to SEQ ID NO: 33135
  GFR-binding peptide
  MOD_RES (4), (4): Xaa is C or S

SEQ ID NO: 71793 - protein, 41 aa, Artificial Sequence; identical to SEQ ID NO: 30966
  GFR-binding peptide
  MOD_RES (4), (5), (39), (41): Xaa is C or S
  MOD_RES (19), (20), (21), (22), (23): Xaa is A or G
  MOD_RES (24), (25), (26), (27): Xaa is A or G or is absent

SEQ ID NO: 71794 - protein, 41 aa, Artificial Sequence; identical to SEQ ID NO: 30970
  GFR-binding peptide
  MOD_RES (6), (7), (41): Xaa is C or S
  MOD_RES (21), (22), (23), (24), (25): Xaa is A or G
  MOD_RES (26), (27), (28), (29): Xaa is A or G or is absent

SEQ ID NO: 71795 - protein, 30 aa, Artificial Sequence
  GFR-binding peptide
TPTKMSATSMLYYNDKQQIILRKHRGMVVD

SEQ ID NO: 71796 - protein, 35 aa, Artificial Sequence
  GFR-binding peptide
  MOD_RES (1), (2): Xaa is C or S
  MOD_RES (16), (17), (18), (19), (20): Xaa is A or G
  MOD_RES (21), (22), (23), (24): Xaa is A or G or is absent
XXVPEKMNAISILYFXXXXXXXXXLKKYRNMTVES

SEQ ID NO: 71797 - protein, 38 aa, Artificial Sequence
  GFR-binding peptide
  MOD_RES (5), (6): Xaa is C or S
  MOD_RES (20), (21), (22), (23), (24): Xaa is A or G
  MOD_RES (25), (26), (27), (28): Xaa is A or G or is absent
SAGPXXTPTKMSPISMLYKXXXXXXXXXLKYHYGMVVD

SEQ ID NO: 71798 - protein, 38 aa, Artificial Sequence; identical to SEQ ID NO: 9577
  GFR-binding peptide
  MOD_RES (4), (5), (37): Xaa is C or S

SEQ ID NO: 71799 - protein, 38 aa, Artificial Sequence; identical to SEQ ID NO: 9578
  GFR-binding peptide
  MOD_RES (4), (5), (38): Xaa is C or S
  MOD_RES (19), (20), (21), (22), (23): Xaa is A or G
  MOD_RES (24), (25), (26), (27): Xaa is A or G or is absent

SEQ ID NO: 71800 - protein, 41 aa, Artificial Sequence; identical to SEQ ID NO: 33143
  GFR-binding peptide
  MOD_RES (2), (3), (38), (40): Xaa is C or S
  MOD_RES (17), (18), (19), (20), (21): Xaa is A or G
  MOD_RES (22), (23), (24), (25): Xaa is A or G or is absent

SEQ ID NO: 71801 - protein, 39 aa, Artificial Sequence
  GFR-binding peptide
  MOD_RES (3), (4), (38): Xaa is C or S
  MOD_RES (18), (19), (20), (21), (22): Xaa is A or G
  MOD_RES (23), (24), (25), (26): Xaa is A or G or is absent
KAXXVPTKLSATSILYYXXXXXXXXXLRKHRGMAVSEXG

SEQ ID NO: 71802 - protein, 40 aa, Artificial Sequence; identical to SEQ ID NO: 9582
  GFR-binding peptide
  MOD_RES (6), (7), (40): Xaa is C or S
  MOD_RES (21), (22), (23), (24), (25): Xaa is A or G
  MOD_RES (26), (27), (28), (29): Xaa is A or G or is absent

SEQ ID NO: 71803 - protein, 38 aa, Artificial Sequence; identical to SEQ ID NO: 9583
  GFR-binding peptide
  MOD_RES (6), (7): Xaa is C or S

SEQ ID NO: 71804 - protein, 36 aa, Artificial Sequence; identical to SEQ ID NO: 58018
  GFR-binding peptide
  MOD_RES (1), (35): Xaa is C or S
  MOD_RES (15), (16), (17), (18), (19): Xaa is A or G
  MOD_RES (20), (21), (22), (23): Xaa is A or G or is absent

SEQ ID NO: 71805 - protein, 39 aa, Artificial Sequence; identical to SEQ ID NO: 30982
  GFR-binding peptide
  MOD_RES (5), (39): Xaa is C or S
  MOD_RES (19), (20), (21), (22), (23): Xaa is A or G
  MOD_RES (24), (25), (26), (27): Xaa is A or G or is absent

SEQ ID NO: 71806 - protein, 36 aa, Artificial Sequence; identical to SEQ ID NO: 33151
  GFR-binding peptide
  MOD_RES (2), (3), (36): Xaa is C or S
  MOD_RES (17), (18), (19), (20), (21): Xaa is A or G
  MOD_RES (22), (23), (24), (25): Xaa is A or G or is absent

SEQ ID NO: 71807 - protein, 40 aa, Artificial Sequence; identical to SEQ ID NO: 30983
  GFR-binding peptide
  MOD_RES (2), (3), (37), (39): Xaa is C or S
  MOD_RES (17), (18), (19), (20), (21): Xaa is A or G
  MOD_RES (22), (23), (24), (25): Xaa is A or G or is absent

SEQ ID NO: 71808 - protein, 42 aa, Artificial Sequence
  GFR-binding peptide
  MOD_RES (6), (7), (39), (41): Xaa is C or S
AAPASXXVPARLSATSILYYDAANNVVLRKHRDMVVEAXGXR

SEQ ID NO: 71809 - protein, 30 aa, Artificial Sequence; identical to SEQ ID NO: 9588
  GFR-binding peptide

SEQ ID NO: 71810 - protein, 39 aa, Artificial Sequence; identical to SEQ ID NO: 9589
  GFR-binding peptide
  MOD_RES (1), (2), (36), (38): Xaa is C or S
  MOD_RES (16), (17), (18), (19), (20): Xaa is A or G
  MOD_RES (21), (22), (23), (24): Xaa is A or G or is absent

SEQ ID NO: 71811 - protein, 37 aa, Artificial Sequence; identical to SEQ ID NO: 9590
  GFR-binding peptide
  MOD_RES (2), (3), (35), (37): Xaa is C or S

SEQ ID NO: 71812 - protein, 35 aa, Artificial Sequence
  GFR-binding peptide
  MOD_RES (1), (2), (34): Xaa is C or S
XXVPTRLEPISILYLDSANNVVKFKYEDMVVESXG

SEQ ID NO: 71813 - protein, 37 aa, Artificial Sequence
  GFR-binding peptide
  MOD_RES (1), (34), (36): Xaa is C or S
  MOD_RES (15), (16), (17), (18), (19): Xaa is A or G
  MOD_RES (20), (21), (22), (23): Xaa is A or G or is absent
XVSQDLSPINILYFXXXXXXXXXYGKIPMIVKSXKXS

SEQ ID NO: 71814 - protein, 41 aa, Artificial Sequence
  GFR-binding peptide
  MOD_RES (4), (5), (38), (40): Xaa is C or S
  MOD_RES (19), (20), (21), (22), (23): Xaa is A or G
  MOD_RES (24), (25), (26), (27): Xaa is A or G or is absent
AAPXXVPQALSPINILYFXXXXXXXXXYGKIPMIVRSXKXS

SEQ ID NO: 71815 - protein, 37 aa, Artificial Sequence
  GFR-binding peptide
  MOD_RES (6), (7): Xaa is C or S
RVPSTXXAPVKTEPISMLYLDNGRVLLKFKYEMIVEE

SEQ ID NO: 71816 - protein, 37 aa, Artificial Sequence; identical to SEQ ID NO: 9602
  GFR-binding peptide
  MOD_RES (4), (5), (37): Xaa is C or S

SEQ ID NO: 71817 - protein, 40 aa, Artificial Sequence; identical to SEQ ID NO: 9605
  GFR-binding peptide
  MOD_RES (5), (39): Xaa is C or S
  MOD_RES (19), (20), (21), (22), (23): Xaa is A or G
  MOD_RES (24), (25), (26), (27): Xaa is A or G or is absent

SEQ ID NO: 71818 - protein, 35 aa, Artificial Sequence
  GFR-binding peptide
  MOD_RES (4), (5): Xaa is C or S
AGPXXTPTKMEPISMLYLNDKQQIIKFKYEGMVVD

SEQ ID NO: 71819 - protein, 37 aa, Artificial Sequence; identical to SEQ ID NO: 33172
  GFR-binding peptide
  MOD_RES (1), (35), (37): Xaa is C or S
  MOD_RES (15), (16), (17), (18), (19): Xaa is A or G
  MOD_RES (20), (21), (22), (23): Xaa is A or G or is absent

SEQ ID NO: 71820 - protein, 36 aa, Artificial Sequence; identical to SEQ ID NO: 9607
  GFR-binding peptide
  MOD_RES (3), (4), (36): Xaa is C or S

SEQ ID NO: 71821 - protein, 35 aa, Artificial Sequence; identical to SEQ ID NO: 31002
  GFR-binding peptide
  MOD_RES (33), (35): Xaa is C or S

SEQ ID NO: 71822 - protein, 35 aa, Artificial Sequence; identical to SEQ ID NO: 9608
  GFR-binding peptide
  MOD_RES (32), (34): Xaa is C or S

SEQ ID NO: 71823 - protein, 37 aa, Artificial Sequence; identical to SEQ ID NO: 33176
  GFR-binding peptide
  MOD_RES (4), (5): Xaa is C or S
  MOD_RES (19), (20), (21), (22), (23): Xaa is A or G
  MOD_RES (24), (25), (26), (27): Xaa is A or G or is absent

SEQ ID NO: 71824 - protein, 39 aa, Artificial Sequence
  GFR-binding peptide
  MOD_RES (6), (7), (39): Xaa is C or S
GIPEPXXVPEKMSATSILYYDENKNVVLRKHRNMTVESX

SEQ ID NO: 71825 - protein, 34 aa, Artificial Sequence
  GFR-binding peptide
  MOD_RES (1), (1): Xaa is C or S
  MOD_RES (15), (16), (17), (18), (19): Xaa is A or G
  MOD_RES (20), (21), (22), (23): Xaa is A or G or is absent
XVPEKMNAISILYFXXXXXXXXXLKKYRNMTVES

SEQ ID NO: 71826 - protein, 41 aa, Artificial Sequence; identical to SEQ ID NO: 9610
  GFR-binding peptide
  MOD_RES (5), (6), (40): Xaa is C or S
  MOD_RES (20), (21), (22), (23), (24): Xaa is A or G
  MOD_RES (25), (26), (27), (28): Xaa is A or G or is absent

SEQ ID NO: 71827 - protein, 35 aa, Artificial Sequence; identical to SEQ ID NO: 9611
  GFR-binding peptide
  MOD_RES (4), (5): Xaa is C or S

SEQ ID NO: 71828 - protein, 42 aa, Artificial Sequence
  GFR-binding peptide
  MOD_RES (6), (7), (39), (41): Xaa is C or S
KASKAXXVPTKLSATSILYYDKGVVTYLRKHRGMAVSEXGXR

SEQ ID NO: 71829 - protein, 34 aa, Artificial Sequence
  GFR-binding peptide
  MOD_RES (31), (33): Xaa is C or S
VPQALSPINILYFVGRKPKVYGKIPMIVRSXKXS

SEQ ID NO: 71830 - protein, 38 aa, Artificial Sequence; identical to SEQ ID NO: 31009
  GFR-binding peptide
  MOD_RES (2), (3), (37): Xaa is C or S
  MOD_RES (17), (18), (19), (20), (21): Xaa is A or G
  MOD_RES (22), (23), (24), (25): Xaa is A or G or is absent

SEQ ID NO: 71831 - protein, 37 aa, Artificial Sequence; identical to SEQ ID NO: 33192
  GFR-binding peptide
  MOD_RES (3), (4), (36): Xaa is C or S

SEQ ID NO: 71832 - protein, 39 aa, Artificial Sequence; identical to SEQ ID NO: 31012
  GFR-binding peptide
  MOD_RES (5), (6), (37), (39): Xaa is C or S

SEQ ID NO: 71833 - protein, 38 aa, Artificial Sequence
  GFR-binding peptide
  MOD_RES (5), (6): Xaa is C or S
  MOD_RES (20), (21), (22), (23), (24): Xaa is A or G
  MOD_RES (25), (26), (27), (28): Xaa is A or G or is absent
ASKAXXVPTKLSATSILYYXXXXXXXXXLRKHRGMAVS

SEQ ID NO: 71834 - protein, 42 aa, Artificial Sequence
  GFR-binding peptide
  MOD_RES (6), (7), (40), (42): Xaa is C or S
  MOD_RES (21), (22), (23), (24), (25): Xaa is A or G
  MOD_RES (26), (27), (28), (29): Xaa is A or G or is absent
ASAAPXXVPQALSPINILYFXXXXXXXXXYGKIPMIVRSXKX

SEQ ID NO: 71835 - protein, 38 aa, Artificial Sequence
  GFR-binding peptide
  MOD_RES (2), (3), (35), (37): Xaa is C or S
PXXTPTKMEPISMLYLNDKQQIIKFKYEGMVVDRXGXS

SEQ ID NO: 71836 - protein, 32 aa, Artificial Sequence; identical to SEQ ID NO: 31016
  GFR-binding peptide
  MOD_RES (32), (32): Xaa is C or S

SEQ ID NO: 71837 - protein, 35 aa, Artificial Sequence; identical to SEQ ID NO: 31019
  GFR-binding peptide
  MOD_RES (4), (5): Xaa is C or S

SEQ ID NO: 71838 - protein, 38 aa, Artificial Sequence; identical to SEQ ID NO: 9616
  GFR-binding peptide
  MOD_RES (1), (2), (35), (37): Xaa is C or S
  MOD_RES (16), (17), (18), (19), (20): Xaa is A or G
  MOD_RES (21), (22), (23), (24): Xaa is A or G or is absent

SEQ ID NO: 71839 - protein, 35 aa, Artificial Sequence; identical to SEQ ID NO: 16902
  GFR-binding peptide
  MOD_RES (1), (2): Xaa is C or S
  MOD_RES (16), (17), (18), (19), (20): Xaa is A or G
  MOD_RES (21), (22), (23), (24): Xaa is A or G or is absent

SEQ ID NO: 71840 - protein, 37 aa, Artificial Sequence; identical to SEQ ID NO: 31020
  GFR-binding peptide
  MOD_RES (3), (4), (36): Xaa is C or S

SEQ ID NO: 71841 - protein, 35 aa, Artificial Sequence; identical to SEQ ID NO: 9617
  GFR-binding peptide
  MOD_RES (1), (35): Xaa is C or S
  MOD_RES (15), (16), (17), (18), (19): Xaa is A or G
  MOD_RES (20), (21), (22), (23): Xaa is A or G or is absent

SEQ ID NO: 71842 - protein, 35 aa, Artificial Sequence
  GFR-binding peptide
  MOD_RES (2), (3): Xaa is C or S
  MOD_RES (17), (18), (19), (20), (21): Xaa is A or G
  MOD_RES (22), (23), (24), (25): Xaa is A or G or is absent
PXXVPQDLSPINILYFXXXXXXXXXYGKIPMVVKS

SEQ ID NO: 71843 - protein, 42 aa, Artificial Sequence; identical to SEQ ID NO: 9619
  GFR-binding peptide
  MOD_RES (6), (7), (41): Xaa is C or S
  MOD_RES (21), (22), (23), (24), (25): Xaa is A or G
  MOD_RES (26), (27), (28), (29): Xaa is A or G or is absent

SEQ ID NO: 71844 - protein, 36 aa, Artificial Sequence
  GFR-binding peptide
  MOD_RES (3), (4): Xaa is C or S
  MOD_RES (18), (19), (20), (21), (22): Xaa is A or G
  MOD_RES (23), (24), (25), (26): Xaa is A or G or is absent
STXXAPVKTSATSMLYYXXXXXXXXXLRKHRMIVEE

SEQ ID NO: 71845 - protein, 37 aa, Artificial Sequence; identical to SEQ ID NO: 33201
  GFR-binding peptide
  MOD_RES (2), (3), (37): Xaa is C or S
  MOD_RES (17), (18), (19), (20), (21): Xaa is A or G
  MOD_RES (22), (23), (24), (25): Xaa is A or G or is absent

SEQ ID NO: 71846 - protein, 43 aa, Artificial Sequence
  GFR-binding peptide
  MOD_RES (6), (7), (41), (43): Xaa is C or S
  MOD_RES (21), (22), (23), (24), (25): Xaa is A or G
  MOD_RES (26), (27), (28), (29): Xaa is A or G or is absent
GSAGPXXTPTKMSPISMLYKXXXXXXXXXLKYHYGMVVDRXGX

SEQ ID NO: 71847 - protein, 33 aa, Artificial Sequence; identical to SEQ ID NO: 33202
  GFR-binding peptide
  MOD_RES (1), (1): Xaa is C or S
  MOD_RES (15), (16), (17), (18), (19): Xaa is A or G
  MOD_RES (20), (21), (22), (23): Xaa is A or G or is absent

SEQ ID NO: 71848 - protein, 36 aa, Artificial Sequence; identical to SEQ ID NO: 31025
  GFR-binding peptide
  MOD_RES (2), (3), (34), (36): Xaa is C or S

SEQ ID NO: 71849 - protein, 36 aa, Artificial Sequence; identical to SEQ ID NO: 9625
  GFR-binding peptide
  MOD_RES (1), (2), (33), (35): Xaa is C or S

SEQ ID NO: 71850 - protein, 31 aa, Artificial Sequence
  GFR-binding peptide
  MOD_RES (1), (1): Xaa is C or S
XVPEKMSATSILYYDENKNVVLRKHRNMTVE

SEQ ID NO: 71851 - protein, 40 aa, Artificial Sequence; identical to SEQ ID NO: 33205
  GFR-binding peptide
  MOD_RES (6), (7): Xaa is C or S
  MOD_RES (21), (22), (23), (24), (25): Xaa is A or G
  MOD_RES (26), (27), (28), (29): Xaa is A or G or is absent

SEQ ID NO: 71852 - protein, 41 aa, Artificial Sequence; identical to SEQ ID NO: 9628
  GFR-binding peptide
  MOD_RES (6), (7), (41): Xaa is C or S
  MOD_RES (21), (22), (23), (24), (25): Xaa is A or G
  MOD_RES (26), (27), (28), (29): Xaa is A or G or is absent

SEQ ID NO: 71853 - protein, 35 aa, Artificial Sequence; identical to SEQ ID NO: 33207
  GFR-binding peptide
  MOD_RES (2), (2): Xaa is C or S
  MOD_RES (16), (17), (18), (19), (20): Xaa is A or G
  MOD_RES (21), (22), (23), (24): Xaa is A or G or is absent

SEQ ID NO: 71854 - protein, 35 aa, Artificial Sequence; identical to SEQ ID NO: 9629
  GFR-binding peptide
  MOD_RES (1), (2), (35): Xaa is C or S
  MOD_RES (16), (17), (18), (19), (20): Xaa is A or G
  MOD_RES (21), (22), (23), (24): Xaa is A or G or is absent

SEQ ID NO: 71855 - protein, 39 aa, Artificial Sequence; identical to SEQ ID NO: 31031
  GFR-binding peptide
  MOD_RES (1), (2), (36), (38): Xaa is C or S
  MOD_RES (16), (17), (18), (19), (20): Xaa is A or G
  MOD_RES (21), (22), (23), (24): Xaa is A or G or is absent

SEQ ID NO: 71856 - protein, 37 aa, Artificial Sequence
  GFR-binding peptide
  MOD_RES (2), (3), (36): Xaa is C or S
  MOD_RES (17), (18), (19), (20), (21): Xaa is A or G
  MOD_RES (22), (23), (24), (25): Xaa is A or G or is absent
TXXAPVKTSPISMLYKXXXXXXXXXLKYHYMIVEEXG

SEQ ID NO: 71857 - protein, 37 aa, Artificial Sequence; identical to SEQ ID NO: 31033
  GFR-binding peptide
  MOD_RES (34), (36): Xaa is C or S
  MOD_RES (14), (15), (16), (17), (18): Xaa is A or G
  MOD_RES (19), (20), (21), (22): Xaa is A or G or is absent

SEQ ID NO: 71858 - protein, 32 aa, Artificial Sequence; identical to SEQ ID NO: 33210
  GFR-binding peptide
  MOD_RES (14), (15), (16), (17), (18): Xaa is A or G
  MOD_RES (19), (20), (21), (22): Xaa is A or G or is absent

SEQ ID NO: 71859 - protein, 41 aa, Artificial Sequence
  GFR-binding peptide
  MOD_RES (5), (6), (40): Xaa is C or S
  MOD_RES (20), (21), (22), (23), (24): Xaa is A or G
  MOD_RES (25), (26), (27), (28): Xaa is A or G or is absent
IPEPXXVPEKMNAISILYFXXXXXXXXXLKKYRNMTVESXA

SEQ ID NO: 71860 - protein, 42 aa, Artificial Sequence; identical to SEQ ID NO: 9631
  GFR-binding peptide
  MOD_RES (5), (6), (39), (41): Xaa is C or S
  MOD_RES (20), (21), (22), (23), (24): Xaa is A or G
  MOD_RES (25), (26), (27), (28): Xaa is A or G or is absent

SEQ ID NO: 71861 - protein, 36 aa, Artificial Sequence; identical to SEQ ID NO: 33213
  GFR-binding peptide
  MOD_RES (2), (3): Xaa is C or S
  MOD_RES (17), (18), (19), (20), (21): Xaa is A or G
  MOD_RES (22), (23), (24), (25): Xaa is A or G or is absent

SEQ ID NO: 71862 - protein, 40 aa, Artificial Sequence; identical to SEQ ID NO: 33214
  GFR-binding peptide
  MOD_RES (6), (7): Xaa is C or S
  MOD_RES (21), (22), (23), (24), (25): Xaa is A or G
  MOD_RES (26), (27), (28), (29): Xaa is A or G or is absent

SEQ ID NO: 71863 - protein, 36 aa, Artificial Sequence; identical to SEQ ID NO: 31040
  GFR-binding peptide
  MOD_RES (4), (5): Xaa is C or S

SEQ ID NO: 71864 - protein, 39 aa, Artificial Sequence
  GFR-binding peptide
  MOD_RES (6), (7), (39): Xaa is C or S
STPPTXXVPTRLSPISILYKDSANNVVLKYHYDMVVESX

SEQ ID NO: 71865 - protein, 43 aa, Artificial Sequence; identical to SEQ ID NO: 9639
  GFR-binding peptide
  MOD_RES (6), (7), (41), (43): Xaa is C or S
  MOD_RES (21), (22), (23), (24), (25): Xaa is A or G
  MOD_RES (26), (27), (28), (29): Xaa is A or G or is absent

SEQ ID NO: 71866 - protein, 39 aa, Artificial Sequence; identical to SEQ ID NO: 33224
  GFR-binding peptide
  MOD_RES (4), (5), (39): Xaa is C or S
  MOD_RES (19), (20), (21), (22), (23): Xaa is A or G
  MOD_RES (24), (25), (26), (27): Xaa is A or G or is absent

SEQ ID NO: 71867 - protein, 37 aa, Artificial Sequence
  GFR-binding peptide
  MOD_RES (3), (4): Xaa is C or S
  MOD_RES (18), (19), (20), (21), (22): Xaa is A or G
  MOD_RES (23), (24), (25), (26): Xaa is A or G or is absent
PTXXVPTRLSPISILYKXXXXXXXXXLKYHYDMVVES

SEQ ID NO: 71868 - protein, 41 aa, Artificial Sequence; identical to SEQ ID NO: 9647
  GFR-binding peptide
  MOD_RES (5), (6), (38), (40): Xaa is C or S

SEQ ID NO: 71869 - protein, 37 aa, Artificial Sequence
  GFR-binding peptide
  MOD_RES (4), (5), (37): Xaa is C or S
PASXXVPARLSATSILYYDAANNVVLRKHRDMVVEAX

SEQ ID NO: 71870 - protein, 40 aa, Artificial Sequence; identical to SEQ ID NO: 33228
  GFR-binding peptide
  MOD_RES (2), (3), (37), (39): Xaa is C or S
  MOD_RES (17), (18), (19), (20), (21): Xaa is A or G
  MOD_RES (22), (23), (24), (25): Xaa is A or G or is absent

SEQ ID NO: 71871 - protein, 35 aa, Artificial Sequence
  GFR-binding peptide
  MOD_RES (34), (34): Xaa is C or S
  MOD_RES (14), (15), (16), (17), (18): Xaa is A or G
  MOD_RES (19), (20), (21), (22): Xaa is A or G or is absent
VPEKMSATSILYYXXXXXXXXXLRKHRNMTVESXA

SEQ ID NO: 71872 - protein, 34 aa, Artificial Sequence; identical to SEQ ID NO: 9648
  GFR-binding peptide
  MOD_RES (34), (34): Xaa is C or S
  MOD_RES (14), (15), (16), (17), (18): Xaa is A or G
  MOD_RES (19), (20), (21), (22): Xaa is A or G or is absent

SEQ ID NO: 71873 - protein, 37 aa, Artificial Sequence; identical to SEQ ID NO: 9651
  GFR-binding peptide
  MOD_RES (1), (34), (36): Xaa is C or S
  MOD_RES (15), (16), (17), (18), (19): Xaa is A or G
  MOD_RES (20), (21), (22), (23): Xaa is A or G or is absent

SEQ ID NO: 71874 - protein, 42 aa, Artificial Sequence; identical to SEQ ID NO: 9652
  GFR-binding peptide
  MOD_RES (6), (7), (40), (42): Xaa is C or S
  MOD_RES (21), (22), (23), (24), (25): Xaa is A or G
  MOD_RES (26), (27), (28), (29): Xaa is A or G or is absent

SEQ ID NO: 71875 - protein, 34 aa, Artificial Sequence
  GFR-binding peptide
  MOD_RES (2), (3), (34): Xaa is C or S
TXXAPVKTSATSMLYYDNGRVLLLRKHRMIVEEX

SEQ ID NO: 71876 - protein, 32 aa, Artificial Sequence
  GFR-binding peptide
  MOD_RES (1), (32): Xaa is C or S
XVSQDLSPINILYFIGKTPKIYGKIPMIVKSX

SEQ ID NO: 71877 - protein, 39 aa, Artificial Sequence
  GFR-binding peptide
  MOD_RES (5), (6): Xaa is C or S
  MOD_RES (20), (21), (22), (23), (24): Xaa is A or G
  MOD_RES (25), (26), (27), (28): Xaa is A or G or is absent
TPPTXXVPTRLSPISILYKXXXXXXXXXLKYHYDMVVES

SEQ ID NO: 71878 - protein, 38 aa, Artificial Sequence; identical to SEQ ID NO: 9658
  GFR-binding peptide
  MOD_RES (5), (6): Xaa is C or S
  MOD_RES (20), (21), (22), (23), (24): Xaa is A or G
  MOD_RES (25), (26), (27), (28): Xaa is A or G or is absent

SEQ ID NO: 71879 - protein, 35 aa, Artificial Sequence; identical to SEQ ID NO: 9660
  GFR-binding peptide
  MOD_RES (4), (5): Xaa is C or S

SEQ ID NO: 71880 - protein, 39 aa, Artificial Sequence; identical to SEQ ID NO: 31064
  GFR-binding peptide
  MOD_RES (5), (6), (38): Xaa is C or S

SEQ ID NO: 71881 - protein, 36 aa, Artificial Sequence; identical to SEQ ID NO: 9661
  GFR-binding peptide
  MOD_RES (3), (4), (36): Xaa is C or S

SEQ ID NO: 71882 - protein, 33 aa, Artificial Sequence
  GFR-binding peptide
  MOD_RES (2), (3): Xaa is C or S
SXXVPARLSATSILYYDAANNVVLRKHRDMVVE

SEQ ID NO: 71883 - protein, 43 aa, Artificial Sequence; identical to SEQ ID NO: 9662
  GFR-binding peptide
  MOD_RES (5), (6), (40), (42): Xaa is C or S
  MOD_RES (20), (21), (22), (23), (24): Xaa is A or G
  MOD_RES (25), (26), (27), (28): Xaa is A or G or is absent

SEQ ID NO: 71884 - protein, 38 aa, Artificial Sequence; identical to SEQ ID NO: 31068
  GFR-binding peptide
  MOD_RES (6), (6): Xaa is C or S
  MOD_RES (20), (21), (22), (23), (24): Xaa is A or G
  MOD_RES (25), (26), (27), (28): Xaa is A or G or is absent

SEQ ID NO: 71885 - protein, 37 aa, Artificial Sequence; identical to SEQ ID NO: 31069
  GFR-binding peptide
  MOD_RES (1), (2), (34), (36): Xaa is C or S

SEQ ID NO: 71886 - protein, 37 aa, Artificial Sequence; identical to SEQ ID NO: 9664
  GFR-binding peptide
  MOD_RES (2), (3), (37): Xaa is C or S
  MOD_RES (17), (18), (19), (20), (21): Xaa is A or G
  MOD_RES (22), (23), (24), (25): Xaa is A or G or is absent

SEQ ID NO: 71887 - protein, 43 aa, Artificial Sequence
  GFR-binding peptide
  MOD_RES (6), (7), (41), (43): Xaa is C or S
  MOD_RES (21), (22), (23), (24), (25): Xaa is A or G
  MOD_RES (26), (27), (28), (29): Xaa is A or G or is absent
GIPEPXXVPEKMSPINILYFXXXXXXXXXYGKIPNMTVESXAX

SEQ ID NO: 71888 - protein, 44 aa, Artificial Sequence
  GFR-binding peptide
  MOD_RES (6), (7), (41), (43): Xaa is C or S
  MOD_RES (21), (22), (23), (24), (25): Xaa is A or G
  MOD_RES (26), (27), (28), (29): Xaa is A or G or is absent
GIPEPXXVPEKMSATSILYYXXXXXXXXXLRKHRNMTVESXAXR

SEQ ID NO: 71889 - protein, 38 aa, Artificial Sequence; identical to SEQ ID NO: 31074
  GFR-binding peptide
  MOD_RES (5), (6): Xaa is C or S
  MOD_RES (20), (21), (22), (23), (24): Xaa is A or G
  MOD_RES (25), (26), (27), (28): Xaa is A or G or is absent

SEQ ID NO: 71890 - protein, 35 aa, Artificial Sequence; identical to SEQ ID NO: 9666
  GFR-binding peptide
  MOD_RES (2), (3), (34): Xaa is C or S

SEQ ID NO: 71891 - protein, 40 aa, Artificial Sequence; identical to SEQ ID NO: 33243
  GFR-binding peptide
  MOD_RES (4), (5), (39): Xaa is C or S
  MOD_RES (19), (20), (21), (22), (23): Xaa is A or G
  MOD_RES (24), (25), (26), (27): Xaa is A or G or is absent

SEQ ID NO: 71892 - protein, 40 aa, Artificial Sequence; identical to SEQ ID NO: 9672
  GFR-binding peptide
  MOD_RES (6), (7), (39): Xaa is C or S

SEQ ID NO: 71893 - protein, 31 aa, Artificial Sequence; identical to SEQ ID NO: 31081
  GFR-binding peptide
  MOD_RES (1), (1): Xaa is C or S

SEQ ID NO: 71894 - protein, 33 aa, Artificial Sequence; identical to SEQ ID NO: 9674
  GFR-binding peptide
  MOD_RES (1), (2), (33): Xaa is C or S

SEQ ID NO: 71895 - protein, 31 aa, Artificial Sequence; identical to SEQ ID NO: 9675
  GFR-binding peptide
  MOD_RES (1), (1): Xaa is C or S

SEQ ID NO: 71896 - protein, 38 aa, Artificial Sequence; identical to SEQ ID NO: 33245
  GFR-binding peptide
  MOD_RES (4), (5), (37): Xaa is C or S

SEQ ID NO: 71897 - protein, 36 aa, Artificial Sequence; identical to SEQ ID NO: 9682
  GFR-binding peptide
  MOD_RES (1), (2), (34), (36): Xaa is C or S

SEQ ID NO: 71898 - protein, 42 aa, Artificial Sequence
  GFR-binding peptide
  MOD_RES (6), (7), (39), (41): Xaa is C or S
GIPEPXXVPEKMSPISILYKDENKNVVLKYHYNMTVESXAXR

SEQ ID NO: 71899 - protein, 38 aa, Artificial Sequence; identical to SEQ ID NO: 16967
  GFR-binding peptide
  MOD_RES (1), (2), (36), (38): Xaa is C or S
  MOD_RES (16), (17), (18), (19), (20): Xaa is A or G
  MOD_RES (21), (22), (23), (24): Xaa is A or G or is absent

SEQ ID NO: 71900 - protein, 35 aa, Artificial Sequence
  GFR-binding peptide
  MOD_RES (1), (33), (35): Xaa is C or S
XVPEKMSPINILYFDENKNVVYGKIPNMTVESXAX

SEQ ID NO: 71901 - protein, 38 aa, Artificial Sequence; identical to SEQ ID NO: 9685
  GFR-binding peptide
  MOD_RES (3), (4), (38): Xaa is C or S
  MOD_RES (18), (19), (20), (21), (22): Xaa is A or G
  MOD_RES (23), (24), (25), (26): Xaa is A or G or is absent

SEQ ID NO: 71902 - protein, 39 aa, Artificial Sequence; identical to SEQ ID NO: 33255
  GFR-binding peptide
  MOD_RES (1), (2), (36), (38): Xaa is C or S
  MOD_RES (16), (17), (18), (19), (20): Xaa is A or G
  MOD_RES (21), (22), (23), (24): Xaa is A or G or is absent

SEQ ID NO: 71903 - protein, 40 aa, Artificial Sequence; identical to SEQ ID NO: 31091
  GFR-binding peptide
  MOD_RES (5), (6), (38), (40): Xaa is C or S

SEQ ID NO: 71904 - protein, 34 aa, Artificial Sequence; identical to SEQ ID NO: 31092
  GFR-binding peptide
  MOD_RES (1), (2): Xaa is C or S
  MOD_RES (16), (17), (18), (19), (20): Xaa is A or G
  MOD_RES (21), (22), (23), (24): Xaa is A or G or is absent

SEQ ID NO: 71905 - protein, 43 aa, Artificial Sequence
  GFR-binding peptide
  MOD_RES (6), (7), (40), (42): Xaa is C or S
  MOD_RES (21), (22), (23), (24), (25): Xaa is A or G
  MOD_RES (26), (27), (28), (29): Xaa is A or G or is absent
RVPSTXXAPVKTSATSMLYYXXXXXXXXXLRKHRMIVEEXGXL

SEQ ID NO: 71906 - protein, 33 aa, Artificial Sequence; identical to SEQ ID NO: 33258
  GFR-binding peptide
  MOD_RES (1), (1): Xaa is C or S
  MOD_RES (15), (16), (17), (18), (19): Xaa is A or G
  MOD_RES (20), (21), (22), (23): Xaa is A or G or is absent

SEQ ID NO: 71907 - protein, 41 aa, Artificial Sequence; identical to SEQ ID NO: 9689
  GFR-binding peptide
  MOD_RES (6), (7), (40): Xaa is C or S
  MOD_RES (21), (22), (23), (24), (25): Xaa is A or G
  MOD_RES (26), (27), (28), (29): Xaa is A or G or is absent

SEQ ID NO: 71908 - protein, 36 aa, Artificial Sequence; identical to SEQ ID NO: 33262
  GFR-binding peptide
  MOD_RES (5), (6): Xaa is C or S

SEQ ID NO: 71909 - protein, 44 aa, Artificial Sequence
  GFR-binding peptide
  MOD_RES (6), (7), (41), (43): Xaa is C or S
  MOD_RES (21), (22), (23), (24), (25): Xaa is A or G
  MOD_RES (26), (27), (28), (29): Xaa is A or G or is absent
GIPEPXXVPEKMEPISILYLXXXXXXXXXKFKYENMTVESXAXR

SEQ ID NO: 71910 - protein, 37 aa, Artificial Sequence
  GFR-binding peptide
  MOD_RES (5), (6): Xaa is C or S
IPEPXXVPEKMSPISILYKDENKNVVLKYHYNMTVES

SEQ ID NO: 71911 - protein, 42 aa, Artificial Sequence; identical to SEQ ID NO: 9692
  GFR-binding peptide
  MOD_RES (6), (7), (40), (42): Xaa is C or S

SEQ ID NO: 71912 - protein, 39 aa, Artificial Sequence
  GFR-binding peptide
  MOD_RES (4), (5), (37), (39): Xaa is C or S
PEPXXVPEKMSATSILYYDENKNVVLRKHRNMTVESXAX

SEQ ID NO: 71913 - protein, 40 aa, Artificial Sequence; identical to SEQ ID NO: 31100
  GFR-binding peptide
  MOD_RES (4), (5), (40): Xaa is C or S
  MOD_RES (19), (20), (21), (22), (23): Xaa is A or G
  MOD_RES (24), (25), (26), (27): Xaa is A or G or is absent

SEQ ID NO: 71914 - protein, 30 aa, Artificial Sequence; identical to SEQ ID NO: 9695
  GFR-binding peptide

SEQ ID NO: 71915 - protein, 38 aa, Artificial Sequence; identical to SEQ ID NO: 33275
  GFR-binding peptide
  MOD_RES (1), (2), (36), (38): Xaa is C or S
  MOD_RES (16), (17), (18), (19), (20): Xaa is A or G
  MOD_RES (21), (22), (23), (24): Xaa is A or G or is absent

SEQ ID NO: 71916 - protein, 37 aa, Artificial Sequence; identical to SEQ ID NO: 16987
  GFR-binding peptide
  MOD_RES (5), (6): Xaa is C or S

SEQ ID NO: 71917 - protein, 34 aa, Artificial Sequence; identical to SEQ ID NO: 9698
  GFR-binding peptide
  MOD_RES (14), (15), (16), (17), (18): Xaa is A or G
  MOD_RES (19), (20), (21), (22): Xaa is A or G or is absent

SEQ ID NO: 71918 - protein, 32 aa, Artificial Sequence; identical to SEQ ID NO: 31104
  GFR-binding peptide
  MOD_RES (1), (2): Xaa is C or S

SEQ ID NO: 71919 - protein, 38 aa, Artificial Sequence; identical to SEQ ID NO: 31111
  GFR-binding peptide
  MOD_RES (2), (3), (36), (38): Xaa is C or S
  MOD_RES (17), (18), (19), (20), (21): Xaa is A or G
  MOD_RES (22), (23), (24), (25): Xaa is A or G or is absent

SEQ ID NO: 71920 - protein, 33 aa, Artificial Sequence; identical to SEQ ID NO: 31112
  GFR-binding peptide
  MOD_RES (14), (15), (16), (17), (18): Xaa is A or G
  MOD_RES (19), (20), (21), (22): Xaa is A or G or is absent

SEQ ID NO: 71921 - protein, 36 aa, Artificial Sequence; identical to SEQ ID NO: 31113
  GFR-binding peptide
  MOD_RES (3), (4): Xaa is C or S
  MOD_RES (18), (19), (20), (21), (22): Xaa is A or G
  MOD_RES (23), (24), (25), (26): Xaa is A or G or is absent

SEQ ID NO: 71922 - protein, 39 aa, Artificial Sequence; identical to SEQ ID NO: 31116
  GFR-binding peptide
  MOD_RES (3), (4), (36), (38): Xaa is C or S

SEQ ID NO: 71923 - protein, 38 aa, Artificial Sequence; identical to SEQ ID NO: 9704
  GFR-binding peptide
  MOD_RES (2), (3), (38): Xaa is C or S
  MOD_RES (17), (18), (19), (20), (21): Xaa is A or G
  MOD_RES (22), (23), (24), (25): Xaa is A or G or is absent

SEQ ID NO: 71924 - protein, 35 aa, Artificial Sequence; identical to SEQ ID NO: 31119
  GFR-binding peptide
  MOD_RES (34), (34): Xaa is C or S
  MOD_RES (14), (15), (16), (17), (18): Xaa is A or G
  MOD_RES (19), (20), (21), (22): Xaa is A or G or is absent

SEQ ID NO: 71925 - protein, 33 aa, Artificial Sequence; identical to SEQ ID NO: 9706
  GFR-binding peptide
  MOD_RES (31), (33): Xaa is C or S

SEQ ID NO: 71926 - protein, 39 aa, Artificial Sequence; identical to SEQ ID NO: 31122
  GFR-binding peptide
  MOD_RES (6), (7), (39): Xaa is C or S

SEQ ID NO: 71927 - protein, 39 aa, Artificial Sequence; identical to SEQ ID NO: 33283
  GFR-binding peptide
  MOD_RES (4), (36), (38): Xaa is C or S

SEQ ID NO: 71928 - protein, 45 aa, Artificial Sequence; identical to SEQ ID NO: 31126
  GFR-binding peptide
  MOD_RES (6), (7), (42), (44): Xaa is C or S
  MOD_RES (21), (22), (23), (24), (25): Xaa is A or G
  MOD_RES (26), (27), (28), (29): Xaa is A or G or is absent

SEQ ID NO: 71929 - protein, 42 aa, Artificial Sequence; identical to SEQ ID NO: 33290
  GFR-binding peptide
  MOD_RES (6), (7), (41): Xaa is C or S
  MOD_RES (21), (22), (23), (24), (25): Xaa is A or G
  MOD_RES (26), (27), (28), (29): Xaa is A or G or is absent

SEQ ID NO: 71930 - protein, 35 aa, Artificial Sequence; identical to SEQ ID NO: 9712
  GFR-binding peptide
  MOD_RES (1), (35): Xaa is C or S
  MOD_RES (15), (16), (17), (18), (19): Xaa is A or G
  MOD_RES (20), (21), (22), (23): Xaa is A or G or is absent

SEQ ID NO: 71931 - protein, 35 aa, Artificial Sequence; identical to SEQ ID NO: 9714
  GFR-binding peptide
  MOD_RES (2), (3): Xaa is C or S
  MOD_RES (17), (18), (19), (20), (21): Xaa is A or G
  MOD_RES (22), (23), (24), (25): Xaa is A or G or is absent

SEQ ID NO: 71932 - protein, 40 aa, Artificial Sequence; identical to SEQ ID NO: 9717
  GFR-binding peptide
  MOD_RES (2), (3), (37), (39): Xaa is C or S
  MOD_RES (17), (18), (19), (20), (21): Xaa is A or G
  MOD_RES (22), (23), (24), (25): Xaa is A or G or is absent

SEQ ID NO: 71933 - protein, 40 aa, Artificial Sequence; identical to SEQ ID NO: 33295
  GFR-binding peptide
  MOD_RES (5), (6), (40): Xaa is C or S
  MOD_RES (20), (21), (22), (23), (24): Xaa is A or G
  MOD_RES (25), (26), (27), (28): Xaa is A or G or is absent

SEQ ID NO: 71934 - protein, 34 aa, Artificial Sequence; identical to SEQ ID NO: 9718
  GFR-binding peptide
  MOD_RES (2), (3): Xaa is C or S

SEQ ID NO: 71935 - protein, 34 aa, Artificial Sequence; identical to SEQ ID NO: 9719
  GFR-binding peptide
  MOD_RES (1), (2): Xaa is C or S
  MOD_RES (16), (17), (18), (19), (20): Xaa is A or G
  MOD_RES (21), (22), (23), (24): Xaa is A or G or is absent

SEQ ID NO: 71936 - protein, 37 aa, Artificial Sequence; identical to SEQ ID NO: 9721
  GFR-binding peptide
  MOD_RES (4), (5), (37): Xaa is C or S

SEQ ID NO: 71937 - protein, 37 aa, Artificial Sequence; identical to SEQ ID NO: 9722
  GFR-binding peptide
  MOD_RES (1), (2), (36): Xaa is C or S
  MOD_RES (16), (17), (18), (19), (20): Xaa is A or G
  MOD_RES (21), (22), (23), (24): Xaa is A or G or is absent

SEQ ID NO: 71938 - protein, 38 aa, Artificial Sequence; identical to SEQ ID NO: 9725
  GFR-binding peptide
  MOD_RES (5), (37): Xaa is C or S

SEQ ID NO: 71939 - protein, 32 aa, Artificial Sequence
  GFR-binding peptide
  MOD_RES (32), (32): Xaa is C or S
VPEKMSPINILYFDENKNVVYGKIPNMTVESX

SEQ ID NO: 71940 - protein, 44 aa, Artificial Sequence; identical to SEQ ID NO: 9727
  GFR-binding peptide
  MOD_RES (7), (41), (43): Xaa is C or S
  MOD_RES (21), (22), (23), (24), (25): Xaa is A or G
  MOD_RES (26), (27), (28), (29): Xaa is A or G or is absent

SEQ ID NO: 71941 - protein, 37 aa, Artificial Sequence; identical to SEQ ID NO: 9728
  GFR-binding peptide
  MOD_RES (34), (36): Xaa is C or S
  MOD_RES (14), (15), (16), (17), (18): Xaa is A or G
  MOD_RES (19), (20), (21), (22): Xaa is A or G or is absent

SEQ ID NO: 71942 - protein, 33 aa, Artificial Sequence; identical to SEQ ID NO: 9732
  GFR-binding peptide
  MOD_RES (14), (15), (16), (17), (18): Xaa is A or G
  MOD_RES (19), (20), (21), (22): Xaa is A or G or is absent

SEQ ID NO: 71943 - protein, 37 aa, Artificial Sequence; identical to SEQ ID NO: 33307
  GFR-binding peptide
  MOD_RES (1), (2), (34), (36): Xaa is C or S

SEQ ID NO: 71944 - protein, 36 aa, Artificial Sequence; identical to SEQ ID NO: 31148
  GFR-binding peptide
  MOD_RES (1), (2), (34), (36): Xaa is C or S

SEQ ID NO: 71945 - protein, 35 aa, Artificial Sequence
  GFR-binding peptide
  MOD_RES (1), (2), (34): Xaa is C or S
XXTPTKMSATSMLYYNDKQQIILRKHRGMVVDRXG

SEQ ID NO: 71946 - protein, 39 aa, Artificial Sequence
  GFR-binding peptide
  MOD_RES (2), (3), (37), (39): Xaa is C or S
  MOD_RES (17), (18), (19), (20), (21): Xaa is A or G
  MOD_RES (22), (23), (24), (25): Xaa is A or G or is absent
PXXVPEKMSPINILYFXXXXXXXXXYGKIPNMTVESXAX

SEQ ID NO: 71947 - protein, 32 aa, Artificial Sequence; identical to SEQ ID NO: 9739
  GFR-binding peptide
  MOD_RES (1), (2): Xaa is C or S

SEQ ID NO: 71948 - protein, 40 aa, Artificial Sequence; identical to SEQ ID NO: 9741
  GFR-binding peptide
  MOD_RES (4), (5), (38), (40): Xaa is C or S
  MOD_RES (19), (20), (21), (22), (23): Xaa is A or G
  MOD_RES (24), (25), (26), (27): Xaa is A or G or is absent

SEQ ID NO: 71949 - protein, 38 aa, Artificial Sequence; identical to SEQ ID NO: 9742
  GFR-binding peptide
  MOD_RES (2), (3), (35), (37): Xaa is C or S

SEQ ID NO: 71950 - protein, 38 aa, Artificial Sequence; identical to SEQ ID NO: 9744
  GFR-binding peptide
  MOD_RES (5), (6): Xaa is C or S
  MOD_RES (20), (21), (22), (23), (24): Xaa is A or G
  MOD_RES (25), (26), (27), (28): Xaa is A or G or is absent

SEQ ID NO: 71951 - protein, 42 aa, Artificial Sequence; identical to SEQ ID NO: 31158
  GFR-binding peptide
  MOD_RES (4), (5), (39), (41): Xaa is C or S
  MOD_RES (19), (20), (21), (22), (23): Xaa is A or G
  MOD_RES (24), (25), (26), (27): Xaa is A or G or is absent

SEQ ID NO: 71952 - protein, 34 aa, Artificial Sequence; identical to SEQ ID NO: 9747
  GFR-binding peptide
  MOD_RES (1), (2): Xaa is C or S
  MOD_RES (16), (17), (18), (19), (20): Xaa is A or G
  MOD_RES (21), (22), (23), (24): Xaa is A or G or is absent

SEQ ID NO: 71953 - protein, 40 aa, Artificial Sequence; identical to SEQ ID NO: 31165
  GFR-binding peptide
  MOD_RES (5), (6), (40): Xaa is C or S
  MOD_RES (20), (21), (22), (23), (24): Xaa is A or G
  MOD_RES (25), (26), (27), (28): Xaa is A or G or is absent

SEQ ID NO: 71954 - protein, 37 aa, Artificial Sequence
  GFR-binding peptide
  MOD_RES (3), (4): Xaa is C or S
  MOD_RES (18), (19), (20), (21), (22): Xaa is A or G
  MOD_RES (23), (24), (25), (26): Xaa is A or G or is absent
GPXXTPTKMEPISMLYLXXXXXXXXXKFKYEGMVVDR

SEQ ID NO: 71955 - protein, 34 aa, Artificial Sequence; identical to SEQ ID NO: 33324
  GFR-binding peptide
  MOD_RES (1), (1): Xaa is C or S
  MOD_RES (15), (16), (17), (18), (19): Xaa is A or G
  MOD_RES (20), (21), (22), (23): Xaa is A or G or is absent

SEQ ID NO: 71956 - protein, 39 aa, Artificial Sequence; identical to SEQ ID NO: 31167
  GFR-binding peptide
  MOD_RES (7), (7): Xaa is C or S
  MOD_RES (21), (22), (23), (24), (25): Xaa is A or G
  MOD_RES (26), (27), (28), (29): Xaa is A or G or is absent

SEQ ID NO: 71957 - protein, 33 aa, Artificial Sequence; identical to SEQ ID NO: 31171
  GFR-binding peptide
  MOD_RES (1), (2): Xaa is C or S

SEQ ID NO: 71958 - protein, 40 aa, Artificial Sequence
  GFR-binding peptide
  MOD_RES (4), (5), (38), (40): Xaa is C or S
  MOD_RES (19), (20), (21), (22), (23): Xaa is A or G
  MOD_RES (24), (25), (26), (27): Xaa is A or G or is absent
AAPXXVPQALSPINILYFXXXXXXXXXYGKIPMIVRSXKX

SEQ ID NO: 71959 - protein, 38 aa, Artificial Sequence; identical to SEQ ID NO: 31172
  GFR-binding peptide
  MOD_RES (2), (3), (35), (37): Xaa is C or S

SEQ ID NO: 71960 - protein, 36 aa, Artificial Sequence
  GFR-binding peptide
  MOD_RES (34), (36): Xaa is C or S
  MOD_RES (14), (15), (16), (17), (18): Xaa is A or G
  MOD_RES (19), (20), (21), (22): Xaa is A or G or is absent
VPEKMSPINILYFXXXXXXXXXYGKIPNMTVESXAX

SEQ ID NO: 71961 - protein, 39 aa, Artificial Sequence
  GFR-binding peptide
  MOD_RES (6), (7): Xaa is C or S
  MOD_RES (21), (22), (23), (24), (25): Xaa is A or G
  MOD_RES (26), (27), (28), (29): Xaa is A or G or is absent
STPPTXXVPTRLEPISILYLXXXXXXXXXKFKYEDMVVE

SEQ ID NO: 71962 - protein, 42 aa, Artificial Sequence; identical to SEQ ID NO: 33331
  GFR-binding peptide
  MOD_RES (5), (6), (40), (42): Xaa is C or S
  MOD_RES (20), (21), (22), (23), (24): Xaa is A or G
  MOD_RES (25), (26), (27), (28): Xaa is A or G or is absent

SEQ ID NO: 71963 - protein, 34 aa, Artificial Sequence; identical to SEQ ID NO: 31179
  GFR-binding peptide
  MOD_RES (32), (34): Xaa is C or S

SEQ ID NO: 71964 - protein, 41 aa, Artificial Sequence; identical to SEQ ID NO: 17035
  GFR-binding peptide
  MOD_RES (5), (6), (40): Xaa is C or S
  MOD_RES (20), (21), (22), (23), (24): Xaa is A or G
  MOD_RES (25), (26), (27), (28): Xaa is A or G or is absent

SEQ ID NO: 71965 - protein, 40 aa, Artificial Sequence; identical to SEQ ID NO: 31182
  GFR-binding peptide
  MOD_RES (6), (7), (39): Xaa is C or S

SEQ ID NO: 71966 - protein, 36 aa, Artificial Sequence; identical to SEQ ID NO: 9760
  GFR-binding peptide
  MOD_RES (6), (6): Xaa is C or S

SEQ ID NO: 71967 - protein, 34 aa, Artificial Sequence; identical to SEQ ID NO: 31185
  GFR-binding peptide
  MOD_RES (3), (3): Xaa is C or S

SEQ ID NO: 71968 - protein, 39 aa, Artificial Sequence; identical to SEQ ID NO: 9762
  GFR-binding peptide
  MOD_RES (2), (3), (37), (39): Xaa is C or S
  MOD_RES (17), (18), (19), (20), (21): Xaa is A or G
  MOD_RES (22), (23), (24), (25): Xaa is A or G or is absent

SEQ ID NO: 71969 - protein, 41 aa, Artificial Sequence; identical to SEQ ID NO: 9763
  GFR-binding peptide
  MOD_RES (5), (6), (39), (41): Xaa is C or S
  MOD_RES (20), (21), (22), (23), (24): Xaa is A or G
  MOD_RES (25), (26), (27), (28): Xaa is A or G or is absent

SEQ ID NO: 71970 - protein, 39 aa, Artificial Sequence
  GFR-binding peptide
  MOD_RES (6), (7), (38): Xaa is C or S
ASASPXXVPQDLSPINILYFVGRTPKVYGKIPMVVKSXK

SEQ ID NO: 71971 - protein, 36 aa, Artificial Sequence; identical to SEQ ID NO: 9768
  GFR-binding peptide
  MOD_RES (2), (3), (35): Xaa is C or S

SEQ ID NO: 71972 - protein, 35 aa, Artificial Sequence; identical to SEQ ID NO: 9770
  GFR-binding peptide
  MOD_RES (1), (32), (34): Xaa is C or S

SEQ ID NO: 71973 - protein, 36 aa, Artificial Sequence; identical to SEQ ID NO: 9772
  GFR-binding peptide
  MOD_RES (1), (2), (36): Xaa is C or S
  MOD_RES (16), (17), (18), (19), (20): Xaa is A or G
  MOD_RES (21), (22), (23), (24): Xaa is A or G or is absent

SEQ ID NO: 71974 - protein, 35 aa, Artificial Sequence
  GFR-binding peptide
  MOD_RES (1), (2), (34): Xaa is C or S
XXTPTKMEPISMLYLNDKQQIIKFKYEGMVVDRXG

SEQ ID NO: 71975 - protein, 36 aa, Artificial Sequence; identical to SEQ ID NO: 33347
  GFR-binding peptide
  MOD_RES (3), (35): Xaa is C or S

SEQ ID NO: 71976 - protein, 36 aa, Artificial Sequence; identical to SEQ ID NO: 31193
  GFR-binding peptide
  MOD_RES (1), (35): Xaa is C or S
  MOD_RES (15), (16), (17), (18), (19): Xaa is A or G
  MOD_RES (20), (21), (22), (23): Xaa is A or G or is absent

SEQ ID NO: 71977 - protein, 36 aa, Artificial Sequence
  GFR-binding peptide
  MOD_RES (5), (6): Xaa is C or S
IPEPXXVPEKMSPISILYKDENKNVVLKYHYNMTVE

SEQ ID NO: 71978 - protein, 37 aa, Artificial Sequence; identical to SEQ ID NO: 31196
  GFR-binding peptide
  MOD_RES (3), (4), (36): Xaa is C or S

SEQ ID NO: 71979 - protein, 33 aa, Artificial Sequence; identical to SEQ ID NO: 9775
  GFR-binding peptide
  MOD_RES (2), (3): Xaa is C or S

SEQ ID NO: 71980 - protein, 38 aa, Artificial Sequence
  GFR-binding peptide
  MOD_RES (3), (4), (37): Xaa is C or S
  MOD_RES (18), (19), (20), (21), (22): Xaa is A or G
  MOD_RES (23), (24), (25), (26): Xaa is A or G or is absent
APXXVPQALSPINILYFXXXXXXXXXYGKIPMIVRSXK

SEQ ID NO: 71981 - protein, 37 aa, Artificial Sequence; identical to SEQ ID NO: 53760
  GFR-binding peptide
  MOD_RES (6), (7): Xaa is C or S

SEQ ID NO: 71982 - protein, 36 aa, Artificial Sequence
  GFR-binding peptide
  MOD_RES (1), (34), (36): Xaa is C or S
  MOD_RES (15), (16), (17), (18), (19): Xaa is A or G
  MOD_RES (20), (21), (22), (23): Xaa is A or G or is absent
XVSQDLSNITIQIMXXXXXXXXXLGEMSMIVKSXKX

SEQ ID NO: 71983 - protein, 35 aa, Artificial Sequence
  GFR-binding peptide
  MOD_RES (4), (5): Xaa is C or S
PPTXXVPTRLSNITIQIMDSANNVVIGEMSDMVVE

SEQ ID NO: 71984 - protein, 40 aa, Artificial Sequence
  GFR-binding peptide
  MOD_RES (4), (5), (38), (40): Xaa is C or S
  MOD_RES (19), (20), (21), (22), (23): Xaa is A or G
  MOD_RES (24), (25), (26), (27): Xaa is A or G or is absent
ASPXXVPQDLSNITIQIMXXXXXXXXXLGEMSMVVKSXKX

SEQ ID NO: 71985 - protein, 37 aa, Artificial Sequence; identical to SEQ ID NO: 18704
  GFR-binding peptide
  MOD_RES (37), (37): Xaa is C or S
  MOD_RES (16), (17), (18), (19), (20): Xaa is A or G
  MOD_RES (21), (22), (23), (24): Xaa is A or G or is absent

SEQ ID NO: 71986 - protein, 37 aa, Artificial Sequence
  GFR-binding peptide
  MOD_RES (5), (6): Xaa is C or S
APASXXVPARLSNITIQIMDAANNVVLGEMSDMVVEA

SEQ ID NO: 71987 - protein, 38 aa, Artificial Sequence; identical to SEQ ID NO: 53763
  GFR-binding peptide
  MOD_RES (5), (6): Xaa is C or S
  MOD_RES (20), (21), (22), (23), (24): Xaa is A or G
  MOD_RES (25), (26), (27), (28): Xaa is A or G or is absent

SEQ ID NO: 71988 - protein, 40 aa, Artificial Sequence
  GFR-binding peptide
  MOD_RES (3), (4), (37), (39): Xaa is C or S
  MOD_RES (18), (19), (20), (21), (22): Xaa is A or G
  MOD_RES (23), (24), (25), (26): Xaa is A or G or is absent
SPXXVPQDLSNITIQIMXXXXXXXXXLGEMSMVVKSXKXS

SEQ ID NO: 71989 - protein, 38 aa, Artificial Sequence
  GFR-binding peptide
  MOD_RES (1), (2), (36), (38): Xaa is C or S
  MOD_RES (16), (17), (18), (19), (20): Xaa is A or G
  MOD_RES (21), (22), (23), (24): Xaa is A or G or is absent
XXVPARLSNITIQIMXXXXXXXXXLGEMSDMVVEAXGX

SEQ ID NO: 71990 - protein, 37 aa, Artificial Sequence
  GFR-binding peptide
  MOD_RES (6), (7): Xaa is C or S
RVPSTXXAPVKTSNITMQIMDNGRVLLLGEMSMIVEE

SEQ ID NO: 71991 - protein, 36 aa, Artificial Sequence; identical to SEQ ID NO: 18705
  GFR-binding peptide
  MOD_RES (34), (36): Xaa is C or S

SEQ ID NO: 71992 - protein, 40 aa, Artificial Sequence; identical to SEQ ID NO: 18706
  GFR-binding peptide
  MOD_RES (6), (40): Xaa is C or S
  MOD_RES (20), (21), (22), (23), (24): Xaa is A or G
  MOD_RES (25), (26), (27), (28): Xaa is A or G or is absent

SEQ ID NO: 71993 - protein, 43 aa, Artificial Sequence
  GFR-binding peptide
  MOD_RES (5), (6), (40), (42): Xaa is C or S
  MOD_RES (20), (21), (22), (23), (24): Xaa is A or G
  MOD_RES (25), (26), (27), (28): Xaa is A or G or is absent
APASXXVPARLSNITIQIMXXXXXXXXXIGEMSDMVVEAXGXR

SEQ ID NO: 71994 - protein, 41 aa, Artificial Sequence
  GFR-binding peptide
  MOD_RES (4), (5), (38), (40): Xaa is C or S
  MOD_RES (19), (20), (21), (22), (23): Xaa is A or G
  MOD_RES (24), (25), (26), (27): Xaa is A or G or is absent
ASPXXVPQDLSNITIQIMXXXXXXXXXLGEMSMVVKSXKXS

SEQ ID NO: 71995 - protein, 43 aa, Artificial Sequence; identical to SEQ ID NO: 18707
  GFR-binding peptide
  MOD_RES (7), (41), (43): Xaa is C or S

SEQ ID NO: 71996 - protein, 35 aa, Artificial Sequence; identical to SEQ ID NO: 18708
  GFR-binding peptide
  MOD_RES (1), (35): Xaa is C or S

SEQ ID NO: 71997 - protein, 34 aa, Artificial Sequence
  GFR-binding peptide
  MOD_RES (3), (4): Xaa is C or S
STXXAPVKTSNITMQIMDNGRVLLLGEMSMIVEE

SEQ ID NO: 71998 - protein, 42 aa, Artificial Sequence; identical to SEQ ID NO: 18709
  GFR-binding peptide
  MOD_RES (2), (39), (41): Xaa is C or S
  MOD_RES (18), (19), (20), (21), (22): Xaa is A or G
  MOD_RES (23), (24), (25), (26): Xaa is A or G or is absent

SEQ ID NO: 71999 - protein, 38 aa, Artificial Sequence; identical to SEQ ID NO: 18710
  GFR-binding peptide
  MOD_RES (36), (38): Xaa is C or S
  MOD_RES (15), (16), (17), (18), (19): Xaa is A or G
  MOD_RES (20), (21), (22), (23): Xaa is A or G or is absent

SEQ ID NO: 72000 - protein, 41 aa, Artificial Sequence; identical to SEQ ID NO: 18711
  GFR-binding peptide
  MOD_RES (2), (39), (41): Xaa is C or S
  MOD_RES (18), (19), (20), (21), (22): Xaa is A or G
  MOD_RES (23), (24), (25), (26): Xaa is A or G or is absent

SEQ ID NO: 72001 - protein, 38 aa, Artificial Sequence
  GFR-binding peptide
  MOD_RES (5), (6): Xaa is C or S
  MOD_RES (20), (21), (22), (23), (24): Xaa is A or G
  MOD_RES (25), (26), (27), (28): Xaa is A or G or is absent
TPPTXXVPTRLSNITIQIMXXXXXXXXXIGEMSDMVVE

SEQ ID NO: 72002 - protein, 38 aa, Artificial Sequence
  GFR-binding peptide
  MOD_RES (3), (4), (37): Xaa is C or S
  MOD_RES (18), (19), (20), (21), (22): Xaa is A or G
  MOD_RES (23), (24), (25), (26): Xaa is A or G or is absent
SPXXVPQDLSNITIQIMXXXXXXXXXLGEMSMVVKSXK

SEQ ID NO: 72003 - protein, 32 aa, Artificial Sequence; identical to SEQ ID NO: 53785
  GFR-binding peptide
  MOD_RES (1), (32): Xaa is C or S

SEQ ID NO: 72004 - protein, 43 aa, Artificial Sequence
  GFR-binding peptide
  MOD_RES (6), (7), (41), (43): Xaa is C or S
  MOD_RES (21), (22), (23), (24), (25): Xaa is A or G
  MOD_RES (26), (27), (28), (29): Xaa is A or G or is absent
STPPTXXVPTRLSNITIQIMXXXXXXXXXLGEMSDMVVESXGX

SEQ ID NO: 72005 - protein, 36 aa, Artificial Sequence; identical to SEQ ID NO: 18717
  GFR-binding peptide
  MOD_RES (2), (2): Xaa is C or S
  MOD_RES (18), (19), (20), (21), (22): Xaa is A or G
  MOD_RES (23), (24), (25), (26): Xaa is A or G or is absent

SEQ ID NO: 72006 - protein, 34 aa, Artificial Sequence; identical to SEQ ID NO: 53786
  GFR-binding peptide
  MOD_RES (2), (3): Xaa is C or S

SEQ ID NO: 72007 - protein, 39 aa, Artificial Sequence
  GFR-binding peptide
  MOD_RES (6), (7): Xaa is C or S
  MOD_RES (21), (22), (23), (24), (25): Xaa is A or G
  MOD_RES (26), (27), (28), (29): Xaa is A or G or is absent
STPPTXXVPTRLSNITIQIMXXXXXXXXXLGEMSDMVVE

SEQ ID NO: 72008 - protein, 35 aa, Artificial Sequence
  GFR-binding peptide
  MOD_RES (3), (4): Xaa is C or S
ASXXVPARLSNITIQIMDAANNVVIGEMSDMVVEA

SEQ ID NO: 72009 - protein, 31 aa, Artificial Sequence
  GFR-binding peptide
VPARLSNITIQIMDAANNVVLGEMSDMVVEA

SEQ ID NO: 72010 - protein, 39 aa, Artificial Sequence
  GFR-binding peptide
  MOD_RES (3), (4), (38): Xaa is C or S
  MOD_RES (18), (19), (20), (21), (22): Xaa is A or G
  MOD_RES (23), (24), (25), (26): Xaa is A or G or is absent
GPXXTPTKMSNITMQIMXXXXXXXXXIGEMSGMVVDRXG

SEQ ID NO: 72011 - protein, 31 aa, Artificial Sequence
  GFR-binding peptide
  MOD_RES (1), (1): Xaa is C or S
XAPVKTSNITMQIMDNGRVLLLGEMSMIVEE

SEQ ID NO: 72012 - protein, 36 aa, Artificial Sequence; identical to SEQ ID NO: 18723
  GFR-binding peptide
  MOD_RES (1), (35): Xaa is C or S
  MOD_RES (15), (16), (17), (18), (19): Xaa is A or G
  MOD_RES (20), (21), (22), (23): Xaa is A or G or is absent

SEQ ID NO: 72013 - protein, 35 aa, Artificial Sequence; identical to SEQ ID NO: 18724
  GFR-binding peptide
  MOD_RES (34), (34): Xaa is C or S

SEQ ID NO: 72014 - protein, 39 aa, Artificial Sequence; identical to SEQ ID NO: 18725
  GFR-binding peptide
  MOD_RES (2), (39): Xaa is C or S

SEQ ID NO: 72015 - protein, 38 aa, Artificial Sequence; identical to SEQ ID NO: 18726
  GFR-binding peptide
  MOD_RES (4), (38): Xaa is C or S
  MOD_RES (18), (19), (20), (21), (22): Xaa is A or G
  MOD_RES (23), (24), (25), (26): Xaa is A or G or is absent

SEQ ID NO: 72016 - protein, 39 aa, Artificial Sequence
  GFR-binding peptide
  MOD_RES (4), (5), (36), (38): Xaa is C or S
ASPXXVPQDLSNITIQIMVGRTPKVLGEMSMVVKSXKXS

SEQ ID NO: 72017 - protein, 38 aa, Artificial Sequence; identical to SEQ ID NO: 51399
  GFR-binding peptide
  MOD_RES (4), (5): Xaa is C or S
  MOD_RES (19), (20), (21), (22), (23): Xaa is A or G
  MOD_RES (24), (25), (26), (27): Xaa is A or G or is absent

SEQ ID NO: 72018 - protein, 39 aa, Artificial Sequence; identical to SEQ ID NO: 51404
  GFR-binding peptide
  MOD_RES (3), (4), (36), (38): Xaa is C or S

SEQ ID NO: 72019 - protein, 30 aa, Artificial Sequence
  GFR-binding peptide
VPTRLSNITIQIMDSANNVVIGEMSDMVVE

SEQ ID NO: 72020 - protein, 42 aa, Artificial Sequence; identical to SEQ ID NO: 18733
  GFR-binding peptide
  MOD_RES (5), (42): Xaa is C or S
  MOD_RES (21), (22), (23), (24), (25): Xaa is A or G
  MOD_RES (26), (27), (28), (29): Xaa is A or G or is absent

SEQ ID NO: 72021 - protein, 36 aa, Artificial Sequence; identical to SEQ ID NO: 18735
  GFR-binding peptide
  MOD_RES (1), (1): Xaa is C or S

SEQ ID NO: 72022 - protein, 36 aa, Artificial Sequence
  GFR-binding peptide
  MOD_RES (1), (2), (33), (35): Xaa is C or S
XXAPVKTSNITMQIMDNGRVLLLGEMSMIVEEXGXL

SEQ ID NO: 72023 - protein, 35 aa, Artificial Sequence
  GFR-binding peptide
  MOD_RES (3), (4), (35): Xaa is C or S
SPXXVPQDLSNITIQIMVGRTPKVLGEMSMVVKSX

SEQ ID NO: 72024 - protein, 33 aa, Artificial Sequence; identical to SEQ ID NO: 51409
  GFR-binding peptide
  MOD_RES (1), (33): Xaa is C or S

SEQ ID NO: 72025 - protein, 45 aa, Artificial Sequence; identical to SEQ ID NO: 18736
  GFR-binding peptide
  MOD_RES (5), (42), (44): Xaa is C or S

SEQ ID NO: 72026 - protein, 34 aa, Artificial Sequence
  GFR-binding peptide
  MOD_RES (32), (34): Xaa is C or S
TPTKMSNITMQIMNDKQQIIIGEMSGMVVDRXGX

SEQ ID NO: 72027 - protein, 39 aa, Artificial Sequence; identical to SEQ ID NO: 53820
  GFR-binding peptide
  MOD_RES (4), (5), (36), (38): Xaa is C or S

SEQ ID NO: 72028 - protein, 34 aa, Artificial Sequence; identical to SEQ ID NO: 53824
  GFR-binding peptide
  MOD_RES (1), (34): Xaa is C or S
  MOD_RES (15), (16), (17), (18), (19): Xaa is A or G
  MOD_RES (20), (21), (22), (23): Xaa is A or G or is absent

SEQ ID NO: 72029 - protein, 35 aa, Artificial Sequence; identical to SEQ ID NO: 18739
  GFR-binding peptide
  MOD_RES (1), (1): Xaa is C or S

SEQ ID NO: 72030 - protein, 42 aa, Artificial Sequence; identical to SEQ ID NO: 51419
  GFR-binding peptide
  MOD_RES (5), (6), (40), (42): Xaa is C or S
  MOD_RES (20), (21), (22), (23), (24): Xaa is A or G
  MOD_RES (25), (26), (27), (28): Xaa is A or G or is absent

SEQ ID NO: 72031 - protein, 37 aa, Artificial Sequence; identical to SEQ ID NO: 51423
  GFR-binding peptide
  MOD_RES (2), (3), (37): Xaa is C or S
  MOD_RES (17), (18), (19), (20), (21): Xaa is A or G
  MOD_RES (22), (23), (24), (25): Xaa is A or G or is absent

SEQ ID NO: 72032 - protein, 34 aa, Artificial Sequence; identical to SEQ ID NO: 18741
  GFR-binding peptide
  MOD_RES (34), (34): Xaa is C or S
  MOD_RES (14), (15), (16), (17), (18): Xaa is A or G
  MOD_RES (19), (20), (21), (22): Xaa is A or G or is absent

SEQ ID NO: 72033 - protein, 33 aa, Artificial Sequence; identical to SEQ ID NO: 18742
  GFR-binding peptide

SEQ ID NO: 72034 - protein, 42 aa, Artificial Sequence
  GFR-binding peptide
  MOD_RES (4), (5), (39), (41): Xaa is C or S
  MOD_RES (19), (20), (21), (22), (23): Xaa is A or G
  MOD_RES (24), (25), (26), (27): Xaa is A or G or is absent
PKPXXAPTKLSNITVQIMXXXXXXXXXLGEMSNMVVRSXGXH

SEQ ID NO: 72035 - protein, 33 aa, Artificial Sequence; identical to SEQ ID NO: 53828
  GFR-binding peptide
  MOD_RES (33), (33): Xaa is C or S
  MOD_RES (14), (15), (16), (17), (18): Xaa is A or G
  MOD_RES (19), (20), (21), (22): Xaa is A or G or is absent

SEQ ID NO: 72036 - protein, 44 aa, Artificial Sequence; identical to SEQ ID NO: 18743
  GFR-binding peptide
  MOD_RES (4), (41), (43): Xaa is C or S

SEQ ID NO: 72037 - protein, 40 aa, Artificial Sequence; identical to SEQ ID NO: 53831
  GFR-binding peptide
  MOD_RES (5), (6), (39): Xaa is C or S
  MOD_RES (20), (21), (22), (23), (24): Xaa is A or G
  MOD_RES (25), (26), (27), (28): Xaa is A or G or is absent

SEQ ID NO: 72038 - protein, 37 aa, Artificial Sequence
  GFR-binding peptide
  MOD_RES (3), (4): Xaa is C or S
  MOD_RES (18), (19), (20), (21), (22): Xaa is A or G
  MOD_RES (23), (24), (25), (26): Xaa is A or G or is absent
GPXXTPTKMSNITMQIMXXXXXXXXXLGEMSGMVVDR

SEQ ID NO: 72039 - protein, 39 aa, Artificial Sequence; identical to SEQ ID NO: 18745
  GFR-binding peptide
  MOD_RES (4), (38): Xaa is C or S
  MOD_RES (18), (19), (20), (21), (22): Xaa is A or G
  MOD_RES (23), (24), (25), (26): Xaa is A or G or is absent

SEQ ID NO: 72040 - protein, 38 aa, Artificial Sequence; identical to SEQ ID NO: 18746
  GFR-binding peptide
  MOD_RES (2), (36), (38): Xaa is C or S
  MOD_RES (16), (17), (18), (19), (20): Xaa is A or G
  MOD_RES (21), (22), (23), (24): Xaa is A or G or is absent

SEQ ID NO: 72041 - protein, 32 aa, Artificial Sequence
  GFR-binding peptide
  MOD_RES (32), (32): Xaa is C or S
TPTKMSNITMQIMNDKQQIIIGEMSGMVVDRX

SEQ ID NO: 72042 - protein, 42 aa, Artificial Sequence; identical to SEQ ID NO: 18748
  GFR-binding peptide
  MOD_RES (4), (41): Xaa is C or S
  MOD_RES (20), (21), (22), (23), (24): Xaa is A or G
  MOD_RES (25), (26), (27), (28): Xaa is A or G or is absent

SEQ ID NO: 72043 - protein, 35 aa, Artificial Sequence
  GFR-binding peptide
  MOD_RES (1), (2), (33), (35): Xaa is C or S
XXAPVKTSNITMQIMDNGRVLLLGEMSMIVEEXGX

SEQ ID NO: 72044 - protein, 41 aa, Artificial Sequence
  GFR-binding peptide
  MOD_RES (6), (7), (39), (41): Xaa is C or S
GSAGPXXTPTKMSNITMQIMNDKQQIILGEMSGMVVDRXGX

SEQ ID NO: 72045 - protein, 38 aa, Artificial Sequence; identical to SEQ ID NO: 51437
  GFR-binding peptide
  MOD_RES (4), (5), (36), (38): Xaa is C or S

SEQ ID NO: 72046 - protein, 40 aa, Artificial Sequence; identical to SEQ ID NO: 18752
  GFR-binding peptide
  MOD_RES (6), (40): Xaa is C or S

SEQ ID NO: 72047 - protein, 36 aa, Artificial Sequence
  GFR-binding peptide
  MOD_RES (1), (2), (34), (36): Xaa is C or S
XXVPTRLSNITIQIMDSANNVVLGEMSDMVVESXGX

SEQ ID NO: 72048 - protein, 36 aa, Artificial Sequence; identical to SEQ ID NO: 53847
  GFR-binding peptide
  MOD_RES (33), (35): Xaa is C or S
  MOD_RES (14), (15), (16), (17), (18): Xaa is A or G
  MOD_RES (19), (20), (21), (22): Xaa is A or G or is absent

SEQ ID NO: 72049 - protein, 37 aa, Artificial Sequence; identical to SEQ ID NO: 18753
  GFR-binding peptide
  MOD_RES (34), (36): Xaa is C or S
  MOD_RES (14), (15), (16), (17), (18): Xaa is A or G
  MOD_RES (19), (20), (21), (22): Xaa is A or G or is absent

SEQ ID NO: 72050 - protein, 37 aa, Artificial Sequence; identical to SEQ ID NO: 18755
  GFR-binding peptide
  MOD_RES (3), (3): Xaa is C or S

SEQ ID NO: 72051 - protein, 39 aa, Artificial Sequence
  GFR-binding peptide
  MOD_RES (2), (3), (37), (39): Xaa is C or S
  MOD_RES (17), (18), (19), (20), (21): Xaa is A or G
  MOD_RES (22), (23), (24), (25): Xaa is A or G or is absent
SXXVPARLSNITIQIMXXXXXXXXXIGEMSDMVVEAXGX

SEQ ID NO: 72052 - protein, 34 aa, Artificial Sequence; identical to SEQ ID NO: 51443
  GFR-binding peptide
  MOD_RES (33), (33): Xaa is C or S
  MOD_RES (14), (15), (16), (17), (18): Xaa is A or G
  MOD_RES (19), (20), (21), (22): Xaa is A or G or is absent

SEQ ID NO: 72053 - protein, 42 aa, Artificial Sequence
  GFR-binding peptide
  MOD_RES (6), (7), (41): Xaa is C or S
  MOD_RES (21), (22), (23), (24), (25): Xaa is A or G
  MOD_RES (26), (27), (28), (29): Xaa is A or G or is absent
GSAGPXXTPTKMSNITMQIMXXXXXXXXXIGEMSGMVVDRXG

SEQ ID NO: 72054 - protein, 37 aa, Artificial Sequence
  GFR-binding peptide
  MOD_RES (2), (3), (34), (36): Xaa is C or S
PXXVPQALSNITIQIMVGRKPKVLGEMSMIVRSXKXS

SEQ ID NO: 72055 - protein, 41 aa, Artificial Sequence; identical to SEQ ID NO: 18758
  GFR-binding peptide
  MOD_RES (4), (41): Xaa is C or S

SEQ ID NO: 72056 - protein, 33 aa, Artificial Sequence; identical to SEQ ID NO: 53860
  GFR-binding peptide
  MOD_RES (1), (32): Xaa is C or S

SEQ ID NO: 72057 - protein, 40 aa, Artificial Sequence
  GFR-binding peptide
  MOD_RES (6), (7): Xaa is C or S
  MOD_RES (21), (22), (23), (24), (25): Xaa is A or G
  MOD_RES (26), (27), (28), (29): Xaa is A or G or is absent
HVPKPXXAPTKLSNITVQIMXXXXXXXXXIGEMSNMVVRS

SEQ ID NO: 72058 - protein, 38 aa, Artificial Sequence
  GFR-binding peptide
  MOD_RES (5), (6), (37): Xaa is C or S
SASPXXVSQDLSNITIQIMIGKTPKILGEMSMIVKSXK

SEQ ID NO: 72059 - protein, 33 aa, Artificial Sequence
  GFR-binding peptide
  MOD_RES (14), (15), (16), (17), (18): Xaa is A or G
  MOD_RES (19), (20), (21), (22): Xaa is A or G or is absent
VPARLSNITIQIMXXXXXXXXXLGEMSDMVVEA

SEQ ID NO: 72060 - protein, 41 aa, Artificial Sequence
  GFR-binding peptide
  MOD_RES (6), (7), (40): Xaa is C or S
  MOD_RES (21), (22), (23), (24), (25): Xaa is A or G
  MOD_RES (26), (27), (28), (29): Xaa is A or G or is absent
RVPSTXXAPVKTSNITMQIMXXXXXXXXXIGEMSMIVEEXG

SEQ ID NO: 72061 - protein, 40 aa, Artificial Sequence; identical to SEQ ID NO: 18763
  GFR-binding peptide
  MOD_RES (4), (38), (40): Xaa is C or S
  MOD_RES (18), (19), (20), (21), (22): Xaa is A or G
  MOD_RES (23), (24), (25), (26): Xaa is A or G or is absent

SEQ ID NO: 72062 - protein, 43 aa, Artificial Sequence; identical to SEQ ID NO: 18764
  GFR-binding peptide
  MOD_RES (6), (40), (42): Xaa is C or S
  MOD_RES (20), (21), (22), (23), (24): Xaa is A or G
  MOD_RES (25), (26), (27), (28): Xaa is A or G or is absent

SEQ ID NO: 72063 - protein, 34 aa, Artificial Sequence
  GFR-binding peptide
  MOD_RES (1), (2): Xaa is C or S
  MOD_RES (16), (17), (18), (19), (20): Xaa is A or G
  MOD_RES (21), (22), (23), (24): Xaa is A or G or is absent
XXTPTKMSNITMQIMXXXXXXXXXLGEMSGMVVD

SEQ ID NO: 72064 - protein, 39 aa, Artificial Sequence; identical to SEQ ID NO: 18766
  GFR-binding peptide
  MOD_RES (2), (36), (38): Xaa is C or S

SEQ ID NO: 72065 - protein, 35 aa, Artificial Sequence
  GFR-binding peptide
  MOD_RES (1), (34): Xaa is C or S
  MOD_RES (15), (16), (17), (18), (19): Xaa is A or G
  MOD_RES (20), (21), (22), (23): Xaa is A or G or is absent
XAPVKTSNITMQIMXXXXXXXXXLGEMSMIVEEXG

SEQ ID NO: 72066 - protein, 40 aa, Artificial Sequence
  GFR-binding peptide
  MOD_RES (4), (5), (39): Xaa is C or S
  MOD_RES (19), (20), (21), (22), (23): Xaa is A or G
  MOD_RES (24), (25), (26), (27): Xaa is A or G or is absent
AGPXXTPTKMSNITMQIMXXXXXXXXXLGEMSGMVVDRXG

SEQ ID NO: 72067 - protein, 34 aa, Artificial Sequence
  GFR-binding peptide
  MOD_RES (1), (32), (34): Xaa is C or S
XAPVKTSNITMQIMDNGRVLLIGEMSMIVEEXGX

SEQ ID NO: 72068 - protein, 35 aa, Artificial Sequence
  GFR-binding peptide
  MOD_RES (33), (35): Xaa is C or S
  MOD_RES (14), (15), (16), (17), (18): Xaa is A or G
  MOD_RES (19), (20), (21), (22): Xaa is A or G or is absent
VPQDLSNITIQIMXXXXXXXXXLGEMSMVVKSXKX

SEQ ID NO: 72069 - protein, 34 aa, Artificial Sequence; identical to SEQ ID NO: 18769
  GFR-binding peptide
  MOD_RES (1), (1): Xaa is C or S
  MOD_RES (15), (16), (17), (18), (19): Xaa is A or G
  MOD_RES (20), (21), (22), (23): Xaa is A or G or is absent

SEQ ID NO: 72070 - protein, 33 aa, Artificial Sequence; identical to SEQ ID NO: 53876
  GFR-binding peptide
  MOD_RES (1), (1): Xaa is C or S
  MOD_RES (15), (16), (17), (18), (19): Xaa is A or G
  MOD_RES (20), (21), (22), (23): Xaa is A or G or is absent

SEQ ID NO: 72071 - protein, 40 aa, Artificial Sequence; identical to SEQ ID NO: 18770
  GFR-binding peptide
  MOD_RES (4), (4): Xaa is C or S

SEQ ID NO: 72072 - protein, 41 aa, Artificial Sequence
  GFR-binding peptide
  MOD_RES (5), (6), (38), (40): Xaa is C or S
SAGPXXTPTKMSNITMQIMNDKQQIIIGEMSGMVVDRXGXS

SEQ ID NO: 72073 - protein, 36 aa, Artificial Sequence; identical to SEQ ID NO: 53879
  GFR-binding peptide
  MOD_RES (1), (2), (33), (35): Xaa is C or S

SEQ ID NO: 72074 - protein, 35 aa, Artificial Sequence
  GFR-binding peptide
  MOD_RES (1), (2), (33), (35): Xaa is C or S
XXAPVKTSNITMQIMDNGRVLLIGEMSMIVEEXGX

SEQ ID NO: 72075 - protein, 42 aa, Artificial Sequence; identical to SEQ ID NO: 18772
  GFR-binding peptide
  MOD_RES (7), (41): Xaa is C or S
  MOD_RES (21), (22), (23), (24), (25): Xaa is A or G
  MOD_RES (26), (27), (28), (29): Xaa is A or G or is absent

SEQ ID NO: 72076 - protein, 36 aa, Artificial Sequence
  GFR-binding peptide
  MOD_RES (5), (6): Xaa is C or S
VPSTXXAPVKTSNITMQIMDNGRVLLLGEMSMIVEE

SEQ ID NO: 72077 - protein, 35 aa, Artificial Sequence
  GFR-binding peptide
  MOD_RES (3), (4), (35): Xaa is C or S
STXXAPVKTSNITMQIMDNGRVLLLGEMSMIVEEX

SEQ ID NO: 72078 - protein, 32 aa, Artificial Sequence
  GFR-binding peptide
  MOD_RES (14), (15), (16), (17), (18): Xaa is A or G
  MOD_RES (19), (20), (21), (22): Xaa is A or G or is absent
VPARLSNITIQIMXXXXXXXXXIGEMSDMVVE

SEQ ID NO: 72079 - protein, 35 aa, Artificial Sequence
  GFR-binding peptide
  MOD_RES (1), (33), (35): Xaa is C or S
XTPTKMSNITMQIMNDKQQIILGEMSGMVVDRXGX

SEQ ID NO: 72080 - protein, 40 aa, Artificial Sequence
  GFR-binding peptide
  MOD_RES (6), (7): Xaa is C or S
  MOD_RES (21), (22), (23), (24), (25): Xaa is A or G
  MOD_RES (26), (27), (28), (29): Xaa is A or G or is absent
AAPASXXVPARLSNITIQIMXXXXXXXXXIGEMSDMVVEA

SEQ ID NO: 72081 - protein, 45 aa, Artificial Sequence; identical to SEQ ID NO: 18773
  GFR-binding peptide
  MOD_RES (5), (42), (44): Xaa is C or S

SEQ ID NO: 72082 - protein, 33 aa, Artificial Sequence
  GFR-binding peptide
  MOD_RES (1), (1): Xaa is C or S
  MOD_RES (15), (16), (17), (18), (19): Xaa is A or G
  MOD_RES (20), (21), (22), (23): Xaa is A or G or is absent
XTPTKMSNITMQIMXXXXXXXXXLGEMSGMVVD

SEQ ID NO: 72083 - protein, 37 aa, Artificial Sequence; identical to SEQ ID NO: 51465
  GFR-binding peptide
  MOD_RES (4), (5): Xaa is C or S
  MOD_RES (19), (20), (21), (22), (23): Xaa is A or G
  MOD_RES (24), (25), (26), (27): Xaa is A or G or is absent

SEQ ID NO: 72084 - protein, 40 aa, Artificial Sequence; identical to SEQ ID NO: 53887
  GFR-binding peptide
  MOD_RES (4), (5), (38), (40): Xaa is C or S
  MOD_RES (19), (20), (21), (22), (23): Xaa is A or G
  MOD_RES (24), (25), (26), (27): Xaa is A or G or is absent

SEQ ID NO: 72085 - protein, 36 aa, Artificial Sequence
  GFR-binding peptide
  MOD_RES (1), (2), (36): Xaa is C or S
  MOD_RES (16), (17), (18), (19), (20): Xaa is A or G
  MOD_RES (21), (22), (23), (24): Xaa is A or G or is absent
XXVPARLSNITIQIMXXXXXXXXXLGEMSDMVVEAX

SEQ ID NO: 72086 - protein, 34 aa, Artificial Sequence
  GFR-binding peptide
  MOD_RES (1), (2): Xaa is C or S
  MOD_RES (16), (17), (18), (19), (20): Xaa is A or G
  MOD_RES (21), (22), (23), (24): Xaa is A or G or is absent
XXVPQDLSNITIQIMXXXXXXXXXLGEMSMVVKS

SEQ ID NO: 72087 - protein, 39 aa, Artificial Sequence; identical to SEQ ID NO: 18775
  GFR-binding peptide
  MOD_RES (5), (39): Xaa is C or S

SEQ ID NO: 72088 - protein, 36 aa, Artificial Sequence; identical to SEQ ID NO: 18776
  GFR-binding peptide
  MOD_RES (2), (36): Xaa is C or S
  MOD_RES (16), (17), (18), (19), (20): Xaa is A or G
  MOD_RES (21), (22), (23), (24): Xaa is A or G or is absent

SEQ ID NO: 72089 - protein, 42 aa, Artificial Sequence; identical to SEQ ID NO: 18777
  GFR-binding peptide
  MOD_RES (5), (42): Xaa is C or S

SEQ ID NO: 72090 - protein, 37 aa, Artificial Sequence; identical to SEQ ID NO: 18778
  GFR-binding peptide
  MOD_RES (2), (36): Xaa is C or S
  MOD_RES (16), (17), (18), (19), (20): Xaa is A or G
  MOD_RES (21), (22), (23), (24): Xaa is A or G or is absent

SEQ ID NO: 72091 - protein, 41 aa, Artificial Sequence
  GFR-binding peptide
  MOD_RES (5), (6), (40): Xaa is C or S
  MOD_RES (20), (21), (22), (23), (24): Xaa is A or G
  MOD_RES (25), (26), (27), (28): Xaa is A or G or is absent
SAGPXXTPTKMSNITMQIMXXXXXXXXXIGEMSGMVVDRXG

SEQ ID NO: 72092 - protein, 38 aa, Artificial Sequence; identical to SEQ ID NO: 18781
  GFR-binding peptide
  MOD_RES (5), (5): Xaa is C or S
  MOD_RES (19), (20), (21), (22), (23): Xaa is A or G
  MOD_RES (24), (25), (26), (27): Xaa is A or G or is absent

SEQ ID NO: 72093 - protein, 32 aa, Artificial Sequence
  GFR-binding peptide
  MOD_RES (14), (15), (16), (17), (18): Xaa is A or G
  MOD_RES (19), (20), (21), (22): Xaa is A or G or is absent
VPTRLSNITIQIMXXXXXXXXXIGEMSDMVVE

SEQ ID NO: 72094 - protein, 37 aa, Artificial Sequence; identical to SEQ ID NO: 18782
  GFR-binding peptide
  MOD_RES (1), (35), (37): Xaa is C or S
  MOD_RES (15), (16), (17), (18), (19): Xaa is A or G
  MOD_RES (20), (21), (22), (23): Xaa is A or G or is absent

SEQ ID NO: 72095 - protein, 39 aa, Artificial Sequence; identical to SEQ ID NO: 18783
  GFR-binding peptide
  MOD_RES (36), (38): Xaa is C or S
  MOD_RES (15), (16), (17), (18), (19): Xaa is A or G
  MOD_RES (20), (21), (22), (23): Xaa is A or G or is absent

SEQ ID NO: 72096 - protein, 37 aa, Artificial Sequence; identical to SEQ ID NO: 51476
  GFR-binding peptide
  MOD_RES (1), (35), (37): Xaa is C or S
  MOD_RES (15), (16), (17), (18), (19): Xaa is A or G
  MOD_RES (20), (21), (22), (23): Xaa is A or G or is absent

SEQ ID NO: 72097 - protein, 37 aa, Artificial Sequence
  GFR-binding peptide
  MOD_RES (1), (2), (35), (37): Xaa is C or S
  MOD_RES (16), (17), (18), (19), (20): Xaa is A or G
  MOD_RES (21), (22), (23), (24): Xaa is A or G or is absent
XXVSQDLSNITIQIMXXXXXXXXXLGEMSMIVKSXKX

SEQ ID NO: 72098 - protein, 36 aa, Artificial Sequence
  GFR-binding peptide
  MOD_RES (1), (2), (35): Xaa is C or S
  MOD_RES (16), (17), (18), (19), (20): Xaa is A or G
  MOD_RES (21), (22), (23), (24): Xaa is A or G or is absent
XXAPVKTSNITMQIMXXXXXXXXXLGEMSMIVEEXG

SEQ ID NO: 72099 - protein, 34 aa, Artificial Sequence; identical to SEQ ID NO: 51480
  GFR-binding peptide
  MOD_RES (1), (2): Xaa is C or S
  MOD_RES (16), (17), (18), (19), (20): Xaa is A or G
  MOD_RES (21), (22), (23), (24): Xaa is A or G or is absent

SEQ ID NO: 72100 - protein, 35 aa, Artificial Sequence
  GFR-binding peptide
  MOD_RES (1), (35): Xaa is C or S
  MOD_RES (15), (16), (17), (18), (19): Xaa is A or G
  MOD_RES (20), (21), (22), (23): Xaa is A or G or is absent
XVPARLSNITIQIMXXXXXXXXXLGEMSDMVVEAX

SEQ ID NO: 72101 - protein, 40 aa, Artificial Sequence; identical to SEQ ID NO: 18786
  GFR-binding peptide
  MOD_RES (5), (5): Xaa is C or S

SEQ ID NO: 72102 - protein, 33 aa, Artificial Sequence
  GFR-binding peptide
  MOD_RES (1), (1): Xaa is C or S
  MOD_RES (15), (16), (17), (18), (19): Xaa is A or G
  MOD_RES (20), (21), (22), (23): Xaa is A or G or is absent
XVPQDLSNITIQIMXXXXXXXXXLGEMSMVVKS

SEQ ID NO: 72103 - protein, 35 aa, Artificial Sequence; identical to SEQ ID NO: 51482
  GFR-binding peptide
  MOD_RES (1), (32), (34): Xaa is C or S

SEQ ID NO: 72104 - protein, 37 aa, Artificial Sequence; identical to SEQ ID NO: 51486
  GFR-binding peptide
  MOD_RES (4), (5), (36): Xaa is C or S

SEQ ID NO: 72105 - protein, 36 aa, Artificial Sequence
  GFR-binding peptide
  MOD_RES (1), (35): Xaa is C or S
  MOD_RES (15), (16), (17), (18), (19): Xaa is A or G
  MOD_RES (20), (21), (22), (23): Xaa is A or G or is absent
XVPTRLSNITIQIMXXXXXXXXXIGEMSDMVVESXG

SEQ ID NO: 72106 - protein, 36 aa, Artificial Sequence
  GFR-binding peptide
  MOD_RES (2), (3), (35): Xaa is C or S
PXXTPTKMSNITMQIMNDKQQIILGEMSGMVVDRXG

SEQ ID NO: 72107 - protein, 39 aa, Artificial Sequence
  GFR-binding peptide
  MOD_RES (5), (6): Xaa is C or S
  MOD_RES (20), (21), (22), (23), (24): Xaa is A or G
  MOD_RES (25), (26), (27), (28): Xaa is A or G or is absent
TPPTXXVPTRLSNITIQIMXXXXXXXXXLGEMSDMVVES

SEQ ID NO: 72108 - protein, 36 aa, Artificial Sequence
  GFR-binding peptide
  MOD_RES (33), (35): Xaa is C or S
  MOD_RES (14), (15), (16), (17), (18): Xaa is A or G
  MOD_RES (19), (20), (21), (22): Xaa is A or G or is absent
APVKTSNITMQIMXXXXXXXXXLGEMSMIVEEXGXL

SEQ ID NO: 72109 - protein, 31 aa, Artificial Sequence; identical to SEQ ID NO: 53907
  GFR-binding peptide
  MOD_RES (1), (1): Xaa is C or S

SEQ ID NO: 72110 - protein, 39 aa, Artificial Sequence; identical to SEQ ID NO: 18793
  GFR-binding peptide
  MOD_RES (1), (38): Xaa is C or S
  MOD_RES (17), (18), (19), (20), (21): Xaa is A or G
  MOD_RES (22), (23), (24), (25): Xaa is A or G or is absent

SEQ ID NO: 72111 - protein, 39 aa, Artificial Sequence
  GFR-binding peptide
  MOD_RES (5), (6), (38): Xaa is C or S
TPPTXXVPTRLSNITIQIMDSANNVVIGEMSDMVVESXG

SEQ ID NO: 72112 - protein, 38 aa, Artificial Sequence; identical to SEQ ID NO: 53910
  GFR-binding peptide
  MOD_RES (4), (5), (38): Xaa is C or S
  MOD_RES (19), (20), (21), (22), (23): Xaa is A or G
  MOD_RES (24), (25), (26), (27): Xaa is A or G or is absent

SEQ ID NO: 72113 - protein, 44 aa, Artificial Sequence; identical to SEQ ID NO: 18795
  GFR-binding peptide
  MOD_RES (5), (42), (44): Xaa is C or S
  MOD_RES (21), (22), (23), (24), (25): Xaa is A or G
  MOD_RES (26), (27), (28), (29): Xaa is A or G or is absent

SEQ ID NO: 72114 - protein, 37 aa, Artificial Sequence; identical to SEQ ID NO: 53911
  GFR-binding peptide
  MOD_RES (5), (6), (37): Xaa is C or S

SEQ ID NO: 72115 - protein, 35 aa, Artificial Sequence
  GFR-binding peptide
  MOD_RES (1), (33), (35): Xaa is C or S
XVPARLSNITIQIMDAANNVVLGEMSDMVVEAXGX

SEQ ID NO: 72116 - protein, 39 aa, Artificial Sequence
  GFR-binding peptide
  MOD_RES (5), (6), (38): Xaa is C or S
SAGPXXTPTKMSNITMQIMNDKQQIILGEMSGMVVDRXG

SEQ ID NO: 72117 - protein, 39 aa, Artificial Sequence; identical to SEQ ID NO: 53912
  GFR-binding peptide
  MOD_RES (4), (5), (39): Xaa is C or S
  MOD_RES (19), (20), (21), (22), (23): Xaa is A or G
  MOD_RES (24), (25), (26), (27): Xaa is A or G or is absent

SEQ ID NO: 72118 - protein, 33 aa, Artificial Sequence
  GFR-binding peptide
  MOD_RES (2), (3): Xaa is C or S
SXXVPARLSNITIQIMDAANNVVIGEMSDMVVE

SEQ ID NO: 72119 - protein, 40 aa, Artificial Sequence
  GFR-binding peptide
  MOD_RES (5), (6), (38), (40): Xaa is C or S
APASXXVPARLSNITIQIMDAANNVVIGEMSDMVVEAXGX

SEQ ID NO: 72120 - protein, 30 aa, Artificial Sequence
  GFR-binding peptide
VPQDLSNITIQIMVGRTPKVLGEMSMVVKS

SEQ ID NO: 72121 - protein, 34 aa, Artificial Sequence
  GFR-binding peptide
  MOD_RES (33), (33): Xaa is C or S
  MOD_RES (14), (15), (16), (17), (18): Xaa is A or G
  MOD_RES (19), (20), (21), (22): Xaa is A or G or is absent
VSQDLSNITIQIMXXXXXXXXXLGEMSMIVKSXK

SEQ ID NO: 72122 - protein, 35 aa, Artificial Sequence
  GFR-binding peptide
  MOD_RES (1), (2), (34): Xaa is C or S
XXVPTRLSNITIQIMDSANNVVLGEMSDMVVESXG

SEQ ID NO: 72123 - protein, 41 aa, Artificial Sequence; identical to SEQ ID NO: 18797
  GFR-binding peptide
  MOD_RES (4), (41): Xaa is C or S

SEQ ID NO: 72124 - protein, 38 aa, Artificial Sequence
  GFR-binding peptide
  MOD_RES (1), (2), (35), (37): Xaa is C or S
  MOD_RES (16), (17), (18), (19), (20): Xaa is A or G
  MOD_RES (21), (22), (23), (24): Xaa is A or G or is absent
XXVPQDLSNITIQIMXXXXXXXXXLGEMSMVVKSXKXS

SEQ ID NO: 72125 - protein, 35 aa, Artificial Sequence
  GFR-binding peptide
  MOD_RES (1), (35): Xaa is C or S
  MOD_RES (15), (16), (17), (18), (19): Xaa is A or G
  MOD_RES (20), (21), (22), (23): Xaa is A or G or is absent
XTPTKMSNITMQIMXXXXXXXXXIGEMSGMVVDRX

SEQ ID NO: 72126 - protein, 40 aa, Artificial Sequence; identical to SEQ ID NO: 18799
  GFR-binding peptide
  MOD_RES (37), (39): Xaa is C or S
  MOD_RES (16), (17), (18), (19), (20): Xaa is A or G
  MOD_RES (21), (22), (23), (24): Xaa is A or G or is absent

SEQ ID NO: 72127 - protein, 34 aa, Artificial Sequence; identical to SEQ ID NO: 51517
  GFR-binding peptide
  MOD_RES (1), (32), (34): Xaa is C or S

SEQ ID NO: 72128 - protein, 36 aa, Artificial Sequence; identical to SEQ ID NO: 18800
  GFR-binding peptide
  MOD_RES (16), (17), (18), (19), (20): Xaa is A or G
  MOD_RES (21), (22), (23), (24): Xaa is A or G or is absent

SEQ ID NO: 72129 - protein, 37 aa, Artificial Sequence
  GFR-binding peptide
  MOD_RES (3), (4), (37): Xaa is C or S
  MOD_RES (18), (19), (20), (21), (22): Xaa is A or G
  MOD_RES (23), (24), (25), (26): Xaa is A or G or is absent
SPXXVPQDLSNITIQIMXXXXXXXXXLGEMSMVVKSX

SEQ ID NO: 72130 - protein, 35 aa, Artificial Sequence
  GFR-binding peptide
  MOD_RES (2), (3): Xaa is C or S
  MOD_RES (17), (18), (19), (20), (21): Xaa is A or G
  MOD_RES (22), (23), (24), (25): Xaa is A or G or is absent
TXXVPTRLSNITIQIMXXXXXXXXXIGEMSDMVVE

SEQ ID NO: 72131 - protein, 43 aa, Artificial Sequence; identical to SEQ ID NO: 53916
  GFR-binding peptide
  MOD_RES (6), (7), (40), (42): Xaa is C or S
  MOD_RES (21), (22), (23), (24), (25): Xaa is A or G
  MOD_RES (26), (27), (28), (29): Xaa is A or G or is absent

SEQ ID NO: 72132 - protein, 32 aa, Artificial Sequence
  GFR-binding peptide
  MOD_RES (1), (2): Xaa is C or S
XXVPQALSNITIQIMVGRKPKVLGEMSMIVRS

SEQ ID NO: 72133 - protein, 33 aa, Artificial Sequence
  GFR-binding peptide
  MOD_RES (14), (15), (16), (17), (18): Xaa is A or G
  MOD_RES (19), (20), (21), (22): Xaa is A or G or is absent
VPTRLSNITIQIMXXXXXXXXXLGEMSDMVVES

SEQ ID NO: 72134 - protein, 38 aa, Artificial Sequence
  GFR-binding peptide
  MOD_RES (2), (3), (35), (37): Xaa is C or S
SXXVPARLSNITIQIMDAANNVVIGEMSDMVVEAXGXR

SEQ ID NO: 72135 - protein, 38 aa, Artificial Sequence
  GFR-binding peptide
  MOD_RES (6), (7): Xaa is C or S
STPPTXXVPTRLSNITIQIMDSANNVVLGEMSDMVVES

SEQ ID NO: 72136 - protein, 41 aa, Artificial Sequence
  GFR-binding peptide
  MOD_RES (6), (7), (39), (41): Xaa is C or S
HVPKPXXAPTKLSNITVQIMDDSSNVILGEMSNMVVRSXGX

SEQ ID NO: 72137 - protein, 38 aa, Artificial Sequence
  GFR-binding peptide
  MOD_RES (5), (6): Xaa is C or S
  MOD_RES (20), (21), (22), (23), (24): Xaa is A or G
  MOD_RES (25), (26), (27), (28): Xaa is A or G or is absent
VPKPXXAPTKLSNITVQIMXXXXXXXXXLGEMSNMVVR

SEQ ID NO: 72138 - protein, 33 aa, Artificial Sequence; identical to SEQ ID NO: 18807
  GFR-binding peptide
  MOD_RES (15), (16), (17), (18), (19): Xaa is A or G
  MOD_RES (20), (21), (22), (23): Xaa is A or G or is absent

SEQ ID NO: 72139 - protein, 37 aa, Artificial Sequence; identical to SEQ ID NO: 18810
  GFR-binding peptide
  MOD_RES (1), (1): Xaa is C or S

SEQ ID NO: 72140 - protein, 34 aa, Artificial Sequence
  GFR-binding peptide
  MOD_RES (1), (32), (34): Xaa is C or S
XAPVKTSNITMQIMDNGRVLLLGEMSMIVEEXGX

SEQ ID NO: 72141 - protein, 35 aa, Artificial Sequence; identical to SEQ ID NO: 51535
  GFR-binding peptide
  MOD_RES (1), (2): Xaa is C or S
  MOD_RES (16), (17), (18), (19), (20): Xaa is A or G
  MOD_RES (21), (22), (23), (24): Xaa is A or G or is absent

SEQ ID NO: 72142 - protein, 40 aa, Artificial Sequence; identical to SEQ ID NO: 18811
  GFR-binding peptide
  MOD_RES (37), (39): Xaa is C or S
  MOD_RES (16), (17), (18), (19), (20): Xaa is A or G
  MOD_RES (21), (22), (23), (24): Xaa is A or G or is absent

SEQ ID NO: 72143 - protein, 40 aa, Artificial Sequence
  GFR-binding peptide
  MOD_RES (4), (5), (38), (40): Xaa is C or S
  MOD_RES (19), (20), (21), (22), (23): Xaa is A or G
  MOD_RES (24), (25), (26), (27): Xaa is A or G or is absent
PSTXXAPVKTSNITMQIMXXXXXXXXXIGEMSMIVEEXGX

SEQ ID NO: 72144 - protein, 36 aa, Artificial Sequence; identical to SEQ ID NO: 18813
  GFR-binding peptide
  MOD_RES (2), (36): Xaa is C or S

SEQ ID NO: 72145 - protein, 34 aa, Artificial Sequence; identical to SEQ ID NO: 51540
  GFR-binding peptide
  MOD_RES (3), (4): Xaa is C or S

SEQ ID NO: 72146 - protein, 39 aa, Artificial Sequence; identical to SEQ ID NO: 51541
  GFR-binding peptide
  MOD_RES (2), (3), (37), (39): Xaa is C or S
  MOD_RES (17), (18), (19), (20), (21): Xaa is A or G
  MOD_RES (22), (23), (24), (25): Xaa is A or G or is absent

SEQ ID NO: 72147 - protein, 37 aa, Artificial Sequence
  GFR-binding peptide
  MOD_RES (1), (2), (36): Xaa is C or S
  MOD_RES (16), (17), (18), (19), (20): Xaa is A or G
  MOD_RES (21), (22), (23), (24): Xaa is A or G or is absent
XXVPARLSNITIQIMXXXXXXXXXIGEMSDMVVEAXG

SEQ ID NO: 72148 - protein, 38 aa, Artificial Sequence; identical to SEQ ID NO: 18814
  GFR-binding peptide
  MOD_RES (3), (3): Xaa is C or S
  MOD_RES (19), (20), (21), (22), (23): Xaa is A or G
  MOD_RES (24), (25), (26), (27): Xaa is A or G or is absent

SEQ ID NO: 72149 - protein, 34 aa, Artificial Sequence
  GFR-binding peptide
  MOD_RES (34), (34): Xaa is C or S
  MOD_RES (14), (15), (16), (17), (18): Xaa is A or G
  MOD_RES (19), (20), (21), (22): Xaa is A or G or is absent
APTKLSNITVQIMXXXXXXXXXLGEMSNMVVRSX

SEQ ID NO: 72150 - protein, 42 aa, Artificial Sequence; identical to SEQ ID NO: 53948
  GFR-binding peptide
  MOD_RES (5), (6), (39), (41): Xaa is C or S
  MOD_RES (20), (21), (22), (23), (24): Xaa is A or G
  MOD_RES (25), (26), (27), (28): Xaa is A or G or is absent

SEQ ID NO: 72151 - protein, 40 aa, Artificial Sequence; identical to SEQ ID NO: 51543
  GFR-binding peptide
  MOD_RES (5), (6), (40): Xaa is C or S
  MOD_RES (20), (21), (22), (23), (24): Xaa is A or G
  MOD_RES (25), (26), (27), (28): Xaa is A or G or is absent

SEQ ID NO: 72152 - protein, 34 aa, Artificial Sequence
  GFR-binding peptide
  MOD_RES (32), (34): Xaa is C or S
VPTRLSNITIQIMDSANNVVLGEMSDMVVESXGX

SEQ ID NO: 72153 - protein, 37 aa, Artificial Sequence
  GFR-binding peptide
  MOD_RES (2), (3), (36): Xaa is C or S
  MOD_RES (17), (18), (19), (20), (21): Xaa is A or G
  MOD_RES (22), (23), (24), (25): Xaa is A or G or is absent
PXXVPQALSNITIQIMXXXXXXXXXLGEMSMIVRSXK

SEQ ID NO: 72154 - protein, 32 aa, Artificial Sequence
  GFR-binding peptide
  MOD_RES (32), (32): Xaa is C or S
APTKLSNITVQIMDDSSNVILGEMSNMVVRSX

SEQ ID NO: 72155 - protein, 37 aa, Artificial Sequence; identical to SEQ ID NO: 51551
  GFR-binding peptide
  MOD_RES (2), (3), (36): Xaa is C or S
  MOD_RES (17), (18), (19), (20), (21): Xaa is A or G
  MOD_RES (22), (23), (24), (25): Xaa is A or G or is absent

SEQ ID NO: 72156 - protein, 36 aa, Artificial Sequence
  GFR-binding peptide
  MOD_RES (3), (4), (36): Xaa is C or S
PTXXVPTRLSNITIQIMDSANNVVLGEMSDMVVESX

SEQ ID NO: 72157 - protein, 38 aa, Artificial Sequence
  GFR-binding peptide
  MOD_RES (3), (4), (36), (38): Xaa is C or S
GPXXTPTKMSNITMQIMNDKQQIILGEMSGMVVDRXGX

SEQ ID NO: 72158 - protein, 38 aa, Artificial Sequence; identical to SEQ ID NO: 51557
  GFR-binding peptide
  MOD_RES (5), (6): Xaa is C or S
  MOD_RES (20), (21), (22), (23), (24): Xaa is A or G
  MOD_RES (25), (26), (27), (28): Xaa is A or G or is absent

SEQ ID NO: 72159 - protein, 44 aa, Artificial Sequence; identical to SEQ ID NO: 18817
  GFR-binding peptide
  MOD_RES (4), (41), (43): Xaa is C or S

SEQ ID NO: 72160 - protein, 43 aa, Artificial Sequence; identical to SEQ ID NO: 18818
  GFR-binding peptide
  MOD_RES (5), (42): Xaa is C or S

SEQ ID NO: 72161 - protein, 32 aa, Artificial Sequence; identical to SEQ ID NO: 53972
  GFR-binding peptide
  MOD_RES (14), (15), (16), (17), (18): Xaa is A or G
  MOD_RES (19), (20), (21), (22): Xaa is A or G or is absent

SEQ ID NO: 72162 - protein, 40 aa, Artificial Sequence
  GFR-binding peptide
  MOD_RES (5), (6), (38), (40): Xaa is C or S
SAGPXXTPTKMSNITMQIMNDKQQIILGEMSGMVVDRXGX

SEQ ID NO: 72163 - protein, 35 aa, Artificial Sequence; identical to SEQ ID NO: 18821
  GFR-binding peptide

SEQ ID NO: 72164 - protein, 38 aa, Artificial Sequence
  GFR-binding peptide
  MOD_RES (4), (5), (37): Xaa is C or S
PPTXXVPTRLSNITIQIMDSANNVVIGEMSDMVVESXG

SEQ ID NO: 72165 - protein, 35 aa, Artificial Sequence
  GFR-binding peptide
  MOD_RES (1), (33), (35): Xaa is C or S
XAPTKLSNITVQIMDDSSNVILGEMSNMVVRSXGX

SEQ ID NO: 72166 - protein, 36 aa, Artificial Sequence
  GFR-binding peptide
  MOD_RES (1), (33), (35): Xaa is C or S
XVPTRLSNITIQIMDSANNVVLGEMSDMVVESXGXR

SEQ ID NO: 72167 - protein, 35 aa, Artificial Sequence
  GFR-binding peptide
  MOD_RES (2), (3): Xaa is C or S
  MOD_RES (17), (18), (19), (20), (21): Xaa is A or G
  MOD_RES (22), (23), (24), (25): Xaa is A or G or is absent
SXXVPARLSNITIQIMXXXXXXXXXIGEMSDMVVE

SEQ ID NO: 72168 - protein, 41 aa, Artificial Sequence
  GFR-binding peptide
  MOD_RES (5), (6), (39), (41): Xaa is C or S
  MOD_RES (20), (21), (22), (23), (24): Xaa is A or G
  MOD_RES (25), (26), (27), (28): Xaa is A or G or is absent
SAAPXXVPQALSNITIQIMXXXXXXXXXLGEMSMIVRSXKX

SEQ ID NO: 72169 - protein, 36 aa, Artificial Sequence; identical to SEQ ID NO: 18822
  GFR-binding peptide
  MOD_RES (34), (36): Xaa is C or S
  MOD_RES (14), (15), (16), (17), (18): Xaa is A or G
  MOD_RES (19), (20), (21), (22): Xaa is A or G or is absent

SEQ ID NO: 72170 - protein, 35 aa, Artificial Sequence
  GFR-binding peptide
  MOD_RES (32), (34): Xaa is C or S
VPARLSNITIQIMDAANNVVIGEMSDMVVEAXGXR

SEQ ID NO: 72171 - protein, 42 aa, Artificial Sequence
  GFR-binding peptide
  MOD_RES (6), (7), (41): Xaa is C or S
  MOD_RES (21), (22), (23), (24), (25): Xaa is A or G
  MOD_RES (26), (27), (28), (29): Xaa is A or G or is absent
AAPASXXVPARLSNITIQIMXXXXXXXXXIGEMSDMVVEAXG

SEQ ID NO: 72172 - protein, 36 aa, Artificial Sequence
  GFR-binding peptide
  MOD_RES (3), (4): Xaa is C or S
  MOD_RES (18), (19), (20), (21), (22): Xaa is A or G
  MOD_RES (23), (24), (25), (26): Xaa is A or G or is absent
SPXXVSQDLSNITIQIMXXXXXXXXXLGEMSMIVKS

SEQ ID NO: 72173 - protein, 36 aa, Artificial Sequence; identical to SEQ ID NO: 53979
  GFR-binding peptide
  MOD_RES (33), (35): Xaa is C or S
  MOD_RES (14), (15), (16), (17), (18): Xaa is A or G
  MOD_RES (19), (20), (21), (22): Xaa is A or G or is absent

SEQ ID NO: 72174 - protein, 41 aa, Artificial Sequence
  GFR-binding peptide
  MOD_RES (6), (7), (39), (41): Xaa is C or S
AAPASXXVPARLSNITIQIMDAANNVVIGEMSDMVVEAXGX

SEQ ID NO: 72175 - protein, 39 aa, Artificial Sequence; identical to SEQ ID NO: 18826
  GFR-binding peptide
  MOD_RES (2), (36), (38): Xaa is C or S
  MOD_RES (16), (17), (18), (19), (20): Xaa is A or G
  MOD_RES (21), (22), (23), (24): Xaa is A or G or is absent

SEQ ID NO: 72176 - protein, 37 aa, Artificial Sequence
  GFR-binding peptide
  MOD_RES (1), (34), (36): Xaa is C or S
  MOD_RES (15), (16), (17), (18), (19): Xaa is A or G
  MOD_RES (20), (21), (22), (23): Xaa is A or G or is absent
XVSQDLSNITIQIMXXXXXXXXXLGEMSMIVKSXKXS

SEQ ID NO: 72177 - protein, 34 aa, Artificial Sequence; identical to SEQ ID NO: 18827
  GFR-binding peptide

SEQ ID NO: 72178 - protein, 40 aa, Artificial Sequence
  GFR-binding peptide
  MOD_RES (5), (6), (39): Xaa is C or S
  MOD_RES (20), (21), (22), (23), (24): Xaa is A or G
  MOD_RES (25), (26), (27), (28): Xaa is A or G or is absent
VPSTXXAPVKTSNITMQIMXXXXXXXXXIGEMSMIVEEXG

SEQ ID NO: 72179 - protein, 39 aa, Artificial Sequence
  GFR-binding peptide
  MOD_RES (6), (7), (39): Xaa is C or S
STPPTXXVPTRLSNITIQIMDSANNVVIGEMSDMVVESX

SEQ ID NO: 72180 - protein, 36 aa, Artificial Sequence
  GFR-binding peptide
  MOD_RES (1), (2), (36): Xaa is C or S
  MOD_RES (16), (17), (18), (19), (20): Xaa is A or G
  MOD_RES (21), (22), (23), (24): Xaa is A or G or is absent
XXVPTRLSNITIQIMXXXXXXXXXLGEMSDMVVESX

SEQ ID NO: 72181 - protein, 40 aa, Artificial Sequence; identical to SEQ ID NO: 18830
  GFR-binding peptide
  MOD_RES (4), (4): Xaa is C or S
  MOD_RES (20), (21), (22), (23), (24): Xaa is A or G
  MOD_RES (25), (26), (27), (28): Xaa is A or G or is absent

SEQ ID NO: 72182 - protein, 36 aa, Artificial Sequence
  GFR-binding peptide
  MOD_RES (3), (4), (36): Xaa is C or S
GPXXTPTKMSNITMQIMNDKQQIIIGEMSGMVVDRX

SEQ ID NO: 72183 - protein, 37 aa, Artificial Sequence
  GFR-binding peptide
  MOD_RES (5), (6), (37): Xaa is C or S
VPSTXXAPVKTSNITMQIMDNGRVLLIGEMSMIVEEX

SEQ ID NO: 72184 - protein, 40 aa, Artificial Sequence; identical to SEQ ID NO: 18833
  GFR-binding peptide
  MOD_RES (7), (7): Xaa is C or S

SEQ ID NO: 72185 - protein, 35 aa, Artificial Sequence
  GFR-binding peptide
  MOD_RES (34), (34): Xaa is C or S
  MOD_RES (14), (15), (16), (17), (18): Xaa is A or G
  MOD_RES (19), (20), (21), (22): Xaa is A or G or is absent
APTKLSNITVQIMXXXXXXXXXLGEMSNMVVRSXG

SEQ ID NO: 72186 - protein, 36 aa, Artificial Sequence; identical to SEQ ID NO: 18834
  GFR-binding peptide
  MOD_RES (36), (36): Xaa is C or S
  MOD_RES (15), (16), (17), (18), (19): Xaa is A or G
  MOD_RES (20), (21), (22), (23): Xaa is A or G or is absent

SEQ ID NO: 72187 - protein, 35 aa, Artificial Sequence; identical to SEQ ID NO: 18835
  GFR-binding peptide
  MOD_RES (1), (35): Xaa is C or S
  MOD_RES (15), (16), (17), (18), (19): Xaa is A or G
  MOD_RES (20), (21), (22), (23): Xaa is A or G or is absent

SEQ ID NO: 72188 - protein, 41 aa, Artificial Sequence
  GFR-binding peptide
  MOD_RES (5), (6), (39), (41): Xaa is C or S
  MOD_RES (20), (21), (22), (23), (24): Xaa is A or G
  MOD_RES (25), (26), (27), (28): Xaa is A or G or is absent
SASPXXVSQDLSNITIQIMXXXXXXXXXLGEMSMIVKSXKX

SEQ ID NO: 72189 - protein, 35 aa, Artificial Sequence
  GFR-binding peptide
  MOD_RES (3), (4): Xaa is C or S
PTXXVPTRLSNITIQIMDSANNVVLGEMSDMVVES

SEQ ID NO: 72190 - protein, 37 aa, Artificial Sequence
  GFR-binding peptide
  MOD_RES (6), (7): Xaa is C or S
HVPKPXXAPTKLSNITVQIMDDSSNVILGEMSNMVVR

SEQ ID NO: 72191 - protein, 39 aa, Artificial Sequence
  GFR-binding peptide
  MOD_RES (1), (2), (36), (38): Xaa is C or S
  MOD_RES (16), (17), (18), (19), (20): Xaa is A or G
  MOD_RES (21), (22), (23), (24): Xaa is A or G or is absent
XXAPTKLSNITVQIMXXXXXXXXXLGEMSNMVVRSXGXH

SEQ ID NO: 72192 - protein, 34 aa, Artificial Sequence; identical to SEQ ID NO: 51608
  GFR-binding peptide
  MOD_RES (32), (34): Xaa is C or S

SEQ ID NO: 72193 - protein, 37 aa, Artificial Sequence; identical to SEQ ID NO: 18842
  GFR-binding peptide
  MOD_RES (4), (4): Xaa is C or S

SEQ ID NO: 72194 - protein, 39 aa, Artificial Sequence; identical to SEQ ID NO: 54012
  GFR-binding peptide
  MOD_RES (6), (7): Xaa is C or S
  MOD_RES (21), (22), (23), (24), (25): Xaa is A or G
  MOD_RES (26), (27), (28), (29): Xaa is A or G or is absent

SEQ ID NO: 72195 - protein, 35 aa, Artificial Sequence
  GFR-binding peptide
  MOD_RES (33), (35): Xaa is C or S
  MOD_RES (14), (15), (16), (17), (18): Xaa is A or G
  MOD_RES (19), (20), (21), (22): Xaa is A or G or is absent
VSQDLSNITIQIMXXXXXXXXXLGEMSMIVKSXKX

SEQ ID NO: 72196 - protein, 34 aa, Artificial Sequence
  GFR-binding peptide
  MOD_RES (1), (1): Xaa is C or S
  MOD_RES (15), (16), (17), (18), (19): Xaa is A or G
  MOD_RES (20), (21), (22), (23): Xaa is A or G or is absent
XTPTKMSNITMQIMXXXXXXXXXIGEMSGMVVDR

SEQ ID NO: 72197 - protein, 34 aa, Artificial Sequence; identical to SEQ ID NO: 18843
  GFR-binding peptide
  MOD_RES (1), (1): Xaa is C or S
  MOD_RES (15), (16), (17), (18), (19): Xaa is A or G
  MOD_RES (20), (21), (22), (23): Xaa is A or G or is absent

SEQ ID NO: 72198 - protein, 33 aa, Artificial Sequence
  GFR-binding peptide
  MOD_RES (1), (1): Xaa is C or S
  MOD_RES (15), (16), (17), (18), (19): Xaa is A or G
  MOD_RES (20), (21), (22), (23): Xaa is A or G or is absent
XVSQDLSNITIQIMXXXXXXXXXLGEMSMIVKS

SEQ ID NO: 72199 - protein, 35 aa, Artificial Sequence; identical to SEQ ID NO: 18846
  GFR-binding peptide
  MOD_RES (35), (35): Xaa is C or S

SEQ ID NO: 72200 - protein, 43 aa, Artificial Sequence; identical to SEQ ID NO: 18847
  GFR-binding peptide
  MOD_RES (7), (41), (43): Xaa is C or S
  MOD_RES (21), (22), (23), (24), (25): Xaa is A or G
  MOD_RES (26), (27), (28), (29): Xaa is A or G or is absent

SEQ ID NO: 72201 - protein, 37 aa, Artificial Sequence
  GFR-binding peptide
  MOD_RES (3), (4), (37): Xaa is C or S
  MOD_RES (18), (19), (20), (21), (22): Xaa is A or G
  MOD_RES (23), (24), (25), (26): Xaa is A or G or is absent
SPXXVSQDLSNITIQIMXXXXXXXXXLGEMSMIVKSX

SEQ ID NO: 72202 - protein, 39 aa, Artificial Sequence
  GFR-binding peptide
  MOD_RES (3), (4), (36), (38): Xaa is C or S
GPXXTPTKMSNITMQIMNDKQQIIIGEMSGMVVDRXGXS

SEQ ID NO: 72203 - protein, 40 aa, Artificial Sequence
  GFR-binding peptide
  MOD_RES (5), (6), (39): Xaa is C or S
  MOD_RES (20), (21), (22), (23), (24): Xaa is A or G
  MOD_RES (25), (26), (27), (28): Xaa is A or G or is absent
SASPXXVPQDLSNITIQIMXXXXXXXXXLGEMSMVVKSXK

SEQ ID NO: 72204 - protein, 42 aa, Artificial Sequence
  GFR-binding peptide
  MOD_RES (5), (6), (40), (42): Xaa is C or S
  MOD_RES (20), (21), (22), (23), (24): Xaa is A or G
  MOD_RES (25), (26), (27), (28): Xaa is A or G or is absent
SAGPXXTPTKMSNITMQIMXXXXXXXXXLGEMSGMVVDRXGX

SEQ ID NO: 72205 - protein, 38 aa, Artificial Sequence
  GFR-binding peptide
  MOD_RES (5), (6): Xaa is C or S
  MOD_RES (20), (21), (22), (23), (24): Xaa is A or G
  MOD_RES (25), (26), (27), (28): Xaa is A or G or is absent
SAAPXXVPQALSNITIQIMXXXXXXXXXLGEMSMIVRS

SEQ ID NO: 72206 - protein, 40 aa, Artificial Sequence
  GFR-binding peptide
  MOD_RES (6), (7), (39): Xaa is C or S
AAPASXXVPARLSNITIQIMDAANNVVLGEMSDMVVEAXG

SEQ ID NO: 72207 - protein, 36 aa, Artificial Sequence; identical to SEQ ID NO: 51625
  GFR-binding peptide
  MOD_RES (3), (4): Xaa is C or S
  MOD_RES (18), (19), (20), (21), (22): Xaa is A or G
  MOD_RES (23), (24), (25), (26): Xaa is A or G or is absent

SEQ ID NO: 72208 - protein, 34 aa, Artificial Sequence; identical to SEQ ID NO: 18850
  GFR-binding peptide
  MOD_RES (2), (2): Xaa is C or S
  MOD_RES (16), (17), (18), (19), (20): Xaa is A or G
  MOD_RES (21), (22), (23), (24): Xaa is A or G or is absent

SEQ ID NO: 72209 - protein, 39 aa, Artificial Sequence
  GFR-binding peptide
  MOD_RES (6), (7), (39): Xaa is C or S
AAPASXXVPARLSNITIQIMDAANNVVLGEMSDMVVEAX

SEQ ID NO: 72210 - protein, 38 aa, Artificial Sequence
  GFR-binding peptide
  MOD_RES (3), (4), (38): Xaa is C or S
  MOD_RES (18), (19), (20), (21), (22): Xaa is A or G
  MOD_RES (23), (24), (25), (26): Xaa is A or G or is absent
ASXXVPARLSNITIQIMXXXXXXXXXLGEMSDMVVEAX

SEQ ID NO: 72211 - protein, 38 aa, Artificial Sequence
  GFR-binding peptide
  MOD_RES (4), (5), (36), (38): Xaa is C or S
ASPXXVSQDLSNITIQIMIGKTPKILGEMSMIVKSXKX

SEQ ID NO: 72212 - protein, 36 aa, Artificial Sequence
  GFR-binding peptide
  MOD_RES (1), (2), (34), (36): Xaa is C or S
XXVPARLSNITIQIMDAANNVVIGEMSDMVVEAXGX

SEQ ID NO: 72213 - protein, 34 aa, Artificial Sequence; identical to SEQ ID NO: 18852
  GFR-binding peptide

SEQ ID NO: 72214 - protein, 34 aa, Artificial Sequence; identical to SEQ ID NO: 51631
  GFR-binding peptide
  MOD_RES (1), (34): Xaa is C or S
  MOD_RES (15), (16), (17), (18), (19): Xaa is A or G
  MOD_RES (20), (21), (22), (23): Xaa is A or G or is absent

SEQ ID NO: 72215 - protein, 43 aa, Artificial Sequence; identical to SEQ ID NO: 18853
  GFR-binding peptide
  MOD_RES (5), (42): Xaa is C or S

SEQ ID NO: 72216 - protein, 36 aa, Artificial Sequence
  GFR-binding peptide
  MOD_RES (3), (4), (36): Xaa is C or S
ASXXVPARLSNITIQIMDAANNVVLGEMSDMVVEAX

SEQ ID NO: 72217 - protein, 35 aa, Artificial Sequence
  GFR-binding peptide
  MOD_RES (4), (5): Xaa is C or S
ASPXXVSQDLSNITIQIMIGKTPKILGEMSMIVKS

SEQ ID NO: 72218 - protein, 38 aa, Artificial Sequence; identical to SEQ ID NO: 54029
  GFR-binding peptide
  MOD_RES (5), (6), (37): Xaa is C or S

SEQ ID NO: 72219 - protein, 38 aa, Artificial Sequence; identical to SEQ ID NO: 18855
  GFR-binding peptide
  MOD_RES (2), (2): Xaa is C or S
  MOD_RES (18), (19), (20), (21), (22): Xaa is A or G
  MOD_RES (23), (24), (25), (26): Xaa is A or G or is absent

SEQ ID NO: 72220 - protein, 36 aa, Artificial Sequence; identical to SEQ ID NO: 54031
  GFR-binding peptide
  MOD_RES (1), (33), (35): Xaa is C or S

SEQ ID NO: 72221 - protein, 37 aa, Artificial Sequence
  GFR-binding peptide
  MOD_RES (2), (3), (35), (37): Xaa is C or S
SXXVPARLSNITIQIMDAANNVVLGEMSDMVVEAXGX

SEQ ID NO: 72222 - protein, 38 aa, Artificial Sequence; identical to SEQ ID NO: 18859
  GFR-binding peptide
  MOD_RES (2), (2): Xaa is C or S

SEQ ID NO: 72223 - protein, 32 aa, Artificial Sequence; identical to SEQ ID NO: 18860
  GFR-binding peptide
  MOD_RES (14), (15), (16), (17), (18): Xaa is A or G
  MOD_RES (19), (20), (21), (22): Xaa is A or G or is absent

SEQ ID NO: 72224 - protein, 38 aa, Artificial Sequence; identical to SEQ ID NO: 51642
  GFR-binding peptide
  MOD_RES (3), (4), (37): Xaa is C or S
  MOD_RES (18), (19), (20), (21), (22): Xaa is A or G
  MOD_RES (23), (24), (25), (26): Xaa is A or G or is absent

SEQ ID NO: 72225 - protein, 37 aa, Artificial Sequence; identical to SEQ ID NO: 18861
  GFR-binding peptide
  MOD_RES (2), (2): Xaa is C or S

SEQ ID NO: 72226 - protein, 35 aa, Artificial Sequence; identical to SEQ ID NO: 18863
  GFR-binding peptide
  MOD_RES (16), (17), (18), (19), (20): Xaa is A or G
  MOD_RES (21), (22), (23), (24): Xaa is A or G or is absent

SEQ ID NO: 72227 - protein, 42 aa, Artificial Sequence
  GFR-binding peptide
  MOD_RES (4), (5), (39), (41): Xaa is C or S
  MOD_RES (19), (20), (21), (22), (23): Xaa is A or G
  MOD_RES (24), (25), (26), (27): Xaa is A or G or is absent
PPTXXVPTRLSNITIQIMXXXXXXXXXLGEMSDMVVESXGXR

SEQ ID NO: 72228 - protein, 38 aa, Artificial Sequence; identical to SEQ ID NO: 18864
  GFR-binding peptide
  MOD_RES (37), (37): Xaa is C or S
  MOD_RES (16), (17), (18), (19), (20): Xaa is A or G
  MOD_RES (21), (22), (23), (24): Xaa is A or G or is absent

SEQ ID NO: 72229 - protein, 35 aa, Artificial Sequence; identical to SEQ ID NO: 54045
  GFR-binding peptide
  MOD_RES (33), (35): Xaa is C or S
  MOD_RES (14), (15), (16), (17), (18): Xaa is A or G
  MOD_RES (19), (20), (21), (22): Xaa is A or G or is absent

SEQ ID NO: 72230 - protein, 35 aa, Artificial Sequence
  GFR-binding peptide
  MOD_RES (4), (5): Xaa is C or S
PASXXVPARLSNITIQIMDAANNVVIGEMSDMVVE

SEQ ID NO: 72231 - protein, 38 aa, Artificial Sequence
  GFR-binding peptide
  MOD_RES (2), (3), (35), (37): Xaa is C or S
PXXAPTKLSNITVQIMDDSSNVILGEMSNMVVRSXGXH

SEQ ID NO: 72232 - protein, 38 aa, Artificial Sequence
  GFR-binding peptide
  MOD_RES (6), (7), (38): Xaa is C or S
ASASPXXVPQDLSNITIQIMVGRTPKVLGEMSMVVKSX

SEQ ID NO: 72233 - protein, 38 aa, Artificial Sequence; identical to SEQ ID NO: 18866
  GFR-binding peptide
  MOD_RES (1), (38): Xaa is C or S

SEQ ID NO: 72234 - protein, 33 aa, Artificial Sequence; identical to SEQ ID NO: 18868
  GFR-binding peptide

SEQ ID NO: 72235 - protein, 36 aa, Artificial Sequence
  GFR-binding peptide
  MOD_RES (3), (4): Xaa is C or S
  MOD_RES (18), (19), (20), (21), (22): Xaa is A or G
  MOD_RES (23), (24), (25), (26): Xaa is A or G or is absent
PTXXVPTRLSNITIQIMXXXXXXXXXLGEMSDMVVE

SEQ ID NO: 72236 - protein, 33 aa, Artificial Sequence; identical to SEQ ID NO: 18869
  GFR-binding peptide
  MOD_RES (1), (1): Xaa is C or S
  MOD_RES (15), (16), (17), (18), (19): Xaa is A or G
  MOD_RES (20), (21), (22), (23): Xaa is A or G or is absent

SEQ ID NO: 72237 - protein, 44 aa, Artificial Sequence
  GFR-binding peptide
  MOD_RES (6), (7), (41), (43): Xaa is C or S
  MOD_RES (21), (22), (23), (24), (25): Xaa is A or G
  MOD_RES (26), (27), (28), (29): Xaa is A or G or is absent
HVPKPXXAPTKLSNITVQIMXXXXXXXXXIGEMSNMVVRSXGXH

SEQ ID NO: 72238 - protein, 36 aa, Artificial Sequence; identical to SEQ ID NO: 18872
  GFR-binding peptide
  MOD_RES (1), (35): Xaa is C or S
  MOD_RES (15), (16), (17), (18), (19): Xaa is A or G
  MOD_RES (20), (21), (22), (23): Xaa is A or G or is absent

SEQ ID NO: 72239 - protein, 40 aa, Artificial Sequence
  GFR-binding peptide
  MOD_RES (4), (5), (39): Xaa is C or S
  MOD_RES (19), (20), (21), (22), (23): Xaa is A or G
  MOD_RES (24), (25), (26), (27): Xaa is A or G or is absent
PASXXVPARLSNITIQIMXXXXXXXXXIGEMSDMVVEAXG

SEQ ID NO: 72240 - protein, 36 aa, Artificial Sequence; identical to SEQ ID NO: 18873
  GFR-binding peptide
  MOD_RES (16), (17), (18), (19), (20): Xaa is A or G
  MOD_RES (21), (22), (23), (24): Xaa is A or G or is absent

SEQ ID NO: 72241 - protein, 41 aa, Artificial Sequence
  GFR-binding peptide
  MOD_RES (6), (7), (39), (41): Xaa is C or S
STPPTXXVPTRLSNITIQIMDSANNVVIGEMSDMVVESXGX

SEQ ID NO: 72242 - protein, 42 aa, Artificial Sequence; identical to SEQ ID NO: 18875
  GFR-binding peptide
  MOD_RES (3), (40), (42): Xaa is C or S

SEQ ID NO: 72243 - protein, 40 aa, Artificial Sequence; identical to SEQ ID NO: 18876
  GFR-binding peptide
  MOD_RES (37), (39): Xaa is C or S

SEQ ID NO: 72244 - protein, 34 aa, Artificial Sequence
  GFR-binding peptide
  MOD_RES (1), (32), (34): Xaa is C or S
XVSQDLSNITIQIMIGKTPKILGEMSMIVKSXKX

SEQ ID NO: 72245 - protein, 36 aa, Artificial Sequence
  GFR-binding peptide
  MOD_RES (3), (4): Xaa is C or S
  MOD_RES (18), (19), (20), (21), (22): Xaa is A or G
  MOD_RES (23), (24), (25), (26): Xaa is A or G or is absent
STXXAPVKTSNITMQIMXXXXXXXXXIGEMSMIVEE

SEQ ID NO: 72246 - protein, 39 aa, Artificial Sequence; identical to SEQ ID NO: 18879
  GFR-binding peptide
  MOD_RES (3), (3): Xaa is C or S
  MOD_RES (19), (20), (21), (22), (23): Xaa is A or G
  MOD_RES (24), (25), (26), (27): Xaa is A or G or is absent

SEQ ID NO: 72247 - protein, 34 aa, Artificial Sequence; identical to SEQ ID NO: 51669
  GFR-binding peptide
  MOD_RES (1), (32), (34): Xaa is C or S

SEQ ID NO: 72248 - protein, 33 aa, Artificial Sequence; identical to SEQ ID NO: 51671
  GFR-binding peptide
  MOD_RES (1), (2), (33): Xaa is C or S

SEQ ID NO: 72249 - protein, 34 aa, Artificial Sequence
  GFR-binding peptide
  MOD_RES (31), (33): Xaa is C or S
APVKTSNITMQIMDNGRVLLLGEMSMIVEEXGXL

SEQ ID NO: 72250 - protein, 42 aa, Artificial Sequence
  GFR-binding peptide
  MOD_RES (5), (6), (40), (42): Xaa is C or S
  MOD_RES (20), (21), (22), (23), (24): Xaa is A or G
  MOD_RES (25), (26), (27), (28): Xaa is A or G or is absent
TPPTXXVPTRLSNITIQIMXXXXXXXXXLGEMSDMVVESXGX

SEQ ID NO: 72251 - protein, 37 aa, Artificial Sequence
  GFR-binding peptide
  MOD_RES (5), (6): Xaa is C or S
SAGPXXTPTKMSNITMQIMNDKQQIILGEMSGMVVDR

SEQ ID NO: 72252 - protein, 38 aa, Artificial Sequence
  GFR-binding peptide
  MOD_RES (2), (3), (37): Xaa is C or S
  MOD_RES (17), (18), (19), (20), (21): Xaa is A or G
  MOD_RES (22), (23), (24), (25): Xaa is A or G or is absent
SXXVPARLSNITIQIMXXXXXXXXXLGEMSDMVVEAXG

SEQ ID NO: 72253 - protein, 34 aa, Artificial Sequence; identical to SEQ ID NO: 18883
  GFR-binding peptide
  MOD_RES (2), (2): Xaa is C or S
  MOD_RES (16), (17), (18), (19), (20): Xaa is A or G
  MOD_RES (21), (22), (23), (24): Xaa is A or G or is absent

SEQ ID NO: 72254 - protein, 36 aa, Artificial Sequence; identical to SEQ ID NO: 51676
  GFR-binding peptide
  MOD_RES (3), (4): Xaa is C or S
  MOD_RES (18), (19), (20), (21), (22): Xaa is A or G
  MOD_RES (23), (24), (25), (26): Xaa is A or G or is absent

SEQ ID NO: 72255 - protein, 42 aa, Artificial Sequence; identical to SEQ ID NO: 18885
  GFR-binding peptide
  MOD_RES (3), (40), (42): Xaa is C or S
  MOD_RES (19), (20), (21), (22), (23): Xaa is A or G
  MOD_RES (24), (25), (26), (27): Xaa is A or G or is absent

SEQ ID NO: 72256 - protein, 38 aa, Artificial Sequence
  GFR-binding peptide
  MOD_RES (3), (4), (38): Xaa is C or S
  MOD_RES (18), (19), (20), (21), (22): Xaa is A or G
  MOD_RES (23), (24), (25), (26): Xaa is A or G or is absent
KPXXAPTKLSNITVQIMXXXXXXXXXLGEMSNMVVRSX

SEQ ID NO: 72257 - protein, 39 aa, Artificial Sequence; identical to SEQ ID NO: 18886
  GFR-binding peptide
  MOD_RES (3), (37), (39): Xaa is C or S
  MOD_RES (17), (18), (19), (20), (21): Xaa is A or G
  MOD_RES (22), (23), (24), (25): Xaa is A or G or is absent

SEQ ID NO: 72258 - protein, 32 aa, Artificial Sequence
  GFR-binding peptide
  MOD_RES (1), (2): Xaa is C or S
XXAPTKLSNITVQIMDDSSNVILGEMSNMVVR

SEQ ID NO: 72259 - protein, 36 aa, Artificial Sequence
  GFR-binding peptide
  MOD_RES (2), (3): Xaa is C or S
  MOD_RES (17), (18), (19), (20), (21): Xaa is A or G
  MOD_RES (22), (23), (24), (25): Xaa is A or G or is absent
TXXVPTRLSNITIQIMXXXXXXXXXIGEMSDMVVES

SEQ ID NO: 72260 - protein, 37 aa, Artificial Sequence
  GFR-binding peptide
  MOD_RES (2), (3), (35), (37): Xaa is C or S
PXXAPTKLSNITVQIMDDSSNVILGEMSNMVVRSXGX

SEQ ID NO: 72261 - protein, 35 aa, Artificial Sequence; identical to SEQ ID NO: 18888
  GFR-binding peptide
  MOD_RES (3), (3): Xaa is C or S

SEQ ID NO: 72262 - protein, 35 aa, Artificial Sequence; identical to SEQ ID NO: 18889
  GFR-binding peptide
  MOD_RES (3), (3): Xaa is C or S
  MOD_RES (17), (18), (19), (20), (21): Xaa is A or G
  MOD_RES (22), (23), (24), (25): Xaa is A or G or is absent

SEQ ID NO: 72263 - protein, 37 aa, Artificial Sequence
  GFR-binding peptide
  MOD_RES (3), (4), (37): Xaa is C or S
  MOD_RES (18), (19), (20), (21), (22): Xaa is A or G
  MOD_RES (23), (24), (25), (26): Xaa is A or G or is absent
STXXAPVKTSNITMQIMXXXXXXXXXIGEMSMIVEEX

SEQ ID NO: 72264 - protein, 37 aa, Artificial Sequence
  GFR-binding peptide
  MOD_RES (5), (6), (37): Xaa is C or S
SASPXXVSQDLSNITIQIMIGKTPKILGEMSMIVKSX

SEQ ID NO: 72265 - protein, 37 aa, Artificial Sequence; identical to SEQ ID NO: 18890
  GFR-binding peptide
  MOD_RES (1), (35), (37): Xaa is C or S

SEQ ID NO: 72266 - protein, 37 aa, Artificial Sequence; identical to SEQ ID NO: 51680
  GFR-binding peptide
  MOD_RES (4), (5), (36): Xaa is C or S

SEQ ID NO: 72267 - protein, 34 aa, Artificial Sequence; identical to SEQ ID NO: 18893
  GFR-binding peptide

SEQ ID NO: 72268 - protein, 37 aa, Artificial Sequence; identical to SEQ ID NO: 18894
  GFR-binding peptide
  MOD_RES (3), (37): Xaa is C or S
  MOD_RES (17), (18), (19), (20), (21): Xaa is A or G
  MOD_RES (22), (23), (24), (25): Xaa is A or G or is absent

SEQ ID NO: 72269 - protein, 39 aa, Artificial Sequence
  GFR-binding peptide
  MOD_RES (4), (5), (39): Xaa is C or S
  MOD_RES (19), (20), (21), (22), (23): Xaa is A or G
  MOD_RES (24), (25), (26), (27): Xaa is A or G or is absent
AGPXXTPTKMSNITMQIMXXXXXXXXXLGEMSGMVVDRX

SEQ ID NO: 72270 - protein, 41 aa, Artificial Sequence
  GFR-binding peptide
  MOD_RES (5), (6), (38), (40): Xaa is C or S
APASXXVPARLSNITIQIMDAANNVVIGEMSDMVVEAXGXR

SEQ ID NO: 72271 - protein, 37 aa, Artificial Sequence
  GFR-binding peptide
  MOD_RES (2), (3), (37): Xaa is C or S
  MOD_RES (17), (18), (19), (20), (21): Xaa is A or G
  MOD_RES (22), (23), (24), (25): Xaa is A or G or is absent
SXXVPARLSNITIQIMXXXXXXXXXIGEMSDMVVEAX

SEQ ID NO: 72272 - protein, 36 aa, Artificial Sequence
  GFR-binding peptide
  MOD_RES (34), (36): Xaa is C or S
  MOD_RES (14), (15), (16), (17), (18): Xaa is A or G
  MOD_RES (19), (20), (21), (22): Xaa is A or G or is absent
VPTRLSNITIQIMXXXXXXXXXLGEMSDMVVESXGX

SEQ ID NO: 72273 - protein, 39 aa, Artificial Sequence
  GFR-binding peptide
  MOD_RES (4), (5), (37), (39): Xaa is C or S
PASXXVPARLSNITIQIMDAANNVVIGEMSDMVVEAXGX

SEQ ID NO: 72274 - protein, 39 aa, Artificial Sequence; identical to SEQ ID NO: 18897
  GFR-binding peptide
  MOD_RES (1), (38): Xaa is C or S
  MOD_RES (17), (18), (19), (20), (21): Xaa is A or G
  MOD_RES (22), (23), (24), (25): Xaa is A or G or is absent

SEQ ID NO: 72275 - protein, 44 aa, Artificial Sequence
  GFR-binding peptide
  MOD_RES (6), (7), (41), (43): Xaa is C or S
  MOD_RES (21), (22), (23), (24), (25): Xaa is A or G
  MOD_RES (26), (27), (28), (29): Xaa is A or G or is absent
GSAGPXXTPTKMSNITMQIMXXXXXXXXXIGEMSGMVVDRXGXS

SEQ ID NO: 72276 - protein, 39 aa, Artificial Sequence
  GFR-binding peptide
  MOD_RES (3), (4), (37), (39): Xaa is C or S
  MOD_RES (18), (19), (20), (21), (22): Xaa is A or G
  MOD_RES (23), (24), (25), (26): Xaa is A or G or is absent
APXXVPQALSNITIQIMXXXXXXXXXLGEMSMIVRSXKX

SEQ ID NO: 72277 - protein, 40 aa, Artificial Sequence; identical to SEQ ID NO: 18898
  GFR-binding peptide
  MOD_RES (4), (4): Xaa is C or S

SEQ ID NO: 72278 - protein, 37 aa, Artificial Sequence; identical to SEQ ID NO: 18899
  GFR-binding peptide
  MOD_RES (35), (37): Xaa is C or S
  MOD_RES (14), (15), (16), (17), (18): Xaa is A or G
  MOD_RES (19), (20), (21), (22): Xaa is A or G or is absent

SEQ ID NO: 72279 - protein, 35 aa, Artificial Sequence; identical to SEQ ID NO: 18900
  GFR-binding peptide
  MOD_RES (34), (34): Xaa is C or S

SEQ ID NO: 72280 - protein, 34 aa, Artificial Sequence
  GFR-binding peptide
  MOD_RES (1), (2), (34): Xaa is C or S
XXVPTRLSNITIQIMDSANNVVIGEMSDMVVESX

SEQ ID NO: 72281 - protein, 35 aa, Artificial Sequence
  GFR-binding peptide
  MOD_RES (1), (2), (35): Xaa is C or S
  MOD_RES (16), (17), (18), (19), (20): Xaa is A or G
  MOD_RES (21), (22), (23), (24): Xaa is A or G or is absent
XXVPQALSNITIQIMXXXXXXXXXLGEMSMIVRSX

SEQ ID NO: 72282 - protein, 40 aa, Artificial Sequence; identical to SEQ ID NO: 18901
  GFR-binding peptide
  MOD_RES (3), (40): Xaa is C or S
  MOD_RES (19), (20), (21), (22), (23): Xaa is A or G
  MOD_RES (24), (25), (26), (27): Xaa is A or G or is absent

SEQ ID NO: 72283 - protein, 40 aa, Artificial Sequence
  GFR-binding peptide
  MOD_RES (4), (5), (37), (39): Xaa is C or S
PASXXVPARLSNITIQIMDAANNVVIGEMSDMVVEAXGXR

SEQ ID NO: 72284 - protein, 32 aa, Artificial Sequence
  GFR-binding peptide
  MOD_RES (1), (1): Xaa is C or S
XVPTRLSNITIQIMDSANNVVIGEMSDMVVES

SEQ ID NO: 72285 - protein, 34 aa, Artificial Sequence; identical to SEQ ID NO: 54096
  GFR-binding peptide
  MOD_RES (31), (33): Xaa is C or S

SEQ ID NO: 72286 - protein, 37 aa, Artificial Sequence
  GFR-binding peptide
  MOD_RES (4), (5), (37): Xaa is C or S
PASXXVPARLSNITIQIMDAANNVVLGEMSDMVVEAX

SEQ ID NO: 72287 - protein, 43 aa, Artificial Sequence; identical to SEQ ID NO: 18904
  GFR-binding peptide
  MOD_RES (3), (40), (42): Xaa is C or S
  MOD_RES (19), (20), (21), (22), (23): Xaa is A or G
  MOD_RES (24), (25), (26), (27): Xaa is A or G or is absent

SEQ ID NO: 72288 - protein, 31 aa, Artificial Sequence; identical to SEQ ID NO: 51705
  GFR-binding peptide
  MOD_RES (1), (1): Xaa is C or S

SEQ ID NO: 72289 - protein, 41 aa, Artificial Sequence; identical to SEQ ID NO: 18905
  GFR-binding peptide
  MOD_RES (5), (39), (41): Xaa is C or S
  MOD_RES (19), (20), (21), (22), (23): Xaa is A or G
  MOD_RES (24), (25), (26), (27): Xaa is A or G or is absent

SEQ ID NO: 72290 - protein, 38 aa, Artificial Sequence
  GFR-binding peptide
  MOD_RES (1), (2), (36), (38): Xaa is C or S
  MOD_RES (16), (17), (18), (19), (20): Xaa is A or G
  MOD_RES (21), (22), (23), (24): Xaa is A or G or is absent
XXAPTKLSNITVQIMXXXXXXXXXLGEMSNMVVRSXGX

SEQ ID NO: 72291 - protein, 38 aa, Artificial Sequence; identical to SEQ ID NO: 18907
  GFR-binding peptide
  MOD_RES (35), (37): Xaa is C or S

SEQ ID NO: 72292 - protein, 34 aa, Artificial Sequence
  GFR-binding peptide
  MOD_RES (33), (33): Xaa is C or S
  MOD_RES (14), (15), (16), (17), (18): Xaa is A or G
  MOD_RES (19), (20), (21), (22): Xaa is A or G or is absent
VPQDLSNITIQIMXXXXXXXXXLGEMSMVVKSXK

SEQ ID NO: 72293 - protein, 35 aa, Artificial Sequence; identical to SEQ ID NO: 18908
  GFR-binding peptide
  MOD_RES (2), (2): Xaa is C or S
  MOD_RES (16), (17), (18), (19), (20): Xaa is A or G
  MOD_RES (21), (22), (23), (24): Xaa is A or G or is absent

SEQ ID NO: 72294 - protein, 38 aa, Artificial Sequence; identical to SEQ ID NO: 18912
  GFR-binding peptide
  MOD_RES (37), (37): Xaa is C or S
  MOD_RES (16), (17), (18), (19), (20): Xaa is A or G
  MOD_RES (21), (22), (23), (24): Xaa is A or G or is absent

SEQ ID NO: 72295 - protein, 36 aa, Artificial Sequence; identical to SEQ ID NO: 18913
  GFR-binding peptide
  MOD_RES (2), (2): Xaa is C or S
  MOD_RES (18), (19), (20), (21), (22): Xaa is A or G
  MOD_RES (23), (24), (25), (26): Xaa is A or G or is absent

SEQ ID NO: 72296 - protein, 33 aa, Artificial Sequence; identical to SEQ ID NO: 18914
  GFR-binding peptide
  MOD_RES (1), (1): Xaa is C or S

SEQ ID NO: 72297 - protein, 39 aa, Artificial Sequence
  GFR-binding peptide
  MOD_RES (1), (2), (36), (38): Xaa is C or S
  MOD_RES (16), (17), (18), (19), (20): Xaa is A or G
  MOD_RES (21), (22), (23), (24): Xaa is A or G or is absent
XXVPTRLSNITIQIMXXXXXXXXXLGEMSDMVVESXGXR

SEQ ID NO: 72298 - protein, 38 aa, Artificial Sequence
  GFR-binding peptide
  MOD_RES (1), (35), (37): Xaa is C or S
  MOD_RES (15), (16), (17), (18), (19): Xaa is A or G
  MOD_RES (20), (21), (22), (23): Xaa is A or G or is absent
XTPTKMSNITMQIMXXXXXXXXXIGEMSGMVVDRXGXS

SEQ ID NO: 72299 - protein, 37 aa, Artificial Sequence
  GFR-binding peptide
  MOD_RES (2), (3), (35), (37): Xaa is C or S
PXXTPTKMSNITMQIMNDKQQIILGEMSGMVVDRXGX

SEQ ID NO: 72300 - protein, 39 aa, Artificial Sequence; identical to SEQ ID NO: 18915
  GFR-binding peptide
  MOD_RES (4), (4): Xaa is C or S

SEQ ID NO: 72301 - protein, 39 aa, Artificial Sequence; identical to SEQ ID NO: 18916
  GFR-binding peptide
  MOD_RES (2), (39): Xaa is C or S
  MOD_RES (18), (19), (20), (21), (22): Xaa is A or G
  MOD_RES (23), (24), (25), (26): Xaa is A or G or is absent

SEQ ID NO: 72302 - protein, 35 aa, Artificial Sequence
  GFR-binding peptide
  MOD_RES (1), (2), (34): Xaa is C or S
XXVPARLSNITIQIMDAANNVVIGEMSDMVVEAXG

SEQ ID NO: 72303 - protein, 38 aa, Artificial Sequence
  GFR-binding peptide
  MOD_RES (1), (35), (37): Xaa is C or S
  MOD_RES (15), (16), (17), (18), (19): Xaa is A or G
  MOD_RES (20), (21), (22), (23): Xaa is A or G or is absent
XVPARLSNITIQIMXXXXXXXXXLGEMSDMVVEAXGXR

SEQ ID NO: 72304 - protein, 35 aa, Artificial Sequence
  GFR-binding peptide
  MOD_RES (1), (32), (34): Xaa is C or S
XVPQALSNITIQIMVGRKPKVLGEMSMIVRSXKXS

SEQ ID NO: 72305 - protein, 33 aa, Artificial Sequence
  GFR-binding peptide
  MOD_RES (1), (1): Xaa is C or S
  MOD_RES (15), (16), (17), (18), (19): Xaa is A or G
  MOD_RES (20), (21), (22), (23): Xaa is A or G or is absent
XVPARLSNITIQIMXXXXXXXXXIGEMSDMVVE

SEQ ID NO: 72306 - protein, 33 aa, Artificial Sequence
  GFR-binding peptide
  MOD_RES (1), (2): Xaa is C or S
XXVPTRLSNITIQIMDSANNVVLGEMSDMVVES

SEQ ID NO: 72307 - protein, 43 aa, Artificial Sequence; identical to SEQ ID NO: 18920
  GFR-binding peptide
  MOD_RES (7), (41), (43): Xaa is C or S
  MOD_RES (21), (22), (23), (24), (25): Xaa is A or G
  MOD_RES (26), (27), (28), (29): Xaa is A or G or is absent

SEQ ID NO: 72308 - protein, 39 aa, Artificial Sequence; identical to SEQ ID NO: 18922
  GFR-binding peptide
  MOD_RES (2), (39): Xaa is C or S

SEQ ID NO: 72309 - protein, 34 aa, Artificial Sequence
  GFR-binding peptide
  MOD_RES (3), (4): Xaa is C or S
ASXXVPARLSNITIQIMDAANNVVLGEMSDMVVE

SEQ ID NO: 72310 - protein, 40 aa, Artificial Sequence
  GFR-binding peptide
  MOD_RES (6), (7): Xaa is C or S
  MOD_RES (21), (22), (23), (24), (25): Xaa is A or G
  MOD_RES (26), (27), (28), (29): Xaa is A or G or is absent
GSAGPXXTPTKMSNITMQIMXXXXXXXXXLGEMSGMVVDR

SEQ ID NO: 72311 - protein, 35 aa, Artificial Sequence; identical to SEQ ID NO: 18926
  GFR-binding peptide
  MOD_RES (34), (34): Xaa is C or S
  MOD_RES (14), (15), (16), (17), (18): Xaa is A or G
  MOD_RES (19), (20), (21), (22): Xaa is A or G or is absent

SEQ ID NO: 72312 - protein, 39 aa, Artificial Sequence
  GFR-binding peptide
  MOD_RES (4), (5), (36), (38): Xaa is C or S
PSTXXAPVKTSNITMQIMDNGRVLLIGEMSMIVEEXGXL

SEQ ID NO: 72313 - protein, 37 aa, Artificial Sequence; identical to SEQ ID NO: 54127
  GFR-binding peptide
  MOD_RES (1), (2), (35), (37): Xaa is C or S
  MOD_RES (16), (17), (18), (19), (20): Xaa is A or G
  MOD_RES (21), (22), (23), (24): Xaa is A or G or is absent

SEQ ID NO: 72314 - protein, 42 aa, Artificial Sequence; identical to SEQ ID NO: 18930
  GFR-binding peptide
  MOD_RES (4), (41): Xaa is C or S

SEQ ID NO: 72315 - protein, 35 aa, Artificial Sequence; identical to SEQ ID NO: 18932
  GFR-binding peptide
  MOD_RES (35), (35): Xaa is C or S
  MOD_RES (14), (15), (16), (17), (18): Xaa is A or G
  MOD_RES (19), (20), (21), (22): Xaa is A or G or is absent

SEQ ID NO: 72316 - protein, 32 aa, Artificial Sequence
  GFR-binding peptide
  MOD_RES (14), (15), (16), (17), (18): Xaa is A or G
  MOD_RES (19), (20), (21), (22): Xaa is A or G or is absent
APVKTSNITMQIMXXXXXXXXXLGEMSMIVEE

SEQ ID NO: 72317 - protein, 39 aa, Artificial Sequence; identical to SEQ ID NO: 18934
  GFR-binding peptide
  MOD_RES (2), (36), (38): Xaa is C or S
  MOD_RES (16), (17), (18), (19), (20): Xaa is A or G
  MOD_RES (21), (22), (23), (24): Xaa is A or G or is absent

SEQ ID NO: 72318 - protein, 38 aa, Artificial Sequence; identical to SEQ ID NO: 18935
  GFR-binding peptide
  MOD_RES (3), (3): Xaa is C or S

SEQ ID NO: 72319 - protein, 38 aa, Artificial Sequence; identical to SEQ ID NO: 51741
  GFR-binding peptide
  MOD_RES (3), (4), (35), (37): Xaa is C or S

SEQ ID NO: 72320 - protein, 36 aa, Artificial Sequence
  GFR-binding peptide
  MOD_RES (2), (3), (36): Xaa is C or S
  MOD_RES (17), (18), (19), (20), (21): Xaa is A or G
  MOD_RES (22), (23), (24), (25): Xaa is A or G or is absent
TXXAPVKTSNITMQIMXXXXXXXXXLGEMSMIVEEX

SEQ ID NO: 72321 - protein, 40 aa, Artificial Sequence; identical to SEQ ID NO: 18936
  GFR-binding peptide
  MOD_RES (4), (4): Xaa is C or S
  MOD_RES (20), (21), (22), (23), (24): Xaa is A or G
  MOD_RES (25), (26), (27), (28): Xaa is A or G or is absent

SEQ ID NO: 72322 - protein, 34 aa, Artificial Sequence; identical to SEQ ID NO: 18937
  GFR-binding peptide

SEQ ID NO: 72323 - protein, 39 aa, Artificial Sequence
  GFR-binding peptide
  MOD_RES (6), (7): Xaa is C or S
  MOD_RES (21), (22), (23), (24), (25): Xaa is A or G
  MOD_RES (26), (27), (28), (29): Xaa is A or G or is absent
RVPSTXXAPVKTSNITMQIMXXXXXXXXXLGEMSMIVEE

SEQ ID NO: 72324 - protein, 33 aa, Artificial Sequence
  GFR-binding peptide
  MOD_RES (32), (32): Xaa is C or S
VPTRLSNITIQIMDSANNVVIGEMSDMVVESXG

SEQ ID NO: 72325 - protein, 38 aa, Artificial Sequence; identical to SEQ ID NO: 18939
  GFR-binding peptide
  MOD_RES (5), (5): Xaa is C or S
  MOD_RES (19), (20), (21), (22), (23): Xaa is A or G
  MOD_RES (24), (25), (26), (27): Xaa is A or G or is absent

SEQ ID NO: 72326 - protein, 39 aa, Artificial Sequence; identical to SEQ ID NO: 54137
  GFR-binding peptide
  MOD_RES (5), (6), (38): Xaa is C or S

SEQ ID NO: 72327 - protein, 32 aa, Artificial Sequence; identical to SEQ ID NO: 51747
  GFR-binding peptide
  MOD_RES (31), (31): Xaa is C or S

SEQ ID NO: 72328 - protein, 39 aa, Artificial Sequence; identical to SEQ ID NO: 18941
  GFR-binding peptide
  MOD_RES (4), (4): Xaa is C or S
  MOD_RES (20), (21), (22), (23), (24): Xaa is A or G
  MOD_RES (25), (26), (27), (28): Xaa is A or G or is absent

SEQ ID NO: 72329 - protein, 41 aa, Artificial Sequence; identical to SEQ ID NO: 18942
  GFR-binding peptide
  MOD_RES (4), (38), (40): Xaa is C or S
  MOD_RES (18), (19), (20), (21), (22): Xaa is A or G
  MOD_RES (23), (24), (25), (26): Xaa is A or G or is absent

SEQ ID NO: 72330 - protein, 36 aa, Artificial Sequence
  GFR-binding peptide
  MOD_RES (1), (33), (35): Xaa is C or S
XVPARLSNITIQIMDAANNVVIGEMSDMVVEAXGXR

SEQ ID NO: 72331 - protein, 32 aa, Artificial Sequence
  GFR-binding peptide
  MOD_RES (1), (2): Xaa is C or S
XXVPARLSNITIQIMDAANNVVLGEMSDMVVE

SEQ ID NO: 72332 - protein, 42 aa, Artificial Sequence
  GFR-binding peptide
  MOD_RES (5), (6), (39), (41): Xaa is C or S
  MOD_RES (20), (21), (22), (23), (24): Xaa is A or G
  MOD_RES (25), (26), (27), (28): Xaa is A or G or is absent
SASPXXVSQDLSNITIQIMXXXXXXXXXLGEMSMIVKSXKXS

SEQ ID NO: 72333 - protein, 38 aa, Artificial Sequence
  GFR-binding peptide
  MOD_RES (3), (4), (38): Xaa is C or S
  MOD_RES (18), (19), (20), (21), (22): Xaa is A or G
  MOD_RES (23), (24), (25), (26): Xaa is A or G or is absent
PTXXVPTRLSNITIQIMXXXXXXXXXLGEMSDMVVESX

SEQ ID NO: 72334 - protein, 38 aa, Artificial Sequence; identical to SEQ ID NO: 18943
  GFR-binding peptide
  MOD_RES (4), (4): Xaa is C or S

SEQ ID NO: 72335 - protein, 37 aa, Artificial Sequence
  GFR-binding peptide
  MOD_RES (6), (7): Xaa is C or S
AAPASXXVPARLSNITIQIMDAANNVVLGEMSDMVVE

SEQ ID NO: 72336 - protein, 43 aa, Artificial Sequence
  GFR-binding peptide
  MOD_RES (6), (7), (41), (43): Xaa is C or S
  MOD_RES (21), (22), (23), (24), (25): Xaa is A or G
  MOD_RES (26), (27), (28), (29): Xaa is A or G or is absent
GSAGPXXTPTKMSNITMQIMXXXXXXXXXIGEMSGMVVDRXGX

SEQ ID NO: 72337 - protein, 37 aa, Artificial Sequence; identical to SEQ ID NO: 18945
  GFR-binding peptide
  MOD_RES (3), (3): Xaa is C or S
  MOD_RES (19), (20), (21), (22), (23): Xaa is A or G
  MOD_RES (24), (25), (26), (27): Xaa is A or G or is absent

SEQ ID NO: 72338 - protein, 36 aa, Artificial Sequence
  GFR-binding peptide
  MOD_RES (5), (6): Xaa is C or S
SAGPXXTPTKMSNITMQIMNDKQQIIIGEMSGMVVD

SEQ ID NO: 72339 - protein, 36 aa, Artificial Sequence
  GFR-binding peptide
  MOD_RES (4), (5), (36): Xaa is C or S
ASPXXVPQDLSNITIQIMVGRTPKVLGEMSMVVKSX

SEQ ID NO: 72340 - protein, 37 aa, Artificial Sequence; identical to SEQ ID NO: 18946
  GFR-binding peptide
  MOD_RES (2), (2): Xaa is C or S
  MOD_RES (18), (19), (20), (21), (22): Xaa is A or G
  MOD_RES (23), (24), (25), (26): Xaa is A or G or is absent

SEQ ID NO: 72341 - protein, 41 aa, Artificial Sequence
  GFR-binding peptide
  MOD_RES (4), (5), (38), (40): Xaa is C or S
  MOD_RES (19), (20), (21), (22), (23): Xaa is A or G
  MOD_RES (24), (25), (26), (27): Xaa is A or G or is absent
PSTXXAPVKTSNITMQIMXXXXXXXXXIGEMSMIVEEXGXL

SEQ ID NO: 72342 - protein, 37 aa, Artificial Sequence
  GFR-binding peptide
  MOD_RES (1), (35), (37): Xaa is C or S
  MOD_RES (15), (16), (17), (18), (19): Xaa is A or G
  MOD_RES (20), (21), (22), (23): Xaa is A or G or is absent
XTPTKMSNITMQIMXXXXXXXXXLGEMSGMVVDRXGX

SEQ ID NO: 72343 - protein, 36 aa, Artificial Sequence
  GFR-binding peptide
  MOD_RES (4), (5): Xaa is C or S
PASXXVPARLSNITIQIMDAANNVVLGEMSDMVVEA

SEQ ID NO: 72344 - protein, 41 aa, Artificial Sequence
  GFR-binding peptide
  MOD_RES (5), (6), (39), (41): Xaa is C or S
  MOD_RES (20), (21), (22), (23), (24): Xaa is A or G
  MOD_RES (25), (26), (27), (28): Xaa is A or G or is absent
SASPXXVPQDLSNITIQIMXXXXXXXXXLGEMSMVVKSXKX

SEQ ID NO: 72345 - protein, 33 aa, Artificial Sequence
  GFR-binding peptide
  MOD_RES (32), (32): Xaa is C or S
TPTKMSNITMQIMNDKQQIILGEMSGMVVDRXG

SEQ ID NO: 72346 - protein, 33 aa, Artificial Sequence; identical to SEQ ID NO: 18950
  GFR-binding peptide
  MOD_RES (14), (15), (16), (17), (18): Xaa is A or G
  MOD_RES (19), (20), (21), (22): Xaa is A or G or is absent

SEQ ID NO: 72347 - protein, 32 aa, Artificial Sequence
  GFR-binding peptide
  MOD_RES (31), (31): Xaa is C or S
APVKTSNITMQIMDNGRVLLLGEMSMIVEEXG

SEQ ID NO: 72348 - protein, 34 aa, Artificial Sequence
  GFR-binding peptide
  MOD_RES (3), (4): Xaa is C or S
PTXXVPTRLSNITIQIMDSANNVVLGEMSDMVVE

SEQ ID NO: 72349 - protein, 41 aa, Artificial Sequence
  GFR-binding peptide
  MOD_RES (4), (5), (38), (40): Xaa is C or S
  MOD_RES (19), (20), (21), (22), (23): Xaa is A or G
  MOD_RES (24), (25), (26), (27): Xaa is A or G or is absent
AAPXXVPQALSNITIQIMXXXXXXXXXLGEMSMIVRSXKXS

SEQ ID NO: 72350 - protein, 35 aa, Artificial Sequence
  GFR-binding peptide
  MOD_RES (1), (2), (34): Xaa is C or S
XXAPTKLSNITVQIMDDSSNVILGEMSNMVVRSXG

SEQ ID NO: 72351 - protein, 32 aa, Artificial Sequence; identical to SEQ ID NO: 54165
  GFR-binding peptide
  MOD_RES (1), (32): Xaa is C or S

SEQ ID NO: 72352 - protein, 38 aa, Artificial Sequence; identical to SEQ ID NO: 18953
  GFR-binding peptide
  MOD_RES (6), (6): Xaa is C or S
  MOD_RES (20), (21), (22), (23), (24): Xaa is A or G
  MOD_RES (25), (26), (27), (28): Xaa is A or G or is absent

SEQ ID NO: 72353 - protein, 38 aa, Artificial Sequence
  GFR-binding peptide
  MOD_RES (4), (5): Xaa is C or S
  MOD_RES (19), (20), (21), (22), (23): Xaa is A or G
  MOD_RES (24), (25), (26), (27): Xaa is A or G or is absent
PASXXVPARLSNITIQIMXXXXXXXXXIGEMSDMVVEA

SEQ ID NO: 72354 - protein, 37 aa, Artificial Sequence; identical to SEQ ID NO: 18955
  GFR-binding peptide
  MOD_RES (5), (5): Xaa is C or S
  MOD_RES (19), (20), (21), (22), (23): Xaa is A or G
  MOD_RES (24), (25), (26), (27): Xaa is A or G or is absent

SEQ ID NO: 72355 - protein, 32 aa, Artificial Sequence
  GFR-binding peptide
  MOD_RES (14), (15), (16), (17), (18): Xaa is A or G
  MOD_RES (19), (20), (21), (22): Xaa is A or G or is absent
VPQDLSNITIQIMXXXXXXXXXLGEMSMVVKS

SEQ ID NO: 72356 - protein, 39 aa, Artificial Sequence
  GFR-binding peptide
  MOD_RES (5), (6), (39): Xaa is C or S
  MOD_RES (20), (21), (22), (23), (24): Xaa is A or G
  MOD_RES (25), (26), (27), (28): Xaa is A or G or is absent
VPSTXXAPVKTSNITMQIMXXXXXXXXXLGEMSMIVEEX

SEQ ID NO: 72357 - protein, 33 aa, Artificial Sequence
  GFR-binding peptide
  MOD_RES (33), (33): Xaa is C or S
  MOD_RES (14), (15), (16), (17), (18): Xaa is A or G
  MOD_RES (19), (20), (21), (22): Xaa is A or G or is absent
APVKTSNITMQIMXXXXXXXXXIGEMSMIVEEX

SEQ ID NO: 72358 - protein, 38 aa, Artificial Sequence
  GFR-binding peptide
  MOD_RES (2), (3), (35), (37): Xaa is C or S
PXXTPTKMSNITMQIMNDKQQIIIGEMSGMVVDRXGXS

SEQ ID NO: 72359 - protein, 42 aa, Artificial Sequence; identical to SEQ ID NO: 18956
  GFR-binding peptide
  MOD_RES (7), (41): Xaa is C or S
  MOD_RES (21), (22), (23), (24), (25): Xaa is A or G
  MOD_RES (26), (27), (28), (29): Xaa is A or G or is absent

SEQ ID NO: 72360 - protein, 39 aa, Artificial Sequence; identical to SEQ ID NO: 51777
  GFR-binding peptide
  MOD_RES (4), (5), (36), (38): Xaa is C or S

SEQ ID NO: 72361 - protein, 37 aa, Artificial Sequence; identical to SEQ ID NO: 18958
  GFR-binding peptide
  MOD_RES (36), (36): Xaa is C or S
  MOD_RES (15), (16), (17), (18), (19): Xaa is A or G
  MOD_RES (20), (21), (22), (23): Xaa is A or G or is absent

SEQ ID NO: 72362 - protein, 31 aa, Artificial Sequence
  GFR-binding peptide
APTKLSNITVQIMDDSSNVILGEMSNMVVRS

SEQ ID NO: 72363 - protein, 33 aa, Artificial Sequence; identical to SEQ ID NO: 18959
  GFR-binding peptide
  MOD_RES (15), (16), (17), (18), (19): Xaa is A or G
  MOD_RES (20), (21), (22), (23): Xaa is A or G or is absent

SEQ ID NO: 72364 - protein, 37 aa, Artificial Sequence; identical to SEQ ID NO: 54174
  GFR-binding peptide
  MOD_RES (6), (7): Xaa is C or S

SEQ ID NO: 72365 - protein, 36 aa, Artificial Sequence
  GFR-binding peptide
  MOD_RES (4), (5): Xaa is C or S
PPTXXVPTRLSNITIQIMDSANNVVIGEMSDMVVES

SEQ ID NO: 72366 - protein, 43 aa, Artificial Sequence; identical to SEQ ID NO: 18961
  GFR-binding peptide
  MOD_RES (3), (40), (42): Xaa is C or S
  MOD_RES (19), (20), (21), (22), (23): Xaa is A or G
  MOD_RES (24), (25), (26), (27): Xaa is A or G or is absent

SEQ ID NO: 72367 - protein, 40 aa, Artificial Sequence
  GFR-binding peptide
  MOD_RES (4), (5), (38), (40): Xaa is C or S
  MOD_RES (19), (20), (21), (22), (23): Xaa is A or G
  MOD_RES (24), (25), (26), (27): Xaa is A or G or is absent
PSTXXAPVKTSNITMQIMXXXXXXXXXLGEMSMIVEEXGX

SEQ ID NO: 72368 - protein, 37 aa, Artificial Sequence
  GFR-binding peptide
  MOD_RES (5), (6), (37): Xaa is C or S
SAAPXXVPQALSNITIQIMVGRKPKVLGEMSMIVRSX

SEQ ID NO: 72369 - protein, 36 aa, Artificial Sequence; identical to SEQ ID NO: 54181
  GFR-binding peptide
  MOD_RES (5), (6): Xaa is C or S

SEQ ID NO: 72370 - protein, 41 aa, Artificial Sequence
  GFR-binding peptide
  MOD_RES (3), (4), (38), (40): Xaa is C or S
  MOD_RES (18), (19), (20), (21), (22): Xaa is A or G
  MOD_RES (23), (24), (25), (26): Xaa is A or G or is absent
PTXXVPTRLSNITIQIMXXXXXXXXXIGEMSDMVVESXGXR

SEQ ID NO: 72371 - protein, 36 aa, Artificial Sequence; identical to SEQ ID NO: 54186
  GFR-binding peptide
  MOD_RES (2), (3), (34), (36): Xaa is C or S

SEQ ID NO: 72372 - protein, 36 aa, Artificial Sequence
  GFR-binding peptide
  MOD_RES (34), (36): Xaa is C or S
  MOD_RES (14), (15), (16), (17), (18): Xaa is A or G
  MOD_RES (19), (20), (21), (22): Xaa is A or G or is absent
VPARLSNITIQIMXXXXXXXXXIGEMSDMVVEAXGX

SEQ ID NO: 72373 - protein, 37 aa, Artificial Sequence; identical to SEQ ID NO: 18963
  GFR-binding peptide
  MOD_RES (36), (36): Xaa is C or S

SEQ ID NO: 72374 - protein, 36 aa, Artificial Sequence; identical to SEQ ID NO: 51793
  GFR-binding peptide
  MOD_RES (4), (5), (36): Xaa is C or S

SEQ ID NO: 72375 - protein, 38 aa, Artificial Sequence
  GFR-binding peptide
  MOD_RES (3), (4), (36), (38): Xaa is C or S
PTXXVPTRLSNITIQIMDSANNVVLGEMSDMVVESXGX

SEQ ID NO: 72376 - protein, 34 aa, Artificial Sequence
  GFR-binding peptide
  MOD_RES (33), (33): Xaa is C or S
  MOD_RES (14), (15), (16), (17), (18): Xaa is A or G
  MOD_RES (19), (20), (21), (22): Xaa is A or G or is absent
APVKTSNITMQIMXXXXXXXXXLGEMSMIVEEXG

SEQ ID NO: 72377 - protein, 31 aa, Artificial Sequence
  GFR-binding peptide
  MOD_RES (1), (1): Xaa is C or S
XVPARLSNITIQIMDAANNVVIGEMSDMVVE

SEQ ID NO: 72378 - protein, 38 aa, Artificial Sequence; identical to SEQ ID NO: 18964
  GFR-binding peptide
  MOD_RES (2), (2): Xaa is C or S

SEQ ID NO: 72379 - protein, 37 aa, Artificial Sequence
  GFR-binding peptide
  MOD_RES (6), (7): Xaa is C or S
GSAGPXXTPTKMSNITMQIMNDKQQIIIGEMSGMVVD

SEQ ID NO: 72380 - protein, 33 aa, Artificial Sequence; identical to SEQ ID NO: 18966
  GFR-binding peptide
  MOD_RES (1), (1): Xaa is C or S

SEQ ID NO: 72381 - protein, 41 aa, Artificial Sequence; identical to SEQ ID NO: 18968
  GFR-binding peptide
  MOD_RES (7), (41): Xaa is C or S
  MOD_RES (21), (22), (23), (24), (25): Xaa is A or G
  MOD_RES (26), (27), (28), (29): Xaa is A or G or is absent

SEQ ID NO: 72382 - protein, 39 aa, Artificial Sequence; identical to SEQ ID NO: 18969
  GFR-binding peptide
  MOD_RES (5), (5): Xaa is C or S

SEQ ID NO: 72383 - protein, 39 aa, Artificial Sequence
  GFR-binding peptide
  MOD_RES (6), (7), (39): Xaa is C or S
HVPKPXXAPTKLSNITVQIMDDSSNVIIGEMSNMVVRSX

SEQ ID NO: 72384 - protein, 37 aa, Artificial Sequence; identical to SEQ ID NO: 18971
  GFR-binding peptide
  MOD_RES (36), (36): Xaa is C or S
  MOD_RES (15), (16), (17), (18), (19): Xaa is A or G
  MOD_RES (20), (21), (22), (23): Xaa is A or G or is absent

SEQ ID NO: 72385 - protein, 32 aa, Artificial Sequence
  GFR-binding peptide
  MOD_RES (14), (15), (16), (17), (18): Xaa is A or G
  MOD_RES (19), (20), (21), (22): Xaa is A or G or is absent
TPTKMSNITMQIMXXXXXXXXXLGEMSGMVVD

SEQ ID NO: 72386 - protein, 42 aa, Artificial Sequence; identical to SEQ ID NO: 18972
  GFR-binding peptide
  MOD_RES (4), (41): Xaa is C or S

SEQ ID NO: 72387 - protein, 33 aa, Artificial Sequence; identical to SEQ ID NO: 51797
  GFR-binding peptide
  MOD_RES (1), (2), (33): Xaa is C or S

SEQ ID NO: 72388 - protein, 35 aa, Artificial Sequence
  GFR-binding peptide
  MOD_RES (1), (2): Xaa is C or S
  MOD_RES (16), (17), (18), (19), (20): Xaa is A or G
  MOD_RES (21), (22), (23), (24): Xaa is A or G or is absent
XXVPARLSNITIQIMXXXXXXXXXLGEMSDMVVEA

SEQ ID NO: 72389 - protein, 39 aa, Artificial Sequence
  GFR-binding peptide
  MOD_RES (3), (4), (37), (39): Xaa is C or S
  MOD_RES (18), (19), (20), (21), (22): Xaa is A or G
  MOD_RES (23), (24), (25), (26): Xaa is A or G or is absent
SPXXVSQDLSNITIQIMXXXXXXXXXLGEMSMIVKSXKX

SEQ ID NO: 72390 - protein, 38 aa, Artificial Sequence; identical to SEQ ID NO: 18973
  GFR-binding peptide
  MOD_RES (5), (5): Xaa is C or S

SEQ ID NO: 72391 - protein, 42 aa, Artificial Sequence; identical to SEQ ID NO: 18974
  GFR-binding peptide
  MOD_RES (4), (41): Xaa is C or S
  MOD_RES (20), (21), (22), (23), (24): Xaa is A or G
  MOD_RES (25), (26), (27), (28): Xaa is A or G or is absent

SEQ ID NO: 72392 - protein, 41 aa, Artificial Sequence
  GFR-binding peptide
  MOD_RES (5), (6), (40): Xaa is C or S
  MOD_RES (20), (21), (22), (23), (24): Xaa is A or G
  MOD_RES (25), (26), (27), (28): Xaa is A or G or is absent
APASXXVPARLSNITIQIMXXXXXXXXXIGEMSDMVVEAXG

SEQ ID NO: 72393 - protein, 34 aa, Artificial Sequence; identical to SEQ ID NO: 54201
  GFR-binding peptide
  MOD_RES (1), (2), (33): Xaa is C or S

SEQ ID NO: 72394 - protein, 41 aa, Artificial Sequence
  GFR-binding peptide
  MOD_RES (6), (7), (41): Xaa is C or S
  MOD_RES (21), (22), (23), (24), (25): Xaa is A or G
  MOD_RES (26), (27), (28), (29): Xaa is A or G or is absent
HVPKPXXAPTKLSNITVQIMXXXXXXXXXIGEMSNMVVRSX

SEQ ID NO: 72395 - protein, 37 aa, Artificial Sequence; identical to SEQ ID NO: 18975
  GFR-binding peptide
  MOD_RES (5), (5): Xaa is C or S
  MOD_RES (19), (20), (21), (22), (23): Xaa is A or G
  MOD_RES (24), (25), (26), (27): Xaa is A or G or is absent

SEQ ID NO: 72396 - protein, 40 aa, Artificial Sequence
  GFR-binding peptide
  MOD_RES (5), (6), (39): Xaa is C or S
  MOD_RES (20), (21), (22), (23), (24): Xaa is A or G
  MOD_RES (25), (26), (27), (28): Xaa is A or G or is absent
SASPXXVSQDLSNITIQIMXXXXXXXXXLGEMSMIVKSXK

SEQ ID NO: 72397 - protein, 41 aa, Artificial Sequence; identical to SEQ ID NO: 18976
  GFR-binding peptide
  MOD_RES (1), (38), (40): Xaa is C or S
  MOD_RES (17), (18), (19), (20), (21): Xaa is A or G
  MOD_RES (22), (23), (24), (25): Xaa is A or G or is absent

SEQ ID NO: 72398 - protein, 37 aa, Artificial Sequence
  GFR-binding peptide
  MOD_RES (1), (2), (36): Xaa is C or S
  MOD_RES (16), (17), (18), (19), (20): Xaa is A or G
  MOD_RES (21), (22), (23), (24): Xaa is A or G or is absent
XXTPTKMSNITMQIMXXXXXXXXXIGEMSGMVVDRXG

SEQ ID NO: 72399 - protein, 32 aa, Artificial Sequence
  GFR-binding peptide
  MOD_RES (1), (1): Xaa is C or S
XTPTKMSNITMQIMNDKQQIIIGEMSGMVVDR

SEQ ID NO: 72400 - protein, 36 aa, Artificial Sequence
  GFR-binding peptide
  MOD_RES (2), (3): Xaa is C or S
  MOD_RES (17), (18), (19), (20), (21): Xaa is A or G
  MOD_RES (22), (23), (24), (25): Xaa is A or G or is absent
SXXVPARLSNITIQIMXXXXXXXXXIGEMSDMVVEA

SEQ ID NO: 72401 - protein, 39 aa, Artificial Sequence; identical to SEQ ID NO: 18978
  GFR-binding peptide
  MOD_RES (3), (3): Xaa is C or S
  MOD_RES (19), (20), (21), (22), (23): Xaa is A or G
  MOD_RES (24), (25), (26), (27): Xaa is A or G or is absent

SEQ ID NO: 72402 - protein, 34 aa, Artificial Sequence; identical to SEQ ID NO: 51813
  GFR-binding peptide
  MOD_RES (31), (33): Xaa is C or S

SEQ ID NO: 72403 - protein, 34 aa, Artificial Sequence
  GFR-binding peptide
  MOD_RES (1), (2): Xaa is C or S
  MOD_RES (16), (17), (18), (19), (20): Xaa is A or G
  MOD_RES (21), (22), (23), (24): Xaa is A or G or is absent
XXVSQDLSNITIQIMXXXXXXXXXLGEMSMIVKS

SEQ ID NO: 72404 - protein, 32 aa, Artificial Sequence
  GFR-binding peptide
  MOD_RES (31), (31): Xaa is C or S
VSQDLSNITIQIMIGKTPKILGEMSMIVKSXK

SEQ ID NO: 72405 - protein, 42 aa, Artificial Sequence; identical to SEQ ID NO: 18979
  GFR-binding peptide
  MOD_RES (2), (39), (41): Xaa is C or S
  MOD_RES (18), (19), (20), (21), (22): Xaa is A or G
  MOD_RES (23), (24), (25), (26): Xaa is A or G or is absent

SEQ ID NO: 72406 - protein, 35 aa, Artificial Sequence; identical to SEQ ID NO: 54218
  GFR-binding peptide
  MOD_RES (3), (4), (35): Xaa is C or S

SEQ ID NO: 72407 - protein, 37 aa, Artificial Sequence
  GFR-binding peptide
  MOD_RES (34), (36): Xaa is C or S
  MOD_RES (14), (15), (16), (17), (18): Xaa is A or G
  MOD_RES (19), (20), (21), (22): Xaa is A or G or is absent
TPTKMSNITMQIMXXXXXXXXXIGEMSGMVVDRXGXS

SEQ ID NO: 72408 - protein, 36 aa, Artificial Sequence; identical to SEQ ID NO: 54221
  GFR-binding peptide
  MOD_RES (5), (6): Xaa is C or S

SEQ ID NO: 72409 - protein, 36 aa, Artificial Sequence
  GFR-binding peptide
  MOD_RES (34), (36): Xaa is C or S
  MOD_RES (14), (15), (16), (17), (18): Xaa is A or G
  MOD_RES (19), (20), (21), (22): Xaa is A or G or is absent
APTKLSNITVQIMXXXXXXXXXLGEMSNMVVRSXGX

SEQ ID NO: 72410 - protein, 35 aa, Artificial Sequence
  GFR-binding peptide
  MOD_RES (2), (3), (34): Xaa is C or S
TXXAPVKTSNITMQIMDNGRVLLIGEMSMIVEEXG

SEQ ID NO: 72411 - protein, 33 aa, Artificial Sequence
  GFR-binding peptide
  MOD_RES (2), (3): Xaa is C or S
TXXAPVKTSNITMQIMDNGRVLLIGEMSMIVEE

SEQ ID NO: 72412 - protein, 38 aa, Artificial Sequence; identical to SEQ ID NO: 18980
  GFR-binding peptide
  MOD_RES (1), (38): Xaa is C or S

SEQ ID NO: 72413 - protein, 40 aa, Artificial Sequence; identical to SEQ ID NO: 18981
  GFR-binding peptide
  MOD_RES (5), (5): Xaa is C or S
  MOD_RES (21), (22), (23), (24), (25): Xaa is A or G
  MOD_RES (26), (27), (28), (29): Xaa is A or G or is absent

SEQ ID NO: 72414 - protein, 42 aa, Artificial Sequence; identical to SEQ ID NO: 18982
  GFR-binding peptide
  MOD_RES (5), (42): Xaa is C or S
  MOD_RES (21), (22), (23), (24), (25): Xaa is A or G
  MOD_RES (26), (27), (28), (29): Xaa is A or G or is absent

SEQ ID NO: 72415 - protein, 36 aa, Artificial Sequence; identical to SEQ ID NO: 54224
  GFR-binding peptide
  MOD_RES (1), (2), (34), (36): Xaa is C or S

SEQ ID NO: 72416 - protein, 35 aa, Artificial Sequence; identical to SEQ ID NO: 18985
  GFR-binding peptide
  MOD_RES (1), (35): Xaa is C or S
  MOD_RES (15), (16), (17), (18), (19): Xaa is A or G
  MOD_RES (20), (21), (22), (23): Xaa is A or G or is absent

SEQ ID NO: 72417 - protein, 38 aa, Artificial Sequence
  GFR-binding peptide
  MOD_RES (4), (5): Xaa is C or S
  MOD_RES (19), (20), (21), (22), (23): Xaa is A or G
  MOD_RES (24), (25), (26), (27): Xaa is A or G or is absent
AGPXXTPTKMSNITMQIMXXXXXXXXXIGEMSGMVVDR

SEQ ID NO: 72418 - protein, 37 aa, Artificial Sequence
  GFR-binding peptide
  MOD_RES (4), (5), (37): Xaa is C or S
AGPXXTPTKMSNITMQIMNDKQQIILGEMSGMVVDRX

SEQ ID NO: 72419 - protein, 34 aa, Artificial Sequence
  GFR-binding peptide
  MOD_RES (1), (33): Xaa is C or S
XVPTRLSNITIQIMDSANNVVIGEMSDMVVESXG

SEQ ID NO: 72420 - protein, 36 aa, Artificial Sequence; identical to SEQ ID NO: 18988
  GFR-binding peptide

SEQ ID NO: 72421 - protein, 31 aa, Artificial Sequence; identical to SEQ ID NO: 51833
  GFR-binding peptide
  MOD_RES (31), (31): Xaa is C or S

SEQ ID NO: 72422 - protein, 36 aa, Artificial Sequence; identical to SEQ ID NO: 51835
  GFR-binding peptide
  MOD_RES (1), (2), (35): Xaa is C or S
  MOD_RES (16), (17), (18), (19), (20): Xaa is A or G
  MOD_RES (21), (22), (23), (24): Xaa is A or G or is absent

SEQ ID NO: 72423 - protein, 41 aa, Artificial Sequence; identical to SEQ ID NO: 18989
  GFR-binding peptide
  MOD_RES (1), (38), (40): Xaa is C or S
  MOD_RES (17), (18), (19), (20), (21): Xaa is A or G
  MOD_RES (22), (23), (24), (25): Xaa is A or G or is absent

SEQ ID NO: 72424 - protein, 36 aa, Artificial Sequence; identical to SEQ ID NO: 18991
  GFR-binding peptide
  MOD_RES (36), (36): Xaa is C or S
  MOD_RES (15), (16), (17), (18), (19): Xaa is A or G
  MOD_RES (20), (21), (22), (23): Xaa is A or G or is absent

SEQ ID NO: 72425 - protein, 44 aa, Artificial Sequence; identical to SEQ ID NO: 18992
  GFR-binding peptide
  MOD_RES (5), (42), (44): Xaa is C or S

SEQ ID NO: 72426 - protein, 36 aa, Artificial Sequence
  GFR-binding peptide
  MOD_RES (34), (36): Xaa is C or S
  MOD_RES (14), (15), (16), (17), (18): Xaa is A or G
  MOD_RES (19), (20), (21), (22): Xaa is A or G or is absent
VPARLSNITIQIMXXXXXXXXXLGEMSDMVVEAXGX

SEQ ID NO: 72427 - protein, 37 aa, Artificial Sequence
  GFR-binding peptide
  MOD_RES (3), (4), (36): Xaa is C or S
PTXXVPTRLSNITIQIMDSANNVVIGEMSDMVVESXG

SEQ ID NO: 72428 - protein, 36 aa, Artificial Sequence; identical to SEQ ID NO: 54236
  GFR-binding peptide
  MOD_RES (1), (34), (36): Xaa is C or S
  MOD_RES (15), (16), (17), (18), (19): Xaa is A or G
  MOD_RES (20), (21), (22), (23): Xaa is A or G or is absent

SEQ ID NO: 72429 - protein, 42 aa, Artificial Sequence
  GFR-binding peptide
  MOD_RES (6), (7), (41): Xaa is C or S
  MOD_RES (21), (22), (23), (24), (25): Xaa is A or G
  MOD_RES (26), (27), (28), (29): Xaa is A or G or is absent
STPPTXXVPTRLSNITIQIMXXXXXXXXXLGEMSDMVVESXG

SEQ ID NO: 72430 - protein, 33 aa, Artificial Sequence
  GFR-binding peptide
  MOD_RES (1), (32): Xaa is C or S
XVPQALSNITIQIMVGRKPKVLGEMSMIVRSXK

SEQ ID NO: 72431 - protein, 35 aa, Artificial Sequence
  GFR-binding peptide
  MOD_RES (2), (3), (35): Xaa is C or S
PXXTPTKMSNITMQIMNDKQQIILGEMSGMVVDRX

SEQ ID NO: 72432 - protein, 36 aa, Artificial Sequence
  GFR-binding peptide
  MOD_RES (1), (34), (36): Xaa is C or S
  MOD_RES (15), (16), (17), (18), (19): Xaa is A or G
  MOD_RES (20), (21), (22), (23): Xaa is A or G or is absent
XVPQDLSNITIQIMXXXXXXXXXLGEMSMVVKSXKX

SEQ ID NO: 72433 - protein, 34 aa, Artificial Sequence
  GFR-binding peptide
  MOD_RES (2), (3), (34): Xaa is C or S
TXXAPVKTSNITMQIMDNGRVLLIGEMSMIVEEX

SEQ ID NO: 72434 - protein, 33 aa, Artificial Sequence
  GFR-binding peptide
  MOD_RES (1), (2): Xaa is C or S
XXTPTKMSNITMQIMNDKQQIILGEMSGMVVDR

SEQ ID NO: 72435 - protein, 38 aa, Artificial Sequence; identical to SEQ ID NO: 51852
  GFR-binding peptide
  MOD_RES (2), (3), (36), (38): Xaa is C or S
  MOD_RES (17), (18), (19), (20), (21): Xaa is A or G
  MOD_RES (22), (23), (24), (25): Xaa is A or G or is absent

SEQ ID NO: 72436 - protein, 39 aa, Artificial Sequence
  GFR-binding peptide
  MOD_RES (3), (4), (36), (38): Xaa is C or S
PTXXVPTRLSNITIQIMDSANNVVIGEMSDMVVESXGXR

SEQ ID NO: 72437 - protein, 37 aa, Artificial Sequence; identical to SEQ ID NO: 54245
  GFR-binding peptide
  MOD_RES (2), (3), (34), (36): Xaa is C or S

SEQ ID NO: 72438 - protein, 40 aa, Artificial Sequence
  GFR-binding peptide
  MOD_RES (2), (3), (37), (39): Xaa is C or S
  MOD_RES (17), (18), (19), (20), (21): Xaa is A or G
  MOD_RES (22), (23), (24), (25): Xaa is A or G or is absent
TXXVPTRLSNITIQIMXXXXXXXXXLGEMSDMVVESXGXR

SEQ ID NO: 72439 - protein, 36 aa, Artificial Sequence
  GFR-binding peptide
  MOD_RES (4), (5): Xaa is C or S
AGPXXTPTKMSNITMQIMNDKQQIILGEMSGMVVDR

SEQ ID NO: 72440 - protein, 37 aa, Artificial Sequence
  GFR-binding peptide
  MOD_RES (1), (2), (34), (36): Xaa is C or S
XXTPTKMSNITMQIMNDKQQIIIGEMSGMVVDRXGXS

SEQ ID NO: 72441 - protein, 38 aa, Artificial Sequence
  GFR-binding peptide
  MOD_RES (5), (6), (37): Xaa is C or S
SASPXXVPQDLSNITIQIMVGRTPKVLGEMSMVVKSXK

SEQ ID NO: 72442 - protein, 32 aa, Artificial Sequence; identical to SEQ ID NO: 51860
  GFR-binding peptide
  MOD_RES (1), (1): Xaa is C or S

SEQ ID NO: 72443 - protein, 34 aa, Artificial Sequence; identical to SEQ ID NO: 18996
  GFR-binding peptide

SEQ ID NO: 72444 - protein, 33 aa, Artificial Sequence
  GFR-binding peptide
  MOD_RES (14), (15), (16), (17), (18): Xaa is A or G
  MOD_RES (19), (20), (21), (22): Xaa is A or G or is absent
TPTKMSNITMQIMXXXXXXXXXLGEMSGMVVDR

SEQ ID NO: 72445 - protein, 39 aa, Artificial Sequence; identical to SEQ ID NO: 19000
  GFR-binding peptide
  MOD_RES (7), (7): Xaa is C or S
  MOD_RES (21), (22), (23), (24), (25): Xaa is A or G
  MOD_RES (26), (27), (28), (29): Xaa is A or G or is absent

SEQ ID NO: 72446 - protein, 38 aa, Artificial Sequence; identical to SEQ ID NO: 19001
  GFR-binding peptide
  MOD_RES (4), (38): Xaa is C or S
  MOD_RES (18), (19), (20), (21), (22): Xaa is A or G
  MOD_RES (23), (24), (25), (26): Xaa is A or G or is absent

SEQ ID NO: 72447 - protein, 40 aa, Artificial Sequence
  GFR-binding peptide
  MOD_RES (6), (7), (40): Xaa is C or S
  MOD_RES (21), (22), (23), (24), (25): Xaa is A or G
  MOD_RES (26), (27), (28), (29): Xaa is A or G or is absent
ASAAPXXVPQALSNITIQIMXXXXXXXXXLGEMSMIVRSX

SEQ ID NO: 72448 - protein, 40 aa, Artificial Sequence
  GFR-binding peptide
  MOD_RES (4), (5), (38), (40): Xaa is C or S
  MOD_RES (19), (20), (21), (22), (23): Xaa is A or G
  MOD_RES (24), (25), (26), (27): Xaa is A or G or is absent
AAPXXVPQALSNITIQIMXXXXXXXXXLGEMSMIVRSXKX

SEQ ID NO: 72449 - protein, 35 aa, Artificial Sequence; identical to SEQ ID NO: 19003
  GFR-binding peptide
  MOD_RES (3), (3): Xaa is C or S
  MOD_RES (17), (18), (19), (20), (21): Xaa is A or G
  MOD_RES (22), (23), (24), (25): Xaa is A or G or is absent

SEQ ID NO: 72450 - protein, 35 aa, Artificial Sequence; identical to SEQ ID NO: 51869
  GFR-binding peptide
  MOD_RES (4), (5): Xaa is C or S

SEQ ID NO: 72451 - protein, 40 aa, Artificial Sequence; identical to SEQ ID NO: 51870
  GFR-binding peptide
  MOD_RES (4), (5), (38), (40): Xaa is C or S
  MOD_RES (19), (20), (21), (22), (23): Xaa is A or G
  MOD_RES (24), (25), (26), (27): Xaa is A or G or is absent

SEQ ID NO: 72452 - protein, 35 aa, Artificial Sequence; identical to SEQ ID NO: 51871
  GFR-binding peptide
  MOD_RES (1), (2), (33), (35): Xaa is C or S

SEQ ID NO: 72453 - protein, 40 aa, Artificial Sequence; identical to SEQ ID NO: 19005
  GFR-binding peptide
  MOD_RES (3), (40): Xaa is C or S

SEQ ID NO: 72454 - protein, 41 aa, Artificial Sequence
  GFR-binding peptide
  MOD_RES (5), (6), (38), (40): Xaa is C or S
VPKPXXAPTKLSNITVQIMDDSSNVILGEMSNMVVRSXGXH

SEQ ID NO: 72455 - protein, 33 aa, Artificial Sequence
  GFR-binding peptide
  MOD_RES (1), (33): Xaa is C or S
XVPTRLSNITIQIMDSANNVVIGEMSDMVVESX

SEQ ID NO: 72456 - protein, 39 aa, Artificial Sequence
  GFR-binding peptide
  MOD_RES (4), (5), (36), (38): Xaa is C or S
PSTXXAPVKTSNITMQIMDNGRVLLLGEMSMIVEEXGXL

SEQ ID NO: 72457 - protein, 40 aa, Artificial Sequence; identical to SEQ ID NO: 51879
  GFR-binding peptide
  MOD_RES (5), (6), (37), (39): Xaa is C or S

SEQ ID NO: 72458 - protein, 35 aa, Artificial Sequence
  GFR-binding peptide
  MOD_RES (2), (3), (35): Xaa is C or S
PXXAPTKLSNITVQIMDDSSNVILGEMSNMVVRSX

SEQ ID NO: 72459 - protein, 39 aa, Artificial Sequence
  GFR-binding peptide
  MOD_RES (3), (4), (37), (39): Xaa is C or S
  MOD_RES (18), (19), (20), (21), (22): Xaa is A or G
  MOD_RES (23), (24), (25), (26): Xaa is A or G or is absent
STXXAPVKTSNITMQIMXXXXXXXXXLGEMSMIVEEXGX

SEQ ID NO: 72460 - protein, 39 aa, Artificial Sequence
  GFR-binding peptide
  MOD_RES (4), (5), (39): Xaa is C or S
  MOD_RES (19), (20), (21), (22), (23): Xaa is A or G
  MOD_RES (24), (25), (26), (27): Xaa is A or G or is absent
PASXXVPARLSNITIQIMXXXXXXXXXIGEMSDMVVEAX

SEQ ID NO: 72461 - protein, 38 aa, Artificial Sequence; identical to SEQ ID NO: 19009
  GFR-binding peptide
  MOD_RES (3), (3): Xaa is C or S
  MOD_RES (19), (20), (21), (22), (23): Xaa is A or G
  MOD_RES (24), (25), (26), (27): Xaa is A or G or is absent

SEQ ID NO: 72462 - protein, 37 aa, Artificial Sequence
  GFR-binding peptide
  MOD_RES (1), (2), (34), (36): Xaa is C or S
XXVPTRLSNITIQIMDSANNVVLGEMSDMVVESXGXR

SEQ ID NO: 72463 - protein, 37 aa, Artificial Sequence
  GFR-binding peptide
  MOD_RES (1), (2), (35), (37): Xaa is C or S
  MOD_RES (16), (17), (18), (19), (20): Xaa is A or G
  MOD_RES (21), (22), (23), (24): Xaa is A or G or is absent
XXVPQDLSNITIQIMXXXXXXXXXLGEMSMVVKSXKX

SEQ ID NO: 72464 - protein, 39 aa, Artificial Sequence
  GFR-binding peptide
  MOD_RES (4), (5), (39): Xaa is C or S
  MOD_RES (19), (20), (21), (22), (23): Xaa is A or G
  MOD_RES (24), (25), (26), (27): Xaa is A or G or is absent
PPTXXVPTRLSNITIQIMXXXXXXXXXLGEMSDMVVESX

SEQ ID NO: 72465 - protein, 37 aa, Artificial Sequence
  GFR-binding peptide
  MOD_RES (34), (36): Xaa is C or S
  MOD_RES (14), (15), (16), (17), (18): Xaa is A or G
  MOD_RES (19), (20), (21), (22): Xaa is A or G or is absent
VPARLSNITIQIMXXXXXXXXXLGEMSDMVVEAXGXR

SEQ ID NO: 72466 - protein, 40 aa, Artificial Sequence
  GFR-binding peptide
  MOD_RES (3), (4), (38), (40): Xaa is C or S
  MOD_RES (18), (19), (20), (21), (22): Xaa is A or G
  MOD_RES (23), (24), (25), (26): Xaa is A or G or is absent
PTXXVPTRLSNITIQIMXXXXXXXXXLGEMSDMVVESXGX

SEQ ID NO: 72467 - protein, 37 aa, Artificial Sequence; identical to SEQ ID NO: 54294
  GFR-binding peptide
  MOD_RES (1), (34), (36): Xaa is C or S
  MOD_RES (15), (16), (17), (18), (19): Xaa is A or G
  MOD_RES (20), (21), (22), (23): Xaa is A or G or is absent

SEQ ID NO: 72468 - protein, 35 aa, Artificial Sequence; identical to SEQ ID NO: 51889
  GFR-binding peptide
  MOD_RES (1), (2), (33), (35): Xaa is C or S

SEQ ID NO: 72469 - protein, 40 aa, Artificial Sequence
  GFR-binding peptide
  MOD_RES (2), (3), (37), (39): Xaa is C or S
  MOD_RES (17), (18), (19), (20), (21): Xaa is A or G
  MOD_RES (22), (23), (24), (25): Xaa is A or G or is absent
PXXTPTKMSNITMQIMXXXXXXXXXLGEMSGMVVDRXGXS

SEQ ID NO: 72470 - protein, 36 aa, Artificial Sequence; identical to SEQ ID NO: 19012
  GFR-binding peptide
  MOD_RES (34), (36): Xaa is C or S
  MOD_RES (14), (15), (16), (17), (18): Xaa is A or G
  MOD_RES (19), (20), (21), (22): Xaa is A or G or is absent

SEQ ID NO: 72471 - protein, 36 aa, Artificial Sequence
  GFR-binding peptide
  MOD_RES (5), (6): Xaa is C or S
VPKPXXAPTKLSNITVQIMDDSSNVILGEMSNMVVR

SEQ ID NO: 72472 - protein, 36 aa, Artificial Sequence; identical to SEQ ID NO: 19013
  GFR-binding peptide
  MOD_RES (3), (3): Xaa is C or S
  MOD_RES (17), (18), (19), (20), (21): Xaa is A or G
  MOD_RES (22), (23), (24), (25): Xaa is A or G or is absent

SEQ ID NO: 72473 - protein, 35 aa, Artificial Sequence; identical to SEQ ID NO: 51893
  GFR-binding peptide
  MOD_RES (3), (4), (35): Xaa is C or S

SEQ ID NO: 72474 - protein, 39 aa, Artificial Sequence
  GFR-binding peptide
  MOD_RES (3), (4), (38): Xaa is C or S
  MOD_RES (18), (19), (20), (21), (22): Xaa is A or G
  MOD_RES (23), (24), (25), (26): Xaa is A or G or is absent
KPXXAPTKLSNITVQIMXXXXXXXXXLGEMSNMVVRSXG

SEQ ID NO: 72475 - protein, 38 aa, Artificial Sequence
  GFR-binding peptide
  MOD_RES (6), (7): Xaa is C or S
AAPASXXVPARLSNITIQIMDAANNVVIGEMSDMVVEA

SEQ ID NO: 72476 - protein, 41 aa, Artificial Sequence; identical to SEQ ID NO: 54302
  GFR-binding peptide
  MOD_RES (6), (7), (40): Xaa is C or S
  MOD_RES (21), (22), (23), (24), (25): Xaa is A or G
  MOD_RES (26), (27), (28), (29): Xaa is A or G or is absent

SEQ ID NO: 72477 - protein, 36 aa, Artificial Sequence
  GFR-binding peptide
  MOD_RES (5), (6): Xaa is C or S
APASXXVPARLSNITIQIMDAANNVVIGEMSDMVVE

SEQ ID NO: 72478 - protein, 33 aa, Artificial Sequence
  GFR-binding peptide
  MOD_RES (1), (2): Xaa is C or S
XXAPTKLSNITVQIMDDSSNVILGEMSNMVVRS

SEQ ID NO: 72479 - protein, 40 aa, Artificial Sequence
  GFR-binding peptide
  MOD_RES (6), (7), (38), (40): Xaa is C or S
ASAAPXXVPQALSNITIQIMVGRKPKVLGEMSMIVRSXKX

SEQ ID NO: 72480 - protein, 35 aa, Artificial Sequence
  GFR-binding peptide
  MOD_RES (32), (34): Xaa is C or S
VPTRLSNITIQIMDSANNVVLGEMSDMVVESXGXR

SEQ ID NO: 72481 - protein, 41 aa, Artificial Sequence; identical to SEQ ID NO: 19016
  GFR-binding peptide
  MOD_RES (5), (5): Xaa is C or S

SEQ ID NO: 72482 - protein, 37 aa, Artificial Sequence; identical to SEQ ID NO: 19017
  GFR-binding peptide
  MOD_RES (2), (36): Xaa is C or S

SEQ ID NO: 72483 - protein, 33 aa, Artificial Sequence
  GFR-binding peptide
  MOD_RES (2), (3): Xaa is C or S
PXXTPTKMSNITMQIMNDKQQIILGEMSGMVVD

SEQ ID NO: 72484 - protein, 39 aa, Artificial Sequence; identical to SEQ ID NO: 19020
  GFR-binding peptide
  MOD_RES (37), (39): Xaa is C or S

SEQ ID NO: 72485 - protein, 37 aa, Artificial Sequence
  GFR-binding peptide
  MOD_RES (3), (4): Xaa is C or S
  MOD_RES (18), (19), (20), (21), (22): Xaa is A or G
  MOD_RES (23), (24), (25), (26): Xaa is A or G or is absent
ASXXVPARLSNITIQIMXXXXXXXXXIGEMSDMVVEA

SEQ ID NO: 72486 - protein, 43 aa, Artificial Sequence; identical to SEQ ID NO: 54320
  GFR-binding peptide
  MOD_RES (6), (7), (40), (42): Xaa is C or S
  MOD_RES (21), (22), (23), (24), (25): Xaa is A or G
  MOD_RES (26), (27), (28), (29): Xaa is A or G or is absent

SEQ ID NO: 72487 - protein, 36 aa, Artificial Sequence
  GFR-binding peptide
  MOD_RES (3), (4): Xaa is C or S
  MOD_RES (18), (19), (20), (21), (22): Xaa is A or G
  MOD_RES (23), (24), (25), (26): Xaa is A or G or is absent
ASXXVPARLSNITIQIMXXXXXXXXXIGEMSDMVVE

SEQ ID NO: 72488 - protein, 40 aa, Artificial Sequence; identical to SEQ ID NO: 19023
  GFR-binding peptide
  MOD_RES (3), (37), (39): Xaa is C or S
  MOD_RES (17), (18), (19), (20), (21): Xaa is A or G
  MOD_RES (22), (23), (24), (25): Xaa is A or G or is absent

SEQ ID NO: 72489 - protein, 43 aa, Artificial Sequence; identical to SEQ ID NO: 19025
  GFR-binding peptide
  MOD_RES (4), (41), (43): Xaa is C or S
  MOD_RES (20), (21), (22), (23), (24): Xaa is A or G
  MOD_RES (25), (26), (27), (28): Xaa is A or G or is absent

SEQ ID NO: 72490 - protein, 39 aa, Artificial Sequence
  GFR-binding peptide
  MOD_RES (4), (5), (37), (39): Xaa is C or S
PASXXVPARLSNITIQIMDAANNVVLGEMSDMVVEAXGX

SEQ ID NO: 72491 - protein, 41 aa, Artificial Sequence; identical to SEQ ID NO: 51908
  GFR-binding peptide
  MOD_RES (5), (6), (40): Xaa is C or S
  MOD_RES (20), (21), (22), (23), (24): Xaa is A or G
  MOD_RES (25), (26), (27), (28): Xaa is A or G or is absent

SEQ ID NO: 72492 - protein, 34 aa, Artificial Sequence
  GFR-binding peptide
  MOD_RES (3), (4): Xaa is C or S
GPXXTPTKMSNITMQIMNDKQQIIIGEMSGMVVD

SEQ ID NO: 72493 - protein, 43 aa, Artificial Sequence; identical to SEQ ID NO: 19031
  GFR-binding peptide
  MOD_RES (3), (40), (42): Xaa is C or S

SEQ ID NO: 72494 - protein, 37 aa, Artificial Sequence; identical to SEQ ID NO: 19032
  GFR-binding peptide
  MOD_RES (36), (36): Xaa is C or S

SEQ ID NO: 72495 - protein, 36 aa, Artificial Sequence
  GFR-binding peptide
  MOD_RES (2), (3): Xaa is C or S
  MOD_RES (17), (18), (19), (20), (21): Xaa is A or G
  MOD_RES (22), (23), (24), (25): Xaa is A or G or is absent
PXXAPTKLSNITVQIMXXXXXXXXXLGEMSNMVVRS

SEQ ID NO: 72496 - protein, 38 aa, Artificial Sequence; identical to SEQ ID NO: 54339
  GFR-binding peptide
  MOD_RES (6), (7), (38): Xaa is C or S

SEQ ID NO: 72497 - protein, 40 aa, Artificial Sequence; identical to SEQ ID NO: 19033
  GFR-binding peptide
  MOD_RES (3), (40): Xaa is C or S

SEQ ID NO: 72498 - protein, 40 aa, Artificial Sequence
  GFR-binding peptide
  MOD_RES (4), (5), (38), (40): Xaa is C or S
  MOD_RES (19), (20), (21), (22), (23): Xaa is A or G
  MOD_RES (24), (25), (26), (27): Xaa is A or G or is absent
ASPXXVSQDLSNITIQIMXXXXXXXXXLGEMSMIVKSXKX

SEQ ID NO: 72499 - protein, 38 aa, Artificial Sequence; identical to SEQ ID NO: 19034
  GFR-binding peptide
  MOD_RES (1), (35), (37): Xaa is C or S
  MOD_RES (15), (16), (17), (18), (19): Xaa is A or G
  MOD_RES (20), (21), (22), (23): Xaa is A or G or is absent

SEQ ID NO: 72500 - protein, 38 aa, Artificial Sequence; identical to SEQ ID NO: 19035
  GFR-binding peptide
  MOD_RES (6), (6): Xaa is C or S
  MOD_RES (20), (21), (22), (23), (24): Xaa is A or G
  MOD_RES (25), (26), (27), (28): Xaa is A or G or is absent

SEQ ID NO: 72501 - protein, 40 aa, Artificial Sequence
  GFR-binding peptide
  MOD_RES (6), (7), (40): Xaa is C or S
  MOD_RES (21), (22), (23), (24), (25): Xaa is A or G
  MOD_RES (26), (27), (28), (29): Xaa is A or G or is absent
RVPSTXXAPVKTSNITMQIMXXXXXXXXXLGEMSMIVEEX

SEQ ID NO: 72502 - protein, 35 aa, Artificial Sequence; identical to SEQ ID NO: 19038
  GFR-binding peptide
  MOD_RES (35), (35): Xaa is C or S
  MOD_RES (14), (15), (16), (17), (18): Xaa is A or G
  MOD_RES (19), (20), (21), (22): Xaa is A or G or is absent

SEQ ID NO: 72503 - protein, 39 aa, Artificial Sequence; identical to SEQ ID NO: 19039
  GFR-binding peptide
  MOD_RES (5), (5): Xaa is C or S

SEQ ID NO: 72504 - protein, 41 aa, Artificial Sequence; identical to SEQ ID NO: 19040
  GFR-binding peptide
  MOD_RES (6), (40): Xaa is C or S

SEQ ID NO: 72505 - protein, 39 aa, Artificial Sequence
  GFR-binding peptide
  MOD_RES (5), (6): Xaa is C or S
  MOD_RES (20), (21), (22), (23), (24): Xaa is A or G
  MOD_RES (25), (26), (27), (28): Xaa is A or G or is absent
SAGPXXTPTKMSNITMQIMXXXXXXXXXLGEMSGMVVDR

SEQ ID NO: 72506 - protein, 32 aa, Artificial Sequence
  GFR-binding peptide
  MOD_RES (1), (2): Xaa is C or S
XXTPTKMSNITMQIMNDKQQIIIGEMSGMVVD

SEQ ID NO: 72507 - protein, 34 aa, Artificial Sequence
  GFR-binding peptide
  MOD_RES (1), (2), (33): Xaa is C or S
XXVPQALSNITIQIMVGRKPKVLGEMSMIVRSXK

SEQ ID NO: 72508 - protein, 38 aa, Artificial Sequence; identical to SEQ ID NO: 19041
  GFR-binding peptide
  MOD_RES (6), (6): Xaa is C or S

SEQ ID NO: 72509 - protein, 36 aa, Artificial Sequence
  GFR-binding peptide
  MOD_RES (1), (2), (34), (36): Xaa is C or S
XXTPTKMSNITMQIMNDKQQIIIGEMSGMVVDRXGX

SEQ ID NO: 72510 - protein, 40 aa, Artificial Sequence; identical to SEQ ID NO: 19043
  GFR-binding peptide
  MOD_RES (1), (38), (40): Xaa is C or S
  MOD_RES (17), (18), (19), (20), (21): Xaa is A or G
  MOD_RES (22), (23), (24), (25): Xaa is A or G or is absent

SEQ ID NO: 72511 - protein, 31 aa, Artificial Sequence
  GFR-binding peptide
  MOD_RES (1), (1): Xaa is C or S
XTPTKMSNITMQIMNDKQQIIIGEMSGMVVD

SEQ ID NO: 72512 - protein, 35 aa, Artificial Sequence; identical to SEQ ID NO: 19044
  GFR-binding peptide
  MOD_RES (3), (3): Xaa is C or S

SEQ ID NO: 72513 - protein, 35 aa, Artificial Sequence; identical to SEQ ID NO: 51941
  GFR-binding peptide
  MOD_RES (2), (3): Xaa is C or S
  MOD_RES (17), (18), (19), (20), (21): Xaa is A or G
  MOD_RES (22), (23), (24), (25): Xaa is A or G or is absent

SEQ ID NO: 72514 - protein, 35 aa, Artificial Sequence
  GFR-binding peptide
  MOD_RES (1), (32), (34): Xaa is C or S
XVPQDLSNITIQIMVGRTPKVLGEMSMVVKSXKXS

SEQ ID NO: 72515 - protein, 36 aa, Artificial Sequence
  GFR-binding peptide
  MOD_RES (1), (2), (36): Xaa is C or S
  MOD_RES (16), (17), (18), (19), (20): Xaa is A or G
  MOD_RES (21), (22), (23), (24): Xaa is A or G or is absent
XXTPTKMSNITMQIMXXXXXXXXXIGEMSGMVVDRX

SEQ ID NO: 72516 - protein, 41 aa, Artificial Sequence; identical to SEQ ID NO: 54359
  GFR-binding peptide
  MOD_RES (6), (7), (40): Xaa is C or S
  MOD_RES (21), (22), (23), (24), (25): Xaa is A or G
  MOD_RES (26), (27), (28), (29): Xaa is A or G or is absent

SEQ ID NO: 72517 - protein, 41 aa, Artificial Sequence
  GFR-binding peptide
  MOD_RES (6), (7), (39), (41): Xaa is C or S
HVPKPXXAPTKLSNITVQIMDDSSNVIIGEMSNMVVRSXGX

SEQ ID NO: 72518 - protein, 37 aa, Artificial Sequence; identical to SEQ ID NO: 19047
  GFR-binding peptide
  MOD_RES (1), (1): Xaa is C or S

SEQ ID NO: 72519 - protein, 36 aa, Artificial Sequence
  GFR-binding peptide
  MOD_RES (33), (35): Xaa is C or S
  MOD_RES (14), (15), (16), (17), (18): Xaa is A or G
  MOD_RES (19), (20), (21), (22): Xaa is A or G or is absent
VPQDLSNITIQIMXXXXXXXXXLGEMSMVVKSXKXS

SEQ ID NO: 72520 - protein, 42 aa, Artificial Sequence; identical to SEQ ID NO: 19048
  GFR-binding peptide
  MOD_RES (6), (40), (42): Xaa is C or S

SEQ ID NO: 72521 - protein, 38 aa, Artificial Sequence; identical to SEQ ID NO: 19049
  GFR-binding peptide
  MOD_RES (4), (4): Xaa is C or S

SEQ ID NO: 72522 - protein, 39 aa, Artificial Sequence; identical to SEQ ID NO: 51946
  GFR-binding peptide
  MOD_RES (2), (3), (36), (38): Xaa is C or S
  MOD_RES (17), (18), (19), (20), (21): Xaa is A or G
  MOD_RES (22), (23), (24), (25): Xaa is A or G or is absent

SEQ ID NO: 72523 - protein, 40 aa, Artificial Sequence; identical to SEQ ID NO: 51947
  GFR-binding peptide
  MOD_RES (4), (5), (37), (39): Xaa is C or S

SEQ ID NO: 72524 - protein, 36 aa, Artificial Sequence
  GFR-binding peptide
  MOD_RES (1), (33), (35): Xaa is C or S
XTPTKMSNITMQIMNDKQQIILGEMSGMVVDRXGXS

SEQ ID NO: 72525 - protein, 39 aa, Artificial Sequence; identical to SEQ ID NO: 19051
  GFR-binding peptide
  MOD_RES (7), (7): Xaa is C or S
  MOD_RES (21), (22), (23), (24), (25): Xaa is A or G
  MOD_RES (26), (27), (28), (29): Xaa is A or G or is absent

SEQ ID NO: 72526 - protein, 41 aa, Artificial Sequence; identical to SEQ ID NO: 19052
  GFR-binding peptide
  MOD_RES (3), (40): Xaa is C or S

SEQ ID NO: 72527 - protein, 36 aa, Artificial Sequence
  GFR-binding peptide
  MOD_RES (1), (2), (34), (36): Xaa is C or S
XXTPTKMSNITMQIMNDKQQIILGEMSGMVVDRXGX

SEQ ID NO: 72528 - protein, 40 aa, Artificial Sequence; identical to SEQ ID NO: 19053
  GFR-binding peptide
  MOD_RES (37), (39): Xaa is C or S

SEQ ID NO: 72529 - protein, 36 aa, Artificial Sequence
  GFR-binding peptide
  MOD_RES (3), (4), (35): Xaa is C or S
APXXVPQALSNITIQIMVGRKPKVLGEMSMIVRSXK

SEQ ID NO: 72530 - protein, 38 aa, Artificial Sequence
  GFR-binding peptide
  MOD_RES (5), (6): Xaa is C or S
  MOD_RES (20), (21), (22), (23), (24): Xaa is A or G
  MOD_RES (25), (26), (27), (28): Xaa is A or G or is absent
APASXXVPARLSNITIQIMXXXXXXXXXLGEMSDMVVE

SEQ ID NO: 72531 - protein, 37 aa, Artificial Sequence; identical to SEQ ID NO: 19054
  GFR-binding peptide
  MOD_RES (37), (37): Xaa is C or S

SEQ ID NO: 72532 - protein, 36 aa, Artificial Sequence
  GFR-binding peptide
  MOD_RES (34), (36): Xaa is C or S
  MOD_RES (14), (15), (16), (17), (18): Xaa is A or G
  MOD_RES (19), (20), (21), (22): Xaa is A or G or is absent
TPTKMSNITMQIMXXXXXXXXXIGEMSGMVVDRXGX

SEQ ID NO: 72533 - protein, 35 aa, Artificial Sequence
  GFR-binding peptide
  MOD_RES (1), (33), (35): Xaa is C or S
XVPTRLSNITIQIMDSANNVVLGEMSDMVVESXGX

SEQ ID NO: 72534 - protein, 36 aa, Artificial Sequence; identical to SEQ ID NO: 19057
  GFR-binding peptide
  MOD_RES (1), (1): Xaa is C or S
  MOD_RES (17), (18), (19), (20), (21): Xaa is A or G
  MOD_RES (22), (23), (24), (25): Xaa is A or G or is absent

SEQ ID NO: 72535 - protein, 35 aa, Artificial Sequence
  GFR-binding peptide
  MOD_RES (1), (2), (35): Xaa is C or S
  MOD_RES (16), (17), (18), (19), (20): Xaa is A or G
  MOD_RES (21), (22), (23), (24): Xaa is A or G or is absent
XXVSQDLSNITIQIMXXXXXXXXXLGEMSMIVKSX

SEQ ID NO: 72536 - protein, 32 aa, Artificial Sequence; identical to SEQ ID NO: 19059
  GFR-binding peptide
  MOD_RES (14), (15), (16), (17), (18): Xaa is A or G
  MOD_RES (19), (20), (21), (22): Xaa is A or G or is absent

SEQ ID NO: 72537 - protein, 36 aa, Artificial Sequence
  GFR-binding peptide
  MOD_RES (2), (3), (34), (36): Xaa is C or S
PXXVSQDLSNITIQIMIGKTPKILGEMSMIVKSXKX

SEQ ID NO: 72538 - protein, 33 aa, Artificial Sequence; identical to SEQ ID NO: 54376
  GFR-binding peptide
  MOD_RES (2), (3): Xaa is C or S

SEQ ID NO: 72539 - protein, 41 aa, Artificial Sequence; identical to SEQ ID NO: 19060
  GFR-binding peptide
  MOD_RES (4), (38), (40): Xaa is C or S

SEQ ID NO: 72540 - protein, 38 aa, Artificial Sequence
  GFR-binding peptide
  MOD_RES (4), (5), (37): Xaa is C or S
PASXXVPARLSNITIQIMDAANNVVLGEMSDMVVEAXG

SEQ ID NO: 72541 - protein, 33 aa, Artificial Sequence
  GFR-binding peptide
  MOD_RES (31), (33): Xaa is C or S
APVKTSNITMQIMDNGRVLLLGEMSMIVEEXGX

SEQ ID NO: 72542 - protein, 42 aa, Artificial Sequence; identical to SEQ ID NO: 19061
  GFR-binding peptide
  MOD_RES (3), (40), (42): Xaa is C or S

SEQ ID NO: 72543 - protein, 36 aa, Artificial Sequence
  GFR-binding peptide
  MOD_RES (5), (6): Xaa is C or S
SASPXXVPQDLSNITIQIMVGRTPKVLGEMSMVVKS

SEQ ID NO: 72544 - protein, 38 aa, Artificial Sequence; identical to SEQ ID NO: 54382
  GFR-binding peptide
  MOD_RES (1), (2), (35), (37): Xaa is C or S
  MOD_RES (16), (17), (18), (19), (20): Xaa is A or G
  MOD_RES (21), (22), (23), (24): Xaa is A or G or is absent

SEQ ID NO: 72545 - protein, 32 aa, Artificial Sequence
  GFR-binding peptide
  MOD_RES (14), (15), (16), (17), (18): Xaa is A or G
  MOD_RES (19), (20), (21), (22): Xaa is A or G or is absent
TPTKMSNITMQIMXXXXXXXXXIGEMSGMVVD

SEQ ID NO: 72546 - protein, 40 aa, Artificial Sequence
  GFR-binding peptide
  MOD_RES (5), (6), (40): Xaa is C or S
  MOD_RES (20), (21), (22), (23), (24): Xaa is A or G
  MOD_RES (25), (26), (27), (28): Xaa is A or G or is absent
APASXXVPARLSNITIQIMXXXXXXXXXLGEMSDMVVEAX

SEQ ID NO: 72547 - protein, 39 aa, Artificial Sequence; identical to SEQ ID NO: 19062
  GFR-binding peptide
  MOD_RES (5), (5): Xaa is C or S
  MOD_RES (21), (22), (23), (24), (25): Xaa is A or G
  MOD_RES (26), (27), (28), (29): Xaa is A or G or is absent

SEQ ID NO: 72548 - protein, 34 aa, Artificial Sequence
  GFR-binding peptide
  MOD_RES (1), (2): Xaa is C or S
  MOD_RES (16), (17), (18), (19), (20): Xaa is A or G
  MOD_RES (21), (22), (23), (24): Xaa is A or G or is absent
XXAPVKTSNITMQIMXXXXXXXXXIGEMSMIVEE

SEQ ID NO: 72549 - protein, 40 aa, Artificial Sequence
  GFR-binding peptide
  MOD_RES (5), (6), (40): Xaa is C or S
  MOD_RES (20), (21), (22), (23), (24): Xaa is A or G
  MOD_RES (25), (26), (27), (28): Xaa is A or G or is absent
APASXXVPARLSNITIQIMXXXXXXXXXIGEMSDMVVEAX

SEQ ID NO: 72550 - protein, 39 aa, Artificial Sequence
  GFR-binding peptide
  MOD_RES (6), (7): Xaa is C or S
  MOD_RES (21), (22), (23), (24), (25): Xaa is A or G
  MOD_RES (26), (27), (28), (29): Xaa is A or G or is absent
GSAGPXXTPTKMSNITMQIMXXXXXXXXXIGEMSGMVVD

SEQ ID NO: 72551 - protein, 39 aa, Artificial Sequence; identical to SEQ ID NO: 19065
  GFR-binding peptide
  MOD_RES (4), (4): Xaa is C or S

SEQ ID NO: 72552 - protein, 35 aa, Artificial Sequence; identical to SEQ ID NO: 51967
  GFR-binding peptide
  MOD_RES (1), (32), (34): Xaa is C or S

SEQ ID NO: 72553 - protein, 42 aa, Artificial Sequence; identical to SEQ ID NO: 19068
  GFR-binding peptide
  MOD_RES (2), (39), (41): Xaa is C or S

SEQ ID NO: 72554 - protein, 44 aa, Artificial Sequence; identical to SEQ ID NO: 19069
  GFR-binding peptide
  MOD_RES (7), (41), (43): Xaa is C or S
  MOD_RES (21), (22), (23), (24), (25): Xaa is A or G
  MOD_RES (26), (27), (28), (29): Xaa is A or G or is absent

SEQ ID NO: 72555 - protein, 42 aa, Artificial Sequence
  GFR-binding peptide
  MOD_RES (6), (7), (41): Xaa is C or S
  MOD_RES (21), (22), (23), (24), (25): Xaa is A or G
  MOD_RES (26), (27), (28), (29): Xaa is A or G or is absent
HVPKPXXAPTKLSNITVQIMXXXXXXXXXLGEMSNMVVRSXG

SEQ ID NO: 72556 - protein, 35 aa, Artificial Sequence
  GFR-binding peptide
  MOD_RES (4), (5): Xaa is C or S
PKPXXAPTKLSNITVQIMDDSSNVILGEMSNMVVR

SEQ ID NO: 72557 - protein, 40 aa, Artificial Sequence
  GFR-binding peptide
  MOD_RES (6), (7), (39): Xaa is C or S
STPPTXXVPTRLSNITIQIMDSANNVVLGEMSDMVVESXG

SEQ ID NO: 72558 - protein, 36 aa, Artificial Sequence; identical to SEQ ID NO: 54398
  GFR-binding peptide
  MOD_RES (3), (4), (35): Xaa is C or S

SEQ ID NO: 72559 - protein, 41 aa, Artificial Sequence; identical to SEQ ID NO: 51976
  GFR-binding peptide
  MOD_RES (4), (5), (38), (40): Xaa is C or S
  MOD_RES (19), (20), (21), (22), (23): Xaa is A or G
  MOD_RES (24), (25), (26), (27): Xaa is A or G or is absent

SEQ ID NO: 72560 - protein, 42 aa, Artificial Sequence; identical to SEQ ID NO: 19070
  GFR-binding peptide
  MOD_RES (4), (41): Xaa is C or S
  MOD_RES (20), (21), (22), (23), (24): Xaa is A or G
  MOD_RES (25), (26), (27), (28): Xaa is A or G or is absent

SEQ ID NO: 72561 - protein, 37 aa, Artificial Sequence; identical to SEQ ID NO: 19072
  GFR-binding peptide
  MOD_RES (3), (37): Xaa is C or S
  MOD_RES (17), (18), (19), (20), (21): Xaa is A or G
  MOD_RES (22), (23), (24), (25): Xaa is A or G or is absent

SEQ ID NO: 72562 - protein, 37 aa, Artificial Sequence; identical to SEQ ID NO: 19073
  GFR-binding peptide
  MOD_RES (37), (37): Xaa is C or S

SEQ ID NO: 72563 - protein, 42 aa, Artificial Sequence
  GFR-binding peptide
  MOD_RES (4), (5), (39), (41): Xaa is C or S
  MOD_RES (19), (20), (21), (22), (23): Xaa is A or G
  MOD_RES (24), (25), (26), (27): Xaa is A or G or is absent
AGPXXTPTKMSNITMQIMXXXXXXXXXLGEMSGMVVDRXGXS

SEQ ID NO: 72564 - protein, 37 aa, Artificial Sequence; identical to SEQ ID NO: 19074
  GFR-binding peptide
  MOD_RES (3), (37): Xaa is C or S
  MOD_RES (17), (18), (19), (20), (21): Xaa is A or G
  MOD_RES (22), (23), (24), (25): Xaa is A or G or is absent

SEQ ID NO: 72565 - protein, 39 aa, Artificial Sequence; identical to SEQ ID NO: 51987
  GFR-binding peptide
  MOD_RES (3), (4), (37), (39): Xaa is C or S
  MOD_RES (18), (19), (20), (21), (22): Xaa is A or G
  MOD_RES (23), (24), (25), (26): Xaa is A or G or is absent

SEQ ID NO: 72566 - protein, 38 aa, Artificial Sequence; identical to SEQ ID NO: 19076
  GFR-binding peptide
  MOD_RES (6), (6): Xaa is C or S

SEQ ID NO: 72567 - protein, 34 aa, Artificial Sequence
  GFR-binding peptide
  MOD_RES (1), (1): Xaa is C or S
  MOD_RES (15), (16), (17), (18), (19): Xaa is A or G
  MOD_RES (20), (21), (22), (23): Xaa is A or G or is absent
XAPTKLSNITVQIMXXXXXXXXXLGEMSNMVVRS

SEQ ID NO: 72568 - protein, 40 aa, Artificial Sequence; identical to SEQ ID NO: 51992
  GFR-binding peptide
  MOD_RES (3), (4), (37), (39): Xaa is C or S
  MOD_RES (18), (19), (20), (21), (22): Xaa is A or G
  MOD_RES (23), (24), (25), (26): Xaa is A or G or is absent

SEQ ID NO: 72569 - protein, 39 aa, Artificial Sequence
  GFR-binding peptide
  MOD_RES (6), (7), (38): Xaa is C or S
RVPSTXXAPVKTSNITMQIMDNGRVLLLGEMSMIVEEXG

SEQ ID NO: 72570 - protein, 37 aa, Artificial Sequence
  GFR-binding peptide
  MOD_RES (6), (7): Xaa is C or S
ASAAPXXVPQALSNITIQIMVGRKPKVLGEMSMIVRS

SEQ ID NO: 72571 - protein, 42 aa, Artificial Sequence; identical to SEQ ID NO: 51998
  GFR-binding peptide
  MOD_RES (5), (6), (39), (41): Xaa is C or S
  MOD_RES (20), (21), (22), (23), (24): Xaa is A or G
  MOD_RES (25), (26), (27), (28): Xaa is A or G or is absent

SEQ ID NO: 72572 - protein, 35 aa, Artificial Sequence
  GFR-binding peptide
  MOD_RES (2), (3): Xaa is C or S
  MOD_RES (17), (18), (19), (20), (21): Xaa is A or G
  MOD_RES (22), (23), (24), (25): Xaa is A or G or is absent
PXXVPQDLSNITIQIMXXXXXXXXXLGEMSMVVKS

SEQ ID NO: 72573 - protein, 36 aa, Artificial Sequence
  GFR-binding peptide
  MOD_RES (1), (2), (34), (36): Xaa is C or S
XXVPTRLSNITIQIMDSANNVVIGEMSDMVVESXGX

SEQ ID NO: 72574 - protein, 39 aa, Artificial Sequence; identical to SEQ ID NO: 19082
  GFR-binding peptide
  MOD_RES (1), (38): Xaa is C or S

SEQ ID NO: 72575 - protein, 37 aa, Artificial Sequence; identical to SEQ ID NO: 19083
  GFR-binding peptide
  MOD_RES (3), (37): Xaa is C or S

SEQ ID NO: 72576 - protein, 43 aa, Artificial Sequence; identical to SEQ ID NO: 19084
  GFR-binding peptide
  MOD_RES (3), (40), (42): Xaa is C or S

SEQ ID NO: 72577 - protein, 33 aa, Artificial Sequence; identical to SEQ ID NO: 19086
  GFR-binding peptide
  MOD_RES (14), (15), (16), (17), (18): Xaa is A or G
  MOD_RES (19), (20), (21), (22): Xaa is A or G or is absent

SEQ ID NO: 72578 - protein, 34 aa, Artificial Sequence
  GFR-binding peptide
  MOD_RES (3), (4): Xaa is C or S
PTXXVPTRLSNITIQIMDSANNVVIGEMSDMVVE

SEQ ID NO: 72579 - protein, 42 aa, Artificial Sequence
  GFR-binding peptide
  MOD_RES (6), (7), (39), (41): Xaa is C or S
AAPASXXVPARLSNITIQIMDAANNVVIGEMSDMVVEAXGXR

SEQ ID NO: 72580 - protein, 39 aa, Artificial Sequence
  GFR-binding peptide
  MOD_RES (6), (7), (38): Xaa is C or S
RVPSTXXAPVKTSNITMQIMDNGRVLLIGEMSMIVEEXG

SEQ ID NO: 72581 - protein, 39 aa, Artificial Sequence
  GFR-binding peptide
  MOD_RES (6), (7): Xaa is C or S
  MOD_RES (21), (22), (23), (24), (25): Xaa is A or G
  MOD_RES (26), (27), (28), (29): Xaa is A or G or is absent
ASASPXXVPQDLSNITIQIMXXXXXXXXXLGEMSMVVKS

SEQ ID NO: 72582 - protein, 37 aa, Artificial Sequence
  GFR-binding peptide
  MOD_RES (5), (6): Xaa is C or S
TPPTXXVPTRLSNITIQIMDSANNVVIGEMSDMVVES

SEQ ID NO: 72583 - protein, 39 aa, Artificial Sequence; identical to SEQ ID NO: 19089
  GFR-binding peptide
  MOD_RES (4), (4): Xaa is C or S

SEQ ID NO: 72584 - protein, 39 aa, Artificial Sequence; identical to SEQ ID NO: 19090
  GFR-binding peptide
  MOD_RES (2), (39): Xaa is C or S
  MOD_RES (18), (19), (20), (21), (22): Xaa is A or G
  MOD_RES (23), (24), (25), (26): Xaa is A or G or is absent

SEQ ID NO: 72585 - protein, 35 aa, Artificial Sequence; identical to SEQ ID NO: 54443
  GFR-binding peptide
  MOD_RES (1), (35): Xaa is C or S
  MOD_RES (15), (16), (17), (18), (19): Xaa is A or G
  MOD_RES (20), (21), (22), (23): Xaa is A or G or is absent

SEQ ID NO: 72586 - protein, 37 aa, Artificial Sequence
  GFR-binding peptide
  MOD_RES (1), (34), (36): Xaa is C or S
  MOD_RES (15), (16), (17), (18), (19): Xaa is A or G
  MOD_RES (20), (21), (22), (23): Xaa is A or G or is absent
XAPVKTSNITMQIMXXXXXXXXXLGEMSMIVEEXGXL

SEQ ID NO: 72587 - protein, 36 aa, Artificial Sequence
  GFR-binding peptide
  MOD_RES (2), (3), (35): Xaa is C or S
SXXVPARLSNITIQIMDAANNVVLGEMSDMVVEAXG

SEQ ID NO: 72588 - protein, 35 aa, Artificial Sequence
  GFR-binding peptide
  MOD_RES (1), (35): Xaa is C or S
  MOD_RES (15), (16), (17), (18), (19): Xaa is A or G
  MOD_RES (20), (21), (22), (23): Xaa is A or G or is absent
XAPTKLSNITVQIMXXXXXXXXXLGEMSNMVVRSX

SEQ ID NO: 72589 - protein, 38 aa, Artificial Sequence
  GFR-binding peptide
  MOD_RES (4), (5), (38): Xaa is C or S
  MOD_RES (19), (20), (21), (22), (23): Xaa is A or G
  MOD_RES (24), (25), (26), (27): Xaa is A or G or is absent
PSTXXAPVKTSNITMQIMXXXXXXXXXIGEMSMIVEEX

SEQ ID NO: 72590 - protein, 42 aa, Artificial Sequence
  GFR-binding peptide
  MOD_RES (4), (5), (39), (41): Xaa is C or S
  MOD_RES (19), (20), (21), (22), (23): Xaa is A or G
  MOD_RES (24), (25), (26), (27): Xaa is A or G or is absent
AGPXXTPTKMSNITMQIMXXXXXXXXXIGEMSGMVVDRXGXS

SEQ ID NO: 72591 - protein, 31 aa, Artificial Sequence
  GFR-binding peptide
  MOD_RES (1), (1): Xaa is C or S
XAPTKLSNITVQIMDDSSNVILGEMSNMVVR

SEQ ID NO: 72592 - protein, 38 aa, Artificial Sequence; identical to SEQ ID NO: 19093
  GFR-binding peptide
  MOD_RES (37), (37): Xaa is C or S

SEQ ID NO: 72593 - protein, 38 aa, Artificial Sequence
  GFR-binding peptide
  MOD_RES (5), (6): Xaa is C or S
  MOD_RES (20), (21), (22), (23), (24): Xaa is A or G
  MOD_RES (25), (26), (27), (28): Xaa is A or G or is absent
VPSTXXAPVKTSNITMQIMXXXXXXXXXIGEMSMIVEE

SEQ ID NO: 72594 - protein, 39 aa, Artificial Sequence
  GFR-binding peptide
  MOD_RES (6), (7): Xaa is C or S
  MOD_RES (21), (22), (23), (24), (25): Xaa is A or G
  MOD_RES (26), (27), (28), (29): Xaa is A or G or is absent
AAPASXXVPARLSNITIQIMXXXXXXXXXIGEMSDMVVE

SEQ ID NO: 72595 - protein, 40 aa, Artificial Sequence; identical to SEQ ID NO: 52018
  GFR-binding peptide
  MOD_RES (3), (4), (38), (40): Xaa is C or S
  MOD_RES (18), (19), (20), (21), (22): Xaa is A or G
  MOD_RES (23), (24), (25), (26): Xaa is A or G or is absent

SEQ ID NO: 72596 - protein, 35 aa, Artificial Sequence
  GFR-binding peptide
  MOD_RES (34), (34): Xaa is C or S
  MOD_RES (14), (15), (16), (17), (18): Xaa is A or G
  MOD_RES (19), (20), (21), (22): Xaa is A or G or is absent
TPTKMSNITMQIMXXXXXXXXXIGEMSGMVVDRXG

SEQ ID NO: 72597 - protein, 40 aa, Artificial Sequence; identical to SEQ ID NO: 19096
  GFR-binding peptide
  MOD_RES (3), (40): Xaa is C or S

SEQ ID NO: 72598 - protein, 32 aa, Artificial Sequence; identical to SEQ ID NO: 54452
  GFR-binding peptide
  MOD_RES (1), (2): Xaa is C or S

SEQ ID NO: 72599 - protein, 42 aa, Artificial Sequence
  GFR-binding peptide
  MOD_RES (6), (7), (40), (42): Xaa is C or S
  MOD_RES (21), (22), (23), (24), (25): Xaa is A or G
  MOD_RES (26), (27), (28), (29): Xaa is A or G or is absent
ASASPXXVSQDLSNITIQIMXXXXXXXXXLGEMSMIVKSXKX

SEQ ID NO: 72600 - protein, 37 aa, Artificial Sequence; identical to SEQ ID NO: 19097
  GFR-binding peptide
  MOD_RES (1), (35), (37): Xaa is C or S

SEQ ID NO: 72601 - protein, 36 aa, Artificial Sequence; identical to SEQ ID NO: 54454
  GFR-binding peptide
  MOD_RES (4), (5): Xaa is C or S

SEQ ID NO: 72602 - protein, 36 aa, Artificial Sequence
  GFR-binding peptide
  MOD_RES (5), (6): Xaa is C or S
TPPTXXVPTRLSNITIQIMDSANNVVLGEMSDMVVE

SEQ ID NO: 72603 - protein, 32 aa, Artificial Sequence
  GFR-binding peptide
  MOD_RES (1), (1): Xaa is C or S
XTPTKMSNITMQIMNDKQQIILGEMSGMVVDR

SEQ ID NO: 72604 - protein, 33 aa, Artificial Sequence; identical to SEQ ID NO: 54461
  GFR-binding peptide
  MOD_RES (2), (3): Xaa is C or S

SEQ ID NO: 72605 - protein, 41 aa, Artificial Sequence; identical to SEQ ID NO: 19100
  GFR-binding peptide
  MOD_RES (3), (40): Xaa is C or S

SEQ ID NO: 72606 - protein, 34 aa, Artificial Sequence
  GFR-binding peptide
  MOD_RES (32), (34): Xaa is C or S
TPTKMSNITMQIMNDKQQIILGEMSGMVVDRXGX

SEQ ID NO: 72607 - protein, 35 aa, Artificial Sequence; identical to SEQ ID NO: 52036
  GFR-binding peptide
  MOD_RES (2), (3), (35): Xaa is C or S

SEQ ID NO: 72608 - protein, 39 aa, Artificial Sequence; identical to SEQ ID NO: 19101
  GFR-binding peptide
  MOD_RES (3), (37), (39): Xaa is C or S
  MOD_RES (17), (18), (19), (20), (21): Xaa is A or G
  MOD_RES (22), (23), (24), (25): Xaa is A or G or is absent

SEQ ID NO: 72609 - protein, 39 aa, Artificial Sequence; identical to SEQ ID NO: 54465
  GFR-binding peptide
  MOD_RES (6), (7), (38): Xaa is C or S

SEQ ID NO: 72610 - protein, 42 aa, Artificial Sequence; identical to SEQ ID NO: 19102
  GFR-binding peptide
  MOD_RES (5), (42): Xaa is C or S
  MOD_RES (21), (22), (23), (24), (25): Xaa is A or G
  MOD_RES (26), (27), (28), (29): Xaa is A or G or is absent

SEQ ID NO: 72611 - protein, 41 aa, Artificial Sequence
  GFR-binding peptide
  MOD_RES (6), (7), (40): Xaa is C or S
  MOD_RES (21), (22), (23), (24), (25): Xaa is A or G
  MOD_RES (26), (27), (28), (29): Xaa is A or G or is absent
ASAAPXXVPQALSNITIQIMXXXXXXXXXLGEMSMIVRSXK

SEQ ID NO: 72612 - protein, 39 aa, Artificial Sequence; identical to SEQ ID NO: 19103
  GFR-binding peptide
  MOD_RES (37), (39): Xaa is C or S

SEQ ID NO: 72613 - protein, 43 aa, Artificial Sequence; identical to SEQ ID NO: 19104
  GFR-binding peptide
  MOD_RES (4), (41), (43): Xaa is C or S

SEQ ID NO: 72614 - protein, 42 aa, Artificial Sequence
  GFR-binding peptide
  MOD_RES (5), (6), (40), (42): Xaa is C or S
  MOD_RES (20), (21), (22), (23), (24): Xaa is A or G
  MOD_RES (25), (26), (27), (28): Xaa is A or G or is absent
APASXXVPARLSNITIQIMXXXXXXXXXLGEMSDMVVEAXGX

SEQ ID NO: 72615 - protein, 37 aa, Artificial Sequence
  GFR-binding peptide
  MOD_RES (2), (3), (35), (37): Xaa is C or S
TXXVPTRLSNITIQIMDSANNVVIGEMSDMVVESXGX

SEQ ID NO: 72616 - protein, 39 aa, Artificial Sequence; identical to SEQ ID NO: 19106
  GFR-binding peptide
  MOD_RES (6), (6): Xaa is C or S
  MOD_RES (20), (21), (22), (23), (24): Xaa is A or G
  MOD_RES (25), (26), (27), (28): Xaa is A or G or is absent

SEQ ID NO: 72617 - protein, 44 aa, Artificial Sequence; identical to SEQ ID NO: 19107
  GFR-binding peptide
  MOD_RES (5), (42), (44): Xaa is C or S

SEQ ID NO: 72618 - protein, 44 aa, Artificial Sequence; identical to SEQ ID NO: 19108
  GFR-binding peptide
  MOD_RES (5), (42), (44): Xaa is C or S

SEQ ID NO: 72619 - protein, 38 aa, Artificial Sequence
  GFR-binding peptide
  MOD_RES (5), (6), (38): Xaa is C or S
APASXXVPARLSNITIQIMDAANNVVLGEMSDMVVEAX

SEQ ID NO: 72620 - protein, 38 aa, Artificial Sequence; identical to SEQ ID NO: 19109
  GFR-binding peptide
  MOD_RES (35), (37): Xaa is C or S

SEQ ID NO: 72621 - protein, 34 aa, Artificial Sequence
  GFR-binding peptide
  MOD_RES (3), (4): Xaa is C or S
ASXXVPARLSNITIQIMDAANNVVIGEMSDMVVE

SEQ ID NO: 72622 - protein, 35 aa, Artificial Sequence; identical to SEQ ID NO: 19111
  GFR-binding peptide
  MOD_RES (2), (2): Xaa is C or S
  MOD_RES (16), (17), (18), (19), (20): Xaa is A or G
  MOD_RES (21), (22), (23), (24): Xaa is A or G or is absent

SEQ ID NO: 72623 - protein, 38 aa, Artificial Sequence
  GFR-binding peptide
  MOD_RES (5), (6), (38): Xaa is C or S
TPPTXXVPTRLSNITIQIMDSANNVVLGEMSDMVVESX

SEQ ID NO: 72624 - protein, 36 aa, Artificial Sequence
  GFR-binding peptide
  MOD_RES (1), (35): Xaa is C or S
  MOD_RES (15), (16), (17), (18), (19): Xaa is A or G
  MOD_RES (20), (21), (22), (23): Xaa is A or G or is absent
XVPARLSNITIQIMXXXXXXXXXIGEMSDMVVEAXG

SEQ ID NO: 72625 - protein, 40 aa, Artificial Sequence
  GFR-binding peptide
  MOD_RES (3), (4), (37), (39): Xaa is C or S
  MOD_RES (18), (19), (20), (21), (22): Xaa is A or G
  MOD_RES (23), (24), (25), (26): Xaa is A or G or is absent
STXXAPVKTSNITMQIMXXXXXXXXXIGEMSMIVEEXGXL

SEQ ID NO: 72626 - protein, 41 aa, Artificial Sequence
  GFR-binding peptide
  MOD_RES (6), (7), (40): Xaa is C or S
  MOD_RES (21), (22), (23), (24), (25): Xaa is A or G
  MOD_RES (26), (27), (28), (29): Xaa is A or G or is absent
ASASPXXVPQDLSNITIQIMXXXXXXXXXLGEMSMVVKSXK

SEQ ID NO: 72627 - protein, 39 aa, Artificial Sequence
  GFR-binding peptide
  MOD_RES (4), (5), (36), (38): Xaa is C or S
ASPXXVSQDLSNITIQIMIGKTPKILGEMSMIVKSXKXS

SEQ ID NO: 72628 - protein, 33 aa, Artificial Sequence; identical to SEQ ID NO: 19114
  GFR-binding peptide

SEQ ID NO: 72629 - protein, 40 aa, Artificial Sequence
  GFR-binding peptide
  MOD_RES (6), (7), (40): Xaa is C or S
  MOD_RES (21), (22), (23), (24), (25): Xaa is A or G
  MOD_RES (26), (27), (28), (29): Xaa is A or G or is absent
RVPSTXXAPVKTSNITMQIMXXXXXXXXXIGEMSMIVEEX

SEQ ID NO: 72630 - protein, 34 aa, Artificial Sequence; identical to SEQ ID NO: 54476
  GFR-binding peptide
  MOD_RES (1), (2): Xaa is C or S
  MOD_RES (16), (17), (18), (19), (20): Xaa is A or G
  MOD_RES (21), (22), (23), (24): Xaa is A or G or is absent

SEQ ID NO: 72631 - protein, 36 aa, Artificial Sequence
  GFR-binding peptide
  MOD_RES (1), (2), (35): Xaa is C or S
  MOD_RES (16), (17), (18), (19), (20): Xaa is A or G
  MOD_RES (21), (22), (23), (24): Xaa is A or G or is absent
XXVSQDLSNITIQIMXXXXXXXXXLGEMSMIVKSXK

SEQ ID NO: 72632 - protein, 30 aa, Artificial Sequence
  GFR-binding peptide
APTKLSNITVQIMDDSSNVILGEMSNMVVR

SEQ ID NO: 72633 - protein, 31 aa, Artificial Sequence; identical to SEQ ID NO: 54479
  GFR-binding peptide
  MOD_RES (31), (31): Xaa is C or S

SEQ ID NO: 72634 - protein, 37 aa, Artificial Sequence
  GFR-binding peptide
  MOD_RES (4), (5), (37): Xaa is C or S
PPTXXVPTRLSNITIQIMDSANNVVIGEMSDMVVESX

SEQ ID NO: 72635 - protein, 37 aa, Artificial Sequence
  GFR-binding peptide
  MOD_RES (4), (5): Xaa is C or S
  MOD_RES (19), (20), (21), (22), (23): Xaa is A or G
  MOD_RES (24), (25), (26), (27): Xaa is A or G or is absent
PSTXXAPVKTSNITMQIMXXXXXXXXXLGEMSMIVEE

SEQ ID NO: 72636 - protein, 41 aa, Artificial Sequence
  GFR-binding peptide
  MOD_RES (6), (7), (38), (40): Xaa is C or S
ASASPXXVSQDLSNITIQIMIGKTPKILGEMSMIVKSXKXS

SEQ ID NO: 72637 - protein, 39 aa, Artificial Sequence; identical to SEQ ID NO: 19117
  GFR-binding peptide
  MOD_RES (36), (38): Xaa is C or S

SEQ ID NO: 72638 - protein, 37 aa, Artificial Sequence; identical to SEQ ID NO: 19119
  GFR-binding peptide
  MOD_RES (2), (36): Xaa is C or S

SEQ ID NO: 72639 - protein, 43 aa, Artificial Sequence
  GFR-binding peptide
  MOD_RES (6), (7), (40), (42): Xaa is C or S
  MOD_RES (21), (22), (23), (24), (25): Xaa is A or G
  MOD_RES (26), (27), (28), (29): Xaa is A or G or is absent
RVPSTXXAPVKTSNITMQIMXXXXXXXXXLGEMSMIVEEXGXL

SEQ ID NO: 72640 - protein, 39 aa, Artificial Sequence
  GFR-binding peptide
  MOD_RES (5), (6), (37), (39): Xaa is C or S
SAAPXXVPQALSNITIQIMVGRKPKVLGEMSMIVRSXKX

SEQ ID NO: 72641 - protein, 35 aa, Artificial Sequence
  GFR-binding peptide
  MOD_RES (2), (3), (35): Xaa is C or S
TXXVPTRLSNITIQIMDSANNVVIGEMSDMVVESX

SEQ ID NO: 72642 - protein, 36 aa, Artificial Sequence; identical to SEQ ID NO: 19120
  GFR-binding peptide
  MOD_RES (1), (1): Xaa is C or S
  MOD_RES (17), (18), (19), (20), (21): Xaa is A or G
  MOD_RES (22), (23), (24), (25): Xaa is A or G or is absent

SEQ ID NO: 72643 - protein, 34 aa, Artificial Sequence; identical to SEQ ID NO: 19122
  GFR-binding peptide
  MOD_RES (1), (1): Xaa is C or S

SEQ ID NO: 72644 - protein, 39 aa, Artificial Sequence
  GFR-binding peptide
  MOD_RES (5), (6): Xaa is C or S
  MOD_RES (20), (21), (22), (23), (24): Xaa is A or G
  MOD_RES (25), (26), (27), (28): Xaa is A or G or is absent
APASXXVPARLSNITIQIMXXXXXXXXXIGEMSDMVVEA

SEQ ID NO: 72645 - protein, 40 aa, Artificial Sequence
  GFR-binding peptide
  MOD_RES (5), (6), (37), (39): Xaa is C or S
SASPXXVSQDLSNITIQIMIGKTPKILGEMSMIVKSXKXS

SEQ ID NO: 72646 - protein, 37 aa, Artificial Sequence; identical to SEQ ID NO: 19124
  GFR-binding peptide
  MOD_RES (1), (1): Xaa is C or S
  MOD_RES (17), (18), (19), (20), (21): Xaa is A or G
  MOD_RES (22), (23), (24), (25): Xaa is A or G or is absent

SEQ ID NO: 72647 - protein, 43 aa, Artificial Sequence
  GFR-binding peptide
  MOD_RES (5), (6), (40), (42): Xaa is C or S
  MOD_RES (20), (21), (22), (23), (24): Xaa is A or G
  MOD_RES (25), (26), (27), (28): Xaa is A or G or is absent
SAGPXXTPTKMSNITMQIMXXXXXXXXXIGEMSGMVVDRXGXS

SEQ ID NO: 72648 - protein, 36 aa, Artificial Sequence; identical to SEQ ID NO: 54498
  GFR-binding peptide
  MOD_RES (4), (5), (36): Xaa is C or S

SEQ ID NO: 72649 - protein, 39 aa, Artificial Sequence; identical to SEQ ID NO: 54499
  GFR-binding peptide
  MOD_RES (4), (5), (36), (38): Xaa is C or S

SEQ ID NO: 72650 - protein, 38 aa, Artificial Sequence; identical to SEQ ID NO: 19127
  GFR-binding peptide
  MOD_RES (35), (37): Xaa is C or S

SEQ ID NO: 72651 - protein, 37 aa, Artificial Sequence; identical to SEQ ID NO: 19128
  GFR-binding peptide
  MOD_RES (35), (37): Xaa is C or S
  MOD_RES (14), (15), (16), (17), (18): Xaa is A or G
  MOD_RES (19), (20), (21), (22): Xaa is A or G or is absent

SEQ ID NO: 72652 - protein, 36 aa, Artificial Sequence
  GFR-binding peptide
  MOD_RES (33), (35): Xaa is C or S
  MOD_RES (14), (15), (16), (17), (18): Xaa is A or G
  MOD_RES (19), (20), (21), (22): Xaa is A or G or is absent
VSQDLSNITIQIMXXXXXXXXXLGEMSMIVKSXKXS

SEQ ID NO: 72653 - protein, 40 aa, Artificial Sequence; identical to SEQ ID NO: 52072
  GFR-binding peptide
  MOD_RES (6), (7), (40): Xaa is C or S
  MOD_RES (21), (22), (23), (24), (25): Xaa is A or G
  MOD_RES (26), (27), (28), (29): Xaa is A or G or is absent

SEQ ID NO: 72654 - protein, 36 aa, Artificial Sequence; identical to SEQ ID NO: 54502
  GFR-binding peptide
  MOD_RES (2), (3), (35): Xaa is C or S

SEQ ID NO: 72655 - protein, 34 aa, Artificial Sequence
  GFR-binding peptide
  MOD_RES (1), (33): Xaa is C or S
XAPTKLSNITVQIMDDSSNVILGEMSNMVVRSXG

SEQ ID NO: 72656 - protein, 45 aa, Artificial Sequence; identical to SEQ ID NO: 19129
  GFR-binding peptide
  MOD_RES (5), (42), (44): Xaa is C or S
  MOD_RES (21), (22), (23), (24), (25): Xaa is A or G
  MOD_RES (26), (27), (28), (29): Xaa is A or G or is absent

SEQ ID NO: 72657 - protein, 38 aa, Artificial Sequence; identical to SEQ ID NO: 19130
  GFR-binding peptide
  MOD_RES (2), (36), (38): Xaa is C or S

SEQ ID NO: 72658 - protein, 36 aa, Artificial Sequence
  GFR-binding peptide
  MOD_RES (2), (3), (34), (36): Xaa is C or S
PXXVPQALSNITIQIMVGRKPKVLGEMSMIVRSXKX

SEQ ID NO: 72659 - protein, 39 aa, Artificial Sequence; identical to SEQ ID NO: 19131
  GFR-binding peptide
  MOD_RES (3), (3): Xaa is C or S

SEQ ID NO: 72660 - protein, 45 aa, Artificial Sequence; identical to SEQ ID NO: 19133
  GFR-binding peptide
  MOD_RES (5), (42), (44): Xaa is C or S
  MOD_RES (21), (22), (23), (24), (25): Xaa is A or G
  MOD_RES (26), (27), (28), (29): Xaa is A or G or is absent

SEQ ID NO: 72661 - protein, 34 aa, Artificial Sequence
  GFR-binding peptide
  MOD_RES (2), (3): Xaa is C or S
PXXTPTKMSNITMQIMNDKQQIIIGEMSGMVVDR

SEQ ID NO: 72662 - protein, 35 aa, Artificial Sequence
  GFR-binding peptide
  MOD_RES (32), (34): Xaa is C or S
TPTKMSNITMQIMNDKQQIIIGEMSGMVVDRXGXS

SEQ ID NO: 72663 - protein, 35 aa, Artificial Sequence
  GFR-binding peptide
  MOD_RES (32), (34): Xaa is C or S
TPTKMSNITMQIMNDKQQIILGEMSGMVVDRXGXS

SEQ ID NO: 72664 - protein, 34 aa, Artificial Sequence
  GFR-binding peptide
  MOD_RES (1), (2), (34): Xaa is C or S
XXAPTKLSNITVQIMDDSSNVILGEMSNMVVRSX

SEQ ID NO: 72665 - protein, 41 aa, Artificial Sequence; identical to SEQ ID NO: 52095
  GFR-binding peptide
  MOD_RES (4), (5), (38), (40): Xaa is C or S
  MOD_RES (19), (20), (21), (22), (23): Xaa is A or G
  MOD_RES (24), (25), (26), (27): Xaa is A or G or is absent

SEQ ID NO: 72666 - protein, 39 aa, Artificial Sequence
  GFR-binding peptide
  MOD_RES (5), (6), (39): Xaa is C or S
  MOD_RES (20), (21), (22), (23), (24): Xaa is A or G
  MOD_RES (25), (26), (27), (28): Xaa is A or G or is absent
SASPXXVSQDLSNITIQIMXXXXXXXXXLGEMSMIVKSX

SEQ ID NO: 72667 - protein, 35 aa, Artificial Sequence; identical to SEQ ID NO: 19135
  GFR-binding peptide
  MOD_RES (34), (34): Xaa is C or S
  MOD_RES (14), (15), (16), (17), (18): Xaa is A or G
  MOD_RES (19), (20), (21), (22): Xaa is A or G or is absent

SEQ ID NO: 72668 - protein, 31 aa, Artificial Sequence
  GFR-binding peptide
  MOD_RES (1), (1): Xaa is C or S
XVSQDLSNITIQIMIGKTPKILGEMSMIVKS

SEQ ID NO: 72669 - protein, 34 aa, Artificial Sequence; identical to SEQ ID NO: 19137
  GFR-binding peptide
  MOD_RES (15), (16), (17), (18), (19): Xaa is A or G
  MOD_RES (20), (21), (22), (23): Xaa is A or G or is absent

SEQ ID NO: 72670 - protein, 35 aa, Artificial Sequence
  GFR-binding peptide
  MOD_RES (2), (3), (35): Xaa is C or S
SXXVPARLSNITIQIMDAANNVVLGEMSDMVVEAX

SEQ ID NO: 72671 - protein, 38 aa, Artificial Sequence
  GFR-binding peptide
  MOD_RES (3), (4), (36), (38): Xaa is C or S
GPXXTPTKMSNITMQIMNDKQQIIIGEMSGMVVDRXGX

SEQ ID NO: 72672 - protein, 37 aa, Artificial Sequence; identical to SEQ ID NO: 52104
  GFR-binding peptide
  MOD_RES (1), (34), (36): Xaa is C or S
  MOD_RES (15), (16), (17), (18), (19): Xaa is A or G
  MOD_RES (20), (21), (22), (23): Xaa is A or G or is absent

SEQ ID NO: 72673 - protein, 34 aa, Artificial Sequence
  GFR-binding peptide
  MOD_RES (2), (3), (34): Xaa is C or S
PXXVPQALSNITIQIMVGRKPKVLGEMSMIVRSX

SEQ ID NO: 72674 - protein, 39 aa, Artificial Sequence; identical to SEQ ID NO: 19138
  GFR-binding peptide
  MOD_RES (7), (7): Xaa is C or S

SEQ ID NO: 72675 - protein, 34 aa, Artificial Sequence
  GFR-binding peptide
  MOD_RES (1), (2): Xaa is C or S
  MOD_RES (16), (17), (18), (19), (20): Xaa is A or G
  MOD_RES (21), (22), (23), (24): Xaa is A or G or is absent
XXVPTRLSNITIQIMXXXXXXXXXLGEMSDMVVE

SEQ ID NO: 72676 - protein, 36 aa, Artificial Sequence; identical to SEQ ID NO: 19139
  GFR-binding peptide
  MOD_RES (1), (35): Xaa is C or S

SEQ ID NO: 72677 - protein, 33 aa, Artificial Sequence
  GFR-binding peptide
  MOD_RES (14), (15), (16), (17), (18): Xaa is A or G
  MOD_RES (19), (20), (21), (22): Xaa is A or G or is absent
APTKLSNITVQIMXXXXXXXXXLGEMSNMVVRS

SEQ ID NO: 72678 - protein, 41 aa, Artificial Sequence
  GFR-binding peptide
  MOD_RES (5), (6), (40): Xaa is C or S
  MOD_RES (20), (21), (22), (23), (24): Xaa is A or G
  MOD_RES (25), (26), (27), (28): Xaa is A or G or is absent
VPKPXXAPTKLSNITVQIMXXXXXXXXXLGEMSNMVVRSXG

SEQ ID NO: 72679 - protein, 36 aa, Artificial Sequence
  GFR-binding peptide
  MOD_RES (5), (6): Xaa is C or S
TPPTXXVPTRLSNITIQIMDSANNVVIGEMSDMVVE

SEQ ID NO: 72680 - protein, 41 aa, Artificial Sequence; identical to SEQ ID NO: 19140
  GFR-binding peptide
  MOD_RES (7), (41): Xaa is C or S

SEQ ID NO: 72681 - protein, 37 aa, Artificial Sequence
  GFR-binding peptide
  MOD_RES (6), (7): Xaa is C or S
HVPKPXXAPTKLSNITVQIMDDSSNVIIGEMSNMVVR

SEQ ID NO: 72682 - protein, 41 aa, Artificial Sequence; identical to SEQ ID NO: 19142
  GFR-binding peptide
  MOD_RES (7), (41): Xaa is C or S
  MOD_RES (21), (22), (23), (24), (25): Xaa is A or G
  MOD_RES (26), (27), (28), (29): Xaa is A or G or is absent

SEQ ID NO: 72683 - protein, 37 aa, Artificial Sequence; identical to SEQ ID NO: 54529
  GFR-binding peptide
  MOD_RES (2), (3), (34), (36): Xaa is C or S

SEQ ID NO: 72684 - protein, 34 aa, Artificial Sequence
  GFR-binding peptide
  MOD_RES (2), (3): Xaa is C or S
TXXVPTRLSNITIQIMDSANNVVIGEMSDMVVES

SEQ ID NO: 72685 - protein, 36 aa, Artificial Sequence; identical to SEQ ID NO: 52112
  GFR-binding peptide
  MOD_RES (1), (35): Xaa is C or S
  MOD_RES (15), (16), (17), (18), (19): Xaa is A or G
  MOD_RES (20), (21), (22), (23): Xaa is A or G or is absent

SEQ ID NO: 72686 - protein, 35 aa, Artificial Sequence
  GFR-binding peptide
  MOD_RES (1), (2), (34): Xaa is C or S
XXVPARLSNITIQIMDAANNVVLGEMSDMVVEAXG

SEQ ID NO: 72687 - protein, 36 aa, Artificial Sequence; identical to SEQ ID NO: 19144
  GFR-binding peptide
  MOD_RES (4), (4): Xaa is C or S
  MOD_RES (18), (19), (20), (21), (22): Xaa is A or G
  MOD_RES (23), (24), (25), (26): Xaa is A or G or is absent

SEQ ID NO: 72688 - protein, 42 aa, Artificial Sequence; identical to SEQ ID NO: 19145
  GFR-binding peptide
  MOD_RES (4), (41): Xaa is C or S
  MOD_RES (20), (21), (22), (23), (24): Xaa is A or G
  MOD_RES (25), (26), (27), (28): Xaa is A or G or is absent

SEQ ID NO: 72689 - protein, 41 aa, Artificial Sequence; identical to SEQ ID NO: 19146
  GFR-binding peptide
  MOD_RES (5), (5): Xaa is C or S
  MOD_RES (21), (22), (23), (24), (25): Xaa is A or G
  MOD_RES (26), (27), (28), (29): Xaa is A or G or is absent

SEQ ID NO: 72690 - protein, 40 aa, Artificial Sequence; identical to SEQ ID NO: 19147
  GFR-binding peptide
  MOD_RES (2), (39): Xaa is C or S
  MOD_RES (18), (19), (20), (21), (22): Xaa is A or G
  MOD_RES (23), (24), (25), (26): Xaa is A or G or is absent

SEQ ID NO: 72691 - protein, 42 aa, Artificial Sequence
  GFR-binding peptide
  MOD_RES (6), (7), (40), (42): Xaa is C or S
  MOD_RES (21), (22), (23), (24), (25): Xaa is A or G
  MOD_RES (26), (27), (28), (29): Xaa is A or G or is absent
RVPSTXXAPVKTSNITMQIMXXXXXXXXXIGEMSMIVEEXGX

SEQ ID NO: 72692 - protein, 35 aa, Artificial Sequence; identical to SEQ ID NO: 54541
  GFR-binding peptide
  MOD_RES (2), (3): Xaa is C or S
  MOD_RES (17), (18), (19), (20), (21): Xaa is A or G
  MOD_RES (22), (23), (24), (25): Xaa is A or G or is absent

SEQ ID NO: 72693 - protein, 34 aa, Artificial Sequence
  GFR-binding peptide
  MOD_RES (33), (33): Xaa is C or S
  MOD_RES (14), (15), (16), (17), (18): Xaa is A or G
  MOD_RES (19), (20), (21), (22): Xaa is A or G or is absent
APVKTSNITMQIMXXXXXXXXXIGEMSMIVEEXG

SEQ ID NO: 72694 - protein, 38 aa, Artificial Sequence; identical to SEQ ID NO: 19151
  GFR-binding peptide
  MOD_RES (37), (37): Xaa is C or S

SEQ ID NO: 72695 - protein, 32 aa, Artificial Sequence
  GFR-binding peptide
  MOD_RES (1), (1): Xaa is C or S
XVPARLSNITIQIMDAANNVVIGEMSDMVVEA

SEQ ID NO: 72696 - protein, 41 aa, Artificial Sequence; identical to SEQ ID NO: 19152
  GFR-binding peptide
  MOD_RES (1), (38), (40): Xaa is C or S

SEQ ID NO: 72697 - protein, 37 aa, Artificial Sequence; identical to SEQ ID NO: 19153
  GFR-binding peptide
  MOD_RES (34), (36): Xaa is C or S

SEQ ID NO: 72698 - protein, 39 aa, Artificial Sequence; identical to SEQ ID NO: 19154
  GFR-binding peptide
  MOD_RES (36), (38): Xaa is C or S

SEQ ID NO: 72699 - protein, 34 aa, Artificial Sequence
  GFR-binding peptide
  MOD_RES (1), (32), (34): Xaa is C or S
XVPQDLSNITIQIMVGRTPKVLGEMSMVVKSXKX

SEQ ID NO: 72700 - protein, 33 aa, Artificial Sequence; identical to SEQ ID NO: 52128
  GFR-binding peptide
  MOD_RES (33), (33): Xaa is C or S
  MOD_RES (14), (15), (16), (17), (18): Xaa is A or G
  MOD_RES (19), (20), (21), (22): Xaa is A or G or is absent

SEQ ID NO: 72701 - protein, 39 aa, Artificial Sequence
  GFR-binding peptide
  MOD_RES (6), (7): Xaa is C or S
  MOD_RES (21), (22), (23), (24), (25): Xaa is A or G
  MOD_RES (26), (27), (28), (29): Xaa is A or G or is absent
ASASPXXVSQDLSNITIQIMXXXXXXXXXLGEMSMIVKS

SEQ ID NO: 72702 - protein, 41 aa, Artificial Sequence; identical to SEQ ID NO: 19157
  GFR-binding peptide
  MOD_RES (4), (38), (40): Xaa is C or S

SEQ ID NO: 72703 - protein, 41 aa, Artificial Sequence; identical to SEQ ID NO: 19160
  GFR-binding peptide
  MOD_RES (3), (40): Xaa is C or S
  MOD_RES (19), (20), (21), (22), (23): Xaa is A or G
  MOD_RES (24), (25), (26), (27): Xaa is A or G or is absent

SEQ ID NO: 72704 - protein, 38 aa, Artificial Sequence; identical to SEQ ID NO: 19161
  GFR-binding peptide
  MOD_RES (3), (37): Xaa is C or S
  MOD_RES (17), (18), (19), (20), (21): Xaa is A or G
  MOD_RES (22), (23), (24), (25): Xaa is A or G or is absent

SEQ ID NO: 72705 - protein, 36 aa, Artificial Sequence
  GFR-binding peptide
  MOD_RES (2), (3): Xaa is C or S
  MOD_RES (17), (18), (19), (20), (21): Xaa is A or G
  MOD_RES (22), (23), (24), (25): Xaa is A or G or is absent
PXXTPTKMSNITMQIMXXXXXXXXXIGEMSGMVVDR

SEQ ID NO: 72706 - protein, 35 aa, Artificial Sequence
  GFR-binding peptide
  MOD_RES (34), (34): Xaa is C or S
  MOD_RES (14), (15), (16), (17), (18): Xaa is A or G
  MOD_RES (19), (20), (21), (22): Xaa is A or G or is absent
TPTKMSNITMQIMXXXXXXXXXLGEMSGMVVDRXG

SEQ ID NO: 72707 - protein, 37 aa, Artificial Sequence; identical to SEQ ID NO: 54556
  GFR-binding peptide
  MOD_RES (2), (3), (35), (37): Xaa is C or S

SEQ ID NO: 72708 - protein, 44 aa, Artificial Sequence; identical to SEQ ID NO: 19164
  GFR-binding peptide
  MOD_RES (5), (42), (44): Xaa is C or S
  MOD_RES (21), (22), (23), (24), (25): Xaa is A or G
  MOD_RES (26), (27), (28), (29): Xaa is A or G or is absent

SEQ ID NO: 72709 - protein, 38 aa, Artificial Sequence
  GFR-binding peptide
  MOD_RES (5), (6): Xaa is C or S
  MOD_RES (20), (21), (22), (23), (24): Xaa is A or G
  MOD_RES (25), (26), (27), (28): Xaa is A or G or is absent
SASPXXVPQDLSNITIQIMXXXXXXXXXLGEMSMVVKS

SEQ ID NO: 72710 - protein, 34 aa, Artificial Sequence
  GFR-binding peptide
  MOD_RES (1), (34): Xaa is C or S
  MOD_RES (15), (16), (17), (18), (19): Xaa is A or G
  MOD_RES (20), (21), (22), (23): Xaa is A or G or is absent
XVPQALSNITIQIMXXXXXXXXXLGEMSMIVRSX

SEQ ID NO: 72711 - protein, 35 aa, Artificial Sequence; identical to SEQ ID NO: 54560
  GFR-binding peptide
  MOD_RES (1), (34): Xaa is C or S
  MOD_RES (15), (16), (17), (18), (19): Xaa is A or G
  MOD_RES (20), (21), (22), (23): Xaa is A or G or is absent

SEQ ID NO: 72712 - protein, 37 aa, Artificial Sequence; identical to SEQ ID NO: 19167
  GFR-binding peptide
  MOD_RES (3), (3): Xaa is C or S
  MOD_RES (19), (20), (21), (22), (23): Xaa is A or G
  MOD_RES (24), (25), (26), (27): Xaa is A or G or is absent

SEQ ID NO: 72713 - protein, 35 aa, Artificial Sequence
  GFR-binding peptide
  MOD_RES (1), (34): Xaa is C or S
  MOD_RES (15), (16), (17), (18), (19): Xaa is A or G
  MOD_RES (20), (21), (22), (23): Xaa is A or G or is absent
XVPQDLSNITIQIMXXXXXXXXXLGEMSMVVKSXK

SEQ ID NO: 72714 - protein, 41 aa, Artificial Sequence
  GFR-binding peptide
  MOD_RES (6), (7), (38), (40): Xaa is C or S
ASAAPXXVPQALSNITIQIMVGRKPKVLGEMSMIVRSXKXS

SEQ ID NO: 72715 - protein, 44 aa, Artificial Sequence
  GFR-binding peptide
  MOD_RES (6), (7), (41), (43): Xaa is C or S
  MOD_RES (21), (22), (23), (24), (25): Xaa is A or G
  MOD_RES (26), (27), (28), (29): Xaa is A or G or is absent
AAPASXXVPARLSNITIQIMXXXXXXXXXLGEMSDMVVEAXGXR

SEQ ID NO: 72716 - protein, 38 aa, Artificial Sequence
  GFR-binding peptide
  MOD_RES (1), (35), (37): Xaa is C or S
  MOD_RES (15), (16), (17), (18), (19): Xaa is A or G
  MOD_RES (20), (21), (22), (23): Xaa is A or G or is absent
XVPTRLSNITIQIMXXXXXXXXXLGEMSDMVVESXGXR

SEQ ID NO: 72717 - protein, 44 aa, Artificial Sequence; identical to SEQ ID NO: 19171
  GFR-binding peptide
  MOD_RES (5), (42), (44): Xaa is C or S
  MOD_RES (21), (22), (23), (24), (25): Xaa is A or G
  MOD_RES (26), (27), (28), (29): Xaa is A or G or is absent

SEQ ID NO: 72718 - protein, 38 aa, Artificial Sequence
  GFR-binding peptide
  MOD_RES (1), (35), (37): Xaa is C or S
  MOD_RES (15), (16), (17), (18), (19): Xaa is A or G
  MOD_RES (20), (21), (22), (23): Xaa is A or G or is absent
XVPTRLSNITIQIMXXXXXXXXXIGEMSDMVVESXGXR

SEQ ID NO: 72719 - protein, 37 aa, Artificial Sequence; identical to SEQ ID NO: 19172
  GFR-binding peptide
  MOD_RES (4), (4): Xaa is C or S
  MOD_RES (18), (19), (20), (21), (22): Xaa is A or G
  MOD_RES (23), (24), (25), (26): Xaa is A or G or is absent

SEQ ID NO: 72720 - protein, 33 aa, Artificial Sequence; identical to SEQ ID NO: 52152
  GFR-binding peptide
  MOD_RES (31), (33): Xaa is C or S

SEQ ID NO: 72721 - protein, 42 aa, Artificial Sequence
  GFR-binding peptide
  MOD_RES (6), (7), (41): Xaa is C or S
  MOD_RES (21), (22), (23), (24), (25): Xaa is A or G
  MOD_RES (26), (27), (28), (29): Xaa is A or G or is absent
HVPKPXXAPTKLSNITVQIMXXXXXXXXXIGEMSNMVVRSXG

SEQ ID NO: 72722 - protein, 39 aa, Artificial Sequence; identical to SEQ ID NO: 54571
  GFR-binding peptide
  MOD_RES (6), (7): Xaa is C or S
  MOD_RES (21), (22), (23), (24), (25): Xaa is A or G
  MOD_RES (26), (27), (28), (29): Xaa is A or G or is absent

SEQ ID NO: 72723 - protein, 35 aa, Artificial Sequence
  GFR-binding peptide
  MOD_RES (1), (2): Xaa is C or S
  MOD_RES (16), (17), (18), (19), (20): Xaa is A or G
  MOD_RES (21), (22), (23), (24): Xaa is A or G or is absent
XXTPTKMSNITMQIMXXXXXXXXXLGEMSGMVVDR

SEQ ID NO: 72724 - protein, 33 aa, Artificial Sequence
  GFR-binding peptide
  MOD_RES (32), (32): Xaa is C or S
VPTRLSNITIQIMDSANNVVLGEMSDMVVESXG

SEQ ID NO: 72725 - protein, 40 aa, Artificial Sequence
  GFR-binding peptide
  MOD_RES (6), (7), (40): Xaa is C or S
  MOD_RES (21), (22), (23), (24), (25): Xaa is A or G
  MOD_RES (26), (27), (28), (29): Xaa is A or G or is absent
ASASPXXVSQDLSNITIQIMXXXXXXXXXLGEMSMIVKSX

SEQ ID NO: 72726 - protein, 39 aa, Artificial Sequence; identical to SEQ ID NO: 19175
  GFR-binding peptide
  MOD_RES (37), (39): Xaa is C or S

SEQ ID NO: 72727 - protein, 40 aa, Artificial Sequence; identical to SEQ ID NO: 52166
  GFR-binding peptide
  MOD_RES (2), (3), (37), (39): Xaa is C or S
  MOD_RES (17), (18), (19), (20), (21): Xaa is A or G
  MOD_RES (22), (23), (24), (25): Xaa is A or G or is absent

SEQ ID NO: 72728 - protein, 40 aa, Artificial Sequence
  GFR-binding peptide
  MOD_RES (2), (3), (37), (39): Xaa is C or S
  MOD_RES (17), (18), (19), (20), (21): Xaa is A or G
  MOD_RES (22), (23), (24), (25): Xaa is A or G or is absent
PXXAPTKLSNITVQIMXXXXXXXXXLGEMSNMVVRSXGXH

SEQ ID NO: 72729 - protein, 31 aa, Artificial Sequence; identical to SEQ ID NO: 52167
  GFR-binding peptide
  MOD_RES (1), (1): Xaa is C or S

SEQ ID NO: 72730 - protein, 43 aa, Artificial Sequence; identical to SEQ ID NO: 52169
  GFR-binding peptide
  MOD_RES (5), (6), (40), (42): Xaa is C or S
  MOD_RES (20), (21), (22), (23), (24): Xaa is A or G
  MOD_RES (25), (26), (27), (28): Xaa is A or G or is absent

SEQ ID NO: 72731 - protein, 40 aa, Artificial Sequence; identical to SEQ ID NO: 52170
  GFR-binding peptide
  MOD_RES (3), (4), (37), (39): Xaa is C or S
  MOD_RES (18), (19), (20), (21), (22): Xaa is A or G
  MOD_RES (23), (24), (25), (26): Xaa is A or G or is absent

SEQ ID NO: 72732 - protein, 32 aa, Artificial Sequence
  GFR-binding peptide
  MOD_RES (1), (2): Xaa is C or S
XXAPVKTSNITMQIMDNGRVLLLGEMSMIVEE

SEQ ID NO: 72733 - protein, 38 aa, Artificial Sequence; identical to SEQ ID NO: 19178
  GFR-binding peptide
  MOD_RES (4), (38): Xaa is C or S
  MOD_RES (18), (19), (20), (21), (22): Xaa is A or G
  MOD_RES (23), (24), (25), (26): Xaa is A or G or is absent

SEQ ID NO: 72734 - protein, 37 aa, Artificial Sequence
  GFR-binding peptide
  MOD_RES (4), (5): Xaa is C or S
  MOD_RES (19), (20), (21), (22), (23): Xaa is A or G
  MOD_RES (24), (25), (26), (27): Xaa is A or G or is absent
PSTXXAPVKTSNITMQIMXXXXXXXXXIGEMSMIVEE

SEQ ID NO: 72735 - protein, 37 aa, Artificial Sequence; identical to SEQ ID NO: 19179
  GFR-binding peptide
  MOD_RES (5), (5): Xaa is C or S

SEQ ID NO: 72736 - protein, 34 aa, Artificial Sequence
  GFR-binding peptide
  MOD_RES (31), (33): Xaa is C or S
VPQALSNITIQIMVGRKPKVLGEMSMIVRSXKXS

SEQ ID NO: 72737 - protein, 38 aa, Artificial Sequence; identical to SEQ ID NO: 19181
  GFR-binding peptide
  MOD_RES (37), (37): Xaa is C or S
  MOD_RES (16), (17), (18), (19), (20): Xaa is A or G
  MOD_RES (21), (22), (23), (24): Xaa is A or G or is absent

SEQ ID NO: 72738 - protein, 35 aa, Artificial Sequence; identical to SEQ ID NO: 19182
  GFR-binding peptide
  MOD_RES (35), (35): Xaa is C or S
  MOD_RES (14), (15), (16), (17), (18): Xaa is A or G
  MOD_RES (19), (20), (21), (22): Xaa is A or G or is absent

SEQ ID NO: 72739 - protein, 33 aa, Artificial Sequence
  GFR-binding peptide
  MOD_RES (2), (3): Xaa is C or S
PXXAPTKLSNITVQIMDDSSNVILGEMSNMVVR

SEQ ID NO: 72740 - protein, 43 aa, Artificial Sequence
  GFR-binding peptide
  MOD_RES (5), (6), (40), (42): Xaa is C or S
  MOD_RES (20), (21), (22), (23), (24): Xaa is A or G
  MOD_RES (25), (26), (27), (28): Xaa is A or G or is absent
VPKPXXAPTKLSNITVQIMXXXXXXXXXLGEMSNMVVRSXGXH

SEQ ID NO: 72741 - protein, 33 aa, Artificial Sequence
  GFR-binding peptide
  MOD_RES (1), (1): Xaa is C or S
  MOD_RES (15), (16), (17), (18), (19): Xaa is A or G
  MOD_RES (20), (21), (22), (23): Xaa is A or G or is absent
XVPARLSNITIQIMXXXXXXXXXLGEMSDMVVE

SEQ ID NO: 72742 - protein, 42 aa, Artificial Sequence; identical to SEQ ID NO: 54585
  GFR-binding peptide
  MOD_RES (5), (6), (39), (41): Xaa is C or S
  MOD_RES (20), (21), (22), (23), (24): Xaa is A or G
  MOD_RES (25), (26), (27), (28): Xaa is A or G or is absent

SEQ ID NO: 72743 - protein, 36 aa, Artificial Sequence; identical to SEQ ID NO: 54590
  GFR-binding peptide
  MOD_RES (2), (3), (34), (36): Xaa is C or S

SEQ ID NO: 72744 - protein, 38 aa, Artificial Sequence
  GFR-binding peptide
  MOD_RES (2), (3), (37): Xaa is C or S
  MOD_RES (17), (18), (19), (20), (21): Xaa is A or G
  MOD_RES (22), (23), (24), (25): Xaa is A or G or is absent
PXXAPTKLSNITVQIMXXXXXXXXXLGEMSNMVVRSXG

SEQ ID NO: 72745 - protein, 41 aa, Artificial Sequence; identical to SEQ ID NO: 19187
  GFR-binding peptide
  MOD_RES (5), (5): Xaa is C or S

SEQ ID NO: 72746 - protein, 40 aa, Artificial Sequence
  GFR-binding peptide
  MOD_RES (6), (7), (39): Xaa is C or S
HVPKPXXAPTKLSNITVQIMDDSSNVIIGEMSNMVVRSXG

SEQ ID NO: 72747 - protein, 33 aa, Artificial Sequence; identical to SEQ ID NO: 54594
  GFR-binding peptide
  MOD_RES (2), (3): Xaa is C or S

SEQ ID NO: 72748 - protein, 40 aa, Artificial Sequence
  GFR-binding peptide
  MOD_RES (4), (5), (39): Xaa is C or S
  MOD_RES (19), (20), (21), (22), (23): Xaa is A or G
  MOD_RES (24), (25), (26), (27): Xaa is A or G or is absent
PPTXXVPTRLSNITIQIMXXXXXXXXXLGEMSDMVVESXG

SEQ ID NO: 72749 - protein, 41 aa, Artificial Sequence; identical to SEQ ID NO: 54599
  GFR-binding peptide
  MOD_RES (5), (6), (39), (41): Xaa is C or S
  MOD_RES (20), (21), (22), (23), (24): Xaa is A or G
  MOD_RES (25), (26), (27), (28): Xaa is A or G or is absent

SEQ ID NO: 72750 - protein, 36 aa, Artificial Sequence; identical to SEQ ID NO: 19190
  GFR-binding peptide
  MOD_RES (35), (35): Xaa is C or S
  MOD_RES (14), (15), (16), (17), (18): Xaa is A or G
  MOD_RES (19), (20), (21), (22): Xaa is A or G or is absent

SEQ ID NO: 72751 - protein, 36 aa, Artificial Sequence; identical to SEQ ID NO: 19191
  GFR-binding peptide
  MOD_RES (35), (35): Xaa is C or S

SEQ ID NO: 72752 - protein, 32 aa, Artificial Sequence; identical to SEQ ID NO: 19192
  GFR-binding peptide
  MOD_RES (14), (15), (16), (17), (18): Xaa is A or G
  MOD_RES (19), (20), (21), (22): Xaa is A or G or is absent

SEQ ID NO: 72753 - protein, 39 aa, Artificial Sequence; identical to SEQ ID NO: 19193
  GFR-binding peptide
  MOD_RES (1), (38): Xaa is C or S
  MOD_RES (17), (18), (19), (20), (21): Xaa is A or G
  MOD_RES (22), (23), (24), (25): Xaa is A or G or is absent

SEQ ID NO: 72754 - protein, 38 aa, Artificial Sequence
  GFR-binding peptide
  MOD_RES (5), (6): Xaa is C or S
  MOD_RES (20), (21), (22), (23), (24): Xaa is A or G
  MOD_RES (25), (26), (27), (28): Xaa is A or G or is absent
VPSTXXAPVKTSNITMQIMXXXXXXXXXLGEMSMIVEE

SEQ ID NO: 72755 - protein, 34 aa, Artificial Sequence
  GFR-binding peptide
  MOD_RES (1), (1): Xaa is C or S
  MOD_RES (15), (16), (17), (18), (19): Xaa is A or G
  MOD_RES (20), (21), (22), (23): Xaa is A or G or is absent
XVPARLSNITIQIMXXXXXXXXXIGEMSDMVVEA

SEQ ID NO: 72756 - protein, 38 aa, Artificial Sequence; identical to SEQ ID NO: 19195
  GFR-binding peptide
  MOD_RES (4), (4): Xaa is C or S

SEQ ID NO: 72757 - protein, 40 aa, Artificial Sequence; identical to SEQ ID NO: 19196
  GFR-binding peptide
  MOD_RES (5), (5): Xaa is C or S
  MOD_RES (21), (22), (23), (24), (25): Xaa is A or G
  MOD_RES (26), (27), (28), (29): Xaa is A or G or is absent

SEQ ID NO: 72758 - protein, 33 aa, Artificial Sequence
  GFR-binding peptide
  MOD_RES (31), (33): Xaa is C or S
VPQALSNITIQIMVGRKPKVLGEMSMIVRSXKX

SEQ ID NO: 72759 - protein, 42 aa, Artificial Sequence
  GFR-binding peptide
  MOD_RES (6), (7), (39), (41): Xaa is C or S
HVPKPXXAPTKLSNITVQIMDDSSNVILGEMSNMVVRSXGXH

SEQ ID NO: 72760 - protein, 33 aa, Artificial Sequence
  GFR-binding peptide
  MOD_RES (31), (33): Xaa is C or S
VSQDLSNITIQIMIGKTPKILGEMSMIVKSXKX

SEQ ID NO: 72761 - protein, 37 aa, Artificial Sequence
  GFR-binding peptide
  MOD_RES (1), (35), (37): Xaa is C or S
  MOD_RES (15), (16), (17), (18), (19): Xaa is A or G
  MOD_RES (20), (21), (22), (23): Xaa is A or G or is absent
XVPTRLSNITIQIMXXXXXXXXXIGEMSDMVVESXGX

SEQ ID NO: 72762 - protein, 32 aa, Artificial Sequence; identical to SEQ ID NO: 19197
  GFR-binding peptide

SEQ ID NO: 72763 - protein, 40 aa, Artificial Sequence; identical to SEQ ID NO: 19198
  GFR-binding peptide
  MOD_RES (5), (39): Xaa is C or S
  MOD_RES (19), (20), (21), (22), (23): Xaa is A or G
  MOD_RES (24), (25), (26), (27): Xaa is A or G or is absent

SEQ ID NO: 72764 - protein, 39 aa, Artificial Sequence
  GFR-binding peptide
  MOD_RES (6), (7), (38): Xaa is C or S
ASAAPXXVPQALSNITIQIMVGRKPKVLGEMSMIVRSXK

SEQ ID NO: 72765 - protein, 38 aa, Artificial Sequence
  GFR-binding peptide
  MOD_RES (5), (6), (38): Xaa is C or S
APASXXVPARLSNITIQIMDAANNVVIGEMSDMVVEAX

SEQ ID NO: 72766 - protein, 35 aa, Artificial Sequence
  GFR-binding peptide
  MOD_RES (33), (35): Xaa is C or S
  MOD_RES (14), (15), (16), (17), (18): Xaa is A or G
  MOD_RES (19), (20), (21), (22): Xaa is A or G or is absent
VPQALSNITIQIMXXXXXXXXXLGEMSMIVRSXKX

SEQ ID NO: 72767 - protein, 37 aa, Artificial Sequence
  GFR-binding peptide
  MOD_RES (2), (3), (36): Xaa is C or S
  MOD_RES (17), (18), (19), (20), (21): Xaa is A or G
  MOD_RES (22), (23), (24), (25): Xaa is A or G or is absent
TXXAPVKTSNITMQIMXXXXXXXXXLGEMSMIVEEXG

SEQ ID NO: 72768 - protein, 39 aa, Artificial Sequence; identical to SEQ ID NO: 19199
  GFR-binding peptide
  MOD_RES (7), (7): Xaa is C or S

SEQ ID NO: 72769 - protein, 32 aa, Artificial Sequence
  GFR-binding peptide
  MOD_RES (31), (31): Xaa is C or S
VPQALSNITIQIMVGRKPKVLGEMSMIVRSXK

SEQ ID NO: 72770 - protein, 34 aa, Artificial Sequence; identical to SEQ ID NO: 52198
  GFR-binding peptide
  MOD_RES (1), (2), (34): Xaa is C or S

SEQ ID NO: 72771 - protein, 42 aa, Artificial Sequence; identical to SEQ ID NO: 19200
  GFR-binding peptide
  MOD_RES (5), (39), (41): Xaa is C or S
  MOD_RES (19), (20), (21), (22), (23): Xaa is A or G
  MOD_RES (24), (25), (26), (27): Xaa is A or G or is absent

SEQ ID NO: 72772 - protein, 42 aa, Artificial Sequence
  GFR-binding peptide
  MOD_RES (4), (5), (39), (41): Xaa is C or S
  MOD_RES (19), (20), (21), (22), (23): Xaa is A or G
  MOD_RES (24), (25), (26), (27): Xaa is A or G or is absent
PASXXVPARLSNITIQIMXXXXXXXXXLGEMSDMVVEAXGXR

SEQ ID NO: 72773 - protein, 31 aa, Artificial Sequence
  GFR-binding peptide
  MOD_RES (1), (1): Xaa is C or S
XVPQALSNITIQIMVGRKPKVLGEMSMIVRS

SEQ ID NO: 72774 - protein, 37 aa, Artificial Sequence; identical to SEQ ID NO: 54614
  GFR-binding peptide
  MOD_RES (6), (7): Xaa is C or S

SEQ ID NO: 72775 - protein, 35 aa, Artificial Sequence
  GFR-binding peptide
  MOD_RES (34), (34): Xaa is C or S
  MOD_RES (14), (15), (16), (17), (18): Xaa is A or G
  MOD_RES (19), (20), (21), (22): Xaa is A or G or is absent
VPTRLSNITIQIMXXXXXXXXXLGEMSDMVVESXG

SEQ ID NO: 72776 - protein, 34 aa, Artificial Sequence
  GFR-binding peptide
  MOD_RES (1), (34): Xaa is C or S
  MOD_RES (15), (16), (17), (18), (19): Xaa is A or G
  MOD_RES (20), (21), (22), (23): Xaa is A or G or is absent
XAPVKTSNITMQIMXXXXXXXXXLGEMSMIVEEX

SEQ ID NO: 72777 - protein, 34 aa, Artificial Sequence
  GFR-binding peptide
  MOD_RES (2), (3): Xaa is C or S
SXXVPARLSNITIQIMDAANNVVLGEMSDMVVEA

SEQ ID NO: 72778 - protein, 31 aa, Artificial Sequence
  GFR-binding peptide
TPTKMSNITMQIMNDKQQIIIGEMSGMVVDR

SEQ ID NO: 72779 - protein, 39 aa, Artificial Sequence
  GFR-binding peptide
  MOD_RES (3), (4), (36), (38): Xaa is C or S
ASXXVPARLSNITIQIMDAANNVVLGEMSDMVVEAXGXR

SEQ ID NO: 72780 - protein, 40 aa, Artificial Sequence
  GFR-binding peptide
  MOD_RES (6), (7), (39): Xaa is C or S
STPPTXXVPTRLSNITIQIMDSANNVVIGEMSDMVVESXG

SEQ ID NO: 72781 - protein, 37 aa, Artificial Sequence
  GFR-binding peptide
  MOD_RES (4), (5), (37): Xaa is C or S
PPTXXVPTRLSNITIQIMDSANNVVLGEMSDMVVESX

SEQ ID NO: 72782 - protein, 35 aa, Artificial Sequence
  GFR-binding peptide
  MOD_RES (3), (4): Xaa is C or S
GPXXTPTKMSNITMQIMNDKQQIILGEMSGMVVDR

SEQ ID NO: 72783 - protein, 36 aa, Artificial Sequence; identical to SEQ ID NO: 19206
  GFR-binding peptide
  MOD_RES (36), (36): Xaa is C or S
  MOD_RES (15), (16), (17), (18), (19): Xaa is A or G
  MOD_RES (20), (21), (22), (23): Xaa is A or G or is absent

SEQ ID NO: 72784 - protein, 39 aa, Artificial Sequence; identical to SEQ ID NO: 19208
  GFR-binding peptide
  MOD_RES (2), (39): Xaa is C or S
  MOD_RES (18), (19), (20), (21), (22): Xaa is A or G
  MOD_RES (23), (24), (25), (26): Xaa is A or G or is absent

SEQ ID NO: 72785 - protein, 38 aa, Artificial Sequence; identical to SEQ ID NO: 19209
  GFR-binding peptide
  MOD_RES (3), (37): Xaa is C or S
  MOD_RES (17), (18), (19), (20), (21): Xaa is A or G
  MOD_RES (22), (23), (24), (25): Xaa is A or G or is absent

SEQ ID NO: 72786 - protein, 36 aa, Artificial Sequence
  GFR-binding peptide
  MOD_RES (2), (3), (34), (36): Xaa is C or S
TXXAPVKTSNITMQIMDNGRVLLIGEMSMIVEEXGX

SEQ ID NO: 72787 - protein, 41 aa, Artificial Sequence; identical to SEQ ID NO: 19210
  GFR-binding peptide
  MOD_RES (7), (41): Xaa is C or S

SEQ ID NO: 72788 - protein, 38 aa, Artificial Sequence
  GFR-binding peptide
  MOD_RES (6), (7): Xaa is C or S
GSAGPXXTPTKMSNITMQIMNDKQQIIIGEMSGMVVDR

SEQ ID NO: 72789 - protein, 41 aa, Artificial Sequence; identical to SEQ ID NO: 19212
  GFR-binding peptide
  MOD_RES (6), (40): Xaa is C or S
  MOD_RES (20), (21), (22), (23), (24): Xaa is A or G
  MOD_RES (25), (26), (27), (28): Xaa is A or G or is absent

SEQ ID NO: 72790 - protein, 41 aa, Artificial Sequence; identical to SEQ ID NO: 54627
  GFR-binding peptide
  MOD_RES (6), (7), (40): Xaa is C or S
  MOD_RES (21), (22), (23), (24), (25): Xaa is A or G
  MOD_RES (26), (27), (28), (29): Xaa is A or G or is absent

SEQ ID NO: 72791 - protein, 36 aa, Artificial Sequence; identical to SEQ ID NO: 54628
  GFR-binding peptide
  MOD_RES (1), (2), (35): Xaa is C or S
  MOD_RES (16), (17), (18), (19), (20): Xaa is A or G
  MOD_RES (21), (22), (23), (24): Xaa is A or G or is absent

SEQ ID NO: 72792 - protein, 39 aa, Artificial Sequence; identical to SEQ ID NO: 19213
  GFR-binding peptide
  MOD_RES (5), (39): Xaa is C or S
  MOD_RES (19), (20), (21), (22), (23): Xaa is A or G
  MOD_RES (24), (25), (26), (27): Xaa is A or G or is absent

SEQ ID NO: 72793 - protein, 37 aa, Artificial Sequence
  GFR-binding peptide
  MOD_RES (1), (2), (34), (36): Xaa is C or S
XXVPARLSNITIQIMDAANNVVIGEMSDMVVEAXGXR

SEQ ID NO: 72794 - protein, 37 aa, Artificial Sequence; identical to SEQ ID NO: 19214
  GFR-binding peptide
  MOD_RES (3), (3): Xaa is C or S
  MOD_RES (19), (20), (21), (22), (23): Xaa is A or G
  MOD_RES (24), (25), (26), (27): Xaa is A or G or is absent

SEQ ID NO: 72795 - protein, 37 aa, Artificial Sequence; identical to SEQ ID NO: 19216
  GFR-binding peptide
  MOD_RES (35), (37): Xaa is C or S

SEQ ID NO: 72796 - protein, 37 aa, Artificial Sequence; identical to SEQ ID NO: 19217
  GFR-binding peptide
  MOD_RES (5), (5): Xaa is C or S

SEQ ID NO: 72797 - protein, 37 aa, Artificial Sequence
  GFR-binding peptide
  MOD_RES (1), (2), (34), (36): Xaa is C or S
XXVPARLSNITIQIMDAANNVVLGEMSDMVVEAXGXR

SEQ ID NO: 72798 - protein, 35 aa, Artificial Sequence
  GFR-binding peptide
  MOD_RES (2), (3), (35): Xaa is C or S
SXXVPARLSNITIQIMDAANNVVIGEMSDMVVEAX

SEQ ID NO: 72799 - protein, 34 aa, Artificial Sequence; identical to SEQ ID NO: 19218
  GFR-binding peptide
  MOD_RES (14), (15), (16), (17), (18): Xaa is A or G
  MOD_RES (19), (20), (21), (22): Xaa is A or G or is absent

SEQ ID NO: 72800 - protein, 38 aa, Artificial Sequence
  GFR-binding peptide
  MOD_RES (1), (2), (35), (37): Xaa is C or S
  MOD_RES (16), (17), (18), (19), (20): Xaa is A or G
  MOD_RES (21), (22), (23), (24): Xaa is A or G or is absent
XXAPVKTSNITMQIMXXXXXXXXXLGEMSMIVEEXGXL

SEQ ID NO: 72801 - protein, 36 aa, Artificial Sequence
  GFR-binding peptide
  MOD_RES (4), (5), (36): Xaa is C or S
PSTXXAPVKTSNITMQIMDNGRVLLLGEMSMIVEEX

SEQ ID NO: 72802 - protein, 40 aa, Artificial Sequence
  GFR-binding peptide
  MOD_RES (5), (6), (40): Xaa is C or S
  MOD_RES (20), (21), (22), (23), (24): Xaa is A or G
  MOD_RES (25), (26), (27), (28): Xaa is A or G or is absent
SAGPXXTPTKMSNITMQIMXXXXXXXXXLGEMSGMVVDRX

SEQ ID NO: 72803 - protein, 42 aa, Artificial Sequence
  GFR-binding peptide
  MOD_RES (6), (7), (40), (42): Xaa is C or S
  MOD_RES (21), (22), (23), (24), (25): Xaa is A or G
  MOD_RES (26), (27), (28), (29): Xaa is A or G or is absent
ASAAPXXVPQALSNITIQIMXXXXXXXXXLGEMSMIVRSXKX

SEQ ID NO: 72804 - protein, 35 aa, Artificial Sequence
  GFR-binding peptide
  MOD_RES (2), (3), (35): Xaa is C or S
TXXVPTRLSNITIQIMDSANNVVLGEMSDMVVESX

SEQ ID NO: 72805 - protein, 43 aa, Artificial Sequence; identical to SEQ ID NO: 19222
  GFR-binding peptide
  MOD_RES (6), (40), (42): Xaa is C or S

SEQ ID NO: 72806 - protein, 36 aa, Artificial Sequence; identical to SEQ ID NO: 19223
  GFR-binding peptide
  MOD_RES (35), (35): Xaa is C or S

SEQ ID NO: 72807 - protein, 39 aa, Artificial Sequence; identical to SEQ ID NO: 19226
  GFR-binding peptide
  MOD_RES (4), (4): Xaa is C or S
  MOD_RES (20), (21), (22), (23), (24): Xaa is A or G
  MOD_RES (25), (26), (27), (28): Xaa is A or G or is absent

SEQ ID NO: 72808 - protein, 39 aa, Artificial Sequence; identical to SEQ ID NO: 19227
  GFR-binding peptide
  MOD_RES (37), (39): Xaa is C or S
  MOD_RES (16), (17), (18), (19), (20): Xaa is A or G
  MOD_RES (21), (22), (23), (24): Xaa is A or G or is absent

SEQ ID NO: 72809 - protein, 32 aa, Artificial Sequence; identical to SEQ ID NO: 19228
  GFR-binding peptide

SEQ ID NO: 72810 - protein, 37 aa, Artificial Sequence
  GFR-binding peptide
  MOD_RES (6), (7): Xaa is C or S
ASASPXXVPQDLSNITIQIMVGRTPKVLGEMSMVVKS

SEQ ID NO: 72811 - protein, 41 aa, Artificial Sequence; identical to SEQ ID NO: 19230
  GFR-binding peptide
  MOD_RES (2), (39), (41): Xaa is C or S
  MOD_RES (18), (19), (20), (21), (22): Xaa is A or G
  MOD_RES (23), (24), (25), (26): Xaa is A or G or is absent

SEQ ID NO: 72812 - protein, 35 aa, Artificial Sequence; identical to SEQ ID NO: 19231
  GFR-binding peptide
  MOD_RES (15), (16), (17), (18), (19): Xaa is A or G
  MOD_RES (20), (21), (22), (23): Xaa is A or G or is absent

SEQ ID NO: 72813 - protein, 35 aa, Artificial Sequence
  GFR-binding peptide
  MOD_RES (1), (2), (34): Xaa is C or S
XXTPTKMSNITMQIMNDKQQIIIGEMSGMVVDRXG

SEQ ID NO: 72814 - protein, 38 aa, Artificial Sequence; identical to SEQ ID NO: 19232
  GFR-binding peptide
  MOD_RES (2), (2): Xaa is C or S

SEQ ID NO: 72815 - protein, 39 aa, Artificial Sequence; identical to SEQ ID NO: 19233
  GFR-binding peptide
  MOD_RES (4), (38): Xaa is C or S
  MOD_RES (18), (19), (20), (21), (22): Xaa is A or G
  MOD_RES (23), (24), (25), (26): Xaa is A or G or is absent

SEQ ID NO: 72816 - protein, 39 aa, Artificial Sequence; identical to SEQ ID NO: 19234
  GFR-binding peptide
  MOD_RES (5), (39): Xaa is C or S

SEQ ID NO: 72817 - protein, 33 aa, Artificial Sequence; identical to SEQ ID NO: 19236
  GFR-binding peptide
  MOD_RES (1), (1): Xaa is C or S
  MOD_RES (15), (16), (17), (18), (19): Xaa is A or G
  MOD_RES (20), (21), (22), (23): Xaa is A or G or is absent

SEQ ID NO: 72818 - protein, 36 aa, Artificial Sequence
  GFR-binding peptide
  MOD_RES (2), (3), (34), (36): Xaa is C or S
TXXAPVKTSNITMQIMDNGRVLLLGEMSMIVEEXGX

SEQ ID NO: 72819 - protein, 40 aa, Artificial Sequence
  GFR-binding peptide
  MOD_RES (6), (7), (38), (40): Xaa is C or S
ASASPXXVPQDLSNITIQIMVGRTPKVLGEMSMVVKSXKX

SEQ ID NO: 72820 - protein, 32 aa, Artificial Sequence; identical to SEQ ID NO: 19238
  GFR-binding peptide
  MOD_RES (14), (15), (16), (17), (18): Xaa is A or G
  MOD_RES (19), (20), (21), (22): Xaa is A or G or is absent

SEQ ID NO: 72821 - protein, 39 aa, Artificial Sequence
  GFR-binding peptide
  MOD_RES (4), (5), (37), (39): Xaa is C or S
AGPXXTPTKMSNITMQIMNDKQQIILGEMSGMVVDRXGX

SEQ ID NO: 72822 - protein, 39 aa, Artificial Sequence; identical to SEQ ID NO: 19241
  GFR-binding peptide
  MOD_RES (5), (5): Xaa is C or S
  MOD_RES (21), (22), (23), (24), (25): Xaa is A or G
  MOD_RES (26), (27), (28), (29): Xaa is A or G or is absent

SEQ ID NO: 72823 - protein, 37 aa, Artificial Sequence; identical to SEQ ID NO: 19242
  GFR-binding peptide
  MOD_RES (35), (37): Xaa is C or S

SEQ ID NO: 72824 - protein, 34 aa, Artificial Sequence
  GFR-binding peptide
  MOD_RES (2), (3), (34): Xaa is C or S
PXXVSQDLSNITIQIMIGKTPKILGEMSMIVKSX

SEQ ID NO: 72825 - protein, 35 aa, Artificial Sequence; identical to SEQ ID NO: 19245
  GFR-binding peptide
  MOD_RES (1), (1): Xaa is C or S
  MOD_RES (17), (18), (19), (20), (21): Xaa is A or G
  MOD_RES (22), (23), (24), (25): Xaa is A or G or is absent

SEQ ID NO: 72826 - protein, 34 aa, Artificial Sequence; identical to SEQ ID NO: 54661
  GFR-binding peptide
  MOD_RES (33), (33): Xaa is C or S
  MOD_RES (14), (15), (16), (17), (18): Xaa is A or G
  MOD_RES (19), (20), (21), (22): Xaa is A or G or is absent

SEQ ID NO: 72827 - protein, 35 aa, Artificial Sequence; identical to SEQ ID NO: 19247
  GFR-binding peptide
  MOD_RES (1), (1): Xaa is C or S
  MOD_RES (17), (18), (19), (20), (21): Xaa is A or G
  MOD_RES (22), (23), (24), (25): Xaa is A or G or is absent

SEQ ID NO: 72828 - protein, 38 aa, Artificial Sequence
  GFR-binding peptide
  MOD_RES (1), (2), (36), (38): Xaa is C or S
  MOD_RES (16), (17), (18), (19), (20): Xaa is A or G
  MOD_RES (21), (22), (23), (24): Xaa is A or G or is absent
XXTPTKMSNITMQIMXXXXXXXXXLGEMSGMVVDRXGX

SEQ ID NO: 72829 - protein, 33 aa, Artificial Sequence
  GFR-binding peptide
  MOD_RES (2), (3): Xaa is C or S
PXXVSQDLSNITIQIMIGKTPKILGEMSMIVKS

SEQ ID NO: 72830 - protein, 38 aa, Artificial Sequence; identical to SEQ ID NO: 19250
  GFR-binding peptide
  MOD_RES (2), (36), (38): Xaa is C or S

SEQ ID NO: 72831 - protein, 39 aa, Artificial Sequence
  GFR-binding peptide
  MOD_RES (4), (5), (38): Xaa is C or S
  MOD_RES (19), (20), (21), (22), (23): Xaa is A or G
  MOD_RES (24), (25), (26), (27): Xaa is A or G or is absent
PSTXXAPVKTSNITMQIMXXXXXXXXXLGEMSMIVEEXG

SEQ ID NO: 72832 - protein, 37 aa, Artificial Sequence
  GFR-binding peptide
  MOD_RES (3), (4): Xaa is C or S
  MOD_RES (18), (19), (20), (21), (22): Xaa is A or G
  MOD_RES (23), (24), (25), (26): Xaa is A or G or is absent
PTXXVPTRLSNITIQIMXXXXXXXXXIGEMSDMVVES

SEQ ID NO: 72833 - protein, 39 aa, Artificial Sequence; identical to SEQ ID NO: 54666
  GFR-binding peptide
  MOD_RES (5), (6), (37), (39): Xaa is C or S

SEQ ID NO: 72834 - protein, 39 aa, Artificial Sequence
  GFR-binding peptide
  MOD_RES (5), (6): Xaa is C or S
  MOD_RES (20), (21), (22), (23), (24): Xaa is A or G
  MOD_RES (25), (26), (27), (28): Xaa is A or G or is absent
TPPTXXVPTRLSNITIQIMXXXXXXXXXIGEMSDMVVES

SEQ ID NO: 72835 - protein, 36 aa, Artificial Sequence; identical to SEQ ID NO: 52270
  GFR-binding peptide
  MOD_RES (1), (34), (36): Xaa is C or S
  MOD_RES (15), (16), (17), (18), (19): Xaa is A or G
  MOD_RES (20), (21), (22), (23): Xaa is A or G or is absent

SEQ ID NO: 72836 - protein, 45 aa, Artificial Sequence; identical to SEQ ID NO: 19256
  GFR-binding peptide
  MOD_RES (5), (42), (44): Xaa is C or S
  MOD_RES (21), (22), (23), (24), (25): Xaa is A or G
  MOD_RES (26), (27), (28), (29): Xaa is A or G or is absent

SEQ ID NO: 72837 - protein, 39 aa, Artificial Sequence
  GFR-binding peptide
  MOD_RES (4), (5), (38): Xaa is C or S
  MOD_RES (19), (20), (21), (22), (23): Xaa is A or G
  MOD_RES (24), (25), (26), (27): Xaa is A or G or is absent
PSTXXAPVKTSNITMQIMXXXXXXXXXIGEMSMIVEEXG

SEQ ID NO: 72838 - protein, 39 aa, Artificial Sequence
  GFR-binding peptide
  MOD_RES (5), (6): Xaa is C or S
  MOD_RES (20), (21), (22), (23), (24): Xaa is A or G
  MOD_RES (25), (26), (27), (28): Xaa is A or G or is absent
VPKPXXAPTKLSNITVQIMXXXXXXXXXLGEMSNMVVRS

SEQ ID NO: 72839 - protein, 32 aa, Artificial Sequence; identical to SEQ ID NO: 19257
  GFR-binding peptide

SEQ ID NO: 72840 - protein, 35 aa, Artificial Sequence
  GFR-binding peptide
  MOD_RES (2), (3): Xaa is C or S
  MOD_RES (17), (18), (19), (20), (21): Xaa is A or G
  MOD_RES (22), (23), (24), (25): Xaa is A or G or is absent
PXXVPQALSNITIQIMXXXXXXXXXLGEMSMIVRS

SEQ ID NO: 72841 - protein, 38 aa, Artificial Sequence; identical to SEQ ID NO: 54676
  GFR-binding peptide
  MOD_RES (5), (6), (38): Xaa is C or S

SEQ ID NO: 72842 - protein, 34 aa, Artificial Sequence
  GFR-binding peptide
  MOD_RES (32), (34): Xaa is C or S
VPARLSNITIQIMDAANNVVLGEMSDMVVEAXGX

SEQ ID NO: 72843 - protein, 37 aa, Artificial Sequence
  GFR-binding peptide
  MOD_RES (4), (5), (36): Xaa is C or S
PSTXXAPVKTSNITMQIMDNGRVLLLGEMSMIVEEXG

SEQ ID NO: 72844 - protein, 32 aa, Artificial Sequence; identical to SEQ ID NO: 19260
  GFR-binding peptide

SEQ ID NO: 72845 - protein, 37 aa, Artificial Sequence; identical to SEQ ID NO: 19261
  GFR-binding peptide
  MOD_RES (1), (1): Xaa is C or S
  MOD_RES (17), (18), (19), (20), (21): Xaa is A or G
  MOD_RES (22), (23), (24), (25): Xaa is A or G or is absent

SEQ ID NO: 72846 - protein, 35 aa, Artificial Sequence; identical to SEQ ID NO: 19262
  GFR-binding peptide

SEQ ID NO: 72847 - protein, 39 aa, Artificial Sequence
  GFR-binding peptide
  MOD_RES (2), (3), (37), (39): Xaa is C or S
  MOD_RES (17), (18), (19), (20), (21): Xaa is A or G
  MOD_RES (22), (23), (24), (25): Xaa is A or G or is absent
PXXTPTKMSNITMQIMXXXXXXXXXLGEMSGMVVDRXGX

SEQ ID NO: 72848 - protein, 41 aa, Artificial Sequence; identical to SEQ ID NO: 19265
  GFR-binding peptide
  MOD_RES (1), (38), (40): Xaa is C or S
  MOD_RES (17), (18), (19), (20), (21): Xaa is A or G
  MOD_RES (22), (23), (24), (25): Xaa is A or G or is absent

SEQ ID NO: 72849 - protein, 36 aa, Artificial Sequence
  GFR-binding peptide
  MOD_RES (2), (3), (36): Xaa is C or S
  MOD_RES (17), (18), (19), (20), (21): Xaa is A or G
  MOD_RES (22), (23), (24), (25): Xaa is A or G or is absent
PXXVPQALSNITIQIMXXXXXXXXXLGEMSMIVRSX

SEQ ID NO: 72850 - protein, 41 aa, Artificial Sequence
  GFR-binding peptide
  MOD_RES (5), (6), (38), (40): Xaa is C or S
APASXXVPARLSNITIQIMDAANNVVLGEMSDMVVEAXGXR

SEQ ID NO: 72851 - protein, 43 aa, Artificial Sequence; identical to SEQ ID NO: 19266
  GFR-binding peptide
  MOD_RES (6), (40), (42): Xaa is C or S
  MOD_RES (20), (21), (22), (23), (24): Xaa is A or G
  MOD_RES (25), (26), (27), (28): Xaa is A or G or is absent

SEQ ID NO: 72852 - protein, 40 aa, Artificial Sequence; identical to SEQ ID NO: 19267
  GFR-binding peptide
  MOD_RES (2), (39): Xaa is C or S

SEQ ID NO: 72853 - protein, 32 aa, Artificial Sequence; identical to SEQ ID NO: 19268
  GFR-binding peptide
  MOD_RES (14), (15), (16), (17), (18): Xaa is A or G
  MOD_RES (19), (20), (21), (22): Xaa is A or G or is absent

SEQ ID NO: 72854 - protein, 35 aa, Artificial Sequence
  GFR-binding peptide
  MOD_RES (3), (4): Xaa is C or S
ASXXVPARLSNITIQIMDAANNVVLGEMSDMVVEA

SEQ ID NO: 72855 - protein, 35 aa, Artificial Sequence; identical to SEQ ID NO: 19269
  GFR-binding peptide
  MOD_RES (15), (16), (17), (18), (19): Xaa is A or G
  MOD_RES (20), (21), (22), (23): Xaa is A or G or is absent

SEQ ID NO: 72856 - protein, 37 aa, Artificial Sequence; identical to SEQ ID NO: 19270
  GFR-binding peptide
  MOD_RES (34), (36): Xaa is C or S

SEQ ID NO: 72857 - protein, 33 aa, Artificial Sequence; identical to SEQ ID NO: 52307
  GFR-binding peptide
  MOD_RES (31), (33): Xaa is C or S

SEQ ID NO: 72858 - protein, 38 aa, Artificial Sequence; identical to SEQ ID NO: 19272
  GFR-binding peptide
  MOD_RES (36), (38): Xaa is C or S
  MOD_RES (15), (16), (17), (18), (19): Xaa is A or G
  MOD_RES (20), (21), (22), (23): Xaa is A or G or is absent

SEQ ID NO: 72859 - protein, 37 aa, Artificial Sequence; identical to SEQ ID NO: 19274
  GFR-binding peptide
  MOD_RES (2), (36): Xaa is C or S
  MOD_RES (16), (17), (18), (19), (20): Xaa is A or G
  MOD_RES (21), (22), (23), (24): Xaa is A or G or is absent

SEQ ID NO: 72860 - protein, 37 aa, Artificial Sequence; identical to SEQ ID NO: 54704
  GFR-binding peptide
  MOD_RES (1), (2), (34), (36): Xaa is C or S

SEQ ID NO: 72861 - protein, 35 aa, Artificial Sequence; identical to SEQ ID NO: 52316
  GFR-binding peptide
  MOD_RES (1), (33), (35): Xaa is C or S

SEQ ID NO: 72862 - protein, 43 aa, Artificial Sequence; identical to SEQ ID NO: 19275
  GFR-binding peptide
  MOD_RES (5), (42): Xaa is C or S
  MOD_RES (21), (22), (23), (24), (25): Xaa is A or G
  MOD_RES (26), (27), (28), (29): Xaa is A or G or is absent

SEQ ID NO: 72863 - protein, 35 aa, Artificial Sequence
  GFR-binding peptide
  MOD_RES (2), (3), (34): Xaa is C or S
PXXVPQALSNITIQIMVGRKPKVLGEMSMIVRSXK

SEQ ID NO: 72864 - protein, 38 aa, Artificial Sequence
  GFR-binding peptide
  MOD_RES (1), (35), (37): Xaa is C or S
  MOD_RES (15), (16), (17), (18), (19): Xaa is A or G
  MOD_RES (20), (21), (22), (23): Xaa is A or G or is absent
XTPTKMSNITMQIMXXXXXXXXXLGEMSGMVVDRXGXS

SEQ ID NO: 72865 - protein, 40 aa, Artificial Sequence
  GFR-binding peptide
  MOD_RES (4), (5), (39): Xaa is C or S
  MOD_RES (19), (20), (21), (22), (23): Xaa is A or G
  MOD_RES (24), (25), (26), (27): Xaa is A or G or is absent
PPTXXVPTRLSNITIQIMXXXXXXXXXIGEMSDMVVESXG

SEQ ID NO: 72866 - protein, 35 aa, Artificial Sequence
  GFR-binding peptide
  MOD_RES (3), (4): Xaa is C or S
KPXXAPTKLSNITVQIMDDSSNVILGEMSNMVVRS

SEQ ID NO: 72867 - protein, 36 aa, Artificial Sequence; identical to SEQ ID NO: 54712
  GFR-binding peptide
  MOD_RES (1), (2), (35): Xaa is C or S
  MOD_RES (16), (17), (18), (19), (20): Xaa is A or G
  MOD_RES (21), (22), (23), (24): Xaa is A or G or is absent

SEQ ID NO: 72868 - protein, 42 aa, Artificial Sequence; identical to SEQ ID NO: 19277
  GFR-binding peptide
  MOD_RES (2), (39), (41): Xaa is C or S
  MOD_RES (18), (19), (20), (21), (22): Xaa is A or G
  MOD_RES (23), (24), (25), (26): Xaa is A or G or is absent

SEQ ID NO: 72869 - protein, 41 aa, Artificial Sequence
  GFR-binding peptide
  MOD_RES (4), (5), (39), (41): Xaa is C or S
  MOD_RES (19), (20), (21), (22), (23): Xaa is A or G
  MOD_RES (24), (25), (26), (27): Xaa is A or G or is absent
PASXXVPARLSNITIQIMXXXXXXXXXLGEMSDMVVEAXGX

SEQ ID NO: 72870 - protein, 39 aa, Artificial Sequence; identical to SEQ ID NO: 19279
  GFR-binding peptide
  MOD_RES (4), (38): Xaa is C or S
  MOD_RES (18), (19), (20), (21), (22): Xaa is A or G
  MOD_RES (23), (24), (25), (26): Xaa is A or G or is absent

SEQ ID NO: 72871 - protein, 38 aa, Artificial Sequence; identical to SEQ ID NO: 19280
  GFR-binding peptide
  MOD_RES (35), (37): Xaa is C or S
  MOD_RES (14), (15), (16), (17), (18): Xaa is A or G
  MOD_RES (19), (20), (21), (22): Xaa is A or G or is absent

SEQ ID NO: 72872 - protein, 38 aa, Artificial Sequence
  GFR-binding peptide
  MOD_RES (6), (7): Xaa is C or S
HVPKPXXAPTKLSNITVQIMDDSSNVILGEMSNMVVRS

SEQ ID NO: 72873 - protein, 41 aa, Artificial Sequence
  GFR-binding peptide
  MOD_RES (6), (7), (41): Xaa is C or S
  MOD_RES (21), (22), (23), (24), (25): Xaa is A or G
  MOD_RES (26), (27), (28), (29): Xaa is A or G or is absent
STPPTXXVPTRLSNITIQIMXXXXXXXXXLGEMSDMVVESX

SEQ ID NO: 72874 - protein, 39 aa, Artificial Sequence; identical to SEQ ID NO: 54722
  GFR-binding peptide
  MOD_RES (5), (6), (39): Xaa is C or S
  MOD_RES (20), (21), (22), (23), (24): Xaa is A or G
  MOD_RES (25), (26), (27), (28): Xaa is A or G or is absent

SEQ ID NO: 72875 - protein, 37 aa, Artificial Sequence
  GFR-binding peptide
  MOD_RES (1), (35), (37): Xaa is C or S
  MOD_RES (15), (16), (17), (18), (19): Xaa is A or G
  MOD_RES (20), (21), (22), (23): Xaa is A or G or is absent
XAPTKLSNITVQIMXXXXXXXXXLGEMSNMVVRSXGX

SEQ ID NO: 72876 - protein, 39 aa, Artificial Sequence
  GFR-binding peptide
  MOD_RES (2), (3), (36), (38): Xaa is C or S
  MOD_RES (17), (18), (19), (20), (21): Xaa is A or G
  MOD_RES (22), (23), (24), (25): Xaa is A or G or is absent
PXXVSQDLSNITIQIMXXXXXXXXXLGEMSMIVKSXKXS

SEQ ID NO: 72877 - protein, 39 aa, Artificial Sequence; identical to SEQ ID NO: 19283
  GFR-binding peptide
  MOD_RES (36), (38): Xaa is C or S

SEQ ID NO: 72878 - protein, 39 aa, Artificial Sequence; identical to SEQ ID NO: 19284
  GFR-binding peptide
  MOD_RES (2), (36), (38): Xaa is C or S
  MOD_RES (16), (17), (18), (19), (20): Xaa is A or G
  MOD_RES (21), (22), (23), (24): Xaa is A or G or is absent

SEQ ID NO: 72879 - protein, 35 aa, Artificial Sequence
  GFR-binding peptide
  MOD_RES (4), (5): Xaa is C or S
PPTXXVPTRLSNITIQIMDSANNVVLGEMSDMVVE

SEQ ID NO: 72880 - protein, 35 aa, Artificial Sequence; identical to SEQ ID NO: 54724
  GFR-binding peptide
  MOD_RES (2), (3), (34): Xaa is C or S

SEQ ID NO: 72881 - protein, 36 aa, Artificial Sequence
  GFR-binding peptide
  MOD_RES (1), (2), (35): Xaa is C or S
  MOD_RES (16), (17), (18), (19), (20): Xaa is A or G
  MOD_RES (21), (22), (23), (24): Xaa is A or G or is absent
XXVPQDLSNITIQIMXXXXXXXXXLGEMSMVVKSXK

SEQ ID NO: 72882 - protein, 35 aa, Artificial Sequence; identical to SEQ ID NO: 52343
  GFR-binding peptide
  MOD_RES (33), (35): Xaa is C or S
  MOD_RES (14), (15), (16), (17), (18): Xaa is A or G
  MOD_RES (19), (20), (21), (22): Xaa is A or G or is absent

SEQ ID NO: 72883 - protein, 38 aa, Artificial Sequence
  GFR-binding peptide
  MOD_RES (6), (7), (38): Xaa is C or S
RVPSTXXAPVKTSNITMQIMDNGRVLLLGEMSMIVEEX

SEQ ID NO: 72884 - protein, 37 aa, Artificial Sequence
  GFR-binding peptide
  MOD_RES (2), (3), (35), (37): Xaa is C or S
SXXVPARLSNITIQIMDAANNVVIGEMSDMVVEAXGX

SEQ ID NO: 72885 - protein, 35 aa, Artificial Sequence
  GFR-binding peptide
  MOD_RES (2), (3), (34): Xaa is C or S
PXXVSQDLSNITIQIMIGKTPKILGEMSMIVKSXK

SEQ ID NO: 72886 - protein, 36 aa, Artificial Sequence
  GFR-binding peptide
  MOD_RES (3), (4), (36): Xaa is C or S
ASXXVPARLSNITIQIMDAANNVVIGEMSDMVVEAX

SEQ ID NO: 72887 - protein, 32 aa, Artificial Sequence; identical to SEQ ID NO: 54731
  GFR-binding peptide
  MOD_RES (1), (2): Xaa is C or S

SEQ ID NO: 72888 - protein, 31 aa, Artificial Sequence
  GFR-binding peptide
VPARLSNITIQIMDAANNVVIGEMSDMVVEA

SEQ ID NO: 72889 - protein, 39 aa, Artificial Sequence; identical to SEQ ID NO: 19289
  GFR-binding peptide
  MOD_RES (3), (37), (39): Xaa is C or S
  MOD_RES (17), (18), (19), (20), (21): Xaa is A or G
  MOD_RES (22), (23), (24), (25): Xaa is A or G or is absent

SEQ ID NO: 72890 - protein, 44 aa, Artificial Sequence
  GFR-binding peptide
  MOD_RES (6), (7), (41), (43): Xaa is C or S
  MOD_RES (21), (22), (23), (24), (25): Xaa is A or G
  MOD_RES (26), (27), (28), (29): Xaa is A or G or is absent
STPPTXXVPTRLSNITIQIMXXXXXXXXXLGEMSDMVVESXGXR

SEQ ID NO: 72891 - protein, 36 aa, Artificial Sequence
  GFR-binding peptide
  MOD_RES (2), (3), (35): Xaa is C or S
PXXAPTKLSNITVQIMDDSSNVILGEMSNMVVRSXG

SEQ ID NO: 72892 - protein, 37 aa, Artificial Sequence; identical to SEQ ID NO: 19291
  GFR-binding peptide
  MOD_RES (2), (2): Xaa is C or S
  MOD_RES (18), (19), (20), (21), (22): Xaa is A or G
  MOD_RES (23), (24), (25), (26): Xaa is A or G or is absent

SEQ ID NO: 72893 - protein, 38 aa, Artificial Sequence
  GFR-binding peptide
  MOD_RES (5), (6): Xaa is C or S
  MOD_RES (20), (21), (22), (23), (24): Xaa is A or G
  MOD_RES (25), (26), (27), (28): Xaa is A or G or is absent
SAGPXXTPTKMSNITMQIMXXXXXXXXXLGEMSGMVVD

SEQ ID NO: 72894 - protein, 41 aa, Artificial Sequence; identical to SEQ ID NO: 52365
  GFR-binding peptide
  MOD_RES (6), (7), (38), (40): Xaa is C or S

SEQ ID NO: 72895 - protein, 34 aa, Artificial Sequence
  GFR-binding peptide
  MOD_RES (1), (2): Xaa is C or S
  MOD_RES (16), (17), (18), (19), (20): Xaa is A or G
  MOD_RES (21), (22), (23), (24): Xaa is A or G or is absent
XXAPVKTSNITMQIMXXXXXXXXXLGEMSMIVEE

SEQ ID NO: 72896 - protein, 35 aa, Artificial Sequence; identical to SEQ ID NO: 19294
  GFR-binding peptide
  MOD_RES (16), (17), (18), (19), (20): Xaa is A or G
  MOD_RES (21), (22), (23), (24): Xaa is A or G or is absent

SEQ ID NO: 72897 - protein, 36 aa, Artificial Sequence; identical to SEQ ID NO: 19295
  GFR-binding peptide
  MOD_RES (4), (4): Xaa is C or S
  MOD_RES (18), (19), (20), (21), (22): Xaa is A or G
  MOD_RES (23), (24), (25), (26): Xaa is A or G or is absent

SEQ ID NO: 72898 - protein, 39 aa, Artificial Sequence
  GFR-binding peptide
  MOD_RES (3), (4), (38): Xaa is C or S
  MOD_RES (18), (19), (20), (21), (22): Xaa is A or G
  MOD_RES (23), (24), (25), (26): Xaa is A or G or is absent
PTXXVPTRLSNITIQIMXXXXXXXXXLGEMSDMVVESXG

SEQ ID NO: 72899 - protein, 31 aa, Artificial Sequence
  GFR-binding peptide
  MOD_RES (31), (31): Xaa is C or S
APVKTSNITMQIMDNGRVLLLGEMSMIVEEX

SEQ ID NO: 72900 - protein, 38 aa, Artificial Sequence
  GFR-binding peptide
  MOD_RES (5), (6), (37): Xaa is C or S
VPSTXXAPVKTSNITMQIMDNGRVLLLGEMSMIVEEXG

SEQ ID NO: 72901 - protein, 39 aa, Artificial Sequence
  GFR-binding peptide
  MOD_RES (3), (4), (38): Xaa is C or S
  MOD_RES (18), (19), (20), (21), (22): Xaa is A or G
  MOD_RES (23), (24), (25), (26): Xaa is A or G or is absent
PTXXVPTRLSNITIQIMXXXXXXXXXIGEMSDMVVESXG

SEQ ID NO: 72902 - protein, 36 aa, Artificial Sequence; identical to SEQ ID NO: 19298
  GFR-binding peptide
  MOD_RES (1), (1): Xaa is C or S

SEQ ID NO: 72903 - protein, 41 aa, Artificial Sequence; identical to SEQ ID NO: 19299
  GFR-binding peptide
  MOD_RES (6), (40): Xaa is C or S
  MOD_RES (20), (21), (22), (23), (24): Xaa is A or G
  MOD_RES (25), (26), (27), (28): Xaa is A or G or is absent

SEQ ID NO: 72904 - protein, 33 aa, Artificial Sequence
  GFR-binding peptide
  MOD_RES (2), (3): Xaa is C or S
PXXVPQDLSNITIQIMVGRTPKVLGEMSMVVKS

SEQ ID NO: 72905 - protein, 38 aa, Artificial Sequence; identical to SEQ ID NO: 19301
  GFR-binding peptide
  MOD_RES (35), (37): Xaa is C or S

SEQ ID NO: 72906 - protein, 35 aa, Artificial Sequence; identical to SEQ ID NO: 52379
  GFR-binding peptide
  MOD_RES (33), (35): Xaa is C or S
  MOD_RES (14), (15), (16), (17), (18): Xaa is A or G
  MOD_RES (19), (20), (21), (22): Xaa is A or G or is absent

SEQ ID NO: 72907 - protein, 32 aa, Artificial Sequence; identical to SEQ ID NO: 52380
  GFR-binding peptide
  MOD_RES (1), (32): Xaa is C or S

SEQ ID NO: 72908 - protein, 38 aa, Artificial Sequence; identical to SEQ ID NO: 19303
  GFR-binding peptide
  MOD_RES (1), (38): Xaa is C or S
  MOD_RES (17), (18), (19), (20), (21): Xaa is A or G
  MOD_RES (22), (23), (24), (25): Xaa is A or G or is absent

SEQ ID NO: 72909 - protein, 31 aa, Artificial Sequence; identical to SEQ ID NO: 54755
  GFR-binding peptide
  MOD_RES (1), (1): Xaa is C or S

SEQ ID NO: 72910 - protein, 37 aa, Artificial Sequence
  GFR-binding peptide
  MOD_RES (4), (5), (37): Xaa is C or S
PKPXXAPTKLSNITVQIMDDSSNVILGEMSNMVVRSX

SEQ ID NO: 72911 - protein, 38 aa, Artificial Sequence
  GFR-binding peptide
  MOD_RES (4), (5): Xaa is C or S
  MOD_RES (19), (20), (21), (22), (23): Xaa is A or G
  MOD_RES (24), (25), (26), (27): Xaa is A or G or is absent
PPTXXVPTRLSNITIQIMXXXXXXXXXIGEMSDMVVES

SEQ ID NO: 72912 - protein, 34 aa, Artificial Sequence
  GFR-binding peptide
  MOD_RES (1), (2): Xaa is C or S
  MOD_RES (16), (17), (18), (19), (20): Xaa is A or G
  MOD_RES (21), (22), (23), (24): Xaa is A or G or is absent
XXVPTRLSNITIQIMXXXXXXXXXIGEMSDMVVE

SEQ ID NO: 72913 - protein, 41 aa, Artificial Sequence
  GFR-binding peptide
  MOD_RES (5), (6), (38), (40): Xaa is C or S
TPPTXXVPTRLSNITIQIMDSANNVVLGEMSDMVVESXGXR

SEQ ID NO: 72914 - protein, 35 aa, Artificial Sequence
  GFR-binding peptide
  MOD_RES (1), (2): Xaa is C or S
  MOD_RES (16), (17), (18), (19), (20): Xaa is A or G
  MOD_RES (21), (22), (23), (24): Xaa is A or G or is absent
XXVPTRLSNITIQIMXXXXXXXXXLGEMSDMVVES

SEQ ID NO: 72915 - protein, 39 aa, Artificial Sequence; identical to SEQ ID NO: 19306
  GFR-binding peptide
  MOD_RES (1), (38): Xaa is C or S
  MOD_RES (17), (18), (19), (20), (21): Xaa is A or G
  MOD_RES (22), (23), (24), (25): Xaa is A or G or is absent

SEQ ID NO: 72916 - protein, 38 aa, Artificial Sequence; identical to SEQ ID NO: 52395
  GFR-binding peptide
  MOD_RES (4), (5), (38): Xaa is C or S
  MOD_RES (19), (20), (21), (22), (23): Xaa is A or G
  MOD_RES (24), (25), (26), (27): Xaa is A or G or is absent

SEQ ID NO: 72917 - protein, 41 aa, Artificial Sequence
  GFR-binding peptide
  MOD_RES (3), (4), (38), (40): Xaa is C or S
  MOD_RES (18), (19), (20), (21), (22): Xaa is A or G
  MOD_RES (23), (24), (25), (26): Xaa is A or G or is absent
GPXXTPTKMSNITMQIMXXXXXXXXXLGEMSGMVVDRXGXS

SEQ ID NO: 72918 - protein, 33 aa, Artificial Sequence; identical to SEQ ID NO: 19308
  GFR-binding peptide

SEQ ID NO: 72919 - protein, 40 aa, Artificial Sequence
  GFR-binding peptide
  MOD_RES (4), (5), (37), (39): Xaa is C or S
AGPXXTPTKMSNITMQIMNDKQQIIIGEMSGMVVDRXGXS

SEQ ID NO: 72920 - protein, 43 aa, Artificial Sequence; identical to SEQ ID NO: 19309
  GFR-binding peptide
  MOD_RES (4), (41), (43): Xaa is C or S
  MOD_RES (20), (21), (22), (23), (24): Xaa is A or G
  MOD_RES (25), (26), (27), (28): Xaa is A or G or is absent

SEQ ID NO: 72921 - protein, 34 aa, Artificial Sequence
  GFR-binding peptide
  MOD_RES (1), (1): Xaa is C or S
  MOD_RES (15), (16), (17), (18), (19): Xaa is A or G
  MOD_RES (20), (21), (22), (23): Xaa is A or G or is absent
XVPTRLSNITIQIMXXXXXXXXXLGEMSDMVVES

SEQ ID NO: 72922 - protein, 39 aa, Artificial Sequence; identical to SEQ ID NO: 19310
  GFR-binding peptide
  MOD_RES (5), (39): Xaa is C or S
  MOD_RES (19), (20), (21), (22), (23): Xaa is A or G
  MOD_RES (24), (25), (26), (27): Xaa is A or G or is absent

SEQ ID NO: 72923 - protein, 36 aa, Artificial Sequence; identical to SEQ ID NO: 54765
  GFR-binding peptide
  MOD_RES (5), (6): Xaa is C or S

SEQ ID NO: 72924 - protein, 44 aa, Artificial Sequence; identical to SEQ ID NO: 19312
  GFR-binding peptide
  MOD_RES (7), (41), (43): Xaa is C or S
  MOD_RES (21), (22), (23), (24), (25): Xaa is A or G
  MOD_RES (26), (27), (28), (29): Xaa is A or G or is absent

SEQ ID NO: 72925 - protein, 40 aa, Artificial Sequence
  GFR-binding peptide
  MOD_RES (3), (4), (37), (39): Xaa is C or S
  MOD_RES (18), (19), (20), (21), (22): Xaa is A or G
  MOD_RES (23), (24), (25), (26): Xaa is A or G or is absent
STXXAPVKTSNITMQIMXXXXXXXXXLGEMSMIVEEXGXL

SEQ ID NO: 72926 - protein, 41 aa, Artificial Sequence
  GFR-binding peptide
  MOD_RES (3), (4), (38), (40): Xaa is C or S
  MOD_RES (18), (19), (20), (21), (22): Xaa is A or G
  MOD_RES (23), (24), (25), (26): Xaa is A or G or is absent
ASXXVPARLSNITIQIMXXXXXXXXXIGEMSDMVVEAXGXR

SEQ ID NO: 72927 - protein, 36 aa, Artificial Sequence; identical to SEQ ID NO: 19316
  GFR-binding peptide
  MOD_RES (36), (36): Xaa is C or S
  MOD_RES (15), (16), (17), (18), (19): Xaa is A or G
  MOD_RES (20), (21), (22), (23): Xaa is A or G or is absent

SEQ ID NO: 72928 - protein, 35 aa, Artificial Sequence; identical to SEQ ID NO: 19317
  GFR-binding peptide
  MOD_RES (2), (2): Xaa is C or S
  MOD_RES (16), (17), (18), (19), (20): Xaa is A or G
  MOD_RES (21), (22), (23), (24): Xaa is A or G or is absent

SEQ ID NO: 72929 - protein, 33 aa, Artificial Sequence
  GFR-binding peptide
  MOD_RES (33), (33): Xaa is C or S
  MOD_RES (14), (15), (16), (17), (18): Xaa is A or G
  MOD_RES (19), (20), (21), (22): Xaa is A or G or is absent
VSQDLSNITIQIMXXXXXXXXXLGEMSMIVKSX

SEQ ID NO: 72930 - protein, 40 aa, Artificial Sequence; identical to SEQ ID NO: 52404
  GFR-binding peptide
  MOD_RES (5), (6), (37), (39): Xaa is C or S

SEQ ID NO: 72931 - protein, 33 aa, Artificial Sequence
  GFR-binding peptide
  MOD_RES (2), (3): Xaa is C or S
TXXVPTRLSNITIQIMDSANNVVIGEMSDMVVE

SEQ ID NO: 72932 - protein, 41 aa, Artificial Sequence
  GFR-binding peptide
  MOD_RES (6), (7), (39), (41): Xaa is C or S
AAPASXXVPARLSNITIQIMDAANNVVLGEMSDMVVEAXGX

SEQ ID NO: 72933 - protein, 37 aa, Artificial Sequence
  GFR-binding peptide
  MOD_RES (2), (3), (36): Xaa is C or S
  MOD_RES (17), (18), (19), (20), (21): Xaa is A or G
  MOD_RES (22), (23), (24), (25): Xaa is A or G or is absent
TXXAPVKTSNITMQIMXXXXXXXXXIGEMSMIVEEXG

SEQ ID NO: 72934 - protein, 32 aa, Artificial Sequence; identical to SEQ ID NO: 52418
  GFR-binding peptide
  MOD_RES (1), (2): Xaa is C or S

SEQ ID NO: 72935 - protein, 38 aa, Artificial Sequence
  GFR-binding peptide
  MOD_RES (5), (6), (38): Xaa is C or S
VPKPXXAPTKLSNITVQIMDDSSNVILGEMSNMVVRSX

SEQ ID NO: 72936 - protein, 40 aa, Artificial Sequence
  GFR-binding peptide
  MOD_RES (6), (7): Xaa is C or S
  MOD_RES (21), (22), (23), (24), (25): Xaa is A or G
  MOD_RES (26), (27), (28), (29): Xaa is A or G or is absent
STPPTXXVPTRLSNITIQIMXXXXXXXXXIGEMSDMVVES

SEQ ID NO: 72937 - protein, 38 aa, Artificial Sequence; identical to SEQ ID NO: 54787
  GFR-binding peptide
  MOD_RES (2), (3), (37): Xaa is C or S
  MOD_RES (17), (18), (19), (20), (21): Xaa is A or G
  MOD_RES (22), (23), (24), (25): Xaa is A or G or is absent

SEQ ID NO: 72938 - protein, 42 aa, Artificial Sequence
  GFR-binding peptide
  MOD_RES (5), (6), (40), (42): Xaa is C or S
  MOD_RES (20), (21), (22), (23), (24): Xaa is A or G
  MOD_RES (25), (26), (27), (28): Xaa is A or G or is absent
APASXXVPARLSNITIQIMXXXXXXXXXIGEMSDMVVEAXGX

SEQ ID NO: 72939 - protein, 32 aa, Artificial Sequence
  GFR-binding peptide
  MOD_RES (1), (2): Xaa is C or S
XXVSQDLSNITIQIMIGKTPKILGEMSMIVKS

SEQ ID NO: 72940 - protein, 36 aa, Artificial Sequence
  GFR-binding peptide
  MOD_RES (3), (4), (35): Xaa is C or S
STXXAPVKTSNITMQIMDNGRVLLIGEMSMIVEEXG

SEQ ID NO: 72941 - protein, 36 aa, Artificial Sequence; identical to SEQ ID NO: 19326
  GFR-binding peptide
  MOD_RES (3), (3): Xaa is C or S
  MOD_RES (17), (18), (19), (20), (21): Xaa is A or G
  MOD_RES (22), (23), (24), (25): Xaa is A or G or is absent

SEQ ID NO: 72942 - protein, 38 aa, Artificial Sequence
  GFR-binding peptide
  MOD_RES (2), (3), (35), (37): Xaa is C or S
PXXTPTKMSNITMQIMNDKQQIILGEMSGMVVDRXGXS

SEQ ID NO: 72943 - protein, 43 aa, Artificial Sequence; identical to SEQ ID NO: 19327
  GFR-binding peptide
  MOD_RES (3), (40), (42): Xaa is C or S
  MOD_RES (19), (20), (21), (22), (23): Xaa is A or G
  MOD_RES (24), (25), (26), (27): Xaa is A or G or is absent

SEQ ID NO: 72944 - protein, 38 aa, Artificial Sequence; identical to SEQ ID NO: 19330
  GFR-binding peptide
  MOD_RES (36), (38): Xaa is C or S

SEQ ID NO: 72945 - protein, 35 aa, Artificial Sequence
  GFR-binding peptide
  MOD_RES (1), (33), (35): Xaa is C or S
XVPTRLSNITIQIMDSANNVVIGEMSDMVVESXGX

SEQ ID NO: 72946 - protein, 41 aa, Artificial Sequence
  GFR-binding peptide
  MOD_RES (6), (7), (41): Xaa is C or S
  MOD_RES (21), (22), (23), (24), (25): Xaa is A or G
  MOD_RES (26), (27), (28), (29): Xaa is A or G or is absent
AAPASXXVPARLSNITIQIMXXXXXXXXXIGEMSDMVVEAX

SEQ ID NO: 72947 - protein, 36 aa, Artificial Sequence
  GFR-binding peptide
  MOD_RES (34), (36): Xaa is C or S
  MOD_RES (14), (15), (16), (17), (18): Xaa is A or G
  MOD_RES (19), (20), (21), (22): Xaa is A or G or is absent
TPTKMSNITMQIMXXXXXXXXXLGEMSGMVVDRXGX

SEQ ID NO: 72948 - protein, 36 aa, Artificial Sequence; identical to SEQ ID NO: 52435
  GFR-binding peptide
  MOD_RES (2), (3), (36): Xaa is C or S
  MOD_RES (17), (18), (19), (20), (21): Xaa is A or G
  MOD_RES (22), (23), (24), (25): Xaa is A or G or is absent

SEQ ID NO: 72949 - protein, 41 aa, Artificial Sequence; identical to SEQ ID NO: 19333
  GFR-binding peptide
  MOD_RES (5), (5): Xaa is C or S
  MOD_RES (21), (22), (23), (24), (25): Xaa is A or G
  MOD_RES (26), (27), (28), (29): Xaa is A or G or is absent

SEQ ID NO: 72950 - protein, 32 aa, Artificial Sequence; identical to SEQ ID NO: 52442
  GFR-binding peptide
  MOD_RES (1), (2): Xaa is C or S

SEQ ID NO: 72951 - protein, 34 aa, Artificial Sequence
  GFR-binding peptide
  MOD_RES (1), (33): Xaa is C or S
XVPARLSNITIQIMDAANNVVIGEMSDMVVEAXG

SEQ ID NO: 72952 - protein, 35 aa, Artificial Sequence
  GFR-binding peptide
  MOD_RES (1), (32), (34): Xaa is C or S
XVSQDLSNITIQIMIGKTPKILGEMSMIVKSXKXS

SEQ ID NO: 72953 - protein, 34 aa, Artificial Sequence
  GFR-binding peptide
  MOD_RES (32), (34): Xaa is C or S
VPARLSNITIQIMDAANNVVIGEMSDMVVEAXGX

SEQ ID NO: 72954 - protein, 37 aa, Artificial Sequence
  GFR-binding peptide
  MOD_RES (1), (2), (36): Xaa is C or S
  MOD_RES (16), (17), (18), (19), (20): Xaa is A or G
  MOD_RES (21), (22), (23), (24): Xaa is A or G or is absent
XXAPTKLSNITVQIMXXXXXXXXXLGEMSNMVVRSXG

SEQ ID NO: 72955 - protein, 37 aa, Artificial Sequence; identical to SEQ ID NO: 52450
  GFR-binding peptide
  MOD_RES (3), (4), (37): Xaa is C or S
  MOD_RES (18), (19), (20), (21), (22): Xaa is A or G
  MOD_RES (23), (24), (25), (26): Xaa is A or G or is absent

SEQ ID NO: 72956 - protein, 40 aa, Artificial Sequence
  GFR-binding peptide
  MOD_RES (5), (6), (38), (40): Xaa is C or S
TPPTXXVPTRLSNITIQIMDSANNVVIGEMSDMVVESXGX

SEQ ID NO: 72957 - protein, 35 aa, Artificial Sequence
  GFR-binding peptide
  MOD_RES (3), (4): Xaa is C or S
PTXXVPTRLSNITIQIMDSANNVVIGEMSDMVVES

SEQ ID NO: 72958 - protein, 39 aa, Artificial Sequence; identical to SEQ ID NO: 54806
  GFR-binding peptide
  MOD_RES (5), (6), (39): Xaa is C or S
  MOD_RES (20), (21), (22), (23), (24): Xaa is A or G
  MOD_RES (25), (26), (27), (28): Xaa is A or G or is absent

SEQ ID NO: 72959 - protein, 38 aa, Artificial Sequence
  GFR-binding peptide
  MOD_RES (5), (6): Xaa is C or S
  MOD_RES (20), (21), (22), (23), (24): Xaa is A or G
  MOD_RES (25), (26), (27), (28): Xaa is A or G or is absent
SAGPXXTPTKMSNITMQIMXXXXXXXXXIGEMSGMVVD

SEQ ID NO: 72960 - protein, 38 aa, Artificial Sequence
  GFR-binding peptide
  MOD_RES (4), (5), (36), (38): Xaa is C or S
AAPXXVPQALSNITIQIMVGRKPKVLGEMSMIVRSXKX

SEQ ID NO: 72961 - protein, 36 aa, Artificial Sequence; identical to SEQ ID NO: 19339
  GFR-binding peptide
  MOD_RES (1), (35): Xaa is C or S
  MOD_RES (15), (16), (17), (18), (19): Xaa is A or G
  MOD_RES (20), (21), (22), (23): Xaa is A or G or is absent

SEQ ID NO: 72962 - protein, 39 aa, Artificial Sequence; identical to SEQ ID NO: 19340
  GFR-binding peptide
  MOD_RES (3), (3): Xaa is C or S

SEQ ID NO: 72963 - protein, 39 aa, Artificial Sequence
  GFR-binding peptide
  MOD_RES (2), (3), (36), (38): Xaa is C or S
  MOD_RES (17), (18), (19), (20), (21): Xaa is A or G
  MOD_RES (22), (23), (24), (25): Xaa is A or G or is absent
PXXVPQDLSNITIQIMXXXXXXXXXLGEMSMVVKSXKXS

SEQ ID NO: 72964 - protein, 35 aa, Artificial Sequence; identical to SEQ ID NO: 54815
  GFR-binding peptide
  MOD_RES (1), (34): Xaa is C or S
  MOD_RES (15), (16), (17), (18), (19): Xaa is A or G
  MOD_RES (20), (21), (22), (23): Xaa is A or G or is absent

SEQ ID NO: 72965 - protein, 40 aa, Artificial Sequence
  GFR-binding peptide
  MOD_RES (4), (5), (37), (39): Xaa is C or S
PPTXXVPTRLSNITIQIMDSANNVVLGEMSDMVVESXGXR

SEQ ID NO: 72966 - protein, 38 aa, Artificial Sequence
  GFR-binding peptide
  MOD_RES (1), (2), (36), (38): Xaa is C or S
  MOD_RES (16), (17), (18), (19), (20): Xaa is A or G
  MOD_RES (21), (22), (23), (24): Xaa is A or G or is absent
XXTPTKMSNITMQIMXXXXXXXXXIGEMSGMVVDRXGX

SEQ ID NO: 72967 - protein, 37 aa, Artificial Sequence
  GFR-binding peptide
  MOD_RES (1), (34), (36): Xaa is C or S
  MOD_RES (15), (16), (17), (18), (19): Xaa is A or G
  MOD_RES (20), (21), (22), (23): Xaa is A or G or is absent
XAPVKTSNITMQIMXXXXXXXXXIGEMSMIVEEXGXL

SEQ ID NO: 72968 - protein, 35 aa, Artificial Sequence
  GFR-binding peptide
  MOD_RES (1), (34): Xaa is C or S
  MOD_RES (15), (16), (17), (18), (19): Xaa is A or G
  MOD_RES (20), (21), (22), (23): Xaa is A or G or is absent
XVSQDLSNITIQIMXXXXXXXXXLGEMSMIVKSXK

SEQ ID NO: 72969 - protein, 35 aa, Artificial Sequence
  GFR-binding peptide
  MOD_RES (2), (3): Xaa is C or S
  MOD_RES (17), (18), (19), (20), (21): Xaa is A or G
  MOD_RES (22), (23), (24), (25): Xaa is A or G or is absent
PXXVSQDLSNITIQIMXXXXXXXXXLGEMSMIVKS

SEQ ID NO: 72970 - protein, 36 aa, Artificial Sequence; identical to SEQ ID NO: 19344
  GFR-binding peptide
  MOD_RES (4), (4): Xaa is C or S
  MOD_RES (18), (19), (20), (21), (22): Xaa is A or G
  MOD_RES (23), (24), (25), (26): Xaa is A or G or is absent

SEQ ID NO: 72971 - protein, 32 aa, Artificial Sequence; identical to SEQ ID NO: 52460
  GFR-binding peptide
  MOD_RES (32), (32): Xaa is C or S

SEQ ID NO: 72972 - protein, 32 aa, Artificial Sequence
  GFR-binding peptide
  MOD_RES (1), (2): Xaa is C or S
XXVPQDLSNITIQIMVGRTPKVLGEMSMVVKS

SEQ ID NO: 72973 - protein, 35 aa, Artificial Sequence
  GFR-binding peptide
  MOD_RES (34), (34): Xaa is C or S
  MOD_RES (14), (15), (16), (17), (18): Xaa is A or G
  MOD_RES (19), (20), (21), (22): Xaa is A or G or is absent
VPTRLSNITIQIMXXXXXXXXXIGEMSDMVVESXG

SEQ ID NO: 72974 - protein, 36 aa, Artificial Sequence
  GFR-binding peptide
  MOD_RES (2), (3), (34), (36): Xaa is C or S
PXXVPQDLSNITIQIMVGRTPKVLGEMSMVVKSXKX

SEQ ID NO: 72975 - protein, 37 aa, Artificial Sequence
  GFR-binding peptide
  MOD_RES (2), (3), (36): Xaa is C or S
  MOD_RES (17), (18), (19), (20), (21): Xaa is A or G
  MOD_RES (22), (23), (24), (25): Xaa is A or G or is absent
PXXVSQDLSNITIQIMXXXXXXXXXLGEMSMIVKSXK

SEQ ID NO: 72976 - protein, 43 aa, Artificial Sequence; identical to SEQ ID NO: 19347
  GFR-binding peptide
  MOD_RES (4), (41), (43): Xaa is C or S
  MOD_RES (20), (21), (22), (23), (24): Xaa is A or G
  MOD_RES (25), (26), (27), (28): Xaa is A or G or is absent

SEQ ID NO: 72977 - protein, 34 aa, Artificial Sequence; identical to SEQ ID NO: 19349
  GFR-binding peptide
  MOD_RES (14), (15), (16), (17), (18): Xaa is A or G
  MOD_RES (19), (20), (21), (22): Xaa is A or G or is absent

SEQ ID NO: 72978 - protein, 36 aa, Artificial Sequence
  GFR-binding peptide
  MOD_RES (3), (4), (36): Xaa is C or S
KPXXAPTKLSNITVQIMDDSSNVILGEMSNMVVRSX

SEQ ID NO: 72979 - protein, 39 aa, Artificial Sequence
  GFR-binding peptide
  MOD_RES (5), (6), (38): Xaa is C or S
VPKPXXAPTKLSNITVQIMDDSSNVILGEMSNMVVRSXG

SEQ ID NO: 72980 - protein, 32 aa, Artificial Sequence
  GFR-binding peptide
  MOD_RES (1), (32): Xaa is C or S
XAPVKTSNITMQIMDNGRVLLLGEMSMIVEEX

SEQ ID NO: 72981 - protein, 36 aa, Artificial Sequence; identical to SEQ ID NO: 54833
  GFR-binding peptide
  MOD_RES (3), (4), (36): Xaa is C or S

SEQ ID NO: 72982 - protein, 36 aa, Artificial Sequence; identical to SEQ ID NO: 19352
  GFR-binding peptide

SEQ ID NO: 72983 - protein, 40 aa, Artificial Sequence
  GFR-binding peptide
  MOD_RES (2), (3), (37), (39): Xaa is C or S
  MOD_RES (17), (18), (19), (20), (21): Xaa is A or G
  MOD_RES (22), (23), (24), (25): Xaa is A or G or is absent
TXXVPTRLSNITIQIMXXXXXXXXXIGEMSDMVVESXGXR

SEQ ID NO: 72984 - protein, 44 aa, Artificial Sequence; identical to SEQ ID NO: 19354
  GFR-binding peptide
  MOD_RES (4), (41), (43): Xaa is C or S

SEQ ID NO: 72985 - protein, 33 aa, Artificial Sequence
  GFR-binding peptide
  MOD_RES (1), (2), (33): Xaa is C or S
XXVPQDLSNITIQIMVGRTPKVLGEMSMVVKSX

SEQ ID NO: 72986 - protein, 31 aa, Artificial Sequence
  GFR-binding peptide
VPTRLSNITIQIMDSANNVVIGEMSDMVVES

SEQ ID NO: 72987 - protein, 36 aa, Artificial Sequence; identical to SEQ ID NO: 19355
  GFR-binding peptide
  MOD_RES (4), (4): Xaa is C or S

SEQ ID NO: 72988 - protein, 36 aa, Artificial Sequence; identical to SEQ ID NO: 54841
  GFR-binding peptide
  MOD_RES (1), (2), (36): Xaa is C or S
  MOD_RES (16), (17), (18), (19), (20): Xaa is A or G
  MOD_RES (21), (22), (23), (24): Xaa is A or G or is absent

SEQ ID NO: 72989 - protein, 34 aa, Artificial Sequence
  GFR-binding peptide
  MOD_RES (31), (33): Xaa is C or S
APVKTSNITMQIMDNGRVLLIGEMSMIVEEXGXL

SEQ ID NO: 72990 - protein, 39 aa, Artificial Sequence
  GFR-binding peptide
  MOD_RES (6), (7), (39): Xaa is C or S
GSAGPXXTPTKMSNITMQIMNDKQQIIIGEMSGMVVDRX

SEQ ID NO: 72991 - protein, 38 aa, Artificial Sequence
  GFR-binding peptide
  MOD_RES (4), (5), (36), (38): Xaa is C or S
PSTXXAPVKTSNITMQIMDNGRVLLLGEMSMIVEEXGX

SEQ ID NO: 72992 - protein, 37 aa, Artificial Sequence; identical to SEQ ID NO: 19358
  GFR-binding peptide
  MOD_RES (2), (2): Xaa is C or S

SEQ ID NO: 72993 - protein, 38 aa, Artificial Sequence; identical to SEQ ID NO: 52486
  GFR-binding peptide
  MOD_RES (2), (3), (36), (38): Xaa is C or S
  MOD_RES (17), (18), (19), (20), (21): Xaa is A or G
  MOD_RES (22), (23), (24), (25): Xaa is A or G or is absent

SEQ ID NO: 72994 - protein, 36 aa, Artificial Sequence
  GFR-binding peptide
  MOD_RES (1), (34), (36): Xaa is C or S
  MOD_RES (15), (16), (17), (18), (19): Xaa is A or G
  MOD_RES (20), (21), (22), (23): Xaa is A or G or is absent
XVPQALSNITIQIMXXXXXXXXXLGEMSMIVRSXKX

SEQ ID NO: 72995 - protein, 35 aa, Artificial Sequence
  GFR-binding peptide
  MOD_RES (1), (2), (34): Xaa is C or S
XXTPTKMSNITMQIMNDKQQIILGEMSGMVVDRXG

SEQ ID NO: 72996 - protein, 41 aa, Artificial Sequence
  GFR-binding peptide
  MOD_RES (4), (5), (38), (40): Xaa is C or S
  MOD_RES (19), (20), (21), (22), (23): Xaa is A or G
  MOD_RES (24), (25), (26), (27): Xaa is A or G or is absent
ASPXXVSQDLSNITIQIMXXXXXXXXXLGEMSMIVKSXKXS

SEQ ID NO: 72997 - protein, 34 aa, Artificial Sequence; identical to SEQ ID NO: 19360
  GFR-binding peptide
  MOD_RES (15), (16), (17), (18), (19): Xaa is A or G
  MOD_RES (20), (21), (22), (23): Xaa is A or G or is absent

SEQ ID NO: 72998 - protein, 36 aa, Artificial Sequence; identical to SEQ ID NO: 19363
  GFR-binding peptide
  MOD_RES (1), (1): Xaa is C or S

SEQ ID NO: 72999 - protein, 38 aa, Artificial Sequence; identical to SEQ ID NO: 54858
  GFR-binding peptide
  MOD_RES (1), (2), (35), (37): Xaa is C or S
  MOD_RES (16), (17), (18), (19), (20): Xaa is A or G
  MOD_RES (21), (22), (23), (24): Xaa is A or G or is absent

SEQ ID NO: 73000 - protein, 33 aa, Artificial Sequence
  GFR-binding peptide
  MOD_RES (31), (33): Xaa is C or S
APVKTSNITMQIMDNGRVLLIGEMSMIVEEXGX

SEQ ID NO: 73001 - protein, 36 aa, Artificial Sequence
  GFR-binding peptide
  MOD_RES (1), (2), (36): Xaa is C or S
  MOD_RES (16), (17), (18), (19), (20): Xaa is A or G
  MOD_RES (21), (22), (23), (24): Xaa is A or G or is absent
XXAPTKLSNITVQIMXXXXXXXXXLGEMSNMVVRSX

SEQ ID NO: 73002 - protein, 35 aa, Artificial Sequence; identical to SEQ ID NO: 19364
  GFR-binding peptide
  MOD_RES (1), (1): Xaa is C or S

SEQ ID NO: 73003 - protein, 41 aa, Artificial Sequence
  GFR-binding peptide
  MOD_RES (6), (7), (38), (40): Xaa is C or S
ASASPXXVPQDLSNITIQIMVGRTPKVLGEMSMVVKSXKXS

SEQ ID NO: 73004 - protein, 41 aa, Artificial Sequence
  GFR-binding peptide
  MOD_RES (4), (5), (39), (41): Xaa is C or S
  MOD_RES (19), (20), (21), (22), (23): Xaa is A or G
  MOD_RES (24), (25), (26), (27): Xaa is A or G or is absent
AGPXXTPTKMSNITMQIMXXXXXXXXXIGEMSGMVVDRXGX

SEQ ID NO: 73005 - protein, 35 aa, Artificial Sequence; identical to SEQ ID NO: 19365
  GFR-binding peptide
  MOD_RES (34), (34): Xaa is C or S
  MOD_RES (14), (15), (16), (17), (18): Xaa is A or G
  MOD_RES (19), (20), (21), (22): Xaa is A or G or is absent

SEQ ID NO: 73006 - protein, 36 aa, Artificial Sequence; identical to SEQ ID NO: 19366
  GFR-binding peptide
  MOD_RES (4), (4): Xaa is C or S
  MOD_RES (18), (19), (20), (21), (22): Xaa is A or G
  MOD_RES (23), (24), (25), (26): Xaa is A or G or is absent

SEQ ID NO: 73007 - protein, 42 aa, Artificial Sequence
  GFR-binding peptide
  MOD_RES (6), (7), (39), (41): Xaa is C or S
STPPTXXVPTRLSNITIQIMDSANNVVIGEMSDMVVESXGXR

SEQ ID NO: 73008 - protein, 37 aa, Artificial Sequence
  GFR-binding peptide
  MOD_RES (3), (4): Xaa is C or S
  MOD_RES (18), (19), (20), (21), (22): Xaa is A or G
  MOD_RES (23), (24), (25), (26): Xaa is A or G or is absent
KPXXAPTKLSNITVQIMXXXXXXXXXLGEMSNMVVRS

SEQ ID NO: 73009 - protein, 34 aa, Artificial Sequence
  GFR-binding peptide
  MOD_RES (1), (2): Xaa is C or S
  MOD_RES (16), (17), (18), (19), (20): Xaa is A or G
  MOD_RES (21), (22), (23), (24): Xaa is A or G or is absent
XXAPTKLSNITVQIMXXXXXXXXXLGEMSNMVVR

SEQ ID NO: 73010 - protein, 40 aa, Artificial Sequence; identical to SEQ ID NO: 19367
  GFR-binding peptide
  MOD_RES (7), (7): Xaa is C or S
  MOD_RES (21), (22), (23), (24), (25): Xaa is A or G
  MOD_RES (26), (27), (28), (29): Xaa is A or G or is absent

SEQ ID NO: 73011 - protein, 35 aa, Artificial Sequence
  GFR-binding peptide
  MOD_RES (1), (2), (35): Xaa is C or S
  MOD_RES (16), (17), (18), (19), (20): Xaa is A or G
  MOD_RES (21), (22), (23), (24): Xaa is A or G or is absent
XXAPVKTSNITMQIMXXXXXXXXXIGEMSMIVEEX

SEQ ID NO: 73012 - protein, 37 aa, Artificial Sequence; identical to SEQ ID NO: 52493
  GFR-binding peptide
  MOD_RES (2), (3), (36): Xaa is C or S
  MOD_RES (17), (18), (19), (20), (21): Xaa is A or G
  MOD_RES (22), (23), (24), (25): Xaa is A or G or is absent

SEQ ID NO: 73013 - protein, 37 aa, Artificial Sequence
  GFR-binding peptide
  MOD_RES (6), (7): Xaa is C or S
ASASPXXVSQDLSNITIQIMIGKTPKILGEMSMIVKS

SEQ ID NO: 73014 - protein, 37 aa, Artificial Sequence
  GFR-binding peptide
  MOD_RES (5), (6): Xaa is C or S
VPKPXXAPTKLSNITVQIMDDSSNVILGEMSNMVVRS

SEQ ID NO: 73015 - protein, 37 aa, Artificial Sequence
  GFR-binding peptide
  MOD_RES (34), (36): Xaa is C or S
  MOD_RES (14), (15), (16), (17), (18): Xaa is A or G
  MOD_RES (19), (20), (21), (22): Xaa is A or G or is absent
VPARLSNITIQIMXXXXXXXXXIGEMSDMVVEAXGXR

SEQ ID NO: 73016 - protein, 37 aa, Artificial Sequence
  GFR-binding peptide
  MOD_RES (1), (2), (34), (36): Xaa is C or S
XXVPTRLSNITIQIMDSANNVVIGEMSDMVVESXGXR

SEQ ID NO: 73017 - protein, 38 aa, Artificial Sequence
  GFR-binding peptide
  MOD_RES (2), (3), (36), (38): Xaa is C or S
  MOD_RES (17), (18), (19), (20), (21): Xaa is A or G
  MOD_RES (22), (23), (24), (25): Xaa is A or G or is absent
PXXVPQALSNITIQIMXXXXXXXXXLGEMSMIVRSXKX

SEQ ID NO: 73018 - protein, 37 aa, Artificial Sequence
  GFR-binding peptide
  MOD_RES (1), (35), (37): Xaa is C or S
  MOD_RES (15), (16), (17), (18), (19): Xaa is A or G
  MOD_RES (20), (21), (22), (23): Xaa is A or G or is absent
XVPTRLSNITIQIMXXXXXXXXXLGEMSDMVVESXGX

SEQ ID NO: 73019 - protein, 34 aa, Artificial Sequence; identical to SEQ ID NO: 52502
  GFR-binding peptide
  MOD_RES (1), (33): Xaa is C or S

SEQ ID NO: 73020 - protein, 42 aa, Artificial Sequence; identical to SEQ ID NO: 19368
  GFR-binding peptide
  MOD_RES (7), (41): Xaa is C or S
  MOD_RES (21), (22), (23), (24), (25): Xaa is A or G
  MOD_RES (26), (27), (28), (29): Xaa is A or G or is absent

SEQ ID NO: 73021 - protein, 37 aa, Artificial Sequence; identical to SEQ ID NO: 19369
  GFR-binding peptide
  MOD_RES (37), (37): Xaa is C or S

SEQ ID NO: 73022 - protein, 43 aa, Artificial Sequence; identical to SEQ ID NO: 19370
  GFR-binding peptide
  MOD_RES (3), (40), (42): Xaa is C or S

SEQ ID NO: 73023 - protein, 36 aa, Artificial Sequence
  GFR-binding peptide
  MOD_RES (2), (3), (35): Xaa is C or S
SXXVPARLSNITIQIMDAANNVVIGEMSDMVVEAXG

SEQ ID NO: 73024 - protein, 34 aa, Artificial Sequence; identical to SEQ ID NO: 19371
  GFR-binding peptide

SEQ ID NO: 73025 - protein, 38 aa, Artificial Sequence
  GFR-binding peptide
  MOD_RES (5), (6): Xaa is C or S
  MOD_RES (20), (21), (22), (23), (24): Xaa is A or G
  MOD_RES (25), (26), (27), (28): Xaa is A or G or is absent
APASXXVPARLSNITIQIMXXXXXXXXXIGEMSDMVVE

SEQ ID NO: 73026 - protein, 35 aa, Artificial Sequence; identical to SEQ ID NO: 54882
  GFR-binding peptide
  MOD_RES (2), (3): Xaa is C or S
  MOD_RES (17), (18), (19), (20), (21): Xaa is A or G
  MOD_RES (22), (23), (24), (25): Xaa is A or G or is absent

SEQ ID NO: 73027 - protein, 41 aa, Artificial Sequence
  GFR-binding peptide
  MOD_RES (6), (7), (39), (41): Xaa is C or S
STPPTXXVPTRLSNITIQIMDSANNVVLGEMSDMVVESXGX

SEQ ID NO: 73028 - protein, 31 aa, Artificial Sequence; identical to SEQ ID NO: 52509
  GFR-binding peptide
  MOD_RES (31), (31): Xaa is C or S

SEQ ID NO: 73029 - protein, 40 aa, Artificial Sequence
  GFR-binding peptide
  MOD_RES (2), (3), (37), (39): Xaa is C or S
  MOD_RES (17), (18), (19), (20), (21): Xaa is A or G
  MOD_RES (22), (23), (24), (25): Xaa is A or G or is absent
PXXTPTKMSNITMQIMXXXXXXXXXIGEMSGMVVDRXGXS

SEQ ID NO: 73030 - protein, 40 aa, Artificial Sequence; identical to SEQ ID NO: 19375
  GFR-binding peptide
  MOD_RES (3), (40): Xaa is C or S
  MOD_RES (19), (20), (21), (22), (23): Xaa is A or G
  MOD_RES (24), (25), (26), (27): Xaa is A or G or is absent

SEQ ID NO: 73031 - protein, 39 aa, Artificial Sequence
  GFR-binding peptide
  MOD_RES (6), (7): Xaa is C or S
  MOD_RES (21), (22), (23), (24), (25): Xaa is A or G
  MOD_RES (26), (27), (28), (29): Xaa is A or G or is absent
AAPASXXVPARLSNITIQIMXXXXXXXXXLGEMSDMVVE

SEQ ID NO: 73032 - protein, 42 aa, Artificial Sequence; identical to SEQ ID NO: 19376
  GFR-binding peptide
  MOD_RES (6), (40), (42): Xaa is C or S

SEQ ID NO: 73033 - protein, 39 aa, Artificial Sequence; identical to SEQ ID NO: 19377
  GFR-binding peptide
  MOD_RES (37), (39): Xaa is C or S

SEQ ID NO: 73034 - protein, 38 aa, Artificial Sequence; identical to SEQ ID NO: 52520
  GFR-binding peptide
  MOD_RES (4), (5), (38): Xaa is C or S
  MOD_RES (19), (20), (21), (22), (23): Xaa is A or G
  MOD_RES (24), (25), (26), (27): Xaa is A or G or is absent

SEQ ID NO: 73035 - protein, 35 aa, Artificial Sequence; identical to SEQ ID NO: 19378
  GFR-binding peptide
  MOD_RES (1), (1): Xaa is C or S

SEQ ID NO: 73036 - protein, 36 aa, Artificial Sequence; identical to SEQ ID NO: 19379
  GFR-binding peptide
  MOD_RES (4), (4): Xaa is C or S

SEQ ID NO: 73037 - protein, 39 aa, Artificial Sequence; identical to SEQ ID NO: 54895
  GFR-binding peptide
  MOD_RES (2), (3), (36), (38): Xaa is C or S
  MOD_RES (17), (18), (19), (20), (21): Xaa is A or G
  MOD_RES (22), (23), (24), (25): Xaa is A or G or is absent

SEQ ID NO: 73038 - protein, 38 aa, Artificial Sequence
  GFR-binding peptide
  MOD_RES (5), (6), (37): Xaa is C or S
VPSTXXAPVKTSNITMQIMDNGRVLLIGEMSMIVEEXG

SEQ ID NO: 73039 - protein, 34 aa, Artificial Sequence; identical to SEQ ID NO: 54896
  GFR-binding peptide
  MOD_RES (3), (4): Xaa is C or S

SEQ ID NO: 73040 - protein, 34 aa, Artificial Sequence; identical to SEQ ID NO: 19380
  GFR-binding peptide
  MOD_RES (16), (17), (18), (19), (20): Xaa is A or G
  MOD_RES (21), (22), (23), (24): Xaa is A or G or is absent

SEQ ID NO: 73041 - protein, 38 aa, Artificial Sequence; identical to SEQ ID NO: 19382
  GFR-binding peptide
  MOD_RES (3), (37): Xaa is C or S
  MOD_RES (17), (18), (19), (20), (21): Xaa is A or G
  MOD_RES (22), (23), (24), (25): Xaa is A or G or is absent

SEQ ID NO: 73042 - protein, 37 aa, Artificial Sequence; identical to SEQ ID NO: 52533
  GFR-binding peptide
  MOD_RES (4), (5), (37): Xaa is C or S

SEQ ID NO: 73043 - protein, 38 aa, Artificial Sequence; identical to SEQ ID NO: 19385
  GFR-binding peptide
  MOD_RES (3), (3): Xaa is C or S

SEQ ID NO: 73044 - protein, 40 aa, Artificial Sequence; identical to SEQ ID NO: 19386
  GFR-binding peptide
  MOD_RES (3), (37), (39): Xaa is C or S
  MOD_RES (17), (18), (19), (20), (21): Xaa is A or G
  MOD_RES (22), (23), (24), (25): Xaa is A or G or is absent

SEQ ID NO: 73045 - protein, 35 aa, Artificial Sequence; identical to SEQ ID NO: 19387
  GFR-binding peptide

SEQ ID NO: 73046 - protein, 42 aa, Artificial Sequence; identical to SEQ ID NO: 19388
  GFR-binding peptide
  MOD_RES (4), (41): Xaa is C or S

SEQ ID NO: 73047 - protein, 35 aa, Artificial Sequence
  GFR-binding peptide
  MOD_RES (4), (5): Xaa is C or S
PSTXXAPVKTSNITMQIMDNGRVLLIGEMSMIVEE

SEQ ID NO: 73048 - protein, 35 aa, Artificial Sequence
  GFR-binding peptide
  MOD_RES (1), (2), (33), (35): Xaa is C or S
XXVPQDLSNITIQIMVGRTPKVLGEMSMVVKSXKX

SEQ ID NO: 73049 - protein, 43 aa, Artificial Sequence; identical to SEQ ID NO: 19392
  GFR-binding peptide
  MOD_RES (7), (41), (43): Xaa is C or S
  MOD_RES (21), (22), (23), (24), (25): Xaa is A or G
  MOD_RES (26), (27), (28), (29): Xaa is A or G or is absent

SEQ ID NO: 73050 - protein, 36 aa, Artificial Sequence
  GFR-binding peptide
  MOD_RES (1), (2), (35): Xaa is C or S
  MOD_RES (16), (17), (18), (19), (20): Xaa is A or G
  MOD_RES (21), (22), (23), (24): Xaa is A or G or is absent
XXAPVKTSNITMQIMXXXXXXXXXIGEMSMIVEEXG

SEQ ID NO: 73051 - protein, 41 aa, Artificial Sequence; identical to SEQ ID NO: 19393
  GFR-binding peptide
  MOD_RES (1), (38), (40): Xaa is C or S

SEQ ID NO: 73052 - protein, 44 aa, Artificial Sequence; identical to SEQ ID NO: 19394
  GFR-binding peptide
  MOD_RES (4), (41), (43): Xaa is C or S
  MOD_RES (20), (21), (22), (23), (24): Xaa is A or G
  MOD_RES (25), (26), (27), (28): Xaa is A or G or is absent

SEQ ID NO: 73053 - protein, 36 aa, Artificial Sequence
  GFR-binding peptide
  MOD_RES (3), (4), (35): Xaa is C or S
STXXAPVKTSNITMQIMDNGRVLLLGEMSMIVEEXG

SEQ ID NO: 73054 - protein, 33 aa, Artificial Sequence
  GFR-binding peptide
  MOD_RES (1), (2): Xaa is C or S
XXVPARLSNITIQIMDAANNVVIGEMSDMVVEA

SEQ ID NO: 73055 - protein, 35 aa, Artificial Sequence
  GFR-binding peptide
  MOD_RES (1), (2), (33), (35): Xaa is C or S
XXVSQDLSNITIQIMIGKTPKILGEMSMIVKSXKX

SEQ ID NO: 73056 - protein, 40 aa, Artificial Sequence; identical to SEQ ID NO: 19395
  GFR-binding peptide
  MOD_RES (5), (39): Xaa is C or S
  MOD_RES (19), (20), (21), (22), (23): Xaa is A or G
  MOD_RES (24), (25), (26), (27): Xaa is A or G or is absent

SEQ ID NO: 73057 - protein, 39 aa, Artificial Sequence; identical to SEQ ID NO: 19396
  GFR-binding peptide
  MOD_RES (1), (38): Xaa is C or S

SEQ ID NO: 73058 - protein, 41 aa, Artificial Sequence; identical to SEQ ID NO: 19399
  GFR-binding peptide
  MOD_RES (4), (38), (40): Xaa is C or S
  MOD_RES (18), (19), (20), (21), (22): Xaa is A or G
  MOD_RES (23), (24), (25), (26): Xaa is A or G or is absent

SEQ ID NO: 73059 - protein, 38 aa, Artificial Sequence; identical to SEQ ID NO: 19400
  GFR-binding peptide
  MOD_RES (1), (35), (37): Xaa is C or S
  MOD_RES (15), (16), (17), (18), (19): Xaa is A or G
  MOD_RES (20), (21), (22), (23): Xaa is A or G or is absent

SEQ ID NO: 73060 - protein, 37 aa, Artificial Sequence; identical to SEQ ID NO: 19401
  GFR-binding peptide
  MOD_RES (37), (37): Xaa is C or S

SEQ ID NO: 73061 - protein, 35 aa, Artificial Sequence
  GFR-binding peptide
  MOD_RES (4), (5): Xaa is C or S
PSTXXAPVKTSNITMQIMDNGRVLLLGEMSMIVEE

SEQ ID NO: 73062 - protein, 34 aa, Artificial Sequence; identical to SEQ ID NO: 52561
  GFR-binding peptide
  MOD_RES (33), (33): Xaa is C or S
  MOD_RES (14), (15), (16), (17), (18): Xaa is A or G
  MOD_RES (19), (20), (21), (22): Xaa is A or G or is absent

SEQ ID NO: 73063 - protein, 37 aa, Artificial Sequence
  GFR-binding peptide
  MOD_RES (4), (5), (36): Xaa is C or S
PSTXXAPVKTSNITMQIMDNGRVLLIGEMSMIVEEXG

SEQ ID NO: 73064 - protein, 35 aa, Artificial Sequence; identical to SEQ ID NO: 52563
  GFR-binding peptide
  MOD_RES (2), (3): Xaa is C or S
  MOD_RES (17), (18), (19), (20), (21): Xaa is A or G
  MOD_RES (22), (23), (24), (25): Xaa is A or G or is absent

SEQ ID NO: 73065 - protein, 38 aa, Artificial Sequence
  GFR-binding peptide
  MOD_RES (1), (35), (37): Xaa is C or S
  MOD_RES (15), (16), (17), (18), (19): Xaa is A or G
  MOD_RES (20), (21), (22), (23): Xaa is A or G or is absent
XAPTKLSNITVQIMXXXXXXXXXLGEMSNMVVRSXGXH

SEQ ID NO: 73066 - protein, 40 aa, Artificial Sequence
  GFR-binding peptide
  MOD_RES (5), (6), (38), (40): Xaa is C or S
SAGPXXTPTKMSNITMQIMNDKQQIIIGEMSGMVVDRXGX

SEQ ID NO: 73067 - protein, 40 aa, Artificial Sequence
  GFR-binding peptide
  MOD_RES (6), (7), (39): Xaa is C or S
HVPKPXXAPTKLSNITVQIMDDSSNVILGEMSNMVVRSXG

SEQ ID NO: 73068 - protein, 41 aa, Artificial Sequence; identical to SEQ ID NO: 19404
  GFR-binding peptide
  MOD_RES (2), (39), (41): Xaa is C or S

SEQ ID NO: 73069 - protein, 36 aa, Artificial Sequence
  GFR-binding peptide
  MOD_RES (2), (3), (36): Xaa is C or S
  MOD_RES (17), (18), (19), (20), (21): Xaa is A or G
  MOD_RES (22), (23), (24), (25): Xaa is A or G or is absent
PXXVPQDLSNITIQIMXXXXXXXXXLGEMSMVVKSX

SEQ ID NO: 73070 - protein, 34 aa, Artificial Sequence
  GFR-binding peptide
  MOD_RES (3), (4): Xaa is C or S
KPXXAPTKLSNITVQIMDDSSNVILGEMSNMVVR

SEQ ID NO: 73071 - protein, 34 aa, Artificial Sequence; identical to SEQ ID NO: 19405
  GFR-binding peptide
  MOD_RES (16), (17), (18), (19), (20): Xaa is A or G
  MOD_RES (21), (22), (23), (24): Xaa is A or G or is absent

SEQ ID NO: 73072 - protein, 40 aa, Artificial Sequence; identical to SEQ ID NO: 54936
  GFR-binding peptide
  MOD_RES (6), (7), (38), (40): Xaa is C or S

SEQ ID NO: 73073 - protein, 40 aa, Artificial Sequence; identical to SEQ ID NO: 19408
  GFR-binding peptide
  MOD_RES (1), (38), (40): Xaa is C or S
  MOD_RES (17), (18), (19), (20), (21): Xaa is A or G
  MOD_RES (22), (23), (24), (25): Xaa is A or G or is absent

SEQ ID NO: 73074 - protein, 39 aa, Artificial Sequence; identical to SEQ ID NO: 19409
  GFR-binding peptide
  MOD_RES (6), (6): Xaa is C or S
  MOD_RES (20), (21), (22), (23), (24): Xaa is A or G
  MOD_RES (25), (26), (27), (28): Xaa is A or G or is absent

SEQ ID NO: 73075 - protein, 37 aa, Artificial Sequence; identical to SEQ ID NO: 19410
  GFR-binding peptide
  MOD_RES (34), (36): Xaa is C or S
  MOD_RES (14), (15), (16), (17), (18): Xaa is A or G
  MOD_RES (19), (20), (21), (22): Xaa is A or G or is absent

SEQ ID NO: 73076 - protein, 37 aa, Artificial Sequence; identical to SEQ ID NO: 54945
  GFR-binding peptide
  MOD_RES (3), (4), (37): Xaa is C or S
  MOD_RES (18), (19), (20), (21), (22): Xaa is A or G
  MOD_RES (23), (24), (25), (26): Xaa is A or G or is absent

SEQ ID NO: 73077 - protein, 34 aa, Artificial Sequence; identical to SEQ ID NO: 19413
  GFR-binding peptide
  MOD_RES (1), (1): Xaa is C or S
  MOD_RES (15), (16), (17), (18), (19): Xaa is A or G
  MOD_RES (20), (21), (22), (23): Xaa is A or G or is absent

SEQ ID NO: 73078 - protein, 37 aa, Artificial Sequence
  GFR-binding peptide
  MOD_RES (1), (2), (35), (37): Xaa is C or S
  MOD_RES (16), (17), (18), (19), (20): Xaa is A or G
  MOD_RES (21), (22), (23), (24): Xaa is A or G or is absent
XXAPVKTSNITMQIMXXXXXXXXXIGEMSMIVEEXGX

SEQ ID NO: 73079 - protein, 35 aa, Artificial Sequence; identical to SEQ ID NO: 19415
  GFR-binding peptide

SEQ ID NO: 73080 - protein, 34 aa, Artificial Sequence
  GFR-binding peptide
  MOD_RES (1), (1): Xaa is C or S
  MOD_RES (15), (16), (17), (18), (19): Xaa is A or G
  MOD_RES (20), (21), (22), (23): Xaa is A or G or is absent
XTPTKMSNITMQIMXXXXXXXXXLGEMSGMVVDR

SEQ ID NO: 73081 - protein, 36 aa, Artificial Sequence; identical to SEQ ID NO: 19416
  GFR-binding peptide
  MOD_RES (16), (17), (18), (19), (20): Xaa is A or G
  MOD_RES (21), (22), (23), (24): Xaa is A or G or is absent

SEQ ID NO: 73082 - protein, 38 aa, Artificial Sequence; identical to SEQ ID NO: 19417
  GFR-binding peptide
  MOD_RES (36), (38): Xaa is C or S
  MOD_RES (15), (16), (17), (18), (19): Xaa is A or G
  MOD_RES (20), (21), (22), (23): Xaa is A or G or is absent

SEQ ID NO: 73083 - protein, 43 aa, Artificial Sequence
  GFR-binding peptide
  MOD_RES (5), (6), (40), (42): Xaa is C or S
  MOD_RES (20), (21), (22), (23), (24): Xaa is A or G
  MOD_RES (25), (26), (27), (28): Xaa is A or G or is absent
APASXXVPARLSNITIQIMXXXXXXXXXLGEMSDMVVEAXGXR

SEQ ID NO: 73084 - protein, 41 aa, Artificial Sequence; identical to SEQ ID NO: 19418
  GFR-binding peptide
  MOD_RES (2), (39), (41): Xaa is C or S
  MOD_RES (18), (19), (20), (21), (22): Xaa is A or G
  MOD_RES (23), (24), (25), (26): Xaa is A or G or is absent

SEQ ID NO: 73085 - protein, 39 aa, Artificial Sequence; identical to SEQ ID NO: 19419
  GFR-binding peptide
  MOD_RES (4), (4): Xaa is C or S
  MOD_RES (20), (21), (22), (23), (24): Xaa is A or G
  MOD_RES (25), (26), (27), (28): Xaa is A or G or is absent

SEQ ID NO: 73086 - protein, 36 aa, Artificial Sequence; identical to SEQ ID NO: 52592
  GFR-binding peptide
  MOD_RES (3), (4): Xaa is C or S
  MOD_RES (18), (19), (20), (21), (22): Xaa is A or G
  MOD_RES (23), (24), (25), (26): Xaa is A or G or is absent

SEQ ID NO: 73087 - protein, 38 aa, Artificial Sequence
  GFR-binding peptide
  MOD_RES (4), (5): Xaa is C or S
  MOD_RES (19), (20), (21), (22), (23): Xaa is A or G
  MOD_RES (24), (25), (26), (27): Xaa is A or G or is absent
PPTXXVPTRLSNITIQIMXXXXXXXXXLGEMSDMVVES

SEQ ID NO: 73088 - protein, 36 aa, Artificial Sequence; identical to SEQ ID NO: 19423
  GFR-binding peptide
  MOD_RES (3), (3): Xaa is C or S

SEQ ID NO: 73089 - protein, 40 aa, Artificial Sequence; identical to SEQ ID NO: 54978
  GFR-binding peptide
  MOD_RES (6), (7), (38), (40): Xaa is C or S

SEQ ID NO: 73090 - protein, 35 aa, Artificial Sequence; identical to SEQ ID NO: 19424
  GFR-binding peptide
  MOD_RES (2), (2): Xaa is C or S

SEQ ID NO: 73091 - protein, 35 aa, Artificial Sequence; identical to SEQ ID NO: 19426
  GFR-binding peptide
  MOD_RES (3), (3): Xaa is C or S
  MOD_RES (17), (18), (19), (20), (21): Xaa is A or G
  MOD_RES (22), (23), (24), (25): Xaa is A or G or is absent

SEQ ID NO: 73092 - protein, 38 aa, Artificial Sequence; identical to SEQ ID NO: 52606
  GFR-binding peptide
  MOD_RES (3), (4), (37): Xaa is C or S
  MOD_RES (18), (19), (20), (21), (22): Xaa is A or G
  MOD_RES (23), (24), (25), (26): Xaa is A or G or is absent

SEQ ID NO: 73093 - protein, 36 aa, Artificial Sequence
  GFR-binding peptide
  MOD_RES (2), (3), (36): Xaa is C or S
  MOD_RES (17), (18), (19), (20), (21): Xaa is A or G
  MOD_RES (22), (23), (24), (25): Xaa is A or G or is absent
PXXVSQDLSNITIQIMXXXXXXXXXLGEMSMIVKSX

SEQ ID NO: 73094 - protein, 32 aa, Artificial Sequence
  GFR-binding peptide
  MOD_RES (1), (2): Xaa is C or S
XXTPTKMSNITMQIMNDKQQIILGEMSGMVVD

SEQ ID NO: 73095 - protein, 37 aa, Artificial Sequence
  GFR-binding peptide
  MOD_RES (2), (3), (34), (36): Xaa is C or S
PXXVSQDLSNITIQIMIGKTPKILGEMSMIVKSXKXS

SEQ ID NO: 73096 - protein, 37 aa, Artificial Sequence
  GFR-binding peptide
  MOD_RES (1), (2), (36): Xaa is C or S
  MOD_RES (16), (17), (18), (19), (20): Xaa is A or G
  MOD_RES (21), (22), (23), (24): Xaa is A or G or is absent
XXVPARLSNITIQIMXXXXXXXXXLGEMSDMVVEAXG

SEQ ID NO: 73097 - protein, 36 aa, Artificial Sequence
  GFR-binding peptide
  MOD_RES (4), (5): Xaa is C or S
PASXXVPARLSNITIQIMDAANNVVIGEMSDMVVEA

SEQ ID NO: 73098 - protein, 39 aa, Artificial Sequence
  GFR-binding peptide
  MOD_RES (5), (6), (38): Xaa is C or S
SAGPXXTPTKMSNITMQIMNDKQQIIIGEMSGMVVDRXG

SEQ ID NO: 73099 - protein, 35 aa, Artificial Sequence
  GFR-binding peptide
  MOD_RES (1), (2), (34): Xaa is C or S
XXVPTRLSNITIQIMDSANNVVIGEMSDMVVESXG

SEQ ID NO: 73100 - protein, 37 aa, Artificial Sequence; identical to SEQ ID NO: 19428
  GFR-binding peptide
  MOD_RES (5), (5): Xaa is C or S
  MOD_RES (19), (20), (21), (22), (23): Xaa is A or G
  MOD_RES (24), (25), (26), (27): Xaa is A or G or is absent

SEQ ID NO: 73101 - protein, 38 aa, Artificial Sequence; identical to SEQ ID NO: 19430
  GFR-binding peptide
  MOD_RES (6), (6): Xaa is C or S
  MOD_RES (20), (21), (22), (23), (24): Xaa is A or G
  MOD_RES (25), (26), (27), (28): Xaa is A or G or is absent

SEQ ID NO: 73102 - protein, 40 aa, Artificial Sequence
  GFR-binding peptide
  MOD_RES (5), (6), (39): Xaa is C or S
  MOD_RES (20), (21), (22), (23), (24): Xaa is A or G
  MOD_RES (25), (26), (27), (28): Xaa is A or G or is absent
SAAPXXVPQALSNITIQIMXXXXXXXXXLGEMSMIVRSXK

SEQ ID NO: 73103 - protein, 33 aa, Artificial Sequence; identical to SEQ ID NO: 19431
  GFR-binding peptide

SEQ ID NO: 73104 - protein, 42 aa, Artificial Sequence; identical to SEQ ID NO: 19432
  GFR-binding peptide
  MOD_RES (5), (42): Xaa is C or S

SEQ ID NO: 73105 - protein, 39 aa, Artificial Sequence
  GFR-binding peptide
  MOD_RES (5), (6), (38): Xaa is C or S
APASXXVPARLSNITIQIMDAANNVVLGEMSDMVVEAXG

SEQ ID NO: 73106 - protein, 32 aa, Artificial Sequence
  GFR-binding peptide
  MOD_RES (1), (32): Xaa is C or S
XVPQALSNITIQIMVGRKPKVLGEMSMIVRSX

SEQ ID NO: 73107 - protein, 39 aa, Artificial Sequence
  GFR-binding peptide
  MOD_RES (3), (4), (36), (38): Xaa is C or S
KPXXAPTKLSNITVQIMDDSSNVILGEMSNMVVRSXGXH

SEQ ID NO: 73108 - protein, 31 aa, Artificial Sequence
  GFR-binding peptide
  MOD_RES (1), (1): Xaa is C or S
XVPTRLSNITIQIMDSANNVVIGEMSDMVVE

SEQ ID NO: 73109 - protein, 32 aa, Artificial Sequence
  GFR-binding peptide
  MOD_RES (32), (32): Xaa is C or S
TPTKMSNITMQIMNDKQQIILGEMSGMVVDRX

SEQ ID NO: 73110 - protein, 40 aa, Artificial Sequence
  GFR-binding peptide
  MOD_RES (5), (6), (38), (40): Xaa is C or S
TPPTXXVPTRLSNITIQIMDSANNVVLGEMSDMVVESXGX

SEQ ID NO: 73111 - protein, 38 aa, Artificial Sequence; identical to SEQ ID NO: 52625
  GFR-binding peptide
  MOD_RES (3), (4), (35), (37): Xaa is C or S

SEQ ID NO: 73112 - protein, 37 aa, Artificial Sequence
  GFR-binding peptide
  MOD_RES (2), (3), (35), (37): Xaa is C or S
TXXVPTRLSNITIQIMDSANNVVLGEMSDMVVESXGX

SEQ ID NO: 73113 - protein, 36 aa, Artificial Sequence; identical to SEQ ID NO: 54995
  GFR-binding peptide
  MOD_RES (33), (35): Xaa is C or S
  MOD_RES (14), (15), (16), (17), (18): Xaa is A or G
  MOD_RES (19), (20), (21), (22): Xaa is A or G or is absent

SEQ ID NO: 73114 - protein, 37 aa, Artificial Sequence; identical to SEQ ID NO: 52627
  GFR-binding peptide
  MOD_RES (1), (2), (36): Xaa is C or S
  MOD_RES (16), (17), (18), (19), (20): Xaa is A or G
  MOD_RES (21), (22), (23), (24): Xaa is A or G or is absent

SEQ ID NO: 73115 - protein, 39 aa, Artificial Sequence
  GFR-binding peptide
  MOD_RES (3), (4), (36), (38): Xaa is C or S
GPXXTPTKMSNITMQIMNDKQQIILGEMSGMVVDRXGXS

SEQ ID NO: 73116 - protein, 41 aa, Artificial Sequence; identical to SEQ ID NO: 19438
  GFR-binding peptide
  MOD_RES (4), (41): Xaa is C or S

SEQ ID NO: 73117 - protein, 33 aa, Artificial Sequence; identical to SEQ ID NO: 19439
  GFR-binding peptide
  MOD_RES (1), (1): Xaa is C or S
  MOD_RES (15), (16), (17), (18), (19): Xaa is A or G
  MOD_RES (20), (21), (22), (23): Xaa is A or G or is absent

SEQ ID NO: 73118 - protein, 34 aa, Artificial Sequence
  GFR-binding peptide
  MOD_RES (3), (4): Xaa is C or S
SPXXVSQDLSNITIQIMIGKTPKILGEMSMIVKS

SEQ ID NO: 73119 - protein, 35 aa, Artificial Sequence; identical to SEQ ID NO: 19440
  GFR-binding peptide

SEQ ID NO: 73120 - protein, 38 aa, Artificial Sequence; identical to SEQ ID NO: 19441
  GFR-binding peptide
  MOD_RES (4), (38): Xaa is C or S
  MOD_RES (18), (19), (20), (21), (22): Xaa is A or G
  MOD_RES (23), (24), (25), (26): Xaa is A or G or is absent

SEQ ID NO: 73121 - protein, 39 aa, Artificial Sequence; identical to SEQ ID NO: 19442
  GFR-binding peptide
  MOD_RES (3), (37), (39): Xaa is C or S

SEQ ID NO: 73122 - protein, 33 aa, Artificial Sequence; identical to SEQ ID NO: 19443
  GFR-binding peptide

SEQ ID NO: 73123 - protein, 35 aa, Artificial Sequence
  GFR-binding peptide
  MOD_RES (2), (3): Xaa is C or S
  MOD_RES (17), (18), (19), (20), (21): Xaa is A or G
  MOD_RES (22), (23), (24), (25): Xaa is A or G or is absent
SXXVPARLSNITIQIMXXXXXXXXXLGEMSDMVVE

SEQ ID NO: 73124 - protein, 34 aa, Artificial Sequence; identical to SEQ ID NO: 19445
  GFR-binding peptide
  MOD_RES (2), (2): Xaa is C or S
  MOD_RES (16), (17), (18), (19), (20): Xaa is A or G
  MOD_RES (21), (22), (23), (24): Xaa is A or G or is absent

SEQ ID NO: 73125 - protein, 41 aa, Artificial Sequence
  GFR-binding peptide
  MOD_RES (5), (6), (39), (41): Xaa is C or S
  MOD_RES (20), (21), (22), (23), (24): Xaa is A or G
  MOD_RES (25), (26), (27), (28): Xaa is A or G or is absent
VPSTXXAPVKTSNITMQIMXXXXXXXXXLGEMSMIVEEXGX

SEQ ID NO: 73126 - protein, 33 aa, Artificial Sequence
  GFR-binding peptide
  MOD_RES (1), (33): Xaa is C or S
XAPTKLSNITVQIMDDSSNVILGEMSNMVVRSX

SEQ ID NO: 73127 - protein, 38 aa, Artificial Sequence; identical to SEQ ID NO: 19449
  GFR-binding peptide
  MOD_RES (3), (37): Xaa is C or S

SEQ ID NO: 73128 - protein, 39 aa, Artificial Sequence
  GFR-binding peptide
  MOD_RES (5), (6), (37), (39): Xaa is C or S
VPSTXXAPVKTSNITMQIMDNGRVLLLGEMSMIVEEXGX

SEQ ID NO: 73129 - protein, 42 aa, Artificial Sequence; identical to SEQ ID NO: 55013
  GFR-binding peptide
  MOD_RES (4), (5), (39), (41): Xaa is C or S
  MOD_RES (19), (20), (21), (22), (23): Xaa is A or G
  MOD_RES (24), (25), (26), (27): Xaa is A or G or is absent

SEQ ID NO: 73130 - protein, 37 aa, Artificial Sequence; identical to SEQ ID NO: 19452
  GFR-binding peptide
  MOD_RES (1), (1): Xaa is C or S

SEQ ID NO: 73131 - protein, 37 aa, Artificial Sequence; identical to SEQ ID NO: 19454
  GFR-binding peptide
  MOD_RES (1), (35), (37): Xaa is C or S
  MOD_RES (15), (16), (17), (18), (19): Xaa is A or G
  MOD_RES (20), (21), (22), (23): Xaa is A or G or is absent

SEQ ID NO: 73132 - protein, 39 aa, Artificial Sequence; identical to SEQ ID NO: 55016
  GFR-binding peptide
  MOD_RES (5), (6), (37), (39): Xaa is C or S

SEQ ID NO: 73133 - protein, 39 aa, Artificial Sequence
  GFR-binding peptide
  MOD_RES (5), (6), (38): Xaa is C or S
TPPTXXVPTRLSNITIQIMDSANNVVLGEMSDMVVESXG

SEQ ID NO: 73134 - protein, 33 aa, Artificial Sequence
  GFR-binding peptide
  MOD_RES (14), (15), (16), (17), (18): Xaa is A or G
  MOD_RES (19), (20), (21), (22): Xaa is A or G or is absent
TPTKMSNITMQIMXXXXXXXXXIGEMSGMVVDR

SEQ ID NO: 73135 - protein, 36 aa, Artificial Sequence
  GFR-binding peptide
  MOD_RES (2), (3): Xaa is C or S
  MOD_RES (17), (18), (19), (20), (21): Xaa is A or G
  MOD_RES (22), (23), (24), (25): Xaa is A or G or is absent
TXXVPTRLSNITIQIMXXXXXXXXXLGEMSDMVVES

SEQ ID NO: 73136 - protein, 35 aa, Artificial Sequence; identical to SEQ ID NO: 52641
  GFR-binding peptide
  MOD_RES (4), (5): Xaa is C or S

SEQ ID NO: 73137 - protein, 37 aa, Artificial Sequence
  GFR-binding peptide
  MOD_RES (2), (3), (37): Xaa is C or S
  MOD_RES (17), (18), (19), (20), (21): Xaa is A or G
  MOD_RES (22), (23), (24), (25): Xaa is A or G or is absent
PXXAPTKLSNITVQIMXXXXXXXXXLGEMSNMVVRSX

SEQ ID NO: 73138 - protein, 37 aa, Artificial Sequence; identical to SEQ ID NO: 19458
  GFR-binding peptide
  MOD_RES (34), (36): Xaa is C or S
  MOD_RES (14), (15), (16), (17), (18): Xaa is A or G
  MOD_RES (19), (20), (21), (22): Xaa is A or G or is absent

SEQ ID NO: 73139 - protein, 43 aa, Artificial Sequence; identical to SEQ ID NO: 19460
  GFR-binding peptide
  MOD_RES (5), (42): Xaa is C or S

SEQ ID NO: 73140 - protein, 37 aa, Artificial Sequence
  GFR-binding peptide
  MOD_RES (3), (4), (35), (37): Xaa is C or S
SPXXVPQDLSNITIQIMVGRTPKVLGEMSMVVKSXKX

SEQ ID NO: 73141 - protein, 42 aa, Artificial Sequence; identical to SEQ ID NO: 19462
  GFR-binding peptide
  MOD_RES (5), (42): Xaa is C or S
  MOD_RES (21), (22), (23), (24), (25): Xaa is A or G
  MOD_RES (26), (27), (28), (29): Xaa is A or G or is absent

SEQ ID NO: 73142 - protein, 34 aa, Artificial Sequence; identical to SEQ ID NO: 19463
  GFR-binding peptide

SEQ ID NO: 73143 - protein, 38 aa, Artificial Sequence
  GFR-binding peptide
  MOD_RES (3), (4), (36), (38): Xaa is C or S
KPXXAPTKLSNITVQIMDDSSNVILGEMSNMVVRSXGX

SEQ ID NO: 73144 - protein, 38 aa, Artificial Sequence; identical to SEQ ID NO: 19464
  GFR-binding peptide
  MOD_RES (2), (2): Xaa is C or S
  MOD_RES (18), (19), (20), (21), (22): Xaa is A or G
  MOD_RES (23), (24), (25), (26): Xaa is A or G or is absent

SEQ ID NO: 73145 - protein, 35 aa, Artificial Sequence; identical to SEQ ID NO: 19465
  GFR-binding peptide
  MOD_RES (1), (35): Xaa is C or S
  MOD_RES (15), (16), (17), (18), (19): Xaa is A or G
  MOD_RES (20), (21), (22), (23): Xaa is A or G or is absent

SEQ ID NO: 73146 - protein, 43 aa, Artificial Sequence
  GFR-binding peptide
  MOD_RES (6), (7), (41), (43): Xaa is C or S
  MOD_RES (21), (22), (23), (24), (25): Xaa is A or G
  MOD_RES (26), (27), (28), (29): Xaa is A or G or is absent
GSAGPXXTPTKMSNITMQIMXXXXXXXXXLGEMSGMVVDRXGX

SEQ ID NO: 73147 - protein, 35 aa, Artificial Sequence
  GFR-binding peptide
  MOD_RES (1), (2): Xaa is C or S
  MOD_RES (16), (17), (18), (19), (20): Xaa is A or G
  MOD_RES (21), (22), (23), (24): Xaa is A or G or is absent
XXAPTKLSNITVQIMXXXXXXXXXLGEMSNMVVRS

SEQ ID NO: 73148 - protein, 40 aa, Artificial Sequence; identical to SEQ ID NO: 55040
  GFR-binding peptide
  MOD_RES (3), (4), (37), (39): Xaa is C or S
  MOD_RES (18), (19), (20), (21), (22): Xaa is A or G
  MOD_RES (23), (24), (25), (26): Xaa is A or G or is absent

SEQ ID NO: 73149 - protein, 32 aa, Artificial Sequence; identical to SEQ ID NO: 19472
  GFR-binding peptide
  MOD_RES (14), (15), (16), (17), (18): Xaa is A or G
  MOD_RES (19), (20), (21), (22): Xaa is A or G or is absent

SEQ ID NO: 73150 - protein, 38 aa, Artificial Sequence
  GFR-binding peptide
  MOD_RES (2), (3), (36), (38): Xaa is C or S
  MOD_RES (17), (18), (19), (20), (21): Xaa is A or G
  MOD_RES (22), (23), (24), (25): Xaa is A or G or is absent
PXXVPQDLSNITIQIMXXXXXXXXXLGEMSMVVKSXKX

SEQ ID NO: 73151 - protein, 38 aa, Artificial Sequence
  GFR-binding peptide
  MOD_RES (4), (5), (38): Xaa is C or S
  MOD_RES (19), (20), (21), (22), (23): Xaa is A or G
  MOD_RES (24), (25), (26), (27): Xaa is A or G or is absent
ASPXXVPQDLSNITIQIMXXXXXXXXXLGEMSMVVKSX

SEQ ID NO: 73152 - protein, 33 aa, Artificial Sequence; identical to SEQ ID NO: 19476
  GFR-binding peptide
  MOD_RES (14), (15), (16), (17), (18): Xaa is A or G
  MOD_RES (19), (20), (21), (22): Xaa is A or G or is absent

SEQ ID NO: 73153 - protein, 33 aa, Artificial Sequence
  GFR-binding peptide
  MOD_RES (1), (2): Xaa is C or S
XXVPTRLSNITIQIMDSANNVVIGEMSDMVVES

SEQ ID NO: 73154 - protein, 37 aa, Artificial Sequence; identical to SEQ ID NO: 19477
  GFR-binding peptide
  MOD_RES (5), (5): Xaa is C or S
  MOD_RES (19), (20), (21), (22), (23): Xaa is A or G
  MOD_RES (24), (25), (26), (27): Xaa is A or G or is absent

SEQ ID NO: 73155 - protein, 35 aa, Artificial Sequence; identical to SEQ ID NO: 52673
  GFR-binding peptide
  MOD_RES (3), (4), (35): Xaa is C or S

SEQ ID NO: 73156 - protein, 33 aa, Artificial Sequence
  GFR-binding peptide
  MOD_RES (2), (3): Xaa is C or S
TXXVPTRLSNITIQIMDSANNVVLGEMSDMVVE

SEQ ID NO: 73157 - protein, 43 aa, Artificial Sequence
  GFR-binding peptide
  MOD_RES (6), (7), (40), (42): Xaa is C or S
  MOD_RES (21), (22), (23), (24), (25): Xaa is A or G
  MOD_RES (26), (27), (28), (29): Xaa is A or G or is absent
RVPSTXXAPVKTSNITMQIMXXXXXXXXXIGEMSMIVEEXGXL

SEQ ID NO: 73158 - protein, 37 aa, Artificial Sequence
  GFR-binding peptide
  MOD_RES (1), (34), (36): Xaa is C or S
  MOD_RES (15), (16), (17), (18), (19): Xaa is A or G
  MOD_RES (20), (21), (22), (23): Xaa is A or G or is absent
XVPQDLSNITIQIMXXXXXXXXXLGEMSMVVKSXKXS

SEQ ID NO: 73159 - protein, 31 aa, Artificial Sequence
  GFR-binding peptide
  MOD_RES (1), (1): Xaa is C or S
XVPQDLSNITIQIMVGRTPKVLGEMSMVVKS

SEQ ID NO: 73160 - protein, 40 aa, Artificial Sequence; identical to SEQ ID NO: 19483
  GFR-binding peptide
  MOD_RES (5), (39): Xaa is C or S

SEQ ID NO: 73161 - protein, 40 aa, Artificial Sequence; identical to SEQ ID NO: 19484
  GFR-binding peptide
  MOD_RES (4), (4): Xaa is C or S
  MOD_RES (20), (21), (22), (23), (24): Xaa is A or G
  MOD_RES (25), (26), (27), (28): Xaa is A or G or is absent

SEQ ID NO: 73162 - protein, 40 aa, Artificial Sequence
  GFR-binding peptide
  MOD_RES (6), (7), (38), (40): Xaa is C or S
RVPSTXXAPVKTSNITMQIMDNGRVLLIGEMSMIVEEXGX

SEQ ID NO: 73163 - protein, 41 aa, Artificial Sequence; identical to SEQ ID NO: 55054
  GFR-binding peptide
  MOD_RES (6), (7), (38), (40): Xaa is C or S

SEQ ID NO: 73164 - protein, 39 aa, Artificial Sequence
  GFR-binding peptide
  MOD_RES (6), (7), (39): Xaa is C or S
AAPASXXVPARLSNITIQIMDAANNVVIGEMSDMVVEAX

SEQ ID NO: 73165 - protein, 37 aa, Artificial Sequence
  GFR-binding peptide
  MOD_RES (1), (35), (37): Xaa is C or S
  MOD_RES (15), (16), (17), (18), (19): Xaa is A or G
  MOD_RES (20), (21), (22), (23): Xaa is A or G or is absent
XVPARLSNITIQIMXXXXXXXXXLGEMSDMVVEAXGX

SEQ ID NO: 73166 - protein, 38 aa, Artificial Sequence
  GFR-binding peptide
  MOD_RES (5), (6), (37): Xaa is C or S
SAAPXXVPQALSNITIQIMVGRKPKVLGEMSMIVRSXK

SEQ ID NO: 73167 - protein, 41 aa, Artificial Sequence
  GFR-binding peptide
  MOD_RES (5), (6), (40): Xaa is C or S
  MOD_RES (20), (21), (22), (23), (24): Xaa is A or G
  MOD_RES (25), (26), (27), (28): Xaa is A or G or is absent
SAGPXXTPTKMSNITMQIMXXXXXXXXXLGEMSGMVVDRXG

SEQ ID NO: 73168 - protein, 33 aa, Artificial Sequence
  GFR-binding peptide
  MOD_RES (1), (2), (33): Xaa is C or S
XXVSQDLSNITIQIMIGKTPKILGEMSMIVKSX

SEQ ID NO: 73169 - protein, 41 aa, Artificial Sequence
  GFR-binding peptide
  MOD_RES (5), (6), (38), (40): Xaa is C or S
SAGPXXTPTKMSNITMQIMNDKQQIILGEMSGMVVDRXGXS

SEQ ID NO: 73170 - protein, 38 aa, Artificial Sequence
  GFR-binding peptide
  MOD_RES (3), (4), (38): Xaa is C or S
  MOD_RES (18), (19), (20), (21), (22): Xaa is A or G
  MOD_RES (23), (24), (25), (26): Xaa is A or G or is absent
ASXXVPARLSNITIQIMXXXXXXXXXIGEMSDMVVEAX

SEQ ID NO: 73171 - protein, 39 aa, Artificial Sequence; identical to SEQ ID NO: 19487
  GFR-binding peptide
  MOD_RES (3), (3): Xaa is C or S
  MOD_RES (19), (20), (21), (22), (23): Xaa is A or G
  MOD_RES (24), (25), (26), (27): Xaa is A or G or is absent

SEQ ID NO: 73172 - protein, 43 aa, Artificial Sequence; identical to SEQ ID NO: 19488
  GFR-binding peptide
  MOD_RES (6), (40), (42): Xaa is C or S
  MOD_RES (20), (21), (22), (23), (24): Xaa is A or G
  MOD_RES (25), (26), (27), (28): Xaa is A or G or is absent

SEQ ID NO: 73173 - protein, 36 aa, Artificial Sequence
  GFR-binding peptide
  MOD_RES (5), (6): Xaa is C or S
SASPXXVSQDLSNITIQIMIGKTPKILGEMSMIVKS

SEQ ID NO: 73174 - protein, 38 aa, Artificial Sequence
  GFR-binding peptide
  MOD_RES (3), (4), (37): Xaa is C or S
  MOD_RES (18), (19), (20), (21), (22): Xaa is A or G
  MOD_RES (23), (24), (25), (26): Xaa is A or G or is absent
APXXVPQALSNITIQIMXXXXXXXXXLGEMSMIVRSXK

SEQ ID NO: 73175 - protein, 40 aa, Artificial Sequence; identical to SEQ ID NO: 19493
  GFR-binding peptide
  MOD_RES (2), (39): Xaa is C or S
  MOD_RES (18), (19), (20), (21), (22): Xaa is A or G
  MOD_RES (23), (24), (25), (26): Xaa is A or G or is absent

SEQ ID NO: 73176 - protein, 35 aa, Artificial Sequence; identical to SEQ ID NO: 55062
  GFR-binding peptide
  MOD_RES (1), (32), (34): Xaa is C or S

SEQ ID NO: 73177 - protein, 35 aa, Artificial Sequence; identical to SEQ ID NO: 55064
  GFR-binding peptide
  MOD_RES (34), (34): Xaa is C or S
  MOD_RES (14), (15), (16), (17), (18): Xaa is A or G
  MOD_RES (19), (20), (21), (22): Xaa is A or G or is absent

SEQ ID NO: 73178 - protein, 32 aa, Artificial Sequence
  GFR-binding peptide
  MOD_RES (14), (15), (16), (17), (18): Xaa is A or G
  MOD_RES (19), (20), (21), (22): Xaa is A or G or is absent
VPTRLSNITIQIMXXXXXXXXXLGEMSDMVVE

SEQ ID NO: 73179 - protein, 37 aa, Artificial Sequence; identical to SEQ ID NO: 19497
  GFR-binding peptide
  MOD_RES (2), (2): Xaa is C or S

SEQ ID NO: 73180 - protein, 33 aa, Artificial Sequence; identical to SEQ ID NO: 55077
  GFR-binding peptide
  MOD_RES (2), (3): Xaa is C or S

SEQ ID NO: 73181 - protein, 38 aa, Artificial Sequence; identical to SEQ ID NO: 19500
  GFR-binding peptide
  MOD_RES (2), (2): Xaa is C or S

SEQ ID NO: 73182 - protein, 42 aa, Artificial Sequence
  GFR-binding peptide
  MOD_RES (5), (6), (39), (41): Xaa is C or S
  MOD_RES (20), (21), (22), (23), (24): Xaa is A or G
  MOD_RES (25), (26), (27), (28): Xaa is A or G or is absent
VPSTXXAPVKTSNITMQIMXXXXXXXXXIGEMSMIVEEXGXL

SEQ ID NO: 73183 - protein, 40 aa, Artificial Sequence; identical to SEQ ID NO: 52712
  GFR-binding peptide
  MOD_RES (5), (6), (39): Xaa is C or S
  MOD_RES (20), (21), (22), (23), (24): Xaa is A or G
  MOD_RES (25), (26), (27), (28): Xaa is A or G or is absent

SEQ ID NO: 73184 - protein, 36 aa, Artificial Sequence; identical to SEQ ID NO: 19503
  GFR-binding peptide
  MOD_RES (36), (36): Xaa is C or S

SEQ ID NO: 73185 - protein, 41 aa, Artificial Sequence; identical to SEQ ID NO: 55084
  GFR-binding peptide
  MOD_RES (4), (5), (38), (40): Xaa is C or S
  MOD_RES (19), (20), (21), (22), (23): Xaa is A or G
  MOD_RES (24), (25), (26), (27): Xaa is A or G or is absent

SEQ ID NO: 73186 - protein, 38 aa, Artificial Sequence
  GFR-binding peptide
  MOD_RES (6), (7), (38): Xaa is C or S
ASAAPXXVPQALSNITIQIMVGRKPKVLGEMSMIVRSX

SEQ ID NO: 73187 - protein, 40 aa, Artificial Sequence; identical to SEQ ID NO: 19505
  GFR-binding peptide
  MOD_RES (6), (40): Xaa is C or S
  MOD_RES (20), (21), (22), (23), (24): Xaa is A or G
  MOD_RES (25), (26), (27), (28): Xaa is A or G or is absent

SEQ ID NO: 73188 - protein, 40 aa, Artificial Sequence
  GFR-binding peptide
  MOD_RES (5), (6), (37), (39): Xaa is C or S
VPSTXXAPVKTSNITMQIMDNGRVLLIGEMSMIVEEXGXL

SEQ ID NO: 73189 - protein, 37 aa, Artificial Sequence; identical to SEQ ID NO: 55091
  GFR-binding peptide
  MOD_RES (3), (4), (37): Xaa is C or S
  MOD_RES (18), (19), (20), (21), (22): Xaa is A or G
  MOD_RES (23), (24), (25), (26): Xaa is A or G or is absent

SEQ ID NO: 73190 - protein, 42 aa, Artificial Sequence
  GFR-binding peptide
  MOD_RES (6), (7), (41): Xaa is C or S
  MOD_RES (21), (22), (23), (24), (25): Xaa is A or G
  MOD_RES (26), (27), (28), (29): Xaa is A or G or is absent
AAPASXXVPARLSNITIQIMXXXXXXXXXLGEMSDMVVEAXG

SEQ ID NO: 73191 - protein, 36 aa, Artificial Sequence; identical to SEQ ID NO: 19508
  GFR-binding peptide
  MOD_RES (16), (17), (18), (19), (20): Xaa is A or G
  MOD_RES (21), (22), (23), (24): Xaa is A or G or is absent

SEQ ID NO: 73192 - protein, 39 aa, Artificial Sequence; identical to SEQ ID NO: 19509
  GFR-binding peptide
  MOD_RES (5), (39): Xaa is C or S
  MOD_RES (19), (20), (21), (22), (23): Xaa is A or G
  MOD_RES (24), (25), (26), (27): Xaa is A or G or is absent

SEQ ID NO: 73193 - protein, 36 aa, Artificial Sequence
  GFR-binding peptide
  MOD_RES (1), (2), (36): Xaa is C or S
  MOD_RES (16), (17), (18), (19), (20): Xaa is A or G
  MOD_RES (21), (22), (23), (24): Xaa is A or G or is absent
XXTPTKMSNITMQIMXXXXXXXXXLGEMSGMVVDRX

SEQ ID NO: 73194 - protein, 36 aa, Artificial Sequence
  GFR-binding peptide
  MOD_RES (5), (6): Xaa is C or S
VPSTXXAPVKTSNITMQIMDNGRVLLIGEMSMIVEE

SEQ ID NO: 73195 - protein, 44 aa, Artificial Sequence; identical to SEQ ID NO: 19510
  GFR-binding peptide
  MOD_RES (5), (42), (44): Xaa is C or S
  MOD_RES (21), (22), (23), (24), (25): Xaa is A or G
  MOD_RES (26), (27), (28), (29): Xaa is A or G or is absent

SEQ ID NO: 73196 - protein, 37 aa, Artificial Sequence; identical to SEQ ID NO: 19513
  GFR-binding peptide
  MOD_RES (4), (4): Xaa is C or S
  MOD_RES (18), (19), (20), (21), (22): Xaa is A or G
  MOD_RES (23), (24), (25), (26): Xaa is A or G or is absent

SEQ ID NO: 73197 - protein, 37 aa, Artificial Sequence
  GFR-binding peptide
  MOD_RES (1), (35), (37): Xaa is C or S
  MOD_RES (15), (16), (17), (18), (19): Xaa is A or G
  MOD_RES (20), (21), (22), (23): Xaa is A or G or is absent
XTPTKMSNITMQIMXXXXXXXXXIGEMSGMVVDRXGX

SEQ ID NO: 73198 - protein, 40 aa, Artificial Sequence
  GFR-binding peptide
  MOD_RES (3), (4), (37), (39): Xaa is C or S
  MOD_RES (18), (19), (20), (21), (22): Xaa is A or G
  MOD_RES (23), (24), (25), (26): Xaa is A or G or is absent
SPXXVSQDLSNITIQIMXXXXXXXXXLGEMSMIVKSXKXS

SEQ ID NO: 73199 - protein, 41 aa, Artificial Sequence; identical to SEQ ID NO: 19515
  GFR-binding peptide
  MOD_RES (5), (5): Xaa is C or S

SEQ ID NO: 73200 - protein, 34 aa, Artificial Sequence; identical to SEQ ID NO: 19516
  GFR-binding peptide
  MOD_RES (2), (2): Xaa is C or S

SEQ ID NO: 73201 - protein, 37 aa, Artificial Sequence; identical to SEQ ID NO: 19517
  GFR-binding peptide
  MOD_RES (2), (2): Xaa is C or S
  MOD_RES (18), (19), (20), (21), (22): Xaa is A or G
  MOD_RES (23), (24), (25), (26): Xaa is A or G or is absent

SEQ ID NO: 73202 - protein, 39 aa, Artificial Sequence
  GFR-binding peptide
  MOD_RES (5), (6), (37), (39): Xaa is C or S
SASPXXVPQDLSNITIQIMVGRTPKVLGEMSMVVKSXKX

SEQ ID NO: 73203 - protein, 42 aa, Artificial Sequence; identical to SEQ ID NO: 19519
  GFR-binding peptide
  MOD_RES (5), (42): Xaa is C or S

SEQ ID NO: 73204 - protein, 39 aa, Artificial Sequence
  GFR-binding peptide
  MOD_RES (2), (3), (37), (39): Xaa is C or S
  MOD_RES (17), (18), (19), (20), (21): Xaa is A or G
  MOD_RES (22), (23), (24), (25): Xaa is A or G or is absent
PXXTPTKMSNITMQIMXXXXXXXXXIGEMSGMVVDRXGX

SEQ ID NO: 73205 - protein, 39 aa, Artificial Sequence
  GFR-binding peptide
  MOD_RES (3), (4), (38): Xaa is C or S
  MOD_RES (18), (19), (20), (21), (22): Xaa is A or G
  MOD_RES (23), (24), (25), (26): Xaa is A or G or is absent
GPXXTPTKMSNITMQIMXXXXXXXXXLGEMSGMVVDRXG

SEQ ID NO: 73206 - protein, 34 aa, Artificial Sequence; identical to SEQ ID NO: 55108
  GFR-binding peptide
  MOD_RES (34), (34): Xaa is C or S
  MOD_RES (14), (15), (16), (17), (18): Xaa is A or G
  MOD_RES (19), (20), (21), (22): Xaa is A or G or is absent

SEQ ID NO: 73207 - protein, 34 aa, Artificial Sequence; identical to SEQ ID NO: 52734
  GFR-binding peptide
  MOD_RES (1), (32), (34): Xaa is C or S

SEQ ID NO: 73208 - protein, 38 aa, Artificial Sequence
  GFR-binding peptide
  MOD_RES (2), (3), (35), (37): Xaa is C or S
SXXVPARLSNITIQIMDAANNVVLGEMSDMVVEAXGXR

SEQ ID NO: 73209 - protein, 36 aa, Artificial Sequence; identical to SEQ ID NO: 19521
  GFR-binding peptide
  MOD_RES (3), (3): Xaa is C or S
  MOD_RES (17), (18), (19), (20), (21): Xaa is A or G
  MOD_RES (22), (23), (24), (25): Xaa is A or G or is absent

SEQ ID NO: 73210 - protein, 35 aa, Artificial Sequence
  GFR-binding peptide
  MOD_RES (2), (3), (34): Xaa is C or S
TXXAPVKTSNITMQIMDNGRVLLLGEMSMIVEEXG

SEQ ID NO: 73211 - protein, 36 aa, Artificial Sequence; identical to SEQ ID NO: 52737
  GFR-binding peptide
  MOD_RES (2), (3), (36): Xaa is C or S
  MOD_RES (17), (18), (19), (20), (21): Xaa is A or G
  MOD_RES (22), (23), (24), (25): Xaa is A or G or is absent

SEQ ID NO: 73212 - protein, 39 aa, Artificial Sequence
  GFR-binding peptide
  MOD_RES (6), (7): Xaa is C or S
  MOD_RES (21), (22), (23), (24), (25): Xaa is A or G
  MOD_RES (26), (27), (28), (29): Xaa is A or G or is absent
ASAAPXXVPQALSNITIQIMXXXXXXXXXLGEMSMIVRS

SEQ ID NO: 73213 - protein, 37 aa, Artificial Sequence
  GFR-binding peptide
  MOD_RES (4), (5), (36): Xaa is C or S
ASPXXVSQDLSNITIQIMIGKTPKILGEMSMIVKSXK

SEQ ID NO: 73214 - protein, 39 aa, Artificial Sequence; identical to SEQ ID NO: 19523
  GFR-binding peptide
  MOD_RES (2), (39): Xaa is C or S

SEQ ID NO: 73215 - protein, 35 aa, Artificial Sequence
  GFR-binding peptide
  MOD_RES (1), (35): Xaa is C or S
  MOD_RES (15), (16), (17), (18), (19): Xaa is A or G
  MOD_RES (20), (21), (22), (23): Xaa is A or G or is absent
XTPTKMSNITMQIMXXXXXXXXXLGEMSGMVVDRX

SEQ ID NO: 73216 - protein, 32 aa, Artificial Sequence
  GFR-binding peptide
  MOD_RES (1), (1): Xaa is C or S
XAPTKLSNITVQIMDDSSNVILGEMSNMVVRS

SEQ ID NO: 73217 - protein, 39 aa, Artificial Sequence
  GFR-binding peptide
  MOD_RES (5), (6), (37), (39): Xaa is C or S
VPSTXXAPVKTSNITMQIMDNGRVLLIGEMSMIVEEXGX

SEQ ID NO: 73218 - protein, 41 aa, Artificial Sequence
  GFR-binding peptide
  MOD_RES (6), (7), (41): Xaa is C or S
  MOD_RES (21), (22), (23), (24), (25): Xaa is A or G
  MOD_RES (26), (27), (28), (29): Xaa is A or G or is absent
AAPASXXVPARLSNITIQIMXXXXXXXXXLGEMSDMVVEAX

SEQ ID NO: 73219 - protein, 44 aa, Artificial Sequence
  GFR-binding peptide
  MOD_RES (6), (7), (41), (43): Xaa is C or S
  MOD_RES (21), (22), (23), (24), (25): Xaa is A or G
  MOD_RES (26), (27), (28), (29): Xaa is A or G or is absent
HVPKPXXAPTKLSNITVQIMXXXXXXXXXLGEMSNMVVRSXGXH

SEQ ID NO: 73220 - protein, 36 aa, Artificial Sequence; identical to SEQ ID NO: 55124
  GFR-binding peptide
  MOD_RES (3), (4): Xaa is C or S
  MOD_RES (18), (19), (20), (21), (22): Xaa is A or G
  MOD_RES (23), (24), (25), (26): Xaa is A or G or is absent

SEQ ID NO: 73221 - protein, 43 aa, Artificial Sequence; identical to SEQ ID NO: 19529
  GFR-binding peptide
  MOD_RES (7), (41), (43): Xaa is C or S
  MOD_RES (21), (22), (23), (24), (25): Xaa is A or G
  MOD_RES (26), (27), (28), (29): Xaa is A or G or is absent

SEQ ID NO: 73222 - protein, 35 aa, Artificial Sequence
  GFR-binding peptide
  MOD_RES (33), (35): Xaa is C or S
  MOD_RES (14), (15), (16), (17), (18): Xaa is A or G
  MOD_RES (19), (20), (21), (22): Xaa is A or G or is absent
APVKTSNITMQIMXXXXXXXXXIGEMSMIVEEXGX

SEQ ID NO: 73223 - protein, 39 aa, Artificial Sequence; identical to SEQ ID NO: 19532
  GFR-binding peptide
  MOD_RES (6), (6): Xaa is C or S

SEQ ID NO: 73224 - protein, 32 aa, Artificial Sequence
  GFR-binding peptide
  MOD_RES (14), (15), (16), (17), (18): Xaa is A or G
  MOD_RES (19), (20), (21), (22): Xaa is A or G or is absent
APVKTSNITMQIMXXXXXXXXXIGEMSMIVEE

SEQ ID NO: 73225 - protein, 36 aa, Artificial Sequence
  GFR-binding peptide
  MOD_RES (3), (4): Xaa is C or S
  MOD_RES (18), (19), (20), (21), (22): Xaa is A or G
  MOD_RES (23), (24), (25), (26): Xaa is A or G or is absent
PTXXVPTRLSNITIQIMXXXXXXXXXIGEMSDMVVE

SEQ ID NO: 73226 - protein, 37 aa, Artificial Sequence
  GFR-binding peptide
  MOD_RES (6), (7): Xaa is C or S
GSAGPXXTPTKMSNITMQIMNDKQQIILGEMSGMVVD

SEQ ID NO: 73227 - protein, 39 aa, Artificial Sequence
  GFR-binding peptide
  MOD_RES (6), (7), (39): Xaa is C or S
GSAGPXXTPTKMSNITMQIMNDKQQIILGEMSGMVVDRX

SEQ ID NO: 73228 - protein, 37 aa, Artificial Sequence; identical to SEQ ID NO: 55133
  GFR-binding peptide
  MOD_RES (2), (3), (36): Xaa is C or S
  MOD_RES (17), (18), (19), (20), (21): Xaa is A or G
  MOD_RES (22), (23), (24), (25): Xaa is A or G or is absent

SEQ ID NO: 73229 - protein, 37 aa, Artificial Sequence
  GFR-binding peptide
  MOD_RES (4), (5), (37): Xaa is C or S
AGPXXTPTKMSNITMQIMNDKQQIIIGEMSGMVVDRX

SEQ ID NO: 73230 - protein, 42 aa, Artificial Sequence
  GFR-binding peptide
  MOD_RES (5), (6), (39), (41): Xaa is C or S
  MOD_RES (20), (21), (22), (23), (24): Xaa is A or G
  MOD_RES (25), (26), (27), (28): Xaa is A or G or is absent
SASPXXVPQDLSNITIQIMXXXXXXXXXLGEMSMVVKSXKXS

SEQ ID NO: 73231 - protein, 31 aa, Artificial Sequence
  GFR-binding peptide
  MOD_RES (1), (1): Xaa is C or S
XAPVKTSNITMQIMDNGRVLLIGEMSMIVEE

SEQ ID NO: 73232 - protein, 36 aa, Artificial Sequence
  GFR-binding peptide
  MOD_RES (4), (5): Xaa is C or S
AGPXXTPTKMSNITMQIMNDKQQIIIGEMSGMVVDR

SEQ ID NO: 73233 - protein, 35 aa, Artificial Sequence; identical to SEQ ID NO: 52772
  GFR-binding peptide
  MOD_RES (1), (2), (34): Xaa is C or S

SEQ ID NO: 73234 - protein, 37 aa, Artificial Sequence; identical to SEQ ID NO: 19537
  GFR-binding peptide
  MOD_RES (2), (2): Xaa is C or S

SEQ ID NO: 73235 - protein, 40 aa, Artificial Sequence
  GFR-binding peptide
  MOD_RES (6), (7): Xaa is C or S
  MOD_RES (21), (22), (23), (24), (25): Xaa is A or G
  MOD_RES (26), (27), (28), (29): Xaa is A or G or is absent
GSAGPXXTPTKMSNITMQIMXXXXXXXXXIGEMSGMVVDR

SEQ ID NO: 73236 - protein, 36 aa, Artificial Sequence
  GFR-binding peptide
  MOD_RES (1), (33), (35): Xaa is C or S
XVPTRLSNITIQIMDSANNVVIGEMSDMVVESXGXR

SEQ ID NO: 73237 - protein, 40 aa, Artificial Sequence
  GFR-binding peptide
  MOD_RES (6), (7), (38), (40): Xaa is C or S
ASASPXXVSQDLSNITIQIMIGKTPKILGEMSMIVKSXKX

SEQ ID NO: 73238 - protein, 41 aa, Artificial Sequence
  GFR-binding peptide
  MOD_RES (4), (5), (38), (40): Xaa is C or S
  MOD_RES (19), (20), (21), (22), (23): Xaa is A or G
  MOD_RES (24), (25), (26), (27): Xaa is A or G or is absent
PSTXXAPVKTSNITMQIMXXXXXXXXXLGEMSMIVEEXGXL

SEQ ID NO: 73239 - protein, 32 aa, Artificial Sequence
  GFR-binding peptide
  MOD_RES (1), (2): Xaa is C or S
XXAPVKTSNITMQIMDNGRVLLIGEMSMIVEE

SEQ ID NO: 73240 - protein, 38 aa, Artificial Sequence; identical to SEQ ID NO: 19541
  GFR-binding peptide
  MOD_RES (3), (3): Xaa is C or S

SEQ ID NO: 73241 - protein, 36 aa, Artificial Sequence
  GFR-binding peptide
  MOD_RES (3), (4), (36): Xaa is C or S
GPXXTPTKMSNITMQIMNDKQQIILGEMSGMVVDRX

SEQ ID NO: 73242 - protein, 40 aa, Artificial Sequence; identical to SEQ ID NO: 19543
  GFR-binding peptide
  MOD_RES (3), (40): Xaa is C or S
  MOD_RES (19), (20), (21), (22), (23): Xaa is A or G
  MOD_RES (24), (25), (26), (27): Xaa is A or G or is absent

SEQ ID NO: 73243 - protein, 40 aa, Artificial Sequence
  GFR-binding peptide
  MOD_RES (6), (7), (38), (40): Xaa is C or S
RVPSTXXAPVKTSNITMQIMDNGRVLLLGEMSMIVEEXGX

SEQ ID NO: 73244 - protein, 40 aa, Artificial Sequence
  GFR-binding peptide
  MOD_RES (5), (6), (39): Xaa is C or S
  MOD_RES (20), (21), (22), (23), (24): Xaa is A or G
  MOD_RES (25), (26), (27), (28): Xaa is A or G or is absent
VPSTXXAPVKTSNITMQIMXXXXXXXXXLGEMSMIVEEXG

SEQ ID NO: 73245 - protein, 34 aa, Artificial Sequence; identical to SEQ ID NO: 19544
  GFR-binding peptide

SEQ ID NO: 73246 - protein, 35 aa, Artificial Sequence
  GFR-binding peptide
  MOD_RES (32), (34): Xaa is C or S
VPARLSNITIQIMDAANNVVLGEMSDMVVEAXGXR

SEQ ID NO: 73247 - protein, 33 aa, Artificial Sequence
  GFR-binding peptide
  MOD_RES (1), (1): Xaa is C or S
  MOD_RES (15), (16), (17), (18), (19): Xaa is A or G
  MOD_RES (20), (21), (22), (23): Xaa is A or G or is absent
XVPQALSNITIQIMXXXXXXXXXLGEMSMIVRS

SEQ ID NO: 73248 - protein, 34 aa, Artificial Sequence
  GFR-binding peptide
  MOD_RES (1), (34): Xaa is C or S
  MOD_RES (15), (16), (17), (18), (19): Xaa is A or G
  MOD_RES (20), (21), (22), (23): Xaa is A or G or is absent
XVPQDLSNITIQIMXXXXXXXXXLGEMSMVVKSX

SEQ ID NO: 73249 - protein, 36 aa, Artificial Sequence
  GFR-binding peptide
  MOD_RES (2), (3), (35): Xaa is C or S
PXXTPTKMSNITMQIMNDKQQIIIGEMSGMVVDRXG

SEQ ID NO: 73250 - protein, 33 aa, Artificial Sequence
  GFR-binding peptide
  MOD_RES (1), (33): Xaa is C or S
XVPTRLSNITIQIMDSANNVVLGEMSDMVVESX

SEQ ID NO: 73251 - protein, 36 aa, Artificial Sequence; identical to SEQ ID NO: 19549
  GFR-binding peptide
  MOD_RES (35), (35): Xaa is C or S
  MOD_RES (14), (15), (16), (17), (18): Xaa is A or G
  MOD_RES (19), (20), (21), (22): Xaa is A or G or is absent

SEQ ID NO: 73252 - protein, 38 aa, Artificial Sequence
  GFR-binding peptide
  MOD_RES (5), (6): Xaa is C or S
  MOD_RES (20), (21), (22), (23), (24): Xaa is A or G
  MOD_RES (25), (26), (27), (28): Xaa is A or G or is absent
TPPTXXVPTRLSNITIQIMXXXXXXXXXLGEMSDMVVE

SEQ ID NO: 73253 - protein, 39 aa, Artificial Sequence
  GFR-binding peptide
  MOD_RES (6), (7), (39): Xaa is C or S
STPPTXXVPTRLSNITIQIMDSANNVVLGEMSDMVVESX

SEQ ID NO: 73254 - protein, 43 aa, Artificial Sequence
  GFR-binding peptide
  MOD_RES (6), (7), (41), (43): Xaa is C or S
  MOD_RES (21), (22), (23), (24), (25): Xaa is A or G
  MOD_RES (26), (27), (28), (29): Xaa is A or G or is absent
AAPASXXVPARLSNITIQIMXXXXXXXXXIGEMSDMVVEAXGX

SEQ ID NO: 73255 - protein, 38 aa, Artificial Sequence
  GFR-binding peptide
  MOD_RES (2), (3), (36), (38): Xaa is C or S
  MOD_RES (17), (18), (19), (20), (21): Xaa is A or G
  MOD_RES (22), (23), (24), (25): Xaa is A or G or is absent
TXXAPVKTSNITMQIMXXXXXXXXXIGEMSMIVEEXGX

SEQ ID NO: 73256 - protein, 37 aa, Artificial Sequence
  GFR-binding peptide
  MOD_RES (2), (3), (36): Xaa is C or S
  MOD_RES (17), (18), (19), (20), (21): Xaa is A or G
  MOD_RES (22), (23), (24), (25): Xaa is A or G or is absent
PXXVPQDLSNITIQIMXXXXXXXXXLGEMSMVVKSXK

SEQ ID NO: 73257 - protein, 36 aa, Artificial Sequence
  GFR-binding peptide
  MOD_RES (34), (36): Xaa is C or S
  MOD_RES (14), (15), (16), (17), (18): Xaa is A or G
  MOD_RES (19), (20), (21), (22): Xaa is A or G or is absent
VPTRLSNITIQIMXXXXXXXXXIGEMSDMVVESXGX

SEQ ID NO: 73258 - protein, 36 aa, Artificial Sequence
  GFR-binding peptide
  MOD_RES (1), (2), (36): Xaa is C or S
  MOD_RES (16), (17), (18), (19), (20): Xaa is A or G
  MOD_RES (21), (22), (23), (24): Xaa is A or G or is absent
XXVPTRLSNITIQIMXXXXXXXXXIGEMSDMVVESX

SEQ ID NO: 73259 - protein, 32 aa, Artificial Sequence
  GFR-binding peptide
  MOD_RES (14), (15), (16), (17), (18): Xaa is A or G
  MOD_RES (19), (20), (21), (22): Xaa is A or G or is absent
VPQALSNITIQIMXXXXXXXXXLGEMSMIVRS

SEQ ID NO: 73260 - protein, 38 aa, Artificial Sequence
  GFR-binding peptide
  MOD_RES (4), (5): Xaa is C or S
  MOD_RES (19), (20), (21), (22), (23): Xaa is A or G
  MOD_RES (24), (25), (26), (27): Xaa is A or G or is absent
PKPXXAPTKLSNITVQIMXXXXXXXXXLGEMSNMVVRS

SEQ ID NO: 73261 - protein, 32 aa, Artificial Sequence
  GFR-binding peptide
  MOD_RES (14), (15), (16), (17), (18): Xaa is A or G
  MOD_RES (19), (20), (21), (22): Xaa is A or G or is absent
VPARLSNITIQIMXXXXXXXXXLGEMSDMVVE

SEQ ID NO: 73262 - protein, 39 aa, Artificial Sequence; identical to SEQ ID NO: 55184
  GFR-binding peptide
  MOD_RES (1), (2), (36), (38): Xaa is C or S
  MOD_RES (16), (17), (18), (19), (20): Xaa is A or G
  MOD_RES (21), (22), (23), (24): Xaa is A or G or is absent

SEQ ID NO: 73263 - protein, 38 aa, Artificial Sequence
  GFR-binding peptide
  MOD_RES (2), (3), (37): Xaa is C or S
  MOD_RES (17), (18), (19), (20), (21): Xaa is A or G
  MOD_RES (22), (23), (24), (25): Xaa is A or G or is absent
PXXTPTKMSNITMQIMXXXXXXXXXLGEMSGMVVDRXG

SEQ ID NO: 73264 - protein, 36 aa, Artificial Sequence
  GFR-binding peptide
  MOD_RES (3), (4): Xaa is C or S
  MOD_RES (18), (19), (20), (21), (22): Xaa is A or G
  MOD_RES (23), (24), (25), (26): Xaa is A or G or is absent
APXXVPQALSNITIQIMXXXXXXXXXLGEMSMIVRS

SEQ ID NO: 73265 - protein, 40 aa, Artificial Sequence
  GFR-binding peptide
  MOD_RES (3), (4), (38), (40): Xaa is C or S
  MOD_RES (18), (19), (20), (21), (22): Xaa is A or G
  MOD_RES (23), (24), (25), (26): Xaa is A or G or is absent
ASXXVPARLSNITIQIMXXXXXXXXXLGEMSDMVVEAXGX

SEQ ID NO: 73266 - protein, 33 aa, Artificial Sequence
  GFR-binding peptide
  MOD_RES (1), (32): Xaa is C or S
XVPQDLSNITIQIMVGRTPKVLGEMSMVVKSXK

SEQ ID NO: 73267 - protein, 40 aa, Artificial Sequence; identical to SEQ ID NO: 19557
  GFR-binding peptide
  MOD_RES (37), (39): Xaa is C or S

SEQ ID NO: 73268 - protein, 39 aa, Artificial Sequence; identical to SEQ ID NO: 19558
  GFR-binding peptide
  MOD_RES (2), (36), (38): Xaa is C or S
  MOD_RES (16), (17), (18), (19), (20): Xaa is A or G
  MOD_RES (21), (22), (23), (24): Xaa is A or G or is absent

SEQ ID NO: 73269 - protein, 42 aa, Artificial Sequence
  GFR-binding peptide
  MOD_RES (6), (7), (41): Xaa is C or S
  MOD_RES (21), (22), (23), (24), (25): Xaa is A or G
  MOD_RES (26), (27), (28), (29): Xaa is A or G or is absent
STPPTXXVPTRLSNITIQIMXXXXXXXXXIGEMSDMVVESXG

SEQ ID NO: 73270 - protein, 34 aa, Artificial Sequence
  GFR-binding peptide
  MOD_RES (2), (3): Xaa is C or S
PXXAPTKLSNITVQIMDDSSNVILGEMSNMVVRS

SEQ ID NO: 73271 - protein, 37 aa, Artificial Sequence; identical to SEQ ID NO: 55194
  GFR-binding peptide
  MOD_RES (3), (4), (35), (37): Xaa is C or S

SEQ ID NO: 73272 - protein, 42 aa, Artificial Sequence; identical to SEQ ID NO: 19559
  GFR-binding peptide
  MOD_RES (2), (39), (41): Xaa is C or S
  MOD_RES (18), (19), (20), (21), (22): Xaa is A or G
  MOD_RES (23), (24), (25), (26): Xaa is A or G or is absent

SEQ ID NO: 73273 - protein, 45 aa, Artificial Sequence; identical to SEQ ID NO: 19560
  GFR-binding peptide
  MOD_RES (5), (42), (44): Xaa is C or S

SEQ ID NO: 73274 - protein, 32 aa, Artificial Sequence
  GFR-binding peptide
  MOD_RES (31), (31): Xaa is C or S
APVKTSNITMQIMDNGRVLLIGEMSMIVEEXG

SEQ ID NO: 73275 - protein, 38 aa, Artificial Sequence; identical to SEQ ID NO: 19563
  GFR-binding peptide
  MOD_RES (3), (37): Xaa is C or S

SEQ ID NO: 73276 - protein, 35 aa, Artificial Sequence
  GFR-binding peptide
  MOD_RES (2), (3): Xaa is C or S
  MOD_RES (17), (18), (19), (20), (21): Xaa is A or G
  MOD_RES (22), (23), (24), (25): Xaa is A or G or is absent
TXXVPTRLSNITIQIMXXXXXXXXXLGEMSDMVVE

SEQ ID NO: 73277 - protein, 41 aa, Artificial Sequence
  GFR-binding peptide
  MOD_RES (6), (7), (41): Xaa is C or S
  MOD_RES (21), (22), (23), (24), (25): Xaa is A or G
  MOD_RES (26), (27), (28), (29): Xaa is A or G or is absent
STPPTXXVPTRLSNITIQIMXXXXXXXXXIGEMSDMVVESX

SEQ ID NO: 73278 - protein, 40 aa, Artificial Sequence
  GFR-binding peptide
  MOD_RES (3), (4), (38), (40): Xaa is C or S
  MOD_RES (18), (19), (20), (21), (22): Xaa is A or G
  MOD_RES (23), (24), (25), (26): Xaa is A or G or is absent
KPXXAPTKLSNITVQIMXXXXXXXXXLGEMSNMVVRSXGX

SEQ ID NO: 73279 - protein, 35 aa, Artificial Sequence
  GFR-binding peptide
  MOD_RES (1), (34): Xaa is C or S
  MOD_RES (15), (16), (17), (18), (19): Xaa is A or G
  MOD_RES (20), (21), (22), (23): Xaa is A or G or is absent
XAPVKTSNITMQIMXXXXXXXXXIGEMSMIVEEXG

SEQ ID NO: 73280 - protein, 36 aa, Artificial Sequence
  GFR-binding peptide
  MOD_RES (3), (4): Xaa is C or S
  MOD_RES (18), (19), (20), (21), (22): Xaa is A or G
  MOD_RES (23), (24), (25), (26): Xaa is A or G or is absent
STXXAPVKTSNITMQIMXXXXXXXXXLGEMSMIVEE

SEQ ID NO: 73281 - protein, 36 aa, Artificial Sequence
  GFR-binding peptide
  MOD_RES (4), (5): Xaa is C or S
PPTXXVPTRLSNITIQIMDSANNVVLGEMSDMVVES

SEQ ID NO: 73282 - protein, 40 aa, Artificial Sequence; identical to SEQ ID NO: 19566
  GFR-binding peptide
  MOD_RES (37), (39): Xaa is C or S
  MOD_RES (16), (17), (18), (19), (20): Xaa is A or G
  MOD_RES (21), (22), (23), (24): Xaa is A or G or is absent

SEQ ID NO: 73283 - protein, 40 aa, Artificial Sequence; identical to SEQ ID NO: 55211
  GFR-binding peptide
  MOD_RES (5), (6), (37), (39): Xaa is C or S

SEQ ID NO: 73284 - protein, 41 aa, Artificial Sequence
  GFR-binding peptide
  MOD_RES (4), (5), (39), (41): Xaa is C or S
  MOD_RES (19), (20), (21), (22), (23): Xaa is A or G
  MOD_RES (24), (25), (26), (27): Xaa is A or G or is absent
AGPXXTPTKMSNITMQIMXXXXXXXXXLGEMSGMVVDRXGX

SEQ ID NO: 73285 - protein, 41 aa, Artificial Sequence
  GFR-binding peptide
  MOD_RES (6), (7), (40): Xaa is C or S
  MOD_RES (21), (22), (23), (24), (25): Xaa is A or G
  MOD_RES (26), (27), (28), (29): Xaa is A or G or is absent
RVPSTXXAPVKTSNITMQIMXXXXXXXXXLGEMSMIVEEXG

SEQ ID NO: 73286 - protein, 35 aa, Artificial Sequence; identical to SEQ ID NO: 19567
  GFR-binding peptide
  MOD_RES (1), (1): Xaa is C or S

SEQ ID NO: 73287 - protein, 33 aa, Artificial Sequence
  GFR-binding peptide
  MOD_RES (1), (32): Xaa is C or S
XVSQDLSNITIQIMIGKTPKILGEMSMIVKSXK

SEQ ID NO: 73288 - protein, 41 aa, Artificial Sequence
  GFR-binding peptide
  MOD_RES (4), (5), (39), (41): Xaa is C or S
  MOD_RES (19), (20), (21), (22), (23): Xaa is A or G
  MOD_RES (24), (25), (26), (27): Xaa is A or G or is absent
PASXXVPARLSNITIQIMXXXXXXXXXIGEMSDMVVEAXGX

SEQ ID NO: 73289 - protein, 40 aa, Artificial Sequence; identical to SEQ ID NO: 19568
  GFR-binding peptide
  MOD_RES (4), (38), (40): Xaa is C or S

SEQ ID NO: 73290 - protein, 38 aa, Artificial Sequence
  GFR-binding peptide
  MOD_RES (1), (2), (35), (37): Xaa is C or S
  MOD_RES (16), (17), (18), (19), (20): Xaa is A or G
  MOD_RES (21), (22), (23), (24): Xaa is A or G or is absent
XXVSQDLSNITIQIMXXXXXXXXXLGEMSMIVKSXKXS

SEQ ID NO: 73291 - protein, 33 aa, Artificial Sequence
  GFR-binding peptide
  MOD_RES (2), (3): Xaa is C or S
PXXVPQALSNITIQIMVGRKPKVLGEMSMIVRS

SEQ ID NO: 73292 - protein, 33 aa, Artificial Sequence; identical to SEQ ID NO: 19571
  GFR-binding peptide
  MOD_RES (1), (1): Xaa is C or S
  MOD_RES (15), (16), (17), (18), (19): Xaa is A or G
  MOD_RES (20), (21), (22), (23): Xaa is A or G or is absent

SEQ ID NO: 73293 - protein, 33 aa, Artificial Sequence; identical to SEQ ID NO: 19572
  GFR-binding peptide

SEQ ID NO: 73294 - protein, 40 aa, Artificial Sequence
  GFR-binding peptide
  MOD_RES (3), (4), (38), (40): Xaa is C or S
  MOD_RES (18), (19), (20), (21), (22): Xaa is A or G
  MOD_RES (23), (24), (25), (26): Xaa is A or G or is absent
PTXXVPTRLSNITIQIMXXXXXXXXXIGEMSDMVVESXGX

SEQ ID NO: 73295 - protein, 37 aa, Artificial Sequence
  GFR-binding peptide
  MOD_RES (3), (4), (36): Xaa is C or S
PTXXVPTRLSNITIQIMDSANNVVLGEMSDMVVESXG

SEQ ID NO: 73296 - protein, 36 aa, Artificial Sequence
  GFR-binding peptide
  MOD_RES (1), (33), (35): Xaa is C or S
XAPTKLSNITVQIMDDSSNVILGEMSNMVVRSXGXH

SEQ ID NO: 73297 - protein, 38 aa, Artificial Sequence; identical to SEQ ID NO: 19574
  GFR-binding peptide
  MOD_RES (3), (3): Xaa is C or S
  MOD_RES (19), (20), (21), (22), (23): Xaa is A or G
  MOD_RES (24), (25), (26), (27): Xaa is A or G or is absent

SEQ ID NO: 73298 - protein, 40 aa, Artificial Sequence; identical to SEQ ID NO: 19576
  GFR-binding peptide
  MOD_RES (2), (39): Xaa is C or S

SEQ ID NO: 73299 - protein, 38 aa, Artificial Sequence; identical to SEQ ID NO: 52834
  GFR-binding peptide
  MOD_RES (3), (4), (35), (37): Xaa is C or S

SEQ ID NO: 73300 - protein, 35 aa, Artificial Sequence; identical to SEQ ID NO: 19578
  GFR-binding peptide

SEQ ID NO: 73301 - protein, 36 aa, Artificial Sequence; identical to SEQ ID NO: 19580
  GFR-binding peptide
  MOD_RES (2), (2): Xaa is C or S
  MOD_RES (18), (19), (20), (21), (22): Xaa is A or G
  MOD_RES (23), (24), (25), (26): Xaa is A or G or is absent

SEQ ID NO: 73302 - protein, 37 aa, Artificial Sequence
  GFR-binding peptide
  MOD_RES (5), (6), (37): Xaa is C or S
SASPXXVPQDLSNITIQIMVGRTPKVLGEMSMVVKSX

SEQ ID NO: 73303 - protein, 38 aa, Artificial Sequence
  GFR-binding peptide
  MOD_RES (4), (5): Xaa is C or S
  MOD_RES (19), (20), (21), (22), (23): Xaa is A or G
  MOD_RES (24), (25), (26), (27): Xaa is A or G or is absent
PASXXVPARLSNITIQIMXXXXXXXXXLGEMSDMVVEA

SEQ ID NO: 73304 - protein, 42 aa, Artificial Sequence
  GFR-binding peptide
  MOD_RES (4), (5), (39), (41): Xaa is C or S
  MOD_RES (19), (20), (21), (22), (23): Xaa is A or G
  MOD_RES (24), (25), (26), (27): Xaa is A or G or is absent
PPTXXVPTRLSNITIQIMXXXXXXXXXIGEMSDMVVESXGXR

SEQ ID NO: 73305 - protein, 34 aa, Artificial Sequence
  GFR-binding peptide
  MOD_RES (1), (32), (34): Xaa is C or S
XVPQALSNITIQIMVGRKPKVLGEMSMIVRSXKX

SEQ ID NO: 73306 - protein, 38 aa, Artificial Sequence
  GFR-binding peptide
  MOD_RES (4), (5), (38): Xaa is C or S
  MOD_RES (19), (20), (21), (22), (23): Xaa is A or G
  MOD_RES (24), (25), (26), (27): Xaa is A or G or is absent
ASPXXVSQDLSNITIQIMXXXXXXXXXLGEMSMIVKSX

SEQ ID NO: 73307 - protein, 43 aa, Artificial Sequence; identical to SEQ ID NO: 55240
  GFR-binding peptide
  MOD_RES (6), (7), (40), (42): Xaa is C or S
  MOD_RES (21), (22), (23), (24), (25): Xaa is A or G
  MOD_RES (26), (27), (28), (29): Xaa is A or G or is absent

SEQ ID NO: 73308 - protein, 37 aa, Artificial Sequence
  GFR-binding peptide
  MOD_RES (2), (3), (37): Xaa is C or S
  MOD_RES (17), (18), (19), (20), (21): Xaa is A or G
  MOD_RES (22), (23), (24), (25): Xaa is A or G or is absent
SXXVPARLSNITIQIMXXXXXXXXXLGEMSDMVVEAX

SEQ ID NO: 73309 - protein, 36 aa, Artificial Sequence; identical to SEQ ID NO: 19588
  GFR-binding peptide
  MOD_RES (2), (36): Xaa is C or S
  MOD_RES (16), (17), (18), (19), (20): Xaa is A or G
  MOD_RES (21), (22), (23), (24): Xaa is A or G or is absent

SEQ ID NO: 73310 - protein, 35 aa, Artificial Sequence
  GFR-binding peptide
  MOD_RES (1), (35): Xaa is C or S
  MOD_RES (15), (16), (17), (18), (19): Xaa is A or G
  MOD_RES (20), (21), (22), (23): Xaa is A or G or is absent
XVPARLSNITIQIMXXXXXXXXXIGEMSDMVVEAX

SEQ ID NO: 73311 - protein, 38 aa, Artificial Sequence; identical to SEQ ID NO: 19590
  GFR-binding peptide
  MOD_RES (2), (36), (38): Xaa is C or S
  MOD_RES (16), (17), (18), (19), (20): Xaa is A or G
  MOD_RES (21), (22), (23), (24): Xaa is A or G or is absent

SEQ ID NO: 73312 - protein, 38 aa, Artificial Sequence; identical to SEQ ID NO: 52845
  GFR-binding peptide
  MOD_RES (2), (3), (35), (37): Xaa is C or S

SEQ ID NO: 73313 - protein, 35 aa, Artificial Sequence
  GFR-binding peptide
  MOD_RES (1), (2): Xaa is C or S
  MOD_RES (16), (17), (18), (19), (20): Xaa is A or G
  MOD_RES (21), (22), (23), (24): Xaa is A or G or is absent
XXVPARLSNITIQIMXXXXXXXXXIGEMSDMVVEA

SEQ ID NO: 73314 - protein, 40 aa, Artificial Sequence
  GFR-binding peptide
  MOD_RES (5), (6), (37), (39): Xaa is C or S
SASPXXVPQDLSNITIQIMVGRTPKVLGEMSMVVKSXKXS

SEQ ID NO: 73315 - protein, 33 aa, Artificial Sequence; identical to SEQ ID NO: 19592
  GFR-binding peptide
  MOD_RES (15), (16), (17), (18), (19): Xaa is A or G
  MOD_RES (20), (21), (22), (23): Xaa is A or G or is absent

SEQ ID NO: 73316 - protein, 33 aa, Artificial Sequence
  GFR-binding peptide
  MOD_RES (31), (33): Xaa is C or S
VPQDLSNITIQIMVGRTPKVLGEMSMVVKSXKX

SEQ ID NO: 73317 - protein, 38 aa, Artificial Sequence; identical to SEQ ID NO: 19593
  GFR-binding peptide
  MOD_RES (1), (38): Xaa is C or S

SEQ ID NO: 73318 - protein, 42 aa, Artificial Sequence; identical to SEQ ID NO: 19594
  GFR-binding peptide
  MOD_RES (3), (40), (42): Xaa is C or S

SEQ ID NO: 73319 - protein, 40 aa, Artificial Sequence; identical to SEQ ID NO: 19595
  GFR-binding peptide
  MOD_RES (6), (40): Xaa is C or S

SEQ ID NO: 73320 - protein, 35 aa, Artificial Sequence
  GFR-binding peptide
  MOD_RES (3), (4), (35): Xaa is C or S
STXXAPVKTSNITMQIMDNGRVLLIGEMSMIVEEX

SEQ ID NO: 73321 - protein, 41 aa, Artificial Sequence
  GFR-binding peptide
  MOD_RES (6), (7), (41): Xaa is C or S
  MOD_RES (21), (22), (23), (24), (25): Xaa is A or G
  MOD_RES (26), (27), (28), (29): Xaa is A or G or is absent
HVPKPXXAPTKLSNITVQIMXXXXXXXXXLGEMSNMVVRSX

SEQ ID NO: 73322 - protein, 36 aa, Artificial Sequence
  GFR-binding peptide
  MOD_RES (3), (4): Xaa is C or S
  MOD_RES (18), (19), (20), (21), (22): Xaa is A or G
  MOD_RES (23), (24), (25), (26): Xaa is A or G or is absent
KPXXAPTKLSNITVQIMXXXXXXXXXLGEMSNMVVR

SEQ ID NO: 73323 - protein, 37 aa, Artificial Sequence; identical to SEQ ID NO: 55249
  GFR-binding peptide
  MOD_RES (4), (5): Xaa is C or S
  MOD_RES (19), (20), (21), (22), (23): Xaa is A or G
  MOD_RES (24), (25), (26), (27): Xaa is A or G or is absent

SEQ ID NO: 73324 - protein, 43 aa, Artificial Sequence
  GFR-binding peptide
  MOD_RES (6), (7), (40), (42): Xaa is C or S
  MOD_RES (21), (22), (23), (24), (25): Xaa is A or G
  MOD_RES (26), (27), (28), (29): Xaa is A or G or is absent
ASAAPXXVPQALSNITIQIMXXXXXXXXXLGEMSMIVRSXKXS

SEQ ID NO: 73325 - protein, 31 aa, Artificial Sequence; identical to SEQ ID NO: 55251
  GFR-binding peptide

SEQ ID NO: 73326 - protein, 37 aa, Artificial Sequence; identical to SEQ ID NO: 55254
  GFR-binding peptide
  MOD_RES (1), (2), (35), (37): Xaa is C or S
  MOD_RES (16), (17), (18), (19), (20): Xaa is A or G
  MOD_RES (21), (22), (23), (24): Xaa is A or G or is absent

SEQ ID NO: 73327 - protein, 38 aa, Artificial Sequence; identical to SEQ ID NO: 55256
  GFR-binding peptide
  MOD_RES (5), (6): Xaa is C or S
  MOD_RES (20), (21), (22), (23), (24): Xaa is A or G
  MOD_RES (25), (26), (27), (28): Xaa is A or G or is absent

SEQ ID NO: 73328 - protein, 37 aa, Artificial Sequence; identical to SEQ ID NO: 55258
  GFR-binding peptide
  MOD_RES (3), (4), (36): Xaa is C or S

SEQ ID NO: 73329 - protein, 34 aa, Artificial Sequence
  GFR-binding peptide
  MOD_RES (1), (2), (33): Xaa is C or S
XXVSQDLSNITIQIMIGKTPKILGEMSMIVKSXK

SEQ ID NO: 73330 - protein, 37 aa, Artificial Sequence
  GFR-binding peptide
  MOD_RES (5), (6): Xaa is C or S
SAGPXXTPTKMSNITMQIMNDKQQIIIGEMSGMVVDR

SEQ ID NO: 73331 - protein, 37 aa, Artificial Sequence
  GFR-binding peptide
  MOD_RES (1), (34), (36): Xaa is C or S
  MOD_RES (15), (16), (17), (18), (19): Xaa is A or G
  MOD_RES (20), (21), (22), (23): Xaa is A or G or is absent
XVPQALSNITIQIMXXXXXXXXXLGEMSMIVRSXKXS

SEQ ID NO: 73332 - protein, 38 aa, Artificial Sequence
  GFR-binding peptide
  MOD_RES (3), (4), (36), (38): Xaa is C or S
ASXXVPARLSNITIQIMDAANNVVIGEMSDMVVEAXGX

SEQ ID NO: 73333 - protein, 33 aa, Artificial Sequence; identical to SEQ ID NO: 52859
  GFR-binding peptide
  MOD_RES (1), (2): Xaa is C or S

SEQ ID NO: 73334 - protein, 38 aa, Artificial Sequence
  GFR-binding peptide
  MOD_RES (1), (2), (36), (38): Xaa is C or S
  MOD_RES (16), (17), (18), (19), (20): Xaa is A or G
  MOD_RES (21), (22), (23), (24): Xaa is A or G or is absent
XXVPTRLSNITIQIMXXXXXXXXXIGEMSDMVVESXGX

SEQ ID NO: 73335 - protein, 32 aa, Artificial Sequence
  GFR-binding peptide
  MOD_RES (32), (32): Xaa is C or S
VPARLSNITIQIMDAANNVVLGEMSDMVVEAX

SEQ ID NO: 73336 - protein, 36 aa, Artificial Sequence
  GFR-binding peptide
  MOD_RES (3), (4): Xaa is C or S
  MOD_RES (18), (19), (20), (21), (22): Xaa is A or G
  MOD_RES (23), (24), (25), (26): Xaa is A or G or is absent
ASXXVPARLSNITIQIMXXXXXXXXXLGEMSDMVVE

SEQ ID NO: 73337 - protein, 38 aa, Artificial Sequence
  GFR-binding peptide
  MOD_RES (6), (7): Xaa is C or S
AAPASXXVPARLSNITIQIMDAANNVVLGEMSDMVVEA

SEQ ID NO: 73338 - protein, 38 aa, Artificial Sequence; identical to SEQ ID NO: 55265
  GFR-binding peptide
  MOD_RES (3), (4), (38): Xaa is C or S
  MOD_RES (18), (19), (20), (21), (22): Xaa is A or G
  MOD_RES (23), (24), (25), (26): Xaa is A or G or is absent

SEQ ID NO: 73339 - protein, 39 aa, Artificial Sequence
  GFR-binding peptide
  MOD_RES (2), (3), (36), (38): Xaa is C or S
  MOD_RES (17), (18), (19), (20), (21): Xaa is A or G
  MOD_RES (22), (23), (24), (25): Xaa is A or G or is absent
TXXAPVKTSNITMQIMXXXXXXXXXLGEMSMIVEEXGXL

SEQ ID NO: 73340 - protein, 36 aa, Artificial Sequence
  GFR-binding peptide
  MOD_RES (1), (34), (36): Xaa is C or S
  MOD_RES (15), (16), (17), (18), (19): Xaa is A or G
  MOD_RES (20), (21), (22), (23): Xaa is A or G or is absent
XAPVKTSNITMQIMXXXXXXXXXLGEMSMIVEEXGX

SEQ ID NO: 73341 - protein, 33 aa, Artificial Sequence
  GFR-binding peptide
  MOD_RES (2), (3): Xaa is C or S
PXXTPTKMSNITMQIMNDKQQIIIGEMSGMVVD

SEQ ID NO: 73342 - protein, 37 aa, Artificial Sequence
  GFR-binding peptide
  MOD_RES (4), (5), (36): Xaa is C or S
ASPXXVPQDLSNITIQIMVGRTPKVLGEMSMVVKSXK

SEQ ID NO: 73343 - protein, 37 aa, Artificial Sequence
  GFR-binding peptide
  MOD_RES (34), (36): Xaa is C or S
  MOD_RES (14), (15), (16), (17), (18): Xaa is A or G
  MOD_RES (19), (20), (21), (22): Xaa is A or G or is absent
VPTRLSNITIQIMXXXXXXXXXIGEMSDMVVESXGXR

SEQ ID NO: 73344 - protein, 36 aa, Artificial Sequence
  GFR-binding peptide
  MOD_RES (4), (5): Xaa is C or S
PKPXXAPTKLSNITVQIMDDSSNVILGEMSNMVVRS

SEQ ID NO: 73345 - protein, 43 aa, Artificial Sequence; identical to SEQ ID NO: 19606
  GFR-binding peptide
  MOD_RES (6), (40), (42): Xaa is C or S
  MOD_RES (20), (21), (22), (23), (24): Xaa is A or G
  MOD_RES (25), (26), (27), (28): Xaa is A or G or is absent

SEQ ID NO: 73346 - protein, 33 aa, Artificial Sequence; identical to SEQ ID NO: 52878
  GFR-binding peptide
  MOD_RES (1), (1): Xaa is C or S
  MOD_RES (15), (16), (17), (18), (19): Xaa is A or G
  MOD_RES (20), (21), (22), (23): Xaa is A or G or is absent

SEQ ID NO: 73347 - protein, 34 aa, Artificial Sequence
  GFR-binding peptide
  MOD_RES (31), (33): Xaa is C or S
VPQDLSNITIQIMVGRTPKVLGEMSMVVKSXKXS

SEQ ID NO: 73348 - protein, 40 aa, Artificial Sequence
  GFR-binding peptide
  MOD_RES (6), (7), (39): Xaa is C or S
GSAGPXXTPTKMSNITMQIMNDKQQIIIGEMSGMVVDRXG

SEQ ID NO: 73349 - protein, 38 aa, Artificial Sequence
  GFR-binding peptide
  MOD_RES (4), (5), (36), (38): Xaa is C or S
PSTXXAPVKTSNITMQIMDNGRVLLIGEMSMIVEEXGX

SEQ ID NO: 73350 - protein, 40 aa, Artificial Sequence; identical to SEQ ID NO: 19609
  GFR-binding peptide
  MOD_RES (2), (39): Xaa is C or S
  MOD_RES (18), (19), (20), (21), (22): Xaa is A or G
  MOD_RES (23), (24), (25), (26): Xaa is A or G or is absent

SEQ ID NO: 73351 - protein, 40 aa, Artificial Sequence
  GFR-binding peptide
  MOD_RES (5), (6), (38), (40): Xaa is C or S
APASXXVPARLSNITIQIMDAANNVVLGEMSDMVVEAXGX

SEQ ID NO: 73352 - protein, 39 aa, Artificial Sequence; identical to SEQ ID NO: 19610
  GFR-binding peptide
  MOD_RES (7), (7): Xaa is C or S
  MOD_RES (21), (22), (23), (24), (25): Xaa is A or G
  MOD_RES (26), (27), (28), (29): Xaa is A or G or is absent

SEQ ID NO: 73353 - protein, 35 aa, Artificial Sequence
  GFR-binding peptide
  MOD_RES (3), (4), (35): Xaa is C or S
SPXXVSQDLSNITIQIMIGKTPKILGEMSMIVKSX

SEQ ID NO: 73354 - protein, 39 aa, Artificial Sequence
  GFR-binding peptide
  MOD_RES (1), (2), (36), (38): Xaa is C or S
  MOD_RES (16), (17), (18), (19), (20): Xaa is A or G
  MOD_RES (21), (22), (23), (24): Xaa is A or G or is absent
XXVPARLSNITIQIMXXXXXXXXXIGEMSDMVVEAXGXR

SEQ ID NO: 73355 - protein, 31 aa, Artificial Sequence
  GFR-binding peptide
TPTKMSNITMQIMNDKQQIILGEMSGMVVDR

SEQ ID NO: 73356 - protein, 40 aa, Artificial Sequence; identical to SEQ ID NO: 19611
  GFR-binding peptide
  MOD_RES (37), (39): Xaa is C or S
  MOD_RES (16), (17), (18), (19), (20): Xaa is A or G
  MOD_RES (21), (22), (23), (24): Xaa is A or G or is absent

SEQ ID NO: 73357 - protein, 31 aa, Artificial Sequence
  GFR-binding peptide
  MOD_RES (1), (1): Xaa is C or S
XTPTKMSNITMQIMNDKQQIILGEMSGMVVD

SEQ ID NO: 73358 - protein, 37 aa, Artificial Sequence
  GFR-binding peptide
  MOD_RES (4), (5), (37): Xaa is C or S
PASXXVPARLSNITIQIMDAANNVVIGEMSDMVVEAX

SEQ ID NO: 73359 - protein, 38 aa, Artificial Sequence; identical to SEQ ID NO: 19612
  GFR-binding peptide
  MOD_RES (36), (38): Xaa is C or S

SEQ ID NO: 73360 - protein, 36 aa, Artificial Sequence; identical to SEQ ID NO: 55291
  GFR-binding peptide
  MOD_RES (1), (34), (36): Xaa is C or S
  MOD_RES (15), (16), (17), (18), (19): Xaa is A or G
  MOD_RES (20), (21), (22), (23): Xaa is A or G or is absent

SEQ ID NO: 73361 - protein, 42 aa, Artificial Sequence; identical to SEQ ID NO: 19614
  GFR-binding peptide
  MOD_RES (6), (40), (42): Xaa is C or S
  MOD_RES (20), (21), (22), (23), (24): Xaa is A or G
  MOD_RES (25), (26), (27), (28): Xaa is A or G or is absent

SEQ ID NO: 73362 - protein, 34 aa, Artificial Sequence
  GFR-binding peptide
  MOD_RES (1), (1): Xaa is C or S
  MOD_RES (15), (16), (17), (18), (19): Xaa is A or G
  MOD_RES (20), (21), (22), (23): Xaa is A or G or is absent
XVPARLSNITIQIMXXXXXXXXXLGEMSDMVVEA

SEQ ID NO: 73363 - protein, 38 aa, Artificial Sequence; identical to SEQ ID NO: 19616
  GFR-binding peptide
  MOD_RES (36), (38): Xaa is C or S
  MOD_RES (15), (16), (17), (18), (19): Xaa is A or G
  MOD_RES (20), (21), (22), (23): Xaa is A or G or is absent

SEQ ID NO: 73364 - protein, 37 aa, Artificial Sequence
  GFR-binding peptide
  MOD_RES (1), (2), (34), (36): Xaa is C or S
XXAPTKLSNITVQIMDDSSNVILGEMSNMVVRSXGXH

SEQ ID NO: 73365 - protein, 33 aa, Artificial Sequence; identical to SEQ ID NO: 52899
  GFR-binding peptide
  MOD_RES (31), (33): Xaa is C or S

SEQ ID NO: 73366 - protein, 34 aa, Artificial Sequence
  GFR-binding peptide
  MOD_RES (1), (2): Xaa is C or S
  MOD_RES (16), (17), (18), (19), (20): Xaa is A or G
  MOD_RES (21), (22), (23), (24): Xaa is A or G or is absent
XXVPQALSNITIQIMXXXXXXXXXLGEMSMIVRS

SEQ ID NO: 73367 - protein, 34 aa, Artificial Sequence
  GFR-binding peptide
  MOD_RES (1), (33): Xaa is C or S
XVPARLSNITIQIMDAANNVVLGEMSDMVVEAXG

SEQ ID NO: 73368 - protein, 39 aa, Artificial Sequence; identical to SEQ ID NO: 19622
  GFR-binding peptide
  MOD_RES (6), (6): Xaa is C or S
  MOD_RES (20), (21), (22), (23), (24): Xaa is A or G
  MOD_RES (25), (26), (27), (28): Xaa is A or G or is absent

SEQ ID NO: 73369 - protein, 35 aa, Artificial Sequence
  GFR-binding peptide
  MOD_RES (33), (35): Xaa is C or S
  MOD_RES (14), (15), (16), (17), (18): Xaa is A or G
  MOD_RES (19), (20), (21), (22): Xaa is A or G or is absent
APVKTSNITMQIMXXXXXXXXXLGEMSMIVEEXGX

SEQ ID NO: 73370 - protein, 39 aa, Artificial Sequence
  GFR-binding peptide
  MOD_RES (4), (5), (37), (39): Xaa is C or S
PPTXXVPTRLSNITIQIMDSANNVVLGEMSDMVVESXGX

SEQ ID NO: 73371 - protein, 32 aa, Artificial Sequence; identical to SEQ ID NO: 19624
  GFR-binding peptide
  MOD_RES (14), (15), (16), (17), (18): Xaa is A or G
  MOD_RES (19), (20), (21), (22): Xaa is A or G or is absent

SEQ ID NO: 73372 - protein, 34 aa, Artificial Sequence
  GFR-binding peptide
  MOD_RES (31), (33): Xaa is C or S
VSQDLSNITIQIMIGKTPKILGEMSMIVKSXKXS

SEQ ID NO: 73373 - protein, 33 aa, Artificial Sequence
  GFR-binding peptide
  MOD_RES (1), (2): Xaa is C or S
XXTPTKMSNITMQIMNDKQQIIIGEMSGMVVDR

SEQ ID NO: 73374 - protein, 36 aa, Artificial Sequence
  GFR-binding peptide
  MOD_RES (33), (35): Xaa is C or S
  MOD_RES (14), (15), (16), (17), (18): Xaa is A or G
  MOD_RES (19), (20), (21), (22): Xaa is A or G or is absent
APVKTSNITMQIMXXXXXXXXXIGEMSMIVEEXGXL

SEQ ID NO: 73375 - protein, 32 aa, Artificial Sequence
  GFR-binding peptide
  MOD_RES (14), (15), (16), (17), (18): Xaa is A or G
  MOD_RES (19), (20), (21), (22): Xaa is A or G or is absent
APTKLSNITVQIMXXXXXXXXXLGEMSNMVVR

SEQ ID NO: 73376 - protein, 36 aa, Artificial Sequence; identical to SEQ ID NO: 19627
  GFR-binding peptide

SEQ ID NO: 73377 - protein, 31 aa, Artificial Sequence
  GFR-binding peptide
  MOD_RES (31), (31): Xaa is C or S
VPQALSNITIQIMVGRKPKVLGEMSMIVRSX

SEQ ID NO: 73378 - protein, 39 aa, Artificial Sequence
  GFR-binding peptide
  MOD_RES (4), (5), (36), (38): Xaa is C or S
AAPXXVPQALSNITIQIMVGRKPKVLGEMSMIVRSXKXS

SEQ ID NO: 73379 - protein, 36 aa, Artificial Sequence
  GFR-binding peptide
  MOD_RES (1), (35): Xaa is C or S
  MOD_RES (15), (16), (17), (18), (19): Xaa is A or G
  MOD_RES (20), (21), (22), (23): Xaa is A or G or is absent
XTPTKMSNITMQIMXXXXXXXXXLGEMSGMVVDRXG

SEQ ID NO: 73380 - protein, 43 aa, Artificial Sequence; identical to SEQ ID NO: 19630
  GFR-binding peptide
  MOD_RES (5), (42): Xaa is C or S
  MOD_RES (21), (22), (23), (24), (25): Xaa is A or G
  MOD_RES (26), (27), (28), (29): Xaa is A or G or is absent

SEQ ID NO: 73381 - protein, 44 aa, Artificial Sequence; identical to SEQ ID NO: 19632
  GFR-binding peptide
  MOD_RES (4), (41), (43): Xaa is C or S

SEQ ID NO: 73382 - protein, 37 aa, Artificial Sequence; identical to SEQ ID NO: 19634
  GFR-binding peptide
  MOD_RES (3), (37): Xaa is C or S
  MOD_RES (17), (18), (19), (20), (21): Xaa is A or G
  MOD_RES (22), (23), (24), (25): Xaa is A or G or is absent

SEQ ID NO: 73383 - protein, 35 aa, Artificial Sequence; identical to SEQ ID NO: 55328
  GFR-binding peptide
  MOD_RES (2), (3), (34): Xaa is C or S

SEQ ID NO: 73384 - protein, 39 aa, Artificial Sequence
  GFR-binding peptide
  MOD_RES (5), (6), (37), (39): Xaa is C or S
SASPXXVSQDLSNITIQIMIGKTPKILGEMSMIVKSXKX

SEQ ID NO: 73385 - protein, 39 aa, Artificial Sequence
  GFR-binding peptide
  MOD_RES (6), (7): Xaa is C or S
  MOD_RES (21), (22), (23), (24), (25): Xaa is A or G
  MOD_RES (26), (27), (28), (29): Xaa is A or G or is absent
STPPTXXVPTRLSNITIQIMXXXXXXXXXIGEMSDMVVE

SEQ ID NO: 73386 - protein, 36 aa, Artificial Sequence
  GFR-binding peptide
  MOD_RES (1), (35): Xaa is C or S
  MOD_RES (15), (16), (17), (18), (19): Xaa is A or G
  MOD_RES (20), (21), (22), (23): Xaa is A or G or is absent
XAPTKLSNITVQIMXXXXXXXXXLGEMSNMVVRSXG

SEQ ID NO: 73387 - protein, 39 aa, Artificial Sequence
  GFR-binding peptide
  MOD_RES (2), (3), (37), (39): Xaa is C or S
  MOD_RES (17), (18), (19), (20), (21): Xaa is A or G
  MOD_RES (22), (23), (24), (25): Xaa is A or G or is absent
PXXAPTKLSNITVQIMXXXXXXXXXLGEMSNMVVRSXGX

SEQ ID NO: 73388 - protein, 38 aa, Artificial Sequence; identical to SEQ ID NO: 55332
  GFR-binding peptide
  MOD_RES (3), (4), (37): Xaa is C or S
  MOD_RES (18), (19), (20), (21), (22): Xaa is A or G
  MOD_RES (23), (24), (25), (26): Xaa is A or G or is absent

SEQ ID NO: 73389 - protein, 36 aa, Artificial Sequence; identical to SEQ ID NO: 19638
  GFR-binding peptide
  MOD_RES (2), (2): Xaa is C or S
  MOD_RES (18), (19), (20), (21), (22): Xaa is A or G
  MOD_RES (23), (24), (25), (26): Xaa is A or G or is absent

SEQ ID NO: 73390 - protein, 41 aa, Artificial Sequence; identical to SEQ ID NO: 19639
  GFR-binding peptide
  MOD_RES (1), (38), (40): Xaa is C or S

SEQ ID NO: 73391 - protein, 39 aa, Artificial Sequence
  GFR-binding peptide
  MOD_RES (4), (5), (39): Xaa is C or S
  MOD_RES (19), (20), (21), (22), (23): Xaa is A or G
  MOD_RES (24), (25), (26), (27): Xaa is A or G or is absent
PASXXVPARLSNITIQIMXXXXXXXXXLGEMSDMVVEAX

SEQ ID NO: 73392 - protein, 39 aa, Artificial Sequence
  GFR-binding peptide
  MOD_RES (3), (4), (38): Xaa is C or S
  MOD_RES (18), (19), (20), (21), (22): Xaa is A or G
  MOD_RES (23), (24), (25), (26): Xaa is A or G or is absent
ASXXVPARLSNITIQIMXXXXXXXXXIGEMSDMVVEAXG

SEQ ID NO: 73393 - protein, 42 aa, Artificial Sequence; identical to SEQ ID NO: 55336
  GFR-binding peptide
  MOD_RES (6), (7), (40), (42): Xaa is C or S
  MOD_RES (21), (22), (23), (24), (25): Xaa is A or G
  MOD_RES (26), (27), (28), (29): Xaa is A or G or is absent

SEQ ID NO: 73394 - protein, 38 aa, Artificial Sequence
  GFR-binding peptide
  MOD_RES (5), (6): Xaa is C or S
  MOD_RES (20), (21), (22), (23), (24): Xaa is A or G
  MOD_RES (25), (26), (27), (28): Xaa is A or G or is absent
SASPXXVSQDLSNITIQIMXXXXXXXXXLGEMSMIVKS

SEQ ID NO: 73395 - protein, 34 aa, Artificial Sequence; identical to SEQ ID NO: 55338
  GFR-binding peptide
  MOD_RES (1), (2): Xaa is C or S
  MOD_RES (16), (17), (18), (19), (20): Xaa is A or G
  MOD_RES (21), (22), (23), (24): Xaa is A or G or is absent

SEQ ID NO: 73396 - protein, 40 aa, Artificial Sequence
  GFR-binding peptide
  MOD_RES (4), (5), (39): Xaa is C or S
  MOD_RES (19), (20), (21), (22), (23): Xaa is A or G
  MOD_RES (24), (25), (26), (27): Xaa is A or G or is absent
PKPXXAPTKLSNITVQIMXXXXXXXXXLGEMSNMVVRSXG

SEQ ID NO: 73397 - protein, 44 aa, Artificial Sequence
  GFR-binding peptide
  MOD_RES (6), (7), (41), (43): Xaa is C or S
  MOD_RES (21), (22), (23), (24), (25): Xaa is A or G
  MOD_RES (26), (27), (28), (29): Xaa is A or G or is absent
STPPTXXVPTRLSNITIQIMXXXXXXXXXIGEMSDMVVESXGXR

SEQ ID NO: 73398 - protein, 38 aa, Artificial Sequence; identical to SEQ ID NO: 19644
  GFR-binding peptide
  MOD_RES (1), (35), (37): Xaa is C or S
  MOD_RES (15), (16), (17), (18), (19): Xaa is A or G
  MOD_RES (20), (21), (22), (23): Xaa is A or G or is absent

SEQ ID NO: 73399 - protein, 36 aa, Artificial Sequence
  GFR-binding peptide
  MOD_RES (5), (6): Xaa is C or S
SAAPXXVPQALSNITIQIMVGRKPKVLGEMSMIVRS

SEQ ID NO: 73400 - protein, 38 aa, Artificial Sequence
  GFR-binding peptide
  MOD_RES (4), (5): Xaa is C or S
  MOD_RES (19), (20), (21), (22), (23): Xaa is A or G
  MOD_RES (24), (25), (26), (27): Xaa is A or G or is absent
AGPXXTPTKMSNITMQIMXXXXXXXXXLGEMSGMVVDR

SEQ ID NO: 73401 - protein, 38 aa, Artificial Sequence; identical to SEQ ID NO: 55343
  GFR-binding peptide
  MOD_RES (5), (6): Xaa is C or S
  MOD_RES (20), (21), (22), (23), (24): Xaa is A or G
  MOD_RES (25), (26), (27), (28): Xaa is A or G or is absent

SEQ ID NO: 73402 - protein, 37 aa, Artificial Sequence
  GFR-binding peptide
  MOD_RES (5), (6), (37): Xaa is C or S
VPSTXXAPVKTSNITMQIMDNGRVLLLGEMSMIVEEX

SEQ ID NO: 73403 - protein, 35 aa, Artificial Sequence
  GFR-binding peptide
  MOD_RES (3), (4), (35): Xaa is C or S
APXXVPQALSNITIQIMVGRKPKVLGEMSMIVRSX

SEQ ID NO: 73404 - protein, 30 aa, Artificial Sequence
  GFR-binding peptide
VPARLSNITIQIMDAANNVVIGEMSDMVVE

SEQ ID NO: 73405 - protein, 33 aa, Artificial Sequence
  GFR-binding peptide
  MOD_RES (1), (2), (33): Xaa is C or S
XXAPVKTSNITMQIMDNGRVLLIGEMSMIVEEX

SEQ ID NO: 73406 - protein, 44 aa, Artificial Sequence; identical to SEQ ID NO: 19646
  GFR-binding peptide
  MOD_RES (4), (41), (43): Xaa is C or S
  MOD_RES (20), (21), (22), (23), (24): Xaa is A or G
  MOD_RES (25), (26), (27), (28): Xaa is A or G or is absent

SEQ ID NO: 73407 - protein, 34 aa, Artificial Sequence
  GFR-binding peptide
  MOD_RES (3), (4): Xaa is C or S
STXXAPVKTSNITMQIMDNGRVLLIGEMSMIVEE

SEQ ID NO: 73408 - protein, 37 aa, Artificial Sequence; identical to SEQ ID NO: 19648
  GFR-binding peptide
  MOD_RES (35), (37): Xaa is C or S

SEQ ID NO: 73409 - protein, 38 aa, Artificial Sequence
  GFR-binding peptide
  MOD_RES (3), (4), (35), (37): Xaa is C or S
STXXAPVKTSNITMQIMDNGRVLLLGEMSMIVEEXGXL

SEQ ID NO: 73410 - protein, 40 aa, Artificial Sequence; identical to SEQ ID NO: 19649
  GFR-binding peptide
  MOD_RES (3), (37), (39): Xaa is C or S
  MOD_RES (17), (18), (19), (20), (21): Xaa is A or G
  MOD_RES (22), (23), (24), (25): Xaa is A or G or is absent

SEQ ID NO: 73411 - protein, 39 aa, Artificial Sequence
  GFR-binding peptide
  MOD_RES (6), (7): Xaa is C or S
  MOD_RES (21), (22), (23), (24), (25): Xaa is A or G
  MOD_RES (26), (27), (28), (29): Xaa is A or G or is absent
HVPKPXXAPTKLSNITVQIMXXXXXXXXXIGEMSNMVVR

SEQ ID NO: 73412 - protein, 44 aa, Artificial Sequence; identical to SEQ ID NO: 19651
  GFR-binding peptide
  MOD_RES (7), (41), (43): Xaa is C or S
  MOD_RES (21), (22), (23), (24), (25): Xaa is A or G
  MOD_RES (26), (27), (28), (29): Xaa is A or G or is absent

SEQ ID NO: 73413 - protein, 41 aa, Artificial Sequence
  GFR-binding peptide
  MOD_RES (5), (6), (38), (40): Xaa is C or S
TPPTXXVPTRLSNITIQIMDSANNVVIGEMSDMVVESXGXR

SEQ ID NO: 73414 - protein, 40 aa, Artificial Sequence; identical to SEQ ID NO: 19653
  GFR-binding peptide
  MOD_RES (7), (7): Xaa is C or S

SEQ ID NO: 73415 - protein, 41 aa, Artificial Sequence
  GFR-binding peptide
  MOD_RES (3), (4), (38), (40): Xaa is C or S
  MOD_RES (18), (19), (20), (21), (22): Xaa is A or G
  MOD_RES (23), (24), (25), (26): Xaa is A or G or is absent
GPXXTPTKMSNITMQIMXXXXXXXXXIGEMSGMVVDRXGXS

SEQ ID NO: 73416 - protein, 40 aa, Artificial Sequence
  GFR-binding peptide
  MOD_RES (2), (3), (37), (39): Xaa is C or S
  MOD_RES (17), (18), (19), (20), (21): Xaa is A or G
  MOD_RES (22), (23), (24), (25): Xaa is A or G or is absent
SXXVPARLSNITIQIMXXXXXXXXXLGEMSDMVVEAXGXR

SEQ ID NO: 73417 - protein, 40 aa, Artificial Sequence; identical to SEQ ID NO: 19655
  GFR-binding peptide
  MOD_RES (5), (39): Xaa is C or S

SEQ ID NO: 73418 - protein, 41 aa, Artificial Sequence; identical to SEQ ID NO: 19657
  GFR-binding peptide
  MOD_RES (4), (41): Xaa is C or S

SEQ ID NO: 73419 - protein, 33 aa, Artificial Sequence
  GFR-binding peptide
  MOD_RES (1), (1): Xaa is C or S
  MOD_RES (15), (16), (17), (18), (19): Xaa is A or G
  MOD_RES (20), (21), (22), (23): Xaa is A or G or is absent
XTPTKMSNITMQIMXXXXXXXXXIGEMSGMVVD

SEQ ID NO: 73420 - protein, 43 aa, Artificial Sequence; identical to SEQ ID NO: 19658
  GFR-binding peptide
  MOD_RES (4), (41), (43): Xaa is C or S
  MOD_RES (20), (21), (22), (23), (24): Xaa is A or G
  MOD_RES (25), (26), (27), (28): Xaa is A or G or is absent

SEQ ID NO: 73421 - protein, 41 aa, Artificial Sequence; identical to SEQ ID NO: 19659
  GFR-binding peptide
  MOD_RES (4), (41): Xaa is C or S
  MOD_RES (20), (21), (22), (23), (24): Xaa is A or G
  MOD_RES (25), (26), (27), (28): Xaa is A or G or is absent

SEQ ID NO: 73422 - protein, 39 aa, Artificial Sequence
  GFR-binding peptide
  MOD_RES (5), (6): Xaa is C or S
  MOD_RES (20), (21), (22), (23), (24): Xaa is A or G
  MOD_RES (25), (26), (27), (28): Xaa is A or G or is absent
SAGPXXTPTKMSNITMQIMXXXXXXXXXIGEMSGMVVDR

SEQ ID NO: 73423 - protein, 40 aa, Artificial Sequence
  GFR-binding peptide
  MOD_RES (4), (5), (37), (39): Xaa is C or S
AGPXXTPTKMSNITMQIMNDKQQIILGEMSGMVVDRXGXS

SEQ ID NO: 73424 - protein, 37 aa, Artificial Sequence
  GFR-binding peptide
  MOD_RES (4), (5): Xaa is C or S
  MOD_RES (19), (20), (21), (22), (23): Xaa is A or G
  MOD_RES (24), (25), (26), (27): Xaa is A or G or is absent
AAPXXVPQALSNITIQIMXXXXXXXXXLGEMSMIVRS

SEQ ID NO: 73425 - protein, 38 aa, Artificial Sequence
  GFR-binding peptide
  MOD_RES (3), (4), (35), (37): Xaa is C or S
STXXAPVKTSNITMQIMDNGRVLLIGEMSMIVEEXGXL

SEQ ID NO: 73426 - protein, 36 aa, Artificial Sequence
  GFR-binding peptide
  MOD_RES (1), (2), (33), (35): Xaa is C or S
XXAPVKTSNITMQIMDNGRVLLIGEMSMIVEEXGXL

SEQ ID NO: 73427 - protein, 39 aa, Artificial Sequence
  GFR-binding peptide
  MOD_RES (1), (2), (36), (38): Xaa is C or S
  MOD_RES (16), (17), (18), (19), (20): Xaa is A or G
  MOD_RES (21), (22), (23), (24): Xaa is A or G or is absent
XXTPTKMSNITMQIMXXXXXXXXXLGEMSGMVVDRXGXS

SEQ ID NO: 73428 - protein, 37 aa, Artificial Sequence
  GFR-binding peptide
  MOD_RES (3), (4), (35), (37): Xaa is C or S
APXXVPQALSNITIQIMVGRKPKVLGEMSMIVRSXKX

SEQ ID NO: 73429 - protein, 36 aa, Artificial Sequence; identical to SEQ ID NO: 52966
  GFR-binding peptide
  MOD_RES (2), (3): Xaa is C or S
  MOD_RES (17), (18), (19), (20), (21): Xaa is A or G
  MOD_RES (22), (23), (24), (25): Xaa is A or G or is absent

SEQ ID NO: 73430 - protein, 41 aa, Artificial Sequence
  GFR-binding peptide
  MOD_RES (3), (4), (38), (40): Xaa is C or S
  MOD_RES (18), (19), (20), (21), (22): Xaa is A or G
  MOD_RES (23), (24), (25), (26): Xaa is A or G or is absent
ASXXVPARLSNITIQIMXXXXXXXXXLGEMSDMVVEAXGXR

SEQ ID NO: 73431 - protein, 33 aa, Artificial Sequence; identical to SEQ ID NO: 19662
  GFR-binding peptide
  MOD_RES (15), (16), (17), (18), (19): Xaa is A or G
  MOD_RES (20), (21), (22), (23): Xaa is A or G or is absent

SEQ ID NO: 73432 - protein, 32 aa, Artificial Sequence
  GFR-binding peptide
  MOD_RES (1), (1): Xaa is C or S
XVPARLSNITIQIMDAANNVVLGEMSDMVVEA

SEQ ID NO: 73433 - protein, 37 aa, Artificial Sequence; identical to SEQ ID NO: 55379
  GFR-binding peptide
  MOD_RES (34), (36): Xaa is C or S
  MOD_RES (14), (15), (16), (17), (18): Xaa is A or G
  MOD_RES (19), (20), (21), (22): Xaa is A or G or is absent

SEQ ID NO: 73434 - protein, 38 aa, Artificial Sequence; identical to SEQ ID NO: 55381
  GFR-binding peptide
  MOD_RES (6), (7), (38): Xaa is C or S

SEQ ID NO: 73435 - protein, 36 aa, Artificial Sequence
  GFR-binding peptide
  MOD_RES (1), (2), (33), (35): Xaa is C or S
XXVSQDLSNITIQIMIGKTPKILGEMSMIVKSXKXS

SEQ ID NO: 73436 - protein, 34 aa, Artificial Sequence
  GFR-binding peptide
  MOD_RES (1), (2), (34): Xaa is C or S
XXVPTRLSNITIQIMDSANNVVLGEMSDMVVESX

SEQ ID NO: 73437 - protein, 36 aa, Artificial Sequence; identical to SEQ ID NO: 19664
  GFR-binding peptide
  MOD_RES (36), (36): Xaa is C or S

SEQ ID NO: 73438 - protein, 40 aa, Artificial Sequence
  GFR-binding peptide
  MOD_RES (5), (6), (40): Xaa is C or S
  MOD_RES (20), (21), (22), (23), (24): Xaa is A or G
  MOD_RES (25), (26), (27), (28): Xaa is A or G or is absent
SAGPXXTPTKMSNITMQIMXXXXXXXXXIGEMSGMVVDRX

SEQ ID NO: 73439 - protein, 40 aa, Artificial Sequence; identical to SEQ ID NO: 19665
  GFR-binding peptide
  MOD_RES (6), (40): Xaa is C or S
  MOD_RES (20), (21), (22), (23), (24): Xaa is A or G
  MOD_RES (25), (26), (27), (28): Xaa is A or G or is absent

SEQ ID NO: 73440 - protein, 42 aa, Artificial Sequence; identical to SEQ ID NO: 19666
  GFR-binding peptide
  MOD_RES (7), (41): Xaa is C or S

SEQ ID NO: 73441 - protein, 34 aa, Artificial Sequence; identical to SEQ ID NO: 52982
  GFR-binding peptide
  MOD_RES (1), (34): Xaa is C or S
  MOD_RES (15), (16), (17), (18), (19): Xaa is A or G
  MOD_RES (20), (21), (22), (23): Xaa is A or G or is absent

SEQ ID NO: 73442 - protein, 39 aa, Artificial Sequence; identical to SEQ ID NO: 19668
  GFR-binding peptide
  MOD_RES (37), (39): Xaa is C or S
  MOD_RES (16), (17), (18), (19), (20): Xaa is A or G
  MOD_RES (21), (22), (23), (24): Xaa is A or G or is absent

SEQ ID NO: 73443 - protein, 38 aa, Artificial Sequence; identical to SEQ ID NO: 19669
  GFR-binding peptide
  MOD_RES (36), (38): Xaa is C or S

SEQ ID NO: 73444 - protein, 40 aa, Artificial Sequence; identical to SEQ ID NO: 19672
  GFR-binding peptide
  MOD_RES (1), (38), (40): Xaa is C or S
  MOD_RES (17), (18), (19), (20), (21): Xaa is A or G
  MOD_RES (22), (23), (24), (25): Xaa is A or G or is absent

SEQ ID NO: 73445 - protein, 39 aa, Artificial Sequence
  GFR-binding peptide
  MOD_RES (6), (7): Xaa is C or S
  MOD_RES (21), (22), (23), (24), (25): Xaa is A or G
  MOD_RES (26), (27), (28), (29): Xaa is A or G or is absent
GSAGPXXTPTKMSNITMQIMXXXXXXXXXLGEMSGMVVD

SEQ ID NO: 73446 - protein, 36 aa, Artificial Sequence
  GFR-binding peptide
  MOD_RES (5), (6): Xaa is C or S
SAGPXXTPTKMSNITMQIMNDKQQIILGEMSGMVVD

SEQ ID NO: 73447 - protein, 34 aa, Artificial Sequence
  GFR-binding peptide
  MOD_RES (2), (3), (34): Xaa is C or S
PXXVPQDLSNITIQIMVGRTPKVLGEMSMVVKSX

SEQ ID NO: 73448 - protein, 39 aa, Artificial Sequence; identical to SEQ ID NO: 52991
  GFR-binding peptide
  MOD_RES (6), (7): Xaa is C or S
  MOD_RES (21), (22), (23), (24), (25): Xaa is A or G
  MOD_RES (26), (27), (28), (29): Xaa is A or G or is absent

SEQ ID NO: 73449 - protein, 40 aa, Artificial Sequence; identical to SEQ ID NO: 19676
  GFR-binding peptide
  MOD_RES (4), (38), (40): Xaa is C or S

SEQ ID NO: 73450 - protein, 33 aa, Artificial Sequence; identical to SEQ ID NO: 19677
  GFR-binding peptide
  MOD_RES (14), (15), (16), (17), (18): Xaa is A or G
  MOD_RES (19), (20), (21), (22): Xaa is A or G or is absent

SEQ ID NO: 73451 - protein, 43 aa, Artificial Sequence; identical to SEQ ID NO: 19678
  GFR-binding peptide
  MOD_RES (6), (40), (42): Xaa is C or S

SEQ ID NO: 73452 - protein, 30 aa, Artificial Sequence; identical to SEQ ID NO: 55395
  GFR-binding peptide

SEQ ID NO: 73453 - protein, 41 aa, Artificial Sequence
  GFR-binding peptide
  MOD_RES (6), (7), (40): Xaa is C or S
  MOD_RES (21), (22), (23), (24), (25): Xaa is A or G
  MOD_RES (26), (27), (28), (29): Xaa is A or G or is absent
ASASPXXVSQDLSNITIQIMXXXXXXXXXLGEMSMIVKSXK

SEQ ID NO: 73454 - protein, 34 aa, Artificial Sequence; identical to SEQ ID NO: 53000
  GFR-binding peptide
  MOD_RES (1), (2), (33): Xaa is C or S

SEQ ID NO: 73455 - protein, 40 aa, Artificial Sequence
  GFR-binding peptide
  MOD_RES (5), (6), (40): Xaa is C or S
  MOD_RES (20), (21), (22), (23), (24): Xaa is A or G
  MOD_RES (25), (26), (27), (28): Xaa is A or G or is absent
TPPTXXVPTRLSNITIQIMXXXXXXXXXLGEMSDMVVESX

SEQ ID NO: 73456 - protein, 35 aa, Artificial Sequence; identical to SEQ ID NO: 55401
  GFR-binding peptide
  MOD_RES (1), (2), (35): Xaa is C or S
  MOD_RES (16), (17), (18), (19), (20): Xaa is A or G
  MOD_RES (21), (22), (23), (24): Xaa is A or G or is absent

SEQ ID NO: 73457 - protein, 37 aa, Artificial Sequence
  GFR-binding peptide
  MOD_RES (5), (6): Xaa is C or S
APASXXVPARLSNITIQIMDAANNVVIGEMSDMVVEA

SEQ ID NO: 73458 - protein, 39 aa, Artificial Sequence
  GFR-binding peptide
  MOD_RES (6), (7): Xaa is C or S
  MOD_RES (21), (22), (23), (24), (25): Xaa is A or G
  MOD_RES (26), (27), (28), (29): Xaa is A or G or is absent
RVPSTXXAPVKTSNITMQIMXXXXXXXXXIGEMSMIVEE

SEQ ID NO: 73459 - protein, 32 aa, Artificial Sequence; identical to SEQ ID NO: 55407
  GFR-binding peptide
  MOD_RES (31), (31): Xaa is C or S

SEQ ID NO: 73460 - protein, 35 aa, Artificial Sequence; identical to SEQ ID NO: 53005
  GFR-binding peptide
  MOD_RES (1), (2), (35): Xaa is C or S
  MOD_RES (16), (17), (18), (19), (20): Xaa is A or G
  MOD_RES (21), (22), (23), (24): Xaa is A or G or is absent

SEQ ID NO: 73461 - protein, 40 aa, Artificial Sequence; identical to SEQ ID NO: 19680
  GFR-binding peptide
  MOD_RES (7), (7): Xaa is C or S
  MOD_RES (21), (22), (23), (24), (25): Xaa is A or G
  MOD_RES (26), (27), (28), (29): Xaa is A or G or is absent

SEQ ID NO: 73462 - protein, 40 aa, Artificial Sequence; identical to SEQ ID NO: 55410
  GFR-binding peptide
  MOD_RES (5), (6), (39): Xaa is C or S
  MOD_RES (20), (21), (22), (23), (24): Xaa is A or G
  MOD_RES (25), (26), (27), (28): Xaa is A or G or is absent

SEQ ID NO: 73463 - protein, 37 aa, Artificial Sequence; identical to SEQ ID NO: 19681
  GFR-binding peptide
  MOD_RES (2), (36): Xaa is C or S
  MOD_RES (16), (17), (18), (19), (20): Xaa is A or G
  MOD_RES (21), (22), (23), (24): Xaa is A or G or is absent

SEQ ID NO: 73464 - protein, 43 aa, Artificial Sequence
  GFR-binding peptide
  MOD_RES (5), (6), (40), (42): Xaa is C or S
  MOD_RES (20), (21), (22), (23), (24): Xaa is A or G
  MOD_RES (25), (26), (27), (28): Xaa is A or G or is absent
TPPTXXVPTRLSNITIQIMXXXXXXXXXIGEMSDMVVESXGXR

SEQ ID NO: 73465 - protein, 40 aa, Artificial Sequence; identical to SEQ ID NO: 53010
  GFR-binding peptide
  MOD_RES (5), (6), (38), (40): Xaa is C or S

SEQ ID NO: 73466 - protein, 41 aa, Artificial Sequence; identical to SEQ ID NO: 19682
  GFR-binding peptide
  MOD_RES (7), (41): Xaa is C or S
  MOD_RES (21), (22), (23), (24), (25): Xaa is A or G
  MOD_RES (26), (27), (28), (29): Xaa is A or G or is absent

SEQ ID NO: 73467 - protein, 38 aa, Artificial Sequence; identical to SEQ ID NO: 53015
  GFR-binding peptide
  MOD_RES (1), (35), (37): Xaa is C or S
  MOD_RES (15), (16), (17), (18), (19): Xaa is A or G
  MOD_RES (20), (21), (22), (23): Xaa is A or G or is absent

SEQ ID NO: 73468 - protein, 36 aa, Artificial Sequence; identical to SEQ ID NO: 55416
  GFR-binding peptide
  MOD_RES (5), (6): Xaa is C or S

SEQ ID NO: 73469 - protein, 38 aa, Artificial Sequence; identical to SEQ ID NO: 19683
  GFR-binding peptide
  MOD_RES (4), (4): Xaa is C or S

SEQ ID NO: 73470 - protein, 40 aa, Artificial Sequence
  GFR-binding peptide
  MOD_RES (5), (6), (40): Xaa is C or S
  MOD_RES (20), (21), (22), (23), (24): Xaa is A or G
  MOD_RES (25), (26), (27), (28): Xaa is A or G or is absent
VPKPXXAPTKLSNITVQIMXXXXXXXXXLGEMSNMVVRSX

SEQ ID NO: 73471 - protein, 40 aa, Artificial Sequence
  GFR-binding peptide
  MOD_RES (4), (5), (37), (39): Xaa is C or S
PPTXXVPTRLSNITIQIMDSANNVVIGEMSDMVVESXGXR

SEQ ID NO: 73472 - protein, 38 aa, Artificial Sequence
  GFR-binding peptide
  MOD_RES (3), (4), (36), (38): Xaa is C or S
ASXXVPARLSNITIQIMDAANNVVLGEMSDMVVEAXGX

SEQ ID NO: 73473 - protein, 37 aa, Artificial Sequence; identical to SEQ ID NO: 53019
  GFR-binding peptide
  MOD_RES (1), (34), (36): Xaa is C or S
  MOD_RES (15), (16), (17), (18), (19): Xaa is A or G
  MOD_RES (20), (21), (22), (23): Xaa is A or G or is absent

SEQ ID NO: 73474 - protein, 36 aa, Artificial Sequence; identical to SEQ ID NO: 19686
  GFR-binding peptide
  MOD_RES (1), (35): Xaa is C or S
  MOD_RES (15), (16), (17), (18), (19): Xaa is A or G
  MOD_RES (20), (21), (22), (23): Xaa is A or G or is absent

SEQ ID NO: 73475 - protein, 35 aa, Artificial Sequence; identical to SEQ ID NO: 19687
  GFR-binding peptide
  MOD_RES (35), (35): Xaa is C or S

SEQ ID NO: 73476 - protein, 37 aa, Artificial Sequence
  GFR-binding peptide
  MOD_RES (3), (4), (37): Xaa is C or S
  MOD_RES (18), (19), (20), (21), (22): Xaa is A or G
  MOD_RES (23), (24), (25), (26): Xaa is A or G or is absent
STXXAPVKTSNITMQIMXXXXXXXXXLGEMSMIVEEX

SEQ ID NO: 73477 - protein, 41 aa, Artificial Sequence; identical to SEQ ID NO: 19688
  GFR-binding peptide
  MOD_RES (5), (39), (41): Xaa is C or S

SEQ ID NO: 73478 - protein, 38 aa, Artificial Sequence; identical to SEQ ID NO: 19689
  GFR-binding peptide
  MOD_RES (35), (37): Xaa is C or S
  MOD_RES (14), (15), (16), (17), (18): Xaa is A or G
  MOD_RES (19), (20), (21), (22): Xaa is A or G or is absent

SEQ ID NO: 73479 - protein, 37 aa, Artificial Sequence; identical to SEQ ID NO: 55426
  GFR-binding peptide
  MOD_RES (5), (6), (37): Xaa is C or S

SEQ ID NO: 73480 - protein, 37 aa, Artificial Sequence
  GFR-binding peptide
  MOD_RES (3), (4): Xaa is C or S
  MOD_RES (18), (19), (20), (21), (22): Xaa is A or G
  MOD_RES (23), (24), (25), (26): Xaa is A or G or is absent
ASXXVPARLSNITIQIMXXXXXXXXXLGEMSDMVVEA

SEQ ID NO: 73481 - protein, 35 aa, Artificial Sequence
  GFR-binding peptide
  MOD_RES (32), (34): Xaa is C or S
APTKLSNITVQIMDDSSNVILGEMSNMVVRSXGXH

SEQ ID NO: 73482 - protein, 39 aa, Artificial Sequence; identical to SEQ ID NO: 19690
  GFR-binding peptide
  MOD_RES (5), (5): Xaa is C or S

SEQ ID NO: 73483 - protein, 40 aa, Artificial Sequence; identical to SEQ ID NO: 19691
  GFR-binding peptide
  MOD_RES (2), (39): Xaa is C or S

SEQ ID NO: 73484 - protein, 38 aa, Artificial Sequence; identical to SEQ ID NO: 19692
  GFR-binding peptide
  MOD_RES (37), (37): Xaa is C or S

SEQ ID NO: 73485 - protein, 35 aa, Artificial Sequence
  GFR-binding peptide
  MOD_RES (2), (3), (35): Xaa is C or S
PXXTPTKMSNITMQIMNDKQQIIIGEMSGMVVDRX

SEQ ID NO: 73486 - protein, 38 aa, Artificial Sequence; identical to SEQ ID NO: 19693
  GFR-binding peptide
  MOD_RES (2), (36), (38): Xaa is C or S
  MOD_RES (16), (17), (18), (19), (20): Xaa is A or G
  MOD_RES (21), (22), (23), (24): Xaa is A or G or is absent

SEQ ID NO: 73487 - protein, 35 aa, Artificial Sequence; identical to SEQ ID NO: 19695
  GFR-binding peptide
  MOD_RES (1), (35): Xaa is C or S
  MOD_RES (15), (16), (17), (18), (19): Xaa is A or G
  MOD_RES (20), (21), (22), (23): Xaa is A or G or is absent

SEQ ID NO: 73488 - protein, 38 aa, Artificial Sequence
  GFR-binding peptide
  MOD_RES (1), (2), (36), (38): Xaa is C or S
  MOD_RES (16), (17), (18), (19), (20): Xaa is A or G
  MOD_RES (21), (22), (23), (24): Xaa is A or G or is absent
XXVPTRLSNITIQIMXXXXXXXXXLGEMSDMVVESXGX

SEQ ID NO: 73489 - protein, 39 aa, Artificial Sequence
  GFR-binding peptide
  MOD_RES (2), (3), (36), (38): Xaa is C or S
  MOD_RES (17), (18), (19), (20), (21): Xaa is A or G
  MOD_RES (22), (23), (24), (25): Xaa is A or G or is absent
TXXAPVKTSNITMQIMXXXXXXXXXIGEMSMIVEEXGXL

SEQ ID NO: 73490 - protein, 39 aa, Artificial Sequence; identical to SEQ ID NO: 19696
  GFR-binding peptide
  MOD_RES (5), (5): Xaa is C or S

SEQ ID NO: 73491 - protein, 33 aa, Artificial Sequence; identical to SEQ ID NO: 53031
  GFR-binding peptide
  MOD_RES (1), (32): Xaa is C or S

SEQ ID NO: 73492 - protein, 40 aa, Artificial Sequence; identical to SEQ ID NO: 19697
  GFR-binding peptide
  MOD_RES (5), (5): Xaa is C or S

SEQ ID NO: 73493 - protein, 40 aa, Artificial Sequence; identical to SEQ ID NO: 19698
  GFR-binding peptide
  MOD_RES (1), (38), (40): Xaa is C or S

SEQ ID NO: 73494 - protein, 38 aa, Artificial Sequence; identical to SEQ ID NO: 19699
  GFR-binding peptide
  MOD_RES (1), (38): Xaa is C or S
  MOD_RES (17), (18), (19), (20), (21): Xaa is A or G
  MOD_RES (22), (23), (24), (25): Xaa is A or G or is absent

SEQ ID NO: 73495 - protein, 41 aa, Artificial Sequence; identical to SEQ ID NO: 19700
  GFR-binding peptide
  MOD_RES (1), (38), (40): Xaa is C or S

SEQ ID NO: 73496 - protein, 38 aa, Artificial Sequence
  GFR-binding peptide
  MOD_RES (1), (2), (36), (38): Xaa is C or S
  MOD_RES (16), (17), (18), (19), (20): Xaa is A or G
  MOD_RES (21), (22), (23), (24): Xaa is A or G or is absent
XXVPARLSNITIQIMXXXXXXXXXIGEMSDMVVEAXGX

SEQ ID NO: 73497 - protein, 30 aa, Artificial Sequence; identical to SEQ ID NO: 55439
  GFR-binding peptide

SEQ ID NO: 73498 - protein, 37 aa, Artificial Sequence; identical to SEQ ID NO: 19701
  GFR-binding peptide
  MOD_RES (1), (35), (37): Xaa is C or S
  MOD_RES (15), (16), (17), (18), (19): Xaa is A or G
  MOD_RES (20), (21), (22), (23): Xaa is A or G or is absent

SEQ ID NO: 73499 - protein, 42 aa, Artificial Sequence; identical to SEQ ID NO: 19702
  GFR-binding peptide
  MOD_RES (5), (39), (41): Xaa is C or S
  MOD_RES (19), (20), (21), (22), (23): Xaa is A or G
  MOD_RES (24), (25), (26), (27): Xaa is A or G or is absent

SEQ ID NO: 73500 - protein, 37 aa, Artificial Sequence; identical to SEQ ID NO: 19703
  GFR-binding peptide
  MOD_RES (1), (1): Xaa is C or S

SEQ ID NO: 73501 - protein, 33 aa, Artificial Sequence; identical to SEQ ID NO: 19704
  GFR-binding peptide
  MOD_RES (14), (15), (16), (17), (18): Xaa is A or G
  MOD_RES (19), (20), (21), (22): Xaa is A or G or is absent

SEQ ID NO: 73502 - protein, 33 aa, Artificial Sequence
  GFR-binding peptide
  MOD_RES (1), (2), (33): Xaa is C or S
XXVPQALSNITIQIMVGRKPKVLGEMSMIVRSX

SEQ ID NO: 73503 - protein, 39 aa, Artificial Sequence; identical to SEQ ID NO: 19706
  GFR-binding peptide
  MOD_RES (36), (38): Xaa is C or S
  MOD_RES (15), (16), (17), (18), (19): Xaa is A or G
  MOD_RES (20), (21), (22), (23): Xaa is A or G or is absent

SEQ ID NO: 73504 - protein, 35 aa, Artificial Sequence
  GFR-binding peptide
  MOD_RES (34), (34): Xaa is C or S
  MOD_RES (14), (15), (16), (17), (18): Xaa is A or G
  MOD_RES (19), (20), (21), (22): Xaa is A or G or is absent
VPARLSNITIQIMXXXXXXXXXLGEMSDMVVEAXG

SEQ ID NO: 73505 - protein, 36 aa, Artificial Sequence
  GFR-binding peptide
  MOD_RES (3), (4), (36): Xaa is C or S
PTXXVPTRLSNITIQIMDSANNVVIGEMSDMVVESX

SEQ ID NO: 73506 - protein, 36 aa, Artificial Sequence; identical to SEQ ID NO: 19707
  GFR-binding peptide
  MOD_RES (35), (35): Xaa is C or S

SEQ ID NO: 73507 - protein, 34 aa, Artificial Sequence; identical to SEQ ID NO: 53039
  GFR-binding peptide
  MOD_RES (1), (2): Xaa is C or S
  MOD_RES (16), (17), (18), (19), (20): Xaa is A or G
  MOD_RES (21), (22), (23), (24): Xaa is A or G or is absent

SEQ ID NO: 73508 - protein, 39 aa, Artificial Sequence
  GFR-binding peptide
  MOD_RES (2), (3), (37), (39): Xaa is C or S
  MOD_RES (17), (18), (19), (20), (21): Xaa is A or G
  MOD_RES (22), (23), (24), (25): Xaa is A or G or is absent
TXXVPTRLSNITIQIMXXXXXXXXXLGEMSDMVVESXGX

SEQ ID NO: 73509 - protein, 33 aa, Artificial Sequence; identical to SEQ ID NO: 19708
  GFR-binding peptide
  MOD_RES (14), (15), (16), (17), (18): Xaa is A or G
  MOD_RES (19), (20), (21), (22): Xaa is A or G or is absent

SEQ ID NO: 73510 - protein, 41 aa, Artificial Sequence; identical to SEQ ID NO: 53045
  GFR-binding peptide
  MOD_RES (6), (7), (38), (40): Xaa is C or S

SEQ ID NO: 73511 - protein, 36 aa, Artificial Sequence; identical to SEQ ID NO: 53046
  GFR-binding peptide
  MOD_RES (1), (2), (33), (35): Xaa is C or S

SEQ ID NO: 73512 - protein, 37 aa, Artificial Sequence; identical to SEQ ID NO: 19709
  GFR-binding peptide
  MOD_RES (4), (4): Xaa is C or S
  MOD_RES (18), (19), (20), (21), (22): Xaa is A or G
  MOD_RES (23), (24), (25), (26): Xaa is A or G or is absent

SEQ ID NO: 73513 - protein, 38 aa, Artificial Sequence; identical to SEQ ID NO: 55454
  GFR-binding peptide
  MOD_RES (5), (6), (37): Xaa is C or S

SEQ ID NO: 73514 - protein, 37 aa, Artificial Sequence
  GFR-binding peptide
  MOD_RES (1), (2), (35), (37): Xaa is C or S
  MOD_RES (16), (17), (18), (19), (20): Xaa is A or G
  MOD_RES (21), (22), (23), (24): Xaa is A or G or is absent
XXAPVKTSNITMQIMXXXXXXXXXLGEMSMIVEEXGX

SEQ ID NO: 73515 - protein, 38 aa, Artificial Sequence; identical to SEQ ID NO: 19711
  GFR-binding peptide
  MOD_RES (2), (2): Xaa is C or S
  MOD_RES (18), (19), (20), (21), (22): Xaa is A or G
  MOD_RES (23), (24), (25), (26): Xaa is A or G or is absent

SEQ ID NO: 73516 - protein, 40 aa, Artificial Sequence
  GFR-binding peptide
  MOD_RES (4), (5), (39): Xaa is C or S
  MOD_RES (19), (20), (21), (22), (23): Xaa is A or G
  MOD_RES (24), (25), (26), (27): Xaa is A or G or is absent
AGPXXTPTKMSNITMQIMXXXXXXXXXIGEMSGMVVDRXG

SEQ ID NO: 73517 - protein, 35 aa, Artificial Sequence
  GFR-binding peptide
  MOD_RES (3), (4): Xaa is C or S
GPXXTPTKMSNITMQIMNDKQQIIIGEMSGMVVDR

SEQ ID NO: 73518 - protein, 38 aa, Artificial Sequence
  GFR-binding peptide
  MOD_RES (5), (6), (38): Xaa is C or S
TPPTXXVPTRLSNITIQIMDSANNVVIGEMSDMVVESX

SEQ ID NO: 73519 - protein, 41 aa, Artificial Sequence; identical to SEQ ID NO: 19712
  GFR-binding peptide
  MOD_RES (2), (39), (41): Xaa is C or S

SEQ ID NO: 73520 - protein, 39 aa, Artificial Sequence
  GFR-binding peptide
  MOD_RES (4), (5), (37), (39): Xaa is C or S
AGPXXTPTKMSNITMQIMNDKQQIIIGEMSGMVVDRXGX

SEQ ID NO: 73521 - protein, 34 aa, Artificial Sequence; identical to SEQ ID NO: 19714
  GFR-binding peptide
  MOD_RES (34), (34): Xaa is C or S

SEQ ID NO: 73522 - protein, 42 aa, Artificial Sequence; identical to SEQ ID NO: 19716
  GFR-binding peptide
  MOD_RES (6), (40), (42): Xaa is C or S
  MOD_RES (20), (21), (22), (23), (24): Xaa is A or G
  MOD_RES (25), (26), (27), (28): Xaa is A or G or is absent

SEQ ID NO: 73523 - protein, 39 aa, Artificial Sequence; identical to SEQ ID NO: 19717
  GFR-binding peptide
  MOD_RES (36), (38): Xaa is C or S

SEQ ID NO: 73524 - protein, 30 aa, Artificial Sequence
  GFR-binding peptide
VPTRLSNITIQIMDSANNVVLGEMSDMVVE

SEQ ID NO: 73525 - protein, 38 aa, Artificial Sequence; identical to SEQ ID NO: 19719
  GFR-binding peptide
  MOD_RES (6), (6): Xaa is C or S
  MOD_RES (20), (21), (22), (23), (24): Xaa is A or G
  MOD_RES (25), (26), (27), (28): Xaa is A or G or is absent

SEQ ID NO: 73526 - protein, 34 aa, Artificial Sequence
  GFR-binding peptide
  MOD_RES (1), (2): Xaa is C or S
  MOD_RES (16), (17), (18), (19), (20): Xaa is A or G
  MOD_RES (21), (22), (23), (24): Xaa is A or G or is absent
XXTPTKMSNITMQIMXXXXXXXXXIGEMSGMVVD

SEQ ID NO: 73527 - protein, 36 aa, Artificial Sequence
  GFR-binding peptide
  MOD_RES (1), (2), (34), (36): Xaa is C or S
XXVPARLSNITIQIMDAANNVVLGEMSDMVVEAXGX

SEQ ID NO: 73528 - protein, 36 aa, Artificial Sequence
  GFR-binding peptide
  MOD_RES (1), (35): Xaa is C or S
  MOD_RES (15), (16), (17), (18), (19): Xaa is A or G
  MOD_RES (20), (21), (22), (23): Xaa is A or G or is absent
XVPTRLSNITIQIMXXXXXXXXXLGEMSDMVVESXG

SEQ ID NO: 73529 - protein, 38 aa, Artificial Sequence; identical to SEQ ID NO: 53065
  GFR-binding peptide
  MOD_RES (1), (2), (36), (38): Xaa is C or S
  MOD_RES (16), (17), (18), (19), (20): Xaa is A or G
  MOD_RES (21), (22), (23), (24): Xaa is A or G or is absent

SEQ ID NO: 73530 - protein, 34 aa, Artificial Sequence; identical to SEQ ID NO: 19721
  GFR-binding peptide
  MOD_RES (1), (1): Xaa is C or S

SEQ ID NO: 73531 - protein, 38 aa, Artificial Sequence; identical to SEQ ID NO: 19722
  GFR-binding peptide
  MOD_RES (1), (38): Xaa is C or S

SEQ ID NO: 73532 - protein, 38 aa, Artificial Sequence; identical to SEQ ID NO: 19723
  GFR-binding peptide
  MOD_RES (4), (38): Xaa is C or S

SEQ ID NO: 73533 - protein, 37 aa, Artificial Sequence
  GFR-binding peptide
  MOD_RES (3), (4): Xaa is C or S
  MOD_RES (18), (19), (20), (21), (22): Xaa is A or G
  MOD_RES (23), (24), (25), (26): Xaa is A or G or is absent
GPXXTPTKMSNITMQIMXXXXXXXXXIGEMSGMVVDR

SEQ ID NO: 73534 - protein, 40 aa, Artificial Sequence; identical to SEQ ID NO: 19724
  GFR-binding peptide
  MOD_RES (4), (38), (40): Xaa is C or S
  MOD_RES (18), (19), (20), (21), (22): Xaa is A or G
  MOD_RES (23), (24), (25), (26): Xaa is A or G or is absent

SEQ ID NO: 73535 - protein, 38 aa, Artificial Sequence
  GFR-binding peptide
  MOD_RES (1), (2), (35), (37): Xaa is C or S
  MOD_RES (16), (17), (18), (19), (20): Xaa is A or G
  MOD_RES (21), (22), (23), (24): Xaa is A or G or is absent
XXAPVKTSNITMQIMXXXXXXXXXIGEMSMIVEEXGXL

SEQ ID NO: 73536 - protein, 34 aa, Artificial Sequence; identical to SEQ ID NO: 19727
  GFR-binding peptide
  MOD_RES (2), (2): Xaa is C or S

SEQ ID NO: 73537 - protein, 38 aa, Artificial Sequence; identical to SEQ ID NO: 55485
  GFR-binding peptide
  MOD_RES (6), (7), (38): Xaa is C or S

SEQ ID NO: 73538 - protein, 42 aa, Artificial Sequence
  GFR-binding peptide
  MOD_RES (5), (6), (40), (42): Xaa is C or S
  MOD_RES (20), (21), (22), (23), (24): Xaa is A or G
  MOD_RES (25), (26), (27), (28): Xaa is A or G or is absent
SAGPXXTPTKMSNITMQIMXXXXXXXXXIGEMSGMVVDRXGX

SEQ ID NO: 73539 - protein, 42 aa, Artificial Sequence
  GFR-binding peptide
  MOD_RES (6), (7), (39), (41): Xaa is C or S
STPPTXXVPTRLSNITIQIMDSANNVVLGEMSDMVVESXGXR

SEQ ID NO: 73540 - protein, 38 aa, Artificial Sequence
  GFR-binding peptide
  MOD_RES (3), (4), (38): Xaa is C or S
  MOD_RES (18), (19), (20), (21), (22): Xaa is A or G
  MOD_RES (23), (24), (25), (26): Xaa is A or G or is absent
PTXXVPTRLSNITIQIMXXXXXXXXXIGEMSDMVVESX

SEQ ID NO: 73541 - protein, 40 aa, Artificial Sequence; identical to SEQ ID NO: 19730
  GFR-binding peptide
  MOD_RES (5), (5): Xaa is C or S
  MOD_RES (21), (22), (23), (24), (25): Xaa is A or G
  MOD_RES (26), (27), (28), (29): Xaa is A or G or is absent

SEQ ID NO: 73542 - protein, 39 aa, Artificial Sequence; identical to SEQ ID NO: 19731
  GFR-binding peptide
  MOD_RES (7), (7): Xaa is C or S
  MOD_RES (21), (22), (23), (24), (25): Xaa is A or G
  MOD_RES (26), (27), (28), (29): Xaa is A or G or is absent

SEQ ID NO: 73543 - protein, 41 aa, Artificial Sequence; identical to SEQ ID NO: 19732
  GFR-binding peptide
  MOD_RES (2), (39), (41): Xaa is C or S

SEQ ID NO: 73544 - protein, 37 aa, Artificial Sequence; identical to SEQ ID NO: 19733
  GFR-binding peptide
  MOD_RES (3), (37): Xaa is C or S

SEQ ID NO: 73545 - protein, 35 aa, Artificial Sequence; identical to SEQ ID NO: 19734
  GFR-binding peptide
  MOD_RES (1), (35): Xaa is C or S

SEQ ID NO: 73546 - protein, 35 aa, Artificial Sequence; identical to SEQ ID NO: 19735
  GFR-binding peptide
  MOD_RES (3), (3): Xaa is C or S
  MOD_RES (17), (18), (19), (20), (21): Xaa is A or G
  MOD_RES (22), (23), (24), (25): Xaa is A or G or is absent

SEQ ID NO: 73547 - protein, 39 aa, Artificial Sequence; identical to SEQ ID NO: 19736
  GFR-binding peptide
  MOD_RES (4), (38): Xaa is C or S

SEQ ID NO: 73548 - protein, 40 aa, Artificial Sequence
  GFR-binding peptide
  MOD_RES (6), (7), (39): Xaa is C or S
AAPASXXVPARLSNITIQIMDAANNVVIGEMSDMVVEAXG

SEQ ID NO: 73549 - protein, 34 aa, Artificial Sequence
  GFR-binding peptide
  MOD_RES (1), (33): Xaa is C or S
XTPTKMSNITMQIMNDKQQIIIGEMSGMVVDRXG

SEQ ID NO: 73550 - protein, 34 aa, Artificial Sequence; identical to SEQ ID NO: 19737
  GFR-binding peptide
  MOD_RES (34), (34): Xaa is C or S
  MOD_RES (14), (15), (16), (17), (18): Xaa is A or G
  MOD_RES (19), (20), (21), (22): Xaa is A or G or is absent

SEQ ID NO: 73551 - protein, 41 aa, Artificial Sequence; identical to SEQ ID NO: 19738
  GFR-binding peptide
  MOD_RES (7), (41): Xaa is C or S
  MOD_RES (21), (22), (23), (24), (25): Xaa is A or G
  MOD_RES (26), (27), (28), (29): Xaa is A or G or is absent

SEQ ID NO: 73552 - protein, 37 aa, Artificial Sequence; identical to SEQ ID NO: 19739
  GFR-binding peptide
  MOD_RES (2), (36): Xaa is C or S
  MOD_RES (16), (17), (18), (19), (20): Xaa is A or G
  MOD_RES (21), (22), (23), (24): Xaa is A or G or is absent

SEQ ID NO: 73553 - protein, 35 aa, Artificial Sequence; identical to SEQ ID NO: 55498
  GFR-binding peptide
  MOD_RES (1), (2), (35): Xaa is C or S
  MOD_RES (16), (17), (18), (19), (20): Xaa is A or G
  MOD_RES (21), (22), (23), (24): Xaa is A or G or is absent

SEQ ID NO: 73554 - protein, 43 aa, Artificial Sequence; identical to SEQ ID NO: 19741
  GFR-binding peptide
  MOD_RES (5), (42): Xaa is C or S
  MOD_RES (21), (22), (23), (24), (25): Xaa is A or G
  MOD_RES (26), (27), (28), (29): Xaa is A or G or is absent

SEQ ID NO: 73555 - protein, 37 aa, Artificial Sequence
  GFR-binding peptide
  MOD_RES (2), (3), (34), (36): Xaa is C or S
TXXAPVKTSNITMQIMDNGRVLLLGEMSMIVEEXGXL

SEQ ID NO: 73556 - protein, 37 aa, Artificial Sequence
  GFR-binding peptide
  MOD_RES (6), (7): Xaa is C or S
RVPSTXXAPVKTSNITMQIMDNGRVLLIGEMSMIVEE

SEQ ID NO: 73557 - protein, 38 aa, Artificial Sequence
  GFR-binding peptide
  MOD_RES (2), (3), (35), (37): Xaa is C or S
TXXVPTRLSNITIQIMDSANNVVIGEMSDMVVESXGXR

SEQ ID NO: 73558 - protein, 45 aa, Artificial Sequence; identical to SEQ ID NO: 19744
  GFR-binding peptide
  MOD_RES (5), (42), (44): Xaa is C or S
  MOD_RES (21), (22), (23), (24), (25): Xaa is A or G
  MOD_RES (26), (27), (28), (29): Xaa is A or G or is absent

SEQ ID NO: 73559 - protein, 37 aa, Artificial Sequence; identical to SEQ ID NO: 55509
  GFR-binding peptide
  MOD_RES (3), (4), (35), (37): Xaa is C or S

SEQ ID NO: 73560 - protein, 42 aa, Artificial Sequence
  GFR-binding peptide
  MOD_RES (5), (6), (40), (42): Xaa is C or S
  MOD_RES (20), (21), (22), (23), (24): Xaa is A or G
  MOD_RES (25), (26), (27), (28): Xaa is A or G or is absent
TPPTXXVPTRLSNITIQIMXXXXXXXXXIGEMSDMVVESXGX

SEQ ID NO: 73561 - protein, 37 aa, Artificial Sequence; identical to SEQ ID NO: 19745
  GFR-binding peptide
  MOD_RES (37), (37): Xaa is C or S
  MOD_RES (16), (17), (18), (19), (20): Xaa is A or G
  MOD_RES (21), (22), (23), (24): Xaa is A or G or is absent

SEQ ID NO: 73562 - protein, 41 aa, Artificial Sequence; identical to SEQ ID NO: 19746
  GFR-binding peptide
  MOD_RES (6), (40): Xaa is C or S
  MOD_RES (20), (21), (22), (23), (24): Xaa is A or G
  MOD_RES (25), (26), (27), (28): Xaa is A or G or is absent

SEQ ID NO: 73563 - protein, 40 aa, Artificial Sequence; identical to SEQ ID NO: 53102
  GFR-binding peptide
  MOD_RES (6), (7), (40): Xaa is C or S
  MOD_RES (21), (22), (23), (24), (25): Xaa is A or G
  MOD_RES (26), (27), (28), (29): Xaa is A or G or is absent

SEQ ID NO: 73564 - protein, 32 aa, Artificial Sequence
  GFR-binding peptide
  MOD_RES (1), (1): Xaa is C or S
XVPTRLSNITIQIMDSANNVVLGEMSDMVVES

SEQ ID NO: 73565 - protein, 35 aa, Artificial Sequence
  GFR-binding peptide
  MOD_RES (2), (3): Xaa is C or S
  MOD_RES (17), (18), (19), (20), (21): Xaa is A or G
  MOD_RES (22), (23), (24), (25): Xaa is A or G or is absent
PXXAPTKLSNITVQIMXXXXXXXXXLGEMSNMVVR

SEQ ID NO: 73566 - protein, 42 aa, Artificial Sequence; identical to SEQ ID NO: 19747
  GFR-binding peptide
  MOD_RES (5), (39), (41): Xaa is C or S

SEQ ID NO: 73567 - protein, 36 aa, Artificial Sequence
  GFR-binding peptide
  MOD_RES (2), (3), (35): Xaa is C or S
TXXVPTRLSNITIQIMDSANNVVIGEMSDMVVESXG

SEQ ID NO: 73568 - protein, 37 aa, Artificial Sequence; identical to SEQ ID NO: 53111
  GFR-binding peptide
  MOD_RES (5), (6), (37): Xaa is C or S

SEQ ID NO: 73569 - protein, 37 aa, Artificial Sequence; identical to SEQ ID NO: 55518
  GFR-binding peptide
  MOD_RES (3), (4), (35), (37): Xaa is C or S

SEQ ID NO: 73570 - protein, 36 aa, Artificial Sequence
  GFR-binding peptide
  MOD_RES (1), (2), (36): Xaa is C or S
  MOD_RES (16), (17), (18), (19), (20): Xaa is A or G
  MOD_RES (21), (22), (23), (24): Xaa is A or G or is absent
XXVPARLSNITIQIMXXXXXXXXXIGEMSDMVVEAX

SEQ ID NO: 73571 - protein, 41 aa, Artificial Sequence; identical to SEQ ID NO: 19748
  GFR-binding peptide
  MOD_RES (5), (39), (41): Xaa is C or S
  MOD_RES (19), (20), (21), (22), (23): Xaa is A or G
  MOD_RES (24), (25), (26), (27): Xaa is A or G or is absent

SEQ ID NO: 73572 - protein, 37 aa, Artificial Sequence
  GFR-binding peptide
  MOD_RES (3), (4), (36): Xaa is C or S
GPXXTPTKMSNITMQIMNDKQQIILGEMSGMVVDRXG

SEQ ID NO: 73573 - protein, 39 aa, Artificial Sequence
  GFR-binding peptide
  MOD_RES (5), (6), (39): Xaa is C or S
  MOD_RES (20), (21), (22), (23), (24): Xaa is A or G
  MOD_RES (25), (26), (27), (28): Xaa is A or G or is absent
VPSTXXAPVKTSNITMQIMXXXXXXXXXIGEMSMIVEEX

SEQ ID NO: 73574 - protein, 34 aa, Artificial Sequence
  GFR-binding peptide
  MOD_RES (3), (4): Xaa is C or S
GPXXTPTKMSNITMQIMNDKQQIILGEMSGMVVD

SEQ ID NO: 73575 - protein, 39 aa, Artificial Sequence; identical to SEQ ID NO: 19750
  GFR-binding peptide
  MOD_RES (3), (3): Xaa is C or S

SEQ ID NO: 73576 - protein, 41 aa, Artificial Sequence; identical to SEQ ID NO: 19752
  GFR-binding peptide
  MOD_RES (4), (38), (40): Xaa is C or S
  MOD_RES (18), (19), (20), (21), (22): Xaa is A or G
  MOD_RES (23), (24), (25), (26): Xaa is A or G or is absent

SEQ ID NO: 73577 - protein, 35 aa, Artificial Sequence
  GFR-binding peptide
  MOD_RES (1), (2), (33), (35): Xaa is C or S
XXVPQALSNITIQIMVGRKPKVLGEMSMIVRSXKX

SEQ ID NO: 73578 - protein, 40 aa, Artificial Sequence
  GFR-binding peptide
  MOD_RES (6), (7): Xaa is C or S
  MOD_RES (21), (22), (23), (24), (25): Xaa is A or G
  MOD_RES (26), (27), (28), (29): Xaa is A or G or is absent
HVPKPXXAPTKLSNITVQIMXXXXXXXXXLGEMSNMVVRS

SEQ ID NO: 73579 - protein, 36 aa, Artificial Sequence
  GFR-binding peptide
  MOD_RES (4), (5), (36): Xaa is C or S
AAPXXVPQALSNITIQIMVGRKPKVLGEMSMIVRSX

SEQ ID NO: 73580 - protein, 38 aa, Artificial Sequence
  GFR-binding peptide
  MOD_RES (3), (4), (35), (37): Xaa is C or S
SPXXVSQDLSNITIQIMIGKTPKILGEMSMIVKSXKXS

SEQ ID NO: 73581 - protein, 38 aa, Artificial Sequence
  GFR-binding peptide
  MOD_RES (4), (5), (37): Xaa is C or S
AGPXXTPTKMSNITMQIMNDKQQIILGEMSGMVVDRXG

SEQ ID NO: 73582 - protein, 38 aa, Artificial Sequence; identical to SEQ ID NO: 55534
  GFR-binding peptide
  MOD_RES (2), (3), (36), (38): Xaa is C or S
  MOD_RES (17), (18), (19), (20), (21): Xaa is A or G
  MOD_RES (22), (23), (24), (25): Xaa is A or G or is absent

SEQ ID NO: 73583 - protein, 39 aa, Artificial Sequence
  GFR-binding peptide
  MOD_RES (6), (7), (39): Xaa is C or S
HVPKPXXAPTKLSNITVQIMDDSSNVILGEMSNMVVRSX

SEQ ID NO: 73584 - protein, 34 aa, Artificial Sequence; identical to SEQ ID NO: 19755
  GFR-binding peptide

SEQ ID NO: 73585 - protein, 40 aa, Artificial Sequence; identical to SEQ ID NO: 19758
  GFR-binding peptide
  MOD_RES (4), (4): Xaa is C or S

SEQ ID NO: 73586 - protein, 42 aa, Artificial Sequence; identical to SEQ ID NO: 19759
  GFR-binding peptide
  MOD_RES (2), (39), (41): Xaa is C or S

SEQ ID NO: 73587 - protein, 35 aa, Artificial Sequence; identical to SEQ ID NO: 19760
  GFR-binding peptide
  MOD_RES (35), (35): Xaa is C or S

SEQ ID NO: 73588 - protein, 36 aa, Artificial Sequence; identical to SEQ ID NO: 55542
  GFR-binding peptide
  MOD_RES (4), (5), (36): Xaa is C or S

SEQ ID NO: 73589 - protein, 41 aa, Artificial Sequence
  GFR-binding peptide
  MOD_RES (6), (7), (41): Xaa is C or S
  MOD_RES (21), (22), (23), (24), (25): Xaa is A or G
  MOD_RES (26), (27), (28), (29): Xaa is A or G or is absent
GSAGPXXTPTKMSNITMQIMXXXXXXXXXIGEMSGMVVDRX

SEQ ID NO: 73590 - protein, 34 aa, Artificial Sequence
  GFR-binding peptide
  MOD_RES (2), (3), (34): Xaa is C or S
TXXAPVKTSNITMQIMDNGRVLLLGEMSMIVEEX

SEQ ID NO: 73591 - protein, 33 aa, Artificial Sequence
  GFR-binding peptide
  MOD_RES (2), (3): Xaa is C or S
TXXAPVKTSNITMQIMDNGRVLLLGEMSMIVEE

SEQ ID NO: 73592 - protein, 36 aa, Artificial Sequence
  GFR-binding peptide
  MOD_RES (4), (5), (36): Xaa is C or S
ASPXXVSQDLSNITIQIMIGKTPKILGEMSMIVKSX

SEQ ID NO: 73593 - protein, 33 aa, Artificial Sequence
  GFR-binding peptide
  MOD_RES (14), (15), (16), (17), (18): Xaa is A or G
  MOD_RES (19), (20), (21), (22): Xaa is A or G or is absent
VPARLSNITIQIMXXXXXXXXXIGEMSDMVVEA

SEQ ID NO: 73594 - protein, 44 aa, Artificial Sequence; identical to SEQ ID NO: 19764
  GFR-binding peptide
  MOD_RES (4), (41), (43): Xaa is C or S
  MOD_RES (20), (21), (22), (23), (24): Xaa is A or G
  MOD_RES (25), (26), (27), (28): Xaa is A or G or is absent

SEQ ID NO: 73595 - protein, 39 aa, Artificial Sequence
  GFR-binding peptide
  MOD_RES (4), (5), (39): Xaa is C or S
  MOD_RES (19), (20), (21), (22), (23): Xaa is A or G
  MOD_RES (24), (25), (26), (27): Xaa is A or G or is absent
PKPXXAPTKLSNITVQIMXXXXXXXXXLGEMSNMVVRSX

SEQ ID NO: 73596 - protein, 38 aa, Artificial Sequence; identical to SEQ ID NO: 55552
  GFR-binding peptide
  MOD_RES (4), (5), (36), (38): Xaa is C or S

SEQ ID NO: 73597 - protein, 37 aa, Artificial Sequence; identical to SEQ ID NO: 19768
  GFR-binding peptide
  MOD_RES (34), (36): Xaa is C or S
  MOD_RES (14), (15), (16), (17), (18): Xaa is A or G
  MOD_RES (19), (20), (21), (22): Xaa is A or G or is absent

SEQ ID NO: 73598 - protein, 41 aa, Artificial Sequence; identical to SEQ ID NO: 19770
  GFR-binding peptide
  MOD_RES (3), (40): Xaa is C or S
  MOD_RES (19), (20), (21), (22), (23): Xaa is A or G
  MOD_RES (24), (25), (26), (27): Xaa is A or G or is absent

SEQ ID NO: 73599 - protein, 33 aa, Artificial Sequence
  GFR-binding peptide
  MOD_RES (33), (33): Xaa is C or S
  MOD_RES (14), (15), (16), (17), (18): Xaa is A or G
  MOD_RES (19), (20), (21), (22): Xaa is A or G or is absent
APVKTSNITMQIMXXXXXXXXXLGEMSMIVEEX

SEQ ID NO: 73600 - protein, 41 aa, Artificial Sequence; identical to SEQ ID NO: 55559
  GFR-binding peptide
  MOD_RES (3), (4), (38), (40): Xaa is C or S
  MOD_RES (18), (19), (20), (21), (22): Xaa is A or G
  MOD_RES (23), (24), (25), (26): Xaa is A or G or is absent

SEQ ID NO: 73601 - protein, 38 aa, Artificial Sequence
  GFR-binding peptide
  MOD_RES (3), (4), (37): Xaa is C or S
  MOD_RES (18), (19), (20), (21), (22): Xaa is A or G
  MOD_RES (23), (24), (25), (26): Xaa is A or G or is absent
STXXAPVKTSNITMQIMXXXXXXXXXIGEMSMIVEEXG

SEQ ID NO: 73602 - protein, 40 aa, Artificial Sequence
  GFR-binding peptide
  MOD_RES (4), (5), (37), (39): Xaa is C or S
PKPXXAPTKLSNITVQIMDDSSNVILGEMSNMVVRSXGXH

SEQ ID NO: 73603 - protein, 36 aa, Artificial Sequence
  GFR-binding peptide
  MOD_RES (2), (3), (35): Xaa is C or S
TXXVPTRLSNITIQIMDSANNVVLGEMSDMVVESXG

SEQ ID NO: 73604 - protein, 38 aa, Artificial Sequence; identical to SEQ ID NO: 19772
  GFR-binding peptide
  MOD_RES (4), (4): Xaa is C or S
  MOD_RES (20), (21), (22), (23), (24): Xaa is A or G
  MOD_RES (25), (26), (27), (28): Xaa is A or G or is absent

SEQ ID NO: 73605 - protein, 37 aa, Artificial Sequence; identical to SEQ ID NO: 19775
  GFR-binding peptide
  MOD_RES (36), (36): Xaa is C or S
  MOD_RES (15), (16), (17), (18), (19): Xaa is A or G
  MOD_RES (20), (21), (22), (23): Xaa is A or G or is absent

SEQ ID NO: 73606 - protein, 32 aa, Artificial Sequence
  GFR-binding peptide
  MOD_RES (1), (2): Xaa is C or S
XXVPARLSNITIQIMDAANNVVIGEMSDMVVE

SEQ ID NO: 73607 - protein, 32 aa, Artificial Sequence
  GFR-binding peptide
  MOD_RES (14), (15), (16), (17), (18): Xaa is A or G
  MOD_RES (19), (20), (21), (22): Xaa is A or G or is absent
VSQDLSNITIQIMXXXXXXXXXLGEMSMIVKS

SEQ ID NO: 73608 - protein, 37 aa, Artificial Sequence
  GFR-binding peptide
  MOD_RES (4), (5): Xaa is C or S
  MOD_RES (19), (20), (21), (22), (23): Xaa is A or G
  MOD_RES (24), (25), (26), (27): Xaa is A or G or is absent
AGPXXTPTKMSNITMQIMXXXXXXXXXLGEMSGMVVD

SEQ ID NO: 73609 - protein, 43 aa, Artificial Sequence
  GFR-binding peptide
  MOD_RES (6), (7), (40), (42): Xaa is C or S
  MOD_RES (21), (22), (23), (24), (25): Xaa is A or G
  MOD_RES (26), (27), (28), (29): Xaa is A or G or is absent
ASASPXXVSQDLSNITIQIMXXXXXXXXXLGEMSMIVKSXKXS

SEQ ID NO: 73610 - protein, 36 aa, Artificial Sequence; identical to SEQ ID NO: 53160
  GFR-binding peptide
  MOD_RES (34), (36): Xaa is C or S
  MOD_RES (14), (15), (16), (17), (18): Xaa is A or G
  MOD_RES (19), (20), (21), (22): Xaa is A or G or is absent

SEQ ID NO: 73611 - protein, 38 aa, Artificial Sequence; identical to SEQ ID NO: 19779
  GFR-binding peptide
  MOD_RES (5), (5): Xaa is C or S
  MOD_RES (19), (20), (21), (22), (23): Xaa is A or G
  MOD_RES (24), (25), (26), (27): Xaa is A or G or is absent

SEQ ID NO: 73612 - protein, 36 aa, Artificial Sequence
  GFR-binding peptide
  MOD_RES (1), (33), (35): Xaa is C or S
XTPTKMSNITMQIMNDKQQIIIGEMSGMVVDRXGXS

SEQ ID NO: 73613 - protein, 36 aa, Artificial Sequence; identical to SEQ ID NO: 19780
  GFR-binding peptide
  MOD_RES (35), (35): Xaa is C or S

SEQ ID NO: 73614 - protein, 41 aa, Artificial Sequence; identical to SEQ ID NO: 19781
  GFR-binding peptide
  MOD_RES (5), (5): Xaa is C or S
  MOD_RES (21), (22), (23), (24), (25): Xaa is A or G
  MOD_RES (26), (27), (28), (29): Xaa is A or G or is absent

SEQ ID NO: 73615 - protein, 38 aa, Artificial Sequence
  GFR-binding peptide
  MOD_RES (3), (4), (37): Xaa is C or S
  MOD_RES (18), (19), (20), (21), (22): Xaa is A or G
  MOD_RES (23), (24), (25), (26): Xaa is A or G or is absent
STXXAPVKTSNITMQIMXXXXXXXXXLGEMSMIVEEXG

SEQ ID NO: 73616 - protein, 34 aa, Artificial Sequence
  GFR-binding peptide
  MOD_RES (3), (4): Xaa is C or S
SPXXVPQDLSNITIQIMVGRTPKVLGEMSMVVKS

SEQ ID NO: 73617 - protein, 34 aa, Artificial Sequence
  GFR-binding peptide
  MOD_RES (34), (34): Xaa is C or S
  MOD_RES (14), (15), (16), (17), (18): Xaa is A or G
  MOD_RES (19), (20), (21), (22): Xaa is A or G or is absent
VPARLSNITIQIMXXXXXXXXXLGEMSDMVVEAX

SEQ ID NO: 73618 - protein, 39 aa, Artificial Sequence; identical to SEQ ID NO: 19782
  GFR-binding peptide
  MOD_RES (3), (3): Xaa is C or S
  MOD_RES (19), (20), (21), (22), (23): Xaa is A or G
  MOD_RES (24), (25), (26), (27): Xaa is A or G or is absent

SEQ ID NO: 73619 - protein, 38 aa, Artificial Sequence; identical to SEQ ID NO: 19783
  GFR-binding peptide
  MOD_RES (3), (3): Xaa is C or S
  MOD_RES (19), (20), (21), (22), (23): Xaa is A or G
  MOD_RES (24), (25), (26), (27): Xaa is A or G or is absent

SEQ ID NO: 73620 - protein, 36 aa, Artificial Sequence; identical to SEQ ID NO: 53167
  GFR-binding peptide
  MOD_RES (3), (4), (35): Xaa is C or S

SEQ ID NO: 73621 - protein, 38 aa, Artificial Sequence; identical to SEQ ID NO: 19784
  GFR-binding peptide
  MOD_RES (2), (2): Xaa is C or S
  MOD_RES (18), (19), (20), (21), (22): Xaa is A or G
  MOD_RES (23), (24), (25), (26): Xaa is A or G or is absent

SEQ ID NO: 73622 - protein, 38 aa, Artificial Sequence
  GFR-binding peptide
  MOD_RES (6), (7): Xaa is C or S
GSAGPXXTPTKMSNITMQIMNDKQQIILGEMSGMVVDR

SEQ ID NO: 73623 - protein, 41 aa, Artificial Sequence; identical to SEQ ID NO: 19786
  GFR-binding peptide
  MOD_RES (5), (5): Xaa is C or S

SEQ ID NO: 73624 - protein, 35 aa, Artificial Sequence; identical to SEQ ID NO: 19787
  GFR-binding peptide
  MOD_RES (2), (2): Xaa is C or S
  MOD_RES (16), (17), (18), (19), (20): Xaa is A or G
  MOD_RES (21), (22), (23), (24): Xaa is A or G or is absent

SEQ ID NO: 73625 - protein, 30 aa, Artificial Sequence
  GFR-binding peptide
VSQDLSNITIQIMIGKTPKILGEMSMIVKS

SEQ ID NO: 73626 - protein, 36 aa, Artificial Sequence; identical to SEQ ID NO: 19790
  GFR-binding peptide
  MOD_RES (35), (35): Xaa is C or S
  MOD_RES (14), (15), (16), (17), (18): Xaa is A or G
  MOD_RES (19), (20), (21), (22): Xaa is A or G or is absent

SEQ ID NO: 73627 - protein, 39 aa, Artificial Sequence
  GFR-binding peptide
  MOD_RES (2), (3), (37), (39): Xaa is C or S
  MOD_RES (17), (18), (19), (20), (21): Xaa is A or G
  MOD_RES (22), (23), (24), (25): Xaa is A or G or is absent
TXXVPTRLSNITIQIMXXXXXXXXXIGEMSDMVVESXGX

SEQ ID NO: 73628 - protein, 34 aa, Artificial Sequence
  GFR-binding peptide
  MOD_RES (1), (33): Xaa is C or S
XVPTRLSNITIQIMDSANNVVLGEMSDMVVESXG

SEQ ID NO: 73629 - protein, 39 aa, Artificial Sequence
  GFR-binding peptide
  MOD_RES (4), (5), (38): Xaa is C or S
  MOD_RES (19), (20), (21), (22), (23): Xaa is A or G
  MOD_RES (24), (25), (26), (27): Xaa is A or G or is absent
AAPXXVPQALSNITIQIMXXXXXXXXXLGEMSMIVRSXK

SEQ ID NO: 73630 - protein, 44 aa, Artificial Sequence; identical to SEQ ID NO: 19792
  GFR-binding peptide
  MOD_RES (7), (41), (43): Xaa is C or S
  MOD_RES (21), (22), (23), (24), (25): Xaa is A or G
  MOD_RES (26), (27), (28), (29): Xaa is A or G or is absent

SEQ ID NO: 73631 - protein, 39 aa, Artificial Sequence; identical to SEQ ID NO: 55587
  GFR-binding peptide
  MOD_RES (4), (5), (38): Xaa is C or S
  MOD_RES (19), (20), (21), (22), (23): Xaa is A or G
  MOD_RES (24), (25), (26), (27): Xaa is A or G or is absent

SEQ ID NO: 73632 - protein, 35 aa, Artificial Sequence
  GFR-binding peptide
  MOD_RES (4), (5): Xaa is C or S
AAPXXVPQALSNITIQIMVGRKPKVLGEMSMIVRS

SEQ ID NO: 73633 - protein, 42 aa, Artificial Sequence; identical to SEQ ID NO: 19794
  GFR-binding peptide
  MOD_RES (3), (40), (42): Xaa is C or S

SEQ ID NO: 73634 - protein, 38 aa, Artificial Sequence
  GFR-binding peptide
  MOD_RES (6), (7): Xaa is C or S
HVPKPXXAPTKLSNITVQIMDDSSNVIIGEMSNMVVRS

SEQ ID NO: 73635 - protein, 32 aa, Artificial Sequence; identical to SEQ ID NO: 53190
  GFR-binding peptide
  MOD_RES (14), (15), (16), (17), (18): Xaa is A or G
  MOD_RES (19), (20), (21), (22): Xaa is A or G or is absent

SEQ ID NO: 73636 - protein, 42 aa, Artificial Sequence
  GFR-binding peptide
  MOD_RES (6), (7), (40), (42): Xaa is C or S
  MOD_RES (21), (22), (23), (24), (25): Xaa is A or G
  MOD_RES (26), (27), (28), (29): Xaa is A or G or is absent
RVPSTXXAPVKTSNITMQIMXXXXXXXXXLGEMSMIVEEXGX

SEQ ID NO: 73637 - protein, 40 aa, Artificial Sequence
  GFR-binding peptide
  MOD_RES (6), (7), (40): Xaa is C or S
  MOD_RES (21), (22), (23), (24), (25): Xaa is A or G
  MOD_RES (26), (27), (28), (29): Xaa is A or G or is absent
ASASPXXVPQDLSNITIQIMXXXXXXXXXLGEMSMVVKSX

SEQ ID NO: 73638 - protein, 39 aa, Artificial Sequence
  GFR-binding peptide
  MOD_RES (4), (5), (38): Xaa is C or S
  MOD_RES (19), (20), (21), (22), (23): Xaa is A or G
  MOD_RES (24), (25), (26), (27): Xaa is A or G or is absent
ASPXXVPQDLSNITIQIMXXXXXXXXXLGEMSMVVKSXK

SEQ ID NO: 73639 - protein, 37 aa, Artificial Sequence
  GFR-binding peptide
  MOD_RES (2), (3), (37): Xaa is C or S
  MOD_RES (17), (18), (19), (20), (21): Xaa is A or G
  MOD_RES (22), (23), (24), (25): Xaa is A or G or is absent
TXXVPTRLSNITIQIMXXXXXXXXXIGEMSDMVVESX

SEQ ID NO: 73640 - protein, 40 aa, Artificial Sequence; identical to SEQ ID NO: 53195
  GFR-binding peptide
  MOD_RES (6), (7), (40): Xaa is C or S
  MOD_RES (21), (22), (23), (24), (25): Xaa is A or G
  MOD_RES (26), (27), (28), (29): Xaa is A or G or is absent

SEQ ID NO: 73641 - protein, 39 aa, Artificial Sequence; identical to SEQ ID NO: 53198
  GFR-binding peptide
  MOD_RES (4), (5), (38): Xaa is C or S
  MOD_RES (19), (20), (21), (22), (23): Xaa is A or G
  MOD_RES (24), (25), (26), (27): Xaa is A or G or is absent

SEQ ID NO: 73642 - protein, 35 aa, Artificial Sequence
  GFR-binding peptide
  MOD_RES (1), (33), (35): Xaa is C or S
XVPARLSNITIQIMDAANNVVIGEMSDMVVEAXGX

SEQ ID NO: 73643 - protein, 41 aa, Artificial Sequence
  GFR-binding peptide
  MOD_RES (5), (6), (40): Xaa is C or S
  MOD_RES (20), (21), (22), (23), (24): Xaa is A or G
  MOD_RES (25), (26), (27), (28): Xaa is A or G or is absent
TPPTXXVPTRLSNITIQIMXXXXXXXXXIGEMSDMVVESXG

SEQ ID NO: 73644 - protein, 34 aa, Artificial Sequence
  GFR-binding peptide
  MOD_RES (1), (2): Xaa is C or S
  MOD_RES (16), (17), (18), (19), (20): Xaa is A or G
  MOD_RES (21), (22), (23), (24): Xaa is A or G or is absent
XXVPARLSNITIQIMXXXXXXXXXLGEMSDMVVE

SEQ ID NO: 73645 - protein, 37 aa, Artificial Sequence
  GFR-binding peptide
  MOD_RES (4), (5): Xaa is C or S
  MOD_RES (19), (20), (21), (22), (23): Xaa is A or G
  MOD_RES (24), (25), (26), (27): Xaa is A or G or is absent
ASPXXVPQDLSNITIQIMXXXXXXXXXLGEMSMVVKS

SEQ ID NO: 73646 - protein, 40 aa, Artificial Sequence; identical to SEQ ID NO: 19799
  GFR-binding peptide
  MOD_RES (5), (39): Xaa is C or S
  MOD_RES (19), (20), (21), (22), (23): Xaa is A or G
  MOD_RES (24), (25), (26), (27): Xaa is A or G or is absent

SEQ ID NO: 73647 - protein, 33 aa, Artificial Sequence
  GFR-binding peptide
  MOD_RES (33), (33): Xaa is C or S
  MOD_RES (14), (15), (16), (17), (18): Xaa is A or G
  MOD_RES (19), (20), (21), (22): Xaa is A or G or is absent
VPQALSNITIQIMXXXXXXXXXLGEMSMIVRSX

SEQ ID NO: 73648 - protein, 36 aa, Artificial Sequence; identical to SEQ ID NO: 19800
  GFR-binding peptide
  MOD_RES (2), (2): Xaa is C or S

SEQ ID NO: 73649 - protein, 36 aa, Artificial Sequence
  GFR-binding peptide
  MOD_RES (5), (6): Xaa is C or S
APASXXVPARLSNITIQIMDAANNVVLGEMSDMVVE

SEQ ID NO: 73650 - protein, 42 aa, Artificial Sequence
  GFR-binding peptide
  MOD_RES (6), (7), (39), (41): Xaa is C or S
AAPASXXVPARLSNITIQIMDAANNVVLGEMSDMVVEAXGXR

SEQ ID NO: 73651 - protein, 34 aa, Artificial Sequence
  GFR-binding peptide
  MOD_RES (34), (34): Xaa is C or S
  MOD_RES (14), (15), (16), (17), (18): Xaa is A or G
  MOD_RES (19), (20), (21), (22): Xaa is A or G or is absent
VPARLSNITIQIMXXXXXXXXXIGEMSDMVVEAX

SEQ ID NO: 73652 - protein, 37 aa, Artificial Sequence; identical to SEQ ID NO: 53212
  GFR-binding peptide
  MOD_RES (4), (5): Xaa is C or S
  MOD_RES (19), (20), (21), (22), (23): Xaa is A or G
  MOD_RES (24), (25), (26), (27): Xaa is A or G or is absent

SEQ ID NO: 73653 - protein, 41 aa, Artificial Sequence
  GFR-binding peptide
  MOD_RES (6), (7), (39), (41): Xaa is C or S
GSAGPXXTPTKMSNITMQIMNDKQQIIIGEMSGMVVDRXGX

SEQ ID NO: 73654 - protein, 38 aa, Artificial Sequence; identical to SEQ ID NO: 19808
  GFR-binding peptide
  MOD_RES (1), (35), (37): Xaa is C or S

SEQ ID NO: 73655 - protein, 38 aa, Artificial Sequence
  GFR-binding peptide
  MOD_RES (2), (3), (37): Xaa is C or S
  MOD_RES (17), (18), (19), (20), (21): Xaa is A or G
  MOD_RES (22), (23), (24), (25): Xaa is A or G or is absent
TXXVPTRLSNITIQIMXXXXXXXXXIGEMSDMVVESXG

SEQ ID NO: 73656 - protein, 40 aa, Artificial Sequence; identical to SEQ ID NO: 19811
  GFR-binding peptide
  MOD_RES (2), (39): Xaa is C or S
  MOD_RES (18), (19), (20), (21), (22): Xaa is A or G
  MOD_RES (23), (24), (25), (26): Xaa is A or G or is absent

SEQ ID NO: 73657 - protein, 42 aa, Artificial Sequence
  GFR-binding peptide
  MOD_RES (6), (7), (40), (42): Xaa is C or S
  MOD_RES (21), (22), (23), (24), (25): Xaa is A or G
  MOD_RES (26), (27), (28), (29): Xaa is A or G or is absent
ASASPXXVPQDLSNITIQIMXXXXXXXXXLGEMSMVVKSXKX

SEQ ID NO: 73658 - protein, 41 aa, Artificial Sequence
  GFR-binding peptide
  MOD_RES (3), (4), (38), (40): Xaa is C or S
  MOD_RES (18), (19), (20), (21), (22): Xaa is A or G
  MOD_RES (23), (24), (25), (26): Xaa is A or G or is absent
KPXXAPTKLSNITVQIMXXXXXXXXXLGEMSNMVVRSXGXH

SEQ ID NO: 73659 - protein, 37 aa, Artificial Sequence
  GFR-binding peptide
  MOD_RES (2), (3), (37): Xaa is C or S
  MOD_RES (17), (18), (19), (20), (21): Xaa is A or G
  MOD_RES (22), (23), (24), (25): Xaa is A or G or is absent
TXXVPTRLSNITIQIMXXXXXXXXXLGEMSDMVVESX

SEQ ID NO: 73660 - protein, 39 aa, Artificial Sequence; identical to SEQ ID NO: 19815
  GFR-binding peptide
  MOD_RES (4), (38): Xaa is C or S

SEQ ID NO: 73661 - protein, 43 aa, Artificial Sequence; identical to SEQ ID NO: 19816
  GFR-binding peptide
  MOD_RES (3), (40), (42): Xaa is C or S

SEQ ID NO: 73662 - protein, 36 aa, Artificial Sequence; identical to SEQ ID NO: 19817
  GFR-binding peptide
  MOD_RES (2), (36): Xaa is C or S

SEQ ID NO: 73663 - protein, 34 aa, Artificial Sequence
  GFR-binding peptide
  MOD_RES (34), (34): Xaa is C or S
  MOD_RES (14), (15), (16), (17), (18): Xaa is A or G
  MOD_RES (19), (20), (21), (22): Xaa is A or G or is absent
VPTRLSNITIQIMXXXXXXXXXLGEMSDMVVESX

SEQ ID NO: 73664 - protein, 42 aa, Artificial Sequence; identical to SEQ ID NO: 19818
  GFR-binding peptide
  MOD_RES (5), (39), (41): Xaa is C or S

SEQ ID NO: 73665 - protein, 39 aa, Artificial Sequence
  GFR-binding peptide
  MOD_RES (6), (7), (38): Xaa is C or S
ASASPXXVPQDLSNITIQIMVGRTPKVLGEMSMVVKSXK

SEQ ID NO: 73666 - protein, 41 aa, Artificial Sequence; identical to SEQ ID NO: 19819
  GFR-binding peptide
  MOD_RES (4), (41): Xaa is C or S
  MOD_RES (20), (21), (22), (23), (24): Xaa is A or G
  MOD_RES (25), (26), (27), (28): Xaa is A or G or is absent

SEQ ID NO: 73667 - protein, 37 aa, Artificial Sequence; identical to SEQ ID NO: 55634
  GFR-binding peptide
  MOD_RES (3), (4): Xaa is C or S
  MOD_RES (18), (19), (20), (21), (22): Xaa is A or G
  MOD_RES (23), (24), (25), (26): Xaa is A or G or is absent

SEQ ID NO: 73668 - protein, 39 aa, Artificial Sequence; identical to SEQ ID NO: 55635
  GFR-binding peptide
  MOD_RES (3), (4), (37), (39): Xaa is C or S
  MOD_RES (18), (19), (20), (21), (22): Xaa is A or G
  MOD_RES (23), (24), (25), (26): Xaa is A or G or is absent

SEQ ID NO: 73669 - protein, 37 aa, Artificial Sequence
  GFR-binding peptide
  MOD_RES (1), (2), (36): Xaa is C or S
  MOD_RES (16), (17), (18), (19), (20): Xaa is A or G
  MOD_RES (21), (22), (23), (24): Xaa is A or G or is absent
XXVPTRLSNITIQIMXXXXXXXXXIGEMSDMVVESXG

SEQ ID NO: 73670 - protein, 34 aa, Artificial Sequence; identical to SEQ ID NO: 19821
  GFR-binding peptide
  MOD_RES (2), (2): Xaa is C or S
  MOD_RES (16), (17), (18), (19), (20): Xaa is A or G
  MOD_RES (21), (22), (23), (24): Xaa is A or G or is absent

SEQ ID NO: 73671 - protein, 40 aa, Artificial Sequence; identical to SEQ ID NO: 19822
  GFR-binding peptide
  MOD_RES (5), (39): Xaa is C or S
  MOD_RES (19), (20), (21), (22), (23): Xaa is A or G
  MOD_RES (24), (25), (26), (27): Xaa is A or G or is absent

SEQ ID NO: 73672 - protein, 42 aa, Artificial Sequence
  GFR-binding peptide
  MOD_RES (5), (6), (39), (41): Xaa is C or S
  MOD_RES (20), (21), (22), (23), (24): Xaa is A or G
  MOD_RES (25), (26), (27), (28): Xaa is A or G or is absent
VPSTXXAPVKTSNITMQIMXXXXXXXXXLGEMSMIVEEXGXL

SEQ ID NO: 73673 - protein, 38 aa, Artificial Sequence
  GFR-binding peptide
  MOD_RES (6), (7), (38): Xaa is C or S
RVPSTXXAPVKTSNITMQIMDNGRVLLIGEMSMIVEEX

SEQ ID NO: 73674 - protein, 30 aa, Artificial Sequence
  GFR-binding peptide
VPQALSNITIQIMVGRKPKVLGEMSMIVRS

SEQ ID NO: 73675 - protein, 35 aa, Artificial Sequence
  GFR-binding peptide
  MOD_RES (1), (2), (35): Xaa is C or S
  MOD_RES (16), (17), (18), (19), (20): Xaa is A or G
  MOD_RES (21), (22), (23), (24): Xaa is A or G or is absent
XXVPQDLSNITIQIMXXXXXXXXXLGEMSMVVKSX

SEQ ID NO: 73676 - protein, 31 aa, Artificial Sequence
  GFR-binding peptide
  MOD_RES (31), (31): Xaa is C or S
VSQDLSNITIQIMIGKTPKILGEMSMIVKSX

SEQ ID NO: 73677 - protein, 37 aa, Artificial Sequence; identical to SEQ ID NO: 19825
  GFR-binding peptide
  MOD_RES (36), (36): Xaa is C or S

SEQ ID NO: 73678 - protein, 39 aa, Artificial Sequence
  GFR-binding peptide
  MOD_RES (4), (5), (39): Xaa is C or S
  MOD_RES (19), (20), (21), (22), (23): Xaa is A or G
  MOD_RES (24), (25), (26), (27): Xaa is A or G or is absent
PPTXXVPTRLSNITIQIMXXXXXXXXXIGEMSDMVVESX

SEQ ID NO: 73679 - protein, 39 aa, Artificial Sequence
  GFR-binding peptide
  MOD_RES (2), (3), (37), (39): Xaa is C or S
  MOD_RES (17), (18), (19), (20), (21): Xaa is A or G
  MOD_RES (22), (23), (24), (25): Xaa is A or G or is absent
SXXVPARLSNITIQIMXXXXXXXXXLGEMSDMVVEAXGX

SEQ ID NO: 73680 - protein, 37 aa, Artificial Sequence
  GFR-binding peptide
  MOD_RES (3), (4): Xaa is C or S
  MOD_RES (18), (19), (20), (21), (22): Xaa is A or G
  MOD_RES (23), (24), (25), (26): Xaa is A or G or is absent
PTXXVPTRLSNITIQIMXXXXXXXXXLGEMSDMVVES

SEQ ID NO: 73681 - protein, 32 aa, Artificial Sequence
  GFR-binding peptide
  MOD_RES (1), (2): Xaa is C or S
XXVPTRLSNITIQIMDSANNVVLGEMSDMVVE

SEQ ID NO: 73682 - protein, 34 aa, Artificial Sequence
  GFR-binding peptide
  MOD_RES (1), (34): Xaa is C or S
  MOD_RES (15), (16), (17), (18), (19): Xaa is A or G
  MOD_RES (20), (21), (22), (23): Xaa is A or G or is absent
XAPVKTSNITMQIMXXXXXXXXXIGEMSMIVEEX

SEQ ID NO: 73683 - protein, 38 aa, Artificial Sequence
  GFR-binding peptide
  MOD_RES (4), (5), (37): Xaa is C or S
PKPXXAPTKLSNITVQIMDDSSNVILGEMSNMVVRSXG

SEQ ID NO: 73684 - protein, 38 aa, Artificial Sequence; identical to SEQ ID NO: 19830
  GFR-binding peptide
  MOD_RES (3), (37): Xaa is C or S
  MOD_RES (17), (18), (19), (20), (21): Xaa is A or G
  MOD_RES (22), (23), (24), (25): Xaa is A or G or is absent

SEQ ID NO: 73685 - protein, 39 aa, Artificial Sequence; identical to SEQ ID NO: 19832
  GFR-binding peptide
  MOD_RES (1), (38): Xaa is C or S

SEQ ID NO: 73686 - protein, 36 aa, Artificial Sequence
  GFR-binding peptide
  MOD_RES (1), (35): Xaa is C or S
  MOD_RES (15), (16), (17), (18), (19): Xaa is A or G
  MOD_RES (20), (21), (22), (23): Xaa is A or G or is absent
XVPARLSNITIQIMXXXXXXXXXLGEMSDMVVEAXG

SEQ ID NO: 73687 - protein, 38 aa, Artificial Sequence; identical to SEQ ID NO: 19833
  GFR-binding peptide
  MOD_RES (4), (4): Xaa is C or S
  MOD_RES (20), (21), (22), (23), (24): Xaa is A or G
  MOD_RES (25), (26), (27), (28): Xaa is A or G or is absent

SEQ ID NO: 73688 - protein, 34 aa, Artificial Sequence; identical to SEQ ID NO: 55658
  GFR-binding peptide
  MOD_RES (2), (3), (34): Xaa is C or S

SEQ ID NO: 73689 - protein, 34 aa, Artificial Sequence
  GFR-binding peptide
  MOD_RES (32), (34): Xaa is C or S
APTKLSNITVQIMDDSSNVILGEMSNMVVRSXGX

SEQ ID NO: 73690 - protein, 34 aa, Artificial Sequence; identical to SEQ ID NO: 19835
  GFR-binding peptide
  MOD_RES (14), (15), (16), (17), (18): Xaa is A or G
  MOD_RES (19), (20), (21), (22): Xaa is A or G or is absent

SEQ ID NO: 73691 - protein, 38 aa, Artificial Sequence
  GFR-binding peptide
  MOD_RES (3), (4), (35), (37): Xaa is C or S
APXXVPQALSNITIQIMVGRKPKVLGEMSMIVRSXKXS

SEQ ID NO: 73692 - protein, 34 aa, Artificial Sequence
  GFR-binding peptide
  MOD_RES (34), (34): Xaa is C or S
  MOD_RES (14), (15), (16), (17), (18): Xaa is A or G
  MOD_RES (19), (20), (21), (22): Xaa is A or G or is absent
TPTKMSNITMQIMXXXXXXXXXLGEMSGMVVDRX

SEQ ID NO: 73693 - protein, 41 aa, Artificial Sequence; identical to SEQ ID NO: 19841
  GFR-binding peptide
  MOD_RES (4), (41): Xaa is C or S
  MOD_RES (20), (21), (22), (23), (24): Xaa is A or G
  MOD_RES (25), (26), (27), (28): Xaa is A or G or is absent

SEQ ID NO: 73694 - protein, 37 aa, Artificial Sequence; identical to SEQ ID NO: 19842
  GFR-binding peptide
  MOD_RES (35), (37): Xaa is C or S
  MOD_RES (14), (15), (16), (17), (18): Xaa is A or G
  MOD_RES (19), (20), (21), (22): Xaa is A or G or is absent

SEQ ID NO: 73695 - protein, 43 aa, Artificial Sequence
  GFR-binding peptide
  MOD_RES (5), (6), (40), (42): Xaa is C or S
  MOD_RES (20), (21), (22), (23), (24): Xaa is A or G
  MOD_RES (25), (26), (27), (28): Xaa is A or G or is absent
SAGPXXTPTKMSNITMQIMXXXXXXXXXLGEMSGMVVDRXGXS

SEQ ID NO: 73696 - protein, 36 aa, Artificial Sequence
  GFR-binding peptide
  MOD_RES (2), (3): Xaa is C or S
  MOD_RES (17), (18), (19), (20), (21): Xaa is A or G
  MOD_RES (22), (23), (24), (25): Xaa is A or G or is absent
PXXTPTKMSNITMQIMXXXXXXXXXLGEMSGMVVDR

SEQ ID NO: 73697 - protein, 43 aa, Artificial Sequence; identical to SEQ ID NO: 19844
  GFR-binding peptide
  MOD_RES (4), (41), (43): Xaa is C or S

SEQ ID NO: 73698 - protein, 37 aa, Artificial Sequence; identical to SEQ ID NO: 19847
  GFR-binding peptide
  MOD_RES (1), (35), (37): Xaa is C or S
  MOD_RES (15), (16), (17), (18), (19): Xaa is A or G
  MOD_RES (20), (21), (22), (23): Xaa is A or G or is absent

SEQ ID NO: 73699 - protein, 37 aa, Artificial Sequence
  GFR-binding peptide
  MOD_RES (1), (2), (36): Xaa is C or S
  MOD_RES (16), (17), (18), (19), (20): Xaa is A or G
  MOD_RES (21), (22), (23), (24): Xaa is A or G or is absent
XXVPTRLSNITIQIMXXXXXXXXXLGEMSDMVVESXG

SEQ ID NO: 73700 - protein, 37 aa, Artificial Sequence; identical to SEQ ID NO: 19850
  GFR-binding peptide
  MOD_RES (3), (3): Xaa is C or S
  MOD_RES (19), (20), (21), (22), (23): Xaa is A or G
  MOD_RES (24), (25), (26), (27): Xaa is A or G or is absent

SEQ ID NO: 73701 - protein, 35 aa, Artificial Sequence; identical to SEQ ID NO: 19851
  GFR-binding peptide
  MOD_RES (2), (2): Xaa is C or S

SEQ ID NO: 73702 - protein, 36 aa, Artificial Sequence
  GFR-binding peptide
  MOD_RES (3), (4), (35): Xaa is C or S
SPXXVPQDLSNITIQIMVGRTPKVLGEMSMVVKSXK

SEQ ID NO: 73703 - protein, 38 aa, Artificial Sequence; identical to SEQ ID NO: 19852
  GFR-binding peptide
  MOD_RES (4), (4): Xaa is C or S
  MOD_RES (20), (21), (22), (23), (24): Xaa is A or G
  MOD_RES (25), (26), (27), (28): Xaa is A or G or is absent

SEQ ID NO: 73704 - protein, 37 aa, Artificial Sequence
  GFR-binding peptide
  MOD_RES (6), (7): Xaa is C or S
AAPASXXVPARLSNITIQIMDAANNVVIGEMSDMVVE

SEQ ID NO: 73705 - protein, 33 aa, Artificial Sequence
  GFR-binding peptide
  MOD_RES (32), (32): Xaa is C or S
APTKLSNITVQIMDDSSNVILGEMSNMVVRSXG

SEQ ID NO: 73706 - protein, 30 aa, Artificial Sequence
  GFR-binding peptide
VPARLSNITIQIMDAANNVVLGEMSDMVVE

SEQ ID NO: 73707 - protein, 41 aa, Artificial Sequence
  GFR-binding peptide
  MOD_RES (6), (7), (41): Xaa is C or S
  MOD_RES (21), (22), (23), (24), (25): Xaa is A or G
  MOD_RES (26), (27), (28), (29): Xaa is A or G or is absent
GSAGPXXTPTKMSNITMQIMXXXXXXXXXLGEMSGMVVDRX

SEQ ID NO: 73708 - protein, 34 aa, Artificial Sequence
  GFR-binding peptide
  MOD_RES (32), (34): Xaa is C or S
VPTRLSNITIQIMDSANNVVIGEMSDMVVESXGX

SEQ ID NO: 73709 - protein, 39 aa, Artificial Sequence
  GFR-binding peptide
  MOD_RES (6), (7), (38): Xaa is C or S
ASASPXXVSQDLSNITIQIMIGKTPKILGEMSMIVKSXK

SEQ ID NO: 73710 - protein, 39 aa, Artificial Sequence; identical to SEQ ID NO: 19858
  GFR-binding peptide
  MOD_RES (4), (4): Xaa is C or S
  MOD_RES (20), (21), (22), (23), (24): Xaa is A or G
  MOD_RES (25), (26), (27), (28): Xaa is A or G or is absent

SEQ ID NO: 73711 - protein, 40 aa, Artificial Sequence; identical to SEQ ID NO: 19859
  GFR-binding peptide
  MOD_RES (37), (39): Xaa is C or S

SEQ ID NO: 73712 - protein, 37 aa, Artificial Sequence
  GFR-binding peptide
  MOD_RES (2), (3), (37): Xaa is C or S
  MOD_RES (17), (18), (19), (20), (21): Xaa is A or G
  MOD_RES (22), (23), (24), (25): Xaa is A or G or is absent
PXXTPTKMSNITMQIMXXXXXXXXXIGEMSGMVVDRX

SEQ ID NO: 73713 - protein, 39 aa, Artificial Sequence
  GFR-binding peptide
  MOD_RES (6), (7): Xaa is C or S
  MOD_RES (21), (22), (23), (24), (25): Xaa is A or G
  MOD_RES (26), (27), (28), (29): Xaa is A or G or is absent
HVPKPXXAPTKLSNITVQIMXXXXXXXXXLGEMSNMVVR

SEQ ID NO: 73714 - protein, 38 aa, Artificial Sequence
  GFR-binding peptide
  MOD_RES (6), (7), (38): Xaa is C or S
ASASPXXVSQDLSNITIQIMIGKTPKILGEMSMIVKSX

SEQ ID NO: 73715 - protein, 37 aa, Artificial Sequence; identical to SEQ ID NO: 53297
  GFR-binding peptide
  MOD_RES (2), (3), (34), (36): Xaa is C or S

SEQ ID NO: 73716 - protein, 37 aa, Artificial Sequence
  GFR-binding peptide
  MOD_RES (3), (4), (35), (37): Xaa is C or S
STXXAPVKTSNITMQIMDNGRVLLIGEMSMIVEEXGX

SEQ ID NO: 73717 - protein, 33 aa, Artificial Sequence
  GFR-binding peptide
  MOD_RES (32), (32): Xaa is C or S
VPARLSNITIQIMDAANNVVIGEMSDMVVEAXG

SEQ ID NO: 73718 - protein, 35 aa, Artificial Sequence; identical to SEQ ID NO: 19862
  GFR-binding peptide

SEQ ID NO: 73719 - protein, 39 aa, Artificial Sequence; identical to SEQ ID NO: 19863
  GFR-binding peptide
  MOD_RES (6), (6): Xaa is C or S

SEQ ID NO: 73720 - protein, 35 aa, Artificial Sequence
  GFR-binding peptide
  MOD_RES (2), (3): Xaa is C or S
  MOD_RES (17), (18), (19), (20), (21): Xaa is A or G
  MOD_RES (22), (23), (24), (25): Xaa is A or G or is absent
PXXTPTKMSNITMQIMXXXXXXXXXIGEMSGMVVD

SEQ ID NO: 73721 - protein, 38 aa, Artificial Sequence; identical to SEQ ID NO: 19864
  GFR-binding peptide
  MOD_RES (35), (37): Xaa is C or S
  MOD_RES (14), (15), (16), (17), (18): Xaa is A or G
  MOD_RES (19), (20), (21), (22): Xaa is A or G or is absent

SEQ ID NO: 73722 - protein, 40 aa, Artificial Sequence; identical to SEQ ID NO: 19866
  GFR-binding peptide
  MOD_RES (1), (38), (40): Xaa is C or S

SEQ ID NO: 73723 - protein, 40 aa, Artificial Sequence; identical to SEQ ID NO: 19867
  GFR-binding peptide
  MOD_RES (1), (38), (40): Xaa is C or S

SEQ ID NO: 73724 - protein, 33 aa, Artificial Sequence; identical to SEQ ID NO: 55696
  GFR-binding peptide
  MOD_RES (1), (1): Xaa is C or S
  MOD_RES (15), (16), (17), (18), (19): Xaa is A or G
  MOD_RES (20), (21), (22), (23): Xaa is A or G or is absent

SEQ ID NO: 73725 - protein, 33 aa, Artificial Sequence; identical to SEQ ID NO: 19869
  GFR-binding peptide

SEQ ID NO: 73726 - protein, 36 aa, Artificial Sequence; identical to SEQ ID NO: 19870
  GFR-binding peptide
  MOD_RES (1), (1): Xaa is C or S

SEQ ID NO: 73727 - protein, 36 aa, Artificial Sequence
  GFR-binding peptide
  MOD_RES (3), (4), (35): Xaa is C or S
SPXXVSQDLSNITIQIMIGKTPKILGEMSMIVKSXK

SEQ ID NO: 73728 - protein, 33 aa, Artificial Sequence; identical to SEQ ID NO: 53314
  GFR-binding peptide
  MOD_RES (32), (32): Xaa is C or S

SEQ ID NO: 73729 - protein, 34 aa, Artificial Sequence; identical to SEQ ID NO: 19873
  GFR-binding peptide

SEQ ID NO: 73730 - protein, 37 aa, Artificial Sequence
  GFR-binding peptide
  MOD_RES (2), (3), (37): Xaa is C or S
  MOD_RES (17), (18), (19), (20), (21): Xaa is A or G
  MOD_RES (22), (23), (24), (25): Xaa is A or G or is absent
PXXTPTKMSNITMQIMXXXXXXXXXLGEMSGMVVDRX

SEQ ID NO: 73731 - protein, 40 aa, Artificial Sequence; identical to SEQ ID NO: 19874
  GFR-binding peptide
  MOD_RES (4), (4): Xaa is C or S

SEQ ID NO: 73732 - protein, 35 aa, Artificial Sequence
  GFR-binding peptide
  MOD_RES (4), (5): Xaa is C or S
AGPXXTPTKMSNITMQIMNDKQQIIIGEMSGMVVD

SEQ ID NO: 73733 - protein, 31 aa, Artificial Sequence
  GFR-binding peptide
VPTRLSNITIQIMDSANNVVLGEMSDMVVES

SEQ ID NO: 73734 - protein, 35 aa, Artificial Sequence; identical to SEQ ID NO: 19875
  GFR-binding peptide
  MOD_RES (15), (16), (17), (18), (19): Xaa is A or G
  MOD_RES (20), (21), (22), (23): Xaa is A or G or is absent

SEQ ID NO: 73735 - protein, 39 aa, Artificial Sequence; identical to SEQ ID NO: 55708
  GFR-binding peptide
  MOD_RES (5), (6), (37), (39): Xaa is C or S

SEQ ID NO: 73736 - protein, 39 aa, Artificial Sequence
  GFR-binding peptide
  MOD_RES (3), (4), (37), (39): Xaa is C or S
  MOD_RES (18), (19), (20), (21), (22): Xaa is A or G
  MOD_RES (23), (24), (25), (26): Xaa is A or G or is absent
SPXXVPQDLSNITIQIMXXXXXXXXXLGEMSMVVKSXKX

SEQ ID NO: 73737 - protein, 38 aa, Artificial Sequence
  GFR-binding peptide
  MOD_RES (4), (5), (37): Xaa is C or S
PASXXVPARLSNITIQIMDAANNVVIGEMSDMVVEAXG

SEQ ID NO: 73738 - protein, 37 aa, Artificial Sequence
  GFR-binding peptide
  MOD_RES (4), (5): Xaa is C or S
  MOD_RES (19), (20), (21), (22), (23): Xaa is A or G
  MOD_RES (24), (25), (26), (27): Xaa is A or G or is absent
ASPXXVSQDLSNITIQIMXXXXXXXXXLGEMSMIVKS

SEQ ID NO: 73739 - protein, 40 aa, Artificial Sequence; identical to SEQ ID NO: 55710
  GFR-binding peptide
  MOD_RES (6), (7), (38), (40): Xaa is C or S

SEQ ID NO: 73740 - protein, 34 aa, Artificial Sequence; identical to SEQ ID NO: 19878
  GFR-binding peptide
  MOD_RES (34), (34): Xaa is C or S

SEQ ID NO: 73741 - protein, 37 aa, Artificial Sequence
  GFR-binding peptide
  MOD_RES (4), (5): Xaa is C or S
  MOD_RES (19), (20), (21), (22), (23): Xaa is A or G
  MOD_RES (24), (25), (26), (27): Xaa is A or G or is absent
PPTXXVPTRLSNITIQIMXXXXXXXXXIGEMSDMVVE

SEQ ID NO: 73742 - protein, 41 aa, Artificial Sequence
  GFR-binding peptide
  MOD_RES (5), (6), (40): Xaa is C or S
  MOD_RES (20), (21), (22), (23), (24): Xaa is A or G
  MOD_RES (25), (26), (27), (28): Xaa is A or G or is absent
TPPTXXVPTRLSNITIQIMXXXXXXXXXLGEMSDMVVESXG

SEQ ID NO: 73743 - protein, 31 aa, Artificial Sequence
  GFR-binding peptide
  MOD_RES (1), (1): Xaa is C or S
XVPARLSNITIQIMDAANNVVLGEMSDMVVE

SEQ ID NO: 73744 - protein, 36 aa, Artificial Sequence; identical to SEQ ID NO: 19879
  GFR-binding peptide
  MOD_RES (2), (2): Xaa is C or S

SEQ ID NO: 73745 - protein, 33 aa, Artificial Sequence
  GFR-binding peptide
  MOD_RES (32), (32): Xaa is C or S
TPTKMSNITMQIMNDKQQIIIGEMSGMVVDRXG

SEQ ID NO: 73746 - protein, 35 aa, Artificial Sequence; identical to SEQ ID NO: 53330
  GFR-binding peptide
  MOD_RES (1), (34): Xaa is C or S
  MOD_RES (15), (16), (17), (18), (19): Xaa is A or G
  MOD_RES (20), (21), (22), (23): Xaa is A or G or is absent

SEQ ID NO: 73747 - protein, 39 aa, Artificial Sequence
  GFR-binding peptide
  MOD_RES (5), (6), (39): Xaa is C or S
  MOD_RES (20), (21), (22), (23), (24): Xaa is A or G
  MOD_RES (25), (26), (27), (28): Xaa is A or G or is absent
SASPXXVPQDLSNITIQIMXXXXXXXXXLGEMSMVVKSX

SEQ ID NO: 73748 - protein, 36 aa, Artificial Sequence
  GFR-binding peptide
  MOD_RES (1), (2), (35): Xaa is C or S
  MOD_RES (16), (17), (18), (19), (20): Xaa is A or G
  MOD_RES (21), (22), (23), (24): Xaa is A or G or is absent
XXVPQALSNITIQIMXXXXXXXXXLGEMSMIVRSXK

SEQ ID NO: 73749 - protein, 37 aa, Artificial Sequence; identical to SEQ ID NO: 19883
  GFR-binding peptide
  MOD_RES (37), (37): Xaa is C or S
  MOD_RES (16), (17), (18), (19), (20): Xaa is A or G
  MOD_RES (21), (22), (23), (24): Xaa is A or G or is absent

SEQ ID NO: 73750 - protein, 40 aa, Artificial Sequence
  GFR-binding peptide
  MOD_RES (5), (6), (37), (39): Xaa is C or S
VPSTXXAPVKTSNITMQIMDNGRVLLLGEMSMIVEEXGXL

SEQ ID NO: 73751 - protein, 32 aa, Artificial Sequence
  GFR-binding peptide
  MOD_RES (32), (32): Xaa is C or S
VPTRLSNITIQIMDSANNVVIGEMSDMVVESX

SEQ ID NO: 73752 - protein, 34 aa, Artificial Sequence; identical to SEQ ID NO: 19884
  GFR-binding peptide
  MOD_RES (34), (34): Xaa is C or S
  MOD_RES (14), (15), (16), (17), (18): Xaa is A or G
  MOD_RES (19), (20), (21), (22): Xaa is A or G or is absent

SEQ ID NO: 73753 - protein, 34 aa, Artificial Sequence; identical to SEQ ID NO: 19885
  GFR-binding peptide
  MOD_RES (15), (16), (17), (18), (19): Xaa is A or G
  MOD_RES (20), (21), (22), (23): Xaa is A or G or is absent

SEQ ID NO: 73754 - protein, 40 aa, Artificial Sequence; identical to SEQ ID NO: 19887
  GFR-binding peptide
  MOD_RES (2), (39): Xaa is C or S

SEQ ID NO: 73755 - protein, 33 aa, Artificial Sequence
  GFR-binding peptide
  MOD_RES (1), (1): Xaa is C or S
  MOD_RES (15), (16), (17), (18), (19): Xaa is A or G
  MOD_RES (20), (21), (22), (23): Xaa is A or G or is absent
XAPVKTSNITMQIMXXXXXXXXXLGEMSMIVEE

SEQ ID NO: 73756 - protein, 35 aa, Artificial Sequence
  GFR-binding peptide
  MOD_RES (1), (2): Xaa is C or S
  MOD_RES (16), (17), (18), (19), (20): Xaa is A or G
  MOD_RES (21), (22), (23), (24): Xaa is A or G or is absent
XXTPTKMSNITMQIMXXXXXXXXXIGEMSGMVVDR

SEQ ID NO: 73757 - protein, 44 aa, Artificial Sequence
  GFR-binding peptide
  MOD_RES (6), (7), (41), (43): Xaa is C or S
  MOD_RES (21), (22), (23), (24), (25): Xaa is A or G
  MOD_RES (26), (27), (28), (29): Xaa is A or G or is absent
AAPASXXVPARLSNITIQIMXXXXXXXXXIGEMSDMVVEAXGXR

SEQ ID NO: 73758 - protein, 38 aa, Artificial Sequence; identical to SEQ ID NO: 19893
  GFR-binding peptide
  MOD_RES (1), (35), (37): Xaa is C or S

SEQ ID NO: 73759 - protein, 43 aa, Artificial Sequence; identical to SEQ ID NO: 19894
  GFR-binding peptide
  MOD_RES (4), (41), (43): Xaa is C or S

SEQ ID NO: 73760 - protein, 43 aa, Artificial Sequence; identical to SEQ ID NO: 19896
  GFR-binding peptide
  MOD_RES (4), (41), (43): Xaa is C or S

SEQ ID NO: 73761 - protein, 37 aa, Artificial Sequence
  GFR-binding peptide
  MOD_RES (2), (3), (35), (37): Xaa is C or S
PXXTPTKMSNITMQIMNDKQQIIIGEMSGMVVDRXGX

SEQ ID NO: 73762 - protein, 34 aa, Artificial Sequence; identical to SEQ ID NO: 19897
  GFR-binding peptide
  MOD_RES (34), (34): Xaa is C or S
  MOD_RES (14), (15), (16), (17), (18): Xaa is A or G
  MOD_RES (19), (20), (21), (22): Xaa is A or G or is absent

SEQ ID NO: 73763 - protein, 33 aa, Artificial Sequence
  GFR-binding peptide
  MOD_RES (1), (1): Xaa is C or S
  MOD_RES (15), (16), (17), (18), (19): Xaa is A or G
  MOD_RES (20), (21), (22), (23): Xaa is A or G or is absent
XAPVKTSNITMQIMXXXXXXXXXIGEMSMIVEE

SEQ ID NO: 73764 - protein, 43 aa, Artificial Sequence
  GFR-binding peptide
  MOD_RES (6), (7), (41), (43): Xaa is C or S
  MOD_RES (21), (22), (23), (24), (25): Xaa is A or G
  MOD_RES (26), (27), (28), (29): Xaa is A or G or is absent
HVPKPXXAPTKLSNITVQIMXXXXXXXXXLGEMSNMVVRSXGX

SEQ ID NO: 73765 - protein, 35 aa, Artificial Sequence
  GFR-binding peptide
  MOD_RES (2), (3), (34): Xaa is C or S
PXXVPQDLSNITIQIMVGRTPKVLGEMSMVVKSXK

SEQ ID NO: 73766 - protein, 36 aa, Artificial Sequence
  GFR-binding peptide
  MOD_RES (2), (3): Xaa is C or S
  MOD_RES (17), (18), (19), (20), (21): Xaa is A or G
  MOD_RES (22), (23), (24), (25): Xaa is A or G or is absent
SXXVPARLSNITIQIMXXXXXXXXXLGEMSDMVVEA

SEQ ID NO: 73767 - protein, 43 aa, Artificial Sequence
  GFR-binding peptide
  MOD_RES (6), (7), (41), (43): Xaa is C or S
  MOD_RES (21), (22), (23), (24), (25): Xaa is A or G
  MOD_RES (26), (27), (28), (29): Xaa is A or G or is absent
STPPTXXVPTRLSNITIQIMXXXXXXXXXIGEMSDMVVESXGX

SEQ ID NO: 73768 - protein, 34 aa, Artificial Sequence
  GFR-binding peptide
  MOD_RES (2), (3): Xaa is C or S
TXXVPTRLSNITIQIMDSANNVVLGEMSDMVVES

SEQ ID NO: 73769 - protein, 33 aa, Artificial Sequence; identical to SEQ ID NO: 55743
  GFR-binding peptide
  MOD_RES (1), (1): Xaa is C or S
  MOD_RES (15), (16), (17), (18), (19): Xaa is A or G
  MOD_RES (20), (21), (22), (23): Xaa is A or G or is absent

SEQ ID NO: 73770 - protein, 33 aa, Artificial Sequence
  GFR-binding peptide
  MOD_RES (32), (32): Xaa is C or S
VPARLSNITIQIMDAANNVVLGEMSDMVVEAXG

SEQ ID NO: 73771 - protein, 40 aa, Artificial Sequence; identical to SEQ ID NO: 19901
  GFR-binding peptide
  MOD_RES (7), (7): Xaa is C or S
  MOD_RES (21), (22), (23), (24), (25): Xaa is A or G
  MOD_RES (26), (27), (28), (29): Xaa is A or G or is absent

SEQ ID NO: 73772 - protein, 40 aa, Artificial Sequence; identical to SEQ ID NO: 19902
  GFR-binding peptide
  MOD_RES (4), (38), (40): Xaa is C or S
  MOD_RES (18), (19), (20), (21), (22): Xaa is A or G
  MOD_RES (23), (24), (25), (26): Xaa is A or G or is absent

SEQ ID NO: 73773 - protein, 33 aa, Artificial Sequence
  GFR-binding peptide
  MOD_RES (1), (2), (33): Xaa is C or S
XXAPVKTSNITMQIMDNGRVLLLGEMSMIVEEX

SEQ ID NO: 73774 - protein, 35 aa, Artificial Sequence
  GFR-binding peptide
  MOD_RES (4), (5): Xaa is C or S
AGPXXTPTKMSNITMQIMNDKQQIILGEMSGMVVD

SEQ ID NO: 73775 - protein, 42 aa, Artificial Sequence; identical to SEQ ID NO: 55755
  GFR-binding peptide
  MOD_RES (6), (7), (40), (42): Xaa is C or S
  MOD_RES (21), (22), (23), (24), (25): Xaa is A or G
  MOD_RES (26), (27), (28), (29): Xaa is A or G or is absent

SEQ ID NO: 73776 - protein, 36 aa, Artificial Sequence; identical to SEQ ID NO: 55758
  GFR-binding peptide
  MOD_RES (2), (3), (34), (36): Xaa is C or S

SEQ ID NO: 73777 - protein, 35 aa, Artificial Sequence; identical to SEQ ID NO: 19906
  GFR-binding peptide
  MOD_RES (1), (1): Xaa is C or S
  MOD_RES (17), (18), (19), (20), (21): Xaa is A or G
  MOD_RES (22), (23), (24), (25): Xaa is A or G or is absent

SEQ ID NO: 73778 - protein, 36 aa, Artificial Sequence; identical to SEQ ID NO: 19908
  GFR-binding peptide
  MOD_RES (1), (35): Xaa is C or S

SEQ ID NO: 73779 - protein, 37 aa, Artificial Sequence
  GFR-binding peptide
  MOD_RES (4), (5): Xaa is C or S
  MOD_RES (19), (20), (21), (22), (23): Xaa is A or G
  MOD_RES (24), (25), (26), (27): Xaa is A or G or is absent
PPTXXVPTRLSNITIQIMXXXXXXXXXLGEMSDMVVE

SEQ ID NO: 73780 - protein, 37 aa, Artificial Sequence; identical to SEQ ID NO: 19911
  GFR-binding peptide
  MOD_RES (1), (1): Xaa is C or S
  MOD_RES (17), (18), (19), (20), (21): Xaa is A or G
  MOD_RES (22), (23), (24), (25): Xaa is A or G or is absent

SEQ ID NO: 73781 - protein, 35 aa, Artificial Sequence; identical to SEQ ID NO: 55765
  GFR-binding peptide
  MOD_RES (2), (3), (34): Xaa is C or S

SEQ ID NO: 73782 - protein, 31 aa, Artificial Sequence
  GFR-binding peptide
  MOD_RES (31), (31): Xaa is C or S
APVKTSNITMQIMDNGRVLLIGEMSMIVEEX

SEQ ID NO: 73783 - protein, 40 aa, Artificial Sequence; identical to SEQ ID NO: 53378
  GFR-binding peptide
  MOD_RES (4), (5), (39): Xaa is C or S
  MOD_RES (19), (20), (21), (22), (23): Xaa is A or G
  MOD_RES (24), (25), (26), (27): Xaa is A or G or is absent

SEQ ID NO: 73784 - protein, 30 aa, Artificial Sequence; identical to SEQ ID NO: 55768
  GFR-binding peptide

SEQ ID NO: 73785 - protein, 32 aa, Artificial Sequence
  GFR-binding peptide
  MOD_RES (1), (32): Xaa is C or S
XVPQDLSNITIQIMVGRTPKVLGEMSMVVKSX

SEQ ID NO: 73786 - protein, 39 aa, Artificial Sequence; identical to SEQ ID NO: 55769
  GFR-binding peptide
  MOD_RES (6), (7), (38): Xaa is C or S

SEQ ID NO: 73787 - protein, 33 aa, Artificial Sequence; identical to SEQ ID NO: 19914
  GFR-binding peptide
  MOD_RES (14), (15), (16), (17), (18): Xaa is A or G
  MOD_RES (19), (20), (21), (22): Xaa is A or G or is absent

SEQ ID NO: 73788 - protein, 35 aa, Artificial Sequence
  GFR-binding peptide
  MOD_RES (2), (3): Xaa is C or S
  MOD_RES (17), (18), (19), (20), (21): Xaa is A or G
  MOD_RES (22), (23), (24), (25): Xaa is A or G or is absent
PXXTPTKMSNITMQIMXXXXXXXXXLGEMSGMVVD

SEQ ID NO: 73789 - protein, 40 aa, Artificial Sequence; identical to SEQ ID NO: 19915
  GFR-binding peptide
  MOD_RES (4), (4): Xaa is C or S
  MOD_RES (20), (21), (22), (23), (24): Xaa is A or G
  MOD_RES (25), (26), (27), (28): Xaa is A or G or is absent

SEQ ID NO: 73790 - protein, 38 aa, Artificial Sequence
  GFR-binding peptide
  MOD_RES (4), (5), (37): Xaa is C or S
AGPXXTPTKMSNITMQIMNDKQQIIIGEMSGMVVDRXG

SEQ ID NO: 73791 - protein, 37 aa, Artificial Sequence
  GFR-binding peptide
  MOD_RES (2), (3), (34), (36): Xaa is C or S
TXXAPVKTSNITMQIMDNGRVLLIGEMSMIVEEXGXL

SEQ ID NO: 73792 - protein, 42 aa, Artificial Sequence; identical to SEQ ID NO: 55776
  GFR-binding peptide
  MOD_RES (6), (7), (40), (42): Xaa is C or S
  MOD_RES (21), (22), (23), (24), (25): Xaa is A or G
  MOD_RES (26), (27), (28), (29): Xaa is A or G or is absent

SEQ ID NO: 73793 - protein, 33 aa, Artificial Sequence
  GFR-binding peptide
  MOD_RES (1), (1): Xaa is C or S
  MOD_RES (15), (16), (17), (18), (19): Xaa is A or G
  MOD_RES (20), (21), (22), (23): Xaa is A or G or is absent
XAPTKLSNITVQIMXXXXXXXXXLGEMSNMVVR

SEQ ID NO: 73794 - protein, 41 aa, Artificial Sequence; identical to SEQ ID NO: 19917
  GFR-binding peptide
  MOD_RES (5), (39), (41): Xaa is C or S

SEQ ID NO: 73795 - protein, 34 aa, Artificial Sequence; identical to SEQ ID NO: 55782
  GFR-binding peptide
  MOD_RES (3), (4): Xaa is C or S

SEQ ID NO: 73796 - protein, 41 aa, Artificial Sequence; identical to SEQ ID NO: 55784
  GFR-binding peptide
  MOD_RES (4), (5), (39), (41): Xaa is C or S
  MOD_RES (19), (20), (21), (22), (23): Xaa is A or G
  MOD_RES (24), (25), (26), (27): Xaa is A or G or is absent

SEQ ID NO: 73797 - protein, 36 aa, Artificial Sequence
  GFR-binding peptide
  MOD_RES (2), (3), (36): Xaa is C or S
  MOD_RES (17), (18), (19), (20), (21): Xaa is A or G
  MOD_RES (22), (23), (24), (25): Xaa is A or G or is absent
TXXAPVKTSNITMQIMXXXXXXXXXIGEMSMIVEEX

SEQ ID NO: 73798 - protein, 42 aa, Artificial Sequence
  GFR-binding peptide
  MOD_RES (4), (5), (39), (41): Xaa is C or S
  MOD_RES (19), (20), (21), (22), (23): Xaa is A or G
  MOD_RES (24), (25), (26), (27): Xaa is A or G or is absent
PASXXVPARLSNITIQIMXXXXXXXXXIGEMSDMVVEAXGXR

SEQ ID NO: 73799 - protein, 33 aa, Artificial Sequence
  GFR-binding peptide
  MOD_RES (14), (15), (16), (17), (18): Xaa is A or G
  MOD_RES (19), (20), (21), (22): Xaa is A or G or is absent
VPTRLSNITIQIMXXXXXXXXXIGEMSDMVVES

SEQ ID NO: 73800 - protein, 37 aa, Artificial Sequence
  GFR-binding peptide
  MOD_RES (1), (2), (35), (37): Xaa is C or S
  MOD_RES (16), (17), (18), (19), (20): Xaa is A or G
  MOD_RES (21), (22), (23), (24): Xaa is A or G or is absent
XXVPQALSNITIQIMXXXXXXXXXLGEMSMIVRSXKX

SEQ ID NO: 73801 - protein, 34 aa, Artificial Sequence; identical to SEQ ID NO: 55792
  GFR-binding peptide
  MOD_RES (2), (3), (34): Xaa is C or S

SEQ ID NO: 73802 - protein, 40 aa, Artificial Sequence; identical to SEQ ID NO: 19926
  GFR-binding peptide
  MOD_RES (5), (5): Xaa is C or S

SEQ ID NO: 73803 - protein, 42 aa, Artificial Sequence
  GFR-binding peptide
  MOD_RES (6), (7), (39), (41): Xaa is C or S
HVPKPXXAPTKLSNITVQIMDDSSNVIIGEMSNMVVRSXGXH

SEQ ID NO: 73804 - protein, 40 aa, Artificial Sequence
  GFR-binding peptide
  MOD_RES (3), (4), (37), (39): Xaa is C or S
  MOD_RES (18), (19), (20), (21), (22): Xaa is A or G
  MOD_RES (23), (24), (25), (26): Xaa is A or G or is absent
APXXVPQALSNITIQIMXXXXXXXXXLGEMSMIVRSXKXS

SEQ ID NO: 73805 - protein, 39 aa, Artificial Sequence; identical to SEQ ID NO: 55800
  GFR-binding peptide
  MOD_RES (5), (6), (39): Xaa is C or S
  MOD_RES (20), (21), (22), (23), (24): Xaa is A or G
  MOD_RES (25), (26), (27), (28): Xaa is A or G or is absent

SEQ ID NO: 73806 - protein, 42 aa, Artificial Sequence; identical to SEQ ID NO: 19930
  GFR-binding peptide
  MOD_RES (5), (39), (41): Xaa is C or S
  MOD_RES (19), (20), (21), (22), (23): Xaa is A or G
  MOD_RES (24), (25), (26), (27): Xaa is A or G or is absent

SEQ ID NO: 73807 - protein, 39 aa, Artificial Sequence
  GFR-binding peptide
  MOD_RES (3), (4), (36), (38): Xaa is C or S
ASXXVPARLSNITIQIMDAANNVVIGEMSDMVVEAXGXR

SEQ ID NO: 73808 - protein, 39 aa, Artificial Sequence; identical to SEQ ID NO: 53409
  GFR-binding peptide
  MOD_RES (4), (5), (37), (39): Xaa is C or S

SEQ ID NO: 73809 - protein, 35 aa, Artificial Sequence; identical to SEQ ID NO: 19932
  GFR-binding peptide
  MOD_RES (1), (1): Xaa is C or S
  MOD_RES (17), (18), (19), (20), (21): Xaa is A or G
  MOD_RES (22), (23), (24), (25): Xaa is A or G or is absent

SEQ ID NO: 73810 - protein, 38 aa, Artificial Sequence; identical to SEQ ID NO: 55810
  GFR-binding peptide
  MOD_RES (4), (5), (36), (38): Xaa is C or S

SEQ ID NO: 73811 - protein, 38 aa, Artificial Sequence; identical to SEQ ID NO: 19933
  GFR-binding peptide
  MOD_RES (1), (38): Xaa is C or S
  MOD_RES (17), (18), (19), (20), (21): Xaa is A or G
  MOD_RES (22), (23), (24), (25): Xaa is A or G or is absent

SEQ ID NO: 73812 - protein, 42 aa, Artificial Sequence; identical to SEQ ID NO: 19934
  GFR-binding peptide
  MOD_RES (2), (39), (41): Xaa is C or S

SEQ ID NO: 73813 - protein, 38 aa, Artificial Sequence
  GFR-binding peptide
  MOD_RES (1), (2), (35), (37): Xaa is C or S
  MOD_RES (16), (17), (18), (19), (20): Xaa is A or G
  MOD_RES (21), (22), (23), (24): Xaa is A or G or is absent
XXVPQALSNITIQIMXXXXXXXXXLGEMSMIVRSXKXS

SEQ ID NO: 73814 - protein, 39 aa, Artificial Sequence; identical to SEQ ID NO: 53419
  GFR-binding peptide
  MOD_RES (3), (4), (38): Xaa is C or S
  MOD_RES (18), (19), (20), (21), (22): Xaa is A or G
  MOD_RES (23), (24), (25), (26): Xaa is A or G or is absent

SEQ ID NO: 73815 - protein, 34 aa, Artificial Sequence; identical to SEQ ID NO: 19937
  GFR-binding peptide
  MOD_RES (1), (1): Xaa is C or S
  MOD_RES (15), (16), (17), (18), (19): Xaa is A or G
  MOD_RES (20), (21), (22), (23): Xaa is A or G or is absent

SEQ ID NO: 73816 - protein, 41 aa, Artificial Sequence; identical to SEQ ID NO: 53420
  GFR-binding peptide
  MOD_RES (5), (6), (39), (41): Xaa is C or S
  MOD_RES (20), (21), (22), (23), (24): Xaa is A or G
  MOD_RES (25), (26), (27), (28): Xaa is A or G or is absent

SEQ ID NO: 73817 - protein, 42 aa, Artificial Sequence
  GFR-binding peptide
  MOD_RES (5), (6), (40), (42): Xaa is C or S
  MOD_RES (20), (21), (22), (23), (24): Xaa is A or G
  MOD_RES (25), (26), (27), (28): Xaa is A or G or is absent
VPKPXXAPTKLSNITVQIMXXXXXXXXXLGEMSNMVVRSXGX

SEQ ID NO: 73818 - protein, 40 aa, Artificial Sequence; identical to SEQ ID NO: 19939
  GFR-binding peptide
  MOD_RES (3), (37), (39): Xaa is C or S

SEQ ID NO: 73819 - protein, 40 aa, Artificial Sequence
  GFR-binding peptide
  MOD_RES (3), (4), (38), (40): Xaa is C or S
  MOD_RES (18), (19), (20), (21), (22): Xaa is A or G
  MOD_RES (23), (24), (25), (26): Xaa is A or G or is absent
GPXXTPTKMSNITMQIMXXXXXXXXXIGEMSGMVVDRXGX

SEQ ID NO: 73820 - protein, 41 aa, Artificial Sequence; identical to SEQ ID NO: 19940
  GFR-binding peptide
  MOD_RES (3), (40): Xaa is C or S
  MOD_RES (19), (20), (21), (22), (23): Xaa is A or G
  MOD_RES (24), (25), (26), (27): Xaa is A or G or is absent

SEQ ID NO: 73821 - protein, 34 aa, Artificial Sequence
  GFR-binding peptide
  MOD_RES (34), (34): Xaa is C or S
  MOD_RES (14), (15), (16), (17), (18): Xaa is A or G
  MOD_RES (19), (20), (21), (22): Xaa is A or G or is absent
TPTKMSNITMQIMXXXXXXXXXIGEMSGMVVDRX

SEQ ID NO: 73822 - protein, 42 aa, Artificial Sequence; identical to SEQ ID NO: 19941
  GFR-binding peptide
  MOD_RES (3), (40), (42): Xaa is C or S
  MOD_RES (19), (20), (21), (22), (23): Xaa is A or G
  MOD_RES (24), (25), (26), (27): Xaa is A or G or is absent

SEQ ID NO: 73823 - protein, 35 aa, Artificial Sequence
  GFR-binding peptide
  MOD_RES (4), (5): Xaa is C or S
PASXXVPARLSNITIQIMDAANNVVLGEMSDMVVE

SEQ ID NO: 73824 - protein, 42 aa, Artificial Sequence; identical to SEQ ID NO: 19942
  GFR-binding peptide
  MOD_RES (3), (40), (42): Xaa is C or S
  MOD_RES (19), (20), (21), (22), (23): Xaa is A or G
  MOD_RES (24), (25), (26), (27): Xaa is A or G or is absent

SEQ ID NO: 73825 - protein, 34 aa, Artificial Sequence
  GFR-binding peptide
  MOD_RES (1), (2), (33): Xaa is C or S
XXVPQDLSNITIQIMVGRTPKVLGEMSMVVKSXK

SEQ ID NO: 73826 - protein, 40 aa, Artificial Sequence; identical to SEQ ID NO: 19943
  GFR-binding peptide
  MOD_RES (6), (40): Xaa is C or S
  MOD_RES (20), (21), (22), (23), (24): Xaa is A or G
  MOD_RES (25), (26), (27), (28): Xaa is A or G or is absent

SEQ ID NO: 73827 - protein, 36 aa, Artificial Sequence
  GFR-binding peptide
  MOD_RES (1), (2), (34), (36): Xaa is C or S
XXAPTKLSNITVQIMDDSSNVILGEMSNMVVRSXGX

SEQ ID NO: 73828 - protein, 38 aa, Artificial Sequence; identical to SEQ ID NO: 19944
  GFR-binding peptide
  MOD_RES (35), (37): Xaa is C or S
  MOD_RES (14), (15), (16), (17), (18): Xaa is A or G
  MOD_RES (19), (20), (21), (22): Xaa is A or G or is absent

SEQ ID NO: 73829 - protein, 41 aa, Artificial Sequence; identical to SEQ ID NO: 19946
  GFR-binding peptide
  MOD_RES (2), (39), (41): Xaa is C or S
  MOD_RES (18), (19), (20), (21), (22): Xaa is A or G
  MOD_RES (23), (24), (25), (26): Xaa is A or G or is absent

SEQ ID NO: 73830 - protein, 39 aa, Artificial Sequence; identical to SEQ ID NO: 55829
  GFR-binding peptide
  MOD_RES (6), (7), (38): Xaa is C or S

SEQ ID NO: 73831 - protein, 39 aa, Artificial Sequence; identical to SEQ ID NO: 19947
  GFR-binding peptide
  MOD_RES (37), (39): Xaa is C or S
  MOD_RES (16), (17), (18), (19), (20): Xaa is A or G
  MOD_RES (21), (22), (23), (24): Xaa is A or G or is absent

SEQ ID NO: 73832 - protein, 39 aa, Artificial Sequence
  GFR-binding peptide
  MOD_RES (5), (6): Xaa is C or S
  MOD_RES (20), (21), (22), (23), (24): Xaa is A or G
  MOD_RES (25), (26), (27), (28): Xaa is A or G or is absent
APASXXVPARLSNITIQIMXXXXXXXXXLGEMSDMVVEA

SEQ ID NO: 73833 - protein, 41 aa, Artificial Sequence; identical to SEQ ID NO: 19948
  GFR-binding peptide
  MOD_RES (5), (39), (41): Xaa is C or S
  MOD_RES (19), (20), (21), (22), (23): Xaa is A or G
  MOD_RES (24), (25), (26), (27): Xaa is A or G or is absent

SEQ ID NO: 73834 - protein, 40 aa, Artificial Sequence
  GFR-binding peptide
  MOD_RES (6), (7): Xaa is C or S
  MOD_RES (21), (22), (23), (24), (25): Xaa is A or G
  MOD_RES (26), (27), (28), (29): Xaa is A or G or is absent
STPPTXXVPTRLSNITIQIMXXXXXXXXXLGEMSDMVVES

SEQ ID NO: 73835 - protein, 38 aa, Artificial Sequence
  GFR-binding peptide
  MOD_RES (4), (5), (36), (38): Xaa is C or S
ASPXXVPQDLSNITIQIMVGRTPKVLGEMSMVVKSXKX

SEQ ID NO: 73836 - protein, 37 aa, Artificial Sequence
  GFR-binding peptide
  MOD_RES (2), (3), (34), (36): Xaa is C or S
PXXVPQDLSNITIQIMVGRTPKVLGEMSMVVKSXKXS

SEQ ID NO: 73837 - protein, 40 aa, Artificial Sequence; identical to SEQ ID NO: 19950
  GFR-binding peptide
  MOD_RES (7), (7): Xaa is C or S
  MOD_RES (21), (22), (23), (24), (25): Xaa is A or G
  MOD_RES (26), (27), (28), (29): Xaa is A or G or is absent

SEQ ID NO: 73838 - protein, 34 aa, Artificial Sequence
  GFR-binding peptide
  MOD_RES (3), (4): Xaa is C or S
APXXVPQALSNITIQIMVGRKPKVLGEMSMIVRS

SEQ ID NO: 73839 - protein, 40 aa, Artificial Sequence; identical to SEQ ID NO: 19952
  GFR-binding peptide
  MOD_RES (3), (40): Xaa is C or S

SEQ ID NO: 73840 - protein, 40 aa, Artificial Sequence
  GFR-binding peptide
  MOD_RES (5), (6), (40): Xaa is C or S
  MOD_RES (20), (21), (22), (23), (24): Xaa is A or G
  MOD_RES (25), (26), (27), (28): Xaa is A or G or is absent
TPPTXXVPTRLSNITIQIMXXXXXXXXXIGEMSDMVVESX

SEQ ID NO: 73841 - protein, 34 aa, Artificial Sequence
  GFR-binding peptide
  MOD_RES (2), (3): Xaa is C or S
PXXTPTKMSNITMQIMNDKQQIILGEMSGMVVDR

SEQ ID NO: 73842 - protein, 37 aa, Artificial Sequence; identical to SEQ ID NO: 19954
  GFR-binding peptide
  MOD_RES (4), (4): Xaa is C or S
  MOD_RES (18), (19), (20), (21), (22): Xaa is A or G
  MOD_RES (23), (24), (25), (26): Xaa is A or G or is absent

SEQ ID NO: 73843 - protein, 39 aa, Artificial Sequence; identical to SEQ ID NO: 19955
  GFR-binding peptide
  MOD_RES (2), (39): Xaa is C or S
  MOD_RES (18), (19), (20), (21), (22): Xaa is A or G
  MOD_RES (23), (24), (25), (26): Xaa is A or G or is absent

SEQ ID NO: 73844 - protein, 38 aa, Artificial Sequence
  GFR-binding peptide
  MOD_RES (5), (6), (38): Xaa is C or S
SAGPXXTPTKMSNITMQIMNDKQQIILGEMSGMVVDRX

SEQ ID NO: 73845 - protein, 33 aa, Artificial Sequence; identical to SEQ ID NO: 19956
  GFR-binding peptide

SEQ ID NO: 73846 - protein, 40 aa, Artificial Sequence; identical to SEQ ID NO: 19957
  GFR-binding peptide
  MOD_RES (5), (5): Xaa is C or S

SEQ ID NO: 73847 - protein, 36 aa, Artificial Sequence; identical to SEQ ID NO: 19958
  GFR-binding peptide
  MOD_RES (36), (36): Xaa is C or S

SEQ ID NO: 73848 - protein, 37 aa, Artificial Sequence
  GFR-binding peptide
  MOD_RES (4), (5): Xaa is C or S
  MOD_RES (19), (20), (21), (22), (23): Xaa is A or G
  MOD_RES (24), (25), (26), (27): Xaa is A or G or is absent
PASXXVPARLSNITIQIMXXXXXXXXXLGEMSDMVVE

SEQ ID NO: 73849 - protein, 40 aa, Artificial Sequence
  GFR-binding peptide
  MOD_RES (6), (7): Xaa is C or S
  MOD_RES (21), (22), (23), (24), (25): Xaa is A or G
  MOD_RES (26), (27), (28), (29): Xaa is A or G or is absent
AAPASXXVPARLSNITIQIMXXXXXXXXXLGEMSDMVVEA

SEQ ID NO: 73850 - protein, 42 aa, Artificial Sequence; identical to SEQ ID NO: 19960
  GFR-binding peptide
  MOD_RES (3), (40), (42): Xaa is C or S
  MOD_RES (19), (20), (21), (22), (23): Xaa is A or G
  MOD_RES (24), (25), (26), (27): Xaa is A or G or is absent

SEQ ID NO: 73851 - protein, 39 aa, Artificial Sequence
  GFR-binding peptide
  MOD_RES (4), (5), (39): Xaa is C or S
  MOD_RES (19), (20), (21), (22), (23): Xaa is A or G
  MOD_RES (24), (25), (26), (27): Xaa is A or G or is absent
AGPXXTPTKMSNITMQIMXXXXXXXXXIGEMSGMVVDRX

SEQ ID NO: 73852 - protein, 34 aa, Artificial Sequence; identical to SEQ ID NO: 53462
  GFR-binding peptide
  MOD_RES (2), (3), (34): Xaa is C or S

SEQ ID NO: 73853 - protein, 39 aa, Artificial Sequence
  GFR-binding peptide
  MOD_RES (5), (6), (39): Xaa is C or S
  MOD_RES (20), (21), (22), (23), (24): Xaa is A or G
  MOD_RES (25), (26), (27), (28): Xaa is A or G or is absent
SAAPXXVPQALSNITIQIMXXXXXXXXXLGEMSMIVRSX

SEQ ID NO: 73854 - protein, 37 aa, Artificial Sequence; identical to SEQ ID NO: 53466
  GFR-binding peptide
  MOD_RES (5), (6): Xaa is C or S

SEQ ID NO: 73855 - protein, 34 aa, Artificial Sequence
  GFR-binding peptide
  MOD_RES (1), (2), (33): Xaa is C or S
XXAPVKTSNITMQIMDNGRVLLLGEMSMIVEEXG

SEQ ID NO: 73856 - protein, 32 aa, Artificial Sequence
  GFR-binding peptide
  MOD_RES (32), (32): Xaa is C or S
VPARLSNITIQIMDAANNVVIGEMSDMVVEAX

SEQ ID NO: 73857 - protein, 32 aa, Artificial Sequence
  GFR-binding peptide
  MOD_RES (1), (2): Xaa is C or S
XXVPTRLSNITIQIMDSANNVVIGEMSDMVVE

SEQ ID NO: 73858 - protein, 34 aa, Artificial Sequence
  GFR-binding peptide
  MOD_RES (2), (3): Xaa is C or S
SXXVPARLSNITIQIMDAANNVVIGEMSDMVVEA

SEQ ID NO: 73859 - protein, 34 aa, Artificial Sequence; identical to SEQ ID NO: 53473
  GFR-binding peptide
  MOD_RES (1), (1): Xaa is C or S
  MOD_RES (15), (16), (17), (18), (19): Xaa is A or G
  MOD_RES (20), (21), (22), (23): Xaa is A or G or is absent

SEQ ID NO: 73860 - protein, 32 aa, Artificial Sequence; identical to SEQ ID NO: 19967
  GFR-binding peptide
  MOD_RES (14), (15), (16), (17), (18): Xaa is A or G
  MOD_RES (19), (20), (21), (22): Xaa is A or G or is absent

SEQ ID NO: 73861 - protein, 34 aa, Artificial Sequence
  GFR-binding peptide
  MOD_RES (1), (2), (33): Xaa is C or S
XXAPVKTSNITMQIMDNGRVLLIGEMSMIVEEXG

SEQ ID NO: 73862 - protein, 37 aa, Artificial Sequence
  GFR-binding peptide
  MOD_RES (34), (36): Xaa is C or S
  MOD_RES (14), (15), (16), (17), (18): Xaa is A or G
  MOD_RES (19), (20), (21), (22): Xaa is A or G or is absent
VPTRLSNITIQIMXXXXXXXXXLGEMSDMVVESXGXR

SEQ ID NO: 73863 - protein, 41 aa, Artificial Sequence; identical to SEQ ID NO: 19968
  GFR-binding peptide
  MOD_RES (5), (5): Xaa is C or S
  MOD_RES (21), (22), (23), (24), (25): Xaa is A or G
  MOD_RES (26), (27), (28), (29): Xaa is A or G or is absent

SEQ ID NO: 73864 - protein, 38 aa, Artificial Sequence
  GFR-binding peptide
  MOD_RES (2), (3), (36), (38): Xaa is C or S
  MOD_RES (17), (18), (19), (20), (21): Xaa is A or G
  MOD_RES (22), (23), (24), (25): Xaa is A or G or is absent
TXXAPVKTSNITMQIMXXXXXXXXXLGEMSMIVEEXGX

SEQ ID NO: 73865 - protein, 37 aa, Artificial Sequence; identical to SEQ ID NO: 19969
  GFR-binding peptide
  MOD_RES (35), (37): Xaa is C or S
  MOD_RES (14), (15), (16), (17), (18): Xaa is A or G
  MOD_RES (19), (20), (21), (22): Xaa is A or G or is absent

SEQ ID NO: 73866 - protein, 37 aa, Artificial Sequence
  GFR-binding peptide
  MOD_RES (4), (5): Xaa is C or S
  MOD_RES (19), (20), (21), (22), (23): Xaa is A or G
  MOD_RES (24), (25), (26), (27): Xaa is A or G or is absent
PKPXXAPTKLSNITVQIMXXXXXXXXXLGEMSNMVVR

SEQ ID NO: 73867 - protein, 32 aa, Artificial Sequence; identical to SEQ ID NO: 55871
  GFR-binding peptide
  MOD_RES (31), (31): Xaa is C or S

SEQ ID NO: 73868 - protein, 35 aa, Artificial Sequence
  GFR-binding peptide
  MOD_RES (2), (3): Xaa is C or S
  MOD_RES (17), (18), (19), (20), (21): Xaa is A or G
  MOD_RES (22), (23), (24), (25): Xaa is A or G or is absent
TXXAPVKTSNITMQIMXXXXXXXXXLGEMSMIVEE

SEQ ID NO: 73869 - protein, 44 aa, Artificial Sequence
  GFR-binding peptide
  MOD_RES (6), (7), (41), (43): Xaa is C or S
  MOD_RES (21), (22), (23), (24), (25): Xaa is A or G
  MOD_RES (26), (27), (28), (29): Xaa is A or G or is absent
GSAGPXXTPTKMSNITMQIMXXXXXXXXXLGEMSGMVVDRXGXS

SEQ ID NO: 73870 - protein, 43 aa, Artificial Sequence
  GFR-binding peptide
  MOD_RES (6), (7), (41), (43): Xaa is C or S
  MOD_RES (21), (22), (23), (24), (25): Xaa is A or G
  MOD_RES (26), (27), (28), (29): Xaa is A or G or is absent
AAPASXXVPARLSNITIQIMXXXXXXXXXLGEMSDMVVEAXGX

SEQ ID NO: 73871 - protein, 36 aa, Artificial Sequence; identical to SEQ ID NO: 19970
  GFR-binding peptide
  MOD_RES (34), (36): Xaa is C or S
  MOD_RES (14), (15), (16), (17), (18): Xaa is A or G
  MOD_RES (19), (20), (21), (22): Xaa is A or G or is absent

SEQ ID NO: 73872 - protein, 38 aa, Artificial Sequence; identical to SEQ ID NO: 19971
  GFR-binding peptide
  MOD_RES (36), (38): Xaa is C or S

SEQ ID NO: 73873 - protein, 37 aa, Artificial Sequence
  GFR-binding peptide
  MOD_RES (3), (4), (36): Xaa is C or S
GPXXTPTKMSNITMQIMNDKQQIIIGEMSGMVVDRXG

SEQ ID NO: 73874 - protein, 40 aa, Artificial Sequence; identical to SEQ ID NO: 19972
  GFR-binding peptide
  MOD_RES (4), (38), (40): Xaa is C or S
  MOD_RES (18), (19), (20), (21), (22): Xaa is A or G
  MOD_RES (23), (24), (25), (26): Xaa is A or G or is absent

SEQ ID NO: 73875 - protein, 41 aa, Artificial Sequence; identical to SEQ ID NO: 19974
  GFR-binding peptide
  MOD_RES (6), (40): Xaa is C or S
  MOD_RES (20), (21), (22), (23), (24): Xaa is A or G
  MOD_RES (25), (26), (27), (28): Xaa is A or G or is absent

SEQ ID NO: 73876 - protein, 37 aa, Artificial Sequence; identical to SEQ ID NO: 19975
  GFR-binding peptide
  MOD_RES (3), (3): Xaa is C or S

SEQ ID NO: 73877 - protein, 33 aa, Artificial Sequence
  GFR-binding peptide
  MOD_RES (2), (3): Xaa is C or S
SXXVPARLSNITIQIMDAANNVVLGEMSDMVVE

SEQ ID NO: 73878 - protein, 38 aa, Artificial Sequence
  GFR-binding peptide
  MOD_RES (3), (4), (38): Xaa is C or S
  MOD_RES (18), (19), (20), (21), (22): Xaa is A or G
  MOD_RES (23), (24), (25), (26): Xaa is A or G or is absent
GPXXTPTKMSNITMQIMXXXXXXXXXIGEMSGMVVDRX

SEQ ID NO: 73879 - protein, 37 aa, Artificial Sequence
  GFR-binding peptide
  MOD_RES (3), (4), (36): Xaa is C or S
ASXXVPARLSNITIQIMDAANNVVLGEMSDMVVEAXG

SEQ ID NO: 73880 - protein, 40 aa, Artificial Sequence
  GFR-binding peptide
  MOD_RES (4), (5), (37), (39): Xaa is C or S
PASXXVPARLSNITIQIMDAANNVVLGEMSDMVVEAXGXR

SEQ ID NO: 73881 - protein, 38 aa, Artificial Sequence; identical to SEQ ID NO: 19978
  GFR-binding peptide
  MOD_RES (5), (5): Xaa is C or S
  MOD_RES (19), (20), (21), (22), (23): Xaa is A or G
  MOD_RES (24), (25), (26), (27): Xaa is A or G or is absent

SEQ ID NO: 73882 - protein, 39 aa, Artificial Sequence
  GFR-binding peptide
  MOD_RES (2), (3), (36), (38): Xaa is C or S
  MOD_RES (17), (18), (19), (20), (21): Xaa is A or G
  MOD_RES (22), (23), (24), (25): Xaa is A or G or is absent
PXXVPQALSNITIQIMXXXXXXXXXLGEMSMIVRSXKXS

SEQ ID NO: 73883 - protein, 32 aa, Artificial Sequence
  GFR-binding peptide
  MOD_RES (1), (32): Xaa is C or S
XAPVKTSNITMQIMDNGRVLLIGEMSMIVEEX

SEQ ID NO: 73884 - protein, 39 aa, Artificial Sequence
  GFR-binding peptide
  MOD_RES (3), (4), (38): Xaa is C or S
  MOD_RES (18), (19), (20), (21), (22): Xaa is A or G
  MOD_RES (23), (24), (25), (26): Xaa is A or G or is absent
ASXXVPARLSNITIQIMXXXXXXXXXLGEMSDMVVEAXG

SEQ ID NO: 73885 - protein, 35 aa, Artificial Sequence; identical to SEQ ID NO: 19980
  GFR-binding peptide
  MOD_RES (35), (35): Xaa is C or S

SEQ ID NO: 73886 - protein, 41 aa, Artificial Sequence
  GFR-binding peptide
  MOD_RES (4), (5), (39), (41): Xaa is C or S
  MOD_RES (19), (20), (21), (22), (23): Xaa is A or G
  MOD_RES (24), (25), (26), (27): Xaa is A or G or is absent
PPTXXVPTRLSNITIQIMXXXXXXXXXIGEMSDMVVESXGX

SEQ ID NO: 73887 - protein, 31 aa, Artificial Sequence
  GFR-binding peptide
  MOD_RES (31), (31): Xaa is C or S
VPQDLSNITIQIMVGRTPKVLGEMSMVVKSX

SEQ ID NO: 73888 - protein, 38 aa, Artificial Sequence; identical to SEQ ID NO: 19981
  GFR-binding peptide
  MOD_RES (3), (3): Xaa is C or S

SEQ ID NO: 73889 - protein, 36 aa, Artificial Sequence
  GFR-binding peptide
  MOD_RES (3), (4): Xaa is C or S
  MOD_RES (18), (19), (20), (21), (22): Xaa is A or G
  MOD_RES (23), (24), (25), (26): Xaa is A or G or is absent
GPXXTPTKMSNITMQIMXXXXXXXXXLGEMSGMVVD

SEQ ID NO: 73890 - protein, 39 aa, Artificial Sequence
  GFR-binding peptide
  MOD_RES (1), (2), (36), (38): Xaa is C or S
  MOD_RES (16), (17), (18), (19), (20): Xaa is A or G
  MOD_RES (21), (22), (23), (24): Xaa is A or G or is absent
XXVPTRLSNITIQIMXXXXXXXXXIGEMSDMVVESXGXR

SEQ ID NO: 73891 - protein, 42 aa, Artificial Sequence; identical to SEQ ID NO: 19984
  GFR-binding peptide
  MOD_RES (4), (41): Xaa is C or S

SEQ ID NO: 73892 - protein, 40 aa, Artificial Sequence
  GFR-binding peptide
  MOD_RES (5), (6), (38), (40): Xaa is C or S
VPKPXXAPTKLSNITVQIMDDSSNVILGEMSNMVVRSXGX

SEQ ID NO: 73893 - protein, 38 aa, Artificial Sequence
  GFR-binding peptide
  MOD_RES (1), (35), (37): Xaa is C or S
  MOD_RES (15), (16), (17), (18), (19): Xaa is A or G
  MOD_RES (20), (21), (22), (23): Xaa is A or G or is absent
XVPARLSNITIQIMXXXXXXXXXIGEMSDMVVEAXGXR

SEQ ID NO: 73894 - protein, 38 aa, Artificial Sequence; identical to SEQ ID NO: 19985
  GFR-binding peptide
  MOD_RES (5), (5): Xaa is C or S

SEQ ID NO: 73895 - protein, 33 aa, Artificial Sequence; identical to SEQ ID NO: 55895
  GFR-binding peptide
  MOD_RES (1), (32): Xaa is C or S

SEQ ID NO: 73896 - protein, 36 aa, Artificial Sequence; identical to SEQ ID NO: 19987
  GFR-binding peptide
  MOD_RES (36), (36): Xaa is C or S

SEQ ID NO: 73897 - protein, 36 aa, Artificial Sequence; identical to SEQ ID NO: 19990
  GFR-binding peptide
  MOD_RES (2), (2): Xaa is C or S

SEQ ID NO: 73898 - protein, 37 aa, Artificial Sequence; identical to SEQ ID NO: 19991
  GFR-binding peptide
  MOD_RES (36), (36): Xaa is C or S
  MOD_RES (15), (16), (17), (18), (19): Xaa is A or G
  MOD_RES (20), (21), (22), (23): Xaa is A or G or is absent

SEQ ID NO: 73899 - protein, 33 aa, Artificial Sequence; identical to SEQ ID NO: 19992
  GFR-binding peptide

SEQ ID NO: 73900 - protein, 37 aa, Artificial Sequence
  GFR-binding peptide
  MOD_RES (3), (4), (36): Xaa is C or S
KPXXAPTKLSNITVQIMDDSSNVILGEMSNMVVRSXG

SEQ ID NO: 73901 - protein, 34 aa, Artificial Sequence; identical to SEQ ID NO: 19993
  GFR-binding peptide

SEQ ID NO: 73902 - protein, 34 aa, Artificial Sequence
  GFR-binding peptide
  MOD_RES (1), (33): Xaa is C or S
XTPTKMSNITMQIMNDKQQIILGEMSGMVVDRXG

SEQ ID NO: 73903 - protein, 36 aa, Artificial Sequence; identical to SEQ ID NO: 19995
  GFR-binding peptide
  MOD_RES (2), (2): Xaa is C or S

SEQ ID NO: 73904 - protein, 37 aa, Artificial Sequence; identical to SEQ ID NO: 55907
  GFR-binding peptide
  MOD_RES (4), (5), (36): Xaa is C or S

SEQ ID NO: 73905 - protein, 42 aa, Artificial Sequence
  GFR-binding peptide
  MOD_RES (5), (6), (39), (41): Xaa is C or S
  MOD_RES (20), (21), (22), (23), (24): Xaa is A or G
  MOD_RES (25), (26), (27), (28): Xaa is A or G or is absent
SAAPXXVPQALSNITIQIMXXXXXXXXXLGEMSMIVRSXKXS

SEQ ID NO: 73906 - protein, 38 aa, Artificial Sequence
  GFR-binding peptide
  MOD_RES (3), (4), (37): Xaa is C or S
  MOD_RES (18), (19), (20), (21), (22): Xaa is A or G
  MOD_RES (23), (24), (25), (26): Xaa is A or G or is absent
SPXXVSQDLSNITIQIMXXXXXXXXXLGEMSMIVKSXK

SEQ ID NO: 73907 - protein, 38 aa, Artificial Sequence
  GFR-binding peptide
  MOD_RES (2), (3), (37): Xaa is C or S
  MOD_RES (17), (18), (19), (20), (21): Xaa is A or G
  MOD_RES (22), (23), (24), (25): Xaa is A or G or is absent
SXXVPARLSNITIQIMXXXXXXXXXIGEMSDMVVEAXG

SEQ ID NO: 73908 - protein, 37 aa, Artificial Sequence
  GFR-binding peptide
  MOD_RES (4), (5), (36): Xaa is C or S
AAPXXVPQALSNITIQIMVGRKPKVLGEMSMIVRSXK

SEQ ID NO: 73909 - protein, 35 aa, Artificial Sequence
  GFR-binding peptide
  MOD_RES (1), (32), (34): Xaa is C or S
XAPVKTSNITMQIMDNGRVLLIGEMSMIVEEXGXL

SEQ ID NO: 73910 - protein, 38 aa, Artificial Sequence; identical to SEQ ID NO: 19998
  GFR-binding peptide
  MOD_RES (4), (4): Xaa is C or S
  MOD_RES (20), (21), (22), (23), (24): Xaa is A or G
  MOD_RES (25), (26), (27), (28): Xaa is A or G or is absent

SEQ ID NO: 73911 - protein, 33 aa, Artificial Sequence
  GFR-binding peptide
  MOD_RES (1), (33): Xaa is C or S
XTPTKMSNITMQIMNDKQQIILGEMSGMVVDRX

SEQ ID NO: 73912 - protein, 32 aa, Artificial Sequence; identical to SEQ ID NO: 55917
  GFR-binding peptide
  MOD_RES (14), (15), (16), (17), (18): Xaa is A or G
  MOD_RES (19), (20), (21), (22): Xaa is A or G or is absent

SEQ ID NO: 73913 - protein, 35 aa, Artificial Sequence
  GFR-binding peptide
  MOD_RES (34), (34): Xaa is C or S
  MOD_RES (14), (15), (16), (17), (18): Xaa is A or G
  MOD_RES (19), (20), (21), (22): Xaa is A or G or is absent
VPARLSNITIQIMXXXXXXXXXIGEMSDMVVEAXG

SEQ ID NO: 73914 - protein, 38 aa, Artificial Sequence; identical to SEQ ID NO: 55921
  GFR-binding peptide
  MOD_RES (1), (2), (35), (37): Xaa is C or S
  MOD_RES (16), (17), (18), (19), (20): Xaa is A or G
  MOD_RES (21), (22), (23), (24): Xaa is A or G or is absent

SEQ ID NO: 73915 - protein, 38 aa, Artificial Sequence; identical to SEQ ID NO: 20002
  GFR-binding peptide
  MOD_RES (1), (35), (37): Xaa is C or S
  MOD_RES (15), (16), (17), (18), (19): Xaa is A or G
  MOD_RES (20), (21), (22), (23): Xaa is A or G or is absent

SEQ ID NO: 73916 - protein, 41 aa, Artificial Sequence; identical to SEQ ID NO: 53538
  GFR-binding peptide
  MOD_RES (5), (6), (39), (41): Xaa is C or S
  MOD_RES (20), (21), (22), (23), (24): Xaa is A or G
  MOD_RES (25), (26), (27), (28): Xaa is A or G or is absent

SEQ ID NO: 73917 - protein, 40 aa, Artificial Sequence; identical to SEQ ID NO: 20006
  GFR-binding peptide
  MOD_RES (3), (37), (39): Xaa is C or S
  MOD_RES (17), (18), (19), (20), (21): Xaa is A or G
  MOD_RES (22), (23), (24), (25): Xaa is A or G or is absent

SEQ ID NO: 73918 - protein, 38 aa, Artificial Sequence
  GFR-binding peptide
  MOD_RES (3), (4), (36), (38): Xaa is C or S
PTXXVPTRLSNITIQIMDSANNVVIGEMSDMVVESXGX

SEQ ID NO: 73919 - protein, 41 aa, Artificial Sequence; identical to SEQ ID NO: 20008
  GFR-binding peptide
  MOD_RES (4), (38), (40): Xaa is C or S
  MOD_RES (18), (19), (20), (21), (22): Xaa is A or G
  MOD_RES (23), (24), (25), (26): Xaa is A or G or is absent

SEQ ID NO: 73920 - protein, 34 aa, Artificial Sequence
  GFR-binding peptide
  MOD_RES (1), (2), (34): Xaa is C or S
XXVPARLSNITIQIMDAANNVVIGEMSDMVVEAX

SEQ ID NO: 73921 - protein, 36 aa, Artificial Sequence
  GFR-binding peptide
  MOD_RES (1), (33), (35): Xaa is C or S
XVPARLSNITIQIMDAANNVVLGEMSDMVVEAXGXR

SEQ ID NO: 73922 - protein, 36 aa, Artificial Sequence
  GFR-binding peptide
  MOD_RES (3), (4): Xaa is C or S
  MOD_RES (18), (19), (20), (21), (22): Xaa is A or G
  MOD_RES (23), (24), (25), (26): Xaa is A or G or is absent
SPXXVPQDLSNITIQIMXXXXXXXXXLGEMSMVVKS

SEQ ID NO: 73923 - protein, 41 aa, Artificial Sequence; identical to SEQ ID NO: 20010
  GFR-binding peptide
  MOD_RES (6), (40): Xaa is C or S

SEQ ID NO: 73924 - protein, 41 aa, Artificial Sequence
  GFR-binding peptide
  MOD_RES (3), (4), (38), (40): Xaa is C or S
  MOD_RES (18), (19), (20), (21), (22): Xaa is A or G
  MOD_RES (23), (24), (25), (26): Xaa is A or G or is absent
PTXXVPTRLSNITIQIMXXXXXXXXXLGEMSDMVVESXGXR

SEQ ID NO: 73925 - protein, 36 aa, Artificial Sequence; identical to SEQ ID NO: 20013
  GFR-binding peptide
  MOD_RES (1), (1): Xaa is C or S
  MOD_RES (17), (18), (19), (20), (21): Xaa is A or G
  MOD_RES (22), (23), (24), (25): Xaa is A or G or is absent

SEQ ID NO: 73926 - protein, 37 aa, Artificial Sequence; identical to SEQ ID NO: 20014
  GFR-binding peptide
  MOD_RES (35), (37): Xaa is C or S

SEQ ID NO: 73927 - protein, 41 aa, Artificial Sequence
  GFR-binding peptide
  MOD_RES (4), (5), (39), (41): Xaa is C or S
  MOD_RES (19), (20), (21), (22), (23): Xaa is A or G
  MOD_RES (24), (25), (26), (27): Xaa is A or G or is absent
PPTXXVPTRLSNITIQIMXXXXXXXXXLGEMSDMVVESXGX

SEQ ID NO: 73928 - protein, 36 aa, Artificial Sequence
  GFR-binding peptide
  MOD_RES (4), (5), (36): Xaa is C or S
PSTXXAPVKTSNITMQIMDNGRVLLIGEMSMIVEEX

SEQ ID NO: 73929 - protein, 36 aa, Artificial Sequence; identical to SEQ ID NO: 53558
  GFR-binding peptide
  MOD_RES (1), (2), (33), (35): Xaa is C or S

SEQ ID NO: 73930 - protein, 43 aa, Artificial Sequence; identical to SEQ ID NO: 20016
  GFR-binding peptide
  MOD_RES (7), (41), (43): Xaa is C or S

SEQ ID NO: 73931 - protein, 45 aa, Artificial Sequence; identical to SEQ ID NO: 20017
  GFR-binding peptide
  MOD_RES (5), (42), (44): Xaa is C or S

SEQ ID NO: 73932 - protein, 37 aa, Artificial Sequence
  GFR-binding peptide
  MOD_RES (3), (4), (36): Xaa is C or S
ASXXVPARLSNITIQIMDAANNVVIGEMSDMVVEAXG

SEQ ID NO: 73933 - protein, 38 aa, Artificial Sequence; identical to SEQ ID NO: 20018
  GFR-binding peptide
  MOD_RES (1), (38): Xaa is C or S
  MOD_RES (17), (18), (19), (20), (21): Xaa is A or G
  MOD_RES (22), (23), (24), (25): Xaa is A or G or is absent

SEQ ID NO: 73934 - protein, 34 aa, Artificial Sequence; identical to SEQ ID NO: 20021
  GFR-binding peptide

SEQ ID NO: 73935 - protein, 37 aa, Artificial Sequence; identical to SEQ ID NO: 20022
  GFR-binding peptide
  MOD_RES (4), (4): Xaa is C or S

SEQ ID NO: 73936 - protein, 40 aa, Artificial Sequence
  GFR-binding peptide
  MOD_RES (2), (3), (37), (39): Xaa is C or S
  MOD_RES (17), (18), (19), (20), (21): Xaa is A or G
  MOD_RES (22), (23), (24), (25): Xaa is A or G or is absent
SXXVPARLSNITIQIMXXXXXXXXXIGEMSDMVVEAXGXR

SEQ ID NO: 73937 - protein, 37 aa, Artificial Sequence; identical to SEQ ID NO: 55949
  GFR-binding peptide
  MOD_RES (1), (2), (35), (37): Xaa is C or S
  MOD_RES (16), (17), (18), (19), (20): Xaa is A or G
  MOD_RES (21), (22), (23), (24): Xaa is A or G or is absent

SEQ ID NO: 73938 - protein, 38 aa, Artificial Sequence
  GFR-binding peptide
  MOD_RES (4), (5), (38): Xaa is C or S
  MOD_RES (19), (20), (21), (22), (23): Xaa is A or G
  MOD_RES (24), (25), (26), (27): Xaa is A or G or is absent
PSTXXAPVKTSNITMQIMXXXXXXXXXLGEMSMIVEEX

SEQ ID NO: 73939 - protein, 42 aa, Artificial Sequence; identical to SEQ ID NO: 20025
  GFR-binding peptide
  MOD_RES (6), (40), (42): Xaa is C or S
  MOD_RES (20), (21), (22), (23), (24): Xaa is A or G
  MOD_RES (25), (26), (27), (28): Xaa is A or G or is absent

SEQ ID NO: 73940 - protein, 39 aa, Artificial Sequence
  GFR-binding peptide
  MOD_RES (3), (4), (37), (39): Xaa is C or S
  MOD_RES (18), (19), (20), (21), (22): Xaa is A or G
  MOD_RES (23), (24), (25), (26): Xaa is A or G or is absent
STXXAPVKTSNITMQIMXXXXXXXXXIGEMSMIVEEXGX

SEQ ID NO: 73941 - protein, 32 aa, Artificial Sequence; identical to SEQ ID NO: 55951
  GFR-binding peptide
  MOD_RES (14), (15), (16), (17), (18): Xaa is A or G
  MOD_RES (19), (20), (21), (22): Xaa is A or G or is absent

SEQ ID NO: 73942 - protein, 36 aa, Artificial Sequence; identical to SEQ ID NO: 53570
  GFR-binding peptide
  MOD_RES (2), (3), (36): Xaa is C or S
  MOD_RES (17), (18), (19), (20), (21): Xaa is A or G
  MOD_RES (22), (23), (24), (25): Xaa is A or G or is absent

SEQ ID NO: 73943 - protein, 34 aa, Artificial Sequence; identical to SEQ ID NO: 20027
  GFR-binding peptide
  MOD_RES (14), (15), (16), (17), (18): Xaa is A or G
  MOD_RES (19), (20), (21), (22): Xaa is A or G or is absent

SEQ ID NO: 73944 - protein, 44 aa, Artificial Sequence; identical to SEQ ID NO: 20028
  GFR-binding peptide
  MOD_RES (4), (41), (43): Xaa is C or S
  MOD_RES (20), (21), (22), (23), (24): Xaa is A or G
  MOD_RES (25), (26), (27), (28): Xaa is A or G or is absent

SEQ ID NO: 73945 - protein, 38 aa, Artificial Sequence
  GFR-binding peptide
  MOD_RES (2), (3), (37): Xaa is C or S
  MOD_RES (17), (18), (19), (20), (21): Xaa is A or G
  MOD_RES (22), (23), (24), (25): Xaa is A or G or is absent
PXXTPTKMSNITMQIMXXXXXXXXXIGEMSGMVVDRXG

SEQ ID NO: 73946 - protein, 42 aa, Artificial Sequence; identical to SEQ ID NO: 20029
  GFR-binding peptide
  MOD_RES (6), (40), (42): Xaa is C or S
  MOD_RES (20), (21), (22), (23), (24): Xaa is A or G
  MOD_RES (25), (26), (27), (28): Xaa is A or G or is absent

SEQ ID NO: 73947 - protein, 39 aa, Artificial Sequence
  GFR-binding peptide
  MOD_RES (1), (2), (36), (38): Xaa is C or S
  MOD_RES (16), (17), (18), (19), (20): Xaa is A or G
  MOD_RES (21), (22), (23), (24): Xaa is A or G or is absent
XXVPARLSNITIQIMXXXXXXXXXLGEMSDMVVEAXGXR

SEQ ID NO: 73948 - protein, 39 aa, Artificial Sequence
  GFR-binding peptide
  MOD_RES (1), (2), (36), (38): Xaa is C or S
  MOD_RES (16), (17), (18), (19), (20): Xaa is A or G
  MOD_RES (21), (22), (23), (24): Xaa is A or G or is absent
XXTPTKMSNITMQIMXXXXXXXXXIGEMSGMVVDRXGXS

SEQ ID NO: 73949 - protein, 37 aa, Artificial Sequence
  GFR-binding peptide
  MOD_RES (1), (2), (36): Xaa is C or S
  MOD_RES (16), (17), (18), (19), (20): Xaa is A or G
  MOD_RES (21), (22), (23), (24): Xaa is A or G or is absent
XXTPTKMSNITMQIMXXXXXXXXXLGEMSGMVVDRXG

SEQ ID NO: 73950 - protein, 35 aa, Artificial Sequence; identical to SEQ ID NO: 55961
  GFR-binding peptide
  MOD_RES (4), (5): Xaa is C or S

SEQ ID NO: 73951 - protein, 34 aa, Artificial Sequence; identical to SEQ ID NO: 55962
  GFR-binding peptide
  MOD_RES (31), (33): Xaa is C or S

SEQ ID NO: 73952 - protein, 31 aa, Artificial Sequence
  GFR-binding peptide
  MOD_RES (1), (1): Xaa is C or S
XVPTRLSNITIQIMDSANNVVLGEMSDMVVE

SEQ ID NO: 73953 - protein, 34 aa, Artificial Sequence
  GFR-binding peptide
  MOD_RES (1), (2): Xaa is C or S
  MOD_RES (16), (17), (18), (19), (20): Xaa is A or G
  MOD_RES (21), (22), (23), (24): Xaa is A or G or is absent
XXVPARLSNITIQIMXXXXXXXXXIGEMSDMVVE

SEQ ID NO: 73954 - protein, 33 aa, Artificial Sequence
  GFR-binding peptide
  MOD_RES (1), (32): Xaa is C or S
XAPVKTSNITMQIMDNGRVLLLGEMSMIVEEXG

SEQ ID NO: 73955 - protein, 36 aa, Artificial Sequence
  GFR-binding peptide
  MOD_RES (1), (35): Xaa is C or S
  MOD_RES (15), (16), (17), (18), (19): Xaa is A or G
  MOD_RES (20), (21), (22), (23): Xaa is A or G or is absent
XTPTKMSNITMQIMXXXXXXXXXIGEMSGMVVDRXG

SEQ ID NO: 73956 - protein, 35 aa, Artificial Sequence; identical to SEQ ID NO: 20032
  GFR-binding peptide
  MOD_RES (16), (17), (18), (19), (20): Xaa is A or G
  MOD_RES (21), (22), (23), (24): Xaa is A or G or is absent

SEQ ID NO: 73957 - protein, 39 aa, Artificial Sequence; identical to SEQ ID NO: 20033
  GFR-binding peptide
  MOD_RES (37), (39): Xaa is C or S
  MOD_RES (16), (17), (18), (19), (20): Xaa is A or G
  MOD_RES (21), (22), (23), (24): Xaa is A or G or is absent

SEQ ID NO: 73958 - protein, 33 aa, Artificial Sequence; identical to SEQ ID NO: 55971
  GFR-binding peptide
  MOD_RES (1), (2), (33): Xaa is C or S

SEQ ID NO: 73959 - protein, 39 aa, Artificial Sequence
  GFR-binding peptide
  MOD_RES (4), (5), (38): Xaa is C or S
  MOD_RES (19), (20), (21), (22), (23): Xaa is A or G
  MOD_RES (24), (25), (26), (27): Xaa is A or G or is absent
ASPXXVSQDLSNITIQIMXXXXXXXXXLGEMSMIVKSXK

SEQ ID NO: 73960 - protein, 36 aa, Artificial Sequence
  GFR-binding peptide
  MOD_RES (33), (35): Xaa is C or S
  MOD_RES (14), (15), (16), (17), (18): Xaa is A or G
  MOD_RES (19), (20), (21), (22): Xaa is A or G or is absent
VPQALSNITIQIMXXXXXXXXXLGEMSMIVRSXKXS

SEQ ID NO: 73961 - protein, 33 aa, Artificial Sequence
  GFR-binding peptide
  MOD_RES (1), (2): Xaa is C or S
XXVPARLSNITIQIMDAANNVVLGEMSDMVVEA

SEQ ID NO: 73962 - protein, 39 aa, Artificial Sequence; identical to SEQ ID NO: 20034
  GFR-binding peptide
  MOD_RES (1), (38): Xaa is C or S

SEQ ID NO: 73963 - protein, 37 aa, Artificial Sequence
  GFR-binding peptide
  MOD_RES (34), (36): Xaa is C or S
  MOD_RES (14), (15), (16), (17), (18): Xaa is A or G
  MOD_RES (19), (20), (21), (22): Xaa is A or G or is absent
APTKLSNITVQIMXXXXXXXXXLGEMSNMVVRSXGXH

SEQ ID NO: 73964 - protein, 41 aa, Artificial Sequence; identical to SEQ ID NO: 20035
  GFR-binding peptide
  MOD_RES (3), (40): Xaa is C or S

SEQ ID NO: 73965 - protein, 39 aa, Artificial Sequence; identical to SEQ ID NO: 20036
  GFR-binding peptide
  MOD_RES (6), (6): Xaa is C or S
  MOD_RES (20), (21), (22), (23), (24): Xaa is A or G
  MOD_RES (25), (26), (27), (28): Xaa is A or G or is absent

SEQ ID NO: 73966 - protein, 39 aa, Artificial Sequence; identical to SEQ ID NO: 20037
  GFR-binding peptide
  MOD_RES (3), (37), (39): Xaa is C or S

SEQ ID NO: 73967 - protein, 39 aa, Artificial Sequence; identical to SEQ ID NO: 20038
  GFR-binding peptide
  MOD_RES (4), (38): Xaa is C or S
  MOD_RES (18), (19), (20), (21), (22): Xaa is A or G
  MOD_RES (23), (24), (25), (26): Xaa is A or G or is absent

SEQ ID NO: 73968 - protein, 38 aa, Artificial Sequence
  GFR-binding peptide
  MOD_RES (5), (6), (38): Xaa is C or S
SAGPXXTPTKMSNITMQIMNDKQQIIIGEMSGMVVDRX

SEQ ID NO: 73969 - protein, 33 aa, Artificial Sequence
  GFR-binding peptide
  MOD_RES (1), (1): Xaa is C or S
  MOD_RES (15), (16), (17), (18), (19): Xaa is A or G
  MOD_RES (20), (21), (22), (23): Xaa is A or G or is absent
XVPTRLSNITIQIMXXXXXXXXXIGEMSDMVVE

SEQ ID NO: 73970 - protein, 34 aa, Artificial Sequence; identical to SEQ ID NO: 55986
  GFR-binding peptide
  MOD_RES (1), (2), (33): Xaa is C or S

SEQ ID NO: 73971 - protein, 36 aa, Artificial Sequence
  GFR-binding peptide
  MOD_RES (1), (2), (33), (35): Xaa is C or S
XXVPQALSNITIQIMVGRKPKVLGEMSMIVRSXKXS

SEQ ID NO: 73972 - protein, 38 aa, Artificial Sequence; identical to SEQ ID NO: 53592
  GFR-binding peptide
  MOD_RES (3), (4), (36), (38): Xaa is C or S

SEQ ID NO: 73973 - protein, 38 aa, Artificial Sequence; identical to SEQ ID NO: 20039
  GFR-binding peptide
  MOD_RES (37), (37): Xaa is C or S

SEQ ID NO: 73974 - protein, 35 aa, Artificial Sequence; identical to SEQ ID NO: 20040
  GFR-binding peptide
  MOD_RES (15), (16), (17), (18), (19): Xaa is A or G
  MOD_RES (20), (21), (22), (23): Xaa is A or G or is absent

SEQ ID NO: 73975 - protein, 40 aa, Artificial Sequence; identical to SEQ ID NO: 20042
  GFR-binding peptide
  MOD_RES (1), (38), (40): Xaa is C or S
  MOD_RES (17), (18), (19), (20), (21): Xaa is A or G
  MOD_RES (22), (23), (24), (25): Xaa is A or G or is absent

SEQ ID NO: 73976 - protein, 39 aa, Artificial Sequence; identical to SEQ ID NO: 20043
  GFR-binding peptide
  MOD_RES (36), (38): Xaa is C or S
  MOD_RES (15), (16), (17), (18), (19): Xaa is A or G
  MOD_RES (20), (21), (22), (23): Xaa is A or G or is absent

SEQ ID NO: 73977 - protein, 35 aa, Artificial Sequence
  GFR-binding peptide
  MOD_RES (1), (32), (34): Xaa is C or S
XAPVKTSNITMQIMDNGRVLLLGEMSMIVEEXGXL

SEQ ID NO: 73978 - protein, 34 aa, Artificial Sequence; identical to SEQ ID NO: 20048
  GFR-binding peptide
  MOD_RES (15), (16), (17), (18), (19): Xaa is A or G
  MOD_RES (20), (21), (22), (23): Xaa is A or G or is absent

SEQ ID NO: 73979 - protein, 39 aa, Artificial Sequence; identical to SEQ ID NO: 20049
  GFR-binding peptide
  MOD_RES (2), (39): Xaa is C or S

SEQ ID NO: 73980 - protein, 43 aa, Artificial Sequence
  GFR-binding peptide
  MOD_RES (5), (6), (40), (42): Xaa is C or S
  MOD_RES (20), (21), (22), (23), (24): Xaa is A or G
  MOD_RES (25), (26), (27), (28): Xaa is A or G or is absent
TPPTXXVPTRLSNITIQIMXXXXXXXXXLGEMSDMVVESXGXR

SEQ ID NO: 73981 - protein, 42 aa, Artificial Sequence; identical to SEQ ID NO: 20050
  GFR-binding peptide
  MOD_RES (5), (42): Xaa is C or S

SEQ ID NO: 73982 - protein, 33 aa, Artificial Sequence; identical to SEQ ID NO: 20056
  GFR-binding peptide
  MOD_RES (14), (15), (16), (17), (18): Xaa is A or G
  MOD_RES (19), (20), (21), (22): Xaa is A or G or is absent

SEQ ID NO: 73983 - protein, 37 aa, Artificial Sequence
  GFR-binding peptide
  MOD_RES (34), (36): Xaa is C or S
  MOD_RES (14), (15), (16), (17), (18): Xaa is A or G
  MOD_RES (19), (20), (21), (22): Xaa is A or G or is absent
TPTKMSNITMQIMXXXXXXXXXLGEMSGMVVDRXGXS

SEQ ID NO: 73984 - protein, 30 aa, Artificial Sequence; identical to SEQ ID NO: 53610
  GFR-binding peptide

SEQ ID NO: 73985 - protein, 32 aa, Artificial Sequence
  GFR-binding peptide
  MOD_RES (1), (32): Xaa is C or S
XVSQDLSNITIQIMIGKTPKILGEMSMIVKSX

SEQ ID NO: 73986 - protein, 36 aa, Artificial Sequence; identical to SEQ ID NO: 20057
  GFR-binding peptide
  MOD_RES (2), (36): Xaa is C or S
  MOD_RES (16), (17), (18), (19), (20): Xaa is A or G
  MOD_RES (21), (22), (23), (24): Xaa is A or G or is absent

SEQ ID NO: 73987 - protein, 36 aa, Artificial Sequence; identical to SEQ ID NO: 53613
  GFR-binding peptide
  MOD_RES (3), (4), (35): Xaa is C or S

SEQ ID NO: 73988 - protein, 40 aa, Artificial Sequence; identical to SEQ ID NO: 20058
  GFR-binding peptide
  MOD_RES (3), (37), (39): Xaa is C or S

SEQ ID NO: 73989 - protein, 38 aa, Artificial Sequence; identical to SEQ ID NO: 56005
  GFR-binding peptide
  MOD_RES (4), (5), (37): Xaa is C or S

SEQ ID NO: 73990 - protein, 42 aa, Artificial Sequence; identical to SEQ ID NO: 20059
  GFR-binding peptide
  MOD_RES (5), (39), (41): Xaa is C or S
  MOD_RES (19), (20), (21), (22), (23): Xaa is A or G
  MOD_RES (24), (25), (26), (27): Xaa is A or G or is absent

SEQ ID NO: 73991 - protein, 34 aa, Artificial Sequence; identical to SEQ ID NO: 20060
  GFR-binding peptide
  MOD_RES (16), (17), (18), (19), (20): Xaa is A or G
  MOD_RES (21), (22), (23), (24): Xaa is A or G or is absent

SEQ ID NO: 73992 - protein, 35 aa, Artificial Sequence; identical to SEQ ID NO: 53620
  GFR-binding peptide
  MOD_RES (32), (34): Xaa is C or S

SEQ ID NO: 73993 - protein, 35 aa, Artificial Sequence
  GFR-binding peptide
  MOD_RES (1), (2): Xaa is C or S
  MOD_RES (16), (17), (18), (19), (20): Xaa is A or G
  MOD_RES (21), (22), (23), (24): Xaa is A or G or is absent
XXVPTRLSNITIQIMXXXXXXXXXIGEMSDMVVES

SEQ ID NO: 73994 - protein, 35 aa, Artificial Sequence; identical to SEQ ID NO: 20061
  GFR-binding peptide
  MOD_RES (16), (17), (18), (19), (20): Xaa is A or G
  MOD_RES (21), (22), (23), (24): Xaa is A or G or is absent

SEQ ID NO: 73995 - protein, 43 aa, Artificial Sequence; identical to SEQ ID NO: 20062
  GFR-binding peptide
  MOD_RES (3), (40), (42): Xaa is C or S
  MOD_RES (19), (20), (21), (22), (23): Xaa is A or G
  MOD_RES (24), (25), (26), (27): Xaa is A or G or is absent

SEQ ID NO: 73996 - protein, 39 aa, Artificial Sequence; identical to SEQ ID NO: 20064
  GFR-binding peptide
  MOD_RES (2), (36), (38): Xaa is C or S

SEQ ID NO: 73997 - protein, 36 aa, Artificial Sequence; identical to SEQ ID NO: 20065
  GFR-binding peptide
  MOD_RES (2), (36): Xaa is C or S
  MOD_RES (16), (17), (18), (19), (20): Xaa is A or G
  MOD_RES (21), (22), (23), (24): Xaa is A or G or is absent

SEQ ID NO: 73998 - protein, 38 aa, Artificial Sequence
  GFR-binding peptide
  MOD_RES (3), (4), (35), (37): Xaa is C or S
SPXXVPQDLSNITIQIMVGRTPKVLGEMSMVVKSXKXS

SEQ ID NO: 73999 - protein, 33 aa, Artificial Sequence
  GFR-binding peptide
  MOD_RES (1), (1): Xaa is C or S
  MOD_RES (15), (16), (17), (18), (19): Xaa is A or G
  MOD_RES (20), (21), (22), (23): Xaa is A or G or is absent
XVPTRLSNITIQIMXXXXXXXXXLGEMSDMVVE

SEQ ID NO: 74000 - protein, 34 aa, Artificial Sequence
  GFR-binding peptide
  MOD_RES (1), (34): Xaa is C or S
  MOD_RES (15), (16), (17), (18), (19): Xaa is A or G
  MOD_RES (20), (21), (22), (23): Xaa is A or G or is absent
XVSQDLSNITIQIMXXXXXXXXXLGEMSMIVKSX

SEQ ID NO: 74001 - protein, 39 aa, Artificial Sequence; identical to SEQ ID NO: 20069
  GFR-binding peptide
  MOD_RES (3), (37), (39): Xaa is C or S
  MOD_RES (17), (18), (19), (20), (21): Xaa is A or G
  MOD_RES (22), (23), (24), (25): Xaa is A or G or is absent

SEQ ID NO: 74002 - protein, 40 aa, Artificial Sequence; identical to SEQ ID NO: 20070
  GFR-binding peptide
  MOD_RES (1), (38), (40): Xaa is C or S

SEQ ID NO: 74003 - protein, 39 aa, Artificial Sequence
  GFR-binding peptide
  MOD_RES (5), (6), (38): Xaa is C or S
APASXXVPARLSNITIQIMDAANNVVIGEMSDMVVEAXG

SEQ ID NO: 74004 - protein, 44 aa, Artificial Sequence; identical to SEQ ID NO: 20072
  GFR-binding peptide
  MOD_RES (5), (42), (44): Xaa is C or S

SEQ ID NO: 74005 - protein, 33 aa, Artificial Sequence; identical to SEQ ID NO: 53639
  GFR-binding peptide
  MOD_RES (33), (33): Xaa is C or S
  MOD_RES (14), (15), (16), (17), (18): Xaa is A or G
  MOD_RES (19), (20), (21), (22): Xaa is A or G or is absent

SEQ ID NO: 74006 - protein, 42 aa, Artificial Sequence; identical to SEQ ID NO: 20073
  GFR-binding peptide
  MOD_RES (7), (41): Xaa is C or S
  MOD_RES (21), (22), (23), (24), (25): Xaa is A or G
  MOD_RES (26), (27), (28), (29): Xaa is A or G or is absent

SEQ ID NO: 74007 - protein, 34 aa, Artificial Sequence
  GFR-binding peptide
  MOD_RES (1), (2), (34): Xaa is C or S
XXTPTKMSNITMQIMNDKQQIILGEMSGMVVDRX

SEQ ID NO: 74008 - protein, 42 aa, Artificial Sequence
  GFR-binding peptide
  MOD_RES (6), (7), (41): Xaa is C or S
  MOD_RES (21), (22), (23), (24), (25): Xaa is A or G
  MOD_RES (26), (27), (28), (29): Xaa is A or G or is absent
GSAGPXXTPTKMSNITMQIMXXXXXXXXXLGEMSGMVVDRXG

SEQ ID NO: 74009 - protein, 34 aa, Artificial Sequence
  GFR-binding peptide
  MOD_RES (1), (2), (34): Xaa is C or S
XXTPTKMSNITMQIMNDKQQIIIGEMSGMVVDRX

SEQ ID NO: 74010 - protein, 33 aa, Artificial Sequence
  GFR-binding peptide
  MOD_RES (1), (33): Xaa is C or S
XVPARLSNITIQIMDAANNVVIGEMSDMVVEAX

SEQ ID NO: 74011 - protein, 37 aa, Artificial Sequence
  GFR-binding peptide
  MOD_RES (1), (2), (34), (36): Xaa is C or S
XXTPTKMSNITMQIMNDKQQIILGEMSGMVVDRXGXS

SEQ ID NO: 74012 - protein, 37 aa, Artificial Sequence
  GFR-binding peptide
  MOD_RES (1), (35), (37): Xaa is C or S
  MOD_RES (15), (16), (17), (18), (19): Xaa is A or G
  MOD_RES (20), (21), (22), (23): Xaa is A or G or is absent
XVPARLSNITIQIMXXXXXXXXXIGEMSDMVVEAXGX

SEQ ID NO: 74013 - protein, 35 aa, Artificial Sequence
  GFR-binding peptide
  MOD_RES (1), (35): Xaa is C or S
  MOD_RES (15), (16), (17), (18), (19): Xaa is A or G
  MOD_RES (20), (21), (22), (23): Xaa is A or G or is absent
XVPTRLSNITIQIMXXXXXXXXXLGEMSDMVVESX

SEQ ID NO: 74014 - protein, 37 aa, Artificial Sequence; identical to SEQ ID NO: 20074
  GFR-binding peptide
  MOD_RES (3), (3): Xaa is C or S

SEQ ID NO: 74015 - protein, 35 aa, Artificial Sequence
  GFR-binding peptide
  MOD_RES (1), (35): Xaa is C or S
  MOD_RES (15), (16), (17), (18), (19): Xaa is A or G
  MOD_RES (20), (21), (22), (23): Xaa is A or G or is absent
XVPTRLSNITIQIMXXXXXXXXXIGEMSDMVVESX

SEQ ID NO: 74016 - protein, 37 aa, Artificial Sequence; identical to SEQ ID NO: 20076
  GFR-binding peptide
  MOD_RES (3), (3): Xaa is C or S

SEQ ID NO: 74017 - protein, 33 aa, Artificial Sequence
  GFR-binding peptide
  MOD_RES (1), (33): Xaa is C or S
XVPARLSNITIQIMDAANNVVLGEMSDMVVEAX

SEQ ID NO: 74018 - protein, 36 aa, Artificial Sequence; identical to SEQ ID NO: 20077
  GFR-binding peptide
  MOD_RES (35), (35): Xaa is C or S
  MOD_RES (14), (15), (16), (17), (18): Xaa is A or G
  MOD_RES (19), (20), (21), (22): Xaa is A or G or is absent

SEQ ID NO: 74019 - protein, 37 aa, Artificial Sequence
  GFR-binding peptide
  MOD_RES (3), (4), (35), (37): Xaa is C or S
STXXAPVKTSNITMQIMDNGRVLLLGEMSMIVEEXGX

SEQ ID NO: 74020 - protein, 35 aa, Artificial Sequence
  GFR-binding peptide
  MOD_RES (1), (34): Xaa is C or S
  MOD_RES (15), (16), (17), (18), (19): Xaa is A or G
  MOD_RES (20), (21), (22), (23): Xaa is A or G or is absent
XVPQALSNITIQIMXXXXXXXXXLGEMSMIVRSXK

SEQ ID NO: 74021 - protein, 32 aa, Artificial Sequence
  GFR-binding peptide
  MOD_RES (32), (32): Xaa is C or S
VPTRLSNITIQIMDSANNVVLGEMSDMVVESX

SEQ ID NO: 74022 - protein, 41 aa, Artificial Sequence; identical to SEQ ID NO: 20078
  GFR-binding peptide
  MOD_RES (2), (39), (41): Xaa is C or S

SEQ ID NO: 74023 - protein, 39 aa, Artificial Sequence
  GFR-binding peptide
  MOD_RES (4), (5), (37), (39): Xaa is C or S
PPTXXVPTRLSNITIQIMDSANNVVIGEMSDMVVESXGX

SEQ ID NO: 74024 - protein, 39 aa, Artificial Sequence
  GFR-binding peptide
  MOD_RES (3), (4), (36), (38): Xaa is C or S
PTXXVPTRLSNITIQIMDSANNVVLGEMSDMVVESXGXR

SEQ ID NO: 74025 - protein, 36 aa, Artificial Sequence
  GFR-binding peptide
  MOD_RES (3), (4): Xaa is C or S
  MOD_RES (18), (19), (20), (21), (22): Xaa is A or G
  MOD_RES (23), (24), (25), (26): Xaa is A or G or is absent
GPXXTPTKMSNITMQIMXXXXXXXXXIGEMSGMVVD

SEQ ID NO: 74026 - protein, 36 aa, Artificial Sequence
  GFR-binding peptide
  MOD_RES (1), (2), (33), (35): Xaa is C or S
XXVPQDLSNITIQIMVGRTPKVLGEMSMVVKSXKXS

SEQ ID NO: 74027 - protein, 41 aa, Artificial Sequence; identical to SEQ ID NO: 20081
  GFR-binding peptide
  MOD_RES (3), (40): Xaa is C or S

SEQ ID NO: 74028 - protein, 33 aa, Artificial Sequence
  GFR-binding peptide
  MOD_RES (33), (33): Xaa is C or S
  MOD_RES (14), (15), (16), (17), (18): Xaa is A or G
  MOD_RES (19), (20), (21), (22): Xaa is A or G or is absent
VPQDLSNITIQIMXXXXXXXXXLGEMSMVVKSX

SEQ ID NO: 74029 - protein, 37 aa, Artificial Sequence; identical to SEQ ID NO: 20083
  GFR-binding peptide
  MOD_RES (2), (2): Xaa is C or S
  MOD_RES (18), (19), (20), (21), (22): Xaa is A or G
  MOD_RES (23), (24), (25), (26): Xaa is A or G or is absent

SEQ ID NO: 74030 - protein, 37 aa, Artificial Sequence; identical to SEQ ID NO: 53673
  GFR-binding peptide
  MOD_RES (4), (5): Xaa is C or S
  MOD_RES (19), (20), (21), (22), (23): Xaa is A or G
  MOD_RES (24), (25), (26), (27): Xaa is A or G or is absent

SEQ ID NO: 74031 - protein, 38 aa, Artificial Sequence; identical to SEQ ID NO: 20086
  GFR-binding peptide
  MOD_RES (4), (38): Xaa is C or S

SEQ ID NO: 74032 - protein, 35 aa, Artificial Sequence
  GFR-binding peptide
  MOD_RES (2), (3): Xaa is C or S
  MOD_RES (17), (18), (19), (20), (21): Xaa is A or G
  MOD_RES (22), (23), (24), (25): Xaa is A or G or is absent
TXXAPVKTSNITMQIMXXXXXXXXXIGEMSMIVEE

SEQ ID NO: 74033 - protein, 38 aa, Artificial Sequence; identical to SEQ ID NO: 20089
  GFR-binding peptide
  MOD_RES (2), (36), (38): Xaa is C or S
  MOD_RES (16), (17), (18), (19), (20): Xaa is A or G
  MOD_RES (21), (22), (23), (24): Xaa is A or G or is absent

SEQ ID NO: 74034 - protein, 37 aa, Artificial Sequence
  GFR-binding peptide
  MOD_RES (5), (6): Xaa is C or S
TPPTXXVPTRLSNITIQIMDSANNVVLGEMSDMVVES

SEQ ID NO: 74035 - protein, 36 aa, Artificial Sequence; identical to SEQ ID NO: 20091
  GFR-binding peptide
  MOD_RES (34), (36): Xaa is C or S
  MOD_RES (14), (15), (16), (17), (18): Xaa is A or G
  MOD_RES (19), (20), (21), (22): Xaa is A or G or is absent

SEQ ID NO: 74036 - protein, 41 aa, Artificial Sequence; identical to SEQ ID NO: 20092
  GFR-binding peptide
  MOD_RES (5), (39), (41): Xaa is C or S
  MOD_RES (19), (20), (21), (22), (23): Xaa is A or G
  MOD_RES (24), (25), (26), (27): Xaa is A or G or is absent

SEQ ID NO: 74037 - protein, 39 aa, Artificial Sequence; identical to SEQ ID NO: 20096
  GFR-binding peptide
  MOD_RES (36), (38): Xaa is C or S
  MOD_RES (15), (16), (17), (18), (19): Xaa is A or G
  MOD_RES (20), (21), (22), (23): Xaa is A or G or is absent

SEQ ID NO: 74038 - protein, 41 aa, Artificial Sequence
  GFR-binding peptide
  MOD_RES (5), (6), (40): Xaa is C or S
  MOD_RES (20), (21), (22), (23), (24): Xaa is A or G
  MOD_RES (25), (26), (27), (28): Xaa is A or G or is absent
APASXXVPARLSNITIQIMXXXXXXXXXLGEMSDMVVEAXG

SEQ ID NO: 74039 - protein, 33 aa, Artificial Sequence; identical to SEQ ID NO: 53683
  GFR-binding peptide
  MOD_RES (14), (15), (16), (17), (18): Xaa is A or G
  MOD_RES (19), (20), (21), (22): Xaa is A or G or is absent

SEQ ID NO: 74040 - protein, 35 aa, Artificial Sequence; identical to SEQ ID NO: 20097
  GFR-binding peptide

SEQ ID NO: 74041 - protein, 41 aa, Artificial Sequence; identical to SEQ ID NO: 53684
  GFR-binding peptide
  MOD_RES (5), (6), (38), (40): Xaa is C or S

SEQ ID NO: 74042 - protein, 38 aa, Artificial Sequence
  GFR-binding peptide
  MOD_RES (6), (7): Xaa is C or S
STPPTXXVPTRLSNITIQIMDSANNVVIGEMSDMVVES

SEQ ID NO: 74043 - protein, 40 aa, Artificial Sequence; identical to SEQ ID NO: 20098
  GFR-binding peptide
  MOD_RES (5), (5): Xaa is C or S
  MOD_RES (21), (22), (23), (24), (25): Xaa is A or G
  MOD_RES (26), (27), (28), (29): Xaa is A or G or is absent

SEQ ID NO: 74044 - protein, 35 aa, Artificial Sequence; identical to SEQ ID NO: 56051
  GFR-binding peptide
  MOD_RES (1), (2), (33), (35): Xaa is C or S

SEQ ID NO: 74045 - protein, 41 aa, Artificial Sequence
  GFR-binding peptide
  MOD_RES (4), (5), (39), (41): Xaa is C or S
  MOD_RES (19), (20), (21), (22), (23): Xaa is A or G
  MOD_RES (24), (25), (26), (27): Xaa is A or G or is absent
PKPXXAPTKLSNITVQIMXXXXXXXXXLGEMSNMVVRSXGX

SEQ ID NO: 74046 - protein, 43 aa, Artificial Sequence; identical to SEQ ID NO: 20100
  GFR-binding peptide
  MOD_RES (5), (42): Xaa is C or S
  MOD_RES (21), (22), (23), (24), (25): Xaa is A or G
  MOD_RES (26), (27), (28), (29): Xaa is A or G or is absent

SEQ ID NO: 74047 - protein, 35 aa, Artificial Sequence
  GFR-binding peptide
  MOD_RES (1), (2), (35): Xaa is C or S
  MOD_RES (16), (17), (18), (19), (20): Xaa is A or G
  MOD_RES (21), (22), (23), (24): Xaa is A or G or is absent
XXAPVKTSNITMQIMXXXXXXXXXLGEMSMIVEEX

SEQ ID NO: 74048 - protein, 41 aa, Artificial Sequence; identical to SEQ ID NO: 20101
  GFR-binding peptide
  MOD_RES (4), (41): Xaa is C or S
  MOD_RES (20), (21), (22), (23), (24): Xaa is A or G
  MOD_RES (25), (26), (27), (28): Xaa is A or G or is absent

SEQ ID NO: 74049 - protein, 38 aa, Artificial Sequence; identical to SEQ ID NO: 56061
  GFR-binding peptide
  MOD_RES (5), (6), (37): Xaa is C or S

SEQ ID NO: 74050 - protein, 38 aa, Artificial Sequence
  GFR-binding peptide
  MOD_RES (2), (3), (35), (37): Xaa is C or S
TXXVPTRLSNITIQIMDSANNVVLGEMSDMVVESXGXR

SEQ ID NO: 74051 - protein, 37 aa, Artificial Sequence
  GFR-binding peptide
  MOD_RES (4), (5): Xaa is C or S
  MOD_RES (19), (20), (21), (22), (23): Xaa is A or G
  MOD_RES (24), (25), (26), (27): Xaa is A or G or is absent
AGPXXTPTKMSNITMQIMXXXXXXXXXIGEMSGMVVD

SEQ ID NO: 74052 - protein, 41 aa, Artificial Sequence
  GFR-binding peptide
  MOD_RES (5), (6), (39), (41): Xaa is C or S
  MOD_RES (20), (21), (22), (23), (24): Xaa is A or G
  MOD_RES (25), (26), (27), (28): Xaa is A or G or is absent
VPSTXXAPVKTSNITMQIMXXXXXXXXXIGEMSMIVEEXGX

SEQ ID NO: 74053 - protein, 38 aa, Artificial Sequence; identical to SEQ ID NO: 20103
  GFR-binding peptide
  MOD_RES (37), (37): Xaa is C or S
  MOD_RES (16), (17), (18), (19), (20): Xaa is A or G
  MOD_RES (21), (22), (23), (24): Xaa is A or G or is absent

SEQ ID NO: 74054 - protein, 34 aa, Artificial Sequence
  GFR-binding peptide
  MOD_RES (1), (2), (34): Xaa is C or S
XXVPARLSNITIQIMDAANNVVLGEMSDMVVEAX

SEQ ID NO: 74055 - protein, 41 aa, Artificial Sequence; identical to SEQ ID NO: 20106
  GFR-binding peptide
  MOD_RES (3), (40): Xaa is C or S
  MOD_RES (19), (20), (21), (22), (23): Xaa is A or G
  MOD_RES (24), (25), (26), (27): Xaa is A or G or is absent

SEQ ID NO: 74056 - protein, 35 aa, Artificial Sequence
  GFR-binding peptide
  MOD_RES (1), (33), (35): Xaa is C or S
XTPTKMSNITMQIMNDKQQIIIGEMSGMVVDRXGX

SEQ ID NO: 74057 - protein, 40 aa, Artificial Sequence
  GFR-binding peptide
  MOD_RES (6), (7), (39): Xaa is C or S
GSAGPXXTPTKMSNITMQIMNDKQQIILGEMSGMVVDRXG

SEQ ID NO: 74058 - protein, 38 aa, Artificial Sequence
  GFR-binding peptide
  MOD_RES (4), (5), (37): Xaa is C or S
PPTXXVPTRLSNITIQIMDSANNVVLGEMSDMVVESXG

SEQ ID NO: 74059 - protein, 39 aa, Artificial Sequence; identical to SEQ ID NO: 20108
  GFR-binding peptide
  MOD_RES (4), (4): Xaa is C or S

SEQ ID NO: 74060 - protein, 37 aa, Artificial Sequence
  GFR-binding peptide
  MOD_RES (4), (5): Xaa is C or S
  MOD_RES (19), (20), (21), (22), (23): Xaa is A or G
  MOD_RES (24), (25), (26), (27): Xaa is A or G or is absent
PASXXVPARLSNITIQIMXXXXXXXXXIGEMSDMVVE

SEQ ID NO: 74061 - protein, 33 aa, Artificial Sequence
  GFR-binding peptide
  MOD_RES (1), (33): Xaa is C or S
XTPTKMSNITMQIMNDKQQIIIGEMSGMVVDRX

SEQ ID NO: 74062 - protein, 37 aa, Artificial Sequence
  GFR-binding peptide
  MOD_RES (3), (4), (35), (37): Xaa is C or S
SPXXVSQDLSNITIQIMIGKTPKILGEMSMIVKSXKX

SEQ ID NO: 74063 - protein, 37 aa, Artificial Sequence; identical to SEQ ID NO: 20111
  GFR-binding peptide
  MOD_RES (36), (36): Xaa is C or S

SEQ ID NO: 74064 - protein, 40 aa, Artificial Sequence
  GFR-binding peptide
  MOD_RES (4), (5), (39): Xaa is C or S
  MOD_RES (19), (20), (21), (22), (23): Xaa is A or G
  MOD_RES (24), (25), (26), (27): Xaa is A or G or is absent
PASXXVPARLSNITIQIMXXXXXXXXXLGEMSDMVVEAXG

SEQ ID NO: 74065 - protein, 42 aa, Artificial Sequence; identical to SEQ ID NO: 20112
  GFR-binding peptide
  MOD_RES (7), (41): Xaa is C or S

SEQ ID NO: 74066 - protein, 41 aa, Artificial Sequence; identical to SEQ ID NO: 20113
  GFR-binding peptide
  MOD_RES (1), (38), (40): Xaa is C or S
  MOD_RES (17), (18), (19), (20), (21): Xaa is A or G
  MOD_RES (22), (23), (24), (25): Xaa is A or G or is absent

SEQ ID NO: 74067 - protein, 40 aa, Artificial Sequence; identical to SEQ ID NO: 56076
  GFR-binding peptide
  MOD_RES (4), (5), (38), (40): Xaa is C or S
  MOD_RES (19), (20), (21), (22), (23): Xaa is A or G
  MOD_RES (24), (25), (26), (27): Xaa is A or G or is absent

SEQ ID NO: 74068 - protein, 38 aa, Artificial Sequence
  GFR-binding peptide
  MOD_RES (2), (3), (36), (38): Xaa is C or S
  MOD_RES (17), (18), (19), (20), (21): Xaa is A or G
  MOD_RES (22), (23), (24), (25): Xaa is A or G or is absent
PXXVSQDLSNITIQIMXXXXXXXXXLGEMSMIVKSXKX

SEQ ID NO: 74069 - protein, 35 aa, Artificial Sequence
  GFR-binding peptide
  MOD_RES (32), (34): Xaa is C or S
VPTRLSNITIQIMDSANNVVIGEMSDMVVESXGXR

SEQ ID NO: 74070 - protein, 40 aa, Artificial Sequence
  GFR-binding peptide
  MOD_RES (3), (4), (38), (40): Xaa is C or S
  MOD_RES (18), (19), (20), (21), (22): Xaa is A or G
  MOD_RES (23), (24), (25), (26): Xaa is A or G or is absent
ASXXVPARLSNITIQIMXXXXXXXXXIGEMSDMVVEAXGX

SEQ ID NO: 74071 - protein, 39 aa, Artificial Sequence; identical to SEQ ID NO: 56079
  GFR-binding peptide
  MOD_RES (2), (3), (36), (38): Xaa is C or S
  MOD_RES (17), (18), (19), (20), (21): Xaa is A or G
  MOD_RES (22), (23), (24), (25): Xaa is A or G or is absent

SEQ ID NO: 74072 - protein, 35 aa, Artificial Sequence; identical to SEQ ID NO: 56080
  GFR-binding peptide
  MOD_RES (3), (4): Xaa is C or S

SEQ ID NO: 74073 - protein, 36 aa, Artificial Sequence; identical to SEQ ID NO: 20114
  GFR-binding peptide
  MOD_RES (34), (36): Xaa is C or S

SEQ ID NO: 74074 - protein, 37 aa, Artificial Sequence; identical to SEQ ID NO: 20115
  GFR-binding peptide
  MOD_RES (1), (1): Xaa is C or S
  MOD_RES (17), (18), (19), (20), (21): Xaa is A or G
  MOD_RES (22), (23), (24), (25): Xaa is A or G or is absent

SEQ ID NO: 74075 - protein, 34 aa, Artificial Sequence
  GFR-binding peptide
  MOD_RES (34), (34): Xaa is C or S
  MOD_RES (14), (15), (16), (17), (18): Xaa is A or G
  MOD_RES (19), (20), (21), (22): Xaa is A or G or is absent
VPTRLSNITIQIMXXXXXXXXXIGEMSDMVVESX

SEQ ID NO: 74076 - protein, 39 aa, Artificial Sequence; identical to SEQ ID NO: 53719
  GFR-binding peptide
  MOD_RES (5), (6): Xaa is C or S
  MOD_RES (20), (21), (22), (23), (24): Xaa is A or G
  MOD_RES (25), (26), (27), (28): Xaa is A or G or is absent

SEQ ID NO: 74077 - protein, 35 aa, Artificial Sequence; identical to SEQ ID NO: 53720
  GFR-binding peptide
  MOD_RES (4), (5): Xaa is C or S

SEQ ID NO: 74078 - protein, 40 aa, Artificial Sequence
  GFR-binding peptide
  MOD_RES (3), (4), (38), (40): Xaa is C or S
  MOD_RES (18), (19), (20), (21), (22): Xaa is A or G
  MOD_RES (23), (24), (25), (26): Xaa is A or G or is absent
GPXXTPTKMSNITMQIMXXXXXXXXXLGEMSGMVVDRXGX

SEQ ID NO: 74079 - protein, 36 aa, Artificial Sequence
  GFR-binding peptide
  MOD_RES (1), (34), (36): Xaa is C or S
  MOD_RES (15), (16), (17), (18), (19): Xaa is A or G
  MOD_RES (20), (21), (22), (23): Xaa is A or G or is absent
XAPVKTSNITMQIMXXXXXXXXXIGEMSMIVEEXGX

SEQ ID NO: 74080 - protein, 43 aa, Artificial Sequence; identical to SEQ ID NO: 20119
  GFR-binding peptide
  MOD_RES (5), (42): Xaa is C or S

SEQ ID NO: 74081 - protein, 43 aa, Artificial Sequence
  GFR-binding peptide
  MOD_RES (6), (7), (40), (42): Xaa is C or S
  MOD_RES (21), (22), (23), (24), (25): Xaa is A or G
  MOD_RES (26), (27), (28), (29): Xaa is A or G or is absent
ASASPXXVPQDLSNITIQIMXXXXXXXXXLGEMSMVVKSXKXS

SEQ ID NO: 74082 - protein, 33 aa, Artificial Sequence
  GFR-binding peptide
  MOD_RES (1), (32): Xaa is C or S
XAPVKTSNITMQIMDNGRVLLIGEMSMIVEEXG

SEQ ID NO: 74083 - protein, 39 aa, Artificial Sequence; identical to SEQ ID NO: 20124
  GFR-binding peptide
  MOD_RES (5), (5): Xaa is C or S
  MOD_RES (21), (22), (23), (24), (25): Xaa is A or G
  MOD_RES (26), (27), (28), (29): Xaa is A or G or is absent

SEQ ID NO: 74084 - protein, 40 aa, Artificial Sequence
  GFR-binding peptide
  MOD_RES (5), (6), (37), (39): Xaa is C or S
SAAPXXVPQALSNITIQIMVGRKPKVLGEMSMIVRSXKXS

SEQ ID NO: 74085 - protein, 36 aa, Artificial Sequence; identical to SEQ ID NO: 20126
  GFR-binding peptide
  MOD_RES (3), (3): Xaa is C or S

SEQ ID NO: 74086 - protein, 37 aa, Artificial Sequence
  GFR-binding peptide
  MOD_RES (6), (7): Xaa is C or S
STPPTXXVPTRLSNITIQIMDSANNVVLGEMSDMVVE

SEQ ID NO: 74087 - protein, 37 aa, Artificial Sequence; identical to SEQ ID NO: 20127
  GFR-binding peptide
  MOD_RES (37), (37): Xaa is C or S
  MOD_RES (16), (17), (18), (19), (20): Xaa is A or G
  MOD_RES (21), (22), (23), (24): Xaa is A or G or is absent

SEQ ID NO: 74088 - protein, 39 aa, Artificial Sequence; identical to SEQ ID NO: 20128
  GFR-binding peptide
  MOD_RES (5), (5): Xaa is C or S
  MOD_RES (21), (22), (23), (24), (25): Xaa is A or G
  MOD_RES (26), (27), (28), (29): Xaa is A or G or is absent

SEQ ID NO: 74089 - protein, 38 aa, Artificial Sequence
  GFR-binding peptide
  MOD_RES (3), (4), (38): Xaa is C or S
  MOD_RES (18), (19), (20), (21), (22): Xaa is A or G
  MOD_RES (23), (24), (25), (26): Xaa is A or G or is absent
GPXXTPTKMSNITMQIMXXXXXXXXXLGEMSGMVVDRX

SEQ ID NO: 74090 - protein, 43 aa, Artificial Sequence
  GFR-binding peptide
  MOD_RES (6), (7), (41), (43): Xaa is C or S
  MOD_RES (21), (22), (23), (24), (25): Xaa is A or G
  MOD_RES (26), (27), (28), (29): Xaa is A or G or is absent
HVPKPXXAPTKLSNITVQIMXXXXXXXXXIGEMSNMVVRSXGX

SEQ ID NO: 74091 - protein, 36 aa, Artificial Sequence; identical to SEQ ID NO: 20130
  GFR-binding peptide

SEQ ID NO: 74092 - protein, 32 aa, Artificial Sequence
  GFR-binding peptide
  MOD_RES (31), (31): Xaa is C or S
VPQDLSNITIQIMVGRTPKVLGEMSMVVKSXK

SEQ ID NO: 74093 - protein, 34 aa, Artificial Sequence; identical to SEQ ID NO: 56104
  GFR-binding peptide
  MOD_RES (3), (4): Xaa is C or S

SEQ ID NO: 74094 - protein, 42 aa, Artificial Sequence; identical to SEQ ID NO: 20133
  GFR-binding peptide
  MOD_RES (2), (39), (41): Xaa is C or S

SEQ ID NO: 74095 - protein, 34 aa, Artificial Sequence; identical to SEQ ID NO: 20135
  GFR-binding peptide
  MOD_RES (16), (17), (18), (19), (20): Xaa is A or G
  MOD_RES (21), (22), (23), (24): Xaa is A or G or is absent

SEQ ID NO: 74096 - protein, 36 aa, Artificial Sequence; identical to SEQ ID NO: 20137
  GFR-binding peptide
  MOD_RES (1), (1): Xaa is C or S
  MOD_RES (17), (18), (19), (20), (21): Xaa is A or G
  MOD_RES (22), (23), (24), (25): Xaa is A or G or is absent

SEQ ID NO: 74097 - protein, 36 aa, Artificial Sequence; identical to SEQ ID NO: 20139
  GFR-binding peptide
  MOD_RES (3), (3): Xaa is C or S
  MOD_RES (17), (18), (19), (20), (21): Xaa is A or G
  MOD_RES (22), (23), (24), (25): Xaa is A or G or is absent

SEQ ID NO: 74098 - protein, 37 aa, Artificial Sequence
  GFR-binding peptide
  MOD_RES (3), (4), (37): Xaa is C or S
  MOD_RES (18), (19), (20), (21), (22): Xaa is A or G
  MOD_RES (23), (24), (25), (26): Xaa is A or G or is absent
APXXVPQALSNITIQIMXXXXXXXXXLGEMSMIVRSX

SEQ ID NO: 74099 - protein, 39 aa, Artificial Sequence; identical to SEQ ID NO: 56112
  GFR-binding peptide
  MOD_RES (3), (4), (37), (39): Xaa is C or S
  MOD_RES (18), (19), (20), (21), (22): Xaa is A or G
  MOD_RES (23), (24), (25), (26): Xaa is A or G or is absent

SEQ ID NO: 74100 - protein, 39 aa, Artificial Sequence; identical to SEQ ID NO: 20140
  GFR-binding peptide
  MOD_RES (3), (3): Xaa is C or S

SEQ ID NO: 74101 - protein, 40 aa, Artificial Sequence; identical to SEQ ID NO: 20141
  GFR-binding peptide
  MOD_RES (3), (40): Xaa is C or S
  MOD_RES (19), (20), (21), (22), (23): Xaa is A or G
  MOD_RES (24), (25), (26), (27): Xaa is A or G or is absent

SEQ ID NO: 74102 - protein, 39 aa, Artificial Sequence; identical to SEQ ID NO: 56119
  GFR-binding peptide
  MOD_RES (4), (5), (38): Xaa is C or S
  MOD_RES (19), (20), (21), (22), (23): Xaa is A or G
  MOD_RES (24), (25), (26), (27): Xaa is A or G or is absent

SEQ ID NO: 74103 - protein, 39 aa, Artificial Sequence
  GFR-binding peptide
  MOD_RES (4), (5), (37), (39): Xaa is C or S
PKPXXAPTKLSNITVQIMDDSSNVILGEMSNMVVRSXGX

SEQ ID NO: 74104 - protein, 38 aa, Artificial Sequence
  GFR-binding peptide
  MOD_RES (2), (3), (37): Xaa is C or S
  MOD_RES (17), (18), (19), (20), (21): Xaa is A or G
  MOD_RES (22), (23), (24), (25): Xaa is A or G or is absent
TXXVPTRLSNITIQIMXXXXXXXXXLGEMSDMVVESXG

SEQ ID NO: 74105 - protein, 35 aa, Artificial Sequence; identical to SEQ ID NO: 20142
  GFR-binding peptide
  MOD_RES (35), (35): Xaa is C or S
  MOD_RES (14), (15), (16), (17), (18): Xaa is A or G
  MOD_RES (19), (20), (21), (22): Xaa is A or G or is absent

SEQ ID NO: 74106 - protein, 38 aa, Artificial Sequence
  GFR-binding peptide
  MOD_RES (4), (5), (38): Xaa is C or S
  MOD_RES (19), (20), (21), (22), (23): Xaa is A or G
  MOD_RES (24), (25), (26), (27): Xaa is A or G or is absent
AAPXXVPQALSNITIQIMXXXXXXXXXLGEMSMIVRSX

SEQ ID NO: 74107 - protein, 35 aa, Artificial Sequence
  GFR-binding peptide
  MOD_RES (4), (5): Xaa is C or S
ASPXXVPQDLSNITIQIMVGRTPKVLGEMSMVVKS

SEQ ID NO: 74108 - protein, 34 aa, Artificial Sequence
  GFR-binding peptide
  MOD_RES (1), (1): Xaa is C or S
  MOD_RES (15), (16), (17), (18), (19): Xaa is A or G
  MOD_RES (20), (21), (22), (23): Xaa is A or G or is absent
XVPTRLSNITIQIMXXXXXXXXXIGEMSDMVVES

SEQ ID NO: 74109 - protein, 37 aa, Artificial Sequence
  GFR-binding peptide
  MOD_RES (6), (7): Xaa is C or S
STPPTXXVPTRLSNITIQIMDSANNVVIGEMSDMVVE

SEQ ID NO: 74110 - protein, 35 aa, Artificial Sequence; identical to SEQ ID NO: 20146
  GFR-binding peptide
  MOD_RES (34), (34): Xaa is C or S
  MOD_RES (14), (15), (16), (17), (18): Xaa is A or G
  MOD_RES (19), (20), (21), (22): Xaa is A or G or is absent

SEQ ID NO: 74111 - protein, 39 aa, Artificial Sequence; identical to SEQ ID NO: 20147
  GFR-binding peptide
  MOD_RES (5), (39): Xaa is C or S
  MOD_RES (19), (20), (21), (22), (23): Xaa is A or G
  MOD_RES (24), (25), (26), (27): Xaa is A or G or is absent

SEQ ID NO: 74112 - protein, 34 aa, Artificial Sequence
  GFR-binding peptide
  MOD_RES (33), (33): Xaa is C or S
  MOD_RES (14), (15), (16), (17), (18): Xaa is A or G
  MOD_RES (19), (20), (21), (22): Xaa is A or G or is absent
VPQALSNITIQIMXXXXXXXXXLGEMSMIVRSXK

SEQ ID NO: 74113 - protein, 37 aa, Artificial Sequence; identical to SEQ ID NO: 48857
  GFR-binding peptide
  MOD_RES (31), (32): Xaa is C or S

SEQ ID NO: 74114 - protein, 36 aa, Artificial Sequence
  GFR-binding peptide
  MOD_RES (1), (3), (36): Xaa is C or S
  MOD_RES (14), (15), (16), (17), (18): Xaa is A or G
  MOD_RES (19), (20), (21), (22): Xaa is A or G or is absent
XKXSKVIMSMEGLXXXXXXXXXMIQITINSLDQSVX

SEQ ID NO: 74115 - protein, 35 aa, Artificial Sequence
  GFR-binding peptide
  MOD_RES (31), (32): Xaa is C or S
EVVMDSMEGIVVNNASDMIQITINSLRTPVXXTPP

SEQ ID NO: 74116 - protein, 40 aa, Artificial Sequence
  GFR-binding peptide
  MOD_RES (1), (3), (36), (37): Xaa is C or S
  MOD_RES (14), (15), (16), (17), (18): Xaa is A or G
  MOD_RES (19), (20), (21), (22): Xaa is A or G or is absent
XKXSKVVMSMEGLXXXXXXXXXMIQITINSLDQPVXXPSA

SEQ ID NO: 74117 - protein, 37 aa, Artificial Sequence; identical to SEQ ID NO: 17048
  GFR-binding peptide
  MOD_RES (1), (1): Xaa is C or S
  MOD_RES (14), (15), (16), (17), (18): Xaa is A or G
  MOD_RES (19), (20), (21), (22): Xaa is A or G or is absent

SEQ ID NO: 74118 - protein, 37 aa, Artificial Sequence
  GFR-binding peptide
  MOD_RES (32), (33): Xaa is C or S
AEVVMDSMEGLVVNNAADMIQITINSLRAPVXXSAPA

SEQ ID NO: 74119 - protein, 38 aa, Artificial Sequence; identical to SEQ ID NO: 48860
  GFR-binding peptide
  MOD_RES (33), (34): Xaa is C or S
  MOD_RES (11), (12), (13), (14), (15): Xaa is A or G
  MOD_RES (16), (17), (18), (19): Xaa is A or G or is absent

SEQ ID NO: 74120 - protein, 40 aa, Artificial Sequence
  GFR-binding peptide
  MOD_RES (2), (4), (37), (38): Xaa is C or S
  MOD_RES (15), (16), (17), (18), (19): Xaa is A or G
  MOD_RES (20), (21), (22), (23): Xaa is A or G or is absent
SXKXSKVVMSMEGLXXXXXXXXXMIQITINSLDQPVXXPS

SEQ ID NO: 74121 - protein, 38 aa, Artificial Sequence
  GFR-binding peptide
  MOD_RES (1), (3), (37), (38): Xaa is C or S
  MOD_RES (15), (16), (17), (18), (19): Xaa is A or G
  MOD_RES (20), (21), (22), (23): Xaa is A or G or is absent
XGXAEVVMDSMEGLXXXXXXXXXMIQITINSLRAPVXX

SEQ ID NO: 74122 - protein, 37 aa, Artificial Sequence
  GFR-binding peptide
  MOD_RES (31), (32): Xaa is C or S
EEVIMSMEGLLLVRGNDMIQMTINSTKVPAXXTSPVR

SEQ ID NO: 74123 - protein, 36 aa, Artificial Sequence; identical to SEQ ID NO: 17049
  GFR-binding peptide
  MOD_RES (1), (3): Xaa is C or S

SEQ ID NO: 74124 - protein, 40 aa, Artificial Sequence; identical to SEQ ID NO: 17050
  GFR-binding peptide
  MOD_RES (1), (35): Xaa is C or S
  MOD_RES (13), (14), (15), (16), (17): Xaa is A or G
  MOD_RES (18), (19), (20), (21): Xaa is A or G or is absent

SEQ ID NO: 74125 - protein, 43 aa, Artificial Sequence
  GFR-binding peptide
  MOD_RES (2), (4), (38), (39): Xaa is C or S
  MOD_RES (16), (17), (18), (19), (20): Xaa is A or G
  MOD_RES (21), (22), (23), (24): Xaa is A or G or is absent
RXGXAEVVMDSMEGIXXXXXXXXXMIQITINSLRAPVXXSAPA

SEQ ID NO: 74126 - protein, 41 aa, Artificial Sequence
  GFR-binding peptide
  MOD_RES (2), (4), (37), (38): Xaa is C or S
  MOD_RES (15), (16), (17), (18), (19): Xaa is A or G
  MOD_RES (20), (21), (22), (23): Xaa is A or G or is absent
SXKXSKVVMSMEGLXXXXXXXXXMIQITINSLDQPVXXPSA

SEQ ID NO: 74127 - protein, 43 aa, Artificial Sequence; identical to SEQ ID NO: 17051
  GFR-binding peptide
  MOD_RES (1), (3), (37): Xaa is C or S

SEQ ID NO: 74128 - protein, 35 aa, Artificial Sequence; identical to SEQ ID NO: 17052
  GFR-binding peptide
  MOD_RES (1), (35): Xaa is C or S

SEQ ID NO: 74129 - protein, 34 aa, Artificial Sequence
  GFR-binding peptide
  MOD_RES (31), (32): Xaa is C or S
EEVIMSMEGLLLVRGNDMIQMTINSTKVPAXXTS

SEQ ID NO: 74130 - protein, 42 aa, Artificial Sequence; identical to SEQ ID NO: 17053
  GFR-binding peptide
  MOD_RES (2), (4), (41): Xaa is C or S
  MOD_RES (17), (18), (19), (20), (21): Xaa is A or G
  MOD_RES (22), (23), (24), (25): Xaa is A or G or is absent

SEQ ID NO: 74131 - protein, 38 aa, Artificial Sequence; identical to SEQ ID NO: 17054
  GFR-binding peptide
  MOD_RES (1), (3): Xaa is C or S
  MOD_RES (16), (17), (18), (19), (20): Xaa is A or G
  MOD_RES (21), (22), (23), (24): Xaa is A or G or is absent

SEQ ID NO: 74132 - protein, 41 aa, Artificial Sequence; identical to SEQ ID NO: 17055
  GFR-binding peptide
  MOD_RES (1), (3), (40): Xaa is C or S
  MOD_RES (16), (17), (18), (19), (20): Xaa is A or G
  MOD_RES (21), (22), (23), (24): Xaa is A or G or is absent

SEQ ID NO: 74133 - protein, 38 aa, Artificial Sequence
  GFR-binding peptide
  MOD_RES (33), (34): Xaa is C or S
  MOD_RES (11), (12), (13), (14), (15): Xaa is A or G
  MOD_RES (16), (17), (18), (19): Xaa is A or G or is absent
EVVMDSMEGIXXXXXXXXXMIQITINSLRTPVXXTPPT

SEQ ID NO: 74134 - protein, 38 aa, Artificial Sequence
  GFR-binding peptide
  MOD_RES (2), (35), (36): Xaa is C or S
  MOD_RES (13), (14), (15), (16), (17): Xaa is A or G
  MOD_RES (18), (19), (20), (21): Xaa is A or G or is absent
KXSKVVMSMEGLXXXXXXXXXMIQITINSLDQPVXXPS

SEQ ID NO: 74135 - protein, 32 aa, Artificial Sequence; identical to SEQ ID NO: 48882
  GFR-binding peptide
  MOD_RES (1), (32): Xaa is C or S

SEQ ID NO: 74136 - protein, 43 aa, Artificial Sequence
  GFR-binding peptide
  MOD_RES (1), (3), (37), (38): Xaa is C or S
  MOD_RES (15), (16), (17), (18), (19): Xaa is A or G
  MOD_RES (20), (21), (22), (23): Xaa is A or G or is absent
XGXSEVVMDSMEGLXXXXXXXXXMIQITINSLRTPVXXTPPTS

SEQ ID NO: 74137 - protein, 36 aa, Artificial Sequence; identical to SEQ ID NO: 17061
  GFR-binding peptide
  MOD_RES (35), (35): Xaa is C or S
  MOD_RES (11), (12), (13), (14), (15): Xaa is A or G
  MOD_RES (16), (17), (18), (19): Xaa is A or G or is absent

SEQ ID NO: 74138 - protein, 34 aa, Artificial Sequence; identical to SEQ ID NO: 48883
  GFR-binding peptide
  MOD_RES (32), (33): Xaa is C or S

SEQ ID NO: 74139 - protein, 39 aa, Artificial Sequence
  GFR-binding peptide
  MOD_RES (33), (34): Xaa is C or S
  MOD_RES (11), (12), (13), (14), (15): Xaa is A or G
  MOD_RES (16), (17), (18), (19): Xaa is A or G or is absent
EVVMDSMEGLXXXXXXXXXMIQITINSLRTPVXXTPPTS

SEQ ID NO: 74140 - protein, 35 aa, Artificial Sequence
  GFR-binding peptide
  MOD_RES (32), (33): Xaa is C or S
AEVVMDSMEGIVVNNAADMIQITINSLRAPVXXSA

SEQ ID NO: 74141 - protein, 31 aa, Artificial Sequence
  GFR-binding peptide
AEVVMDSMEGLVVNNAADMIQITINSLRAPV

SEQ ID NO: 74142 - protein, 39 aa, Artificial Sequence
  GFR-binding peptide
  MOD_RES (2), (36), (37): Xaa is C or S
  MOD_RES (14), (15), (16), (17), (18): Xaa is A or G
  MOD_RES (19), (20), (21), (22): Xaa is A or G or is absent
GXRDVVMGSMEGIXXXXXXXXXMIQMTINSMKTPTXXPG

SEQ ID NO: 74143 - protein, 31 aa, Artificial Sequence
  GFR-binding peptide
  MOD_RES (31), (31): Xaa is C or S
EEVIMSMEGLLLVRGNDMIQMTINSTKVPAX

SEQ ID NO: 74144 - protein, 36 aa, Artificial Sequence; identical to SEQ ID NO: 17067
  GFR-binding peptide
  MOD_RES (2), (36): Xaa is C or S
  MOD_RES (14), (15), (16), (17), (18): Xaa is A or G
  MOD_RES (19), (20), (21), (22): Xaa is A or G or is absent

SEQ ID NO: 74145 - protein, 35 aa, Artificial Sequence; identical to SEQ ID NO: 17068
  GFR-binding peptide
  MOD_RES (2), (2): Xaa is C or S

SEQ ID NO: 74146 - protein, 39 aa, Artificial Sequence; identical to SEQ ID NO: 17069
  GFR-binding peptide
  MOD_RES (1), (38): Xaa is C or S

SEQ ID NO: 74147 - protein, 38 aa, Artificial Sequence; identical to SEQ ID NO: 17070
  GFR-binding peptide
  MOD_RES (1), (35): Xaa is C or S
  MOD_RES (13), (14), (15), (16), (17): Xaa is A or G
  MOD_RES (18), (19), (20), (21): Xaa is A or G or is absent

SEQ ID NO: 74148 - protein, 39 aa, Artificial Sequence
  GFR-binding peptide
  MOD_RES (2), (4), (35), (36): Xaa is C or S
SXKXSKVVMSMEGLVKPTRGVMIQITINSLDQPVXXPSA

SEQ ID NO: 74149 - protein, 38 aa, Artificial Sequence; identical to SEQ ID NO: 46345
  GFR-binding peptide
  MOD_RES (34), (35): Xaa is C or S
  MOD_RES (12), (13), (14), (15), (16): Xaa is A or G
  MOD_RES (17), (18), (19), (20): Xaa is A or G or is absent

SEQ ID NO: 74150 - protein, 39 aa, Artificial Sequence; identical to SEQ ID NO: 46350
  GFR-binding peptide
  MOD_RES (2), (4), (36), (37): Xaa is C or S

SEQ ID NO: 74151 - protein, 30 aa, Artificial Sequence
  GFR-binding peptide
EVVMDSMEGIVVNNASDMIQITINSLRTPV

SEQ ID NO: 74152 - protein, 42 aa, Artificial Sequence; identical to SEQ ID NO: 17077
  GFR-binding peptide
  MOD_RES (1), (38): Xaa is C or S
  MOD_RES (14), (15), (16), (17), (18): Xaa is A or G
  MOD_RES (19), (20), (21), (22): Xaa is A or G or is absent

SEQ ID NO: 74153 - protein, 36 aa, Artificial Sequence; identical to SEQ ID NO: 17079
  GFR-binding peptide
  MOD_RES (36), (36): Xaa is C or S

SEQ ID NO: 74154 - protein, 36 aa, Artificial Sequence
  GFR-binding peptide
  MOD_RES (2), (4), (35), (36): Xaa is C or S
LXGXEEVIMSMEGLLLVRGNDMIQMTINSTKVPAXX

SEQ ID NO: 74155 - protein, 35 aa, Artificial Sequence
  GFR-binding peptide
  MOD_RES (1), (32), (33): Xaa is C or S
XSKVVMSMEGLVKPTRGVMIQITINSLDQPVXXPS

SEQ ID NO: 74156 - protein, 33 aa, Artificial Sequence; identical to SEQ ID NO: 46355
  GFR-binding peptide
  MOD_RES (1), (33): Xaa is C or S

SEQ ID NO: 74157 - protein, 45 aa, Artificial Sequence; identical to SEQ ID NO: 17080
  GFR-binding peptide
  MOD_RES (2), (4), (41): Xaa is C or S

SEQ ID NO: 74158 - protein, 34 aa, Artificial Sequence
  GFR-binding peptide
  MOD_RES (1), (3): Xaa is C or S
XGXRDVVMGSMEGIIIQQKDNMIQMTINSMKTPT

SEQ ID NO: 74159 - protein, 39 aa, Artificial Sequence; identical to SEQ ID NO: 48918
  GFR-binding peptide
  MOD_RES (2), (4), (35), (36): Xaa is C or S

SEQ ID NO: 74160 - protein, 34 aa, Artificial Sequence; identical to SEQ ID NO: 48922
  GFR-binding peptide
  MOD_RES (1), (34): Xaa is C or S
  MOD_RES (12), (13), (14), (15), (16): Xaa is A or G
  MOD_RES (17), (18), (19), (20): Xaa is A or G or is absent

SEQ ID NO: 74161 - protein, 35 aa, Artificial Sequence; identical to SEQ ID NO: 17083
  GFR-binding peptide
  MOD_RES (35), (35): Xaa is C or S

SEQ ID NO: 74162 - protein, 42 aa, Artificial Sequence; identical to SEQ ID NO: 46365
  GFR-binding peptide
  MOD_RES (1), (3), (37), (38): Xaa is C or S
  MOD_RES (15), (16), (17), (18), (19): Xaa is A or G
  MOD_RES (20), (21), (22), (23): Xaa is A or G or is absent

SEQ ID NO: 74163 - protein, 37 aa, Artificial Sequence; identical to SEQ ID NO: 46369
  GFR-binding peptide
  MOD_RES (1), (35), (36): Xaa is C or S
  MOD_RES (13), (14), (15), (16), (17): Xaa is A or G
  MOD_RES (18), (19), (20), (21): Xaa is A or G or is absent

SEQ ID NO: 74164 - protein, 34 aa, Artificial Sequence; identical to SEQ ID NO: 17085
  GFR-binding peptide
  MOD_RES (1), (1): Xaa is C or S
  MOD_RES (13), (14), (15), (16), (17): Xaa is A or G
  MOD_RES (18), (19), (20), (21): Xaa is A or G or is absent

SEQ ID NO: 74165 - protein, 33 aa, Artificial Sequence; identical to SEQ ID NO: 17086
  GFR-binding peptide

SEQ ID NO: 74166 - protein, 42 aa, Artificial Sequence
  GFR-binding peptide
  MOD_RES (2), (4), (38), (39): Xaa is C or S
  MOD_RES (16), (17), (18), (19), (20): Xaa is A or G
  MOD_RES (21), (22), (23), (24): Xaa is A or G or is absent
HXGXSRVVMNSMEGLXXXXXXXXXMIQVTINSLKTPAXXPKP

SEQ ID NO: 74167 - protein, 33 aa, Artificial Sequence; identical to SEQ ID NO: 48926
  GFR-binding peptide
  MOD_RES (1), (1): Xaa is C or S
  MOD_RES (12), (13), (14), (15), (16): Xaa is A or G
  MOD_RES (17), (18), (19), (20): Xaa is A or G or is absent

SEQ ID NO: 74168 - protein, 44 aa, Artificial Sequence; identical to SEQ ID NO: 17087
  GFR-binding peptide
  MOD_RES (2), (4), (41): Xaa is C or S

SEQ ID NO: 74169 - protein, 40 aa, Artificial Sequence; identical to SEQ ID NO: 48929
  GFR-binding peptide
  MOD_RES (2), (35), (36): Xaa is C or S
  MOD_RES (13), (14), (15), (16), (17): Xaa is A or G
  MOD_RES (18), (19), (20), (21): Xaa is A or G or is absent

SEQ ID NO: 74170 - protein, 37 aa, Artificial Sequence
  GFR-binding peptide
  MOD_RES (34), (35): Xaa is C or S
  MOD_RES (12), (13), (14), (15), (16): Xaa is A or G
  MOD_RES (17), (18), (19), (20): Xaa is A or G or is absent
RDVVMGSMEGLXXXXXXXXXMIQMTINSMKTPTXXPG

SEQ ID NO: 74171 - protein, 39 aa, Artificial Sequence; identical to SEQ ID NO: 17089
  GFR-binding peptide
  MOD_RES (2), (36): Xaa is C or S
  MOD_RES (14), (15), (16), (17), (18): Xaa is A or G
  MOD_RES (19), (20), (21), (22): Xaa is A or G or is absent

SEQ ID NO: 74172 - protein, 38 aa, Artificial Sequence; identical to SEQ ID NO: 17090
  GFR-binding peptide
  MOD_RES (1), (3), (37): Xaa is C or S
  MOD_RES (15), (16), (17), (18), (19): Xaa is A or G
  MOD_RES (20), (21), (22), (23): Xaa is A or G or is absent

SEQ ID NO: 74173 - protein, 32 aa, Artificial Sequence
  GFR-binding peptide
  MOD_RES (1), (1): Xaa is C or S
XRDVVMGSMEGIIIQQKDNMIQMTINSMKTPT

SEQ ID NO: 74174 - protein, 42 aa, Artificial Sequence; identical to SEQ ID NO: 17093
  GFR-binding peptide
  MOD_RES (2), (39): Xaa is C or S
  MOD_RES (15), (16), (17), (18), (19): Xaa is A or G
  MOD_RES (20), (21), (22), (23): Xaa is A or G or is absent

SEQ ID NO: 74175 - protein, 35 aa, Artificial Sequence
  GFR-binding peptide
  MOD_RES (1), (3), (34), (35): Xaa is C or S
XGXEEVIMSMEGLLLVRGNDMIQMTINSTKVPAXX

SEQ ID NO: 74176 - protein, 41 aa, Artificial Sequence
  GFR-binding peptide
  MOD_RES (1), (3), (35), (36): Xaa is C or S
XGXRDVVMGSMEGLIIQQKDNMIQMTINSMKTPTXXPGASG

SEQ ID NO: 74177 - protein, 38 aa, Artificial Sequence; identical to SEQ ID NO: 46384
  GFR-binding peptide
  MOD_RES (1), (3), (34), (35): Xaa is C or S

SEQ ID NO: 74178 - protein, 40 aa, Artificial Sequence; identical to SEQ ID NO: 17097
  GFR-binding peptide
  MOD_RES (1), (35): Xaa is C or S

SEQ ID NO: 74179 - protein, 36 aa, Artificial Sequence
  GFR-binding peptide
  MOD_RES (1), (3), (35), (36): Xaa is C or S
XGXSEVVMDSMEGLVVNNASDMIQITINSLRTPVXX

SEQ ID NO: 74180 - protein, 36 aa, Artificial Sequence; identical to SEQ ID NO: 48946
  GFR-binding peptide
  MOD_RES (2), (4): Xaa is C or S
  MOD_RES (15), (16), (17), (18), (19): Xaa is A or G
  MOD_RES (20), (21), (22), (23): Xaa is A or G or is absent

SEQ ID NO: 74181 - protein, 37 aa, Artificial Sequence; identical to SEQ ID NO: 17098
  GFR-binding peptide
  MOD_RES (2), (4): Xaa is C or S
  MOD_RES (16), (17), (18), (19), (20): Xaa is A or G
  MOD_RES (21), (22), (23), (24): Xaa is A or G or is absent

SEQ ID NO: 74182 - protein, 37 aa, Artificial Sequence; identical to SEQ ID NO: 17100
  GFR-binding peptide
  MOD_RES (35), (35): Xaa is C or S

SEQ ID NO: 74183 - protein, 39 aa, Artificial Sequence
  GFR-binding peptide
  MOD_RES (1), (3), (37), (38): Xaa is C or S
  MOD_RES (15), (16), (17), (18), (19): Xaa is A or G
  MOD_RES (20), (21), (22), (23): Xaa is A or G or is absent
XGXAEVVMDSMEGIXXXXXXXXXMIQITINSLRAPVXXS

SEQ ID NO: 74184 - protein, 34 aa, Artificial Sequence; identical to SEQ ID NO: 46391
  GFR-binding peptide
  MOD_RES (2), (2): Xaa is C or S
  MOD_RES (13), (14), (15), (16), (17): Xaa is A or G
  MOD_RES (18), (19), (20), (21): Xaa is A or G or is absent

SEQ ID NO: 74185 - protein, 42 aa, Artificial Sequence
  GFR-binding peptide
  MOD_RES (2), (36), (37): Xaa is C or S
  MOD_RES (14), (15), (16), (17), (18): Xaa is A or G
  MOD_RES (19), (20), (21), (22): Xaa is A or G or is absent
GXRDVVMGSMEGIXXXXXXXXXMIQMTINSMKTPTXXPGASG

SEQ ID NO: 74186 - protein, 37 aa, Artificial Sequence
  GFR-binding peptide
  MOD_RES (2), (4), (35), (36): Xaa is C or S
SXKXSRVIMSMEGLVKPKRGVMIQITINSLAQPVXXP

SEQ ID NO: 74187 - protein, 41 aa, Artificial Sequence; identical to SEQ ID NO: 17105
  GFR-binding peptide
  MOD_RES (1), (38): Xaa is C or S

SEQ ID NO: 74188 - protein, 33 aa, Artificial Sequence; identical to SEQ ID NO: 48961
  GFR-binding peptide
  MOD_RES (2), (33): Xaa is C or S

SEQ ID NO: 74189 - protein, 40 aa, Artificial Sequence
  GFR-binding peptide
  MOD_RES (34), (35): Xaa is C or S
  MOD_RES (12), (13), (14), (15), (16): Xaa is A or G
  MOD_RES (17), (18), (19), (20): Xaa is A or G or is absent
SRVVMNSMEGIXXXXXXXXXMIQVTINSLKTPAXXPKPVH

SEQ ID NO: 74190 - protein, 38 aa, Artificial Sequence
  GFR-binding peptide
  MOD_RES (2), (33), (34): Xaa is C or S
KXSKVIMSMEGLIKPTKGIMIQITINSLDQSVXXPSAS

SEQ ID NO: 74191 - protein, 33 aa, Artificial Sequence
  GFR-binding peptide
  MOD_RES (12), (13), (14), (15), (16): Xaa is A or G
  MOD_RES (17), (18), (19), (20): Xaa is A or G or is absent
AEVVMDSMEGLXXXXXXXXXMIQITINSLRAPV

SEQ ID NO: 74192 - protein, 41 aa, Artificial Sequence
  GFR-binding peptide
  MOD_RES (2), (35), (36): Xaa is C or S
  MOD_RES (13), (14), (15), (16), (17): Xaa is A or G
  MOD_RES (18), (19), (20), (21): Xaa is A or G or is absent
GXEEVIMSMEGIXXXXXXXXXMIQMTINSTKVPAXXTSPVR

SEQ ID NO: 74193 - protein, 40 aa, Artificial Sequence; identical to SEQ ID NO: 17110
  GFR-binding peptide
  MOD_RES (1), (3), (37): Xaa is C or S
  MOD_RES (15), (16), (17), (18), (19): Xaa is A or G
  MOD_RES (20), (21), (22), (23): Xaa is A or G or is absent

SEQ ID NO: 74194 - protein, 43 aa, Artificial Sequence; identical to SEQ ID NO: 17111
  GFR-binding peptide
  MOD_RES (2), (4), (38): Xaa is C or S
  MOD_RES (16), (17), (18), (19), (20): Xaa is A or G
  MOD_RES (21), (22), (23), (24): Xaa is A or G or is absent

SEQ ID NO: 74195 - protein, 34 aa, Artificial Sequence
  GFR-binding peptide
  MOD_RES (33), (34): Xaa is C or S
  MOD_RES (11), (12), (13), (14), (15): Xaa is A or G
  MOD_RES (16), (17), (18), (19): Xaa is A or G or is absent
DVVMGSMEGLXXXXXXXXXMIQMTINSMKTPTXX

SEQ ID NO: 74196 - protein, 39 aa, Artificial Sequence; identical to SEQ ID NO: 17113
  GFR-binding peptide
  MOD_RES (2), (4), (38): Xaa is C or S

SEQ ID NO: 74197 - protein, 35 aa, Artificial Sequence
  GFR-binding peptide
  MOD_RES (2), (35): Xaa is C or S
  MOD_RES (13), (14), (15), (16), (17): Xaa is A or G
  MOD_RES (18), (19), (20), (21): Xaa is A or G or is absent
GXEEVIMSMEGLXXXXXXXXXMIQMTINSTKVPAX

SEQ ID NO: 74198 - protein, 40 aa, Artificial Sequence
  GFR-binding peptide
  MOD_RES (2), (36), (37): Xaa is C or S
  MOD_RES (14), (15), (16), (17), (18): Xaa is A or G
  MOD_RES (19), (20), (21), (22): Xaa is A or G or is absent
GXRDVVMGSMEGLXXXXXXXXXMIQMTINSMKTPTXXPGA

SEQ ID NO: 74199 - protein, 34 aa, Artificial Sequence
  GFR-binding peptide
  MOD_RES (1), (3), (34): Xaa is C or S
XGXEEVIMSMEGILLVRGNDMIQMTINSTKVPAX

SEQ ID NO: 74200 - protein, 35 aa, Artificial Sequence
  GFR-binding peptide
  MOD_RES (1), (3): Xaa is C or S
  MOD_RES (14), (15), (16), (17), (18): Xaa is A or G
  MOD_RES (19), (20), (21), (22): Xaa is A or G or is absent
XKXSKVVMSMEGLXXXXXXXXXMIQITINSLDQPV

SEQ ID NO: 74201 - protein, 34 aa, Artificial Sequence; identical to SEQ ID NO: 17116
  GFR-binding peptide
  MOD_RES (34), (34): Xaa is C or S
  MOD_RES (12), (13), (14), (15), (16): Xaa is A or G
  MOD_RES (17), (18), (19), (20): Xaa is A or G or is absent

SEQ ID NO: 74202 - protein, 33 aa, Artificial Sequence; identical to SEQ ID NO: 48978
  GFR-binding peptide
  MOD_RES (33), (33): Xaa is C or S
  MOD_RES (11), (12), (13), (14), (15): Xaa is A or G
  MOD_RES (16), (17), (18), (19): Xaa is A or G or is absent

SEQ ID NO: 74203 - protein, 40 aa, Artificial Sequence; identical to SEQ ID NO: 17117
  GFR-binding peptide
  MOD_RES (37), (37): Xaa is C or S

SEQ ID NO: 74204 - protein, 41 aa, Artificial Sequence
  GFR-binding peptide
  MOD_RES (2), (4), (36), (37): Xaa is C or S
SXGXRDVVMGSMEGIIIQQKDNMIQMTINSMKTPTXXPGAS

SEQ ID NO: 74205 - protein, 36 aa, Artificial Sequence; identical to SEQ ID NO: 48981
  GFR-binding peptide
  MOD_RES (2), (4), (35), (36): Xaa is C or S

SEQ ID NO: 74206 - protein, 35 aa, Artificial Sequence
  GFR-binding peptide
  MOD_RES (1), (3), (34), (35): Xaa is C or S
XGXEEVIMSMEGILLVRGNDMIQMTINSTKVPAXX

SEQ ID NO: 74207 - protein, 42 aa, Artificial Sequence; identical to SEQ ID NO: 17119
  GFR-binding peptide
  MOD_RES (2), (36): Xaa is C or S
  MOD_RES (14), (15), (16), (17), (18): Xaa is A or G
  MOD_RES (19), (20), (21), (22): Xaa is A or G or is absent

SEQ ID NO: 74208 - protein, 36 aa, Artificial Sequence
  GFR-binding peptide
  MOD_RES (31), (32): Xaa is C or S
EEVIMSMEGLLLVRGNDMIQMTINSTKVPAXXTSPV

SEQ ID NO: 74209 - protein, 35 aa, Artificial Sequence
  GFR-binding peptide
  MOD_RES (1), (32), (33): Xaa is C or S
XEEVIMSMEGLLLVRGNDMIQMTINSTKVPAXXTS

SEQ ID NO: 74210 - protein, 32 aa, Artificial Sequence
  GFR-binding peptide
  MOD_RES (11), (12), (13), (14), (15): Xaa is A or G
  MOD_RES (16), (17), (18), (19): Xaa is A or G or is absent
EVVMDSMEGIXXXXXXXXXMIQITINSLRAPV

SEQ ID NO: 74211 - protein, 39 aa, Artificial Sequence; identical to SEQ ID NO: 17120
  GFR-binding peptide
  MOD_RES (1), (3), (37): Xaa is C or S

SEQ ID NO: 74212 - protein, 35 aa, Artificial Sequence
  GFR-binding peptide
  MOD_RES (1), (3), (35): Xaa is C or S
XGXRDVVMGSMEGLIIQQKDNMIQMTINSMKTPTX

SEQ ID NO: 74213 - protein, 40 aa, Artificial Sequence
  GFR-binding peptide
  MOD_RES (34), (35): Xaa is C or S
  MOD_RES (12), (13), (14), (15), (16): Xaa is A or G
  MOD_RES (17), (18), (19), (20): Xaa is A or G or is absent
AEVVMDSMEGIXXXXXXXXXMIQITINSLRAPVXXSAPAA

SEQ ID NO: 74214 - protein, 45 aa, Artificial Sequence; identical to SEQ ID NO: 17121
  GFR-binding peptide
  MOD_RES (2), (4), (41): Xaa is C or S

SEQ ID NO: 74215 - protein, 33 aa, Artificial Sequence
  GFR-binding peptide
  MOD_RES (33), (33): Xaa is C or S
  MOD_RES (11), (12), (13), (14), (15): Xaa is A or G
  MOD_RES (16), (17), (18), (19): Xaa is A or G or is absent
DVVMGSMEGLXXXXXXXXXMIQMTINSMKTPTX

SEQ ID NO: 74216 - protein, 37 aa, Artificial Sequence; identical to SEQ ID NO: 46416
  GFR-binding peptide
  MOD_RES (33), (34): Xaa is C or S
  MOD_RES (11), (12), (13), (14), (15): Xaa is A or G
  MOD_RES (16), (17), (18), (19): Xaa is A or G or is absent

SEQ ID NO: 74217 - protein, 40 aa, Artificial Sequence; identical to SEQ ID NO: 48989
  GFR-binding peptide
  MOD_RES (1), (3), (36), (37): Xaa is C or S
  MOD_RES (14), (15), (16), (17), (18): Xaa is A or G
  MOD_RES (19), (20), (21), (22): Xaa is A or G or is absent

SEQ ID NO: 74218 - protein, 36 aa, Artificial Sequence
  GFR-binding peptide
  MOD_RES (1), (35), (36): Xaa is C or S
  MOD_RES (13), (14), (15), (16), (17): Xaa is A or G
  MOD_RES (18), (19), (20), (21): Xaa is A or G or is absent
XAEVVMDSMEGLXXXXXXXXXMIQITINSLRAPVXX

SEQ ID NO: 74219 - protein, 39 aa, Artificial Sequence; identical to SEQ ID NO: 17123
  GFR-binding peptide
  MOD_RES (34), (34): Xaa is C or S

SEQ ID NO: 74220 - protein, 34 aa, Artificial Sequence
  GFR-binding peptide
  MOD_RES (33), (34): Xaa is C or S
  MOD_RES (11), (12), (13), (14), (15): Xaa is A or G
  MOD_RES (16), (17), (18), (19): Xaa is A or G or is absent
SKVVMSMEGLXXXXXXXXXMIQITINSLDQPVXX

SEQ ID NO: 74221 - protein, 39 aa, Artificial Sequence; identical to SEQ ID NO: 17124
  GFR-binding peptide
  MOD_RES (1), (35): Xaa is C or S

SEQ ID NO: 74222 - protein, 36 aa, Artificial Sequence; identical to SEQ ID NO: 17125
  GFR-binding peptide
  MOD_RES (1), (35): Xaa is C or S
  MOD_RES (13), (14), (15), (16), (17): Xaa is A or G
  MOD_RES (18), (19), (20), (21): Xaa is A or G or is absent

SEQ ID NO: 74223 - protein, 42 aa, Artificial Sequence; identical to SEQ ID NO: 17127
  GFR-binding peptide
  MOD_RES (1), (38): Xaa is C or S

SEQ ID NO: 74224 - protein, 37 aa, Artificial Sequence; identical to SEQ ID NO: 17128
  GFR-binding peptide
  MOD_RES (2), (36): Xaa is C or S
  MOD_RES (14), (15), (16), (17), (18): Xaa is A or G
  MOD_RES (19), (20), (21), (22): Xaa is A or G or is absent

SEQ ID NO: 74225 - protein, 41 aa, Artificial Sequence
  GFR-binding peptide
  MOD_RES (2), (36), (37): Xaa is C or S
  MOD_RES (14), (15), (16), (17), (18): Xaa is A or G
  MOD_RES (19), (20), (21), (22): Xaa is A or G or is absent
GXRDVVMGSMEGIXXXXXXXXXMIQMTINSMKTPTXXPGAS

SEQ ID NO: 74226 - protein, 38 aa, Artificial Sequence; identical to SEQ ID NO: 17131
  GFR-binding peptide
  MOD_RES (34), (34): Xaa is C or S
  MOD_RES (12), (13), (14), (15), (16): Xaa is A or G
  MOD_RES (17), (18), (19), (20): Xaa is A or G or is absent

SEQ ID NO: 74227 - protein, 32 aa, Artificial Sequence
  GFR-binding peptide
  MOD_RES (11), (12), (13), (14), (15): Xaa is A or G
  MOD_RES (16), (17), (18), (19): Xaa is A or G or is absent
EVVMDSMEGIXXXXXXXXXMIQITINSLRTPV

SEQ ID NO: 74228 - protein, 37 aa, Artificial Sequence; identical to SEQ ID NO: 17132
  GFR-binding peptide
  MOD_RES (1), (3), (37): Xaa is C or S
  MOD_RES (15), (16), (17), (18), (19): Xaa is A or G
  MOD_RES (20), (21), (22), (23): Xaa is A or G or is absent

SEQ ID NO: 74229 - protein, 39 aa, Artificial Sequence; identical to SEQ ID NO: 17133
  GFR-binding peptide
  MOD_RES (2), (4): Xaa is C or S
  MOD_RES (17), (18), (19), (20), (21): Xaa is A or G
  MOD_RES (22), (23), (24), (25): Xaa is A or G or is absent

SEQ ID NO: 74230 - protein, 37 aa, Artificial Sequence; identical to SEQ ID NO: 46428
  GFR-binding peptide
  MOD_RES (1), (3), (37): Xaa is C or S
  MOD_RES (15), (16), (17), (18), (19): Xaa is A or G
  MOD_RES (20), (21), (22), (23): Xaa is A or G or is absent

SEQ ID NO: 74231 - protein, 37 aa, Artificial Sequence
  GFR-binding peptide
  MOD_RES (1), (3), (36), (37): Xaa is C or S
  MOD_RES (14), (15), (16), (17), (18): Xaa is A or G
  MOD_RES (19), (20), (21), (22): Xaa is A or G or is absent
XKXSKVIMSMEGLXXXXXXXXXMIQITINSLDQSVXX

SEQ ID NO: 74232 - protein, 36 aa, Artificial Sequence
  GFR-binding peptide
  MOD_RES (2), (35), (36): Xaa is C or S
  MOD_RES (13), (14), (15), (16), (17): Xaa is A or G
  MOD_RES (18), (19), (20), (21): Xaa is A or G or is absent
GXEEVIMSMEGLXXXXXXXXXMIQMTINSTKVPAXX

SEQ ID NO: 74233 - protein, 34 aa, Artificial Sequence; identical to SEQ ID NO: 46433
  GFR-binding peptide
  MOD_RES (33), (34): Xaa is C or S
  MOD_RES (11), (12), (13), (14), (15): Xaa is A or G
  MOD_RES (16), (17), (18), (19): Xaa is A or G or is absent

SEQ ID NO: 74234 - protein, 38 aa, Artificial Sequence; identical to SEQ ID NO: 17136
  GFR-binding peptide
  MOD_RES (2), (36): Xaa is C or S

SEQ ID NO: 74235 - protein, 35 aa, Artificial Sequence
  GFR-binding peptide
  MOD_RES (1), (35): Xaa is C or S
  MOD_RES (13), (14), (15), (16), (17): Xaa is A or G
  MOD_RES (18), (19), (20), (21): Xaa is A or G or is absent
XAEVVMDSMEGLXXXXXXXXXMIQITINSLRAPVX

SEQ ID NO: 74236 - protein, 40 aa, Artificial Sequence; identical to SEQ ID NO: 17137
  GFR-binding peptide
  MOD_RES (36), (36): Xaa is C or S

SEQ ID NO: 74237 - protein, 33 aa, Artificial Sequence
  GFR-binding peptide
  MOD_RES (33), (33): Xaa is C or S
  MOD_RES (11), (12), (13), (14), (15): Xaa is A or G
  MOD_RES (16), (17), (18), (19): Xaa is A or G or is absent
SKVVMSMEGLXXXXXXXXXMIQITINSLDQPVX

SEQ ID NO: 74238 - protein, 35 aa, Artificial Sequence; identical to SEQ ID NO: 46435
  GFR-binding peptide
  MOD_RES (2), (4), (35): Xaa is C or S

SEQ ID NO: 74239 - protein, 37 aa, Artificial Sequence; identical to SEQ ID NO: 46439
  GFR-binding peptide
  MOD_RES (2), (33), (34): Xaa is C or S

SEQ ID NO: 74240 - protein, 36 aa, Artificial Sequence
  GFR-binding peptide
  MOD_RES (2), (36): Xaa is C or S
  MOD_RES (14), (15), (16), (17), (18): Xaa is A or G
  MOD_RES (19), (20), (21), (22): Xaa is A or G or is absent
GXSEVVMDSMEGIXXXXXXXXXMIQITINSLRTPVX

SEQ ID NO: 74241 - protein, 36 aa, Artificial Sequence
  GFR-binding peptide
  MOD_RES (2), (34), (35): Xaa is C or S
GXRDVVMGSMEGLIIQQKDNMIQMTINSMKTPTXXP

SEQ ID NO: 74242 - protein, 39 aa, Artificial Sequence
  GFR-binding peptide
  MOD_RES (34), (35): Xaa is C or S
  MOD_RES (12), (13), (14), (15), (16): Xaa is A or G
  MOD_RES (17), (18), (19), (20): Xaa is A or G or is absent
SEVVMDSMEGLXXXXXXXXXMIQITINSLRTPVXXTPPT

SEQ ID NO: 74243 - protein, 36 aa, Artificial Sequence
  GFR-binding peptide
  MOD_RES (2), (4): Xaa is C or S
  MOD_RES (15), (16), (17), (18), (19): Xaa is A or G
  MOD_RES (20), (21), (22), (23): Xaa is A or G or is absent
LXGXEEVIMSMEGLXXXXXXXXXMIQMTINSTKVPA

SEQ ID NO: 74244 - protein, 31 aa, Artificial Sequence; identical to SEQ ID NO: 49011
  GFR-binding peptide
  MOD_RES (31), (31): Xaa is C or S

SEQ ID NO: 74245 - protein, 39 aa, Artificial Sequence; identical to SEQ ID NO: 17144
  GFR-binding peptide
  MOD_RES (2), (39): Xaa is C or S
  MOD_RES (15), (16), (17), (18), (19): Xaa is A or G
  MOD_RES (20), (21), (22), (23): Xaa is A or G or is absent

SEQ ID NO: 74246 - protein, 39 aa, Artificial Sequence
  GFR-binding peptide
  MOD_RES (2), (34), (35): Xaa is C or S
GXSEVVMDSMEGIVVNNASDMIQITINSLRTPVXXTPPT

SEQ ID NO: 74247 - protein, 38 aa, Artificial Sequence; identical to SEQ ID NO: 49014
  GFR-binding peptide
  MOD_RES (1), (34), (35): Xaa is C or S
  MOD_RES (12), (13), (14), (15), (16): Xaa is A or G
  MOD_RES (17), (18), (19), (20): Xaa is A or G or is absent

SEQ ID NO: 74248 - protein, 44 aa, Artificial Sequence; identical to SEQ ID NO: 17146
  GFR-binding peptide
  MOD_RES (1), (3), (40): Xaa is C or S
  MOD_RES (16), (17), (18), (19), (20): Xaa is A or G
  MOD_RES (21), (22), (23), (24): Xaa is A or G or is absent

SEQ ID NO: 74249 - protein, 37 aa, Artificial Sequence; identical to SEQ ID NO: 49015
  GFR-binding peptide
  MOD_RES (1), (32), (33): Xaa is C or S

SEQ ID NO: 74250 - protein, 35 aa, Artificial Sequence
  GFR-binding peptide
  MOD_RES (1), (3), (35): Xaa is C or S
XGXAEVVMDSMEGLVVNNAADMIQITINSLRAPVX

SEQ ID NO: 74251 - protein, 39 aa, Artificial Sequence
  GFR-binding peptide
  MOD_RES (2), (34), (35): Xaa is C or S
GXRDVVMGSMEGLIIQQKDNMIQMTINSMKTPTXXPGAS

SEQ ID NO: 74252 - protein, 39 aa, Artificial Sequence; identical to SEQ ID NO: 49016
  GFR-binding peptide
  MOD_RES (1), (35), (36): Xaa is C or S
  MOD_RES (13), (14), (15), (16), (17): Xaa is A or G
  MOD_RES (18), (19), (20), (21): Xaa is A or G or is absent

SEQ ID NO: 74253 - protein, 33 aa, Artificial Sequence
  GFR-binding peptide
  MOD_RES (31), (32): Xaa is C or S
EVVMDSMEGIVVNNAADMIQITINSLRAPVXXS

SEQ ID NO: 74254 - protein, 40 aa, Artificial Sequence
  GFR-binding peptide
  MOD_RES (1), (3), (35), (36): Xaa is C or S
XGXAEVVMDSMEGIVVNNAADMIQITINSLRAPVXXSAPA

SEQ ID NO: 74255 - protein, 30 aa, Artificial Sequence
  GFR-binding peptide
SKVVMSMEGLVKPTRGVMIQITINSLDQPV

SEQ ID NO: 74256 - protein, 34 aa, Artificial Sequence
  GFR-binding peptide
  MOD_RES (2), (2): Xaa is C or S
  MOD_RES (13), (14), (15), (16), (17): Xaa is A or G
  MOD_RES (18), (19), (20), (21): Xaa is A or G or is absent
KXSKVIMSMEGLXXXXXXXXXMIQITINSLDQSV

SEQ ID NO: 74257 - protein, 35 aa, Artificial Sequence
  GFR-binding peptide
  MOD_RES (2), (34), (35): Xaa is C or S
GXSEVVMDSMEGLVVNNASDMIQITINSLRTPVXX

SEQ ID NO: 74258 - protein, 41 aa, Artificial Sequence; identical to SEQ ID NO: 17148
  GFR-binding peptide
  MOD_RES (1), (38): Xaa is C or S

SEQ ID NO: 74259 - protein, 38 aa, Artificial Sequence
  GFR-binding peptide
  MOD_RES (2), (4), (37), (38): Xaa is C or S
  MOD_RES (15), (16), (17), (18), (19): Xaa is A or G
  MOD_RES (20), (21), (22), (23): Xaa is A or G or is absent
SXKXSKVVMSMEGLXXXXXXXXXMIQITINSLDQPVXX

SEQ ID NO: 74260 - protein, 35 aa, Artificial Sequence
  GFR-binding peptide
  MOD_RES (1), (35): Xaa is C or S
  MOD_RES (13), (14), (15), (16), (17): Xaa is A or G
  MOD_RES (18), (19), (20), (21): Xaa is A or G or is absent
XRDVVMGSMEGIXXXXXXXXXMIQMTINSMKTPTX

SEQ ID NO: 74261 - protein, 40 aa, Artificial Sequence; identical to SEQ ID NO: 17150
  GFR-binding peptide
  MOD_RES (2), (4): Xaa is C or S
  MOD_RES (17), (18), (19), (20), (21): Xaa is A or G
  MOD_RES (22), (23), (24), (25): Xaa is A or G or is absent

SEQ ID NO: 74262 - protein, 34 aa, Artificial Sequence; identical to SEQ ID NO: 46470
  GFR-binding peptide
  MOD_RES (1), (3), (34): Xaa is C or S

SEQ ID NO: 74263 - protein, 36 aa, Artificial Sequence; identical to SEQ ID NO: 17151
  GFR-binding peptide
  MOD_RES (13), (14), (15), (16), (17): Xaa is A or G
  MOD_RES (18), (19), (20), (21): Xaa is A or G or is absent

SEQ ID NO: 74264 - protein, 37 aa, Artificial Sequence
  GFR-binding peptide
  MOD_RES (1), (34), (35): Xaa is C or S
  MOD_RES (12), (13), (14), (15), (16): Xaa is A or G
  MOD_RES (17), (18), (19), (20): Xaa is A or G or is absent
XSKVVMSMEGLXXXXXXXXXMIQITINSLDQPVXXPS

SEQ ID NO: 74265 - protein, 35 aa, Artificial Sequence
  GFR-binding peptide
  MOD_RES (33), (34): Xaa is C or S
  MOD_RES (11), (12), (13), (14), (15): Xaa is A or G
  MOD_RES (16), (17), (18), (19): Xaa is A or G or is absent
EVVMDSMEGIXXXXXXXXXMIQITINSLRTPVXXT

SEQ ID NO: 74266 - protein, 43 aa, Artificial Sequence; identical to SEQ ID NO: 49020
  GFR-binding peptide
  MOD_RES (2), (4), (37), (38): Xaa is C or S
  MOD_RES (15), (16), (17), (18), (19): Xaa is A or G
  MOD_RES (20), (21), (22), (23): Xaa is A or G or is absent

SEQ ID NO: 74267 - protein, 32 aa, Artificial Sequence
  GFR-binding peptide
  MOD_RES (31), (32): Xaa is C or S
SRVIMSMEGLVKPKRGVMIQITINSLAQPVXX

SEQ ID NO: 74268 - protein, 33 aa, Artificial Sequence
  GFR-binding peptide
  MOD_RES (12), (13), (14), (15), (16): Xaa is A or G
  MOD_RES (17), (18), (19), (20): Xaa is A or G or is absent
SEVVMDSMEGLXXXXXXXXXMIQITINSLRTPV

SEQ ID NO: 74269 - protein, 38 aa, Artificial Sequence
  GFR-binding peptide
  MOD_RES (2), (4), (36), (37): Xaa is C or S
RXGXAEVVMDSMEGIVVNNAADMIQITINSLRAPVXXS

SEQ ID NO: 74270 - protein, 38 aa, Artificial Sequence
  GFR-binding peptide
  MOD_RES (32), (33): Xaa is C or S
SEVVMDSMEGLVVNNASDMIQITINSLRTPVXXTPPTS

SEQ ID NO: 74271 - protein, 41 aa, Artificial Sequence
  GFR-binding peptide
  MOD_RES (1), (3), (35), (36): Xaa is C or S
XGXSRVVMNSMEGLIVNSSDDMIQVTINSLKTPAXXPKPVH

SEQ ID NO: 74272 - protein, 40 aa, Artificial Sequence; identical to SEQ ID NO: 17159
  GFR-binding peptide
  MOD_RES (1), (3), (37): Xaa is C or S

SEQ ID NO: 74273 - protein, 38 aa, Artificial Sequence
  GFR-binding peptide
  MOD_RES (33), (34): Xaa is C or S
  MOD_RES (11), (12), (13), (14), (15): Xaa is A or G
  MOD_RES (16), (17), (18), (19): Xaa is A or G or is absent
RVVMNSMEGLXXXXXXXXXMIQVTINSLKTPAXXPKPV

SEQ ID NO: 74274 - protein, 33 aa, Artificial Sequence; identical to SEQ ID NO: 17160
  GFR-binding peptide
  MOD_RES (11), (12), (13), (14), (15): Xaa is A or G
  MOD_RES (16), (17), (18), (19): Xaa is A or G or is absent

SEQ ID NO: 74275 - protein, 37 aa, Artificial Sequence; identical to SEQ ID NO: 17163
  GFR-binding peptide
  MOD_RES (37), (37): Xaa is C or S

SEQ ID NO: 74276 - protein, 34 aa, Artificial Sequence
  GFR-binding peptide
  MOD_RES (1), (3), (34): Xaa is C or S
XGXEEVIMSMEGLLLVRGNDMIQMTINSTKVPAX

SEQ ID NO: 74277 - protein, 35 aa, Artificial Sequence; identical to SEQ ID NO: 46488
  GFR-binding peptide
  MOD_RES (34), (35): Xaa is C or S
  MOD_RES (12), (13), (14), (15), (16): Xaa is A or G
  MOD_RES (17), (18), (19), (20): Xaa is A or G or is absent

SEQ ID NO: 74278 - protein, 40 aa, Artificial Sequence; identical to SEQ ID NO: 17164
  GFR-binding peptide
  MOD_RES (2), (4): Xaa is C or S
  MOD_RES (17), (18), (19), (20), (21): Xaa is A or G
  MOD_RES (22), (23), (24), (25): Xaa is A or G or is absent

SEQ ID NO: 74279 - protein, 40 aa, Artificial Sequence
  GFR-binding peptide
  MOD_RES (1), (3), (36), (37): Xaa is C or S
  MOD_RES (14), (15), (16), (17), (18): Xaa is A or G
  MOD_RES (19), (20), (21), (22): Xaa is A or G or is absent
XGXEEVIMSMEGIXXXXXXXXXMIQMTINSTKVPAXXTSP

SEQ ID NO: 74280 - protein, 36 aa, Artificial Sequence; identical to SEQ ID NO: 17166
  GFR-binding peptide
  MOD_RES (1), (35): Xaa is C or S

SEQ ID NO: 74281 - protein, 34 aa, Artificial Sequence; identical to SEQ ID NO: 46493
  GFR-binding peptide
  MOD_RES (31), (32): Xaa is C or S

SEQ ID NO: 74282 - protein, 39 aa, Artificial Sequence; identical to SEQ ID NO: 46494
  GFR-binding peptide
  MOD_RES (1), (3), (37), (38): Xaa is C or S
  MOD_RES (15), (16), (17), (18), (19): Xaa is A or G
  MOD_RES (20), (21), (22), (23): Xaa is A or G or is absent

SEQ ID NO: 74283 - protein, 37 aa, Artificial Sequence
  GFR-binding peptide
  MOD_RES (2), (36), (37): Xaa is C or S
  MOD_RES (14), (15), (16), (17), (18): Xaa is A or G
  MOD_RES (19), (20), (21), (22): Xaa is A or G or is absent
GXAEVVMDSMEGIXXXXXXXXXMIQITINSLRAPVXX

SEQ ID NO: 74284 - protein, 38 aa, Artificial Sequence; identical to SEQ ID NO: 17167
  GFR-binding peptide
  MOD_RES (36), (36): Xaa is C or S
  MOD_RES (12), (13), (14), (15), (16): Xaa is A or G
  MOD_RES (17), (18), (19), (20): Xaa is A or G or is absent

SEQ ID NO: 74285 - protein, 34 aa, Artificial Sequence
  GFR-binding peptide
  MOD_RES (1), (1): Xaa is C or S
  MOD_RES (13), (14), (15), (16), (17): Xaa is A or G
  MOD_RES (18), (19), (20), (21): Xaa is A or G or is absent
XSRVVMNSMEGLXXXXXXXXXMIQVTINSLKTPA

SEQ ID NO: 74286 - protein, 42 aa, Artificial Sequence; identical to SEQ ID NO: 49053
  GFR-binding peptide
  MOD_RES (2), (4), (37), (38): Xaa is C or S
  MOD_RES (15), (16), (17), (18), (19): Xaa is A or G
  MOD_RES (20), (21), (22), (23): Xaa is A or G or is absent

SEQ ID NO: 74287 - protein, 40 aa, Artificial Sequence; identical to SEQ ID NO: 46496
  GFR-binding peptide
  MOD_RES (1), (35), (36): Xaa is C or S
  MOD_RES (13), (14), (15), (16), (17): Xaa is A or G
  MOD_RES (18), (19), (20), (21): Xaa is A or G or is absent

SEQ ID NO: 74288 - protein, 34 aa, Artificial Sequence
  GFR-binding peptide
  MOD_RES (1), (3): Xaa is C or S
XGXSEVVMDSMEGLVVNNASDMIQITINSLRTPV

SEQ ID NO: 74289 - protein, 37 aa, Artificial Sequence
  GFR-binding peptide
  MOD_RES (2), (35), (36): Xaa is C or S
  MOD_RES (13), (14), (15), (16), (17): Xaa is A or G
  MOD_RES (18), (19), (20), (21): Xaa is A or G or is absent
KXSRVIMSMEGLXXXXXXXXXMIQITINSLAQPVXXP

SEQ ID NO: 74290 - protein, 32 aa, Artificial Sequence
  GFR-binding peptide
  MOD_RES (1), (1): Xaa is C or S
XSRVVMNSMEGLIVNSSDDMIQVTINSLKTPA

SEQ ID NO: 74291 - protein, 37 aa, Artificial Sequence; identical to SEQ ID NO: 46504
  GFR-binding peptide
  MOD_RES (2), (35), (36): Xaa is C or S
  MOD_RES (13), (14), (15), (16), (17): Xaa is A or G
  MOD_RES (18), (19), (20), (21): Xaa is A or G or is absent

SEQ ID NO: 74292 - protein, 36 aa, Artificial Sequence
  GFR-binding peptide
  MOD_RES (1), (33), (34): Xaa is C or S
XSEVVMDSMEGLVVNNASDMIQITINSLRTPVXXTP

SEQ ID NO: 74293 - protein, 38 aa, Artificial Sequence
  GFR-binding peptide
  MOD_RES (1), (3), (35), (36): Xaa is C or S
XGXRDVVMGSMEGLIIQQKDNMIQMTINSMKTPTXXPG

SEQ ID NO: 74294 - protein, 38 aa, Artificial Sequence; identical to SEQ ID NO: 46510
  GFR-binding peptide
  MOD_RES (33), (34): Xaa is C or S
  MOD_RES (11), (12), (13), (14), (15): Xaa is A or G
  MOD_RES (16), (17), (18), (19): Xaa is A or G or is absent

SEQ ID NO: 74295 - protein, 44 aa, Artificial Sequence; identical to SEQ ID NO: 17171
  GFR-binding peptide
  MOD_RES (2), (4), (41): Xaa is C or S

SEQ ID NO: 74296 - protein, 43 aa, Artificial Sequence; identical to SEQ ID NO: 17172
  GFR-binding peptide
  MOD_RES (2), (39): Xaa is C or S

SEQ ID NO: 74297 - protein, 40 aa, Artificial Sequence; identical to SEQ ID NO: 17173
  GFR-binding peptide
  MOD_RES (2), (36): Xaa is C or S

SEQ ID NO: 74298 - protein, 40 aa, Artificial Sequence; identical to SEQ ID NO: 17174
  GFR-binding peptide
  MOD_RES (34), (34): Xaa is C or S

SEQ ID NO: 74299 - protein, 38 aa, Artificial Sequence; identical to SEQ ID NO: 17176
  GFR-binding peptide
  MOD_RES (34), (34): Xaa is C or S

SEQ ID NO: 74300 - protein, 32 aa, Artificial Sequence; identical to SEQ ID NO: 49081
  GFR-binding peptide
  MOD_RES (11), (12), (13), (14), (15): Xaa is A or G
  MOD_RES (16), (17), (18), (19): Xaa is A or G or is absent

SEQ ID NO: 74301 - protein, 40 aa, Artificial Sequence
  GFR-binding peptide
  MOD_RES (1), (3), (35), (36): Xaa is C or S
XGXRDVVMGSMEGLIIQQKDNMIQMTINSMKTPTXXPGAS

SEQ ID NO: 74302 - protein, 35 aa, Artificial Sequence; identical to SEQ ID NO: 17179
  GFR-binding peptide

SEQ ID NO: 74303 - protein, 38 aa, Artificial Sequence
  GFR-binding peptide
  MOD_RES (2), (34), (35): Xaa is C or S
GXSEVVMDSMEGIVVNNASDMIQITINSLRTPVXXTPP

SEQ ID NO: 74304 - protein, 35 aa, Artificial Sequence
  GFR-binding peptide
  MOD_RES (1), (3), (35): Xaa is C or S
XGXSRVVMNSMEGLIVNSSDDMIQVTINSLKTPAX

SEQ ID NO: 74305 - protein, 36 aa, Artificial Sequence
  GFR-binding peptide
  MOD_RES (2), (4), (36): Xaa is C or S
RXGXSEVVMDSMEGLVVNNASDMIQITINSLRTPVX

SEQ ID NO: 74306 - protein, 35 aa, Artificial Sequence
  GFR-binding peptide
  MOD_RES (33), (34): Xaa is C or S
  MOD_RES (11), (12), (13), (14), (15): Xaa is A or G
  MOD_RES (16), (17), (18), (19): Xaa is A or G or is absent
EVVMDSMEGIXXXXXXXXXMIQITINSLRAPVXXS

SEQ ID NO: 74307 - protein, 41 aa, Artificial Sequence
  GFR-binding peptide
  MOD_RES (1), (3), (36), (37): Xaa is C or S
  MOD_RES (14), (15), (16), (17), (18): Xaa is A or G
  MOD_RES (19), (20), (21), (22): Xaa is A or G or is absent
XKXSRVIMSMEGLXXXXXXXXXMIQITINSLAQPVXXPAAS

SEQ ID NO: 74308 - protein, 36 aa, Artificial Sequence; identical to SEQ ID NO: 17180
  GFR-binding peptide
  MOD_RES (1), (3): Xaa is C or S
  MOD_RES (15), (16), (17), (18), (19): Xaa is A or G
  MOD_RES (20), (21), (22), (23): Xaa is A or G or is absent

SEQ ID NO: 74309 - protein, 35 aa, Artificial Sequence
  GFR-binding peptide
  MOD_RES (2), (4): Xaa is C or S
RXGXAEVVMDSMEGIVVNNAADMIQITINSLRAPV

SEQ ID NO: 74310 - protein, 42 aa, Artificial Sequence
  GFR-binding peptide
  MOD_RES (2), (36), (37): Xaa is C or S
  MOD_RES (14), (15), (16), (17), (18): Xaa is A or G
  MOD_RES (19), (20), (21), (22): Xaa is A or G or is absent
GXAEVVMDSMEGIXXXXXXXXXMIQITINSLRAPVXXSAPAA

SEQ ID NO: 74311 - protein, 36 aa, Artificial Sequence
  GFR-binding peptide
  MOD_RES (33), (34): Xaa is C or S
  MOD_RES (11), (12), (13), (14), (15): Xaa is A or G
  MOD_RES (16), (17), (18), (19): Xaa is A or G or is absent
SKVIMSMEGLXXXXXXXXXMIQITINSLDQSVXXPS

SEQ ID NO: 74312 - protein, 36 aa, Artificial Sequence; identical to SEQ ID NO: 49089
  GFR-binding peptide
  MOD_RES (2), (4): Xaa is C or S
  MOD_RES (15), (16), (17), (18), (19): Xaa is A or G
  MOD_RES (20), (21), (22), (23): Xaa is A or G or is absent

SEQ ID NO: 74313 - protein, 41 aa, Artificial Sequence
  GFR-binding peptide
  MOD_RES (1), (3), (35), (36): Xaa is C or S
XGXAEVVMDSMEGIVVNNAADMIQITINSLRAPVXXSAPAA

SEQ ID NO: 74314 - protein, 39 aa, Artificial Sequence; identical to SEQ ID NO: 17185
  GFR-binding peptide
  MOD_RES (2), (4), (38): Xaa is C or S
  MOD_RES (16), (17), (18), (19), (20): Xaa is A or G
  MOD_RES (21), (22), (23), (24): Xaa is A or G or is absent

SEQ ID NO: 74315 - protein, 37 aa, Artificial Sequence
  GFR-binding peptide
  MOD_RES (2), (4), (37): Xaa is C or S
  MOD_RES (15), (16), (17), (18), (19): Xaa is A or G
  MOD_RES (20), (21), (22), (23): Xaa is A or G or is absent
SXKXSKVIMSMEGLXXXXXXXXXMIQITINSLDQSVX

SEQ ID NO: 74316 - protein, 34 aa, Artificial Sequence; identical to SEQ ID NO: 17186
  GFR-binding peptide

SEQ ID NO: 74317 - protein, 40 aa, Artificial Sequence
  GFR-binding peptide
  MOD_RES (2), (35), (36): Xaa is C or S
  MOD_RES (13), (14), (15), (16), (17): Xaa is A or G
  MOD_RES (18), (19), (20), (21): Xaa is A or G or is absent
GXEEVIMSMEGIXXXXXXXXXMIQMTINSTKVPAXXTSPV

SEQ ID NO: 74318 - protein, 39 aa, Artificial Sequence
  GFR-binding peptide
  MOD_RES (1), (33), (34): Xaa is C or S
XSEVVMDSMEGIVVNNASDMIQITINSLRTPVXXTPPTS

SEQ ID NO: 74319 - protein, 36 aa, Artificial Sequence
  GFR-binding peptide
  MOD_RES (1), (35), (36): Xaa is C or S
  MOD_RES (13), (14), (15), (16), (17): Xaa is A or G
  MOD_RES (18), (19), (20), (21): Xaa is A or G or is absent
XSEVVMDSMEGLXXXXXXXXXMIQITINSLRTPVXX

SEQ ID NO: 74320 - protein, 40 aa, Artificial Sequence; identical to SEQ ID NO: 17189
  GFR-binding peptide
  MOD_RES (37), (37): Xaa is C or S
  MOD_RES (13), (14), (15), (16), (17): Xaa is A or G
  MOD_RES (18), (19), (20), (21): Xaa is A or G or is absent

SEQ ID NO: 74321 - protein, 36 aa, Artificial Sequence
  GFR-binding peptide
  MOD_RES (1), (33), (34): Xaa is C or S
XRDVVMGSMEGIIIQQKDNMIQMTINSMKTPTXXPG

SEQ ID NO: 74322 - protein, 37 aa, Artificial Sequence
  GFR-binding peptide
  MOD_RES (1), (32), (33): Xaa is C or S
XEEVIMSMEGILLVRGNDMIQMTINSTKVPAXXTSPV

SEQ ID NO: 74323 - protein, 40 aa, Artificial Sequence; identical to SEQ ID NO: 17192
  GFR-binding peptide
  MOD_RES (34), (34): Xaa is C or S

SEQ ID NO: 74324 - protein, 35 aa, Artificial Sequence
  GFR-binding peptide
  MOD_RES (2), (2): Xaa is C or S
  MOD_RES (14), (15), (16), (17), (18): Xaa is A or G
  MOD_RES (19), (20), (21), (22): Xaa is A or G or is absent
GXSRVVMNSMEGLXXXXXXXXXMIQVTINSLKTPA

SEQ ID NO: 74325 - protein, 36 aa, Artificial Sequence; identical to SEQ ID NO: 17193
  GFR-binding peptide
  MOD_RES (1), (1): Xaa is C or S
  MOD_RES (14), (15), (16), (17), (18): Xaa is A or G
  MOD_RES (19), (20), (21), (22): Xaa is A or G or is absent

SEQ ID NO: 74326 - protein, 35 aa, Artificial Sequence; identical to SEQ ID NO: 17194
  GFR-binding peptide
  MOD_RES (1), (35): Xaa is C or S
  MOD_RES (13), (14), (15), (16), (17): Xaa is A or G
  MOD_RES (18), (19), (20), (21): Xaa is A or G or is absent

SEQ ID NO: 74327 - protein, 41 aa, Artificial Sequence
  GFR-binding peptide
  MOD_RES (1), (3), (36), (37): Xaa is C or S
  MOD_RES (14), (15), (16), (17), (18): Xaa is A or G
  MOD_RES (19), (20), (21), (22): Xaa is A or G or is absent
XKXSKVIMSMEGLXXXXXXXXXMIQITINSLDQSVXXPSAS

SEQ ID NO: 74328 - protein, 35 aa, Artificial Sequence
  GFR-binding peptide
  MOD_RES (32), (33): Xaa is C or S
SEVVMDSMEGLVVNNASDMIQITINSLRTPVXXTP

SEQ ID NO: 74329 - protein, 37 aa, Artificial Sequence
  GFR-binding peptide
  MOD_RES (31), (32): Xaa is C or S
RVVMNSMEGLIVNSSDDMIQVTINSLKTPAXXPKPVH

SEQ ID NO: 74330 - protein, 39 aa, Artificial Sequence
  GFR-binding peptide
  MOD_RES (2), (4), (38), (39): Xaa is C or S
  MOD_RES (16), (17), (18), (19), (20): Xaa is A or G
  MOD_RES (21), (22), (23), (24): Xaa is A or G or is absent
HXGXSRVVMNSMEGLXXXXXXXXXMIQVTINSLKTPAXX

SEQ ID NO: 74331 - protein, 34 aa, Artificial Sequence; identical to SEQ ID NO: 46564
  GFR-binding peptide
  MOD_RES (1), (3): Xaa is C or S

SEQ ID NO: 74332 - protein, 37 aa, Artificial Sequence; identical to SEQ ID NO: 17202
  GFR-binding peptide
  MOD_RES (34), (34): Xaa is C or S

SEQ ID NO: 74333 - protein, 39 aa, Artificial Sequence; identical to SEQ ID NO: 49123
  GFR-binding peptide
  MOD_RES (33), (34): Xaa is C or S
  MOD_RES (11), (12), (13), (14), (15): Xaa is A or G
  MOD_RES (16), (17), (18), (19): Xaa is A or G or is absent

SEQ ID NO: 74334 - protein, 35 aa, Artificial Sequence
  GFR-binding peptide
  MOD_RES (1), (3): Xaa is C or S
  MOD_RES (14), (15), (16), (17), (18): Xaa is A or G
  MOD_RES (19), (20), (21), (22): Xaa is A or G or is absent
XKXSKVIMSMEGLXXXXXXXXXMIQITINSLDQSV

SEQ ID NO: 74335 - protein, 34 aa, Artificial Sequence
  GFR-binding peptide
  MOD_RES (34), (34): Xaa is C or S
  MOD_RES (12), (13), (14), (15), (16): Xaa is A or G
  MOD_RES (17), (18), (19), (20): Xaa is A or G or is absent
RDVVMGSMEGIXXXXXXXXXMIQMTINSMKTPTX

SEQ ID NO: 74336 - protein, 34 aa, Artificial Sequence; identical to SEQ ID NO: 17203
  GFR-binding peptide
  MOD_RES (34), (34): Xaa is C or S
  MOD_RES (12), (13), (14), (15), (16): Xaa is A or G
  MOD_RES (17), (18), (19), (20): Xaa is A or G or is absent

SEQ ID NO: 74337 - protein, 33 aa, Artificial Sequence
  GFR-binding peptide
  MOD_RES (33), (33): Xaa is C or S
  MOD_RES (11), (12), (13), (14), (15): Xaa is A or G
  MOD_RES (16), (17), (18), (19): Xaa is A or G or is absent
SKVIMSMEGLXXXXXXXXXMIQITINSLDQSVX

SEQ ID NO: 74338 - protein, 35 aa, Artificial Sequence; identical to SEQ ID NO: 17206
  GFR-binding peptide
  MOD_RES (1), (1): Xaa is C or S

SEQ ID NO: 74339 - protein, 43 aa, Artificial Sequence; identical to SEQ ID NO: 17207
  GFR-binding peptide
  MOD_RES (1), (3), (37): Xaa is C or S
  MOD_RES (15), (16), (17), (18), (19): Xaa is A or G
  MOD_RES (20), (21), (22), (23): Xaa is A or G or is absent

SEQ ID NO: 74340 - protein, 37 aa, Artificial Sequence
  GFR-binding peptide
  MOD_RES (1), (34), (35): Xaa is C or S
  MOD_RES (12), (13), (14), (15), (16): Xaa is A or G
  MOD_RES (17), (18), (19), (20): Xaa is A or G or is absent
XSKVIMSMEGLXXXXXXXXXMIQITINSLDQSVXXPS

SEQ ID NO: 74341 - protein, 39 aa, Artificial Sequence
  GFR-binding peptide
  MOD_RES (2), (4), (36), (37): Xaa is C or S
SXGXRDVVMGSMEGIIIQQKDNMIQMTINSMKTPTXXPG

SEQ ID NO: 74342 - protein, 40 aa, Artificial Sequence
  GFR-binding peptide
  MOD_RES (2), (35), (36): Xaa is C or S
  MOD_RES (13), (14), (15), (16), (17): Xaa is A or G
  MOD_RES (18), (19), (20), (21): Xaa is A or G or is absent
KXSKVVMSMEGLXXXXXXXXXMIQITINSLDQPVXXPSAS

SEQ ID NO: 74343 - protein, 42 aa, Artificial Sequence
  GFR-binding peptide
  MOD_RES (1), (3), (37), (38): Xaa is C or S
  MOD_RES (15), (16), (17), (18), (19): Xaa is A or G
  MOD_RES (20), (21), (22), (23): Xaa is A or G or is absent
XGXRDVVMGSMEGLXXXXXXXXXMIQMTINSMKTPTXXPGAS

SEQ ID NO: 74344 - protein, 38 aa, Artificial Sequence
  GFR-binding peptide
  MOD_RES (33), (34): Xaa is C or S
  MOD_RES (11), (12), (13), (14), (15): Xaa is A or G
  MOD_RES (16), (17), (18), (19): Xaa is A or G or is absent
SRVIMSMEGLXXXXXXXXXMIQITINSLAQPVXXPAAS

SEQ ID NO: 74345 - protein, 40 aa, Artificial Sequence
  GFR-binding peptide
  MOD_RES (2), (34), (35): Xaa is C or S
GXAEVVMDSMEGLVVNNAADMIQITINSLRAPVXXSAPAA

SEQ ID NO: 74346 - protein, 36 aa, Artificial Sequence; identical to SEQ ID NO: 46583
  GFR-binding peptide
  MOD_RES (33), (34): Xaa is C or S
  MOD_RES (11), (12), (13), (14), (15): Xaa is A or G
  MOD_RES (16), (17), (18), (19): Xaa is A or G or is absent

SEQ ID NO: 74347 - protein, 34 aa, Artificial Sequence; identical to SEQ ID NO: 17210
  GFR-binding peptide
  MOD_RES (33), (33): Xaa is C or S
  MOD_RES (11), (12), (13), (14), (15): Xaa is A or G
  MOD_RES (16), (17), (18), (19): Xaa is A or G or is absent

SEQ ID NO: 74348 - protein, 39 aa, Artificial Sequence
  GFR-binding peptide
  MOD_RES (1), (33), (34): Xaa is C or S
XAEVVMDSMEGLVVNNAADMIQITINSLRAPVXXSAPAA

SEQ ID NO: 74349 - protein, 38 aa, Artificial Sequence
  GFR-binding peptide
  MOD_RES (1), (35), (36): Xaa is C or S
  MOD_RES (13), (14), (15), (16), (17): Xaa is A or G
  MOD_RES (18), (19), (20), (21): Xaa is A or G or is absent
XAEVVMDSMEGLXXXXXXXXXMIQITINSLRAPVXXSA

SEQ ID NO: 74350 - protein, 38 aa, Artificial Sequence
  GFR-binding peptide
  MOD_RES (1), (3), (34), (35): Xaa is C or S
XKXSKVIMSMEGLIKPTKGIMIQITINSLDQSVXXPSA

SEQ ID NO: 74351 - protein, 36 aa, Artificial Sequence
  GFR-binding peptide
  MOD_RES (1), (3), (35), (36): Xaa is C or S
XGXAEVVMDSMEGIVVNNAADMIQITINSLRAPVXX

SEQ ID NO: 74352 - protein, 34 aa, Artificial Sequence; identical to SEQ ID NO: 17213
  GFR-binding peptide

SEQ ID NO: 74353 - protein, 34 aa, Artificial Sequence; identical to SEQ ID NO: 46589
  GFR-binding peptide
  MOD_RES (1), (34): Xaa is C or S
  MOD_RES (12), (13), (14), (15), (16): Xaa is A or G
  MOD_RES (17), (18), (19), (20): Xaa is A or G or is absent

SEQ ID NO: 74354 - protein, 43 aa, Artificial Sequence; identical to SEQ ID NO: 17214
  GFR-binding peptide
  MOD_RES (2), (39): Xaa is C or S

SEQ ID NO: 74355 - protein, 40 aa, Artificial Sequence; identical to SEQ ID NO: 17216
  GFR-binding peptide
  MOD_RES (2), (36): Xaa is C or S

SEQ ID NO: 74356 - protein, 36 aa, Artificial Sequence
  GFR-binding peptide
  MOD_RES (1), (33), (34): Xaa is C or S
XAEVVMDSMEGLVVNNAADMIQITINSLRAPVXXSA

SEQ ID NO: 74357 - protein, 35 aa, Artificial Sequence
  GFR-binding peptide
  MOD_RES (31), (32): Xaa is C or S
SKVIMSMEGLIKPTKGIMIQITINSLDQSVXXPSA

SEQ ID NO: 74358 - protein, 37 aa, Artificial Sequence; identical to SEQ ID NO: 17217
  GFR-binding peptide
  MOD_RES (34), (34): Xaa is C or S

SEQ ID NO: 74359 - protein, 38 aa, Artificial Sequence; identical to SEQ ID NO: 49143
  GFR-binding peptide
  MOD_RES (2), (33), (34): Xaa is C or S

SEQ ID NO: 74360 - protein, 38 aa, Artificial Sequence; identical to SEQ ID NO: 17218
  GFR-binding peptide
  MOD_RES (37), (37): Xaa is C or S
  MOD_RES (13), (14), (15), (16), (17): Xaa is A or G
  MOD_RES (18), (19), (20), (21): Xaa is A or G or is absent

SEQ ID NO: 74361 - protein, 36 aa, Artificial Sequence; identical to SEQ ID NO: 49145
  GFR-binding peptide
  MOD_RES (2), (4), (36): Xaa is C or S

SEQ ID NO: 74362 - protein, 37 aa, Artificial Sequence
  GFR-binding peptide
  MOD_RES (1), (3), (35), (36): Xaa is C or S
XGXAEVVMDSMEGLVVNNAADMIQITINSLRAPVXXS

SEQ ID NO: 74363 - protein, 38 aa, Artificial Sequence; identical to SEQ ID NO: 17222
  GFR-binding peptide
  MOD_RES (37), (37): Xaa is C or S

SEQ ID NO: 74364 - protein, 32 aa, Artificial Sequence; identical to SEQ ID NO: 17223
  GFR-binding peptide
  MOD_RES (11), (12), (13), (14), (15): Xaa is A or G
  MOD_RES (16), (17), (18), (19): Xaa is A or G or is absent

SEQ ID NO: 74365 - protein, 38 aa, Artificial Sequence; identical to SEQ ID NO: 46601
  GFR-binding peptide
  MOD_RES (2), (35), (36): Xaa is C or S
  MOD_RES (13), (14), (15), (16), (17): Xaa is A or G
  MOD_RES (18), (19), (20), (21): Xaa is A or G or is absent

SEQ ID NO: 74366 - protein, 37 aa, Artificial Sequence; identical to SEQ ID NO: 17224
  GFR-binding peptide
  MOD_RES (36), (36): Xaa is C or S

SEQ ID NO: 74367 - protein, 35 aa, Artificial Sequence; identical to SEQ ID NO: 17226
  GFR-binding peptide
  MOD_RES (12), (13), (14), (15), (16): Xaa is A or G
  MOD_RES (17), (18), (19), (20): Xaa is A or G or is absent

SEQ ID NO: 74368 - protein, 42 aa, Artificial Sequence
  GFR-binding peptide
  MOD_RES (2), (4), (38), (39): Xaa is C or S
  MOD_RES (16), (17), (18), (19), (20): Xaa is A or G
  MOD_RES (21), (22), (23), (24): Xaa is A or G or is absent
RXGXSEVVMDSMEGLXXXXXXXXXMIQITINSLRTPVXXTPP

SEQ ID NO: 74369 - protein, 38 aa, Artificial Sequence; identical to SEQ ID NO: 17227
  GFR-binding peptide
  MOD_RES (2), (2): Xaa is C or S
  MOD_RES (15), (16), (17), (18), (19): Xaa is A or G
  MOD_RES (20), (21), (22), (23): Xaa is A or G or is absent

SEQ ID NO: 74370 - protein, 35 aa, Artificial Sequence; identical to SEQ ID NO: 49159
  GFR-binding peptide
  MOD_RES (1), (3): Xaa is C or S
  MOD_RES (14), (15), (16), (17), (18): Xaa is A or G
  MOD_RES (19), (20), (21), (22): Xaa is A or G or is absent

SEQ ID NO: 74371 - protein, 35 aa, Artificial Sequence
  GFR-binding peptide
  MOD_RES (31), (32): Xaa is C or S
EVVMDSMEGIVVNNAADMIQITINSLRAPVXXSAP

SEQ ID NO: 74372 - protein, 38 aa, Artificial Sequence
  GFR-binding peptide
  MOD_RES (2), (4), (36), (37): Xaa is C or S
HXGXSRVVMNSMEGLIVNSSDDMIQVTINSLKTPAXXP

SEQ ID NO: 74373 - protein, 38 aa, Artificial Sequence
  GFR-binding peptide
  MOD_RES (1), (32), (33): Xaa is C or S
XSKVVMSMEGLVKPTRGVMIQITINSLDQPVXXPSASA

SEQ ID NO: 74374 - protein, 38 aa, Artificial Sequence; identical to SEQ ID NO: 17229
  GFR-binding peptide
  MOD_RES (1), (38): Xaa is C or S

SEQ ID NO: 74375 - protein, 33 aa, Artificial Sequence; identical to SEQ ID NO: 17231
  GFR-binding peptide

SEQ ID NO: 74376 - protein, 36 aa, Artificial Sequence
  GFR-binding peptide
  MOD_RES (33), (34): Xaa is C or S
  MOD_RES (11), (12), (13), (14), (15): Xaa is A or G
  MOD_RES (16), (17), (18), (19): Xaa is A or G or is absent
EVVMDSMEGLXXXXXXXXXMIQITINSLRTPVXXTP

SEQ ID NO: 74377 - protein, 33 aa, Artificial Sequence; identical to SEQ ID NO: 17232
  GFR-binding peptide
  MOD_RES (33), (33): Xaa is C or S
  MOD_RES (11), (12), (13), (14), (15): Xaa is A or G
  MOD_RES (16), (17), (18), (19): Xaa is A or G or is absent

SEQ ID NO: 74378 - protein, 44 aa, Artificial Sequence
  GFR-binding peptide
  MOD_RES (2), (4), (38), (39): Xaa is C or S
  MOD_RES (16), (17), (18), (19), (20): Xaa is A or G
  MOD_RES (21), (22), (23), (24): Xaa is A or G or is absent
HXGXSRVVMNSMEGIXXXXXXXXXMIQVTINSLKTPAXXPKPVH

SEQ ID NO: 74379 - protein, 36 aa, Artificial Sequence; identical to SEQ ID NO: 17235
  GFR-binding peptide
  MOD_RES (2), (36): Xaa is C or S
  MOD_RES (14), (15), (16), (17), (18): Xaa is A or G
  MOD_RES (19), (20), (21), (22): Xaa is A or G or is absent

SEQ ID NO: 74380 - protein, 40 aa, Artificial Sequence
  GFR-binding peptide
  MOD_RES (2), (36), (37): Xaa is C or S
  MOD_RES (14), (15), (16), (17), (18): Xaa is A or G
  MOD_RES (19), (20), (21), (22): Xaa is A or G or is absent
GXAEVVMDSMEGIXXXXXXXXXMIQITINSLRAPVXXSAP

SEQ ID NO: 74381 - protein, 36 aa, Artificial Sequence; identical to SEQ ID NO: 17236
  GFR-binding peptide
  MOD_RES (13), (14), (15), (16), (17): Xaa is A or G
  MOD_RES (18), (19), (20), (21): Xaa is A or G or is absent

SEQ ID NO: 74382 - protein, 41 aa, Artificial Sequence
  GFR-binding peptide
  MOD_RES (1), (3), (35), (36): Xaa is C or S
XGXSEVVMDSMEGIVVNNASDMIQITINSLRTPVXXTPPTS

SEQ ID NO: 74383 - protein, 42 aa, Artificial Sequence; identical to SEQ ID NO: 17239
  GFR-binding peptide
  MOD_RES (1), (3), (40): Xaa is C or S

SEQ ID NO: 74384 - protein, 40 aa, Artificial Sequence; identical to SEQ ID NO: 17240
  GFR-binding peptide
  MOD_RES (2), (4): Xaa is C or S

SEQ ID NO: 74385 - protein, 34 aa, Artificial Sequence
  GFR-binding peptide
  MOD_RES (1), (3), (34): Xaa is C or S
XKXSKVIMSMEGLIKPTKGIMIQITINSLDQSVX

SEQ ID NO: 74386 - protein, 36 aa, Artificial Sequence
  GFR-binding peptide
  MOD_RES (33), (34): Xaa is C or S
  MOD_RES (11), (12), (13), (14), (15): Xaa is A or G
  MOD_RES (16), (17), (18), (19): Xaa is A or G or is absent
EEVIMSMEGIXXXXXXXXXMIQMTINSTKVPAXXTS

SEQ ID NO: 74387 - protein, 39 aa, Artificial Sequence; identical to SEQ ID NO: 17243
  GFR-binding peptide
  MOD_RES (37), (37): Xaa is C or S
  MOD_RES (13), (14), (15), (16), (17): Xaa is A or G
  MOD_RES (18), (19), (20), (21): Xaa is A or G or is absent

SEQ ID NO: 74388 - protein, 34 aa, Artificial Sequence; identical to SEQ ID NO: 46629
  GFR-binding peptide
  MOD_RES (1), (3), (34): Xaa is C or S

SEQ ID NO: 74389 - protein, 33 aa, Artificial Sequence; identical to SEQ ID NO: 46631
  GFR-binding peptide
  MOD_RES (1), (32), (33): Xaa is C or S

SEQ ID NO: 74390 - protein, 34 aa, Artificial Sequence
  GFR-binding peptide
  MOD_RES (2), (4): Xaa is C or S
LXGXEEVIMSMEGLLLVRGNDMIQMTINSTKVPA

SEQ ID NO: 74391 - protein, 42 aa, Artificial Sequence
  GFR-binding peptide
  MOD_RES (1), (3), (37), (38): Xaa is C or S
  MOD_RES (15), (16), (17), (18), (19): Xaa is A or G
  MOD_RES (20), (21), (22), (23): Xaa is A or G or is absent
XGXSEVVMDSMEGLXXXXXXXXXMIQITINSLRTPVXXTPPT

SEQ ID NO: 74392 - protein, 37 aa, Artificial Sequence
  GFR-binding peptide
  MOD_RES (32), (33): Xaa is C or S
RDVVMGSMEGLIIQQKDNMIQMTINSMKTPTXXPGAS

SEQ ID NO: 74393 - protein, 38 aa, Artificial Sequence
  GFR-binding peptide
  MOD_RES (2), (36), (37): Xaa is C or S
  MOD_RES (14), (15), (16), (17), (18): Xaa is A or G
  MOD_RES (19), (20), (21), (22): Xaa is A or G or is absent
GXAEVVMDSMEGLXXXXXXXXXMIQITINSLRAPVXXS

SEQ ID NO: 74394 - protein, 34 aa, Artificial Sequence; identical to SEQ ID NO: 17247
  GFR-binding peptide
  MOD_RES (33), (33): Xaa is C or S
  MOD_RES (11), (12), (13), (14), (15): Xaa is A or G
  MOD_RES (16), (17), (18), (19): Xaa is A or G or is absent

SEQ ID NO: 74395 - protein, 36 aa, Artificial Sequence; identical to SEQ ID NO: 46636
  GFR-binding peptide
  MOD_RES (33), (34): Xaa is C or S
  MOD_RES (11), (12), (13), (14), (15): Xaa is A or G
  MOD_RES (16), (17), (18), (19): Xaa is A or G or is absent

SEQ ID NO: 74396 - protein, 42 aa, Artificial Sequence; identical to SEQ ID NO: 17249
  GFR-binding peptide
  MOD_RES (1), (3), (40): Xaa is C or S
  MOD_RES (16), (17), (18), (19), (20): Xaa is A or G
  MOD_RES (21), (22), (23), (24): Xaa is A or G or is absent

SEQ ID NO: 74397 - protein, 38 aa, Artificial Sequence
  GFR-binding peptide
  MOD_RES (1), (35), (36): Xaa is C or S
  MOD_RES (13), (14), (15), (16), (17): Xaa is A or G
  MOD_RES (18), (19), (20), (21): Xaa is A or G or is absent
XSRVVMNSMEGLXXXXXXXXXMIQVTINSLKTPAXXPK

SEQ ID NO: 74398 - protein, 39 aa, Artificial Sequence; identical to SEQ ID NO: 17250
  GFR-binding peptide
  MOD_RES (1), (3), (37): Xaa is C or S
  MOD_RES (15), (16), (17), (18), (19): Xaa is A or G
  MOD_RES (20), (21), (22), (23): Xaa is A or G or is absent

SEQ ID NO: 74399 - protein, 32 aa, Artificial Sequence
  GFR-binding peptide
  MOD_RES (31), (32): Xaa is C or S
RVVMNSMEGLIVNSSDDMIQVTINSLKTPAXX

SEQ ID NO: 74400 - protein, 36 aa, Artificial Sequence
  GFR-binding peptide
  MOD_RES (34), (35): Xaa is C or S
  MOD_RES (12), (13), (14), (15), (16): Xaa is A or G
  MOD_RES (17), (18), (19), (20): Xaa is A or G or is absent
SEVVMDSMEGIXXXXXXXXXMIQITINSLRTPVXXT

SEQ ID NO: 74401 - protein, 37 aa, Artificial Sequence
  GFR-binding peptide
  MOD_RES (1), (3), (35), (36): Xaa is C or S
XGXSRVVMNSMEGLIVNSSDDMIQVTINSLKTPAXXP

SEQ ID NO: 74402 - protein, 35 aa, Artificial Sequence; identical to SEQ ID NO: 17252
  GFR-binding peptide
  MOD_RES (33), (33): Xaa is C or S

SEQ ID NO: 74403 - protein, 35 aa, Artificial Sequence; identical to SEQ ID NO: 17253
  GFR-binding peptide
  MOD_RES (33), (33): Xaa is C or S
  MOD_RES (11), (12), (13), (14), (15): Xaa is A or G
  MOD_RES (16), (17), (18), (19): Xaa is A or G or is absent

SEQ ID NO: 74404 - protein, 37 aa, Artificial Sequence
  GFR-binding peptide
  MOD_RES (1), (34), (35): Xaa is C or S
  MOD_RES (12), (13), (14), (15), (16): Xaa is A or G
  MOD_RES (17), (18), (19), (20): Xaa is A or G or is absent
XEEVIMSMEGIXXXXXXXXXMIQMTINSTKVPAXXTS

SEQ ID NO: 74405 - protein, 37 aa, Artificial Sequence
  GFR-binding peptide
  MOD_RES (1), (32), (33): Xaa is C or S
XSKVIMSMEGLIKPTKGIMIQITINSLDQSVXXPSAS

SEQ ID NO: 74406 - protein, 37 aa, Artificial Sequence; identical to SEQ ID NO: 17254
  GFR-binding peptide
  MOD_RES (1), (3), (37): Xaa is C or S

SEQ ID NO: 74407 - protein, 37 aa, Artificial Sequence; identical to SEQ ID NO: 46641
  GFR-binding peptide
  MOD_RES (2), (33), (34): Xaa is C or S

SEQ ID NO: 74408 - protein, 34 aa, Artificial Sequence; identical to SEQ ID NO: 17257
  GFR-binding peptide

SEQ ID NO: 74409 - protein, 37 aa, Artificial Sequence; identical to SEQ ID NO: 17258
  GFR-binding peptide
  MOD_RES (1), (35): Xaa is C or S
  MOD_RES (13), (14), (15), (16), (17): Xaa is A or G
  MOD_RES (18), (19), (20), (21): Xaa is A or G or is absent

SEQ ID NO: 74410 - protein, 39 aa, Artificial Sequence
  GFR-binding peptide
  MOD_RES (1), (35), (36): Xaa is C or S
  MOD_RES (13), (14), (15), (16), (17): Xaa is A or G
  MOD_RES (18), (19), (20), (21): Xaa is A or G or is absent
XRDVVMGSMEGLXXXXXXXXXMIQMTINSMKTPTXXPGA

SEQ ID NO: 74411 - protein, 41 aa, Artificial Sequence
  GFR-binding peptide
  MOD_RES (2), (4), (36), (37): Xaa is C or S
RXGXAEVVMDSMEGIVVNNAADMIQITINSLRAPVXXSAPA

SEQ ID NO: 74412 - protein, 37 aa, Artificial Sequence
  GFR-binding peptide
  MOD_RES (1), (35), (36): Xaa is C or S
  MOD_RES (13), (14), (15), (16), (17): Xaa is A or G
  MOD_RES (18), (19), (20), (21): Xaa is A or G or is absent
XAEVVMDSMEGIXXXXXXXXXMIQITINSLRAPVXXS

SEQ ID NO: 74413 - protein, 36 aa, Artificial Sequence
  GFR-binding peptide
  MOD_RES (1), (3): Xaa is C or S
  MOD_RES (15), (16), (17), (18), (19): Xaa is A or G
  MOD_RES (20), (21), (22), (23): Xaa is A or G or is absent
XGXSEVVMDSMEGLXXXXXXXXXMIQITINSLRTPV

SEQ ID NO: 74414 - protein, 39 aa, Artificial Sequence
  GFR-binding peptide
  MOD_RES (1), (3), (35), (36): Xaa is C or S
XGXAEVVMDSMEGIVVNNAADMIQITINSLRAPVXXSAP

SEQ ID NO: 74415 - protein, 39 aa, Artificial Sequence; identical to SEQ ID NO: 17262
  GFR-binding peptide
  MOD_RES (2), (39): Xaa is C or S
  MOD_RES (15), (16), (17), (18), (19): Xaa is A or G
  MOD_RES (20), (21), (22), (23): Xaa is A or G or is absent

SEQ ID NO: 74416 - protein, 44 aa, Artificial Sequence
  GFR-binding peptide
  MOD_RES (2), (4), (38), (39): Xaa is C or S
  MOD_RES (16), (17), (18), (19), (20): Xaa is A or G
  MOD_RES (21), (22), (23), (24): Xaa is A or G or is absent
SXGXRDVVMGSMEGIXXXXXXXXXMIQMTINSMKTPTXXPGASG

SEQ ID NO: 74417 - protein, 39 aa, Artificial Sequence
  GFR-binding peptide
  MOD_RES (1), (3), (36), (37): Xaa is C or S
  MOD_RES (14), (15), (16), (17), (18): Xaa is A or G
  MOD_RES (19), (20), (21), (22): Xaa is A or G or is absent
XKXSRVIMSMEGLXXXXXXXXXMIQITINSLAQPVXXPA

SEQ ID NO: 74418 - protein, 40 aa, Artificial Sequence; identical to SEQ ID NO: 17263
  GFR-binding peptide
  MOD_RES (37), (37): Xaa is C or S

SEQ ID NO: 74419 - protein, 37 aa, Artificial Sequence; identical to SEQ ID NO: 17264
  GFR-binding peptide
  MOD_RES (1), (3): Xaa is C or S
  MOD_RES (16), (17), (18), (19), (20): Xaa is A or G
  MOD_RES (21), (22), (23), (24): Xaa is A or G or is absent

SEQ ID NO: 74420 - protein, 35 aa, Artificial Sequence; identical to SEQ ID NO: 17265
  GFR-binding peptide
  MOD_RES (2), (2): Xaa is C or S

SEQ ID NO: 74421 - protein, 34 aa, Artificial Sequence
  GFR-binding peptide
  MOD_RES (1), (33), (34): Xaa is C or S
XSEVVMDSMEGIVVNNASDMIQITINSLRTPVXX

SEQ ID NO: 74422 - protein, 35 aa, Artificial Sequence
  GFR-binding peptide
  MOD_RES (1), (34), (35): Xaa is C or S
  MOD_RES (12), (13), (14), (15), (16): Xaa is A or G
  MOD_RES (17), (18), (19), (20): Xaa is A or G or is absent
XSRVIMSMEGLXXXXXXXXXMIQITINSLAQPVXX

SEQ ID NO: 74423 - protein, 40 aa, Artificial Sequence; identical to SEQ ID NO: 17266
  GFR-binding peptide
  MOD_RES (1), (38): Xaa is C or S
  MOD_RES (14), (15), (16), (17), (18): Xaa is A or G
  MOD_RES (19), (20), (21), (22): Xaa is A or G or is absent

SEQ ID NO: 74424 - protein, 40 aa, Artificial Sequence
  GFR-binding peptide
  MOD_RES (2), (4), (36), (37): Xaa is C or S
RXGXAEVVMDSMEGIVVNNAADMIQITINSLRAPVXXSAP

SEQ ID NO: 74425 - protein, 32 aa, Artificial Sequence
  GFR-binding peptide
  MOD_RES (32), (32): Xaa is C or S
SEVVMDSMEGIVVNNASDMIQITINSLRTPVX

SEQ ID NO: 74426 - protein, 34 aa, Artificial Sequence; identical to SEQ ID NO: 49212
  GFR-binding peptide
  MOD_RES (2), (4): Xaa is C or S

SEQ ID NO: 74427 - protein, 37 aa, Artificial Sequence
  GFR-binding peptide
  MOD_RES (1), (33), (34): Xaa is C or S
XAEVVMDSMEGLVVNNAADMIQITINSLRAPVXXSAP

SEQ ID NO: 74428 - protein, 43 aa, Artificial Sequence; identical to SEQ ID NO: 17269
  GFR-binding peptide
  MOD_RES (2), (4), (41): Xaa is C or S
  MOD_RES (17), (18), (19), (20), (21): Xaa is A or G
  MOD_RES (22), (23), (24), (25): Xaa is A or G or is absent

SEQ ID NO: 74429 - protein, 31 aa, Artificial Sequence; identical to SEQ ID NO: 46668
  GFR-binding peptide
  MOD_RES (31), (31): Xaa is C or S

SEQ ID NO: 74430 - protein, 41 aa, Artificial Sequence; identical to SEQ ID NO: 17270
  GFR-binding peptide
  MOD_RES (1), (3), (37): Xaa is C or S
  MOD_RES (15), (16), (17), (18), (19): Xaa is A or G
  MOD_RES (20), (21), (22), (23): Xaa is A or G or is absent

SEQ ID NO: 74431 - protein, 32 aa, Artificial Sequence; identical to SEQ ID NO: 17271
  GFR-binding peptide

SEQ ID NO: 74432 - protein, 38 aa, Artificial Sequence
  GFR-binding peptide
  MOD_RES (1), (3), (37), (38): Xaa is C or S
  MOD_RES (15), (16), (17), (18), (19): Xaa is A or G
  MOD_RES (20), (21), (22), (23): Xaa is A or G or is absent
XGXSRVVMNSMEGLXXXXXXXXXMIQVTINSLKTPAXX

SEQ ID NO: 74433 - protein, 38 aa, Artificial Sequence; identical to SEQ ID NO: 17273
  GFR-binding peptide
  MOD_RES (2), (4): Xaa is C or S

SEQ ID NO: 74434 - protein, 34 aa, Artificial Sequence
  GFR-binding peptide
  MOD_RES (2), (2): Xaa is C or S
  MOD_RES (13), (14), (15), (16), (17): Xaa is A or G
  MOD_RES (18), (19), (20), (21): Xaa is A or G or is absent
KXSKVVMSMEGLXXXXXXXXXMIQITINSLDQPV

SEQ ID NO: 74435 - protein, 35 aa, Artificial Sequence; identical to SEQ ID NO: 17274
  GFR-binding peptide
  MOD_RES (34), (34): Xaa is C or S
  MOD_RES (12), (13), (14), (15), (16): Xaa is A or G
  MOD_RES (17), (18), (19), (20): Xaa is A or G or is absent

SEQ ID NO: 74436 - protein, 38 aa, Artificial Sequence; identical to SEQ ID NO: 17278
  GFR-binding peptide
  MOD_RES (2), (2): Xaa is C or S
  MOD_RES (15), (16), (17), (18), (19): Xaa is A or G
  MOD_RES (20), (21), (22), (23): Xaa is A or G or is absent

SEQ ID NO: 74437 - protein, 38 aa, Artificial Sequence; identical to SEQ ID NO: 17279
  GFR-binding peptide
  MOD_RES (33), (33): Xaa is C or S

SEQ ID NO: 74438 - protein, 36 aa, Artificial Sequence; identical to SEQ ID NO: 17280
  GFR-binding peptide
  MOD_RES (35), (35): Xaa is C or S
  MOD_RES (11), (12), (13), (14), (15): Xaa is A or G
  MOD_RES (16), (17), (18), (19): Xaa is A or G or is absent

SEQ ID NO: 74439 - protein, 33 aa, Artificial Sequence; identical to SEQ ID NO: 17281
  GFR-binding peptide
  MOD_RES (33), (33): Xaa is C or S

SEQ ID NO: 74440 - protein, 39 aa, Artificial Sequence
  GFR-binding peptide
  MOD_RES (2), (4), (38), (39): Xaa is C or S
  MOD_RES (16), (17), (18), (19), (20): Xaa is A or G
  MOD_RES (21), (22), (23), (24): Xaa is A or G or is absent
RXGXSEVVMDSMEGLXXXXXXXXXMIQITINSLRTPVXX

SEQ ID NO: 74441 - protein, 38 aa, Artificial Sequence
  GFR-binding peptide
  MOD_RES (2), (4), (38): Xaa is C or S
  MOD_RES (16), (17), (18), (19), (20): Xaa is A or G
  MOD_RES (21), (22), (23), (24): Xaa is A or G or is absent
SXGXRDVVMGSMEGIXXXXXXXXXMIQMTINSMKTPTX

SEQ ID NO: 74442 - protein, 37 aa, Artificial Sequence
  GFR-binding peptide
  MOD_RES (1), (3), (35), (36): Xaa is C or S
XGXRDVVMGSMEGLIIQQKDNMIQMTINSMKTPTXXP

SEQ ID NO: 74443 - protein, 39 aa, Artificial Sequence; identical to SEQ ID NO: 17282
  GFR-binding peptide
  MOD_RES (36), (36): Xaa is C or S

SEQ ID NO: 74444 - protein, 39 aa, Artificial Sequence; identical to SEQ ID NO: 17283
  GFR-binding peptide
  MOD_RES (1), (38): Xaa is C or S
  MOD_RES (14), (15), (16), (17), (18): Xaa is A or G
  MOD_RES (19), (20), (21), (22): Xaa is A or G or is absent

SEQ ID NO: 74445 - protein, 35 aa, Artificial Sequence
  GFR-binding peptide
  MOD_RES (2), (34), (35): Xaa is C or S
GXAEVVMDSMEGIVVNNAADMIQITINSLRAPVXX

SEQ ID NO: 74446 - protein, 38 aa, Artificial Sequence
  GFR-binding peptide
  MOD_RES (2), (4), (38): Xaa is C or S
  MOD_RES (16), (17), (18), (19), (20): Xaa is A or G
  MOD_RES (21), (22), (23), (24): Xaa is A or G or is absent
RXGXAEVVMDSMEGLXXXXXXXXXMIQITINSLRAPVX

SEQ ID NO: 74447 - protein, 35 aa, Artificial Sequence
  GFR-binding peptide
  MOD_RES (2), (4), (35): Xaa is C or S
SXKXSRVIMSMEGLVKPKRGVMIQITINSLAQPVX

SEQ ID NO: 74448 - protein, 33 aa, Artificial Sequence
  GFR-binding peptide
  MOD_RES (33), (33): Xaa is C or S
  MOD_RES (11), (12), (13), (14), (15): Xaa is A or G
  MOD_RES (16), (17), (18), (19): Xaa is A or G or is absent
EVVMDSMEGIXXXXXXXXXMIQITINSLRAPVX

SEQ ID NO: 74449 - protein, 33 aa, Artificial Sequence
  GFR-binding peptide
  MOD_RES (32), (33): Xaa is C or S
SEVVMDSMEGLVVNNASDMIQITINSLRTPVXX

SEQ ID NO: 74450 - protein, 43 aa, Artificial Sequence; identical to SEQ ID NO: 17287
  GFR-binding peptide
  MOD_RES (1), (3), (37): Xaa is C or S
  MOD_RES (15), (16), (17), (18), (19): Xaa is A or G
  MOD_RES (20), (21), (22), (23): Xaa is A or G or is absent

SEQ ID NO: 74451 - protein, 39 aa, Artificial Sequence; identical to SEQ ID NO: 17289
  GFR-binding peptide
  MOD_RES (1), (38): Xaa is C or S

SEQ ID NO: 74452 - protein, 34 aa, Artificial Sequence
  GFR-binding peptide
  MOD_RES (31), (32): Xaa is C or S
EVVMDSMEGLVVNNAADMIQITINSLRAPVXXSA

SEQ ID NO: 74453 - protein, 40 aa, Artificial Sequence
  GFR-binding peptide
  MOD_RES (34), (35): Xaa is C or S
  MOD_RES (12), (13), (14), (15), (16): Xaa is A or G
  MOD_RES (17), (18), (19), (20): Xaa is A or G or is absent
RDVVMGSMEGLXXXXXXXXXMIQMTINSMKTPTXXPGASG

SEQ ID NO: 74454 - protein, 35 aa, Artificial Sequence; identical to SEQ ID NO: 17294
  GFR-binding peptide
  MOD_RES (2), (2): Xaa is C or S
  MOD_RES (14), (15), (16), (17), (18): Xaa is A or G
  MOD_RES (19), (20), (21), (22): Xaa is A or G or is absent

SEQ ID NO: 74455 - protein, 39 aa, Artificial Sequence
  GFR-binding peptide
  MOD_RES (2), (4), (35), (36): Xaa is C or S
LXGXEEVIMSMEGILLVRGNDMIQMTINSTKVPAXXTSP

SEQ ID NO: 74456 - protein, 37 aa, Artificial Sequence; identical to SEQ ID NO: 49245
  GFR-binding peptide
  MOD_RES (1), (3), (36), (37): Xaa is C or S
  MOD_RES (14), (15), (16), (17), (18): Xaa is A or G
  MOD_RES (19), (20), (21), (22): Xaa is A or G or is absent

SEQ ID NO: 74457 - protein, 42 aa, Artificial Sequence; identical to SEQ ID NO: 17298
  GFR-binding peptide
  MOD_RES (2), (39): Xaa is C or S

SEQ ID NO: 74458 - protein, 35 aa, Artificial Sequence; identical to SEQ ID NO: 17300
  GFR-binding peptide
  MOD_RES (1), (1): Xaa is C or S
  MOD_RES (14), (15), (16), (17), (18): Xaa is A or G
  MOD_RES (19), (20), (21), (22): Xaa is A or G or is absent

SEQ ID NO: 74459 - protein, 32 aa, Artificial Sequence
  GFR-binding peptide
  MOD_RES (11), (12), (13), (14), (15): Xaa is A or G
  MOD_RES (16), (17), (18), (19): Xaa is A or G or is absent
EEVIMSMEGLXXXXXXXXXMIQMTINSTKVPA

SEQ ID NO: 74460 - protein, 39 aa, Artificial Sequence; identical to SEQ ID NO: 17303
  GFR-binding peptide
  MOD_RES (2), (4), (38): Xaa is C or S
  MOD_RES (16), (17), (18), (19), (20): Xaa is A or G
  MOD_RES (21), (22), (23), (24): Xaa is A or G or is absent

SEQ ID NO: 74461 - protein, 38 aa, Artificial Sequence; identical to SEQ ID NO: 17304
  GFR-binding peptide
  MOD_RES (36), (36): Xaa is C or S

SEQ ID NO: 74462 - protein, 38 aa, Artificial Sequence; identical to SEQ ID NO: 46705
  GFR-binding peptide
  MOD_RES (2), (4), (35), (36): Xaa is C or S

SEQ ID NO: 74463 - protein, 36 aa, Artificial Sequence
  GFR-binding peptide
  MOD_RES (1), (34), (35): Xaa is C or S
  MOD_RES (12), (13), (14), (15), (16): Xaa is A or G
  MOD_RES (17), (18), (19), (20): Xaa is A or G or is absent
XEEVIMSMEGLXXXXXXXXXMIQMTINSTKVPAXXT

SEQ ID NO: 74464 - protein, 34 aa, Artificial Sequence; identical to SEQ ID NO: 17305
  GFR-binding peptide
  MOD_RES (34), (34): Xaa is C or S

SEQ ID NO: 74465 - protein, 40 aa, Artificial Sequence; identical to SEQ ID NO: 17306
  GFR-binding peptide
  MOD_RES (37), (37): Xaa is C or S
  MOD_RES (13), (14), (15), (16), (17): Xaa is A or G
  MOD_RES (18), (19), (20), (21): Xaa is A or G or is absent

SEQ ID NO: 74466 - protein, 34 aa, Artificial Sequence; identical to SEQ ID NO: 17307
  GFR-binding peptide

SEQ ID NO: 74467 - protein, 39 aa, Artificial Sequence
  GFR-binding peptide
  MOD_RES (33), (34): Xaa is C or S
  MOD_RES (11), (12), (13), (14), (15): Xaa is A or G
  MOD_RES (16), (17), (18), (19): Xaa is A or G or is absent
EEVIMSMEGLXXXXXXXXXMIQMTINSTKVPAXXTSPVR

SEQ ID NO: 74468 - protein, 33 aa, Artificial Sequence
  GFR-binding peptide
  MOD_RES (2), (2): Xaa is C or S
GXSEVVMDSMEGIVVNNASDMIQITINSLRTPV

SEQ ID NO: 74469 - protein, 38 aa, Artificial Sequence; identical to SEQ ID NO: 17309
  GFR-binding peptide
  MOD_RES (34), (34): Xaa is C or S
  MOD_RES (12), (13), (14), (15), (16): Xaa is A or G
  MOD_RES (17), (18), (19), (20): Xaa is A or G or is absent

SEQ ID NO: 74470 - protein, 39 aa, Artificial Sequence; identical to SEQ ID NO: 49256
  GFR-binding peptide
  MOD_RES (2), (34), (35): Xaa is C or S

SEQ ID NO: 74471 - protein, 32 aa, Artificial Sequence; identical to SEQ ID NO: 46712
  GFR-binding peptide
  MOD_RES (2), (2): Xaa is C or S

SEQ ID NO: 74472 - protein, 39 aa, Artificial Sequence; identical to SEQ ID NO: 17311
  GFR-binding peptide
  MOD_RES (36), (36): Xaa is C or S
  MOD_RES (12), (13), (14), (15), (16): Xaa is A or G
  MOD_RES (17), (18), (19), (20): Xaa is A or G or is absent

SEQ ID NO: 74473 - protein, 41 aa, Artificial Sequence; identical to SEQ ID NO: 17312
  GFR-binding peptide
  MOD_RES (2), (4), (38): Xaa is C or S
  MOD_RES (16), (17), (18), (19), (20): Xaa is A or G
  MOD_RES (21), (22), (23), (24): Xaa is A or G or is absent

SEQ ID NO: 74474 - protein, 42 aa, Artificial Sequence; identical to SEQ ID NO: 17313
  GFR-binding peptide
  MOD_RES (2), (36): Xaa is C or S

SEQ ID NO: 74475 - protein, 37 aa, Artificial Sequence; identical to SEQ ID NO: 17314
  GFR-binding peptide
  MOD_RES (1), (35): Xaa is C or S

SEQ ID NO: 74476 - protein, 35 aa, Artificial Sequence; identical to SEQ ID NO: 17315
  GFR-binding peptide
  MOD_RES (1), (35): Xaa is C or S

SEQ ID NO: 74477 - protein, 36 aa, Artificial Sequence
  GFR-binding peptide
  MOD_RES (2), (4), (36): Xaa is C or S
RXGXAEVVMDSMEGIVVNNAADMIQITINSLRAPVX

SEQ ID NO: 74478 - protein, 32 aa, Artificial Sequence
  GFR-binding peptide
  MOD_RES (31), (32): Xaa is C or S
EVVMDSMEGLVVNNAADMIQITINSLRAPVXX

SEQ ID NO: 74479 - protein, 42 aa, Artificial Sequence
  GFR-binding peptide
  MOD_RES (2), (4), (37), (38): Xaa is C or S
  MOD_RES (15), (16), (17), (18), (19): Xaa is A or G
  MOD_RES (20), (21), (22), (23): Xaa is A or G or is absent
SXKXSKVIMSMEGLXXXXXXXXXMIQITINSLDQSVXXPSAS

SEQ ID NO: 74480 - protein, 38 aa, Artificial Sequence
  GFR-binding peptide
  MOD_RES (1), (35), (36): Xaa is C or S
  MOD_RES (13), (14), (15), (16), (17): Xaa is A or G
  MOD_RES (18), (19), (20), (21): Xaa is A or G or is absent
XSEVVMDSMEGLXXXXXXXXXMIQITINSLRTPVXXTP

SEQ ID NO: 74481 - protein, 38 aa, Artificial Sequence; identical to SEQ ID NO: 17316
  GFR-binding peptide
  MOD_RES (35), (35): Xaa is C or S

SEQ ID NO: 74482 - protein, 37 aa, Artificial Sequence
  GFR-binding peptide
  MOD_RES (31), (32): Xaa is C or S
EVVMDSMEGLVVNNAADMIQITINSLRAPVXXSAPAA

SEQ ID NO: 74483 - protein, 43 aa, Artificial Sequence
  GFR-binding peptide
  MOD_RES (1), (3), (37), (38): Xaa is C or S
  MOD_RES (15), (16), (17), (18), (19): Xaa is A or G
  MOD_RES (20), (21), (22), (23): Xaa is A or G or is absent
XGXRDVVMGSMEGIXXXXXXXXXMIQMTINSMKTPTXXPGASG

SEQ ID NO: 74484 - protein, 34 aa, Artificial Sequence; identical to SEQ ID NO: 17318
  GFR-binding peptide
  MOD_RES (33), (33): Xaa is C or S

SEQ ID NO: 74485 - protein, 37 aa, Artificial Sequence; identical to SEQ ID NO: 17319
  GFR-binding peptide
  MOD_RES (35), (35): Xaa is C or S
  MOD_RES (11), (12), (13), (14), (15): Xaa is A or G
  MOD_RES (16), (17), (18), (19): Xaa is A or G or is absent

SEQ ID NO: 74486 - protein, 36 aa, Artificial Sequence
  GFR-binding peptide
  MOD_RES (31), (32): Xaa is C or S
DVVMGSMEGIIIQQKDNMIQMTINSMKTPTXXPGAS

SEQ ID NO: 74487 - protein, 36 aa, Artificial Sequence
  GFR-binding peptide
  MOD_RES (1), (32), (33): Xaa is C or S
XSKVVMSMEGLVKPTRGVMIQITINSLDQPVXXPSA

SEQ ID NO: 74488 - protein, 37 aa, Artificial Sequence; identical to SEQ ID NO: 17320
  GFR-binding peptide
  MOD_RES (36), (36): Xaa is C or S
  MOD_RES (12), (13), (14), (15), (16): Xaa is A or G
  MOD_RES (17), (18), (19), (20): Xaa is A or G or is absent

SEQ ID NO: 74489 - protein, 41 aa, Artificial Sequence
  GFR-binding peptide
  MOD_RES (2), (4), (37), (38): Xaa is C or S
  MOD_RES (15), (16), (17), (18), (19): Xaa is A or G
  MOD_RES (20), (21), (22), (23): Xaa is A or G or is absent
LXGXEEVIMSMEGIXXXXXXXXXMIQMTINSTKVPAXXTSP

SEQ ID NO: 74490 - protein, 37 aa, Artificial Sequence
  GFR-binding peptide
  MOD_RES (1), (3), (37): Xaa is C or S
  MOD_RES (15), (16), (17), (18), (19): Xaa is A or G
  MOD_RES (20), (21), (22), (23): Xaa is A or G or is absent
XGXRDVVMGSMEGLXXXXXXXXXMIQMTINSMKTPTX

SEQ ID NO: 74491 - protein, 41 aa, Artificial Sequence; identical to SEQ ID NO: 17322
  GFR-binding peptide
  MOD_RES (1), (35): Xaa is C or S

SEQ ID NO: 74492 - protein, 36 aa, Artificial Sequence
  GFR-binding peptide
  MOD_RES (32), (33): Xaa is C or S
AEVVMDSMEGLVVNNAADMIQITINSLRAPVXXSAP

SEQ ID NO: 74493 - protein, 41 aa, Artificial Sequence
  GFR-binding peptide
  MOD_RES (1), (3), (36), (37): Xaa is C or S
  MOD_RES (14), (15), (16), (17), (18): Xaa is A or G
  MOD_RES (19), (20), (21), (22): Xaa is A or G or is absent
XKXSKVVMSMEGLXXXXXXXXXMIQITINSLDQPVXXPSAS

SEQ ID NO: 74494 - protein, 33 aa, Artificial Sequence
  GFR-binding peptide
  MOD_RES (2), (2): Xaa is C or S
GXRDVVMGSMEGLIIQQKDNMIQMTINSMKTPT

SEQ ID NO: 74495 - protein, 33 aa, Artificial Sequence; identical to SEQ ID NO: 17325
  GFR-binding peptide
  MOD_RES (12), (13), (14), (15), (16): Xaa is A or G
  MOD_RES (17), (18), (19), (20): Xaa is A or G or is absent

SEQ ID NO: 74496 - protein, 39 aa, Artificial Sequence; identical to SEQ ID NO: 17328
  GFR-binding peptide
  MOD_RES (33), (33): Xaa is C or S

SEQ ID NO: 74497 - protein, 32 aa, Artificial Sequence
  GFR-binding peptide
  MOD_RES (2), (2): Xaa is C or S
GXEEVIMSMEGLLLVRGNDMIQMTINSTKVPA

SEQ ID NO: 74498 - protein, 34 aa, Artificial Sequence
  GFR-binding peptide
  MOD_RES (31), (32): Xaa is C or S
EVVMDSMEGLVVNNASDMIQITINSLRTPVXXTP

SEQ ID NO: 74499 - protein, 41 aa, Artificial Sequence
  GFR-binding peptide
  MOD_RES (2), (4), (37), (38): Xaa is C or S
  MOD_RES (15), (16), (17), (18), (19): Xaa is A or G
  MOD_RES (20), (21), (22), (23): Xaa is A or G or is absent
SXKXSRVIMSMEGLXXXXXXXXXMIQITINSLAQPVXXPAA

SEQ ID NO: 74500 - protein, 35 aa, Artificial Sequence
  GFR-binding peptide
  MOD_RES (2), (34), (35): Xaa is C or S
GXSRVVMNSMEGLIVNSSDDMIQVTINSLKTPAXX

SEQ ID NO: 74501 - protein, 32 aa, Artificial Sequence; identical to SEQ ID NO: 49285
  GFR-binding peptide
  MOD_RES (1), (32): Xaa is C or S

SEQ ID NO: 74502 - protein, 38 aa, Artificial Sequence; identical to SEQ ID NO: 17329
  GFR-binding peptide
  MOD_RES (33), (33): Xaa is C or S
  MOD_RES (11), (12), (13), (14), (15): Xaa is A or G
  MOD_RES (16), (17), (18), (19): Xaa is A or G or is absent

SEQ ID NO: 74503 - protein, 38 aa, Artificial Sequence
  GFR-binding peptide
  MOD_RES (34), (35): Xaa is C or S
  MOD_RES (12), (13), (14), (15), (16): Xaa is A or G
  MOD_RES (17), (18), (19), (20): Xaa is A or G or is absent
AEVVMDSMEGIXXXXXXXXXMIQITINSLRAPVXXSAP

SEQ ID NO: 74504 - protein, 37 aa, Artificial Sequence; identical to SEQ ID NO: 17331
  GFR-binding peptide
  MOD_RES (33), (33): Xaa is C or S
  MOD_RES (11), (12), (13), (14), (15): Xaa is A or G
  MOD_RES (16), (17), (18), (19): Xaa is A or G or is absent

SEQ ID NO: 74505 - protein, 32 aa, Artificial Sequence
  GFR-binding peptide
  MOD_RES (11), (12), (13), (14), (15): Xaa is A or G
  MOD_RES (16), (17), (18), (19): Xaa is A or G or is absent
SKVVMSMEGLXXXXXXXXXMIQITINSLDQPV

SEQ ID NO: 74506 - protein, 39 aa, Artificial Sequence
  GFR-binding peptide
  MOD_RES (1), (34), (35): Xaa is C or S
  MOD_RES (12), (13), (14), (15), (16): Xaa is A or G
  MOD_RES (17), (18), (19), (20): Xaa is A or G or is absent
XEEVIMSMEGLXXXXXXXXXMIQMTINSTKVPAXXTSPV

SEQ ID NO: 74507 - protein, 33 aa, Artificial Sequence
  GFR-binding peptide
  MOD_RES (1), (1): Xaa is C or S
  MOD_RES (12), (13), (14), (15), (16): Xaa is A or G
  MOD_RES (17), (18), (19), (20): Xaa is A or G or is absent
XEEVIMSMEGIXXXXXXXXXMIQMTINSTKVPA

SEQ ID NO: 74508 - protein, 38 aa, Artificial Sequence
  GFR-binding peptide
  MOD_RES (2), (4), (36), (37): Xaa is C or S
SXGXRDVVMGSMEGIIIQQKDNMIQMTINSMKTPTXXP

SEQ ID NO: 74509 - protein, 42 aa, Artificial Sequence; identical to SEQ ID NO: 17333
  GFR-binding peptide
  MOD_RES (2), (36): Xaa is C or S
  MOD_RES (14), (15), (16), (17), (18): Xaa is A or G
  MOD_RES (19), (20), (21), (22): Xaa is A or G or is absent

SEQ ID NO: 74510 - protein, 39 aa, Artificial Sequence; identical to SEQ ID NO: 46744
  GFR-binding peptide
  MOD_RES (2), (4), (35), (36): Xaa is C or S

SEQ ID NO: 74511 - protein, 37 aa, Artificial Sequence; identical to SEQ ID NO: 17335
  GFR-binding peptide
  MOD_RES (2), (2): Xaa is C or S
  MOD_RES (15), (16), (17), (18), (19): Xaa is A or G
  MOD_RES (20), (21), (22), (23): Xaa is A or G or is absent

SEQ ID NO: 74512 - protein, 31 aa, Artificial Sequence
  GFR-binding peptide
SRVVMNSMEGLIVNSSDDMIQVTINSLKTPA

SEQ ID NO: 74513 - protein, 33 aa, Artificial Sequence; identical to SEQ ID NO: 17336
  GFR-binding peptide
  MOD_RES (11), (12), (13), (14), (15): Xaa is A or G
  MOD_RES (16), (17), (18), (19): Xaa is A or G or is absent

SEQ ID NO: 74514 - protein, 37 aa, Artificial Sequence; identical to SEQ ID NO: 49295
  GFR-binding peptide
  MOD_RES (31), (32): Xaa is C or S

SEQ ID NO: 74515 - protein, 36 aa, Artificial Sequence
  GFR-binding peptide
  MOD_RES (32), (33): Xaa is C or S
SEVVMDSMEGIVVNNASDMIQITINSLRTPVXXTPP

SEQ ID NO: 74516 - protein, 43 aa, Artificial Sequence; identical to SEQ ID NO: 17338
  GFR-binding peptide
  MOD_RES (2), (4), (41): Xaa is C or S
  MOD_RES (17), (18), (19), (20), (21): Xaa is A or G
  MOD_RES (22), (23), (24), (25): Xaa is A or G or is absent

SEQ ID NO: 74517 - protein, 40 aa, Artificial Sequence
  GFR-binding peptide
  MOD_RES (1), (3), (36), (37): Xaa is C or S
  MOD_RES (14), (15), (16), (17), (18): Xaa is A or G
  MOD_RES (19), (20), (21), (22): Xaa is A or G or is absent
XGXEEVIMSMEGLXXXXXXXXXMIQMTINSTKVPAXXTSP

SEQ ID NO: 74518 - protein, 37 aa, Artificial Sequence
  GFR-binding peptide
  MOD_RES (1), (32), (33): Xaa is C or S
XSRVIMSMEGLVKPKRGVMIQITINSLAQPVXXPAAS

SEQ ID NO: 74519 - protein, 36 aa, Artificial Sequence; identical to SEQ ID NO: 49302
  GFR-binding peptide
  MOD_RES (31), (32): Xaa is C or S

SEQ ID NO: 74520 - protein, 41 aa, Artificial Sequence
  GFR-binding peptide
  MOD_RES (2), (4), (38), (39): Xaa is C or S
  MOD_RES (16), (17), (18), (19), (20): Xaa is A or G
  MOD_RES (21), (22), (23), (24): Xaa is A or G or is absent
RXGXSEVVMDSMEGIXXXXXXXXXMIQITINSLRTPVXXTP

SEQ ID NO: 74521 - protein, 40 aa, Artificial Sequence; identical to SEQ ID NO: 17339
  GFR-binding peptide
  MOD_RES (1), (35): Xaa is C or S

SEQ ID NO: 74522 - protein, 36 aa, Artificial Sequence; identical to SEQ ID NO: 49309
  GFR-binding peptide
  MOD_RES (1), (3), (34), (35): Xaa is C or S

SEQ ID NO: 74523 - protein, 36 aa, Artificial Sequence
  GFR-binding peptide
  MOD_RES (1), (3): Xaa is C or S
  MOD_RES (15), (16), (17), (18), (19): Xaa is A or G
  MOD_RES (20), (21), (22), (23): Xaa is A or G or is absent
XGXAEVVMDSMEGIXXXXXXXXXMIQITINSLRAPV

SEQ ID NO: 74524 - protein, 37 aa, Artificial Sequence; identical to SEQ ID NO: 17341
  GFR-binding peptide
  MOD_RES (2), (2): Xaa is C or S

SEQ ID NO: 74525 - protein, 36 aa, Artificial Sequence; identical to SEQ ID NO: 46760
  GFR-binding peptide
  MOD_RES (1), (32), (33): Xaa is C or S

SEQ ID NO: 74526 - protein, 38 aa, Artificial Sequence
  GFR-binding peptide
  MOD_RES (1), (3), (35), (36): Xaa is C or S
XGXSEVVMDSMEGLVVNNASDMIQITINSLRTPVXXTP

SEQ ID NO: 74527 - protein, 34 aa, Artificial Sequence
  GFR-binding peptide
  MOD_RES (2), (2): Xaa is C or S
  MOD_RES (13), (14), (15), (16), (17): Xaa is A or G
  MOD_RES (18), (19), (20), (21): Xaa is A or G or is absent
GXEEVIMSMEGLXXXXXXXXXMIQMTINSTKVPA

SEQ ID NO: 74528 - protein, 31 aa, Artificial Sequence
  GFR-binding peptide
  MOD_RES (31), (31): Xaa is C or S
EVVMDSMEGIVVNNAADMIQITINSLRAPVX

SEQ ID NO: 74529 - protein, 38 aa, Artificial Sequence; identical to SEQ ID NO: 17342
  GFR-binding peptide
  MOD_RES (37), (37): Xaa is C or S

SEQ ID NO: 74530 - protein, 37 aa, Artificial Sequence
  GFR-binding peptide
  MOD_RES (31), (32): Xaa is C or S
DVVMGSMEGIIIQQKDNMIQMTINSMKTPTXXPGASG

SEQ ID NO: 74531 - protein, 33 aa, Artificial Sequence; identical to SEQ ID NO: 17344
  GFR-binding peptide
  MOD_RES (33), (33): Xaa is C or S

SEQ ID NO: 74532 - protein, 41 aa, Artificial Sequence; identical to SEQ ID NO: 17346
  GFR-binding peptide
  MOD_RES (1), (35): Xaa is C or S
  MOD_RES (13), (14), (15), (16), (17): Xaa is A or G
  MOD_RES (18), (19), (20), (21): Xaa is A or G or is absent

SEQ ID NO: 74533 - protein, 39 aa, Artificial Sequence; identical to SEQ ID NO: 17347
  GFR-binding peptide
  MOD_RES (35), (35): Xaa is C or S

SEQ ID NO: 74534 - protein, 39 aa, Artificial Sequence
  GFR-binding peptide
  MOD_RES (1), (33), (34): Xaa is C or S
XSRVVMNSMEGIIVNSSDDMIQVTINSLKTPAXXPKPVH

SEQ ID NO: 74535 - protein, 37 aa, Artificial Sequence; identical to SEQ ID NO: 17349
  GFR-binding peptide
  MOD_RES (2), (2): Xaa is C or S
  MOD_RES (15), (16), (17), (18), (19): Xaa is A or G
  MOD_RES (20), (21), (22), (23): Xaa is A or G or is absent

SEQ ID NO: 74536 - protein, 32 aa, Artificial Sequence
  GFR-binding peptide
  MOD_RES (11), (12), (13), (14), (15): Xaa is A or G
  MOD_RES (16), (17), (18), (19): Xaa is A or G or is absent
DVVMGSMEGLXXXXXXXXXMIQMTINSMKTPT

SEQ ID NO: 74537 - protein, 42 aa, Artificial Sequence; identical to SEQ ID NO: 17350
  GFR-binding peptide
  MOD_RES (2), (39): Xaa is C or S

SEQ ID NO: 74538 - protein, 33 aa, Artificial Sequence; identical to SEQ ID NO: 46765
  GFR-binding peptide
  MOD_RES (1), (32), (33): Xaa is C or S

SEQ ID NO: 74539 - protein, 35 aa, Artificial Sequence
  GFR-binding peptide
  MOD_RES (34), (35): Xaa is C or S
  MOD_RES (12), (13), (14), (15), (16): Xaa is A or G
  MOD_RES (17), (18), (19), (20): Xaa is A or G or is absent
AEVVMDSMEGLXXXXXXXXXMIQITINSLRAPVXX

SEQ ID NO: 74540 - protein, 39 aa, Artificial Sequence
  GFR-binding peptide
  MOD_RES (1), (3), (36), (37): Xaa is C or S
  MOD_RES (14), (15), (16), (17), (18): Xaa is A or G
  MOD_RES (19), (20), (21), (22): Xaa is A or G or is absent
XKXSKVIMSMEGLXXXXXXXXXMIQITINSLDQSVXXPS

SEQ ID NO: 74541 - protein, 38 aa, Artificial Sequence; identical to SEQ ID NO: 17352
  GFR-binding peptide
  MOD_RES (34), (34): Xaa is C or S

SEQ ID NO: 74542 - protein, 42 aa, Artificial Sequence; identical to SEQ ID NO: 17353
  GFR-binding peptide
  MOD_RES (2), (39): Xaa is C or S
  MOD_RES (15), (16), (17), (18), (19): Xaa is A or G
  MOD_RES (20), (21), (22), (23): Xaa is A or G or is absent

SEQ ID NO: 74543 - protein, 41 aa, Artificial Sequence
  GFR-binding peptide
  MOD_RES (2), (36), (37): Xaa is C or S
  MOD_RES (14), (15), (16), (17), (18): Xaa is A or G
  MOD_RES (19), (20), (21), (22): Xaa is A or G or is absent
GXAEVVMDSMEGIXXXXXXXXXMIQITINSLRAPVXXSAPA

SEQ ID NO: 74544 - protein, 34 aa, Artificial Sequence; identical to SEQ ID NO: 49327
  GFR-binding peptide
  MOD_RES (2), (33), (34): Xaa is C or S

SEQ ID NO: 74545 - protein, 41 aa, Artificial Sequence
  GFR-binding peptide
  MOD_RES (1), (35), (36): Xaa is C or S
  MOD_RES (13), (14), (15), (16), (17): Xaa is A or G
  MOD_RES (18), (19), (20), (21): Xaa is A or G or is absent
XSRVVMNSMEGIXXXXXXXXXMIQVTINSLKTPAXXPKPVH

SEQ ID NO: 74546 - protein, 37 aa, Artificial Sequence; identical to SEQ ID NO: 17354
  GFR-binding peptide
  MOD_RES (33), (33): Xaa is C or S
  MOD_RES (11), (12), (13), (14), (15): Xaa is A or G
  MOD_RES (16), (17), (18), (19): Xaa is A or G or is absent

SEQ ID NO: 74547 - protein, 41 aa, Artificial Sequence; identical to SEQ ID NO: 17355
  GFR-binding peptide
  MOD_RES (1), (35): Xaa is C or S

SEQ ID NO: 74548 - protein, 40 aa, Artificial Sequence
  GFR-binding peptide
  MOD_RES (2), (35), (36): Xaa is C or S
  MOD_RES (13), (14), (15), (16), (17): Xaa is A or G
  MOD_RES (18), (19), (20), (21): Xaa is A or G or is absent
KXSKVIMSMEGLXXXXXXXXXMIQITINSLDQSVXXPSAS

SEQ ID NO: 74549 - protein, 41 aa, Artificial Sequence; identical to SEQ ID NO: 17356
  GFR-binding peptide
  MOD_RES (2), (4), (41): Xaa is C or S
  MOD_RES (17), (18), (19), (20), (21): Xaa is A or G
  MOD_RES (22), (23), (24), (25): Xaa is A or G or is absent

SEQ ID NO: 74550 - protein, 37 aa, Artificial Sequence
  GFR-binding peptide
  MOD_RES (2), (36), (37): Xaa is C or S
  MOD_RES (14), (15), (16), (17), (18): Xaa is A or G
  MOD_RES (19), (20), (21), (22): Xaa is A or G or is absent
GXRDVVMGSMEGIXXXXXXXXXMIQMTINSMKTPTXX

SEQ ID NO: 74551 - protein, 32 aa, Artificial Sequence
  GFR-binding peptide
  MOD_RES (32), (32): Xaa is C or S
RDVVMGSMEGIIIQQKDNMIQMTINSMKTPTX

SEQ ID NO: 74552 - protein, 34 aa, Artificial Sequence; identical to SEQ ID NO: 17358
  GFR-binding peptide
  MOD_RES (33), (33): Xaa is C or S

SEQ ID NO: 74553 - protein, 36 aa, Artificial Sequence
  GFR-binding peptide
  MOD_RES (34), (35): Xaa is C or S
  MOD_RES (12), (13), (14), (15), (16): Xaa is A or G
  MOD_RES (17), (18), (19), (20): Xaa is A or G or is absent
AEVVMDSMEGIXXXXXXXXXMIQITINSLRAPVXXS

SEQ ID NO: 74554 - protein, 39 aa, Artificial Sequence; identical to SEQ ID NO: 17359
  GFR-binding peptide
  MOD_RES (37), (37): Xaa is C or S
  MOD_RES (13), (14), (15), (16), (17): Xaa is A or G
  MOD_RES (18), (19), (20), (21): Xaa is A or G or is absent

SEQ ID NO: 74555 - protein, 34 aa, Artificial Sequence; identical to SEQ ID NO: 46781
  GFR-binding peptide
  MOD_RES (2), (4): Xaa is C or S

SEQ ID NO: 74556 - protein, 34 aa, Artificial Sequence
  GFR-binding peptide
  MOD_RES (33), (34): Xaa is C or S
  MOD_RES (11), (12), (13), (14), (15): Xaa is A or G
  MOD_RES (16), (17), (18), (19): Xaa is A or G or is absent
SKVIMSMEGLXXXXXXXXXMIQITINSLDQSVXX

SEQ ID NO: 74557 - protein, 32 aa, Artificial Sequence
  GFR-binding peptide
  MOD_RES (2), (2): Xaa is C or S
KXSKVIMSMEGLIKPTKGIMIQITINSLDQSV

SEQ ID NO: 74558 - protein, 42 aa, Artificial Sequence; identical to SEQ ID NO: 17360
  GFR-binding peptide
  MOD_RES (2), (4), (41): Xaa is C or S
  MOD_RES (17), (18), (19), (20), (21): Xaa is A or G
  MOD_RES (22), (23), (24), (25): Xaa is A or G or is absent

SEQ ID NO: 74559 - protein, 35 aa, Artificial Sequence; identical to SEQ ID NO: 49345
  GFR-binding peptide
  MOD_RES (1), (32), (33): Xaa is C or S

SEQ ID NO: 74560 - protein, 37 aa, Artificial Sequence
  GFR-binding peptide
  MOD_RES (2), (4): Xaa is C or S
  MOD_RES (16), (17), (18), (19), (20): Xaa is A or G
  MOD_RES (21), (22), (23), (24): Xaa is A or G or is absent
SXGXRDVVMGSMEGIXXXXXXXXXMIQMTINSMKTPT

SEQ ID NO: 74561 - protein, 36 aa, Artificial Sequence; identical to SEQ ID NO: 49348
  GFR-binding peptide
  MOD_RES (31), (32): Xaa is C or S

SEQ ID NO: 74562 - protein, 36 aa, Artificial Sequence
  GFR-binding peptide
  MOD_RES (1), (3): Xaa is C or S
  MOD_RES (15), (16), (17), (18), (19): Xaa is A or G
  MOD_RES (20), (21), (22), (23): Xaa is A or G or is absent
XGXSRVVMNSMEGLXXXXXXXXXMIQVTINSLKTPA

SEQ ID NO: 74563 - protein, 35 aa, Artificial Sequence
  GFR-binding peptide
  MOD_RES (2), (33), (34): Xaa is C or S
GXEEVIMSMEGILLVRGNDMIQMTINSTKVPAXXT

SEQ ID NO: 74564 - protein, 33 aa, Artificial Sequence
  GFR-binding peptide
  MOD_RES (31), (32): Xaa is C or S
EEVIMSMEGILLVRGNDMIQMTINSTKVPAXXT

SEQ ID NO: 74565 - protein, 38 aa, Artificial Sequence; identical to SEQ ID NO: 17361
  GFR-binding peptide
  MOD_RES (1), (38): Xaa is C or S

SEQ ID NO: 74566 - protein, 40 aa, Artificial Sequence; identical to SEQ ID NO: 17362
  GFR-binding peptide
  MOD_RES (36), (36): Xaa is C or S
  MOD_RES (12), (13), (14), (15), (16): Xaa is A or G
  MOD_RES (17), (18), (19), (20): Xaa is A or G or is absent

SEQ ID NO: 74567 - protein, 42 aa, Artificial Sequence; identical to SEQ ID NO: 17363
  GFR-binding peptide
  MOD_RES (1), (38): Xaa is C or S
  MOD_RES (14), (15), (16), (17), (18): Xaa is A or G
  MOD_RES (19), (20), (21), (22): Xaa is A or G or is absent

SEQ ID NO: 74568 - protein, 36 aa, Artificial Sequence; identical to SEQ ID NO: 49351
  GFR-binding peptide
  MOD_RES (1), (3), (35), (36): Xaa is C or S

SEQ ID NO: 74569 - protein, 35 aa, Artificial Sequence; identical to SEQ ID NO: 17366
  GFR-binding peptide
  MOD_RES (1), (35): Xaa is C or S
  MOD_RES (13), (14), (15), (16), (17): Xaa is A or G
  MOD_RES (18), (19), (20), (21): Xaa is A or G or is absent

SEQ ID NO: 74570 - protein, 38 aa, Artificial Sequence
  GFR-binding peptide
  MOD_RES (34), (35): Xaa is C or S
  MOD_RES (12), (13), (14), (15), (16): Xaa is A or G
  MOD_RES (17), (18), (19), (20): Xaa is A or G or is absent
RDVVMGSMEGIXXXXXXXXXMIQMTINSMKTPTXXPGA

SEQ ID NO: 74571 - protein, 37 aa, Artificial Sequence
  GFR-binding peptide
  MOD_RES (1), (33), (34): Xaa is C or S
XRDVVMGSMEGLIIQQKDNMIQMTINSMKTPTXXPGA

SEQ ID NO: 74572 - protein, 34 aa, Artificial Sequence
  GFR-binding peptide
  MOD_RES (2), (34): Xaa is C or S
GXSEVVMDSMEGIVVNNASDMIQITINSLRTPVX

SEQ ID NO: 74573 - protein, 36 aa, Artificial Sequence; identical to SEQ ID NO: 17369
  GFR-binding peptide

SEQ ID NO: 74574 - protein, 31 aa, Artificial Sequence; identical to SEQ ID NO: 46801
  GFR-binding peptide
  MOD_RES (1), (1): Xaa is C or S

SEQ ID NO: 74575 - protein, 36 aa, Artificial Sequence; identical to SEQ ID NO: 46803
  GFR-binding peptide
  MOD_RES (2), (35), (36): Xaa is C or S
  MOD_RES (13), (14), (15), (16), (17): Xaa is A or G
  MOD_RES (18), (19), (20), (21): Xaa is A or G or is absent

SEQ ID NO: 74576 - protein, 41 aa, Artificial Sequence; identical to SEQ ID NO: 17370
  GFR-binding peptide
  MOD_RES (2), (4), (41): Xaa is C or S
  MOD_RES (17), (18), (19), (20), (21): Xaa is A or G
  MOD_RES (22), (23), (24), (25): Xaa is A or G or is absent

SEQ ID NO: 74577 - protein, 36 aa, Artificial Sequence; identical to SEQ ID NO: 17372
  GFR-binding peptide
  MOD_RES (1), (1): Xaa is C or S
  MOD_RES (14), (15), (16), (17), (18): Xaa is A or G
  MOD_RES (19), (20), (21), (22): Xaa is A or G or is absent

SEQ ID NO: 74578 - protein, 44 aa, Artificial Sequence; identical to SEQ ID NO: 17373
  GFR-binding peptide
  MOD_RES (1), (3), (40): Xaa is C or S

SEQ ID NO: 74579 - protein, 36 aa, Artificial Sequence
  GFR-binding peptide
  MOD_RES (1), (3): Xaa is C or S
  MOD_RES (15), (16), (17), (18), (19): Xaa is A or G
  MOD_RES (20), (21), (22), (23): Xaa is A or G or is absent
XGXAEVVMDSMEGLXXXXXXXXXMIQITINSLRAPV

SEQ ID NO: 74580 - protein, 37 aa, Artificial Sequence
  GFR-binding peptide
  MOD_RES (2), (34), (35): Xaa is C or S
GXSEVVMDSMEGIVVNNASDMIQITINSLRTPVXXTP

SEQ ID NO: 74581 - protein, 36 aa, Artificial Sequence; identical to SEQ ID NO: 49363
  GFR-binding peptide
  MOD_RES (1), (3), (36): Xaa is C or S
  MOD_RES (14), (15), (16), (17), (18): Xaa is A or G
  MOD_RES (19), (20), (21), (22): Xaa is A or G or is absent

SEQ ID NO: 74582 - protein, 42 aa, Artificial Sequence
  GFR-binding peptide
  MOD_RES (2), (36), (37): Xaa is C or S
  MOD_RES (14), (15), (16), (17), (18): Xaa is A or G
  MOD_RES (19), (20), (21), (22): Xaa is A or G or is absent
GXSEVVMDSMEGLXXXXXXXXXMIQITINSLRTPVXXTPPTS

SEQ ID NO: 74583 - protein, 33 aa, Artificial Sequence
  GFR-binding peptide
  MOD_RES (2), (33): Xaa is C or S
KXSRVIMSMEGLVKPKRGVMIQITINSLAQPVX

SEQ ID NO: 74584 - protein, 35 aa, Artificial Sequence
  GFR-binding peptide
  MOD_RES (1), (33), (34): Xaa is C or S
XRDVVMGSMEGLIIQQKDNMIQMTINSMKTPTXXP

SEQ ID NO: 74585 - protein, 36 aa, Artificial Sequence
  GFR-binding peptide
  MOD_RES (1), (3), (36): Xaa is C or S
  MOD_RES (14), (15), (16), (17), (18): Xaa is A or G
  MOD_RES (19), (20), (21), (22): Xaa is A or G or is absent
XKXSKVVMSMEGLXXXXXXXXXMIQITINSLDQPVX

SEQ ID NO: 74586 - protein, 34 aa, Artificial Sequence
  GFR-binding peptide
  MOD_RES (1), (32), (33): Xaa is C or S
XEEVIMSMEGILLVRGNDMIQMTINSTKVPAXXT

SEQ ID NO: 74587 - protein, 33 aa, Artificial Sequence
  GFR-binding peptide
  MOD_RES (32), (33): Xaa is C or S
RDVVMGSMEGLIIQQKDNMIQMTINSMKTPTXX

SEQ ID NO: 74588 - protein, 38 aa, Artificial Sequence; identical to SEQ ID NO: 46820
  GFR-binding peptide
  MOD_RES (1), (3), (36), (37): Xaa is C or S
  MOD_RES (14), (15), (16), (17), (18): Xaa is A or G
  MOD_RES (19), (20), (21), (22): Xaa is A or G or is absent

SEQ ID NO: 74589 - protein, 39 aa, Artificial Sequence
  GFR-binding peptide
  MOD_RES (2), (4), (36), (37): Xaa is C or S
RXGXSEVVMDSMEGIVVNNASDMIQITINSLRTPVXXTP

SEQ ID NO: 74590 - protein, 39 aa, Artificial Sequence; identical to SEQ ID NO: 17378
  GFR-binding peptide
  MOD_RES (1), (3), (37): Xaa is C or S

SEQ ID NO: 74591 - protein, 34 aa, Artificial Sequence; identical to SEQ ID NO: 17379
  GFR-binding peptide
  MOD_RES (1), (1): Xaa is C or S

SEQ ID NO: 74592 - protein, 37 aa, Artificial Sequence; identical to SEQ ID NO: 49373
  GFR-binding peptide
  MOD_RES (2), (4), (35), (36): Xaa is C or S

SEQ ID NO: 74593 - protein, 40 aa, Artificial Sequence
  GFR-binding peptide
  MOD_RES (2), (4), (38), (39): Xaa is C or S
  MOD_RES (16), (17), (18), (19), (20): Xaa is A or G
  MOD_RES (21), (22), (23), (24): Xaa is A or G or is absent
RXGXSEVVMDSMEGLXXXXXXXXXMIQITINSLRTPVXXT

SEQ ID NO: 74594 - protein, 36 aa, Artificial Sequence
  GFR-binding peptide
  MOD_RES (32), (33): Xaa is C or S
RDVVMGSMEGLIIQQKDNMIQMTINSMKTPTXXPGA

SEQ ID NO: 74595 - protein, 37 aa, Artificial Sequence
  GFR-binding peptide
  MOD_RES (2), (4), (36), (37): Xaa is C or S
SXGXRDVVMGSMEGIIIQQKDNMIQMTINSMKTPTXX

SEQ ID NO: 74596 - protein, 38 aa, Artificial Sequence
  GFR-binding peptide
  MOD_RES (2), (33), (34): Xaa is C or S
KXSKVVMSMEGLVKPTRGVMIQITINSLDQPVXXPSAS

SEQ ID NO: 74597 - protein, 32 aa, Artificial Sequence; identical to SEQ ID NO: 46830
  GFR-binding peptide
  MOD_RES (32), (32): Xaa is C or S

SEQ ID NO: 74598 - protein, 34 aa, Artificial Sequence; identical to SEQ ID NO: 17380
  GFR-binding peptide

SEQ ID NO: 74599 - protein, 38 aa, Artificial Sequence; identical to SEQ ID NO: 17382
  GFR-binding peptide
  MOD_RES (1), (3), (37): Xaa is C or S

SEQ ID NO: 74600 - protein, 33 aa, Artificial Sequence
  GFR-binding peptide
  MOD_RES (12), (13), (14), (15), (16): Xaa is A or G
  MOD_RES (17), (18), (19), (20): Xaa is A or G or is absent
RDVVMGSMEGLXXXXXXXXXMIQMTINSMKTPT

SEQ ID NO: 74601 - protein, 39 aa, Artificial Sequence; identical to SEQ ID NO: 17386
  GFR-binding peptide
  MOD_RES (33), (33): Xaa is C or S
  MOD_RES (11), (12), (13), (14), (15): Xaa is A or G
  MOD_RES (16), (17), (18), (19): Xaa is A or G or is absent

SEQ ID NO: 74602 - protein, 38 aa, Artificial Sequence; identical to SEQ ID NO: 17387
  GFR-binding peptide
  MOD_RES (1), (35): Xaa is C or S
  MOD_RES (13), (14), (15), (16), (17): Xaa is A or G
  MOD_RES (18), (19), (20), (21): Xaa is A or G or is absent

SEQ ID NO: 74603 - protein, 40 aa, Artificial Sequence
  GFR-binding peptide
  MOD_RES (1), (34), (35): Xaa is C or S
  MOD_RES (12), (13), (14), (15), (16): Xaa is A or G
  MOD_RES (17), (18), (19), (20): Xaa is A or G or is absent
XSRVIMSMEGLXXXXXXXXXMIQITINSLAQPVXXPAASA

SEQ ID NO: 74604 - protein, 40 aa, Artificial Sequence
  GFR-binding peptide
  MOD_RES (1), (3), (36), (37): Xaa is C or S
  MOD_RES (14), (15), (16), (17), (18): Xaa is A or G
  MOD_RES (19), (20), (21), (22): Xaa is A or G or is absent
XKXSRVIMSMEGLXXXXXXXXXMIQITINSLAQPVXXPAA

SEQ ID NO: 74605 - protein, 35 aa, Artificial Sequence; identical to SEQ ID NO: 17389
  GFR-binding peptide
  MOD_RES (33), (33): Xaa is C or S
  MOD_RES (11), (12), (13), (14), (15): Xaa is A or G
  MOD_RES (16), (17), (18), (19): Xaa is A or G or is absent

SEQ ID NO: 74606 - protein, 35 aa, Artificial Sequence; identical to SEQ ID NO: 46840
  GFR-binding peptide
  MOD_RES (31), (32): Xaa is C or S

SEQ ID NO: 74607 - protein, 40 aa, Artificial Sequence; identical to SEQ ID NO: 46841
  GFR-binding peptide
  MOD_RES (1), (3), (36), (37): Xaa is C or S
  MOD_RES (14), (15), (16), (17), (18): Xaa is A or G
  MOD_RES (19), (20), (21), (22): Xaa is A or G or is absent

SEQ ID NO: 74608 - protein, 35 aa, Artificial Sequence; identical to SEQ ID NO: 46843
  GFR-binding peptide
  MOD_RES (1), (3), (34), (35): Xaa is C or S

SEQ ID NO: 74609 - protein, 40 aa, Artificial Sequence; identical to SEQ ID NO: 17392
  GFR-binding peptide
  MOD_RES (1), (38): Xaa is C or S

SEQ ID NO: 74610 - protein, 41 aa, Artificial Sequence
  GFR-binding peptide
  MOD_RES (2), (4), (36), (37): Xaa is C or S
HXGXSRVVMNSMEGLIVNSSDDMIQVTINSLKTPAXXPKPV

SEQ ID NO: 74611 - protein, 33 aa, Artificial Sequence
  GFR-binding peptide
  MOD_RES (1), (33): Xaa is C or S
XSEVVMDSMEGIVVNNASDMIQITINSLRTPVX

SEQ ID NO: 74612 - protein, 39 aa, Artificial Sequence
  GFR-binding peptide
  MOD_RES (2), (4), (35), (36): Xaa is C or S
LXGXEEVIMSMEGLLLVRGNDMIQMTINSTKVPAXXTSP

SEQ ID NO: 74613 - protein, 40 aa, Artificial Sequence; identical to SEQ ID NO: 46851
  GFR-binding peptide
  MOD_RES (2), (4), (35), (36): Xaa is C or S

SEQ ID NO: 74614 - protein, 35 aa, Artificial Sequence
  GFR-binding peptide
  MOD_RES (1), (33), (34): Xaa is C or S
XSRVVMNSMEGLIVNSSDDMIQVTINSLKTPAXXP

SEQ ID NO: 74615 - protein, 39 aa, Artificial Sequence
  GFR-binding peptide
  MOD_RES (1), (3), (36), (37): Xaa is C or S
  MOD_RES (14), (15), (16), (17), (18): Xaa is A or G
  MOD_RES (19), (20), (21), (22): Xaa is A or G or is absent
XGXEEVIMSMEGLXXXXXXXXXMIQMTINSTKVPAXXTS

SEQ ID NO: 74616 - protein, 39 aa, Artificial Sequence
  GFR-binding peptide
  MOD_RES (1), (35), (36): Xaa is C or S
  MOD_RES (13), (14), (15), (16), (17): Xaa is A or G
  MOD_RES (18), (19), (20), (21): Xaa is A or G or is absent
XAEVVMDSMEGIXXXXXXXXXMIQITINSLRAPVXXSAP

SEQ ID NO: 74617 - protein, 38 aa, Artificial Sequence; identical to SEQ ID NO: 17396
  GFR-binding peptide
  MOD_RES (36), (36): Xaa is C or S
  MOD_RES (12), (13), (14), (15), (16): Xaa is A or G
  MOD_RES (17), (18), (19), (20): Xaa is A or G or is absent

SEQ ID NO: 74618 - protein, 37 aa, Artificial Sequence
  GFR-binding peptide
  MOD_RES (2), (4), (36), (37): Xaa is C or S
RXGXSEVVMDSMEGLVVNNASDMIQITINSLRTPVXX

SEQ ID NO: 74619 - protein, 37 aa, Artificial Sequence
  GFR-binding peptide
  MOD_RES (1), (3), (36), (37): Xaa is C or S
  MOD_RES (14), (15), (16), (17), (18): Xaa is A or G
  MOD_RES (19), (20), (21), (22): Xaa is A or G or is absent
XKXSKVVMSMEGLXXXXXXXXXMIQITINSLDQPVXX

SEQ ID NO: 74620 - protein, 39 aa, Artificial Sequence
  GFR-binding peptide
  MOD_RES (1), (35), (36): Xaa is C or S
  MOD_RES (13), (14), (15), (16), (17): Xaa is A or G
  MOD_RES (18), (19), (20), (21): Xaa is A or G or is absent
XSEVVMDSMEGLXXXXXXXXXMIQITINSLRTPVXXTPP

SEQ ID NO: 74621 - protein, 37 aa, Artificial Sequence
  GFR-binding peptide
  MOD_RES (2), (4): Xaa is C or S
  MOD_RES (16), (17), (18), (19), (20): Xaa is A or G
  MOD_RES (21), (22), (23), (24): Xaa is A or G or is absent
RXGXAEVVMDSMEGLXXXXXXXXXMIQITINSLRAPV

SEQ ID NO: 74622 - protein, 40 aa, Artificial Sequence
  GFR-binding peptide
  MOD_RES (1), (3), (37), (38): Xaa is C or S
  MOD_RES (15), (16), (17), (18), (19): Xaa is A or G
  MOD_RES (20), (21), (22), (23): Xaa is A or G or is absent
XGXSEVVMDSMEGLXXXXXXXXXMIQITINSLRTPVXXTP

SEQ ID NO: 74623 - protein, 37 aa, Artificial Sequence; identical to SEQ ID NO: 49426
  GFR-binding peptide
  MOD_RES (2), (4), (37): Xaa is C or S
  MOD_RES (15), (16), (17), (18), (19): Xaa is A or G
  MOD_RES (20), (21), (22), (23): Xaa is A or G or is absent

SEQ ID NO: 74624 - protein, 35 aa, Artificial Sequence; identical to SEQ ID NO: 46861
  GFR-binding peptide
  MOD_RES (1), (3), (34), (35): Xaa is C or S

SEQ ID NO: 74625 - protein, 40 aa, Artificial Sequence
  GFR-binding peptide
  MOD_RES (2), (4), (38), (39): Xaa is C or S
  MOD_RES (16), (17), (18), (19), (20): Xaa is A or G
  MOD_RES (21), (22), (23), (24): Xaa is A or G or is absent
SXGXRDVVMGSMEGLXXXXXXXXXMIQMTINSMKTPTXXP

SEQ ID NO: 74626 - protein, 36 aa, Artificial Sequence; identical to SEQ ID NO: 17399
  GFR-binding peptide
  MOD_RES (1), (3): Xaa is C or S
  MOD_RES (15), (16), (17), (18), (19): Xaa is A or G
  MOD_RES (20), (21), (22), (23): Xaa is A or G or is absent

SEQ ID NO: 74627 - protein, 36 aa, Artificial Sequence
  GFR-binding peptide
  MOD_RES (31), (32): Xaa is C or S
RVVMNSMEGLIVNSSDDMIQVTINSLKTPAXXPKPV

SEQ ID NO: 74628 - protein, 36 aa, Artificial Sequence; identical to SEQ ID NO: 17400
  GFR-binding peptide
  MOD_RES (34), (34): Xaa is C or S
  MOD_RES (12), (13), (14), (15), (16): Xaa is A or G
  MOD_RES (17), (18), (19), (20): Xaa is A or G or is absent

SEQ ID NO: 74629 - protein, 35 aa, Artificial Sequence; identical to SEQ ID NO: 46865
  GFR-binding peptide
  MOD_RES (1), (32), (33): Xaa is C or S

SEQ ID NO: 74630 - protein, 39 aa, Artificial Sequence
  GFR-binding peptide
  MOD_RES (2), (36), (37): Xaa is C or S
  MOD_RES (14), (15), (16), (17), (18): Xaa is A or G
  MOD_RES (19), (20), (21), (22): Xaa is A or G or is absent
GXSRVVMNSMEGLXXXXXXXXXMIQVTINSLKTPAXXPK

SEQ ID NO: 74631 - protein, 38 aa, Artificial Sequence
  GFR-binding peptide
  MOD_RES (32), (33): Xaa is C or S
AEVVMDSMEGIVVNNAADMIQITINSLRAPVXXSAPAA

SEQ ID NO: 74632 - protein, 41 aa, Artificial Sequence; identical to SEQ ID NO: 49435
  GFR-binding peptide
  MOD_RES (2), (35), (36): Xaa is C or S
  MOD_RES (13), (14), (15), (16), (17): Xaa is A or G
  MOD_RES (18), (19), (20), (21): Xaa is A or G or is absent

SEQ ID NO: 74633 - protein, 36 aa, Artificial Sequence
  GFR-binding peptide
  MOD_RES (31), (32): Xaa is C or S
EVVMDSMEGIVVNNAADMIQITINSLRAPVXXSAPA

SEQ ID NO: 74634 - protein, 33 aa, Artificial Sequence
  GFR-binding peptide
  MOD_RES (32), (33): Xaa is C or S
SRVVMNSMEGLIVNSSDDMIQVTINSLKTPAXX

SEQ ID NO: 74635 - protein, 40 aa, Artificial Sequence
  GFR-binding peptide
  MOD_RES (1), (3), (34), (35): Xaa is C or S
XKXSRVIMSMEGLVKPKRGVMIQITINSLAQPVXXPAASA

SEQ ID NO: 74636 - protein, 35 aa, Artificial Sequence
  GFR-binding peptide
  MOD_RES (2), (4): Xaa is C or S
RXGXSEVVMDSMEGLVVNNASDMIQITINSLRTPV

SEQ ID NO: 74637 - protein, 41 aa, Artificial Sequence; identical to SEQ ID NO: 17404
  GFR-binding peptide
  MOD_RES (37), (37): Xaa is C or S

SEQ ID NO: 74638 - protein, 37 aa, Artificial Sequence; identical to SEQ ID NO: 17405
  GFR-binding peptide
  MOD_RES (2), (36): Xaa is C or S

SEQ ID NO: 74639 - protein, 33 aa, Artificial Sequence
  GFR-binding peptide
  MOD_RES (31), (32): Xaa is C or S
DVVMGSMEGLIIQQKDNMIQMTINSMKTPTXXP

SEQ ID NO: 74640 - protein, 39 aa, Artificial Sequence; identical to SEQ ID NO: 17408
  GFR-binding peptide
  MOD_RES (1), (3): Xaa is C or S

SEQ ID NO: 74641 - protein, 37 aa, Artificial Sequence
  GFR-binding peptide
  MOD_RES (34), (35): Xaa is C or S
  MOD_RES (12), (13), (14), (15), (16): Xaa is A or G
  MOD_RES (17), (18), (19), (20): Xaa is A or G or is absent
AEVVMDSMEGIXXXXXXXXXMIQITINSLRAPVXXSA

SEQ ID NO: 74642 - protein, 36 aa, Artificial Sequence; identical to SEQ ID NO: 17409
  GFR-binding peptide
  MOD_RES (34), (34): Xaa is C or S

SEQ ID NO: 74643 - protein, 43 aa, Artificial Sequence; identical to SEQ ID NO: 49454
  GFR-binding peptide
  MOD_RES (2), (4), (37), (38): Xaa is C or S
  MOD_RES (15), (16), (17), (18), (19): Xaa is A or G
  MOD_RES (20), (21), (22), (23): Xaa is A or G or is absent

SEQ ID NO: 74644 - protein, 36 aa, Artificial Sequence
  GFR-binding peptide
  MOD_RES (33), (34): Xaa is C or S
  MOD_RES (11), (12), (13), (14), (15): Xaa is A or G
  MOD_RES (16), (17), (18), (19): Xaa is A or G or is absent
EVVMDSMEGIXXXXXXXXXMIQITINSLRAPVXXSA

SEQ ID NO: 74645 - protein, 40 aa, Artificial Sequence; identical to SEQ ID NO: 17412
  GFR-binding peptide
  MOD_RES (2), (4), (38): Xaa is C or S
  MOD_RES (16), (17), (18), (19), (20): Xaa is A or G
  MOD_RES (21), (22), (23), (24): Xaa is A or G or is absent

SEQ ID NO: 74646 - protein, 43 aa, Artificial Sequence; identical to SEQ ID NO: 17414
  GFR-binding peptide
  MOD_RES (1), (3), (40): Xaa is C or S
  MOD_RES (16), (17), (18), (19), (20): Xaa is A or G
  MOD_RES (21), (22), (23), (24): Xaa is A or G or is absent

SEQ ID NO: 74647 - protein, 39 aa, Artificial Sequence
  GFR-binding peptide
  MOD_RES (1), (3), (35), (36): Xaa is C or S
XGXAEVVMDSMEGLVVNNAADMIQITINSLRAPVXXSAP

SEQ ID NO: 74648 - protein, 41 aa, Artificial Sequence; identical to SEQ ID NO: 46881
  GFR-binding peptide
  MOD_RES (2), (36), (37): Xaa is C or S
  MOD_RES (14), (15), (16), (17), (18): Xaa is A or G
  MOD_RES (19), (20), (21), (22): Xaa is A or G or is absent

SEQ ID NO: 74649 - protein, 34 aa, Artificial Sequence
  GFR-binding peptide
  MOD_RES (31), (32): Xaa is C or S
DVVMGSMEGIIIQQKDNMIQMTINSMKTPTXXPG

SEQ ID NO: 74650 - protein, 43 aa, Artificial Sequence; identical to SEQ ID NO: 17420
  GFR-binding peptide
  MOD_RES (2), (4), (41): Xaa is C or S

SEQ ID NO: 74651 - protein, 37 aa, Artificial Sequence; identical to SEQ ID NO: 17421
  GFR-binding peptide
  MOD_RES (2), (2): Xaa is C or S

SEQ ID NO: 74652 - protein, 36 aa, Artificial Sequence
  GFR-binding peptide
  MOD_RES (34), (35): Xaa is C or S
  MOD_RES (12), (13), (14), (15), (16): Xaa is A or G
  MOD_RES (17), (18), (19), (20): Xaa is A or G or is absent
SRVVMNSMEGLXXXXXXXXXMIQVTINSLKTPAXXP

SEQ ID NO: 74653 - protein, 38 aa, Artificial Sequence; identical to SEQ ID NO: 49474
  GFR-binding peptide
  MOD_RES (1), (32), (33): Xaa is C or S

SEQ ID NO: 74654 - protein, 40 aa, Artificial Sequence; identical to SEQ ID NO: 17423
  GFR-binding peptide
  MOD_RES (1), (38): Xaa is C or S

SEQ ID NO: 74655 - protein, 40 aa, Artificial Sequence
  GFR-binding peptide
  MOD_RES (1), (3), (36), (37): Xaa is C or S
  MOD_RES (14), (15), (16), (17), (18): Xaa is A or G
  MOD_RES (19), (20), (21), (22): Xaa is A or G or is absent
XKXSKVIMSMEGLXXXXXXXXXMIQITINSLDQSVXXPSA

SEQ ID NO: 74656 - protein, 38 aa, Artificial Sequence; identical to SEQ ID NO: 17424
  GFR-binding peptide
  MOD_RES (2), (4), (38): Xaa is C or S
  MOD_RES (16), (17), (18), (19), (20): Xaa is A or G
  MOD_RES (21), (22), (23), (24): Xaa is A or G or is absent

SEQ ID NO: 74657 - protein, 38 aa, Artificial Sequence; identical to SEQ ID NO: 17425
  GFR-binding peptide
  MOD_RES (33), (33): Xaa is C or S
  MOD_RES (11), (12), (13), (14), (15): Xaa is A or G
  MOD_RES (16), (17), (18), (19): Xaa is A or G or is absent

SEQ ID NO: 74658 - protein, 40 aa, Artificial Sequence
  GFR-binding peptide
  MOD_RES (1), (34), (35): Xaa is C or S
  MOD_RES (12), (13), (14), (15), (16): Xaa is A or G
  MOD_RES (17), (18), (19), (20): Xaa is A or G or is absent
XEEVIMSMEGLXXXXXXXXXMIQMTINSTKVPAXXTSPVR

SEQ ID NO: 74659 - protein, 35 aa, Artificial Sequence; identical to SEQ ID NO: 17428
  GFR-binding peptide
  MOD_RES (1), (1): Xaa is C or S
  MOD_RES (14), (15), (16), (17), (18): Xaa is A or G
  MOD_RES (19), (20), (21), (22): Xaa is A or G or is absent

SEQ ID NO: 74660 - protein, 39 aa, Artificial Sequence; identical to SEQ ID NO: 17429
  GFR-binding peptide
  MOD_RES (35), (35): Xaa is C or S

SEQ ID NO: 74661 - protein, 41 aa, Artificial Sequence; identical to SEQ ID NO: 17430
  GFR-binding peptide
  MOD_RES (2), (36): Xaa is C or S

SEQ ID NO: 74662 - protein, 39 aa, Artificial Sequence
  GFR-binding peptide
  MOD_RES (34), (35): Xaa is C or S
  MOD_RES (12), (13), (14), (15), (16): Xaa is A or G
  MOD_RES (17), (18), (19), (20): Xaa is A or G or is absent
RDVVMGSMEGLXXXXXXXXXMIQMTINSMKTPTXXPGAS

SEQ ID NO: 74663 - protein, 32 aa, Artificial Sequence
  GFR-binding peptide
  MOD_RES (31), (32): Xaa is C or S
DVVMGSMEGIIIQQKDNMIQMTINSMKTPTXX

SEQ ID NO: 74664 - protein, 34 aa, Artificial Sequence
  GFR-binding peptide
  MOD_RES (2), (33), (34): Xaa is C or S
KXSRVIMSMEGLVKPKRGVMIQITINSLAQPVXX

SEQ ID NO: 74665 - protein, 38 aa, Artificial Sequence; identical to SEQ ID NO: 17431
  GFR-binding peptide
  MOD_RES (33), (33): Xaa is C or S

SEQ ID NO: 74666 - protein, 36 aa, Artificial Sequence
  GFR-binding peptide
  MOD_RES (1), (3), (35), (36): Xaa is C or S
XGXRDVVMGSMEGIIIQQKDNMIQMTINSMKTPTXX

SEQ ID NO: 74667 - protein, 40 aa, Artificial Sequence; identical to SEQ ID NO: 17433
  GFR-binding peptide
  MOD_RES (1), (3), (40): Xaa is C or S
  MOD_RES (16), (17), (18), (19), (20): Xaa is A or G
  MOD_RES (21), (22), (23), (24): Xaa is A or G or is absent

SEQ ID NO: 74668 - protein, 31 aa, Artificial Sequence
  GFR-binding peptide
  MOD_RES (31), (31): Xaa is C or S
DVVMGSMEGIIIQQKDNMIQMTINSMKTPTX

SEQ ID NO: 74669 - protein, 35 aa, Artificial Sequence; identical to SEQ ID NO: 17434
  GFR-binding peptide
  MOD_RES (33), (33): Xaa is C or S

SEQ ID NO: 74670 - protein, 35 aa, Artificial Sequence; identical to SEQ ID NO: 46914
  GFR-binding peptide
  MOD_RES (33), (34): Xaa is C or S
  MOD_RES (11), (12), (13), (14), (15): Xaa is A or G
  MOD_RES (16), (17), (18), (19): Xaa is A or G or is absent

SEQ ID NO: 74671 - protein, 35 aa, Artificial Sequence
  GFR-binding peptide
  MOD_RES (2), (4), (35): Xaa is C or S
SXKXSKVVMSMEGLVKPTRGVMIQITINSLDQPVX

SEQ ID NO: 74672 - protein, 36 aa, Artificial Sequence
  GFR-binding peptide
  MOD_RES (1), (35), (36): Xaa is C or S
  MOD_RES (13), (14), (15), (16), (17): Xaa is A or G
  MOD_RES (18), (19), (20), (21): Xaa is A or G or is absent
XRDVVMGSMEGIXXXXXXXXXMIQMTINSMKTPTXX

SEQ ID NO: 74673 - protein, 41 aa, Artificial Sequence; identical to SEQ ID NO: 49494
  GFR-binding peptide
  MOD_RES (2), (35), (36): Xaa is C or S
  MOD_RES (13), (14), (15), (16), (17): Xaa is A or G
  MOD_RES (18), (19), (20), (21): Xaa is A or G or is absent

SEQ ID NO: 74674 - protein, 41 aa, Artificial Sequence
  GFR-binding peptide
  MOD_RES (1), (3), (35), (36): Xaa is C or S
XGXSRVVMNSMEGIIVNSSDDMIQVTINSLKTPAXXPKPVH

SEQ ID NO: 74675 - protein, 37 aa, Artificial Sequence; identical to SEQ ID NO: 17437
  GFR-binding peptide
  MOD_RES (37), (37): Xaa is C or S

SEQ ID NO: 74676 - protein, 36 aa, Artificial Sequence
  GFR-binding peptide
  MOD_RES (2), (4): Xaa is C or S
  MOD_RES (15), (16), (17), (18), (19): Xaa is A or G
  MOD_RES (20), (21), (22), (23): Xaa is A or G or is absent
SXKXSKVVMSMEGLXXXXXXXXXMIQITINSLDQPV

SEQ ID NO: 74677 - protein, 42 aa, Artificial Sequence; identical to SEQ ID NO: 17438
  GFR-binding peptide
  MOD_RES (1), (3), (37): Xaa is C or S

SEQ ID NO: 74678 - protein, 38 aa, Artificial Sequence; identical to SEQ ID NO: 17439
  GFR-binding peptide
  MOD_RES (35), (35): Xaa is C or S

SEQ ID NO: 74679 - protein, 39 aa, Artificial Sequence; identical to SEQ ID NO: 46919
  GFR-binding peptide
  MOD_RES (2), (4), (37), (38): Xaa is C or S
  MOD_RES (15), (16), (17), (18), (19): Xaa is A or G
  MOD_RES (20), (21), (22), (23): Xaa is A or G or is absent

SEQ ID NO: 74680 - protein, 40 aa, Artificial Sequence; identical to SEQ ID NO: 46920
  GFR-binding peptide
  MOD_RES (2), (4), (36), (37): Xaa is C or S

SEQ ID NO: 74681 - protein, 36 aa, Artificial Sequence
  GFR-binding peptide
  MOD_RES (2), (4), (36): Xaa is C or S
SXGXRDVVMGSMEGLIIQQKDNMIQMTINSMKTPTX

SEQ ID NO: 74682 - protein, 39 aa, Artificial Sequence; identical to SEQ ID NO: 17441
  GFR-binding peptide
  MOD_RES (33), (33): Xaa is C or S
  MOD_RES (11), (12), (13), (14), (15): Xaa is A or G
  MOD_RES (16), (17), (18), (19): Xaa is A or G or is absent

SEQ ID NO: 74683 - protein, 41 aa, Artificial Sequence; identical to SEQ ID NO: 17442
  GFR-binding peptide
  MOD_RES (2), (39): Xaa is C or S

SEQ ID NO: 74684 - protein, 36 aa, Artificial Sequence
  GFR-binding peptide
  MOD_RES (1), (3), (35), (36): Xaa is C or S
XGXRDVVMGSMEGLIIQQKDNMIQMTINSMKTPTXX

SEQ ID NO: 74685 - protein, 41 aa, Artificial Sequence; identical to SEQ ID NO: 17443
  GFR-binding peptide
  MOD_RES (1), (3), (37): Xaa is C or S

SEQ ID NO: 74686 - protein, 40 aa, Artificial Sequence; identical to SEQ ID NO: 17444
  GFR-binding peptide
  MOD_RES (2), (4): Xaa is C or S

SEQ ID NO: 74687 - protein, 36 aa, Artificial Sequence
  GFR-binding peptide
  MOD_RES (2), (33), (34): Xaa is C or S
KXSRVIMSMEGLVKPKRGVMIQITINSLAQPVXXPA

SEQ ID NO: 74688 - protein, 38 aa, Artificial Sequence
  GFR-binding peptide
  MOD_RES (33), (34): Xaa is C or S
  MOD_RES (11), (12), (13), (14), (15): Xaa is A or G
  MOD_RES (16), (17), (18), (19): Xaa is A or G or is absent
EVVMDSMEGLXXXXXXXXXMIQITINSLRAPVXXSAPA

SEQ ID NO: 74689 - protein, 37 aa, Artificial Sequence; identical to SEQ ID NO: 17445
  GFR-binding peptide
  MOD_RES (1), (1): Xaa is C or S

SEQ ID NO: 74690 - protein, 36 aa, Artificial Sequence
  GFR-binding peptide
  MOD_RES (1), (3): Xaa is C or S
  MOD_RES (15), (16), (17), (18), (19): Xaa is A or G
  MOD_RES (20), (21), (22), (23): Xaa is A or G or is absent
XGXRDVVMGSMEGIXXXXXXXXXMIQMTINSMKTPT

SEQ ID NO: 74691 - protein, 35 aa, Artificial Sequence
  GFR-binding peptide
  MOD_RES (1), (3), (35): Xaa is C or S
XGXSEVVMDSMEGLVVNNASDMIQITINSLRTPVX

SEQ ID NO: 74692 - protein, 36 aa, Artificial Sequence; identical to SEQ ID NO: 17448
  GFR-binding peptide
  MOD_RES (36), (36): Xaa is C or S
  MOD_RES (12), (13), (14), (15), (16): Xaa is A or G
  MOD_RES (17), (18), (19), (20): Xaa is A or G or is absent

SEQ ID NO: 74693 - protein, 35 aa, Artificial Sequence
  GFR-binding peptide
  MOD_RES (1), (34), (35): Xaa is C or S
  MOD_RES (12), (13), (14), (15), (16): Xaa is A or G
  MOD_RES (17), (18), (19), (20): Xaa is A or G or is absent
XSKVIMSMEGLXXXXXXXXXMIQITINSLDQSVXX

SEQ ID NO: 74694 - protein, 32 aa, Artificial Sequence; identical to SEQ ID NO: 17450
  GFR-binding peptide
  MOD_RES (11), (12), (13), (14), (15): Xaa is A or G
  MOD_RES (16), (17), (18), (19): Xaa is A or G or is absent

SEQ ID NO: 74695 - protein, 36 aa, Artificial Sequence
  GFR-binding peptide
  MOD_RES (1), (3), (34), (35): Xaa is C or S
XKXSKVIMSMEGLIKPTKGIMIQITINSLDQSVXXP

SEQ ID NO: 74696 - protein, 33 aa, Artificial Sequence; identical to SEQ ID NO: 49512
  GFR-binding peptide
  MOD_RES (31), (32): Xaa is C or S

SEQ ID NO: 74697 - protein, 41 aa, Artificial Sequence; identical to SEQ ID NO: 17451
  GFR-binding peptide
  MOD_RES (2), (4), (38): Xaa is C or S

SEQ ID NO: 74698 - protein, 38 aa, Artificial Sequence
  GFR-binding peptide
  MOD_RES (2), (34), (35): Xaa is C or S
GXAEVVMDSMEGLVVNNAADMIQITINSLRAPVXXSAP

SEQ ID NO: 74699 - protein, 33 aa, Artificial Sequence
  GFR-binding peptide
  MOD_RES (1), (3): Xaa is C or S
XGXEEVIMSMEGLLLVRGNDMIQMTINSTKVPA

SEQ ID NO: 74700 - protein, 42 aa, Artificial Sequence; identical to SEQ ID NO: 17452
  GFR-binding peptide
  MOD_RES (1), (3), (40): Xaa is C or S

SEQ ID NO: 74701 - protein, 36 aa, Artificial Sequence
  GFR-binding peptide
  MOD_RES (31), (32): Xaa is C or S
SKVVMSMEGLVKPTRGVMIQITINSLDQPVXXPSAS

SEQ ID NO: 74702 - protein, 37 aa, Artificial Sequence; identical to SEQ ID NO: 17453
  GFR-binding peptide
  MOD_RES (1), (35): Xaa is C or S

SEQ ID NO: 74703 - protein, 38 aa, Artificial Sequence; identical to SEQ ID NO: 49519
  GFR-binding peptide
  MOD_RES (2), (4), (37), (38): Xaa is C or S
  MOD_RES (15), (16), (17), (18), (19): Xaa is A or G
  MOD_RES (20), (21), (22), (23): Xaa is A or G or is absent

SEQ ID NO: 74704 - protein, 32 aa, Artificial Sequence
  GFR-binding peptide
  MOD_RES (11), (12), (13), (14), (15): Xaa is A or G
  MOD_RES (16), (17), (18), (19): Xaa is A or G or is absent
DVVMGSMEGIXXXXXXXXXMIQMTINSMKTPT

SEQ ID NO: 74705 - protein, 40 aa, Artificial Sequence
  GFR-binding peptide
  MOD_RES (1), (35), (36): Xaa is C or S
  MOD_RES (13), (14), (15), (16), (17): Xaa is A or G
  MOD_RES (18), (19), (20), (21): Xaa is A or G or is absent
XAEVVMDSMEGLXXXXXXXXXMIQITINSLRAPVXXSAPA

SEQ ID NO: 74706 - protein, 39 aa, Artificial Sequence; identical to SEQ ID NO: 17454
  GFR-binding peptide
  MOD_RES (35), (35): Xaa is C or S
  MOD_RES (11), (12), (13), (14), (15): Xaa is A or G
  MOD_RES (16), (17), (18), (19): Xaa is A or G or is absent

SEQ ID NO: 74707 - protein, 34 aa, Artificial Sequence
  GFR-binding peptide
  MOD_RES (33), (34): Xaa is C or S
  MOD_RES (11), (12), (13), (14), (15): Xaa is A or G
  MOD_RES (16), (17), (18), (19): Xaa is A or G or is absent
EEVIMSMEGIXXXXXXXXXMIQMTINSTKVPAXX

SEQ ID NO: 74708 - protein, 40 aa, Artificial Sequence
  GFR-binding peptide
  MOD_RES (1), (35), (36): Xaa is C or S
  MOD_RES (13), (14), (15), (16), (17): Xaa is A or G
  MOD_RES (18), (19), (20), (21): Xaa is A or G or is absent
XAEVVMDSMEGIXXXXXXXXXMIQITINSLRAPVXXSAPA

SEQ ID NO: 74709 - protein, 39 aa, Artificial Sequence
  GFR-binding peptide
  MOD_RES (33), (34): Xaa is C or S
  MOD_RES (11), (12), (13), (14), (15): Xaa is A or G
  MOD_RES (16), (17), (18), (19): Xaa is A or G or is absent
DVVMGSMEGIXXXXXXXXXMIQMTINSMKTPTXXPGASG

SEQ ID NO: 74710 - protein, 39 aa, Artificial Sequence; identical to SEQ ID NO: 17457
  GFR-binding peptide
  MOD_RES (36), (36): Xaa is C or S

SEQ ID NO: 74711 - protein, 35 aa, Artificial Sequence; identical to SEQ ID NO: 46941
  GFR-binding peptide
  MOD_RES (2), (4), (35): Xaa is C or S

SEQ ID NO: 74712 - protein, 42 aa, Artificial Sequence; identical to SEQ ID NO: 17460
  GFR-binding peptide
  MOD_RES (2), (4), (41): Xaa is C or S

SEQ ID NO: 74713 - protein, 44 aa, Artificial Sequence; identical to SEQ ID NO: 17461
  GFR-binding peptide
  MOD_RES (2), (4), (38): Xaa is C or S
  MOD_RES (16), (17), (18), (19), (20): Xaa is A or G
  MOD_RES (21), (22), (23), (24): Xaa is A or G or is absent

SEQ ID NO: 74714 - protein, 35 aa, Artificial Sequence; identical to SEQ ID NO: 17462
  GFR-binding peptide
  MOD_RES (33), (33): Xaa is C or S

SEQ ID NO: 74715 - protein, 42 aa, Artificial Sequence
  GFR-binding peptide
  MOD_RES (2), (36), (37): Xaa is C or S
  MOD_RES (14), (15), (16), (17), (18): Xaa is A or G
  MOD_RES (19), (20), (21), (22): Xaa is A or G or is absent
GXSRVVMNSMEGLXXXXXXXXXMIQVTINSLKTPAXXPKPVH

SEQ ID NO: 74716 - protein, 35 aa, Artificial Sequence
  GFR-binding peptide
  MOD_RES (31), (32): Xaa is C or S
RVVMNSMEGLIVNSSDDMIQVTINSLKTPAXXPKP

SEQ ID NO: 74717 - protein, 40 aa, Artificial Sequence
  GFR-binding peptide
  MOD_RES (2), (34), (35): Xaa is C or S
GXSEVVMDSMEGLVVNNASDMIQITINSLRTPVXXTPPTS

SEQ ID NO: 74718 - protein, 36 aa, Artificial Sequence; identical to SEQ ID NO: 49538
  GFR-binding peptide
  MOD_RES (2), (33), (34): Xaa is C or S

SEQ ID NO: 74719 - protein, 41 aa, Artificial Sequence; identical to SEQ ID NO: 46950
  GFR-binding peptide
  MOD_RES (2), (4), (37), (38): Xaa is C or S
  MOD_RES (15), (16), (17), (18), (19): Xaa is A or G
  MOD_RES (20), (21), (22), (23): Xaa is A or G or is absent

SEQ ID NO: 74720 - protein, 42 aa, Artificial Sequence; identical to SEQ ID NO: 17464
  GFR-binding peptide
  MOD_RES (2), (39): Xaa is C or S
  MOD_RES (15), (16), (17), (18), (19): Xaa is A or G
  MOD_RES (20), (21), (22), (23): Xaa is A or G or is absent

SEQ ID NO: 74721 - protein, 37 aa, Artificial Sequence; identical to SEQ ID NO: 17466
  GFR-binding peptide
  MOD_RES (1), (35): Xaa is C or S
  MOD_RES (13), (14), (15), (16), (17): Xaa is A or G
  MOD_RES (18), (19), (20), (21): Xaa is A or G or is absent

SEQ ID NO: 74722 - protein, 37 aa, Artificial Sequence; identical to SEQ ID NO: 17467
  GFR-binding peptide
  MOD_RES (1), (1): Xaa is C or S

SEQ ID NO: 74723 - protein, 42 aa, Artificial Sequence
  GFR-binding peptide
  MOD_RES (2), (4), (38), (39): Xaa is C or S
  MOD_RES (16), (17), (18), (19), (20): Xaa is A or G
  MOD_RES (21), (22), (23), (24): Xaa is A or G or is absent
SXGXRDVVMGSMEGLXXXXXXXXXMIQMTINSMKTPTXXPGA

SEQ ID NO: 74724 - protein, 37 aa, Artificial Sequence; identical to SEQ ID NO: 17468
  GFR-binding peptide
  MOD_RES (1), (35): Xaa is C or S
  MOD_RES (13), (14), (15), (16), (17): Xaa is A or G
  MOD_RES (18), (19), (20), (21): Xaa is A or G or is absent

SEQ ID NO: 74725 - protein, 33 aa, Artificial Sequence; identical to SEQ ID NO: 17469
  GFR-binding peptide
  MOD_RES (33), (33): Xaa is C or S

SEQ ID NO: 74726 - protein, 39 aa, Artificial Sequence; identical to SEQ ID NO: 46962
  GFR-binding peptide
  MOD_RES (1), (3), (36), (37): Xaa is C or S
  MOD_RES (14), (15), (16), (17), (18): Xaa is A or G
  MOD_RES (19), (20), (21), (22): Xaa is A or G or is absent

SEQ ID NO: 74727 - protein, 38 aa, Artificial Sequence; identical to SEQ ID NO: 17471
  GFR-binding peptide
  MOD_RES (33), (33): Xaa is C or S

SEQ ID NO: 74728 - protein, 34 aa, Artificial Sequence
  GFR-binding peptide
  MOD_RES (34), (34): Xaa is C or S
  MOD_RES (12), (13), (14), (15), (16): Xaa is A or G
  MOD_RES (17), (18), (19), (20): Xaa is A or G or is absent
SRVVMNSMEGLXXXXXXXXXMIQVTINSLKTPAX

SEQ ID NO: 74729 - protein, 40 aa, Artificial Sequence; identical to SEQ ID NO: 46967
  GFR-binding peptide
  MOD_RES (2), (4), (37), (38): Xaa is C or S
  MOD_RES (15), (16), (17), (18), (19): Xaa is A or G
  MOD_RES (20), (21), (22), (23): Xaa is A or G or is absent

SEQ ID NO: 74730 - protein, 39 aa, Artificial Sequence
  GFR-binding peptide
  MOD_RES (2), (33), (34): Xaa is C or S
GXEEVIMSMEGLLLVRGNDMIQMTINSTKVPAXXTSPVR

SEQ ID NO: 74731 - protein, 37 aa, Artificial Sequence
  GFR-binding peptide
  MOD_RES (31), (32): Xaa is C or S
SRVIMSMEGLVKPKRGVMIQITINSLAQPVXXPAASA

SEQ ID NO: 74732 - protein, 42 aa, Artificial Sequence; identical to SEQ ID NO: 46974
  GFR-binding peptide
  MOD_RES (2), (4), (37), (38): Xaa is C or S
  MOD_RES (15), (16), (17), (18), (19): Xaa is A or G
  MOD_RES (20), (21), (22), (23): Xaa is A or G or is absent

SEQ ID NO: 74733 - protein, 35 aa, Artificial Sequence
  GFR-binding peptide
  MOD_RES (33), (34): Xaa is C or S
  MOD_RES (11), (12), (13), (14), (15): Xaa is A or G
  MOD_RES (16), (17), (18), (19): Xaa is A or G or is absent
SKVVMSMEGLXXXXXXXXXMIQITINSLDQPVXXP

SEQ ID NO: 74734 - protein, 36 aa, Artificial Sequence
  GFR-binding peptide
  MOD_RES (1), (3), (35), (36): Xaa is C or S
XGXSEVVMDSMEGIVVNNASDMIQITINSLRTPVXX

SEQ ID NO: 74735 - protein, 39 aa, Artificial Sequence; identical to SEQ ID NO: 17478
  GFR-binding peptide
  MOD_RES (2), (39): Xaa is C or S

SEQ ID NO: 74736 - protein, 37 aa, Artificial Sequence; identical to SEQ ID NO: 17479
  GFR-binding peptide
  MOD_RES (1), (35): Xaa is C or S

SEQ ID NO: 74737 - protein, 43 aa, Artificial Sequence; identical to SEQ ID NO: 17480
  GFR-binding peptide
  MOD_RES (2), (4), (41): Xaa is C or S

SEQ ID NO: 74738 - protein, 33 aa, Artificial Sequence; identical to SEQ ID NO: 17482
  GFR-binding peptide
  MOD_RES (12), (13), (14), (15), (16): Xaa is A or G
  MOD_RES (17), (18), (19), (20): Xaa is A or G or is absent

SEQ ID NO: 74739 - protein, 34 aa, Artificial Sequence
  GFR-binding peptide
  MOD_RES (31), (32): Xaa is C or S
EVVMDSMEGIVVNNASDMIQITINSLRTPVXXTP

SEQ ID NO: 74740 - protein, 42 aa, Artificial Sequence
  GFR-binding peptide
  MOD_RES (2), (4), (36), (37): Xaa is C or S
RXGXAEVVMDSMEGIVVNNAADMIQITINSLRAPVXXSAPAA

SEQ ID NO: 74741 - protein, 39 aa, Artificial Sequence
  GFR-binding peptide
  MOD_RES (2), (33), (34): Xaa is C or S
GXEEVIMSMEGILLVRGNDMIQMTINSTKVPAXXTSPVR

SEQ ID NO: 74742 - protein, 39 aa, Artificial Sequence
  GFR-binding peptide
  MOD_RES (33), (34): Xaa is C or S
  MOD_RES (11), (12), (13), (14), (15): Xaa is A or G
  MOD_RES (16), (17), (18), (19): Xaa is A or G or is absent
SKVVMSMEGLXXXXXXXXXMIQITINSLDQPVXXPSASA

SEQ ID NO: 74743 - protein, 38 aa, Artificial Sequence; identical to SEQ ID NO: 17485
  GFR-binding peptide
  MOD_RES (2), (4), (38): Xaa is C or S

SEQ ID NO: 74744 - protein, 37 aa, Artificial Sequence
  GFR-binding peptide
  MOD_RES (32), (33): Xaa is C or S
SEVVMDSMEGIVVNNASDMIQITINSLRTPVXXTPPT

SEQ ID NO: 74745 - protein, 39 aa, Artificial Sequence; identical to SEQ ID NO: 17486
  GFR-binding peptide
  MOD_RES (36), (36): Xaa is C or S

SEQ ID NO: 74746 - protein, 39 aa, Artificial Sequence; identical to SEQ ID NO: 17487
  GFR-binding peptide
  MOD_RES (1), (38): Xaa is C or S
  MOD_RES (14), (15), (16), (17), (18): Xaa is A or G
  MOD_RES (19), (20), (21), (22): Xaa is A or G or is absent

SEQ ID NO: 74747 - protein, 35 aa, Artificial Sequence; identical to SEQ ID NO: 49585
  GFR-binding peptide
  MOD_RES (1), (35): Xaa is C or S
  MOD_RES (13), (14), (15), (16), (17): Xaa is A or G
  MOD_RES (18), (19), (20), (21): Xaa is A or G or is absent

SEQ ID NO: 74748 - protein, 37 aa, Artificial Sequence
  GFR-binding peptide
  MOD_RES (2), (4), (37): Xaa is C or S
  MOD_RES (15), (16), (17), (18), (19): Xaa is A or G
  MOD_RES (20), (21), (22), (23): Xaa is A or G or is absent
LXGXEEVIMSMEGLXXXXXXXXXMIQMTINSTKVPAX

SEQ ID NO: 74749 - protein, 36 aa, Artificial Sequence
  GFR-binding peptide
  MOD_RES (2), (34), (35): Xaa is C or S
GXAEVVMDSMEGLVVNNAADMIQITINSLRAPVXXS

SEQ ID NO: 74750 - protein, 35 aa, Artificial Sequence
  GFR-binding peptide
  MOD_RES (1), (35): Xaa is C or S
  MOD_RES (13), (14), (15), (16), (17): Xaa is A or G
  MOD_RES (18), (19), (20), (21): Xaa is A or G or is absent
XSRVVMNSMEGLXXXXXXXXXMIQVTINSLKTPAX

SEQ ID NO: 74751 - protein, 38 aa, Artificial Sequence
  GFR-binding peptide
  MOD_RES (1), (34), (35): Xaa is C or S
  MOD_RES (12), (13), (14), (15), (16): Xaa is A or G
  MOD_RES (17), (18), (19), (20): Xaa is A or G or is absent
XEEVIMSMEGIXXXXXXXXXMIQMTINSTKVPAXXTSP

SEQ ID NO: 74752 - protein, 42 aa, Artificial Sequence
  GFR-binding peptide
  MOD_RES (2), (4), (38), (39): Xaa is C or S
  MOD_RES (16), (17), (18), (19), (20): Xaa is A or G
  MOD_RES (21), (22), (23), (24): Xaa is A or G or is absent
SXGXRDVVMGSMEGIXXXXXXXXXMIQMTINSMKTPTXXPGA

SEQ ID NO: 74753 - protein, 31 aa, Artificial Sequence
  GFR-binding peptide
  MOD_RES (31), (31): Xaa is C or S
RVVMNSMEGLIVNSSDDMIQVTINSLKTPAX

SEQ ID NO: 74754 - protein, 38 aa, Artificial Sequence; identical to SEQ ID NO: 17490
  GFR-binding peptide
  MOD_RES (2), (2): Xaa is C or S

SEQ ID NO: 74755 - protein, 36 aa, Artificial Sequence; identical to SEQ ID NO: 17491
  GFR-binding peptide
  MOD_RES (2), (36): Xaa is C or S

SEQ ID NO: 74756 - protein, 38 aa, Artificial Sequence
  GFR-binding peptide
  MOD_RES (33), (34): Xaa is C or S
  MOD_RES (11), (12), (13), (14), (15): Xaa is A or G
  MOD_RES (16), (17), (18), (19): Xaa is A or G or is absent
EEVIMSMEGIXXXXXXXXXMIQMTINSTKVPAXXTSPV

SEQ ID NO: 74757 - protein, 39 aa, Artificial Sequence
  GFR-binding peptide
  MOD_RES (33), (34): Xaa is C or S
  MOD_RES (11), (12), (13), (14), (15): Xaa is A or G
  MOD_RES (16), (17), (18), (19): Xaa is A or G or is absent
EVVMDSMEGIXXXXXXXXXMIQITINSLRAPVXXSAPAA

SEQ ID NO: 74758 - protein, 40 aa, Artificial Sequence; identical to SEQ ID NO: 46995
  GFR-binding peptide
  MOD_RES (1), (3), (37), (38): Xaa is C or S
  MOD_RES (15), (16), (17), (18), (19): Xaa is A or G
  MOD_RES (20), (21), (22), (23): Xaa is A or G or is absent

SEQ ID NO: 74759 - protein, 37 aa, Artificial Sequence; identical to SEQ ID NO: 17493
  GFR-binding peptide
  MOD_RES (2), (36): Xaa is C or S

SEQ ID NO: 74760 - protein, 35 aa, Artificial Sequence
  GFR-binding peptide
  MOD_RES (2), (2): Xaa is C or S
  MOD_RES (14), (15), (16), (17), (18): Xaa is A or G
  MOD_RES (19), (20), (21), (22): Xaa is A or G or is absent
GXRDVVMGSMEGIXXXXXXXXXMIQMTINSMKTPT

SEQ ID NO: 74761 - protein, 40 aa, Artificial Sequence; identical to SEQ ID NO: 17495
  GFR-binding peptide
  MOD_RES (1), (38): Xaa is C or S

SEQ ID NO: 74762 - protein, 42 aa, Artificial Sequence; identical to SEQ ID NO: 17496
  GFR-binding peptide
  MOD_RES (1), (3), (37): Xaa is C or S

SEQ ID NO: 74763 - protein, 32 aa, Artificial Sequence; identical to SEQ ID NO: 49595
  GFR-binding peptide
  MOD_RES (31), (32): Xaa is C or S

SEQ ID NO: 74764 - protein, 42 aa, Artificial Sequence
  GFR-binding peptide
  MOD_RES (1), (3), (36), (37): Xaa is C or S
  MOD_RES (14), (15), (16), (17), (18): Xaa is A or G
  MOD_RES (19), (20), (21), (22): Xaa is A or G or is absent
XKXSKVIMSMEGLXXXXXXXXXMIQITINSLDQSVXXPSASA

SEQ ID NO: 74765 - protein, 37 aa, Artificial Sequence; identical to SEQ ID NO: 17497
  GFR-binding peptide
  MOD_RES (1), (3), (37): Xaa is C or S

SEQ ID NO: 74766 - protein, 36 aa, Artificial Sequence; identical to SEQ ID NO: 49597
  GFR-binding peptide
  MOD_RES (32), (33): Xaa is C or S

SEQ ID NO: 74767 - protein, 36 aa, Artificial Sequence
  GFR-binding peptide
  MOD_RES (31), (32): Xaa is C or S
EVVMDSMEGLVVNNASDMIQITINSLRTPVXXTPPT

SEQ ID NO: 74768 - protein, 32 aa, Artificial Sequence
  GFR-binding peptide
  MOD_RES (32), (32): Xaa is C or S
RDVVMGSMEGLIIQQKDNMIQMTINSMKTPTX

SEQ ID NO: 74769 - protein, 33 aa, Artificial Sequence; identical to SEQ ID NO: 49604
  GFR-binding peptide
  MOD_RES (31), (32): Xaa is C or S

SEQ ID NO: 74770 - protein, 41 aa, Artificial Sequence; identical to SEQ ID NO: 17500
  GFR-binding peptide
  MOD_RES (2), (39): Xaa is C or S

SEQ ID NO: 74771 - protein, 34 aa, Artificial Sequence
  GFR-binding peptide
  MOD_RES (1), (3): Xaa is C or S
XGXRDVVMGSMEGLIIQQKDNMIQMTINSMKTPT

SEQ ID NO: 74772 - protein, 35 aa, Artificial Sequence; identical to SEQ ID NO: 47014
  GFR-binding peptide
  MOD_RES (1), (33), (34): Xaa is C or S

SEQ ID NO: 74773 - protein, 39 aa, Artificial Sequence; identical to SEQ ID NO: 17501
  GFR-binding peptide
  MOD_RES (1), (3), (37): Xaa is C or S
  MOD_RES (15), (16), (17), (18), (19): Xaa is A or G
  MOD_RES (20), (21), (22), (23): Xaa is A or G or is absent

SEQ ID NO: 74774 - protein, 39 aa, Artificial Sequence; identical to SEQ ID NO: 49608
  GFR-binding peptide
  MOD_RES (2), (33), (34): Xaa is C or S

SEQ ID NO: 74775 - protein, 42 aa, Artificial Sequence; identical to SEQ ID NO: 17502
  GFR-binding peptide
  MOD_RES (1), (38): Xaa is C or S
  MOD_RES (14), (15), (16), (17), (18): Xaa is A or G
  MOD_RES (19), (20), (21), (22): Xaa is A or G or is absent

SEQ ID NO: 74776 - protein, 41 aa, Artificial Sequence
  GFR-binding peptide
  MOD_RES (2), (35), (36): Xaa is C or S
  MOD_RES (13), (14), (15), (16), (17): Xaa is A or G
  MOD_RES (18), (19), (20), (21): Xaa is A or G or is absent
KXSRVIMSMEGLXXXXXXXXXMIQITINSLAQPVXXPAASA

SEQ ID NO: 74777 - protein, 39 aa, Artificial Sequence; identical to SEQ ID NO: 17503
  GFR-binding peptide
  MOD_RES (1), (3): Xaa is C or S

SEQ ID NO: 74778 - protein, 43 aa, Artificial Sequence; identical to SEQ ID NO: 17504
  GFR-binding peptide
  MOD_RES (1), (3), (40): Xaa is C or S

SEQ ID NO: 74779 - protein, 42 aa, Artificial Sequence
  GFR-binding peptide
  MOD_RES (1), (3), (37), (38): Xaa is C or S
  MOD_RES (15), (16), (17), (18), (19): Xaa is A or G
  MOD_RES (20), (21), (22), (23): Xaa is A or G or is absent
XGXAEVVMDSMEGLXXXXXXXXXMIQITINSLRAPVXXSAPA

SEQ ID NO: 74780 - protein, 37 aa, Artificial Sequence
  GFR-binding peptide
  MOD_RES (1), (3), (35), (36): Xaa is C or S
XGXSEVVMDSMEGIVVNNASDMIQITINSLRTPVXXT

SEQ ID NO: 74781 - protein, 39 aa, Artificial Sequence; identical to SEQ ID NO: 17506
  GFR-binding peptide
  MOD_RES (34), (34): Xaa is C or S
  MOD_RES (12), (13), (14), (15), (16): Xaa is A or G
  MOD_RES (17), (18), (19), (20): Xaa is A or G or is absent

SEQ ID NO: 74782 - protein, 44 aa, Artificial Sequence; identical to SEQ ID NO: 17507
  GFR-binding peptide
  MOD_RES (1), (3), (40): Xaa is C or S

SEQ ID NO: 74783 - protein, 44 aa, Artificial Sequence; identical to SEQ ID NO: 17508
  GFR-binding peptide
  MOD_RES (1), (3), (40): Xaa is C or S

SEQ ID NO: 74784 - protein, 38 aa, Artificial Sequence
  GFR-binding peptide
  MOD_RES (1), (33), (34): Xaa is C or S
XAEVVMDSMEGLVVNNAADMIQITINSLRAPVXXSAPA

SEQ ID NO: 74785 - protein, 38 aa, Artificial Sequence; identical to SEQ ID NO: 17509
  GFR-binding peptide
  MOD_RES (2), (4): Xaa is C or S

SEQ ID NO: 74786 - protein, 34 aa, Artificial Sequence
  GFR-binding peptide
  MOD_RES (31), (32): Xaa is C or S
EVVMDSMEGIVVNNAADMIQITINSLRAPVXXSA

SEQ ID NO: 74787 - protein, 35 aa, Artificial Sequence; identical to SEQ ID NO: 17511
  GFR-binding peptide
  MOD_RES (34), (34): Xaa is C or S
  MOD_RES (12), (13), (14), (15), (16): Xaa is A or G
  MOD_RES (17), (18), (19), (20): Xaa is A or G or is absent

SEQ ID NO: 74788 - protein, 38 aa, Artificial Sequence
  GFR-binding peptide
  MOD_RES (1), (33), (34): Xaa is C or S
XSEVVMDSMEGLVVNNASDMIQITINSLRTPVXXTPPT

SEQ ID NO: 74789 - protein, 36 aa, Artificial Sequence
  GFR-binding peptide
  MOD_RES (2), (36): Xaa is C or S
  MOD_RES (14), (15), (16), (17), (18): Xaa is A or G
  MOD_RES (19), (20), (21), (22): Xaa is A or G or is absent
GXAEVVMDSMEGIXXXXXXXXXMIQITINSLRAPVX

SEQ ID NO: 74790 - protein, 40 aa, Artificial Sequence
  GFR-binding peptide
  MOD_RES (2), (4), (37), (38): Xaa is C or S
  MOD_RES (15), (16), (17), (18), (19): Xaa is A or G
  MOD_RES (20), (21), (22), (23): Xaa is A or G or is absent
LXGXEEVIMSMEGIXXXXXXXXXMIQMTINSTKVPAXXTS

SEQ ID NO: 74791 - protein, 41 aa, Artificial Sequence
  GFR-binding peptide
  MOD_RES (2), (35), (36): Xaa is C or S
  MOD_RES (13), (14), (15), (16), (17): Xaa is A or G
  MOD_RES (18), (19), (20), (21): Xaa is A or G or is absent
KXSKVVMSMEGLXXXXXXXXXMIQITINSLDQPVXXPSASA

SEQ ID NO: 74792 - protein, 39 aa, Artificial Sequence
  GFR-binding peptide
  MOD_RES (2), (4), (35), (36): Xaa is C or S
SXKXSKVIMSMEGLIKPTKGIMIQITINSLDQSVXXPSA

SEQ ID NO: 74793 - protein, 33 aa, Artificial Sequence; identical to SEQ ID NO: 17514
  GFR-binding peptide

SEQ ID NO: 74794 - protein, 40 aa, Artificial Sequence
  GFR-binding peptide
  MOD_RES (1), (34), (35): Xaa is C or S
  MOD_RES (12), (13), (14), (15), (16): Xaa is A or G
  MOD_RES (17), (18), (19), (20): Xaa is A or G or is absent
XEEVIMSMEGIXXXXXXXXXMIQMTINSTKVPAXXTSPVR

SEQ ID NO: 74795 - protein, 34 aa, Artificial Sequence; identical to SEQ ID NO: 49619
  GFR-binding peptide
  MOD_RES (33), (34): Xaa is C or S
  MOD_RES (11), (12), (13), (14), (15): Xaa is A or G
  MOD_RES (16), (17), (18), (19): Xaa is A or G or is absent

SEQ ID NO: 74796 - protein, 36 aa, Artificial Sequence
  GFR-binding peptide
  MOD_RES (2), (35), (36): Xaa is C or S
  MOD_RES (13), (14), (15), (16), (17): Xaa is A or G
  MOD_RES (18), (19), (20), (21): Xaa is A or G or is absent
KXSKVIMSMEGLXXXXXXXXXMIQITINSLDQSVXX

SEQ ID NO: 74797 - protein, 30 aa, Artificial Sequence
  GFR-binding peptide
RVVMNSMEGLIVNSSDDMIQVTINSLKTPA

SEQ ID NO: 74798 - protein, 31 aa, Artificial Sequence; identical to SEQ ID NO: 49622
  GFR-binding peptide
  MOD_RES (1), (1): Xaa is C or S

SEQ ID NO: 74799 - protein, 37 aa, Artificial Sequence
  GFR-binding peptide
  MOD_RES (1), (33), (34): Xaa is C or S
XSEVVMDSMEGIVVNNASDMIQITINSLRTPVXXTPP

SEQ ID NO: 74800 - protein, 37 aa, Artificial Sequence
  GFR-binding peptide
  MOD_RES (33), (34): Xaa is C or S
  MOD_RES (11), (12), (13), (14), (15): Xaa is A or G
  MOD_RES (16), (17), (18), (19): Xaa is A or G or is absent
EEVIMSMEGLXXXXXXXXXMIQMTINSTKVPAXXTSP

SEQ ID NO: 74801 - protein, 41 aa, Artificial Sequence
  GFR-binding peptide
  MOD_RES (2), (4), (35), (36): Xaa is C or S
SXKXSKVIMSMEGLIKPTKGIMIQITINSLDQSVXXPSASA

SEQ ID NO: 74802 - protein, 39 aa, Artificial Sequence; identical to SEQ ID NO: 17517
  GFR-binding peptide
  MOD_RES (2), (4): Xaa is C or S

SEQ ID NO: 74803 - protein, 37 aa, Artificial Sequence; identical to SEQ ID NO: 17519
  GFR-binding peptide
  MOD_RES (2), (36): Xaa is C or S

SEQ ID NO: 74804 - protein, 43 aa, Artificial Sequence
  GFR-binding peptide
  MOD_RES (2), (4), (37), (38): Xaa is C or S
  MOD_RES (15), (16), (17), (18), (19): Xaa is A or G
  MOD_RES (20), (21), (22), (23): Xaa is A or G or is absent
LXGXEEVIMSMEGLXXXXXXXXXMIQMTINSTKVPAXXTSPVR

SEQ ID NO: 74805 - protein, 39 aa, Artificial Sequence
  GFR-binding peptide
  MOD_RES (1), (3), (34), (35): Xaa is C or S
XKXSRVIMSMEGLVKPKRGVMIQITINSLAQPVXXPAAS

SEQ ID NO: 74806 - protein, 35 aa, Artificial Sequence
  GFR-binding peptide
  MOD_RES (1), (33), (34): Xaa is C or S
XSEVVMDSMEGIVVNNASDMIQITINSLRTPVXXT

SEQ ID NO: 74807 - protein, 36 aa, Artificial Sequence; identical to SEQ ID NO: 17520
  GFR-binding peptide
  MOD_RES (36), (36): Xaa is C or S
  MOD_RES (12), (13), (14), (15), (16): Xaa is A or G
  MOD_RES (17), (18), (19), (20): Xaa is A or G or is absent

SEQ ID NO: 74808 - protein, 34 aa, Artificial Sequence; identical to SEQ ID NO: 17522
  GFR-binding peptide
  MOD_RES (34), (34): Xaa is C or S

SEQ ID NO: 74809 - protein, 39 aa, Artificial Sequence
  GFR-binding peptide
  MOD_RES (34), (35): Xaa is C or S
  MOD_RES (12), (13), (14), (15), (16): Xaa is A or G
  MOD_RES (17), (18), (19), (20): Xaa is A or G or is absent
AEVVMDSMEGIXXXXXXXXXMIQITINSLRAPVXXSAPA

SEQ ID NO: 74810 - protein, 40 aa, Artificial Sequence
  GFR-binding peptide
  MOD_RES (2), (4), (35), (36): Xaa is C or S
SXKXSKVIMSMEGLIKPTKGIMIQITINSLDQSVXXPSAS

SEQ ID NO: 74811 - protein, 37 aa, Artificial Sequence; identical to SEQ ID NO: 17524
  GFR-binding peptide
  MOD_RES (37), (37): Xaa is C or S
  MOD_RES (13), (14), (15), (16), (17): Xaa is A or G
  MOD_RES (18), (19), (20), (21): Xaa is A or G or is absent

SEQ ID NO: 74812 - protein, 43 aa, Artificial Sequence
  GFR-binding peptide
  MOD_RES (2), (4), (38), (39): Xaa is C or S
  MOD_RES (16), (17), (18), (19), (20): Xaa is A or G
  MOD_RES (21), (22), (23), (24): Xaa is A or G or is absent
SXGXRDVVMGSMEGIXXXXXXXXXMIQMTINSMKTPTXXPGAS

SEQ ID NO: 74813 - protein, 36 aa, Artificial Sequence; identical to SEQ ID NO: 49641
  GFR-binding peptide
  MOD_RES (1), (32), (33): Xaa is C or S

SEQ ID NO: 74814 - protein, 39 aa, Artificial Sequence; identical to SEQ ID NO: 49642
  GFR-binding peptide
  MOD_RES (2), (4), (35), (36): Xaa is C or S

SEQ ID NO: 74815 - protein, 38 aa, Artificial Sequence; identical to SEQ ID NO: 17527
  GFR-binding peptide
  MOD_RES (2), (4): Xaa is C or S

SEQ ID NO: 74816 - protein, 37 aa, Artificial Sequence; identical to SEQ ID NO: 17529
  GFR-binding peptide
  MOD_RES (1), (3): Xaa is C or S
  MOD_RES (16), (17), (18), (19), (20): Xaa is A or G
  MOD_RES (21), (22), (23), (24): Xaa is A or G or is absent

SEQ ID NO: 74817 - protein, 36 aa, Artificial Sequence
  GFR-binding peptide
  MOD_RES (2), (4): Xaa is C or S
  MOD_RES (15), (16), (17), (18), (19): Xaa is A or G
  MOD_RES (20), (21), (22), (23): Xaa is A or G or is absent
SXKXSKVIMSMEGLXXXXXXXXXMIQITINSLDQSV

SEQ ID NO: 74818 - protein, 40 aa, Artificial Sequence; identical to SEQ ID NO: 47051
  GFR-binding peptide
  MOD_RES (1), (34), (35): Xaa is C or S
  MOD_RES (12), (13), (14), (15), (16): Xaa is A or G
  MOD_RES (17), (18), (19), (20): Xaa is A or G or is absent

SEQ ID NO: 74819 - protein, 36 aa, Artificial Sequence; identical to SEQ ID NO: 49645
  GFR-binding peptide
  MOD_RES (2), (34), (35): Xaa is C or S

SEQ ID NO: 74820 - protein, 34 aa, Artificial Sequence
  GFR-binding peptide
  MOD_RES (2), (34): Xaa is C or S
GXSRVVMNSMEGLIVNSSDDMIQVTINSLKTPAX

SEQ ID NO: 74821 - protein, 45 aa, Artificial Sequence; identical to SEQ ID NO: 17530
  GFR-binding peptide
  MOD_RES (2), (4), (41): Xaa is C or S
  MOD_RES (17), (18), (19), (20), (21): Xaa is A or G
  MOD_RES (22), (23), (24), (25): Xaa is A or G or is absent

SEQ ID NO: 74822 - protein, 38 aa, Artificial Sequence; identical to SEQ ID NO: 17531
  GFR-binding peptide
  MOD_RES (1), (3), (37): Xaa is C or S

SEQ ID NO: 74823 - protein, 36 aa, Artificial Sequence
  GFR-binding peptide
  MOD_RES (1), (3), (34), (35): Xaa is C or S
XKXSRVIMSMEGLVKPKRGVMIQITINSLAQPVXXP

SEQ ID NO: 74824 - protein, 39 aa, Artificial Sequence; identical to SEQ ID NO: 17532
  GFR-binding peptide
  MOD_RES (37), (37): Xaa is C or S

SEQ ID NO: 74825 - protein, 45 aa, Artificial Sequence; identical to SEQ ID NO: 17534
  GFR-binding peptide
  MOD_RES (2), (4), (41): Xaa is C or S
  MOD_RES (17), (18), (19), (20), (21): Xaa is A or G
  MOD_RES (22), (23), (24), (25): Xaa is A or G or is absent

SEQ ID NO: 74826 - protein, 39 aa, Artificial Sequence; identical to SEQ ID NO: 17536
  GFR-binding peptide
  MOD_RES (1), (35): Xaa is C or S

SEQ ID NO: 74827 - protein, 34 aa, Artificial Sequence
  GFR-binding peptide
  MOD_RES (32), (33): Xaa is C or S
RDVVMGSMEGIIIQQKDNMIQMTINSMKTPTXXP

SEQ ID NO: 74828 - protein, 35 aa, Artificial Sequence
  GFR-binding peptide
  MOD_RES (2), (4): Xaa is C or S
SXGXRDVVMGSMEGIIIQQKDNMIQMTINSMKTPT

SEQ ID NO: 74829 - protein, 35 aa, Artificial Sequence
  GFR-binding peptide
  MOD_RES (2), (4): Xaa is C or S
SXGXRDVVMGSMEGLIIQQKDNMIQMTINSMKTPT

SEQ ID NO: 74830 - protein, 34 aa, Artificial Sequence
  GFR-binding peptide
  MOD_RES (1), (33), (34): Xaa is C or S
XSRVVMNSMEGLIVNSSDDMIQVTINSLKTPAXX

SEQ ID NO: 74831 - protein, 41 aa, Artificial Sequence; identical to SEQ ID NO: 47075
  GFR-binding peptide
  MOD_RES (2), (4), (37), (38): Xaa is C or S
  MOD_RES (15), (16), (17), (18), (19): Xaa is A or G
  MOD_RES (20), (21), (22), (23): Xaa is A or G or is absent

SEQ ID NO: 74832 - protein, 39 aa, Artificial Sequence
  GFR-binding peptide
  MOD_RES (1), (34), (35): Xaa is C or S
  MOD_RES (12), (13), (14), (15), (16): Xaa is A or G
  MOD_RES (17), (18), (19), (20): Xaa is A or G or is absent
XSKVIMSMEGLXXXXXXXXXMIQITINSLDQSVXXPSAS

SEQ ID NO: 74833 - protein, 35 aa, Artificial Sequence; identical to SEQ ID NO: 17539
  GFR-binding peptide
  MOD_RES (2), (2): Xaa is C or S
  MOD_RES (14), (15), (16), (17), (18): Xaa is A or G
  MOD_RES (19), (20), (21), (22): Xaa is A or G or is absent

SEQ ID NO: 74834 - protein, 31 aa, Artificial Sequence
  GFR-binding peptide
  MOD_RES (31), (31): Xaa is C or S
SKVIMSMEGLIKPTKGIMIQITINSLDQSVX

SEQ ID NO: 74835 - protein, 34 aa, Artificial Sequence; identical to SEQ ID NO: 17541
  GFR-binding peptide
  MOD_RES (12), (13), (14), (15), (16): Xaa is A or G
  MOD_RES (17), (18), (19), (20): Xaa is A or G or is absent

SEQ ID NO: 74836 - protein, 35 aa, Artificial Sequence
  GFR-binding peptide
  MOD_RES (1), (33), (34): Xaa is C or S
XAEVVMDSMEGLVVNNAADMIQITINSLRAPVXXS

SEQ ID NO: 74837 - protein, 38 aa, Artificial Sequence
  GFR-binding peptide
  MOD_RES (1), (3), (35), (36): Xaa is C or S
XGXRDVVMGSMEGIIIQQKDNMIQMTINSMKTPTXXPG

SEQ ID NO: 74838 - protein, 37 aa, Artificial Sequence; identical to SEQ ID NO: 47084
  GFR-binding peptide
  MOD_RES (2), (4), (37): Xaa is C or S
  MOD_RES (15), (16), (17), (18), (19): Xaa is A or G
  MOD_RES (20), (21), (22), (23): Xaa is A or G or is absent

SEQ ID NO: 74839 - protein, 34 aa, Artificial Sequence
  GFR-binding peptide
  MOD_RES (1), (32), (33): Xaa is C or S
XSRVIMSMEGLVKPKRGVMIQITINSLAQPVXXP

SEQ ID NO: 74840 - protein, 39 aa, Artificial Sequence; identical to SEQ ID NO: 17542
  GFR-binding peptide
  MOD_RES (33), (33): Xaa is C or S

SEQ ID NO: 74841 - protein, 34 aa, Artificial Sequence
  GFR-binding peptide
  MOD_RES (33), (34): Xaa is C or S
  MOD_RES (11), (12), (13), (14), (15): Xaa is A or G
  MOD_RES (16), (17), (18), (19): Xaa is A or G or is absent
EVVMDSMEGLXXXXXXXXXMIQITINSLRTPVXX

SEQ ID NO: 74842 - protein, 36 aa, Artificial Sequence; identical to SEQ ID NO: 17543
  GFR-binding peptide
  MOD_RES (2), (36): Xaa is C or S

SEQ ID NO: 74843 - protein, 33 aa, Artificial Sequence
  GFR-binding peptide
  MOD_RES (12), (13), (14), (15), (16): Xaa is A or G
  MOD_RES (17), (18), (19), (20): Xaa is A or G or is absent
SRVVMNSMEGLXXXXXXXXXMIQVTINSLKTPA

SEQ ID NO: 74844 - protein, 41 aa, Artificial Sequence
  GFR-binding peptide
  MOD_RES (2), (36), (37): Xaa is C or S
  MOD_RES (14), (15), (16), (17), (18): Xaa is A or G
  MOD_RES (19), (20), (21), (22): Xaa is A or G or is absent
GXSRVVMNSMEGLXXXXXXXXXMIQVTINSLKTPAXXPKPV

SEQ ID NO: 74845 - protein, 36 aa, Artificial Sequence
  GFR-binding peptide
  MOD_RES (31), (32): Xaa is C or S
EVVMDSMEGIVVNNASDMIQITINSLRTPVXXTPPT

SEQ ID NO: 74846 - protein, 41 aa, Artificial Sequence; identical to SEQ ID NO: 17544
  GFR-binding peptide
  MOD_RES (1), (35): Xaa is C or S

SEQ ID NO: 74847 - protein, 37 aa, Artificial Sequence
  GFR-binding peptide
  MOD_RES (31), (32): Xaa is C or S
RVVMNSMEGIIVNSSDDMIQVTINSLKTPAXXPKPVH

SEQ ID NO: 74848 - protein, 41 aa, Artificial Sequence; identical to SEQ ID NO: 17546
  GFR-binding peptide
  MOD_RES (1), (35): Xaa is C or S
  MOD_RES (13), (14), (15), (16), (17): Xaa is A or G
  MOD_RES (18), (19), (20), (21): Xaa is A or G or is absent

SEQ ID NO: 74849 - protein, 37 aa, Artificial Sequence; identical to SEQ ID NO: 49675
  GFR-binding peptide
  MOD_RES (2), (4), (35), (36): Xaa is C or S

SEQ ID NO: 74850 - protein, 34 aa, Artificial Sequence
  GFR-binding peptide
  MOD_RES (32), (33): Xaa is C or S
SEVVMDSMEGIVVNNASDMIQITINSLRTPVXXT

SEQ ID NO: 74851 - protein, 36 aa, Artificial Sequence; identical to SEQ ID NO: 47092
  GFR-binding peptide
  MOD_RES (2), (36): Xaa is C or S
  MOD_RES (14), (15), (16), (17), (18): Xaa is A or G
  MOD_RES (19), (20), (21), (22): Xaa is A or G or is absent

SEQ ID NO: 74852 - protein, 35 aa, Artificial Sequence
  GFR-binding peptide
  MOD_RES (2), (34), (35): Xaa is C or S
GXAEVVMDSMEGLVVNNAADMIQITINSLRAPVXX

SEQ ID NO: 74853 - protein, 36 aa, Artificial Sequence; identical to SEQ ID NO: 17548
  GFR-binding peptide
  MOD_RES (33), (33): Xaa is C or S
  MOD_RES (11), (12), (13), (14), (15): Xaa is A or G
  MOD_RES (16), (17), (18), (19): Xaa is A or G or is absent

SEQ ID NO: 74854 - protein, 42 aa, Artificial Sequence; identical to SEQ ID NO: 17549
  GFR-binding peptide
  MOD_RES (2), (39): Xaa is C or S
  MOD_RES (15), (16), (17), (18), (19): Xaa is A or G
  MOD_RES (20), (21), (22), (23): Xaa is A or G or is absent

SEQ ID NO: 74855 - protein, 41 aa, Artificial Sequence; identical to SEQ ID NO: 17550
  GFR-binding peptide
  MOD_RES (37), (37): Xaa is C or S
  MOD_RES (13), (14), (15), (16), (17): Xaa is A or G
  MOD_RES (18), (19), (20), (21): Xaa is A or G or is absent

SEQ ID NO: 74856 - protein, 39 aa, Artificial Sequence; identical to SEQ ID NO: 17551
  GFR-binding peptide
  MOD_RES (33), (33): Xaa is C or S

SEQ ID NO: 74857 - protein, 40 aa, Artificial Sequence; identical to SEQ ID NO: 17552
  GFR-binding peptide
  MOD_RES (2), (39): Xaa is C or S
  MOD_RES (15), (16), (17), (18), (19): Xaa is A or G
  MOD_RES (20), (21), (22), (23): Xaa is A or G or is absent

SEQ ID NO: 74858 - protein, 42 aa, Artificial Sequence
  GFR-binding peptide
  MOD_RES (1), (3), (36), (37): Xaa is C or S
  MOD_RES (14), (15), (16), (17), (18): Xaa is A or G
  MOD_RES (19), (20), (21), (22): Xaa is A or G or is absent
XGXEEVIMSMEGIXXXXXXXXXMIQMTINSTKVPAXXTSPVR

SEQ ID NO: 74859 - protein, 35 aa, Artificial Sequence; identical to SEQ ID NO: 49687
  GFR-binding peptide
  MOD_RES (33), (34): Xaa is C or S
  MOD_RES (11), (12), (13), (14), (15): Xaa is A or G
  MOD_RES (16), (17), (18), (19): Xaa is A or G or is absent

SEQ ID NO: 74860 - protein, 34 aa, Artificial Sequence
  GFR-binding peptide
  MOD_RES (2), (2): Xaa is C or S
  MOD_RES (13), (14), (15), (16), (17): Xaa is A or G
  MOD_RES (18), (19), (20), (21): Xaa is A or G or is absent
GXEEVIMSMEGIXXXXXXXXXMIQMTINSTKVPA

SEQ ID NO: 74861 - protein, 38 aa, Artificial Sequence; identical to SEQ ID NO: 17556
  GFR-binding peptide
  MOD_RES (2), (2): Xaa is C or S

SEQ ID NO: 74862 - protein, 32 aa, Artificial Sequence
  GFR-binding peptide
  MOD_RES (32), (32): Xaa is C or S
AEVVMDSMEGIVVNNAADMIQITINSLRAPVX

SEQ ID NO: 74863 - protein, 41 aa, Artificial Sequence; identical to SEQ ID NO: 17557
  GFR-binding peptide
  MOD_RES (2), (4), (41): Xaa is C or S

SEQ ID NO: 74864 - protein, 37 aa, Artificial Sequence; identical to SEQ ID NO: 17559
  GFR-binding peptide
  MOD_RES (2), (4): Xaa is C or S

SEQ ID NO: 74865 - protein, 39 aa, Artificial Sequence; identical to SEQ ID NO: 17560
  GFR-binding peptide
  MOD_RES (2), (4): Xaa is C or S

SEQ ID NO: 74866 - protein, 34 aa, Artificial Sequence
  GFR-binding peptide
  MOD_RES (1), (3), (34): Xaa is C or S
XKXSKVVMSMEGLVKPTRGVMIQITINSLDQPVX

SEQ ID NO: 74867 - protein, 33 aa, Artificial Sequence; identical to SEQ ID NO: 47110
  GFR-binding peptide
  MOD_RES (1), (1): Xaa is C or S
  MOD_RES (12), (13), (14), (15), (16): Xaa is A or G
  MOD_RES (17), (18), (19), (20): Xaa is A or G or is absent

SEQ ID NO: 74868 - protein, 39 aa, Artificial Sequence
  GFR-binding peptide
  MOD_RES (33), (34): Xaa is C or S
  MOD_RES (11), (12), (13), (14), (15): Xaa is A or G
  MOD_RES (16), (17), (18), (19): Xaa is A or G or is absent
SKVIMSMEGLXXXXXXXXXMIQITINSLDQSVXXPSASA

SEQ ID NO: 74869 - protein, 41 aa, Artificial Sequence; identical to SEQ ID NO: 17563
  GFR-binding peptide
  MOD_RES (2), (4), (38): Xaa is C or S

SEQ ID NO: 74870 - protein, 41 aa, Artificial Sequence; identical to SEQ ID NO: 17566
  GFR-binding peptide
  MOD_RES (2), (39): Xaa is C or S
  MOD_RES (15), (16), (17), (18), (19): Xaa is A or G
  MOD_RES (20), (21), (22), (23): Xaa is A or G or is absent

SEQ ID NO: 74871 - protein, 38 aa, Artificial Sequence; identical to SEQ ID NO: 17567
  GFR-binding peptide
  MOD_RES (2), (36): Xaa is C or S
  MOD_RES (14), (15), (16), (17), (18): Xaa is A or G
  MOD_RES (19), (20), (21), (22): Xaa is A or G or is absent

SEQ ID NO: 74872 - protein, 36 aa, Artificial Sequence
  GFR-binding peptide
  MOD_RES (34), (35): Xaa is C or S
  MOD_RES (12), (13), (14), (15), (16): Xaa is A or G
  MOD_RES (17), (18), (19), (20): Xaa is A or G or is absent
RDVVMGSMEGIXXXXXXXXXMIQMTINSMKTPTXXP

SEQ ID NO: 74873 - protein, 35 aa, Artificial Sequence
  GFR-binding peptide
  MOD_RES (2), (2): Xaa is C or S
  MOD_RES (14), (15), (16), (17), (18): Xaa is A or G
  MOD_RES (19), (20), (21), (22): Xaa is A or G or is absent
GXRDVVMGSMEGLXXXXXXXXXMIQMTINSMKTPT

SEQ ID NO: 74874 - protein, 37 aa, Artificial Sequence; identical to SEQ ID NO: 49703
  GFR-binding peptide
  MOD_RES (1), (3), (35), (36): Xaa is C or S

SEQ ID NO: 74875 - protein, 44 aa, Artificial Sequence; identical to SEQ ID NO: 17571
  GFR-binding peptide
  MOD_RES (1), (3), (40): Xaa is C or S
  MOD_RES (16), (17), (18), (19), (20): Xaa is A or G
  MOD_RES (21), (22), (23), (24): Xaa is A or G or is absent

SEQ ID NO: 74876 - protein, 38 aa, Artificial Sequence
  GFR-binding peptide
  MOD_RES (33), (34): Xaa is C or S
  MOD_RES (11), (12), (13), (14), (15): Xaa is A or G
  MOD_RES (16), (17), (18), (19): Xaa is A or G or is absent
SKVVMSMEGLXXXXXXXXXMIQITINSLDQPVXXPSAS

SEQ ID NO: 74877 - protein, 34 aa, Artificial Sequence
  GFR-binding peptide
  MOD_RES (1), (34): Xaa is C or S
  MOD_RES (12), (13), (14), (15), (16): Xaa is A or G
  MOD_RES (17), (18), (19), (20): Xaa is A or G or is absent
XSRVIMSMEGLXXXXXXXXXMIQITINSLAQPVX

SEQ ID NO: 74878 - protein, 35 aa, Artificial Sequence; identical to SEQ ID NO: 49707
  GFR-binding peptide
  MOD_RES (2), (35): Xaa is C or S
  MOD_RES (13), (14), (15), (16), (17): Xaa is A or G
  MOD_RES (18), (19), (20), (21): Xaa is A or G or is absent

SEQ ID NO: 74879 - protein, 37 aa, Artificial Sequence; identical to SEQ ID NO: 17574
  GFR-binding peptide
  MOD_RES (35), (35): Xaa is C or S
  MOD_RES (11), (12), (13), (14), (15): Xaa is A or G
  MOD_RES (16), (17), (18), (19): Xaa is A or G or is absent

SEQ ID NO: 74880 - protein, 35 aa, Artificial Sequence
  GFR-binding peptide
  MOD_RES (2), (35): Xaa is C or S
  MOD_RES (13), (14), (15), (16), (17): Xaa is A or G
  MOD_RES (18), (19), (20), (21): Xaa is A or G or is absent
KXSKVVMSMEGLXXXXXXXXXMIQITINSLDQPVX

SEQ ID NO: 74881 - protein, 41 aa, Artificial Sequence
  GFR-binding peptide
  MOD_RES (2), (4), (35), (36): Xaa is C or S
SXKXSRVIMSMEGLVKPKRGVMIQITINSLAQPVXXPAASA

SEQ ID NO: 74882 - protein, 44 aa, Artificial Sequence
  GFR-binding peptide
  MOD_RES (2), (4), (38), (39): Xaa is C or S
  MOD_RES (16), (17), (18), (19), (20): Xaa is A or G
  MOD_RES (21), (22), (23), (24): Xaa is A or G or is absent
RXGXAEVVMDSMEGLXXXXXXXXXMIQITINSLRAPVXXSAPAA

SEQ ID NO: 74883 - protein, 38 aa, Artificial Sequence
  GFR-binding peptide
  MOD_RES (2), (4), (38): Xaa is C or S
  MOD_RES (16), (17), (18), (19), (20): Xaa is A or G
  MOD_RES (21), (22), (23), (24): Xaa is A or G or is absent
RXGXSEVVMDSMEGLXXXXXXXXXMIQITINSLRTPVX

SEQ ID NO: 74884 - protein, 44 aa, Artificial Sequence; identical to SEQ ID NO: 17578
  GFR-binding peptide
  MOD_RES (1), (3), (40): Xaa is C or S
  MOD_RES (16), (17), (18), (19), (20): Xaa is A or G
  MOD_RES (21), (22), (23), (24): Xaa is A or G or is absent

SEQ ID NO: 74885 - protein, 38 aa, Artificial Sequence
  GFR-binding peptide
  MOD_RES (2), (4), (38): Xaa is C or S
  MOD_RES (16), (17), (18), (19), (20): Xaa is A or G
  MOD_RES (21), (22), (23), (24): Xaa is A or G or is absent
RXGXSEVVMDSMEGIXXXXXXXXXMIQITINSLRTPVX

SEQ ID NO: 74886 - protein, 37 aa, Artificial Sequence; identical to SEQ ID NO: 17579
  GFR-binding peptide
  MOD_RES (34), (34): Xaa is C or S
  MOD_RES (12), (13), (14), (15), (16): Xaa is A or G
  MOD_RES (17), (18), (19), (20): Xaa is A or G or is absent

SEQ ID NO: 74887 - protein, 33 aa, Artificial Sequence; identical to SEQ ID NO: 47135
  GFR-binding peptide
  MOD_RES (1), (3): Xaa is C or S

SEQ ID NO: 74888 - protein, 38 aa, Artificial Sequence; identical to SEQ ID NO: 17580
  GFR-binding peptide
  MOD_RES (2), (4), (38): Xaa is C or S

SEQ ID NO: 74889 - protein, 42 aa, Artificial Sequence
  GFR-binding peptide
  MOD_RES (2), (36), (37): Xaa is C or S
  MOD_RES (14), (15), (16), (17), (18): Xaa is A or G
  MOD_RES (19), (20), (21), (22): Xaa is A or G or is absent
GXSRVVMNSMEGIXXXXXXXXXMIQVTINSLKTPAXXPKPVH

SEQ ID NO: 74890 - protein, 39 aa, Artificial Sequence; identical to SEQ ID NO: 49718
  GFR-binding peptide
  MOD_RES (33), (34): Xaa is C or S
  MOD_RES (11), (12), (13), (14), (15): Xaa is A or G
  MOD_RES (16), (17), (18), (19): Xaa is A or G or is absent

SEQ ID NO: 74891 - protein, 35 aa, Artificial Sequence
  GFR-binding peptide
  MOD_RES (34), (35): Xaa is C or S
  MOD_RES (12), (13), (14), (15), (16): Xaa is A or G
  MOD_RES (17), (18), (19), (20): Xaa is A or G or is absent
RDVVMGSMEGLXXXXXXXXXMIQMTINSMKTPTXX

SEQ ID NO: 74892 - protein, 33 aa, Artificial Sequence
  GFR-binding peptide
  MOD_RES (2), (2): Xaa is C or S
GXSEVVMDSMEGLVVNNASDMIQITINSLRTPV

SEQ ID NO: 74893 - protein, 40 aa, Artificial Sequence
  GFR-binding peptide
  MOD_RES (1), (34), (35): Xaa is C or S
  MOD_RES (12), (13), (14), (15), (16): Xaa is A or G
  MOD_RES (17), (18), (19), (20): Xaa is A or G or is absent
XSKVIMSMEGLXXXXXXXXXMIQITINSLDQSVXXPSASA

SEQ ID NO: 74894 - protein, 39 aa, Artificial Sequence; identical to SEQ ID NO: 17583
  GFR-binding peptide
  MOD_RES (1), (3): Xaa is C or S

SEQ ID NO: 74895 - protein, 40 aa, Artificial Sequence; identical to SEQ ID NO: 47151
  GFR-binding peptide
  MOD_RES (2), (4), (38), (39): Xaa is C or S
  MOD_RES (16), (17), (18), (19), (20): Xaa is A or G
  MOD_RES (21), (22), (23), (24): Xaa is A or G or is absent

SEQ ID NO: 74896 - protein, 40 aa, Artificial Sequence
  GFR-binding peptide
  MOD_RES (2), (4), (38), (39): Xaa is C or S
  MOD_RES (16), (17), (18), (19), (20): Xaa is A or G
  MOD_RES (21), (22), (23), (24): Xaa is A or G or is absent
HXGXSRVVMNSMEGLXXXXXXXXXMIQVTINSLKTPAXXP

SEQ ID NO: 74897 - protein, 31 aa, Artificial Sequence; identical to SEQ ID NO: 47152
  GFR-binding peptide
  MOD_RES (31), (31): Xaa is C or S

SEQ ID NO: 74898 - protein, 43 aa, Artificial Sequence; identical to SEQ ID NO: 47154
  GFR-binding peptide
  MOD_RES (2), (4), (38), (39): Xaa is C or S
  MOD_RES (16), (17), (18), (19), (20): Xaa is A or G
  MOD_RES (21), (22), (23), (24): Xaa is A or G or is absent

SEQ ID NO: 74899 - protein, 40 aa, Artificial Sequence; identical to SEQ ID NO: 47155
  GFR-binding peptide
  MOD_RES (2), (4), (37), (38): Xaa is C or S
  MOD_RES (15), (16), (17), (18), (19): Xaa is A or G
  MOD_RES (20), (21), (22), (23): Xaa is A or G or is absent

SEQ ID NO: 74900 - protein, 43 aa, Artificial Sequence; identical to SEQ ID NO: 17586
  GFR-binding peptide
  MOD_RES (1), (3), (37): Xaa is C or S

SEQ ID NO: 74901 - protein, 32 aa, Artificial Sequence
  GFR-binding peptide
  MOD_RES (31), (32): Xaa is C or S
EEVIMSMEGLLLVRGNDMIQMTINSTKVPAXX

SEQ ID NO: 74902 - protein, 38 aa, Artificial Sequence; identical to SEQ ID NO: 17587
  GFR-binding peptide
  MOD_RES (1), (35): Xaa is C or S
  MOD_RES (13), (14), (15), (16), (17): Xaa is A or G
  MOD_RES (18), (19), (20), (21): Xaa is A or G or is absent

SEQ ID NO: 74903 - protein, 37 aa, Artificial Sequence
  GFR-binding peptide
  MOD_RES (33), (34): Xaa is C or S
  MOD_RES (11), (12), (13), (14), (15): Xaa is A or G
  MOD_RES (16), (17), (18), (19): Xaa is A or G or is absent
EEVIMSMEGIXXXXXXXXXMIQMTINSTKVPAXXTSP

SEQ ID NO: 74904 - protein, 37 aa, Artificial Sequence; identical to SEQ ID NO: 17588
  GFR-binding peptide
  MOD_RES (33), (33): Xaa is C or S

SEQ ID NO: 74905 - protein, 34 aa, Artificial Sequence
  GFR-binding peptide
  MOD_RES (2), (4): Xaa is C or S
SXKXSRVIMSMEGLVKPKRGVMIQITINSLAQPV

SEQ ID NO: 74906 - protein, 38 aa, Artificial Sequence; identical to SEQ ID NO: 17590
  GFR-binding peptide
  MOD_RES (2), (2): Xaa is C or S
  MOD_RES (15), (16), (17), (18), (19): Xaa is A or G
  MOD_RES (20), (21), (22), (23): Xaa is A or G or is absent

SEQ ID NO: 74907 - protein, 35 aa, Artificial Sequence; identical to SEQ ID NO: 17591
  GFR-binding peptide
  MOD_RES (1), (1): Xaa is C or S
  MOD_RES (14), (15), (16), (17), (18): Xaa is A or G
  MOD_RES (19), (20), (21), (22): Xaa is A or G or is absent

SEQ ID NO: 74908 - protein, 33 aa, Artificial Sequence
  GFR-binding peptide
  MOD_RES (31), (32): Xaa is C or S
RVVMNSMEGLIVNSSDDMIQVTINSLKTPAXXP

SEQ ID NO: 74909 - protein, 43 aa, Artificial Sequence
  GFR-binding peptide
  MOD_RES (2), (4), (38), (39): Xaa is C or S
  MOD_RES (16), (17), (18), (19), (20): Xaa is A or G
  MOD_RES (21), (22), (23), (24): Xaa is A or G or is absent
HXGXSRVVMNSMEGLXXXXXXXXXMIQVTINSLKTPAXXPKPV

SEQ ID NO: 74910 - protein, 33 aa, Artificial Sequence
  GFR-binding peptide
  MOD_RES (33), (33): Xaa is C or S
  MOD_RES (11), (12), (13), (14), (15): Xaa is A or G
  MOD_RES (16), (17), (18), (19): Xaa is A or G or is absent
EVVMDSMEGLXXXXXXXXXMIQITINSLRAPVX

SEQ ID NO: 74911 - protein, 42 aa, Artificial Sequence; identical to SEQ ID NO: 49732
  GFR-binding peptide
  MOD_RES (2), (4), (37), (38): Xaa is C or S
  MOD_RES (15), (16), (17), (18), (19): Xaa is A or G
  MOD_RES (20), (21), (22), (23): Xaa is A or G or is absent

SEQ ID NO: 74912 - protein, 36 aa, Artificial Sequence; identical to SEQ ID NO: 49737
  GFR-binding peptide
  MOD_RES (1), (3), (34), (35): Xaa is C or S

SEQ ID NO: 74913 - protein, 38 aa, Artificial Sequence
  GFR-binding peptide
  MOD_RES (2), (36), (37): Xaa is C or S
  MOD_RES (14), (15), (16), (17), (18): Xaa is A or G
  MOD_RES (19), (20), (21), (22): Xaa is A or G or is absent
GXSRVVMNSMEGLXXXXXXXXXMIQVTINSLKTPAXXP

SEQ ID NO: 74914 - protein, 41 aa, Artificial Sequence; identical to SEQ ID NO: 17597
  GFR-binding peptide
  MOD_RES (37), (37): Xaa is C or S

SEQ ID NO: 74915 - protein, 40 aa, Artificial Sequence
  GFR-binding peptide
  MOD_RES (2), (34), (35): Xaa is C or S
GXSRVVMNSMEGIIVNSSDDMIQVTINSLKTPAXXPKPVH

SEQ ID NO: 74916 - protein, 33 aa, Artificial Sequence; identical to SEQ ID NO: 49742
  GFR-binding peptide
  MOD_RES (31), (32): Xaa is C or S

SEQ ID NO: 74917 - protein, 38 aa, Artificial Sequence; identical to SEQ ID NO: 17600
  GFR-binding peptide
  MOD_RES (1), (35): Xaa is C or S

SEQ ID NO: 74918 - protein, 40 aa, Artificial Sequence
  GFR-binding peptide
  MOD_RES (2), (36), (37): Xaa is C or S
  MOD_RES (14), (15), (16), (17), (18): Xaa is A or G
  MOD_RES (19), (20), (21), (22): Xaa is A or G or is absent
GXSEVVMDSMEGLXXXXXXXXXMIQITINSLRTPVXXTPP

SEQ ID NO: 74919 - protein, 41 aa, Artificial Sequence; identical to SEQ ID NO: 49748
  GFR-binding peptide
  MOD_RES (1), (3), (36), (37): Xaa is C or S
  MOD_RES (14), (15), (16), (17), (18): Xaa is A or G
  MOD_RES (19), (20), (21), (22): Xaa is A or G or is absent

SEQ ID NO: 74920 - protein, 36 aa, Artificial Sequence; identical to SEQ ID NO: 17601
  GFR-binding peptide
  MOD_RES (2), (2): Xaa is C or S
  MOD_RES (15), (16), (17), (18), (19): Xaa is A or G
  MOD_RES (20), (21), (22), (23): Xaa is A or G or is absent

SEQ ID NO: 74921 - protein, 36 aa, Artificial Sequence; identical to SEQ ID NO: 17602
  GFR-binding peptide
  MOD_RES (2), (2): Xaa is C or S

SEQ ID NO: 74922 - protein, 32 aa, Artificial Sequence; identical to SEQ ID NO: 17603
  GFR-binding peptide
  MOD_RES (11), (12), (13), (14), (15): Xaa is A or G
  MOD_RES (16), (17), (18), (19): Xaa is A or G or is absent

SEQ ID NO: 74923 - protein, 39 aa, Artificial Sequence; identical to SEQ ID NO: 17604
  GFR-binding peptide
  MOD_RES (2), (39): Xaa is C or S
  MOD_RES (15), (16), (17), (18), (19): Xaa is A or G
  MOD_RES (20), (21), (22), (23): Xaa is A or G or is absent

SEQ ID NO: 74924 - protein, 38 aa, Artificial Sequence
  GFR-binding peptide
  MOD_RES (33), (34): Xaa is C or S
  MOD_RES (11), (12), (13), (14), (15): Xaa is A or G
  MOD_RES (16), (17), (18), (19): Xaa is A or G or is absent
EEVIMSMEGLXXXXXXXXXMIQMTINSTKVPAXXTSPV

SEQ ID NO: 74925 - protein, 34 aa, Artificial Sequence
  GFR-binding peptide
  MOD_RES (34), (34): Xaa is C or S
  MOD_RES (12), (13), (14), (15), (16): Xaa is A or G
  MOD_RES (17), (18), (19), (20): Xaa is A or G or is absent
AEVVMDSMEGIXXXXXXXXXMIQITINSLRAPVX

SEQ ID NO: 74926 - protein, 38 aa, Artificial Sequence; identical to SEQ ID NO: 17606
  GFR-binding peptide
  MOD_RES (35), (35): Xaa is C or S

SEQ ID NO: 74927 - protein, 40 aa, Artificial Sequence; identical to SEQ ID NO: 17607
  GFR-binding peptide
  MOD_RES (36), (36): Xaa is C or S
  MOD_RES (12), (13), (14), (15), (16): Xaa is A or G
  MOD_RES (17), (18), (19), (20): Xaa is A or G or is absent

SEQ ID NO: 74928 - protein, 33 aa, Artificial Sequence
  GFR-binding peptide
  MOD_RES (1), (3): Xaa is C or S
XKXSRVIMSMEGLVKPKRGVMIQITINSLAQPV

SEQ ID NO: 74929 - protein, 42 aa, Artificial Sequence
  GFR-binding peptide
  MOD_RES (2), (4), (36), (37): Xaa is C or S
HXGXSRVVMNSMEGLIVNSSDDMIQVTINSLKTPAXXPKPVH

SEQ ID NO: 74930 - protein, 33 aa, Artificial Sequence
  GFR-binding peptide
  MOD_RES (1), (3): Xaa is C or S
XKXSKVIMSMEGLIKPTKGIMIQITINSLDQSV

SEQ ID NO: 74931 - protein, 37 aa, Artificial Sequence
  GFR-binding peptide
  MOD_RES (1), (3), (37): Xaa is C or S
  MOD_RES (15), (16), (17), (18), (19): Xaa is A or G
  MOD_RES (20), (21), (22), (23): Xaa is A or G or is absent
XGXSEVVMDSMEGIXXXXXXXXXMIQITINSLRTPVX

SEQ ID NO: 74932 - protein, 32 aa, Artificial Sequence; identical to SEQ ID NO: 17608
  GFR-binding peptide

SEQ ID NO: 74933 - protein, 40 aa, Artificial Sequence; identical to SEQ ID NO: 17609
  GFR-binding peptide
  MOD_RES (2), (36): Xaa is C or S
  MOD_RES (14), (15), (16), (17), (18): Xaa is A or G
  MOD_RES (19), (20), (21), (22): Xaa is A or G or is absent

SEQ ID NO: 74934 - protein, 39 aa, Artificial Sequence
  GFR-binding peptide
  MOD_RES (2), (33), (34): Xaa is C or S
KXSRVIMSMEGLVKPKRGVMIQITINSLAQPVXXPAASA

SEQ ID NO: 74935 - protein, 38 aa, Artificial Sequence
  GFR-binding peptide
  MOD_RES (1), (33), (34): Xaa is C or S
XAEVVMDSMEGIVVNNAADMIQITINSLRAPVXXSAPA

SEQ ID NO: 74936 - protein, 35 aa, Artificial Sequence
  GFR-binding peptide
  MOD_RES (1), (3): Xaa is C or S
  MOD_RES (14), (15), (16), (17), (18): Xaa is A or G
  MOD_RES (19), (20), (21), (22): Xaa is A or G or is absent
XKXSRVIMSMEGLXXXXXXXXXMIQITINSLAQPV

SEQ ID NO: 74937 - protein, 37 aa, Artificial Sequence
  GFR-binding peptide
  MOD_RES (2), (35), (36): Xaa is C or S
  MOD_RES (13), (14), (15), (16), (17): Xaa is A or G
  MOD_RES (18), (19), (20), (21): Xaa is A or G or is absent
GXEEVIMSMEGLXXXXXXXXXMIQMTINSTKVPAXXT

SEQ ID NO: 74938 - protein, 39 aa, Artificial Sequence; identical to SEQ ID NO: 17610
  GFR-binding peptide
  MOD_RES (33), (33): Xaa is C or S

SEQ ID NO: 74939 - protein, 32 aa, Artificial Sequence
  GFR-binding peptide
  MOD_RES (2), (2): Xaa is C or S
KXSRVIMSMEGLVKPKRGVMIQITINSLAQPV

SEQ ID NO: 74940 - protein, 34 aa, Artificial Sequence; identical to SEQ ID NO: 47185
  GFR-binding peptide
  MOD_RES (1), (33), (34): Xaa is C or S

SEQ ID NO: 74941 - protein, 42 aa, Artificial Sequence; identical to SEQ ID NO: 17611
  GFR-binding peptide
  MOD_RES (2), (4), (38): Xaa is C or S
  MOD_RES (16), (17), (18), (19), (20): Xaa is A or G
  MOD_RES (21), (22), (23), (24): Xaa is A or G or is absent

SEQ ID NO: 74942 - protein, 42 aa, Artificial Sequence
  GFR-binding peptide
  MOD_RES (2), (4), (38), (39): Xaa is C or S
  MOD_RES (16), (17), (18), (19), (20): Xaa is A or G
  MOD_RES (21), (22), (23), (24): Xaa is A or G or is absent
RXGXAEVVMDSMEGLXXXXXXXXXMIQITINSLRAPVXXSAP

SEQ ID NO: 74943 - protein, 31 aa, Artificial Sequence
  GFR-binding peptide
  MOD_RES (31), (31): Xaa is C or S
SRVIMSMEGLVKPKRGVMIQITINSLAQPVX

SEQ ID NO: 74944 - protein, 37 aa, Artificial Sequence; identical to SEQ ID NO: 49764
  GFR-binding peptide
  MOD_RES (31), (32): Xaa is C or S

SEQ ID NO: 74945 - protein, 35 aa, Artificial Sequence
  GFR-binding peptide
  MOD_RES (2), (2): Xaa is C or S
  MOD_RES (14), (15), (16), (17), (18): Xaa is A or G
  MOD_RES (19), (20), (21), (22): Xaa is A or G or is absent
GXSEVVMDSMEGLXXXXXXXXXMIQITINSLRTPV

SEQ ID NO: 74946 - protein, 34 aa, Artificial Sequence
  GFR-binding peptide
  MOD_RES (1), (34): Xaa is C or S
  MOD_RES (12), (13), (14), (15), (16): Xaa is A or G
  MOD_RES (17), (18), (19), (20): Xaa is A or G or is absent
XEEVIMSMEGLXXXXXXXXXMIQMTINSTKVPAX

SEQ ID NO: 74947 - protein, 34 aa, Artificial Sequence
  GFR-binding peptide
  MOD_RES (32), (33): Xaa is C or S
AEVVMDSMEGLVVNNAADMIQITINSLRAPVXXS

SEQ ID NO: 74948 - protein, 31 aa, Artificial Sequence
  GFR-binding peptide
RDVVMGSMEGIIIQQKDNMIQMTINSMKTPT

SEQ ID NO: 74949 - protein, 39 aa, Artificial Sequence
  GFR-binding peptide
  MOD_RES (2), (4), (36), (37): Xaa is C or S
RXGXAEVVMDSMEGLVVNNAADMIQITINSLRAPVXXSA

SEQ ID NO: 74950 - protein, 40 aa, Artificial Sequence
  GFR-binding peptide
  MOD_RES (2), (34), (35): Xaa is C or S
GXSEVVMDSMEGIVVNNASDMIQITINSLRTPVXXTPPTS

SEQ ID NO: 74951 - protein, 37 aa, Artificial Sequence; identical to SEQ ID NO: 17616
  GFR-binding peptide
  MOD_RES (33), (33): Xaa is C or S

SEQ ID NO: 74952 - protein, 37 aa, Artificial Sequence
  GFR-binding peptide
  MOD_RES (1), (33), (34): Xaa is C or S
XSEVVMDSMEGLVVNNASDMIQITINSLRTPVXXTPP

SEQ ID NO: 74953 - protein, 35 aa, Artificial Sequence
  GFR-binding peptide
  MOD_RES (32), (33): Xaa is C or S
RDVVMGSMEGLIIQQKDNMIQMTINSMKTPTXXPG

SEQ ID NO: 74954 - protein, 36 aa, Artificial Sequence; identical to SEQ ID NO: 17618
  GFR-binding peptide
  MOD_RES (1), (1): Xaa is C or S
  MOD_RES (14), (15), (16), (17), (18): Xaa is A or G
  MOD_RES (19), (20), (21), (22): Xaa is A or G or is absent

SEQ ID NO: 74955 - protein, 39 aa, Artificial Sequence; identical to SEQ ID NO: 17620
  GFR-binding peptide
  MOD_RES (1), (38): Xaa is C or S
  MOD_RES (14), (15), (16), (17), (18): Xaa is A or G
  MOD_RES (19), (20), (21), (22): Xaa is A or G or is absent

SEQ ID NO: 74956 - protein, 38 aa, Artificial Sequence; identical to SEQ ID NO: 17621
  GFR-binding peptide
  MOD_RES (2), (36): Xaa is C or S
  MOD_RES (14), (15), (16), (17), (18): Xaa is A or G
  MOD_RES (19), (20), (21), (22): Xaa is A or G or is absent

SEQ ID NO: 74957 - protein, 36 aa, Artificial Sequence
  GFR-binding peptide
  MOD_RES (1), (3), (34), (35): Xaa is C or S
XGXEEVIMSMEGILLVRGNDMIQMTINSTKVPAXXT

SEQ ID NO: 74958 - protein, 41 aa, Artificial Sequence; identical to SEQ ID NO: 17622
  GFR-binding peptide
  MOD_RES (1), (35): Xaa is C or S

SEQ ID NO: 74959 - protein, 38 aa, Artificial Sequence
  GFR-binding peptide
  MOD_RES (32), (33): Xaa is C or S
RDVVMGSMEGIIIQQKDNMIQMTINSMKTPTXXPGASG

SEQ ID NO: 74960 - protein, 41 aa, Artificial Sequence; identical to SEQ ID NO: 17624
  GFR-binding peptide
  MOD_RES (2), (36): Xaa is C or S
  MOD_RES (14), (15), (16), (17), (18): Xaa is A or G
  MOD_RES (19), (20), (21), (22): Xaa is A or G or is absent

SEQ ID NO: 74961 - protein, 41 aa, Artificial Sequence; identical to SEQ ID NO: 49777
  GFR-binding peptide
  MOD_RES (2), (35), (36): Xaa is C or S
  MOD_RES (13), (14), (15), (16), (17): Xaa is A or G
  MOD_RES (18), (19), (20), (21): Xaa is A or G or is absent

SEQ ID NO: 74962 - protein, 36 aa, Artificial Sequence; identical to SEQ ID NO: 49778
  GFR-binding peptide
  MOD_RES (2), (35), (36): Xaa is C or S
  MOD_RES (13), (14), (15), (16), (17): Xaa is A or G
  MOD_RES (18), (19), (20), (21): Xaa is A or G or is absent

SEQ ID NO: 74963 - protein, 39 aa, Artificial Sequence; identical to SEQ ID NO: 17625
  GFR-binding peptide
  MOD_RES (1), (35): Xaa is C or S
  MOD_RES (13), (14), (15), (16), (17): Xaa is A or G
  MOD_RES (18), (19), (20), (21): Xaa is A or G or is absent

SEQ ID NO: 74964 - protein, 37 aa, Artificial Sequence
  GFR-binding peptide
  MOD_RES (2), (4), (36), (37): Xaa is C or S
RXGXAEVVMDSMEGIVVNNAADMIQITINSLRAPVXX

SEQ ID NO: 74965 - protein, 37 aa, Artificial Sequence; identical to SEQ ID NO: 17626
  GFR-binding peptide
  MOD_RES (35), (35): Xaa is C or S
  MOD_RES (11), (12), (13), (14), (15): Xaa is A or G
  MOD_RES (16), (17), (18), (19): Xaa is A or G or is absent

SEQ ID NO: 74966 - protein, 37 aa, Artificial Sequence; identical to SEQ ID NO: 17628
  GFR-binding peptide
  MOD_RES (1), (3): Xaa is C or S

SEQ ID NO: 74967 - protein, 37 aa, Artificial Sequence; identical to SEQ ID NO: 17629
  GFR-binding peptide
  MOD_RES (33), (33): Xaa is C or S

SEQ ID NO: 74968 - protein, 40 aa, Artificial Sequence; identical to SEQ ID NO: 17630
  GFR-binding peptide
  MOD_RES (2), (4), (38): Xaa is C or S

SEQ ID NO: 74969 - protein, 37 aa, Artificial Sequence
  GFR-binding peptide
  MOD_RES (2), (4), (36), (37): Xaa is C or S
RXGXAEVVMDSMEGLVVNNAADMIQITINSLRAPVXX

SEQ ID NO: 74970 - protein, 35 aa, Artificial Sequence
  GFR-binding peptide
  MOD_RES (1), (33), (34): Xaa is C or S
XAEVVMDSMEGIVVNNAADMIQITINSLRAPVXXS

SEQ ID NO: 74971 - protein, 34 aa, Artificial Sequence; identical to SEQ ID NO: 17631
  GFR-binding peptide
  MOD_RES (13), (14), (15), (16), (17): Xaa is A or G
  MOD_RES (18), (19), (20), (21): Xaa is A or G or is absent

SEQ ID NO: 74972 - protein, 39 aa, Artificial Sequence; identical to SEQ ID NO: 17632
  GFR-binding peptide
  MOD_RES (2), (36): Xaa is C or S

SEQ ID NO: 74973 - protein, 38 aa, Artificial Sequence
  GFR-binding peptide
  MOD_RES (2), (4), (37), (38): Xaa is C or S
  MOD_RES (15), (16), (17), (18), (19): Xaa is A or G
  MOD_RES (20), (21), (22), (23): Xaa is A or G or is absent
LXGXEEVIMSMEGLXXXXXXXXXMIQMTINSTKVPAXX

SEQ ID NO: 74974 - protein, 36 aa, Artificial Sequence
  GFR-binding peptide
  MOD_RES (1), (32), (33): Xaa is C or S
XEEVIMSMEGLLLVRGNDMIQMTINSTKVPAXXTSP

SEQ ID NO: 74975 - protein, 40 aa, Artificial Sequence
  GFR-binding peptide
  MOD_RES (1), (35), (36): Xaa is C or S
  MOD_RES (13), (14), (15), (16), (17): Xaa is A or G
  MOD_RES (18), (19), (20), (21): Xaa is A or G or is absent
XRDVVMGSMEGLXXXXXXXXXMIQMTINSMKTPTXXPGAS

SEQ ID NO: 74976 - protein, 42 aa, Artificial Sequence
  GFR-binding peptide
  MOD_RES (1), (3), (36), (37): Xaa is C or S
  MOD_RES (14), (15), (16), (17), (18): Xaa is A or G
  MOD_RES (19), (20), (21), (22): Xaa is A or G or is absent
XKXSRVIMSMEGLXXXXXXXXXMIQITINSLAQPVXXPAASA

SEQ ID NO: 74977 - protein, 35 aa, Artificial Sequence
  GFR-binding peptide
  MOD_RES (1), (33), (34): Xaa is C or S
XSEVVMDSMEGLVVNNASDMIQITINSLRTPVXXT

SEQ ID NO: 74978 - protein, 43 aa, Artificial Sequence; identical to SEQ ID NO: 17636
  GFR-binding peptide
  MOD_RES (2), (4), (38): Xaa is C or S

SEQ ID NO: 74979 - protein, 36 aa, Artificial Sequence; identical to SEQ ID NO: 17637
  GFR-binding peptide
  MOD_RES (2), (2): Xaa is C or S

SEQ ID NO: 74980 - protein, 43 aa, Artificial Sequence; identical to SEQ ID NO: 17638
  GFR-binding peptide
  MOD_RES (2), (4), (38): Xaa is C or S

SEQ ID NO: 74981 - protein, 39 aa, Artificial Sequence; identical to SEQ ID NO: 17641
  GFR-binding peptide
  MOD_RES (36), (36): Xaa is C or S
  MOD_RES (12), (13), (14), (15), (16): Xaa is A or G
  MOD_RES (17), (18), (19), (20): Xaa is A or G or is absent

SEQ ID NO: 74982 - protein, 39 aa, Artificial Sequence; identical to SEQ ID NO: 17642
  GFR-binding peptide
  MOD_RES (1), (3): Xaa is C or S
  MOD_RES (16), (17), (18), (19), (20): Xaa is A or G
  MOD_RES (21), (22), (23), (24): Xaa is A or G or is absent

SEQ ID NO: 74983 - protein, 32 aa, Artificial Sequence; identical to SEQ ID NO: 17643
  GFR-binding peptide

SEQ ID NO: 74984 - protein, 37 aa, Artificial Sequence
  GFR-binding peptide
  MOD_RES (31), (32): Xaa is C or S
SKVVMSMEGLVKPTRGVMIQITINSLDQPVXXPSASA

SEQ ID NO: 74985 - protein, 41 aa, Artificial Sequence; identical to SEQ ID NO: 17645
  GFR-binding peptide
  MOD_RES (1), (3), (40): Xaa is C or S
  MOD_RES (16), (17), (18), (19), (20): Xaa is A or G
  MOD_RES (21), (22), (23), (24): Xaa is A or G or is absent

SEQ ID NO: 74986 - protein, 35 aa, Artificial Sequence; identical to SEQ ID NO: 17646
  GFR-binding peptide
  MOD_RES (13), (14), (15), (16), (17): Xaa is A or G
  MOD_RES (18), (19), (20), (21): Xaa is A or G or is absent

SEQ ID NO: 74987 - protein, 35 aa, Artificial Sequence
  GFR-binding peptide
  MOD_RES (2), (34), (35): Xaa is C or S
GXRDVVMGSMEGIIIQQKDNMIQMTINSMKTPTXX

SEQ ID NO: 74988 - protein, 38 aa, Artificial Sequence; identical to SEQ ID NO: 17647
  GFR-binding peptide
  MOD_RES (37), (37): Xaa is C or S

SEQ ID NO: 74989 - protein, 39 aa, Artificial Sequence; identical to SEQ ID NO: 17648
  GFR-binding peptide
  MOD_RES (2), (36): Xaa is C or S
  MOD_RES (14), (15), (16), (17), (18): Xaa is A or G
  MOD_RES (19), (20), (21), (22): Xaa is A or G or is absent

SEQ ID NO: 74990 - protein, 39 aa, Artificial Sequence; identical to SEQ ID NO: 17649
  GFR-binding peptide
  MOD_RES (1), (35): Xaa is C or S

SEQ ID NO: 74991 - protein, 33 aa, Artificial Sequence; identical to SEQ ID NO: 17651
  GFR-binding peptide
  MOD_RES (33), (33): Xaa is C or S
  MOD_RES (11), (12), (13), (14), (15): Xaa is A or G
  MOD_RES (16), (17), (18), (19): Xaa is A or G or is absent

SEQ ID NO: 74992 - protein, 36 aa, Artificial Sequence
  GFR-binding peptide
  MOD_RES (1), (3), (34), (35): Xaa is C or S
XGXEEVIMSMEGLLLVRGNDMIQMTINSTKVPAXXT

SEQ ID NO: 74993 - protein, 40 aa, Artificial Sequence
  GFR-binding peptide
  MOD_RES (1), (3), (34), (35): Xaa is C or S
XKXSKVVMSMEGLVKPTRGVMIQITINSLDQPVXXPSASA

SEQ ID NO: 74994 - protein, 32 aa, Artificial Sequence; identical to SEQ ID NO: 17653
  GFR-binding peptide
  MOD_RES (11), (12), (13), (14), (15): Xaa is A or G
  MOD_RES (16), (17), (18), (19): Xaa is A or G or is absent

SEQ ID NO: 74995 - protein, 39 aa, Artificial Sequence
  GFR-binding peptide
  MOD_RES (1), (3), (35), (36): Xaa is C or S
XGXRDVVMGSMEGLIIQQKDNMIQMTINSMKTPTXXPGA

SEQ ID NO: 74996 - protein, 39 aa, Artificial Sequence; identical to SEQ ID NO: 17656
  GFR-binding peptide
  MOD_RES (35), (35): Xaa is C or S
  MOD_RES (11), (12), (13), (14), (15): Xaa is A or G
  MOD_RES (16), (17), (18), (19): Xaa is A or G or is absent

SEQ ID NO: 74997 - protein, 37 aa, Artificial Sequence; identical to SEQ ID NO: 17657
  GFR-binding peptide
  MOD_RES (1), (3): Xaa is C or S

SEQ ID NO: 74998 - protein, 34 aa, Artificial Sequence
  GFR-binding peptide
  MOD_RES (1), (32), (33): Xaa is C or S
XSKVIMSMEGLIKPTKGIMIQITINSLDQSVXXP

SEQ ID NO: 74999 - protein, 35 aa, Artificial Sequence; identical to SEQ ID NO: 17660
  GFR-binding peptide
  MOD_RES (35), (35): Xaa is C or S
  MOD_RES (11), (12), (13), (14), (15): Xaa is A or G
  MOD_RES (16), (17), (18), (19): Xaa is A or G or is absent

SEQ ID NO: 75000 - protein, 34 aa, Artificial Sequence; identical to SEQ ID NO: 49812
  GFR-binding peptide
  MOD_RES (2), (2): Xaa is C or S
  MOD_RES (13), (14), (15), (16), (17): Xaa is A or G
  MOD_RES (18), (19), (20), (21): Xaa is A or G or is absent

SEQ ID NO: 75001 - protein, 35 aa, Artificial Sequence; identical to SEQ ID NO: 17662
  GFR-binding peptide
  MOD_RES (35), (35): Xaa is C or S
  MOD_RES (11), (12), (13), (14), (15): Xaa is A or G
  MOD_RES (16), (17), (18), (19): Xaa is A or G or is absent

SEQ ID NO: 75002 - protein, 38 aa, Artificial Sequence
  GFR-binding peptide
  MOD_RES (1), (3), (37), (38): Xaa is C or S
  MOD_RES (15), (16), (17), (18), (19): Xaa is A or G
  MOD_RES (20), (21), (22), (23): Xaa is A or G or is absent
XGXRDVVMGSMEGLXXXXXXXXXMIQMTINSMKTPTXX

SEQ ID NO: 75003 - protein, 33 aa, Artificial Sequence
  GFR-binding peptide
  MOD_RES (31), (32): Xaa is C or S
SKVIMSMEGLIKPTKGIMIQITINSLDQSVXXP

SEQ ID NO: 75004 - protein, 38 aa, Artificial Sequence; identical to SEQ ID NO: 17665
  GFR-binding peptide
  MOD_RES (1), (3), (37): Xaa is C or S

SEQ ID NO: 75005 - protein, 39 aa, Artificial Sequence
  GFR-binding peptide
  MOD_RES (2), (35), (36): Xaa is C or S
  MOD_RES (13), (14), (15), (16), (17): Xaa is A or G
  MOD_RES (18), (19), (20), (21): Xaa is A or G or is absent
GXEEVIMSMEGLXXXXXXXXXMIQMTINSTKVPAXXTSP

SEQ ID NO: 75006 - protein, 37 aa, Artificial Sequence
  GFR-binding peptide
  MOD_RES (34), (35): Xaa is C or S
  MOD_RES (12), (13), (14), (15), (16): Xaa is A or G
  MOD_RES (17), (18), (19), (20): Xaa is A or G or is absent
SEVVMDSMEGIXXXXXXXXXMIQITINSLRTPVXXTP

SEQ ID NO: 75007 - protein, 39 aa, Artificial Sequence; identical to SEQ ID NO: 49817
  GFR-binding peptide
  MOD_RES (1), (3), (34), (35): Xaa is C or S

SEQ ID NO: 75008 - protein, 39 aa, Artificial Sequence
  GFR-binding peptide
  MOD_RES (34), (35): Xaa is C or S
  MOD_RES (12), (13), (14), (15), (16): Xaa is A or G
  MOD_RES (17), (18), (19), (20): Xaa is A or G or is absent
SEVVMDSMEGIXXXXXXXXXMIQITINSLRTPVXXTPPT

SEQ ID NO: 75009 - protein, 36 aa, Artificial Sequence; identical to SEQ ID NO: 47261
  GFR-binding peptide
  MOD_RES (1), (3), (36): Xaa is C or S
  MOD_RES (14), (15), (16), (17), (18): Xaa is A or G
  MOD_RES (19), (20), (21), (22): Xaa is A or G or is absent

SEQ ID NO: 75010 - protein, 45 aa, Artificial Sequence; identical to SEQ ID NO: 17671
  GFR-binding peptide
  MOD_RES (2), (4), (41): Xaa is C or S
  MOD_RES (17), (18), (19), (20), (21): Xaa is A or G
  MOD_RES (22), (23), (24), (25): Xaa is A or G or is absent

SEQ ID NO: 75011 - protein, 39 aa, Artificial Sequence
  GFR-binding peptide
  MOD_RES (2), (35), (36): Xaa is C or S
  MOD_RES (13), (14), (15), (16), (17): Xaa is A or G
  MOD_RES (18), (19), (20), (21): Xaa is A or G or is absent
GXEEVIMSMEGIXXXXXXXXXMIQMTINSTKVPAXXTSP

SEQ ID NO: 75012 - protein, 39 aa, Artificial Sequence
  GFR-binding peptide
  MOD_RES (34), (35): Xaa is C or S
  MOD_RES (12), (13), (14), (15), (16): Xaa is A or G
  MOD_RES (17), (18), (19), (20): Xaa is A or G or is absent
SRVVMNSMEGLXXXXXXXXXMIQVTINSLKTPAXXPKPV

SEQ ID NO: 75013 - protein, 32 aa, Artificial Sequence; identical to SEQ ID NO: 17672
  GFR-binding peptide

SEQ ID NO: 75014 - protein, 35 aa, Artificial Sequence
  GFR-binding peptide
  MOD_RES (33), (34): Xaa is C or S
  MOD_RES (11), (12), (13), (14), (15): Xaa is A or G
  MOD_RES (16), (17), (18), (19): Xaa is A or G or is absent
SRVIMSMEGLXXXXXXXXXMIQITINSLAQPVXXP

SEQ ID NO: 75015 - protein, 38 aa, Artificial Sequence; identical to SEQ ID NO: 49827
  GFR-binding peptide
  MOD_RES (1), (33), (34): Xaa is C or S

SEQ ID NO: 75016 - protein, 34 aa, Artificial Sequence
  GFR-binding peptide
  MOD_RES (1), (3): Xaa is C or S
XGXAEVVMDSMEGLVVNNAADMIQITINSLRAPV

SEQ ID NO: 75017 - protein, 37 aa, Artificial Sequence
  GFR-binding peptide
  MOD_RES (2), (33), (34): Xaa is C or S
GXEEVIMSMEGLLLVRGNDMIQMTINSTKVPAXXTSP

SEQ ID NO: 75018 - protein, 32 aa, Artificial Sequence; identical to SEQ ID NO: 17675
  GFR-binding peptide

SEQ ID NO: 75019 - protein, 37 aa, Artificial Sequence; identical to SEQ ID NO: 17676
  GFR-binding peptide
  MOD_RES (37), (37): Xaa is C or S
  MOD_RES (13), (14), (15), (16), (17): Xaa is A or G
  MOD_RES (18), (19), (20), (21): Xaa is A or G or is absent

SEQ ID NO: 75020 - protein, 35 aa, Artificial Sequence; identical to SEQ ID NO: 17677
  GFR-binding peptide

SEQ ID NO: 75021 - protein, 39 aa, Artificial Sequence
  GFR-binding peptide
  MOD_RES (1), (3), (37), (38): Xaa is C or S
  MOD_RES (15), (16), (17), (18), (19): Xaa is A or G
  MOD_RES (20), (21), (22), (23): Xaa is A or G or is absent
XGXRDVVMGSMEGLXXXXXXXXXMIQMTINSMKTPTXXP

SEQ ID NO: 75022 - protein, 36 aa, Artificial Sequence; identical to SEQ ID NO: 17679
  GFR-binding peptide
  MOD_RES (34), (34): Xaa is C or S

SEQ ID NO: 75023 - protein, 41 aa, Artificial Sequence; identical to SEQ ID NO: 17682
  GFR-binding peptide
  MOD_RES (2), (4), (41): Xaa is C or S
  MOD_RES (17), (18), (19), (20), (21): Xaa is A or G
  MOD_RES (22), (23), (24), (25): Xaa is A or G or is absent

SEQ ID NO: 75024 - protein, 36 aa, Artificial Sequence
  GFR-binding peptide
  MOD_RES (1), (34), (35): Xaa is C or S
  MOD_RES (12), (13), (14), (15), (16): Xaa is A or G
  MOD_RES (17), (18), (19), (20): Xaa is A or G or is absent
XSRVIMSMEGLXXXXXXXXXMIQITINSLAQPVXXP

SEQ ID NO: 75025 - protein, 41 aa, Artificial Sequence
  GFR-binding peptide
  MOD_RES (2), (4), (36), (37): Xaa is C or S
RXGXAEVVMDSMEGLVVNNAADMIQITINSLRAPVXXSAPA

SEQ ID NO: 75026 - protein, 43 aa, Artificial Sequence; identical to SEQ ID NO: 17683
  GFR-binding peptide
  MOD_RES (2), (4), (38): Xaa is C or S
  MOD_RES (16), (17), (18), (19), (20): Xaa is A or G
  MOD_RES (21), (22), (23), (24): Xaa is A or G or is absent

SEQ ID NO: 75027 - protein, 40 aa, Artificial Sequence; identical to SEQ ID NO: 17684
  GFR-binding peptide
  MOD_RES (2), (39): Xaa is C or S

SEQ ID NO: 75028 - protein, 32 aa, Artificial Sequence; identical to SEQ ID NO: 17685
  GFR-binding peptide
  MOD_RES (11), (12), (13), (14), (15): Xaa is A or G
  MOD_RES (16), (17), (18), (19): Xaa is A or G or is absent

SEQ ID NO: 75029 - protein, 35 aa, Artificial Sequence
  GFR-binding peptide
  MOD_RES (32), (33): Xaa is C or S
AEVVMDSMEGLVVNNAADMIQITINSLRAPVXXSA

SEQ ID NO: 75030 - protein, 35 aa, Artificial Sequence; identical to SEQ ID NO: 17686
  GFR-binding peptide
  MOD_RES (13), (14), (15), (16), (17): Xaa is A or G
  MOD_RES (18), (19), (20), (21): Xaa is A or G or is absent

SEQ ID NO: 75031 - protein, 37 aa, Artificial Sequence; identical to SEQ ID NO: 17687
  GFR-binding peptide
  MOD_RES (2), (4): Xaa is C or S

SEQ ID NO: 75032 - protein, 33 aa, Artificial Sequence; identical to SEQ ID NO: 47299
  GFR-binding peptide
  MOD_RES (1), (3): Xaa is C or S

SEQ ID NO: 75033 - protein, 38 aa, Artificial Sequence; identical to SEQ ID NO: 17690
  GFR-binding peptide
  MOD_RES (1), (3): Xaa is C or S
  MOD_RES (16), (17), (18), (19), (20): Xaa is A or G
  MOD_RES (21), (22), (23), (24): Xaa is A or G or is absent

SEQ ID NO: 75034 - protein, 37 aa, Artificial Sequence; identical to SEQ ID NO: 17693
  GFR-binding peptide
  MOD_RES (2), (36): Xaa is C or S
  MOD_RES (14), (15), (16), (17), (18): Xaa is A or G
  MOD_RES (19), (20), (21), (22): Xaa is A or G or is absent

SEQ ID NO: 75035 - protein, 37 aa, Artificial Sequence; identical to SEQ ID NO: 49857
  GFR-binding peptide
  MOD_RES (2), (4), (36), (37): Xaa is C or S

SEQ ID NO: 75036 - protein, 35 aa, Artificial Sequence; identical to SEQ ID NO: 47309
  GFR-binding peptide
  MOD_RES (1), (3), (35): Xaa is C or S

SEQ ID NO: 75037 - protein, 43 aa, Artificial Sequence; identical to SEQ ID NO: 17694
  GFR-binding peptide
  MOD_RES (2), (39): Xaa is C or S
  MOD_RES (15), (16), (17), (18), (19): Xaa is A or G
  MOD_RES (20), (21), (22), (23): Xaa is A or G or is absent

SEQ ID NO: 75038 - protein, 35 aa, Artificial Sequence
  GFR-binding peptide
  MOD_RES (2), (33), (34): Xaa is C or S
KXSRVIMSMEGLVKPKRGVMIQITINSLAQPVXXP

SEQ ID NO: 75039 - protein, 38 aa, Artificial Sequence
  GFR-binding peptide
  MOD_RES (2), (4), (38): Xaa is C or S
  MOD_RES (16), (17), (18), (19), (20): Xaa is A or G
  MOD_RES (21), (22), (23), (24): Xaa is A or G or is absent
SXGXRDVVMGSMEGLXXXXXXXXXMIQMTINSMKTPTX

SEQ ID NO: 75040 - protein, 40 aa, Artificial Sequence
  GFR-binding peptide
  MOD_RES (2), (36), (37): Xaa is C or S
  MOD_RES (14), (15), (16), (17), (18): Xaa is A or G
  MOD_RES (19), (20), (21), (22): Xaa is A or G or is absent
GXSEVVMDSMEGIXXXXXXXXXMIQITINSLRTPVXXTPP

SEQ ID NO: 75041 - protein, 35 aa, Artificial Sequence
  GFR-binding peptide
  MOD_RES (32), (33): Xaa is C or S
SRVVMNSMEGLIVNSSDDMIQVTINSLKTPAXXPK

SEQ ID NO: 75042 - protein, 36 aa, Artificial Sequence; identical to SEQ ID NO: 49865
  GFR-binding peptide
  MOD_RES (2), (35), (36): Xaa is C or S
  MOD_RES (13), (14), (15), (16), (17): Xaa is A or G
  MOD_RES (18), (19), (20), (21): Xaa is A or G or is absent

SEQ ID NO: 75043 - protein, 42 aa, Artificial Sequence; identical to SEQ ID NO: 17696
  GFR-binding peptide
  MOD_RES (2), (4), (41): Xaa is C or S
  MOD_RES (17), (18), (19), (20), (21): Xaa is A or G
  MOD_RES (22), (23), (24), (25): Xaa is A or G or is absent

SEQ ID NO: 75044 - protein, 41 aa, Artificial Sequence
  GFR-binding peptide
  MOD_RES (1), (3), (37), (38): Xaa is C or S
  MOD_RES (15), (16), (17), (18), (19): Xaa is A or G
  MOD_RES (20), (21), (22), (23): Xaa is A or G or is absent
XGXAEVVMDSMEGLXXXXXXXXXMIQITINSLRAPVXXSAP

SEQ ID NO: 75045 - protein, 39 aa, Artificial Sequence; identical to SEQ ID NO: 17698
  GFR-binding peptide
  MOD_RES (2), (36): Xaa is C or S
  MOD_RES (14), (15), (16), (17), (18): Xaa is A or G
  MOD_RES (19), (20), (21), (22): Xaa is A or G or is absent

SEQ ID NO: 75046 - protein, 38 aa, Artificial Sequence; identical to SEQ ID NO: 17699
  GFR-binding peptide
  MOD_RES (2), (4): Xaa is C or S
  MOD_RES (17), (18), (19), (20), (21): Xaa is A or G
  MOD_RES (22), (23), (24), (25): Xaa is A or G or is absent

SEQ ID NO: 75047 - protein, 38 aa, Artificial Sequence
  GFR-binding peptide
  MOD_RES (32), (33): Xaa is C or S
SRVVMNSMEGLIVNSSDDMIQVTINSLKTPAXXPKPVH

SEQ ID NO: 75048 - protein, 41 aa, Artificial Sequence
  GFR-binding peptide
  MOD_RES (1), (35), (36): Xaa is C or S
  MOD_RES (13), (14), (15), (16), (17): Xaa is A or G
  MOD_RES (18), (19), (20), (21): Xaa is A or G or is absent
XSEVVMDSMEGLXXXXXXXXXMIQITINSLRTPVXXTPPTS

SEQ ID NO: 75049 - protein, 39 aa, Artificial Sequence; identical to SEQ ID NO: 49875
  GFR-binding peptide
  MOD_RES (1), (34), (35): Xaa is C or S
  MOD_RES (12), (13), (14), (15), (16): Xaa is A or G
  MOD_RES (17), (18), (19), (20): Xaa is A or G or is absent

SEQ ID NO: 75050 - protein, 37 aa, Artificial Sequence
  GFR-binding peptide
  MOD_RES (1), (3), (37): Xaa is C or S
  MOD_RES (15), (16), (17), (18), (19): Xaa is A or G
  MOD_RES (20), (21), (22), (23): Xaa is A or G or is absent
XGXSRVVMNSMEGLXXXXXXXXXMIQVTINSLKTPAX

SEQ ID NO: 75051 - protein, 39 aa, Artificial Sequence
  GFR-binding peptide
  MOD_RES (2), (4), (37), (38): Xaa is C or S
  MOD_RES (15), (16), (17), (18), (19): Xaa is A or G
  MOD_RES (20), (21), (22), (23): Xaa is A or G or is absent
SXKXSKVIMSMEGLXXXXXXXXXMIQITINSLDQSVXXP

SEQ ID NO: 75052 - protein, 39 aa, Artificial Sequence; identical to SEQ ID NO: 17702
  GFR-binding peptide
  MOD_RES (2), (4): Xaa is C or S

SEQ ID NO: 75053 - protein, 39 aa, Artificial Sequence; identical to SEQ ID NO: 17703
  GFR-binding peptide
  MOD_RES (2), (4), (38): Xaa is C or S
  MOD_RES (16), (17), (18), (19), (20): Xaa is A or G
  MOD_RES (21), (22), (23), (24): Xaa is A or G or is absent

SEQ ID NO: 75054 - protein, 35 aa, Artificial Sequence
  GFR-binding peptide
  MOD_RES (31), (32): Xaa is C or S
EVVMDSMEGLVVNNASDMIQITINSLRTPVXXTPP

SEQ ID NO: 75055 - protein, 35 aa, Artificial Sequence; identical to SEQ ID NO: 49877
  GFR-binding peptide
  MOD_RES (2), (33), (34): Xaa is C or S

SEQ ID NO: 75056 - protein, 36 aa, Artificial Sequence
  GFR-binding peptide
  MOD_RES (2), (35), (36): Xaa is C or S
  MOD_RES (13), (14), (15), (16), (17): Xaa is A or G
  MOD_RES (18), (19), (20), (21): Xaa is A or G or is absent
KXSKVVMSMEGLXXXXXXXXXMIQITINSLDQPVXX

SEQ ID NO: 75057 - protein, 35 aa, Artificial Sequence; identical to SEQ ID NO: 47338
  GFR-binding peptide
  MOD_RES (1), (3): Xaa is C or S
  MOD_RES (14), (15), (16), (17), (18): Xaa is A or G
  MOD_RES (19), (20), (21), (22): Xaa is A or G or is absent

SEQ ID NO: 75058 - protein, 38 aa, Artificial Sequence
  GFR-binding peptide
  MOD_RES (1), (32), (33): Xaa is C or S
XEEVIMSMEGLLLVRGNDMIQMTINSTKVPAXXTSPVR

SEQ ID NO: 75059 - protein, 37 aa, Artificial Sequence
  GFR-binding peptide
  MOD_RES (1), (3), (35), (36): Xaa is C or S
XGXAEVVMDSMEGIVVNNAADMIQITINSLRAPVXXS

SEQ ID NO: 75060 - protein, 35 aa, Artificial Sequence
  GFR-binding peptide
  MOD_RES (2), (33), (34): Xaa is C or S
KXSKVIMSMEGLIKPTKGIMIQITINSLDQSVXXP

SEQ ID NO: 75061 - protein, 36 aa, Artificial Sequence
  GFR-binding peptide
  MOD_RES (1), (33), (34): Xaa is C or S
XAEVVMDSMEGIVVNNAADMIQITINSLRAPVXXSA

SEQ ID NO: 75062 - protein, 32 aa, Artificial Sequence; identical to SEQ ID NO: 49884
  GFR-binding peptide
  MOD_RES (31), (32): Xaa is C or S

SEQ ID NO: 75063 - protein, 31 aa, Artificial Sequence
  GFR-binding peptide
AEVVMDSMEGIVVNNAADMIQITINSLRAPV

SEQ ID NO: 75064 - protein, 39 aa, Artificial Sequence; identical to SEQ ID NO: 17708
  GFR-binding peptide
  MOD_RES (1), (3), (37): Xaa is C or S
  MOD_RES (15), (16), (17), (18), (19): Xaa is A or G
  MOD_RES (20), (21), (22), (23): Xaa is A or G or is absent

SEQ ID NO: 75065 - protein, 44 aa, Artificial Sequence
  GFR-binding peptide
  MOD_RES (2), (4), (38), (39): Xaa is C or S
  MOD_RES (16), (17), (18), (19), (20): Xaa is A or G
  MOD_RES (21), (22), (23), (24): Xaa is A or G or is absent
RXGXSEVVMDSMEGLXXXXXXXXXMIQITINSLRTPVXXTPPTS

SEQ ID NO: 75066 - protein, 36 aa, Artificial Sequence
  GFR-binding peptide
  MOD_RES (2), (34), (35): Xaa is C or S
GXSRVVMNSMEGLIVNSSDDMIQVTINSLKTPAXXP

SEQ ID NO: 75067 - protein, 37 aa, Artificial Sequence; identical to SEQ ID NO: 17711
  GFR-binding peptide
  MOD_RES (36), (36): Xaa is C or S
  MOD_RES (12), (13), (14), (15), (16): Xaa is A or G
  MOD_RES (17), (18), (19), (20): Xaa is A or G or is absent

SEQ ID NO: 75068 - protein, 38 aa, Artificial Sequence
  GFR-binding peptide
  MOD_RES (33), (34): Xaa is C or S
  MOD_RES (11), (12), (13), (14), (15): Xaa is A or G
  MOD_RES (16), (17), (18), (19): Xaa is A or G or is absent
DVVMGSMEGLXXXXXXXXXMIQMTINSMKTPTXXPGAS

SEQ ID NO: 75069 - protein, 41 aa, Artificial Sequence; identical to SEQ ID NO: 47360
  GFR-binding peptide
  MOD_RES (2), (4), (35), (36): Xaa is C or S

SEQ ID NO: 75070 - protein, 34 aa, Artificial Sequence
  GFR-binding peptide
  MOD_RES (33), (34): Xaa is C or S
  MOD_RES (11), (12), (13), (14), (15): Xaa is A or G
  MOD_RES (16), (17), (18), (19): Xaa is A or G or is absent
EEVIMSMEGLXXXXXXXXXMIQMTINSTKVPAXX

SEQ ID NO: 75071 - protein, 35 aa, Artificial Sequence; identical to SEQ ID NO: 17714
  GFR-binding peptide
  MOD_RES (12), (13), (14), (15), (16): Xaa is A or G
  MOD_RES (17), (18), (19), (20): Xaa is A or G or is absent

SEQ ID NO: 75072 - protein, 36 aa, Artificial Sequence; identical to SEQ ID NO: 17715
  GFR-binding peptide
  MOD_RES (33), (33): Xaa is C or S
  MOD_RES (11), (12), (13), (14), (15): Xaa is A or G
  MOD_RES (16), (17), (18), (19): Xaa is A or G or is absent

SEQ ID NO: 75073 - protein, 35 aa, Artificial Sequence; identical to SEQ ID NO: 17716
  GFR-binding peptide
  MOD_RES (34), (34): Xaa is C or S

SEQ ID NO: 75074 - protein, 39 aa, Artificial Sequence
  GFR-binding peptide
  MOD_RES (2), (36), (37): Xaa is C or S
  MOD_RES (14), (15), (16), (17), (18): Xaa is A or G
  MOD_RES (19), (20), (21), (22): Xaa is A or G or is absent
GXSEVVMDSMEGLXXXXXXXXXMIQITINSLRTPVXXTP

SEQ ID NO: 75075 - protein, 31 aa, Artificial Sequence
  GFR-binding peptide
  MOD_RES (1), (1): Xaa is C or S
XEEVIMSMEGLLLVRGNDMIQMTINSTKVPA

SEQ ID NO: 75076 - protein, 38 aa, Artificial Sequence
  GFR-binding peptide
  MOD_RES (2), (33), (34): Xaa is C or S
GXEEVIMSMEGLLLVRGNDMIQMTINSTKVPAXXTSPV

SEQ ID NO: 75077 - protein, 39 aa, Artificial Sequence
  GFR-binding peptide
  MOD_RES (2), (36), (37): Xaa is C or S
  MOD_RES (14), (15), (16), (17), (18): Xaa is A or G
  MOD_RES (19), (20), (21), (22): Xaa is A or G or is absent
GXSEVVMDSMEGIXXXXXXXXXMIQITINSLRTPVXXTP

SEQ ID NO: 75078 - protein, 36 aa, Artificial Sequence; identical to SEQ ID NO: 17719
  GFR-binding peptide
  MOD_RES (36), (36): Xaa is C or S

SEQ ID NO: 75079 - protein, 41 aa, Artificial Sequence; identical to SEQ ID NO: 17720
  GFR-binding peptide
  MOD_RES (2), (36): Xaa is C or S
  MOD_RES (14), (15), (16), (17), (18): Xaa is A or G
  MOD_RES (19), (20), (21), (22): Xaa is A or G or is absent

SEQ ID NO: 75080 - protein, 33 aa, Artificial Sequence
  GFR-binding peptide
  MOD_RES (31), (32): Xaa is C or S
SKVVMSMEGLVKPTRGVMIQITINSLDQPVXXP

SEQ ID NO: 75081 - protein, 38 aa, Artificial Sequence; identical to SEQ ID NO: 17722
  GFR-binding peptide
  MOD_RES (2), (4): Xaa is C or S

SEQ ID NO: 75082 - protein, 35 aa, Artificial Sequence; identical to SEQ ID NO: 47374
  GFR-binding peptide
  MOD_RES (1), (3): Xaa is C or S
  MOD_RES (14), (15), (16), (17), (18): Xaa is A or G
  MOD_RES (19), (20), (21), (22): Xaa is A or G or is absent

SEQ ID NO: 75083 - protein, 32 aa, Artificial Sequence; identical to SEQ ID NO: 47375
  GFR-binding peptide
  MOD_RES (1), (32): Xaa is C or S

SEQ ID NO: 75084 - protein, 38 aa, Artificial Sequence; identical to SEQ ID NO: 17724
  GFR-binding peptide
  MOD_RES (1), (38): Xaa is C or S
  MOD_RES (14), (15), (16), (17), (18): Xaa is A or G
  MOD_RES (19), (20), (21), (22): Xaa is A or G or is absent

SEQ ID NO: 75085 - protein, 31 aa, Artificial Sequence; identical to SEQ ID NO: 49910
  GFR-binding peptide
  MOD_RES (31), (31): Xaa is C or S

SEQ ID NO: 75086 - protein, 37 aa, Artificial Sequence
  GFR-binding peptide
  MOD_RES (1), (33), (34): Xaa is C or S
XSRVVMNSMEGLIVNSSDDMIQVTINSLKTPAXXPKP

SEQ ID NO: 75087 - protein, 38 aa, Artificial Sequence
  GFR-binding peptide
  MOD_RES (34), (35): Xaa is C or S
  MOD_RES (12), (13), (14), (15), (16): Xaa is A or G
  MOD_RES (17), (18), (19), (20): Xaa is A or G or is absent
SEVVMDSMEGIXXXXXXXXXMIQITINSLRTPVXXTPP

SEQ ID NO: 75088 - protein, 34 aa, Artificial Sequence
  GFR-binding peptide
  MOD_RES (33), (34): Xaa is C or S
  MOD_RES (11), (12), (13), (14), (15): Xaa is A or G
  MOD_RES (16), (17), (18), (19): Xaa is A or G or is absent
EVVMDSMEGIXXXXXXXXXMIQITINSLRTPVXX

SEQ ID NO: 75089 - protein, 41 aa, Artificial Sequence
  GFR-binding peptide
  MOD_RES (2), (4), (36), (37): Xaa is C or S
RXGXSEVVMDSMEGLVVNNASDMIQITINSLRTPVXXTPPT

SEQ ID NO: 75090 - protein, 35 aa, Artificial Sequence
  GFR-binding peptide
  MOD_RES (34), (35): Xaa is C or S
  MOD_RES (12), (13), (14), (15), (16): Xaa is A or G
  MOD_RES (17), (18), (19), (20): Xaa is A or G or is absent
SEVVMDSMEGLXXXXXXXXXMIQITINSLRTPVXX

SEQ ID NO: 75091 - protein, 39 aa, Artificial Sequence; identical to SEQ ID NO: 17728
  GFR-binding peptide
  MOD_RES (2), (39): Xaa is C or S
  MOD_RES (15), (16), (17), (18), (19): Xaa is A or G
  MOD_RES (20), (21), (22), (23): Xaa is A or G or is absent

SEQ ID NO: 75092 - protein, 38 aa, Artificial Sequence; identical to SEQ ID NO: 47391
  GFR-binding peptide
  MOD_RES (1), (34), (35): Xaa is C or S
  MOD_RES (12), (13), (14), (15), (16): Xaa is A or G
  MOD_RES (17), (18), (19), (20): Xaa is A or G or is absent

SEQ ID NO: 75093 - protein, 41 aa, Artificial Sequence
  GFR-binding peptide
  MOD_RES (2), (4), (38), (39): Xaa is C or S
  MOD_RES (16), (17), (18), (19), (20): Xaa is A or G
  MOD_RES (21), (22), (23), (24): Xaa is A or G or is absent
SXGXRDVVMGSMEGLXXXXXXXXXMIQMTINSMKTPTXXPG

SEQ ID NO: 75094 - protein, 33 aa, Artificial Sequence; identical to SEQ ID NO: 17731
  GFR-binding peptide

SEQ ID NO: 75095 - protein, 40 aa, Artificial Sequence
  GFR-binding peptide
  MOD_RES (2), (4), (36), (37): Xaa is C or S
SXGXRDVVMGSMEGIIIQQKDNMIQMTINSMKTPTXXPGA

SEQ ID NO: 75096 - protein, 43 aa, Artificial Sequence; identical to SEQ ID NO: 17732
  GFR-binding peptide
  MOD_RES (1), (3), (40): Xaa is C or S
  MOD_RES (16), (17), (18), (19), (20): Xaa is A or G
  MOD_RES (21), (22), (23), (24): Xaa is A or G or is absent

SEQ ID NO: 75097 - protein, 34 aa, Artificial Sequence
  GFR-binding peptide
  MOD_RES (34), (34): Xaa is C or S
  MOD_RES (12), (13), (14), (15), (16): Xaa is A or G
  MOD_RES (17), (18), (19), (20): Xaa is A or G or is absent
SEVVMDSMEGLXXXXXXXXXMIQITINSLRTPVX

SEQ ID NO: 75098 - protein, 39 aa, Artificial Sequence; identical to SEQ ID NO: 17733
  GFR-binding peptide
  MOD_RES (1), (35): Xaa is C or S
  MOD_RES (13), (14), (15), (16), (17): Xaa is A or G
  MOD_RES (18), (19), (20), (21): Xaa is A or G or is absent

SEQ ID NO: 75099 - protein, 36 aa, Artificial Sequence; identical to SEQ ID NO: 49921
  GFR-binding peptide
  MOD_RES (31), (32): Xaa is C or S

SEQ ID NO: 75100 - protein, 44 aa, Artificial Sequence; identical to SEQ ID NO: 17735
  GFR-binding peptide
  MOD_RES (2), (4), (38): Xaa is C or S
  MOD_RES (16), (17), (18), (19), (20): Xaa is A or G
  MOD_RES (21), (22), (23), (24): Xaa is A or G or is absent

SEQ ID NO: 75101 - protein, 40 aa, Artificial Sequence
  GFR-binding peptide
  MOD_RES (2), (4), (37), (38): Xaa is C or S
  MOD_RES (15), (16), (17), (18), (19): Xaa is A or G
  MOD_RES (20), (21), (22), (23): Xaa is A or G or is absent
LXGXEEVIMSMEGLXXXXXXXXXMIQMTINSTKVPAXXTS

SEQ ID NO: 75102 - protein, 41 aa, Artificial Sequence
  GFR-binding peptide
  MOD_RES (2), (4), (38), (39): Xaa is C or S
  MOD_RES (16), (17), (18), (19), (20): Xaa is A or G
  MOD_RES (21), (22), (23), (24): Xaa is A or G or is absent
RXGXAEVVMDSMEGIXXXXXXXXXMIQITINSLRAPVXXSA

SEQ ID NO: 75103 - protein, 36 aa, Artificial Sequence; identical to SEQ ID NO: 17739
  GFR-binding peptide
  MOD_RES (1), (1): Xaa is C or S
  MOD_RES (14), (15), (16), (17), (18): Xaa is A or G
  MOD_RES (19), (20), (21), (22): Xaa is A or G or is absent

SEQ ID NO: 75104 - protein, 35 aa, Artificial Sequence; identical to SEQ ID NO: 17740
  GFR-binding peptide
  MOD_RES (34), (34): Xaa is C or S
  MOD_RES (12), (13), (14), (15), (16): Xaa is A or G
  MOD_RES (17), (18), (19), (20): Xaa is A or G or is absent

SEQ ID NO: 75105 - protein, 33 aa, Artificial Sequence
  GFR-binding peptide
  MOD_RES (1), (1): Xaa is C or S
  MOD_RES (12), (13), (14), (15), (16): Xaa is A or G
  MOD_RES (17), (18), (19), (20): Xaa is A or G or is absent
XSKVIMSMEGLXXXXXXXXXMIQITINSLDQSV

SEQ ID NO: 75106 - protein, 40 aa, Artificial Sequence; identical to SEQ ID NO: 47400
  GFR-binding peptide
  MOD_RES (2), (4), (35), (36): Xaa is C or S

SEQ ID NO: 75107 - protein, 33 aa, Artificial Sequence
  GFR-binding peptide
  MOD_RES (31), (32): Xaa is C or S
EVVMDSMEGIVVNNASDMIQITINSLRTPVXXT

SEQ ID NO: 75108 - protein, 41 aa, Artificial Sequence
  GFR-binding peptide
  MOD_RES (1), (3), (35), (36): Xaa is C or S
XGXAEVVMDSMEGLVVNNAADMIQITINSLRAPVXXSAPAA

SEQ ID NO: 75109 - protein, 37 aa, Artificial Sequence
  GFR-binding peptide
  MOD_RES (2), (35), (36): Xaa is C or S
  MOD_RES (13), (14), (15), (16), (17): Xaa is A or G
  MOD_RES (18), (19), (20), (21): Xaa is A or G or is absent
GXEEVIMSMEGIXXXXXXXXXMIQMTINSTKVPAXXT

SEQ ID NO: 75110 - protein, 32 aa, Artificial Sequence; identical to SEQ ID NO: 47416
  GFR-binding peptide
  MOD_RES (31), (32): Xaa is C or S

SEQ ID NO: 75111 - protein, 38 aa, Artificial Sequence
  GFR-binding peptide
  MOD_RES (1), (33), (34): Xaa is C or S
XSRVVMNSMEGLIVNSSDDMIQVTINSLKTPAXXPKPV

SEQ ID NO: 75112 - protein, 40 aa, Artificial Sequence
  GFR-binding peptide
  MOD_RES (34), (35): Xaa is C or S
  MOD_RES (12), (13), (14), (15), (16): Xaa is A or G
  MOD_RES (17), (18), (19), (20): Xaa is A or G or is absent
SEVVMDSMEGIXXXXXXXXXMIQITINSLRTPVXXTPPTS

SEQ ID NO: 75113 - protein, 38 aa, Artificial Sequence; identical to SEQ ID NO: 49944
  GFR-binding peptide
  MOD_RES (2), (36), (37): Xaa is C or S
  MOD_RES (14), (15), (16), (17), (18): Xaa is A or G
  MOD_RES (19), (20), (21), (22): Xaa is A or G or is absent

SEQ ID NO: 75114 - protein, 42 aa, Artificial Sequence
  GFR-binding peptide
  MOD_RES (1), (3), (37), (38): Xaa is C or S
  MOD_RES (15), (16), (17), (18), (19): Xaa is A or G
  MOD_RES (20), (21), (22), (23): Xaa is A or G or is absent
XGXAEVVMDSMEGIXXXXXXXXXMIQITINSLRAPVXXSAPA

SEQ ID NO: 75115 - protein, 32 aa, Artificial Sequence
  GFR-binding peptide
  MOD_RES (31), (32): Xaa is C or S
SKVIMSMEGLIKPTKGIMIQITINSLDQSVXX

SEQ ID NO: 75116 - protein, 36 aa, Artificial Sequence
  GFR-binding peptide
  MOD_RES (2), (33), (34): Xaa is C or S
GXEEVIMSMEGILLVRGNDMIQMTINSTKVPAXXTS

SEQ ID NO: 75117 - protein, 36 aa, Artificial Sequence; identical to SEQ ID NO: 17752
  GFR-binding peptide
  MOD_RES (34), (34): Xaa is C or S
  MOD_RES (12), (13), (14), (15), (16): Xaa is A or G
  MOD_RES (17), (18), (19), (20): Xaa is A or G or is absent

SEQ ID NO: 75118 - protein, 38 aa, Artificial Sequence
  GFR-binding peptide
  MOD_RES (2), (4), (36), (37): Xaa is C or S
SXGXRDVVMGSMEGLIIQQKDNMIQMTINSMKTPTXXP

SEQ ID NO: 75119 - protein, 43 aa, Artificial Sequence; identical to SEQ ID NO: 17753
  GFR-binding peptide
  MOD_RES (2), (4), (41): Xaa is C or S
  MOD_RES (17), (18), (19), (20), (21): Xaa is A or G
  MOD_RES (22), (23), (24), (25): Xaa is A or G or is absent

SEQ ID NO: 75120 - protein, 37 aa, Artificial Sequence; identical to SEQ ID NO: 17755
  GFR-binding peptide
  MOD_RES (1), (3), (37): Xaa is C or S

SEQ ID NO: 75121 - protein, 38 aa, Artificial Sequence; identical to SEQ ID NO: 17757
  GFR-binding peptide
  MOD_RES (1), (3): Xaa is C or S

SEQ ID NO: 75122 - protein, 35 aa, Artificial Sequence
  GFR-binding peptide
  MOD_RES (1), (3), (35): Xaa is C or S
XGXSEVVMDSMEGIVVNNASDMIQITINSLRTPVX

SEQ ID NO: 75123 - protein, 41 aa, Artificial Sequence
  GFR-binding peptide
  MOD_RES (1), (35), (36): Xaa is C or S
  MOD_RES (13), (14), (15), (16), (17): Xaa is A or G
  MOD_RES (18), (19), (20), (21): Xaa is A or G or is absent
XAEVVMDSMEGIXXXXXXXXXMIQITINSLRAPVXXSAPAA

SEQ ID NO: 75124 - protein, 36 aa, Artificial Sequence
  GFR-binding peptide
  MOD_RES (1), (3): Xaa is C or S
  MOD_RES (15), (16), (17), (18), (19): Xaa is A or G
  MOD_RES (20), (21), (22), (23): Xaa is A or G or is absent
XGXRDVVMGSMEGLXXXXXXXXXMIQMTINSMKTPT

SEQ ID NO: 75125 - protein, 36 aa, Artificial Sequence; identical to SEQ ID NO: 47433
  GFR-binding peptide
  MOD_RES (1), (34), (35): Xaa is C or S
  MOD_RES (12), (13), (14), (15), (16): Xaa is A or G
  MOD_RES (17), (18), (19), (20): Xaa is A or G or is absent

SEQ ID NO: 75126 - protein, 41 aa, Artificial Sequence; identical to SEQ ID NO: 17760
  GFR-binding peptide
  MOD_RES (37), (37): Xaa is C or S
  MOD_RES (13), (14), (15), (16), (17): Xaa is A or G
  MOD_RES (18), (19), (20), (21): Xaa is A or G or is absent

SEQ ID NO: 75127 - protein, 32 aa, Artificial Sequence; identical to SEQ ID NO: 47440
  GFR-binding peptide
  MOD_RES (31), (32): Xaa is C or S

SEQ ID NO: 75128 - protein, 34 aa, Artificial Sequence
  GFR-binding peptide
  MOD_RES (2), (34): Xaa is C or S
GXAEVVMDSMEGIVVNNAADMIQITINSLRAPVX

SEQ ID NO: 75129 - protein, 36 aa, Artificial Sequence; identical to SEQ ID NO: 17763
  GFR-binding peptide
  MOD_RES (33), (33): Xaa is C or S

SEQ ID NO: 75130 - protein, 35 aa, Artificial Sequence
  GFR-binding peptide
  MOD_RES (2), (4), (35): Xaa is C or S
SXKXSKVIMSMEGLIKPTKGIMIQITINSLDQSVX

SEQ ID NO: 75131 - protein, 34 aa, Artificial Sequence
  GFR-binding peptide
  MOD_RES (1), (3): Xaa is C or S
XGXAEVVMDSMEGIVVNNAADMIQITINSLRAPV

SEQ ID NO: 75132 - protein, 37 aa, Artificial Sequence
  GFR-binding peptide
  MOD_RES (2), (36), (37): Xaa is C or S
  MOD_RES (14), (15), (16), (17), (18): Xaa is A or G
  MOD_RES (19), (20), (21), (22): Xaa is A or G or is absent
GXSRVVMNSMEGLXXXXXXXXXMIQVTINSLKTPAXX

SEQ ID NO: 75133 - protein, 37 aa, Artificial Sequence; identical to SEQ ID NO: 47450
  GFR-binding peptide
  MOD_RES (1), (34), (35): Xaa is C or S
  MOD_RES (12), (13), (14), (15), (16): Xaa is A or G
  MOD_RES (17), (18), (19), (20): Xaa is A or G or is absent

SEQ ID NO: 75134 - protein, 40 aa, Artificial Sequence
  GFR-binding peptide
  MOD_RES (1), (3), (35), (36): Xaa is C or S
XGXSEVVMDSMEGIVVNNASDMIQITINSLRTPVXXTPPT

SEQ ID NO: 75135 - protein, 35 aa, Artificial Sequence
  GFR-binding peptide
  MOD_RES (32), (33): Xaa is C or S
SEVVMDSMEGIVVNNASDMIQITINSLRTPVXXTP

SEQ ID NO: 75136 - protein, 39 aa, Artificial Sequence; identical to SEQ ID NO: 49963
  GFR-binding peptide
  MOD_RES (1), (34), (35): Xaa is C or S
  MOD_RES (12), (13), (14), (15), (16): Xaa is A or G
  MOD_RES (17), (18), (19), (20): Xaa is A or G or is absent

SEQ ID NO: 75137 - protein, 38 aa, Artificial Sequence
  GFR-binding peptide
  MOD_RES (33), (34): Xaa is C or S
  MOD_RES (11), (12), (13), (14), (15): Xaa is A or G
  MOD_RES (16), (17), (18), (19): Xaa is A or G or is absent
DVVMGSMEGIXXXXXXXXXMIQMTINSMKTPTXXPGAS

SEQ ID NO: 75138 - protein, 38 aa, Artificial Sequence
  GFR-binding peptide
  MOD_RES (1), (3), (34), (35): Xaa is C or S
XKXSRVIMSMEGLVKPKRGVMIQITINSLAQPVXXPAA

SEQ ID NO: 75139 - protein, 36 aa, Artificial Sequence; identical to SEQ ID NO: 17767
  GFR-binding peptide
  MOD_RES (2), (36): Xaa is C or S
  MOD_RES (14), (15), (16), (17), (18): Xaa is A or G
  MOD_RES (19), (20), (21), (22): Xaa is A or G or is absent

SEQ ID NO: 75140 - protein, 39 aa, Artificial Sequence; identical to SEQ ID NO: 17768
  GFR-binding peptide
  MOD_RES (37), (37): Xaa is C or S

SEQ ID NO: 75141 - protein, 39 aa, Artificial Sequence
  GFR-binding peptide
  MOD_RES (2), (4), (37), (38): Xaa is C or S
  MOD_RES (15), (16), (17), (18), (19): Xaa is A or G
  MOD_RES (20), (21), (22), (23): Xaa is A or G or is absent
SXKXSKVVMSMEGLXXXXXXXXXMIQITINSLDQPVXXP

SEQ ID NO: 75142 - protein, 35 aa, Artificial Sequence; identical to SEQ ID NO: 49972
  GFR-binding peptide
  MOD_RES (2), (35): Xaa is C or S
  MOD_RES (13), (14), (15), (16), (17): Xaa is A or G
  MOD_RES (18), (19), (20), (21): Xaa is A or G or is absent

SEQ ID NO: 75143 - protein, 40 aa, Artificial Sequence
  GFR-binding peptide
  MOD_RES (2), (4), (36), (37): Xaa is C or S
RXGXSEVVMDSMEGLVVNNASDMIQITINSLRTPVXXTPP

SEQ ID NO: 75144 - protein, 38 aa, Artificial Sequence
  GFR-binding peptide
  MOD_RES (1), (3), (37), (38): Xaa is C or S
  MOD_RES (15), (16), (17), (18), (19): Xaa is A or G
  MOD_RES (20), (21), (22), (23): Xaa is A or G or is absent
XGXRDVVMGSMEGIXXXXXXXXXMIQMTINSMKTPTXX

SEQ ID NO: 75145 - protein, 37 aa, Artificial Sequence
  GFR-binding peptide
  MOD_RES (2), (4), (37): Xaa is C or S
  MOD_RES (15), (16), (17), (18), (19): Xaa is A or G
  MOD_RES (20), (21), (22), (23): Xaa is A or G or is absent
LXGXEEVIMSMEGIXXXXXXXXXMIQMTINSTKVPAX

SEQ ID NO: 75146 - protein, 35 aa, Artificial Sequence
  GFR-binding peptide
  MOD_RES (2), (35): Xaa is C or S
  MOD_RES (13), (14), (15), (16), (17): Xaa is A or G
  MOD_RES (18), (19), (20), (21): Xaa is A or G or is absent
KXSKVIMSMEGLXXXXXXXXXMIQITINSLDQSVX

SEQ ID NO: 75147 - protein, 35 aa, Artificial Sequence
  GFR-binding peptide
  MOD_RES (33), (34): Xaa is C or S
  MOD_RES (11), (12), (13), (14), (15): Xaa is A or G
  MOD_RES (16), (17), (18), (19): Xaa is A or G or is absent
SKVIMSMEGLXXXXXXXXXMIQITINSLDQSVXXP

SEQ ID NO: 75148 - protein, 36 aa, Artificial Sequence; identical to SEQ ID NO: 17772
  GFR-binding peptide
  MOD_RES (33), (33): Xaa is C or S
  MOD_RES (11), (12), (13), (14), (15): Xaa is A or G
  MOD_RES (16), (17), (18), (19): Xaa is A or G or is absent

SEQ ID NO: 75149 - protein, 32 aa, Artificial Sequence; identical to SEQ ID NO: 47461
  GFR-binding peptide
  MOD_RES (1), (1): Xaa is C or S

SEQ ID NO: 75150 - protein, 32 aa, Artificial Sequence
  GFR-binding peptide
  MOD_RES (31), (32): Xaa is C or S
SKVVMSMEGLVKPTRGVMIQITINSLDQPVXX

SEQ ID NO: 75151 - protein, 35 aa, Artificial Sequence
  GFR-binding peptide
  MOD_RES (2), (2): Xaa is C or S
  MOD_RES (14), (15), (16), (17), (18): Xaa is A or G
  MOD_RES (19), (20), (21), (22): Xaa is A or G or is absent
GXSEVVMDSMEGIXXXXXXXXXMIQITINSLRTPV

SEQ ID NO: 75152 - protein, 36 aa, Artificial Sequence
  GFR-binding peptide
  MOD_RES (1), (3), (34), (35): Xaa is C or S
XKXSKVVMSMEGLVKPTRGVMIQITINSLDQPVXXP

SEQ ID NO: 75153 - protein, 37 aa, Artificial Sequence
  GFR-binding peptide
  MOD_RES (2), (35), (36): Xaa is C or S
  MOD_RES (13), (14), (15), (16), (17): Xaa is A or G
  MOD_RES (18), (19), (20), (21): Xaa is A or G or is absent
KXSKVIMSMEGLXXXXXXXXXMIQITINSLDQSVXXP

SEQ ID NO: 75154 - protein, 43 aa, Artificial Sequence; identical to SEQ ID NO: 17775
  GFR-binding peptide
  MOD_RES (1), (3), (40): Xaa is C or S
  MOD_RES (16), (17), (18), (19), (20): Xaa is A or G
  MOD_RES (21), (22), (23), (24): Xaa is A or G or is absent

SEQ ID NO: 75155 - protein, 34 aa, Artificial Sequence; identical to SEQ ID NO: 17777
  GFR-binding peptide
  MOD_RES (13), (14), (15), (16), (17): Xaa is A or G
  MOD_RES (18), (19), (20), (21): Xaa is A or G or is absent

SEQ ID NO: 75156 - protein, 36 aa, Artificial Sequence
  GFR-binding peptide
  MOD_RES (1), (33), (34): Xaa is C or S
XSRVVMNSMEGLIVNSSDDMIQVTINSLKTPAXXPK

SEQ ID NO: 75157 - protein, 39 aa, Artificial Sequence
  GFR-binding peptide
  MOD_RES (2), (34), (35): Xaa is C or S
GXSRVVMNSMEGLIVNSSDDMIQVTINSLKTPAXXPKPV

SEQ ID NO: 75158 - protein, 32 aa, Artificial Sequence
  GFR-binding peptide
  MOD_RES (1), (32): Xaa is C or S
XEEVIMSMEGLLLVRGNDMIQMTINSTKVPAX

SEQ ID NO: 75159 - protein, 36 aa, Artificial Sequence; identical to SEQ ID NO: 49990
  GFR-binding peptide
  MOD_RES (1), (33), (34): Xaa is C or S

SEQ ID NO: 75160 - protein, 36 aa, Artificial Sequence; identical to SEQ ID NO: 17781
  GFR-binding peptide

SEQ ID NO: 75161 - protein, 40 aa, Artificial Sequence
  GFR-binding peptide
  MOD_RES (2), (4), (38), (39): Xaa is C or S
  MOD_RES (16), (17), (18), (19), (20): Xaa is A or G
  MOD_RES (21), (22), (23), (24): Xaa is A or G or is absent
RXGXSEVVMDSMEGIXXXXXXXXXMIQITINSLRTPVXXT

SEQ ID NO: 75162 - protein, 44 aa, Artificial Sequence; identical to SEQ ID NO: 17783
  GFR-binding peptide
  MOD_RES (2), (4), (41): Xaa is C or S

SEQ ID NO: 75163 - protein, 33 aa, Artificial Sequence
  GFR-binding peptide
  MOD_RES (1), (32), (33): Xaa is C or S
XSKVVMSMEGLVKPTRGVMIQITINSLDQPVXX

SEQ ID NO: 75164 - protein, 31 aa, Artificial Sequence
  GFR-binding peptide
SEVVMDSMEGIVVNNASDMIQITINSLRTPV

SEQ ID NO: 75165 - protein, 36 aa, Artificial Sequence; identical to SEQ ID NO: 17784
  GFR-binding peptide
  MOD_RES (33), (33): Xaa is C or S

SEQ ID NO: 75166 - protein, 36 aa, Artificial Sequence; identical to SEQ ID NO: 49998
  GFR-binding peptide
  MOD_RES (1), (35), (36): Xaa is C or S
  MOD_RES (13), (14), (15), (16), (17): Xaa is A or G
  MOD_RES (18), (19), (20), (21): Xaa is A or G or is absent

SEQ ID NO: 75167 - protein, 34 aa, Artificial Sequence
  GFR-binding peptide
  MOD_RES (2), (4): Xaa is C or S
LXGXEEVIMSMEGILLVRGNDMIQMTINSTKVPA

SEQ ID NO: 75168 - protein, 39 aa, Artificial Sequence
  GFR-binding peptide
  MOD_RES (1), (33), (34): Xaa is C or S
XRDVVMGSMEGIIIQQKDNMIQMTINSMKTPTXXPGASG

SEQ ID NO: 75169 - protein, 38 aa, Artificial Sequence
  GFR-binding peptide
  MOD_RES (1), (3), (34), (35): Xaa is C or S
XGXEEVIMSMEGLLLVRGNDMIQMTINSTKVPAXXTSP

SEQ ID NO: 75170 - protein, 38 aa, Artificial Sequence; identical to SEQ ID NO: 17787
  GFR-binding peptide
  MOD_RES (2), (36): Xaa is C or S

SEQ ID NO: 75171 - protein, 37 aa, Artificial Sequence; identical to SEQ ID NO: 17788
  GFR-binding peptide
  MOD_RES (36), (36): Xaa is C or S

SEQ ID NO: 75172 - protein, 38 aa, Artificial Sequence; identical to SEQ ID NO: 47489
  GFR-binding peptide
  MOD_RES (1), (3), (36), (37): Xaa is C or S
  MOD_RES (14), (15), (16), (17), (18): Xaa is A or G
  MOD_RES (19), (20), (21), (22): Xaa is A or G or is absent

SEQ ID NO: 75173 - protein, 36 aa, Artificial Sequence
  GFR-binding peptide
  MOD_RES (1), (3), (36): Xaa is C or S
  MOD_RES (14), (15), (16), (17), (18): Xaa is A or G
  MOD_RES (19), (20), (21), (22): Xaa is A or G or is absent
XKXSRVIMSMEGLXXXXXXXXXMIQITINSLAQPVX

SEQ ID NO: 75174 - protein, 35 aa, Artificial Sequence
  GFR-binding peptide
  MOD_RES (2), (34), (35): Xaa is C or S
GXRDVVMGSMEGLIIQQKDNMIQMTINSMKTPTXX

SEQ ID NO: 75175 - protein, 41 aa, Artificial Sequence
  GFR-binding peptide
  MOD_RES (2), (4), (37), (38): Xaa is C or S
  MOD_RES (15), (16), (17), (18), (19): Xaa is A or G
  MOD_RES (20), (21), (22), (23): Xaa is A or G or is absent
SXKXSKVIMSMEGLXXXXXXXXXMIQITINSLDQSVXXPSA

SEQ ID NO: 75176 - protein, 34 aa, Artificial Sequence; identical to SEQ ID NO: 17790
  GFR-binding peptide
  MOD_RES (12), (13), (14), (15), (16): Xaa is A or G
  MOD_RES (17), (18), (19), (20): Xaa is A or G or is absent

SEQ ID NO: 75177 - protein, 36 aa, Artificial Sequence; identical to SEQ ID NO: 17793
  GFR-binding peptide
  MOD_RES (36), (36): Xaa is C or S

SEQ ID NO: 75178 - protein, 38 aa, Artificial Sequence; identical to SEQ ID NO: 50015
  GFR-binding peptide
  MOD_RES (2), (4), (37), (38): Xaa is C or S
  MOD_RES (15), (16), (17), (18), (19): Xaa is A or G
  MOD_RES (20), (21), (22), (23): Xaa is A or G or is absent

SEQ ID NO: 75179 - protein, 33 aa, Artificial Sequence
  GFR-binding peptide
  MOD_RES (1), (3): Xaa is C or S
XGXEEVIMSMEGILLVRGNDMIQMTINSTKVPA

SEQ ID NO: 75180 - protein, 36 aa, Artificial Sequence
  GFR-binding peptide
  MOD_RES (1), (35), (36): Xaa is C or S
  MOD_RES (13), (14), (15), (16), (17): Xaa is A or G
  MOD_RES (18), (19), (20), (21): Xaa is A or G or is absent
XSRVVMNSMEGLXXXXXXXXXMIQVTINSLKTPAXX

SEQ ID NO: 75181 - protein, 35 aa, Artificial Sequence; identical to SEQ ID NO: 17794
  GFR-binding peptide
  MOD_RES (35), (35): Xaa is C or S

SEQ ID NO: 75182 - protein, 41 aa, Artificial Sequence
  GFR-binding peptide
  MOD_RES (2), (4), (35), (36): Xaa is C or S
SXKXSKVVMSMEGLVKPTRGVMIQITINSLDQPVXXPSASA

SEQ ID NO: 75183 - protein, 41 aa, Artificial Sequence
  GFR-binding peptide
  MOD_RES (1), (3), (37), (38): Xaa is C or S
  MOD_RES (15), (16), (17), (18), (19): Xaa is A or G
  MOD_RES (20), (21), (22), (23): Xaa is A or G or is absent
XGXRDVVMGSMEGIXXXXXXXXXMIQMTINSMKTPTXXPGA

SEQ ID NO: 75184 - protein, 35 aa, Artificial Sequence; identical to SEQ ID NO: 17795
  GFR-binding peptide
  MOD_RES (2), (2): Xaa is C or S
  MOD_RES (14), (15), (16), (17), (18): Xaa is A or G
  MOD_RES (19), (20), (21), (22): Xaa is A or G or is absent

SEQ ID NO: 75185 - protein, 36 aa, Artificial Sequence; identical to SEQ ID NO: 17796
  GFR-binding peptide
  MOD_RES (33), (33): Xaa is C or S
  MOD_RES (11), (12), (13), (14), (15): Xaa is A or G
  MOD_RES (16), (17), (18), (19): Xaa is A or G or is absent

SEQ ID NO: 75186 - protein, 42 aa, Artificial Sequence
  GFR-binding peptide
  MOD_RES (2), (4), (36), (37): Xaa is C or S
RXGXSEVVMDSMEGIVVNNASDMIQITINSLRTPVXXTPPTS

SEQ ID NO: 75187 - protein, 37 aa, Artificial Sequence
  GFR-binding peptide
  MOD_RES (34), (35): Xaa is C or S
  MOD_RES (12), (13), (14), (15), (16): Xaa is A or G
  MOD_RES (17), (18), (19), (20): Xaa is A or G or is absent
SRVVMNSMEGLXXXXXXXXXMIQVTINSLKTPAXXPK

SEQ ID NO: 75188 - protein, 34 aa, Artificial Sequence
  GFR-binding peptide
  MOD_RES (33), (34): Xaa is C or S
  MOD_RES (11), (12), (13), (14), (15): Xaa is A or G
  MOD_RES (16), (17), (18), (19): Xaa is A or G or is absent
RVVMNSMEGLXXXXXXXXXMIQVTINSLKTPAXX

SEQ ID NO: 75189 - protein, 40 aa, Artificial Sequence; identical to SEQ ID NO: 17797
  GFR-binding peptide
  MOD_RES (34), (34): Xaa is C or S
  MOD_RES (12), (13), (14), (15), (16): Xaa is A or G
  MOD_RES (17), (18), (19), (20): Xaa is A or G or is absent

SEQ ID NO: 75190 - protein, 35 aa, Artificial Sequence
  GFR-binding peptide
  MOD_RES (1), (34), (35): Xaa is C or S
  MOD_RES (12), (13), (14), (15), (16): Xaa is A or G
  MOD_RES (17), (18), (19), (20): Xaa is A or G or is absent
XEEVIMSMEGIXXXXXXXXXMIQMTINSTKVPAXX

SEQ ID NO: 75191 - protein, 37 aa, Artificial Sequence; identical to SEQ ID NO: 47496
  GFR-binding peptide
  MOD_RES (2), (35), (36): Xaa is C or S
  MOD_RES (13), (14), (15), (16), (17): Xaa is A or G
  MOD_RES (18), (19), (20), (21): Xaa is A or G or is absent

SEQ ID NO: 75192 - protein, 37 aa, Artificial Sequence
  GFR-binding peptide
  MOD_RES (31), (32): Xaa is C or S
SKVIMSMEGLIKPTKGIMIQITINSLDQSVXXPSASA

SEQ ID NO: 75193 - protein, 37 aa, Artificial Sequence
  GFR-binding peptide
  MOD_RES (32), (33): Xaa is C or S
SRVVMNSMEGLIVNSSDDMIQVTINSLKTPAXXPKPV

SEQ ID NO: 75194 - protein, 37 aa, Artificial Sequence
  GFR-binding peptide
  MOD_RES (2), (4): Xaa is C or S
  MOD_RES (16), (17), (18), (19), (20): Xaa is A or G
  MOD_RES (21), (22), (23), (24): Xaa is A or G or is absent
RXGXAEVVMDSMEGIXXXXXXXXXMIQITINSLRAPV

SEQ ID NO: 75195 - protein, 37 aa, Artificial Sequence
  GFR-binding peptide
  MOD_RES (2), (4), (36), (37): Xaa is C or S
RXGXSEVVMDSMEGIVVNNASDMIQITINSLRTPVXX

SEQ ID NO: 75196 - protein, 38 aa, Artificial Sequence
  GFR-binding peptide
  MOD_RES (1), (3), (36), (37): Xaa is C or S
  MOD_RES (14), (15), (16), (17), (18): Xaa is A or G
  MOD_RES (19), (20), (21), (22): Xaa is A or G or is absent
XKXSRVIMSMEGLXXXXXXXXXMIQITINSLAQPVXXP

SEQ ID NO: 75197 - protein, 37 aa, Artificial Sequence
  GFR-binding peptide
  MOD_RES (1), (3), (37): Xaa is C or S
  MOD_RES (15), (16), (17), (18), (19): Xaa is A or G
  MOD_RES (20), (21), (22), (23): Xaa is A or G or is absent
XGXSEVVMDSMEGLXXXXXXXXXMIQITINSLRTPVX

SEQ ID NO: 75198 - protein, 34 aa, Artificial Sequence; identical to SEQ ID NO: 47505
  GFR-binding peptide
  MOD_RES (2), (34): Xaa is C or S

SEQ ID NO: 75199 - protein, 42 aa, Artificial Sequence; identical to SEQ ID NO: 17798
  GFR-binding peptide
  MOD_RES (2), (36): Xaa is C or S
  MOD_RES (14), (15), (16), (17), (18): Xaa is A or G
  MOD_RES (19), (20), (21), (22): Xaa is A or G or is absent

SEQ ID NO: 75200 - protein, 37 aa, Artificial Sequence; identical to SEQ ID NO: 17799
  GFR-binding peptide
  MOD_RES (1), (1): Xaa is C or S

SEQ ID NO: 75201 - protein, 43 aa, Artificial Sequence; identical to SEQ ID NO: 17800
  GFR-binding peptide
  MOD_RES (2), (4), (41): Xaa is C or S

SEQ ID NO: 75202 - protein, 36 aa, Artificial Sequence
  GFR-binding peptide
  MOD_RES (2), (34), (35): Xaa is C or S
GXAEVVMDSMEGIVVNNAADMIQITINSLRAPVXXS

SEQ ID NO: 75203 - protein, 34 aa, Artificial Sequence; identical to SEQ ID NO: 17802
  GFR-binding peptide

SEQ ID NO: 75204 - protein, 38 aa, Artificial Sequence
  GFR-binding peptide
  MOD_RES (33), (34): Xaa is C or S
  MOD_RES (11), (12), (13), (14), (15): Xaa is A or G
  MOD_RES (16), (17), (18), (19): Xaa is A or G or is absent
EVVMDSMEGIXXXXXXXXXMIQITINSLRAPVXXSAPA

SEQ ID NO: 75205 - protein, 35 aa, Artificial Sequence; identical to SEQ ID NO: 50039
  GFR-binding peptide
  MOD_RES (33), (34): Xaa is C or S
  MOD_RES (11), (12), (13), (14), (15): Xaa is A or G
  MOD_RES (16), (17), (18), (19): Xaa is A or G or is absent

SEQ ID NO: 75206 - protein, 41 aa, Artificial Sequence
  GFR-binding peptide
  MOD_RES (1), (3), (35), (36): Xaa is C or S
XGXSEVVMDSMEGLVVNNASDMIQITINSLRTPVXXTPPTS

SEQ ID NO: 75207 - protein, 31 aa, Artificial Sequence; identical to SEQ ID NO: 47513
  GFR-binding peptide
  MOD_RES (1), (1): Xaa is C or S

SEQ ID NO: 75208 - protein, 40 aa, Artificial Sequence
  GFR-binding peptide
  MOD_RES (2), (4), (38), (39): Xaa is C or S
  MOD_RES (16), (17), (18), (19), (20): Xaa is A or G
  MOD_RES (21), (22), (23), (24): Xaa is A or G or is absent
SXGXRDVVMGSMEGIXXXXXXXXXMIQMTINSMKTPTXXP

SEQ ID NO: 75209 - protein, 40 aa, Artificial Sequence; identical to SEQ ID NO: 17806
  GFR-binding peptide
  MOD_RES (1), (38): Xaa is C or S
  MOD_RES (14), (15), (16), (17), (18): Xaa is A or G
  MOD_RES (19), (20), (21), (22): Xaa is A or G or is absent

SEQ ID NO: 75210 - protein, 39 aa, Artificial Sequence
  GFR-binding peptide
  MOD_RES (33), (34): Xaa is C or S
  MOD_RES (11), (12), (13), (14), (15): Xaa is A or G
  MOD_RES (16), (17), (18), (19): Xaa is A or G or is absent
EVVMDSMEGLXXXXXXXXXMIQITINSLRAPVXXSAPAA

SEQ ID NO: 75211 - protein, 42 aa, Artificial Sequence; identical to SEQ ID NO: 17807
  GFR-binding peptide
  MOD_RES (1), (3), (37): Xaa is C or S

SEQ ID NO: 75212 - protein, 39 aa, Artificial Sequence; identical to SEQ ID NO: 17809
  GFR-binding peptide
  MOD_RES (1), (3): Xaa is C or S

SEQ ID NO: 75213 - protein, 38 aa, Artificial Sequence; identical to SEQ ID NO: 47525
  GFR-binding peptide
  MOD_RES (1), (34), (35): Xaa is C or S
  MOD_RES (12), (13), (14), (15), (16): Xaa is A or G
  MOD_RES (17), (18), (19), (20): Xaa is A or G or is absent

SEQ ID NO: 75214 - protein, 35 aa, Artificial Sequence; identical to SEQ ID NO: 17810
  GFR-binding peptide
  MOD_RES (35), (35): Xaa is C or S

SEQ ID NO: 75215 - protein, 36 aa, Artificial Sequence; identical to SEQ ID NO: 17811
  GFR-binding peptide
  MOD_RES (33), (33): Xaa is C or S

SEQ ID NO: 75216 - protein, 39 aa, Artificial Sequence; identical to SEQ ID NO: 50052
  GFR-binding peptide
  MOD_RES (2), (4), (37), (38): Xaa is C or S
  MOD_RES (15), (16), (17), (18), (19): Xaa is A or G
  MOD_RES (20), (21), (22), (23): Xaa is A or G or is absent

SEQ ID NO: 75217 - protein, 38 aa, Artificial Sequence
  GFR-binding peptide
  MOD_RES (2), (33), (34): Xaa is C or S
GXEEVIMSMEGILLVRGNDMIQMTINSTKVPAXXTSPV

SEQ ID NO: 75218 - protein, 34 aa, Artificial Sequence; identical to SEQ ID NO: 50053
  GFR-binding peptide
  MOD_RES (31), (32): Xaa is C or S

SEQ ID NO: 75219 - protein, 34 aa, Artificial Sequence; identical to SEQ ID NO: 17812
  GFR-binding peptide
  MOD_RES (11), (12), (13), (14), (15): Xaa is A or G
  MOD_RES (16), (17), (18), (19): Xaa is A or G or is absent

SEQ ID NO: 75220 - protein, 38 aa, Artificial Sequence; identical to SEQ ID NO: 17814
  GFR-binding peptide
  MOD_RES (2), (36): Xaa is C or S
  MOD_RES (14), (15), (16), (17), (18): Xaa is A or G
  MOD_RES (19), (20), (21), (22): Xaa is A or G or is absent

SEQ ID NO: 75221 - protein, 37 aa, Artificial Sequence; identical to SEQ ID NO: 47538
  GFR-binding peptide
  MOD_RES (1), (33), (34): Xaa is C or S

SEQ ID NO: 75222 - protein, 38 aa, Artificial Sequence; identical to SEQ ID NO: 17817
  GFR-binding peptide
  MOD_RES (36), (36): Xaa is C or S

SEQ ID NO: 75223 - protein, 40 aa, Artificial Sequence; identical to SEQ ID NO: 17818
  GFR-binding peptide
  MOD_RES (2), (4), (38): Xaa is C or S
  MOD_RES (16), (17), (18), (19), (20): Xaa is A or G
  MOD_RES (21), (22), (23), (24): Xaa is A or G or is absent

SEQ ID NO: 75224 - protein, 35 aa, Artificial Sequence; identical to SEQ ID NO: 17819
  GFR-binding peptide

SEQ ID NO: 75225 - protein, 42 aa, Artificial Sequence; identical to SEQ ID NO: 17820
  GFR-binding peptide
  MOD_RES (2), (39): Xaa is C or S

SEQ ID NO: 75226 - protein, 35 aa, Artificial Sequence
  GFR-binding peptide
  MOD_RES (31), (32): Xaa is C or S
EEVIMSMEGILLVRGNDMIQMTINSTKVPAXXTSP

SEQ ID NO: 75227 - protein, 35 aa, Artificial Sequence
  GFR-binding peptide
  MOD_RES (1), (3), (34), (35): Xaa is C or S
XKXSKVVMSMEGLVKPTRGVMIQITINSLDQPVXX

SEQ ID NO: 75228 - protein, 43 aa, Artificial Sequence; identical to SEQ ID NO: 17824
  GFR-binding peptide
  MOD_RES (1), (3), (37): Xaa is C or S
  MOD_RES (15), (16), (17), (18), (19): Xaa is A or G
  MOD_RES (20), (21), (22), (23): Xaa is A or G or is absent

SEQ ID NO: 75229 - protein, 36 aa, Artificial Sequence
  GFR-binding peptide
  MOD_RES (2), (35), (36): Xaa is C or S
  MOD_RES (13), (14), (15), (16), (17): Xaa is A or G
  MOD_RES (18), (19), (20), (21): Xaa is A or G or is absent
GXEEVIMSMEGIXXXXXXXXXMIQMTINSTKVPAXX

SEQ ID NO: 75230 - protein, 41 aa, Artificial Sequence; identical to SEQ ID NO: 17825
  GFR-binding peptide
  MOD_RES (2), (4), (41): Xaa is C or S

SEQ ID NO: 75231 - protein, 44 aa, Artificial Sequence; identical to SEQ ID NO: 17826
  GFR-binding peptide
  MOD_RES (2), (4), (41): Xaa is C or S
  MOD_RES (17), (18), (19), (20), (21): Xaa is A or G
  MOD_RES (22), (23), (24), (25): Xaa is A or G or is absent

SEQ ID NO: 75232 - protein, 36 aa, Artificial Sequence
  GFR-binding peptide
  MOD_RES (2), (33), (34): Xaa is C or S
GXEEVIMSMEGLLLVRGNDMIQMTINSTKVPAXXTS

SEQ ID NO: 75233 - protein, 33 aa, Artificial Sequence
  GFR-binding peptide
  MOD_RES (32), (33): Xaa is C or S
AEVVMDSMEGIVVNNAADMIQITINSLRAPVXX

SEQ ID NO: 75234 - protein, 35 aa, Artificial Sequence
  GFR-binding peptide
  MOD_RES (1), (3), (34), (35): Xaa is C or S
XKXSKVIMSMEGLIKPTKGIMIQITINSLDQSVXX

SEQ ID NO: 75235 - protein, 40 aa, Artificial Sequence; identical to SEQ ID NO: 17827
  GFR-binding peptide
  MOD_RES (2), (36): Xaa is C or S
  MOD_RES (14), (15), (16), (17), (18): Xaa is A or G
  MOD_RES (19), (20), (21), (22): Xaa is A or G or is absent

SEQ ID NO: 75236 - protein, 39 aa, Artificial Sequence; identical to SEQ ID NO: 17828
  GFR-binding peptide
  MOD_RES (2), (39): Xaa is C or S

SEQ ID NO: 75237 - protein, 41 aa, Artificial Sequence; identical to SEQ ID NO: 17831
  GFR-binding peptide
  MOD_RES (2), (4), (38): Xaa is C or S
  MOD_RES (16), (17), (18), (19), (20): Xaa is A or G
  MOD_RES (21), (22), (23), (24): Xaa is A or G or is absent

SEQ ID NO: 75238 - protein, 42 aa, Artificial Sequence; identical to SEQ ID NO: 17832
  GFR-binding peptide
  MOD_RES (2), (4), (38): Xaa is C or S

SEQ ID NO: 75239 - protein, 38 aa, Artificial Sequence; identical to SEQ ID NO: 17833
  GFR-binding peptide
  MOD_RES (2), (4), (38): Xaa is C or S
  MOD_RES (16), (17), (18), (19), (20): Xaa is A or G
  MOD_RES (21), (22), (23), (24): Xaa is A or G or is absent

SEQ ID NO: 75240 - protein, 37 aa, Artificial Sequence; identical to SEQ ID NO: 17834
  GFR-binding peptide
  MOD_RES (1), (1): Xaa is C or S

SEQ ID NO: 75241 - protein, 36 aa, Artificial Sequence; identical to SEQ ID NO: 17835
  GFR-binding peptide
  MOD_RES (33), (33): Xaa is C or S

SEQ ID NO: 75242 - protein, 35 aa, Artificial Sequence
  GFR-binding peptide
  MOD_RES (31), (32): Xaa is C or S
EEVIMSMEGLLLVRGNDMIQMTINSTKVPAXXTSP

SEQ ID NO: 75243 - protein, 34 aa, Artificial Sequence; identical to SEQ ID NO: 47567
  GFR-binding peptide
  MOD_RES (2), (2): Xaa is C or S
  MOD_RES (13), (14), (15), (16), (17): Xaa is A or G
  MOD_RES (18), (19), (20), (21): Xaa is A or G or is absent

SEQ ID NO: 75244 - protein, 37 aa, Artificial Sequence
  GFR-binding peptide
  MOD_RES (2), (33), (34): Xaa is C or S
GXEEVIMSMEGILLVRGNDMIQMTINSTKVPAXXTSP

SEQ ID NO: 75245 - protein, 35 aa, Artificial Sequence; identical to SEQ ID NO: 47569
  GFR-binding peptide
  MOD_RES (33), (34): Xaa is C or S
  MOD_RES (11), (12), (13), (14), (15): Xaa is A or G
  MOD_RES (16), (17), (18), (19): Xaa is A or G or is absent

SEQ ID NO: 75246 - protein, 38 aa, Artificial Sequence
  GFR-binding peptide
  MOD_RES (2), (4), (38): Xaa is C or S
  MOD_RES (16), (17), (18), (19), (20): Xaa is A or G
  MOD_RES (21), (22), (23), (24): Xaa is A or G or is absent
HXGXSRVVMNSMEGLXXXXXXXXXMIQVTINSLKTPAX

SEQ ID NO: 75247 - protein, 40 aa, Artificial Sequence
  GFR-binding peptide
  MOD_RES (1), (3), (35), (36): Xaa is C or S
XGXRDVVMGSMEGIIIQQKDNMIQMTINSMKTPTXXPGAS

SEQ ID NO: 75248 - protein, 40 aa, Artificial Sequence
  GFR-binding peptide
  MOD_RES (2), (34), (35): Xaa is C or S
GXSRVVMNSMEGLIVNSSDDMIQVTINSLKTPAXXPKPVH

SEQ ID NO: 75249 - protein, 41 aa, Artificial Sequence; identical to SEQ ID NO: 17838
  GFR-binding peptide
  MOD_RES (1), (3), (40): Xaa is C or S

SEQ ID NO: 75250 - protein, 36 aa, Artificial Sequence
  GFR-binding peptide
  MOD_RES (1), (34), (35): Xaa is C or S
  MOD_RES (12), (13), (14), (15), (16): Xaa is A or G
  MOD_RES (17), (18), (19), (20): Xaa is A or G or is absent
XSKVVMSMEGLXXXXXXXXXMIQITINSLDQPVXXP

SEQ ID NO: 75251 - protein, 34 aa, Artificial Sequence
  GFR-binding peptide
  MOD_RES (31), (32): Xaa is C or S
RVVMNSMEGLIVNSSDDMIQVTINSLKTPAXXPK

SEQ ID NO: 75252 - protein, 34 aa, Artificial Sequence; identical to SEQ ID NO: 17839
  GFR-binding peptide
  MOD_RES (11), (12), (13), (14), (15): Xaa is A or G
  MOD_RES (16), (17), (18), (19): Xaa is A or G or is absent

SEQ ID NO: 75253 - protein, 40 aa, Artificial Sequence; identical to SEQ ID NO: 50095
  GFR-binding peptide
  MOD_RES (1), (3), (34), (35): Xaa is C or S

SEQ ID NO: 75254 - protein, 40 aa, Artificial Sequence; identical to SEQ ID NO: 17842
  GFR-binding peptide
  MOD_RES (1), (3), (40): Xaa is C or S
  MOD_RES (16), (17), (18), (19), (20): Xaa is A or G
  MOD_RES (21), (22), (23), (24): Xaa is A or G or is absent

SEQ ID NO: 75255 - protein, 39 aa, Artificial Sequence; identical to SEQ ID NO: 17844
  GFR-binding peptide
  MOD_RES (34), (34): Xaa is C or S
  MOD_RES (12), (13), (14), (15), (16): Xaa is A or G
  MOD_RES (17), (18), (19), (20): Xaa is A or G or is absent

SEQ ID NO: 75256 - protein, 37 aa, Artificial Sequence; identical to SEQ ID NO: 17845
  GFR-binding peptide
  MOD_RES (2), (4): Xaa is C or S
  MOD_RES (16), (17), (18), (19), (20): Xaa is A or G
  MOD_RES (21), (22), (23), (24): Xaa is A or G or is absent

SEQ ID NO: 75257 - protein, 37 aa, Artificial Sequence; identical to SEQ ID NO: 50104
  GFR-binding peptide
  MOD_RES (1), (34), (35): Xaa is C or S
  MOD_RES (12), (13), (14), (15), (16): Xaa is A or G
  MOD_RES (17), (18), (19), (20): Xaa is A or G or is absent

SEQ ID NO: 75258 - protein, 34 aa, Artificial Sequence; identical to SEQ ID NO: 17848
  GFR-binding peptide
  MOD_RES (34), (34): Xaa is C or S
  MOD_RES (12), (13), (14), (15), (16): Xaa is A or G
  MOD_RES (17), (18), (19), (20): Xaa is A or G or is absent

SEQ ID NO: 75259 - protein, 37 aa, Artificial Sequence
  GFR-binding peptide
  MOD_RES (1), (3), (36), (37): Xaa is C or S
  MOD_RES (14), (15), (16), (17), (18): Xaa is A or G
  MOD_RES (19), (20), (21), (22): Xaa is A or G or is absent
XGXEEVIMSMEGIXXXXXXXXXMIQMTINSTKVPAXX

SEQ ID NO: 75260 - protein, 38 aa, Artificial Sequence; identical to SEQ ID NO: 17850
  GFR-binding peptide
  MOD_RES (34), (34): Xaa is C or S

SEQ ID NO: 75261 - protein, 37 aa, Artificial Sequence; identical to SEQ ID NO: 17851
  GFR-binding peptide
  MOD_RES (34), (34): Xaa is C or S

SEQ ID NO: 75262 - protein, 35 aa, Artificial Sequence; identical to SEQ ID NO: 17852
  GFR-binding peptide

SEQ ID NO: 75263 - protein, 34 aa, Artificial Sequence
  GFR-binding peptide
  MOD_RES (34), (34): Xaa is C or S
  MOD_RES (12), (13), (14), (15), (16): Xaa is A or G
  MOD_RES (17), (18), (19), (20): Xaa is A or G or is absent
RDVVMGSMEGLXXXXXXXXXMIQMTINSMKTPTX

SEQ ID NO: 75264 - protein, 36 aa, Artificial Sequence; identical to SEQ ID NO: 17853
  GFR-binding peptide
  MOD_RES (13), (14), (15), (16), (17): Xaa is A or G
  MOD_RES (18), (19), (20), (21): Xaa is A or G or is absent

SEQ ID NO: 75265 - protein, 38 aa, Artificial Sequence; identical to SEQ ID NO: 17855
  GFR-binding peptide
  MOD_RES (1), (3): Xaa is C or S
  MOD_RES (16), (17), (18), (19), (20): Xaa is A or G
  MOD_RES (21), (22), (23), (24): Xaa is A or G or is absent

SEQ ID NO: 75266 - protein, 40 aa, Artificial Sequence; identical to SEQ ID NO: 17856
  GFR-binding peptide
  MOD_RES (34), (34): Xaa is C or S

SEQ ID NO: 75267 - protein, 43 aa, Artificial Sequence
  GFR-binding peptide
  MOD_RES (2), (4), (38), (39): Xaa is C or S
  MOD_RES (16), (17), (18), (19), (20): Xaa is A or G
  MOD_RES (21), (22), (23), (24): Xaa is A or G or is absent
RXGXAEVVMDSMEGLXXXXXXXXXMIQITINSLRAPVXXSAPA

SEQ ID NO: 75268 - protein, 41 aa, Artificial Sequence; identical to SEQ ID NO: 17857
  GFR-binding peptide
  MOD_RES (1), (3), (40): Xaa is C or S
  MOD_RES (16), (17), (18), (19), (20): Xaa is A or G
  MOD_RES (21), (22), (23), (24): Xaa is A or G or is absent

SEQ ID NO: 75269 - protein, 39 aa, Artificial Sequence; identical to SEQ ID NO: 17858
  GFR-binding peptide
  MOD_RES (36), (36): Xaa is C or S
  MOD_RES (12), (13), (14), (15), (16): Xaa is A or G
  MOD_RES (17), (18), (19), (20): Xaa is A or G or is absent

SEQ ID NO: 75270 - protein, 36 aa, Artificial Sequence; identical to SEQ ID NO: 47603
  GFR-binding peptide
  MOD_RES (33), (34): Xaa is C or S
  MOD_RES (11), (12), (13), (14), (15): Xaa is A or G
  MOD_RES (16), (17), (18), (19): Xaa is A or G or is absent

SEQ ID NO: 75271 - protein, 38 aa, Artificial Sequence
  GFR-binding peptide
  MOD_RES (34), (35): Xaa is C or S
  MOD_RES (12), (13), (14), (15), (16): Xaa is A or G
  MOD_RES (17), (18), (19), (20): Xaa is A or G or is absent
SEVVMDSMEGLXXXXXXXXXMIQITINSLRTPVXXTPP

SEQ ID NO: 75272 - protein, 35 aa, Artificial Sequence; identical to SEQ ID NO: 17861
  GFR-binding peptide
  MOD_RES (1), (35): Xaa is C or S

SEQ ID NO: 75273 - protein, 36 aa, Artificial Sequence; identical to SEQ ID NO: 17864
  GFR-binding peptide
  MOD_RES (34), (34): Xaa is C or S

SEQ ID NO: 75274 - protein, 40 aa, Artificial Sequence; identical to SEQ ID NO: 50137
  GFR-binding peptide
  MOD_RES (1), (3), (34), (35): Xaa is C or S

SEQ ID NO: 75275 - protein, 35 aa, Artificial Sequence; identical to SEQ ID NO: 17865
  GFR-binding peptide
  MOD_RES (34), (34): Xaa is C or S

SEQ ID NO: 75276 - protein, 35 aa, Artificial Sequence; identical to SEQ ID NO: 17867
  GFR-binding peptide
  MOD_RES (33), (33): Xaa is C or S
  MOD_RES (11), (12), (13), (14), (15): Xaa is A or G
  MOD_RES (16), (17), (18), (19): Xaa is A or G or is absent

SEQ ID NO: 75277 - protein, 38 aa, Artificial Sequence; identical to SEQ ID NO: 47618
  GFR-binding peptide
  MOD_RES (2), (35), (36): Xaa is C or S
  MOD_RES (13), (14), (15), (16), (17): Xaa is A or G
  MOD_RES (18), (19), (20), (21): Xaa is A or G or is absent

SEQ ID NO: 75278 - protein, 36 aa, Artificial Sequence
  GFR-binding peptide
  MOD_RES (1), (34), (35): Xaa is C or S
  MOD_RES (12), (13), (14), (15), (16): Xaa is A or G
  MOD_RES (17), (18), (19), (20): Xaa is A or G or is absent
XSKVIMSMEGLXXXXXXXXXMIQITINSLDQSVXXP

SEQ ID NO: 75279 - protein, 32 aa, Artificial Sequence
  GFR-binding peptide
  MOD_RES (31), (32): Xaa is C or S
DVVMGSMEGLIIQQKDNMIQMTINSMKTPTXX

SEQ ID NO: 75280 - protein, 37 aa, Artificial Sequence
  GFR-binding peptide
  MOD_RES (2), (4), (35), (36): Xaa is C or S
SXKXSKVIMSMEGLIKPTKGIMIQITINSLDQSVXXP

SEQ ID NO: 75281 - protein, 37 aa, Artificial Sequence
  GFR-binding peptide
  MOD_RES (2), (36), (37): Xaa is C or S
  MOD_RES (14), (15), (16), (17), (18): Xaa is A or G
  MOD_RES (19), (20), (21), (22): Xaa is A or G or is absent
GXAEVVMDSMEGLXXXXXXXXXMIQITINSLRAPVXX

SEQ ID NO: 75282 - protein, 36 aa, Artificial Sequence
  GFR-binding peptide
  MOD_RES (32), (33): Xaa is C or S
AEVVMDSMEGIVVNNAADMIQITINSLRAPVXXSAP

SEQ ID NO: 75283 - protein, 39 aa, Artificial Sequence
  GFR-binding peptide
  MOD_RES (2), (34), (35): Xaa is C or S
GXRDVVMGSMEGIIIQQKDNMIQMTINSMKTPTXXPGAS

SEQ ID NO: 75284 - protein, 35 aa, Artificial Sequence
  GFR-binding peptide
  MOD_RES (2), (34), (35): Xaa is C or S
GXSEVVMDSMEGIVVNNASDMIQITINSLRTPVXX

SEQ ID NO: 75285 - protein, 37 aa, Artificial Sequence; identical to SEQ ID NO: 17870
  GFR-binding peptide
  MOD_RES (33), (33): Xaa is C or S
  MOD_RES (11), (12), (13), (14), (15): Xaa is A or G
  MOD_RES (16), (17), (18), (19): Xaa is A or G or is absent

SEQ ID NO: 75286 - protein, 38 aa, Artificial Sequence; identical to SEQ ID NO: 17872
  GFR-binding peptide
  MOD_RES (33), (33): Xaa is C or S
  MOD_RES (11), (12), (13), (14), (15): Xaa is A or G
  MOD_RES (16), (17), (18), (19): Xaa is A or G or is absent

SEQ ID NO: 75287 - protein, 40 aa, Artificial Sequence
  GFR-binding peptide
  MOD_RES (2), (35), (36): Xaa is C or S
  MOD_RES (13), (14), (15), (16), (17): Xaa is A or G
  MOD_RES (18), (19), (20), (21): Xaa is A or G or is absent
KXSRVIMSMEGLXXXXXXXXXMIQITINSLAQPVXXPAAS

SEQ ID NO: 75288 - protein, 33 aa, Artificial Sequence; identical to SEQ ID NO: 17873
  GFR-binding peptide

SEQ ID NO: 75289 - protein, 42 aa, Artificial Sequence; identical to SEQ ID NO: 17874
  GFR-binding peptide
  MOD_RES (1), (38): Xaa is C or S

SEQ ID NO: 75290 - protein, 39 aa, Artificial Sequence
  GFR-binding peptide
  MOD_RES (2), (34), (35): Xaa is C or S
GXAEVVMDSMEGLVVNNAADMIQITINSLRAPVXXSAPA

SEQ ID NO: 75291 - protein, 32 aa, Artificial Sequence
  GFR-binding peptide
  MOD_RES (1), (32): Xaa is C or S
XSRVIMSMEGLVKPKRGVMIQITINSLAQPVX

SEQ ID NO: 75292 - protein, 39 aa, Artificial Sequence
  GFR-binding peptide
  MOD_RES (2), (4), (36), (37): Xaa is C or S
HXGXSRVVMNSMEGLIVNSSDDMIQVTINSLKTPAXXPK

SEQ ID NO: 75293 - protein, 31 aa, Artificial Sequence
  GFR-binding peptide
  MOD_RES (31), (31): Xaa is C or S
EVVMDSMEGIVVNNASDMIQITINSLRTPVX

SEQ ID NO: 75294 - protein, 32 aa, Artificial Sequence
  GFR-binding peptide
  MOD_RES (1), (1): Xaa is C or S
XRDVVMGSMEGLIIQQKDNMIQMTINSMKTPT

SEQ ID NO: 75295 - protein, 40 aa, Artificial Sequence
  GFR-binding peptide
  MOD_RES (1), (3), (35), (36): Xaa is C or S
XGXSEVVMDSMEGLVVNNASDMIQITINSLRTPVXXTPPT

SEQ ID NO: 75296 - protein, 38 aa, Artificial Sequence; identical to SEQ ID NO: 47639
  GFR-binding peptide
  MOD_RES (2), (4), (35), (36): Xaa is C or S

SEQ ID NO: 75297 - protein, 37 aa, Artificial Sequence
  GFR-binding peptide
  MOD_RES (1), (3), (35), (36): Xaa is C or S
XGXSEVVMDSMEGLVVNNASDMIQITINSLRTPVXXT

SEQ ID NO: 75298 - protein, 36 aa, Artificial Sequence; identical to SEQ ID NO: 50154
  GFR-binding peptide
  MOD_RES (2), (4): Xaa is C or S
  MOD_RES (15), (16), (17), (18), (19): Xaa is A or G
  MOD_RES (20), (21), (22), (23): Xaa is A or G or is absent

SEQ ID NO: 75299 - protein, 37 aa, Artificial Sequence; identical to SEQ ID NO: 47641
  GFR-binding peptide
  MOD_RES (2), (36), (37): Xaa is C or S
  MOD_RES (14), (15), (16), (17), (18): Xaa is A or G
  MOD_RES (19), (20), (21), (22): Xaa is A or G or is absent

SEQ ID NO: 75300 - protein, 39 aa, Artificial Sequence
  GFR-binding peptide
  MOD_RES (2), (4), (36), (37): Xaa is C or S
SXGXRDVVMGSMEGLIIQQKDNMIQMTINSMKTPTXXPG

SEQ ID NO: 75301 - protein, 41 aa, Artificial Sequence; identical to SEQ ID NO: 17880
  GFR-binding peptide
  MOD_RES (1), (38): Xaa is C or S

SEQ ID NO: 75302 - protein, 33 aa, Artificial Sequence; identical to SEQ ID NO: 17881
  GFR-binding peptide
  MOD_RES (33), (33): Xaa is C or S
  MOD_RES (11), (12), (13), (14), (15): Xaa is A or G
  MOD_RES (16), (17), (18), (19): Xaa is A or G or is absent

SEQ ID NO: 75303 - protein, 34 aa, Artificial Sequence
  GFR-binding peptide
  MOD_RES (31), (32): Xaa is C or S
SKVIMSMEGLIKPTKGIMIQITINSLDQSVXXPS

SEQ ID NO: 75304 - protein, 35 aa, Artificial Sequence; identical to SEQ ID NO: 17882
  GFR-binding peptide

SEQ ID NO: 75305 - protein, 38 aa, Artificial Sequence; identical to SEQ ID NO: 17883
  GFR-binding peptide
  MOD_RES (1), (35): Xaa is C or S
  MOD_RES (13), (14), (15), (16), (17): Xaa is A or G
  MOD_RES (18), (19), (20), (21): Xaa is A or G or is absent

SEQ ID NO: 75306 - protein, 39 aa, Artificial Sequence; identical to SEQ ID NO: 17884
  GFR-binding peptide
  MOD_RES (1), (3), (37): Xaa is C or S

SEQ ID NO: 75307 - protein, 33 aa, Artificial Sequence; identical to SEQ ID NO: 17885
  GFR-binding peptide

SEQ ID NO: 75308 - protein, 35 aa, Artificial Sequence
  GFR-binding peptide
  MOD_RES (33), (34): Xaa is C or S
  MOD_RES (11), (12), (13), (14), (15): Xaa is A or G
  MOD_RES (16), (17), (18), (19): Xaa is A or G or is absent
EVVMDSMEGLXXXXXXXXXMIQITINSLRAPVXXS

SEQ ID NO: 75309 - protein, 34 aa, Artificial Sequence; identical to SEQ ID NO: 17887
  GFR-binding peptide
  MOD_RES (33), (33): Xaa is C or S
  MOD_RES (11), (12), (13), (14), (15): Xaa is A or G
  MOD_RES (16), (17), (18), (19): Xaa is A or G or is absent

SEQ ID NO: 75310 - protein, 41 aa, Artificial Sequence
  GFR-binding peptide
  MOD_RES (1), (3), (36), (37): Xaa is C or S
  MOD_RES (14), (15), (16), (17), (18): Xaa is A or G
  MOD_RES (19), (20), (21), (22): Xaa is A or G or is absent
XGXEEVIMSMEGLXXXXXXXXXMIQMTINSTKVPAXXTSPV

SEQ ID NO: 75311 - protein, 33 aa, Artificial Sequence
  GFR-binding peptide
  MOD_RES (1), (33): Xaa is C or S
XSRVVMNSMEGLIVNSSDDMIQVTINSLKTPAX

SEQ ID NO: 75312 - protein, 38 aa, Artificial Sequence; identical to SEQ ID NO: 17891
  GFR-binding peptide
  MOD_RES (2), (36): Xaa is C or S

SEQ ID NO: 75313 - protein, 36 aa, Artificial Sequence; identical to SEQ ID NO: 17892
  GFR-binding peptide
  MOD_RES (1), (3): Xaa is C or S

SEQ ID NO: 75314 - protein, 39 aa, Artificial Sequence
  GFR-binding peptide
  MOD_RES (1), (3), (34), (35): Xaa is C or S
XGXEEVIMSMEGLLLVRGNDMIQMTINSTKVPAXXTSPV

SEQ ID NO: 75315 - protein, 42 aa, Artificial Sequence; identical to SEQ ID NO: 50172
  GFR-binding peptide
  MOD_RES (2), (4), (38), (39): Xaa is C or S
  MOD_RES (16), (17), (18), (19), (20): Xaa is A or G
  MOD_RES (21), (22), (23), (24): Xaa is A or G or is absent

SEQ ID NO: 75316 - protein, 37 aa, Artificial Sequence; identical to SEQ ID NO: 17895
  GFR-binding peptide
  MOD_RES (37), (37): Xaa is C or S

SEQ ID NO: 75317 - protein, 37 aa, Artificial Sequence; identical to SEQ ID NO: 17897
  GFR-binding peptide
  MOD_RES (1), (3), (37): Xaa is C or S
  MOD_RES (15), (16), (17), (18), (19): Xaa is A or G
  MOD_RES (20), (21), (22), (23): Xaa is A or G or is absent

SEQ ID NO: 75318 - protein, 39 aa, Artificial Sequence; identical to SEQ ID NO: 50175
  GFR-binding peptide
  MOD_RES (1), (3), (34), (35): Xaa is C or S

SEQ ID NO: 75319 - protein, 43 aa, Artificial Sequence; identical to SEQ ID NO: 17899
  GFR-binding peptide
  MOD_RES (1), (3), (37): Xaa is C or S

SEQ ID NO: 75320 - protein, 39 aa, Artificial Sequence
  GFR-binding peptide
  MOD_RES (2), (34), (35): Xaa is C or S
GXSEVVMDSMEGLVVNNASDMIQITINSLRTPVXXTPPT

SEQ ID NO: 75321 - protein, 33 aa, Artificial Sequence
  GFR-binding peptide
  MOD_RES (12), (13), (14), (15), (16): Xaa is A or G
  MOD_RES (17), (18), (19), (20): Xaa is A or G or is absent
RDVVMGSMEGIXXXXXXXXXMIQMTINSMKTPT

SEQ ID NO: 75322 - protein, 36 aa, Artificial Sequence
  GFR-binding peptide
  MOD_RES (34), (35): Xaa is C or S
  MOD_RES (12), (13), (14), (15), (16): Xaa is A or G
  MOD_RES (17), (18), (19), (20): Xaa is A or G or is absent
SEVVMDSMEGLXXXXXXXXXMIQITINSLRTPVXXT

SEQ ID NO: 75323 - protein, 35 aa, Artificial Sequence; identical to SEQ ID NO: 47657
  GFR-binding peptide
  MOD_RES (31), (32): Xaa is C or S

SEQ ID NO: 75324 - protein, 37 aa, Artificial Sequence
  GFR-binding peptide
  MOD_RES (1), (35), (36): Xaa is C or S
  MOD_RES (13), (14), (15), (16), (17): Xaa is A or G
  MOD_RES (18), (19), (20), (21): Xaa is A or G or is absent
XSRVVMNSMEGLXXXXXXXXXMIQVTINSLKTPAXXP

SEQ ID NO: 75325 - protein, 37 aa, Artificial Sequence; identical to SEQ ID NO: 17903
  GFR-binding peptide
  MOD_RES (2), (4): Xaa is C or S
  MOD_RES (16), (17), (18), (19), (20): Xaa is A or G
  MOD_RES (21), (22), (23), (24): Xaa is A or G or is absent

SEQ ID NO: 75326 - protein, 43 aa, Artificial Sequence; identical to SEQ ID NO: 17905
  GFR-binding peptide
  MOD_RES (2), (39): Xaa is C or S

SEQ ID NO: 75327 - protein, 37 aa, Artificial Sequence
  GFR-binding peptide
  MOD_RES (1), (3), (34), (35): Xaa is C or S
XKXSKVVMSMEGLVKPTRGVMIQITINSLDQPVXXPS

SEQ ID NO: 75328 - protein, 42 aa, Artificial Sequence; identical to SEQ ID NO: 17907
  GFR-binding peptide
  MOD_RES (1), (38): Xaa is C or S
  MOD_RES (14), (15), (16), (17), (18): Xaa is A or G
  MOD_RES (19), (20), (21), (22): Xaa is A or G or is absent

SEQ ID NO: 75329 - protein, 34 aa, Artificial Sequence; identical to SEQ ID NO: 17908
  GFR-binding peptide

SEQ ID NO: 75330 - protein, 38 aa, Artificial Sequence
  GFR-binding peptide
  MOD_RES (1), (3), (35), (36): Xaa is C or S
XGXSRVVMNSMEGLIVNSSDDMIQVTINSLKTPAXXPK

SEQ ID NO: 75331 - protein, 38 aa, Artificial Sequence; identical to SEQ ID NO: 17909
  GFR-binding peptide
  MOD_RES (37), (37): Xaa is C or S
  MOD_RES (13), (14), (15), (16), (17): Xaa is A or G
  MOD_RES (18), (19), (20), (21): Xaa is A or G or is absent

SEQ ID NO: 75332 - protein, 35 aa, Artificial Sequence; identical to SEQ ID NO: 17910
  GFR-binding peptide
  MOD_RES (1), (35): Xaa is C or S
  MOD_RES (13), (14), (15), (16), (17): Xaa is A or G
  MOD_RES (18), (19), (20), (21): Xaa is A or G or is absent

SEQ ID NO: 75333 - protein, 43 aa, Artificial Sequence
  GFR-binding peptide
  MOD_RES (1), (3), (37), (38): Xaa is C or S
  MOD_RES (15), (16), (17), (18), (19): Xaa is A or G
  MOD_RES (20), (21), (22), (23): Xaa is A or G or is absent
XGXRDVVMGSMEGLXXXXXXXXXMIQMTINSMKTPTXXPGASG

SEQ ID NO: 75334 - protein, 35 aa, Artificial Sequence
  GFR-binding peptide
  MOD_RES (34), (35): Xaa is C or S
  MOD_RES (12), (13), (14), (15), (16): Xaa is A or G
  MOD_RES (17), (18), (19), (20): Xaa is A or G or is absent
SRVVMNSMEGLXXXXXXXXXMIQVTINSLKTPAXX

SEQ ID NO: 75335 - protein, 40 aa, Artificial Sequence; identical to SEQ ID NO: 50201
  GFR-binding peptide
  MOD_RES (2), (4), (37), (38): Xaa is C or S
  MOD_RES (15), (16), (17), (18), (19): Xaa is A or G
  MOD_RES (20), (21), (22), (23): Xaa is A or G or is absent

SEQ ID NO: 75336 - protein, 33 aa, Artificial Sequence; identical to SEQ ID NO: 17917
  GFR-binding peptide
  MOD_RES (33), (33): Xaa is C or S

SEQ ID NO: 75337 - protein, 32 aa, Artificial Sequence; identical to SEQ ID NO: 17919
  GFR-binding peptide
  MOD_RES (11), (12), (13), (14), (15): Xaa is A or G
  MOD_RES (16), (17), (18), (19): Xaa is A or G or is absent

SEQ ID NO: 75338 - protein, 38 aa, Artificial Sequence
  GFR-binding peptide
  MOD_RES (1), (3), (36), (37): Xaa is C or S
  MOD_RES (14), (15), (16), (17), (18): Xaa is A or G
  MOD_RES (19), (20), (21), (22): Xaa is A or G or is absent
XKXSKVVMSMEGLXXXXXXXXXMIQITINSLDQPVXXP

SEQ ID NO: 75339 - protein, 38 aa, Artificial Sequence
  GFR-binding peptide
  MOD_RES (1), (34), (35): Xaa is C or S
  MOD_RES (12), (13), (14), (15), (16): Xaa is A or G
  MOD_RES (17), (18), (19), (20): Xaa is A or G or is absent
XSKVVMSMEGLXXXXXXXXXMIQITINSLDQPVXXPSA

SEQ ID NO: 75340 - protein, 33 aa, Artificial Sequence; identical to SEQ ID NO: 17923
  GFR-binding peptide
  MOD_RES (12), (13), (14), (15), (16): Xaa is A or G
  MOD_RES (17), (18), (19), (20): Xaa is A or G or is absent

SEQ ID NO: 75341 - protein, 33 aa, Artificial Sequence
  GFR-binding peptide
  MOD_RES (32), (33): Xaa is C or S
SEVVMDSMEGIVVNNASDMIQITINSLRTPVXX

SEQ ID NO: 75342 - protein, 37 aa, Artificial Sequence; identical to SEQ ID NO: 17924
  GFR-binding peptide
  MOD_RES (33), (33): Xaa is C or S
  MOD_RES (11), (12), (13), (14), (15): Xaa is A or G
  MOD_RES (16), (17), (18), (19): Xaa is A or G or is absent

SEQ ID NO: 75343 - protein, 35 aa, Artificial Sequence; identical to SEQ ID NO: 47692
  GFR-binding peptide
  MOD_RES (1), (32), (33): Xaa is C or S

SEQ ID NO: 75344 - protein, 33 aa, Artificial Sequence
  GFR-binding peptide
  MOD_RES (31), (32): Xaa is C or S
EVVMDSMEGLVVNNASDMIQITINSLRTPVXXT

SEQ ID NO: 75345 - protein, 43 aa, Artificial Sequence
  GFR-binding peptide
  MOD_RES (2), (4), (37), (38): Xaa is C or S
  MOD_RES (15), (16), (17), (18), (19): Xaa is A or G
  MOD_RES (20), (21), (22), (23): Xaa is A or G or is absent
LXGXEEVIMSMEGIXXXXXXXXXMIQMTINSTKVPAXXTSPVR

SEQ ID NO: 75346 - protein, 37 aa, Artificial Sequence
  GFR-binding peptide
  MOD_RES (2), (4), (37): Xaa is C or S
  MOD_RES (15), (16), (17), (18), (19): Xaa is A or G
  MOD_RES (20), (21), (22), (23): Xaa is A or G or is absent
SXKXSKVVMSMEGLXXXXXXXXXMIQITINSLDQPVX

SEQ ID NO: 75347 - protein, 31 aa, Artificial Sequence
  GFR-binding peptide
  MOD_RES (31), (31): Xaa is C or S
SKVVMSMEGLVKPTRGVMIQITINSLDQPVX

SEQ ID NO: 75348 - protein, 40 aa, Artificial Sequence; identical to SEQ ID NO: 17931
  GFR-binding peptide
  MOD_RES (2), (36): Xaa is C or S

SEQ ID NO: 75349 - protein, 40 aa, Artificial Sequence; identical to SEQ ID NO: 17933
  GFR-binding peptide
  MOD_RES (37), (37): Xaa is C or S
  MOD_RES (13), (14), (15), (16), (17): Xaa is A or G
  MOD_RES (18), (19), (20), (21): Xaa is A or G or is absent

SEQ ID NO: 75350 - protein, 40 aa, Artificial Sequence
  GFR-binding peptide
  MOD_RES (1), (3), (34), (35): Xaa is C or S
XGXEEVIMSMEGILLVRGNDMIQMTINSTKVPAXXTSPVR

SEQ ID NO: 75351 - protein, 41 aa, Artificial Sequence; identical to SEQ ID NO: 50216
  GFR-binding peptide
  MOD_RES (2), (4), (35), (36): Xaa is C or S

SEQ ID NO: 75352 - protein, 39 aa, Artificial Sequence
  GFR-binding peptide
  MOD_RES (1), (33), (34): Xaa is C or S
XAEVVMDSMEGIVVNNAADMIQITINSLRAPVXXSAPAA

SEQ ID NO: 75353 - protein, 37 aa, Artificial Sequence
  GFR-binding peptide
  MOD_RES (1), (3), (37): Xaa is C or S
  MOD_RES (15), (16), (17), (18), (19): Xaa is A or G
  MOD_RES (20), (21), (22), (23): Xaa is A or G or is absent
XGXAEVVMDSMEGLXXXXXXXXXMIQITINSLRAPVX

SEQ ID NO: 75354 - protein, 38 aa, Artificial Sequence
  GFR-binding peptide
  MOD_RES (2), (33), (34): Xaa is C or S
KXSRVIMSMEGLVKPKRGVMIQITINSLAQPVXXPAAS

SEQ ID NO: 75355 - protein, 41 aa, Artificial Sequence
  GFR-binding peptide
  MOD_RES (2), (36), (37): Xaa is C or S
  MOD_RES (14), (15), (16), (17), (18): Xaa is A or G
  MOD_RES (19), (20), (21), (22): Xaa is A or G or is absent
GXRDVVMGSMEGLXXXXXXXXXMIQMTINSMKTPTXXPGAS

SEQ ID NO: 75356 - protein, 33 aa, Artificial Sequence
  GFR-binding peptide
  MOD_RES (1), (32), (33): Xaa is C or S
XSKVIMSMEGLIKPTKGIMIQITINSLDQSVXX

SEQ ID NO: 75357 - protein, 41 aa, Artificial Sequence
  GFR-binding peptide
  MOD_RES (2), (4), (36), (37): Xaa is C or S
SXGXRDVVMGSMEGLIIQQKDNMIQMTINSMKTPTXXPGAS

SEQ ID NO: 75358 - protein, 39 aa, Artificial Sequence; identical to SEQ ID NO: 17935
  GFR-binding peptide
  MOD_RES (2), (4), (38): Xaa is C or S

SEQ ID NO: 75359 - protein, 38 aa, Artificial Sequence
  GFR-binding peptide
  MOD_RES (1), (35), (36): Xaa is C or S
  MOD_RES (13), (14), (15), (16), (17): Xaa is A or G
  MOD_RES (18), (19), (20), (21): Xaa is A or G or is absent
XAEVVMDSMEGIXXXXXXXXXMIQITINSLRAPVXXSA

SEQ ID NO: 75360 - protein, 39 aa, Artificial Sequence; identical to SEQ ID NO: 17937
  GFR-binding peptide
  MOD_RES (37), (37): Xaa is C or S
  MOD_RES (13), (14), (15), (16), (17): Xaa is A or G
  MOD_RES (18), (19), (20), (21): Xaa is A or G or is absent

SEQ ID NO: 75361 - protein, 43 aa, Artificial Sequence; identical to SEQ ID NO: 17938
  GFR-binding peptide
  MOD_RES (2), (4), (38): Xaa is C or S
  MOD_RES (16), (17), (18), (19), (20): Xaa is A or G
  MOD_RES (21), (22), (23), (24): Xaa is A or G or is absent

SEQ ID NO: 75362 - protein, 36 aa, Artificial Sequence
  GFR-binding peptide
  MOD_RES (31), (32): Xaa is C or S
SKVIMSMEGLIKPTKGIMIQITINSLDQSVXXPSAS

SEQ ID NO: 75363 - protein, 38 aa, Artificial Sequence
  GFR-binding peptide
  MOD_RES (2), (35), (36): Xaa is C or S
  MOD_RES (13), (14), (15), (16), (17): Xaa is A or G
  MOD_RES (18), (19), (20), (21): Xaa is A or G or is absent
KXSRVIMSMEGLXXXXXXXXXMIQITINSLAQPVXXPA

SEQ ID NO: 75364 - protein, 40 aa, Artificial Sequence; identical to SEQ ID NO: 17943
  GFR-binding peptide
  MOD_RES (2), (39): Xaa is C or S
  MOD_RES (15), (16), (17), (18), (19): Xaa is A or G
  MOD_RES (20), (21), (22), (23): Xaa is A or G or is absent

SEQ ID NO: 75365 - protein, 35 aa, Artificial Sequence; identical to SEQ ID NO: 50224
  GFR-binding peptide
  MOD_RES (2), (4), (35): Xaa is C or S

SEQ ID NO: 75366 - protein, 35 aa, Artificial Sequence; identical to SEQ ID NO: 50226
  GFR-binding peptide
  MOD_RES (2), (2): Xaa is C or S
  MOD_RES (14), (15), (16), (17), (18): Xaa is A or G
  MOD_RES (19), (20), (21), (22): Xaa is A or G or is absent

SEQ ID NO: 75367 - protein, 32 aa, Artificial Sequence
  GFR-binding peptide
  MOD_RES (11), (12), (13), (14), (15): Xaa is A or G
  MOD_RES (16), (17), (18), (19): Xaa is A or G or is absent
EVVMDSMEGLXXXXXXXXXMIQITINSLRTPV

SEQ ID NO: 75368 - protein, 37 aa, Artificial Sequence; identical to SEQ ID NO: 17947
  GFR-binding peptide
  MOD_RES (36), (36): Xaa is C or S

SEQ ID NO: 75369 - protein, 33 aa, Artificial Sequence; identical to SEQ ID NO: 50241
  GFR-binding peptide
  MOD_RES (31), (32): Xaa is C or S

SEQ ID NO: 75370 - protein, 38 aa, Artificial Sequence; identical to SEQ ID NO: 17950
  GFR-binding peptide
  MOD_RES (37), (37): Xaa is C or S

SEQ ID NO: 75371 - protein, 42 aa, Artificial Sequence
  GFR-binding peptide
  MOD_RES (2), (4), (37), (38): Xaa is C or S
  MOD_RES (15), (16), (17), (18), (19): Xaa is A or G
  MOD_RES (20), (21), (22), (23): Xaa is A or G or is absent
LXGXEEVIMSMEGIXXXXXXXXXMIQMTINSTKVPAXXTSPV

SEQ ID NO: 75372 - protein, 40 aa, Artificial Sequence; identical to SEQ ID NO: 47732
  GFR-binding peptide
  MOD_RES (2), (35), (36): Xaa is C or S
  MOD_RES (13), (14), (15), (16), (17): Xaa is A or G
  MOD_RES (18), (19), (20), (21): Xaa is A or G or is absent

SEQ ID NO: 75373 - protein, 36 aa, Artificial Sequence; identical to SEQ ID NO: 17953
  GFR-binding peptide
  MOD_RES (1), (1): Xaa is C or S

SEQ ID NO: 75374 - protein, 41 aa, Artificial Sequence; identical to SEQ ID NO: 50248
  GFR-binding peptide
  MOD_RES (2), (4), (37), (38): Xaa is C or S
  MOD_RES (15), (16), (17), (18), (19): Xaa is A or G
  MOD_RES (20), (21), (22), (23): Xaa is A or G or is absent

SEQ ID NO: 75375 - protein, 38 aa, Artificial Sequence
  GFR-binding peptide
  MOD_RES (1), (32), (33): Xaa is C or S
XSRVIMSMEGLVKPKRGVMIQITINSLAQPVXXPAASA

SEQ ID NO: 75376 - protein, 40 aa, Artificial Sequence; identical to SEQ ID NO: 17955
  GFR-binding peptide
  MOD_RES (1), (35): Xaa is C or S
  MOD_RES (13), (14), (15), (16), (17): Xaa is A or G
  MOD_RES (18), (19), (20), (21): Xaa is A or G or is absent

SEQ ID NO: 75377 - protein, 40 aa, Artificial Sequence
  GFR-binding peptide
  MOD_RES (2), (4), (35), (36): Xaa is C or S
LXGXEEVIMSMEGILLVRGNDMIQMTINSTKVPAXXTSPV

SEQ ID NO: 75378 - protein, 37 aa, Artificial Sequence; identical to SEQ ID NO: 50255
  GFR-binding peptide
  MOD_RES (1), (34), (35): Xaa is C or S
  MOD_RES (12), (13), (14), (15), (16): Xaa is A or G
  MOD_RES (17), (18), (19), (20): Xaa is A or G or is absent

SEQ ID NO: 75379 - protein, 42 aa, Artificial Sequence
  GFR-binding peptide
  MOD_RES (2), (36), (37): Xaa is C or S
  MOD_RES (14), (15), (16), (17), (18): Xaa is A or G
  MOD_RES (19), (20), (21), (22): Xaa is A or G or is absent
GXAEVVMDSMEGLXXXXXXXXXMIQITINSLRAPVXXSAPAA

SEQ ID NO: 75380 - protein, 36 aa, Artificial Sequence; identical to SEQ ID NO: 17958
  GFR-binding peptide
  MOD_RES (13), (14), (15), (16), (17): Xaa is A or G
  MOD_RES (18), (19), (20), (21): Xaa is A or G or is absent

SEQ ID NO: 75381 - protein, 39 aa, Artificial Sequence; identical to SEQ ID NO: 17959
  GFR-binding peptide
  MOD_RES (1), (35): Xaa is C or S
  MOD_RES (13), (14), (15), (16), (17): Xaa is A or G
  MOD_RES (18), (19), (20), (21): Xaa is A or G or is absent

SEQ ID NO: 75382 - protein, 36 aa, Artificial Sequence
  GFR-binding peptide
  MOD_RES (1), (35), (36): Xaa is C or S
  MOD_RES (13), (14), (15), (16), (17): Xaa is A or G
  MOD_RES (18), (19), (20), (21): Xaa is A or G or is absent
XRDVVMGSMEGLXXXXXXXXXMIQMTINSMKTPTXX

SEQ ID NO: 75383 - protein, 36 aa, Artificial Sequence
  GFR-binding peptide
  MOD_RES (31), (32): Xaa is C or S
EEVIMSMEGILLVRGNDMIQMTINSTKVPAXXTSPV

SEQ ID NO: 75384 - protein, 44 aa, Artificial Sequence; identical to SEQ ID NO: 17960
  GFR-binding peptide
  MOD_RES (1), (3), (40): Xaa is C or S
  MOD_RES (16), (17), (18), (19), (20): Xaa is A or G
  MOD_RES (21), (22), (23), (24): Xaa is A or G or is absent

SEQ ID NO: 75385 - protein, 37 aa, Artificial Sequence; identical to SEQ ID NO: 17963
  GFR-binding peptide
  MOD_RES (34), (34): Xaa is C or S
  MOD_RES (12), (13), (14), (15), (16): Xaa is A or G
  MOD_RES (17), (18), (19), (20): Xaa is A or G or is absent

SEQ ID NO: 75386 - protein, 37 aa, Artificial Sequence
  GFR-binding peptide
  MOD_RES (1), (3), (37): Xaa is C or S
  MOD_RES (15), (16), (17), (18), (19): Xaa is A or G
  MOD_RES (20), (21), (22), (23): Xaa is A or G or is absent
XGXRDVVMGSMEGIXXXXXXXXXMIQMTINSMKTPTX

SEQ ID NO: 75387 - protein, 40 aa, Artificial Sequence
  GFR-binding peptide
  MOD_RES (2), (4), (37), (38): Xaa is C or S
  MOD_RES (15), (16), (17), (18), (19): Xaa is A or G
  MOD_RES (20), (21), (22), (23): Xaa is A or G or is absent
SXKXSKVIMSMEGLXXXXXXXXXMIQITINSLDQSVXXPS

SEQ ID NO: 75388 - protein, 41 aa, Artificial Sequence; identical to SEQ ID NO: 17965
  GFR-binding peptide
  MOD_RES (37), (37): Xaa is C or S

SEQ ID NO: 75389 - protein, 34 aa, Artificial Sequence; identical to SEQ ID NO: 17966
  GFR-binding peptide
  MOD_RES (33), (33): Xaa is C or S

SEQ ID NO: 75390 - protein, 37 aa, Artificial Sequence; identical to SEQ ID NO: 17967
  GFR-binding peptide
  MOD_RES (36), (36): Xaa is C or S
  MOD_RES (12), (13), (14), (15), (16): Xaa is A or G
  MOD_RES (17), (18), (19), (20): Xaa is A or G or is absent

SEQ ID NO: 75391 - protein, 39 aa, Artificial Sequence
  GFR-binding peptide
  MOD_RES (1), (3), (34), (35): Xaa is C or S
XKXSKVVMSMEGLVKPTRGVMIQITINSLDQPVXXPSAS

SEQ ID NO: 75392 - protein, 42 aa, Artificial Sequence; identical to SEQ ID NO: 17969
  GFR-binding peptide
  MOD_RES (1), (38): Xaa is C or S

SEQ ID NO: 75393 - protein, 39 aa, Artificial Sequence
  GFR-binding peptide
  MOD_RES (1), (3), (37), (38): Xaa is C or S
  MOD_RES (15), (16), (17), (18), (19): Xaa is A or G
  MOD_RES (20), (21), (22), (23): Xaa is A or G or is absent
XGXRDVVMGSMEGIXXXXXXXXXMIQMTINSMKTPTXXP

SEQ ID NO: 75394 - protein, 39 aa, Artificial Sequence
  GFR-binding peptide
  MOD_RES (2), (36), (37): Xaa is C or S
  MOD_RES (14), (15), (16), (17), (18): Xaa is A or G
  MOD_RES (19), (20), (21), (22): Xaa is A or G or is absent
GXRDVVMGSMEGLXXXXXXXXXMIQMTINSMKTPTXXPG

SEQ ID NO: 75395 - protein, 34 aa, Artificial Sequence; identical to SEQ ID NO: 50272
  GFR-binding peptide
  MOD_RES (1), (1): Xaa is C or S
  MOD_RES (13), (14), (15), (16), (17): Xaa is A or G
  MOD_RES (18), (19), (20), (21): Xaa is A or G or is absent

SEQ ID NO: 75396 - protein, 35 aa, Artificial Sequence; identical to SEQ ID NO: 17971
  GFR-binding peptide
  MOD_RES (2), (2): Xaa is C or S

SEQ ID NO: 75397 - protein, 34 aa, Artificial Sequence; identical to SEQ ID NO: 47754
  GFR-binding peptide
  MOD_RES (1), (3), (34): Xaa is C or S

SEQ ID NO: 75398 - protein, 38 aa, Artificial Sequence
  GFR-binding peptide
  MOD_RES (2), (4), (36), (37): Xaa is C or S
RXGXAEVVMDSMEGLVVNNAADMIQITINSLRAPVXXS

SEQ ID NO: 75399 - protein, 36 aa, Artificial Sequence; identical to SEQ ID NO: 17972
  GFR-binding peptide
  MOD_RES (34), (34): Xaa is C or S
  MOD_RES (12), (13), (14), (15), (16): Xaa is A or G
  MOD_RES (17), (18), (19), (20): Xaa is A or G or is absent

SEQ ID NO: 75400 - protein, 35 aa, Artificial Sequence
  GFR-binding peptide
  MOD_RES (2), (33), (34): Xaa is C or S
GXEEVIMSMEGLLLVRGNDMIQMTINSTKVPAXXT

SEQ ID NO: 75401 - protein, 36 aa, Artificial Sequence; identical to SEQ ID NO: 47757
  GFR-binding peptide
  MOD_RES (1), (34), (35): Xaa is C or S
  MOD_RES (12), (13), (14), (15), (16): Xaa is A or G
  MOD_RES (17), (18), (19), (20): Xaa is A or G or is absent

SEQ ID NO: 75402 - protein, 39 aa, Artificial Sequence
  GFR-binding peptide
  MOD_RES (33), (34): Xaa is C or S
  MOD_RES (11), (12), (13), (14), (15): Xaa is A or G
  MOD_RES (16), (17), (18), (19): Xaa is A or G or is absent
SRVIMSMEGLXXXXXXXXXMIQITINSLAQPVXXPAASA

SEQ ID NO: 75403 - protein, 37 aa, Artificial Sequence
  GFR-binding peptide
  MOD_RES (2), (33), (34): Xaa is C or S
KXSKVIMSMEGLIKPTKGIMIQITINSLDQSVXXPSA

SEQ ID NO: 75404 - protein, 39 aa, Artificial Sequence; identical to SEQ ID NO: 17975
  GFR-binding peptide
  MOD_RES (1), (38): Xaa is C or S

SEQ ID NO: 75405 - protein, 35 aa, Artificial Sequence
  GFR-binding peptide
  MOD_RES (1), (35): Xaa is C or S
  MOD_RES (13), (14), (15), (16), (17): Xaa is A or G
  MOD_RES (18), (19), (20), (21): Xaa is A or G or is absent
XRDVVMGSMEGLXXXXXXXXXMIQMTINSMKTPTX

SEQ ID NO: 75406 - protein, 32 aa, Artificial Sequence
  GFR-binding peptide
  MOD_RES (32), (32): Xaa is C or S
SRVVMNSMEGLIVNSSDDMIQVTINSLKTPAX

SEQ ID NO: 75407 - protein, 39 aa, Artificial Sequence
  GFR-binding peptide
  MOD_RES (1), (3), (34), (35): Xaa is C or S
XGXEEVIMSMEGILLVRGNDMIQMTINSTKVPAXXTSPV

SEQ ID NO: 75408 - protein, 41 aa, Artificial Sequence
  GFR-binding peptide
  MOD_RES (1), (35), (36): Xaa is C or S
  MOD_RES (13), (14), (15), (16), (17): Xaa is A or G
  MOD_RES (18), (19), (20), (21): Xaa is A or G or is absent
XAEVVMDSMEGLXXXXXXXXXMIQITINSLRAPVXXSAPAA

SEQ ID NO: 75409 - protein, 36 aa, Artificial Sequence; identical to SEQ ID NO: 17982
  GFR-binding peptide
  MOD_RES (1), (35): Xaa is C or S

SEQ ID NO: 75410 - protein, 44 aa, Artificial Sequence
  GFR-binding peptide
  MOD_RES (2), (4), (38), (39): Xaa is C or S
  MOD_RES (16), (17), (18), (19), (20): Xaa is A or G
  MOD_RES (21), (22), (23), (24): Xaa is A or G or is absent
HXGXSRVVMNSMEGLXXXXXXXXXMIQVTINSLKTPAXXPKPVH

SEQ ID NO: 75411 - protein, 36 aa, Artificial Sequence; identical to SEQ ID NO: 50292
  GFR-binding peptide
  MOD_RES (33), (34): Xaa is C or S
  MOD_RES (11), (12), (13), (14), (15): Xaa is A or G
  MOD_RES (16), (17), (18), (19): Xaa is A or G or is absent

SEQ ID NO: 75412 - protein, 43 aa, Artificial Sequence; identical to SEQ ID NO: 17984
  GFR-binding peptide
  MOD_RES (1), (3), (37): Xaa is C or S
  MOD_RES (15), (16), (17), (18), (19): Xaa is A or G
  MOD_RES (20), (21), (22), (23): Xaa is A or G or is absent

SEQ ID NO: 75413 - protein, 35 aa, Artificial Sequence
  GFR-binding peptide
  MOD_RES (1), (3): Xaa is C or S
  MOD_RES (14), (15), (16), (17), (18): Xaa is A or G
  MOD_RES (19), (20), (21), (22): Xaa is A or G or is absent
XGXEEVIMSMEGIXXXXXXXXXMIQMTINSTKVPA

SEQ ID NO: 75414 - protein, 39 aa, Artificial Sequence; identical to SEQ ID NO: 17988
  GFR-binding peptide
  MOD_RES (34), (34): Xaa is C or S

SEQ ID NO: 75415 - protein, 32 aa, Artificial Sequence
  GFR-binding peptide
  MOD_RES (11), (12), (13), (14), (15): Xaa is A or G
  MOD_RES (16), (17), (18), (19): Xaa is A or G or is absent
EEVIMSMEGIXXXXXXXXXMIQMTINSTKVPA

SEQ ID NO: 75416 - protein, 36 aa, Artificial Sequence
  GFR-binding peptide
  MOD_RES (33), (34): Xaa is C or S
  MOD_RES (11), (12), (13), (14), (15): Xaa is A or G
  MOD_RES (16), (17), (18), (19): Xaa is A or G or is absent
EVVMDSMEGIXXXXXXXXXMIQITINSLRTPVXXTP

SEQ ID NO: 75417 - protein, 37 aa, Artificial Sequence
  GFR-binding peptide
  MOD_RES (31), (32): Xaa is C or S
DVVMGSMEGLIIQQKDNMIQMTINSMKTPTXXPGASG

SEQ ID NO: 75418 - protein, 39 aa, Artificial Sequence
  GFR-binding peptide
  MOD_RES (1), (33), (34): Xaa is C or S
XRDVVMGSMEGLIIQQKDNMIQMTINSMKTPTXXPGASG

SEQ ID NO: 75419 - protein, 37 aa, Artificial Sequence; identical to SEQ ID NO: 50301
  GFR-binding peptide
  MOD_RES (2), (35), (36): Xaa is C or S
  MOD_RES (13), (14), (15), (16), (17): Xaa is A or G
  MOD_RES (18), (19), (20), (21): Xaa is A or G or is absent

SEQ ID NO: 75420 - protein, 37 aa, Artificial Sequence
  GFR-binding peptide
  MOD_RES (1), (33), (34): Xaa is C or S
XRDVVMGSMEGIIIQQKDNMIQMTINSMKTPTXXPGA

SEQ ID NO: 75421 - protein, 42 aa, Artificial Sequence
  GFR-binding peptide
  MOD_RES (2), (4), (37), (38): Xaa is C or S
  MOD_RES (15), (16), (17), (18), (19): Xaa is A or G
  MOD_RES (20), (21), (22), (23): Xaa is A or G or is absent
SXKXSKVVMSMEGLXXXXXXXXXMIQITINSLDQPVXXPSAS

SEQ ID NO: 75422 - protein, 31 aa, Artificial Sequence
  GFR-binding peptide
  MOD_RES (31), (31): Xaa is C or S
EEVIMSMEGILLVRGNDMIQMTINSTKVPAX

SEQ ID NO: 75423 - protein, 36 aa, Artificial Sequence
  GFR-binding peptide
  MOD_RES (32), (33): Xaa is C or S
RDVVMGSMEGIIIQQKDNMIQMTINSMKTPTXXPGA

SEQ ID NO: 75424 - protein, 35 aa, Artificial Sequence; identical to SEQ ID NO: 47795
  GFR-binding peptide
  MOD_RES (2), (34), (35): Xaa is C or S

SEQ ID NO: 75425 - protein, 37 aa, Artificial Sequence; identical to SEQ ID NO: 17994
  GFR-binding peptide
  MOD_RES (36), (36): Xaa is C or S

SEQ ID NO: 75426 - protein, 40 aa, Artificial Sequence
  GFR-binding peptide
  MOD_RES (34), (35): Xaa is C or S
  MOD_RES (12), (13), (14), (15), (16): Xaa is A or G
  MOD_RES (17), (18), (19), (20): Xaa is A or G or is absent
RDVVMGSMEGIXXXXXXXXXMIQMTINSMKTPTXXPGASG

SEQ ID NO: 75427 - protein, 36 aa, Artificial Sequence
  GFR-binding peptide
  MOD_RES (2), (4), (36): Xaa is C or S
RXGXSEVVMDSMEGIVVNNASDMIQITINSLRTPVX

SEQ ID NO: 75428 - protein, 41 aa, Artificial Sequence; identical to SEQ ID NO: 17996
  GFR-binding peptide
  MOD_RES (2), (36): Xaa is C or S

SEQ ID NO: 75429 - protein, 40 aa, Artificial Sequence
  GFR-binding peptide
  MOD_RES (1), (3), (34), (35): Xaa is C or S
XKXSKVIMSMEGLIKPTKGIMIQITINSLDQSVXXPSASA

SEQ ID NO: 75430 - protein, 41 aa, Artificial Sequence
  GFR-binding peptide
  MOD_RES (2), (4), (37), (38): Xaa is C or S
  MOD_RES (15), (16), (17), (18), (19): Xaa is A or G
  MOD_RES (20), (21), (22), (23): Xaa is A or G or is absent
LXGXEEVIMSMEGLXXXXXXXXXMIQMTINSTKVPAXXTSP

SEQ ID NO: 75431 - protein, 32 aa, Artificial Sequence
  GFR-binding peptide
  MOD_RES (31), (32): Xaa is C or S
EEVIMSMEGILLVRGNDMIQMTINSTKVPAXX

SEQ ID NO: 75432 - protein, 38 aa, Artificial Sequence; identical to SEQ ID NO: 17999
  GFR-binding peptide
  MOD_RES (36), (36): Xaa is C or S

SEQ ID NO: 75433 - protein, 36 aa, Artificial Sequence
  GFR-binding peptide
  MOD_RES (1), (33), (34): Xaa is C or S
XRDVVMGSMEGLIIQQKDNMIQMTINSMKTPTXXPG

SEQ ID NO: 75434 - protein, 40 aa, Artificial Sequence; identical to SEQ ID NO: 18001
  GFR-binding peptide
  MOD_RES (1), (38): Xaa is C or S
  MOD_RES (14), (15), (16), (17), (18): Xaa is A or G
  MOD_RES (19), (20), (21), (22): Xaa is A or G or is absent

SEQ ID NO: 75435 - protein, 40 aa, Artificial Sequence
  GFR-binding peptide
  MOD_RES (1), (3), (34), (35): Xaa is C or S
XGXEEVIMSMEGLLLVRGNDMIQMTINSTKVPAXXTSPVR

SEQ ID NO: 75436 - protein, 40 aa, Artificial Sequence
  GFR-binding peptide
  MOD_RES (2), (35), (36): Xaa is C or S
  MOD_RES (13), (14), (15), (16), (17): Xaa is A or G
  MOD_RES (18), (19), (20), (21): Xaa is A or G or is absent
GXEEVIMSMEGLXXXXXXXXXMIQMTINSTKVPAXXTSPV

SEQ ID NO: 75437 - protein, 34 aa, Artificial Sequence; identical to SEQ ID NO: 18002
  GFR-binding peptide

SEQ ID NO: 75438 - protein, 35 aa, Artificial Sequence
  GFR-binding peptide
  MOD_RES (2), (4): Xaa is C or S
RXGXAEVVMDSMEGLVVNNAADMIQITINSLRAPV

SEQ ID NO: 75439 - protein, 33 aa, Artificial Sequence
  GFR-binding peptide
  MOD_RES (33), (33): Xaa is C or S
  MOD_RES (11), (12), (13), (14), (15): Xaa is A or G
  MOD_RES (16), (17), (18), (19): Xaa is A or G or is absent
SRVIMSMEGLXXXXXXXXXMIQITINSLAQPVX

SEQ ID NO: 75440 - protein, 34 aa, Artificial Sequence
  GFR-binding peptide
  MOD_RES (1), (34): Xaa is C or S
  MOD_RES (12), (13), (14), (15), (16): Xaa is A or G
  MOD_RES (17), (18), (19), (20): Xaa is A or G or is absent
XSKVVMSMEGLXXXXXXXXXMIQITINSLDQPVX

SEQ ID NO: 75441 - protein, 36 aa, Artificial Sequence
  GFR-binding peptide
  MOD_RES (2), (34), (35): Xaa is C or S
GXRDVVMGSMEGIIIQQKDNMIQMTINSMKTPTXXP

SEQ ID NO: 75442 - protein, 33 aa, Artificial Sequence
  GFR-binding peptide
  MOD_RES (1), (33): Xaa is C or S
XSEVVMDSMEGLVVNNASDMIQITINSLRTPVX

SEQ ID NO: 75443 - protein, 36 aa, Artificial Sequence; identical to SEQ ID NO: 18007
  GFR-binding peptide
  MOD_RES (2), (2): Xaa is C or S
  MOD_RES (15), (16), (17), (18), (19): Xaa is A or G
  MOD_RES (20), (21), (22), (23): Xaa is A or G or is absent

SEQ ID NO: 75444 - protein, 38 aa, Artificial Sequence
  GFR-binding peptide
  MOD_RES (33), (34): Xaa is C or S
  MOD_RES (11), (12), (13), (14), (15): Xaa is A or G
  MOD_RES (16), (17), (18), (19): Xaa is A or G or is absent
EVVMDSMEGLXXXXXXXXXMIQITINSLRTPVXXTPPT

SEQ ID NO: 75445 - protein, 39 aa, Artificial Sequence
  GFR-binding peptide
  MOD_RES (1), (33), (34): Xaa is C or S
XSEVVMDSMEGLVVNNASDMIQITINSLRTPVXXTPPTS

SEQ ID NO: 75446 - protein, 43 aa, Artificial Sequence
  GFR-binding peptide
  MOD_RES (1), (3), (37), (38): Xaa is C or S
  MOD_RES (15), (16), (17), (18), (19): Xaa is A or G
  MOD_RES (20), (21), (22), (23): Xaa is A or G or is absent
XGXAEVVMDSMEGIXXXXXXXXXMIQITINSLRAPVXXSAPAA

SEQ ID NO: 75447 - protein, 38 aa, Artificial Sequence
  GFR-binding peptide
  MOD_RES (1), (3), (36), (37): Xaa is C or S
  MOD_RES (14), (15), (16), (17), (18): Xaa is A or G
  MOD_RES (19), (20), (21), (22): Xaa is A or G or is absent
XGXEEVIMSMEGIXXXXXXXXXMIQMTINSTKVPAXXT

SEQ ID NO: 75448 - protein, 37 aa, Artificial Sequence
  GFR-binding peptide
  MOD_RES (2), (35), (36): Xaa is C or S
  MOD_RES (13), (14), (15), (16), (17): Xaa is A or G
  MOD_RES (18), (19), (20), (21): Xaa is A or G or is absent
KXSKVVMSMEGLXXXXXXXXXMIQITINSLDQPVXXP

SEQ ID NO: 75449 - protein, 36 aa, Artificial Sequence
  GFR-binding peptide
  MOD_RES (1), (3): Xaa is C or S
  MOD_RES (15), (16), (17), (18), (19): Xaa is A or G
  MOD_RES (20), (21), (22), (23): Xaa is A or G or is absent
XGXSEVVMDSMEGIXXXXXXXXXMIQITINSLRTPV

SEQ ID NO: 75450 - protein, 36 aa, Artificial Sequence
  GFR-binding peptide
  MOD_RES (1), (35), (36): Xaa is C or S
  MOD_RES (13), (14), (15), (16), (17): Xaa is A or G
  MOD_RES (18), (19), (20), (21): Xaa is A or G or is absent
XSEVVMDSMEGIXXXXXXXXXMIQITINSLRTPVXX

SEQ ID NO: 75451 - protein, 32 aa, Artificial Sequence
  GFR-binding peptide
  MOD_RES (11), (12), (13), (14), (15): Xaa is A or G
  MOD_RES (16), (17), (18), (19): Xaa is A or G or is absent
SRVIMSMEGLXXXXXXXXXMIQITINSLAQPV

SEQ ID NO: 75452 - protein, 38 aa, Artificial Sequence
  GFR-binding peptide
  MOD_RES (34), (35): Xaa is C or S
  MOD_RES (12), (13), (14), (15), (16): Xaa is A or G
  MOD_RES (17), (18), (19), (20): Xaa is A or G or is absent
SRVVMNSMEGLXXXXXXXXXMIQVTINSLKTPAXXPKP

SEQ ID NO: 75453 - protein, 32 aa, Artificial Sequence
  GFR-binding peptide
  MOD_RES (11), (12), (13), (14), (15): Xaa is A or G
  MOD_RES (16), (17), (18), (19): Xaa is A or G or is absent
EVVMDSMEGLXXXXXXXXXMIQITINSLRAPV

SEQ ID NO: 75454 - protein, 38 aa, Artificial Sequence; identical to SEQ ID NO: 18013
  GFR-binding peptide
  MOD_RES (1), (35): Xaa is C or S

SEQ ID NO: 75455 - protein, 39 aa, Artificial Sequence; identical to SEQ ID NO: 50357
  GFR-binding peptide
  MOD_RES (2), (4), (38), (39): Xaa is C or S
  MOD_RES (16), (17), (18), (19), (20): Xaa is A or G
  MOD_RES (21), (22), (23), (24): Xaa is A or G or is absent

SEQ ID NO: 75456 - protein, 38 aa, Artificial Sequence
  GFR-binding peptide
  MOD_RES (2), (36), (37): Xaa is C or S
  MOD_RES (14), (15), (16), (17), (18): Xaa is A or G
  MOD_RES (19), (20), (21), (22): Xaa is A or G or is absent
GXRDVVMGSMEGLXXXXXXXXXMIQMTINSMKTPTXXP

SEQ ID NO: 75457 - protein, 36 aa, Artificial Sequence
  GFR-binding peptide
  MOD_RES (33), (34): Xaa is C or S
  MOD_RES (11), (12), (13), (14), (15): Xaa is A or G
  MOD_RES (16), (17), (18), (19): Xaa is A or G or is absent
SRVIMSMEGLXXXXXXXXXMIQITINSLAQPVXXPA

SEQ ID NO: 75458 - protein, 40 aa, Artificial Sequence
  GFR-binding peptide
  MOD_RES (1), (3), (37), (38): Xaa is C or S
  MOD_RES (15), (16), (17), (18), (19): Xaa is A or G
  MOD_RES (20), (21), (22), (23): Xaa is A or G or is absent
XGXAEVVMDSMEGLXXXXXXXXXMIQITINSLRAPVXXSA

SEQ ID NO: 75459 - protein, 33 aa, Artificial Sequence
  GFR-binding peptide
  MOD_RES (2), (33): Xaa is C or S
KXSKVVMSMEGLVKPTRGVMIQITINSLDQPVX

SEQ ID NO: 75460 - protein, 40 aa, Artificial Sequence; identical to SEQ ID NO: 18021
  GFR-binding peptide
  MOD_RES (2), (4): Xaa is C or S

SEQ ID NO: 75461 - protein, 39 aa, Artificial Sequence; identical to SEQ ID NO: 18022
  GFR-binding peptide
  MOD_RES (2), (4), (38): Xaa is C or S
  MOD_RES (16), (17), (18), (19), (20): Xaa is A or G
  MOD_RES (21), (22), (23), (24): Xaa is A or G or is absent

SEQ ID NO: 75462 - protein, 42 aa, Artificial Sequence
  GFR-binding peptide
  MOD_RES (2), (36), (37): Xaa is C or S
  MOD_RES (14), (15), (16), (17), (18): Xaa is A or G
  MOD_RES (19), (20), (21), (22): Xaa is A or G or is absent
GXSEVVMDSMEGIXXXXXXXXXMIQITINSLRTPVXXTPPTS

SEQ ID NO: 75463 - protein, 34 aa, Artificial Sequence
  GFR-binding peptide
  MOD_RES (32), (33): Xaa is C or S
SRVVMNSMEGLIVNSSDDMIQVTINSLKTPAXXP

SEQ ID NO: 75464 - protein, 37 aa, Artificial Sequence; identical to SEQ ID NO: 50367
  GFR-binding peptide
  MOD_RES (1), (3), (34), (35): Xaa is C or S

SEQ ID NO: 75465 - protein, 42 aa, Artificial Sequence; identical to SEQ ID NO: 18023
  GFR-binding peptide
  MOD_RES (2), (4), (41): Xaa is C or S
  MOD_RES (17), (18), (19), (20), (21): Xaa is A or G
  MOD_RES (22), (23), (24), (25): Xaa is A or G or is absent

SEQ ID NO: 75466 - protein, 45 aa, Artificial Sequence; identical to SEQ ID NO: 18024
  GFR-binding peptide
  MOD_RES (2), (4), (41): Xaa is C or S

SEQ ID NO: 75467 - protein, 32 aa, Artificial Sequence
  GFR-binding peptide
  MOD_RES (2), (2): Xaa is C or S
GXEEVIMSMEGILLVRGNDMIQMTINSTKVPA

SEQ ID NO: 75468 - protein, 35 aa, Artificial Sequence; identical to SEQ ID NO: 18027
  GFR-binding peptide
  MOD_RES (2), (2): Xaa is C or S

SEQ ID NO: 75469 - protein, 38 aa, Artificial Sequence; identical to SEQ ID NO: 18028
  GFR-binding peptide
  MOD_RES (2), (36): Xaa is C or S

SEQ ID NO: 75470 - protein, 35 aa, Artificial Sequence
  GFR-binding peptide
  MOD_RES (33), (34): Xaa is C or S
  MOD_RES (11), (12), (13), (14), (15): Xaa is A or G
  MOD_RES (16), (17), (18), (19): Xaa is A or G or is absent
EVVMDSMEGLXXXXXXXXXMIQITINSLRTPVXXT

SEQ ID NO: 75471 - protein, 41 aa, Artificial Sequence
  GFR-binding peptide
  MOD_RES (1), (35), (36): Xaa is C or S
  MOD_RES (13), (14), (15), (16), (17): Xaa is A or G
  MOD_RES (18), (19), (20), (21): Xaa is A or G or is absent
XSEVVMDSMEGIXXXXXXXXXMIQITINSLRTPVXXTPPTS

SEQ ID NO: 75472 - protein, 40 aa, Artificial Sequence
  GFR-binding peptide
  MOD_RES (1), (3), (37), (38): Xaa is C or S
  MOD_RES (15), (16), (17), (18), (19): Xaa is A or G
  MOD_RES (20), (21), (22), (23): Xaa is A or G or is absent
XGXSRVVMNSMEGLXXXXXXXXXMIQVTINSLKTPAXXPK

SEQ ID NO: 75473 - protein, 35 aa, Artificial Sequence
  GFR-binding peptide
  MOD_RES (2), (35): Xaa is C or S
  MOD_RES (13), (14), (15), (16), (17): Xaa is A or G
  MOD_RES (18), (19), (20), (21): Xaa is A or G or is absent
GXEEVIMSMEGIXXXXXXXXXMIQMTINSTKVPAX

SEQ ID NO: 75474 - protein, 36 aa, Artificial Sequence
  GFR-binding peptide
  MOD_RES (33), (34): Xaa is C or S
  MOD_RES (11), (12), (13), (14), (15): Xaa is A or G
  MOD_RES (16), (17), (18), (19): Xaa is A or G or is absent
EEVIMSMEGLXXXXXXXXXMIQMTINSTKVPAXXTS

SEQ ID NO: 75475 - protein, 36 aa, Artificial Sequence
  GFR-binding peptide
  MOD_RES (32), (33): Xaa is C or S
SEVVMDSMEGLVVNNASDMIQITINSLRTPVXXTPP

SEQ ID NO: 75476 - protein, 40 aa, Artificial Sequence; identical to SEQ ID NO: 18032
  GFR-binding peptide
  MOD_RES (2), (4): Xaa is C or S
  MOD_RES (17), (18), (19), (20), (21): Xaa is A or G
  MOD_RES (22), (23), (24), (25): Xaa is A or G or is absent

SEQ ID NO: 75477 - protein, 40 aa, Artificial Sequence; identical to SEQ ID NO: 50386
  GFR-binding peptide
  MOD_RES (2), (4), (35), (36): Xaa is C or S

SEQ ID NO: 75478 - protein, 41 aa, Artificial Sequence
  GFR-binding peptide
  MOD_RES (1), (3), (37), (38): Xaa is C or S
  MOD_RES (15), (16), (17), (18), (19): Xaa is A or G
  MOD_RES (20), (21), (22), (23): Xaa is A or G or is absent
XGXRDVVMGSMEGLXXXXXXXXXMIQMTINSMKTPTXXPGA

SEQ ID NO: 75479 - protein, 41 aa, Artificial Sequence
  GFR-binding peptide
  MOD_RES (2), (35), (36): Xaa is C or S
  MOD_RES (13), (14), (15), (16), (17): Xaa is A or G
  MOD_RES (18), (19), (20), (21): Xaa is A or G or is absent
GXEEVIMSMEGLXXXXXXXXXMIQMTINSTKVPAXXTSPVR

SEQ ID NO: 75480 - protein, 35 aa, Artificial Sequence; identical to SEQ ID NO: 18033
  GFR-binding peptide
  MOD_RES (35), (35): Xaa is C or S

SEQ ID NO: 75481 - protein, 33 aa, Artificial Sequence
  GFR-binding peptide
  MOD_RES (2), (33): Xaa is C or S
KXSKVIMSMEGLIKPTKGIMIQITINSLDQSVX

SEQ ID NO: 75482 - protein, 41 aa, Artificial Sequence
  GFR-binding peptide
  MOD_RES (1), (3), (37), (38): Xaa is C or S
  MOD_RES (15), (16), (17), (18), (19): Xaa is A or G
  MOD_RES (20), (21), (22), (23): Xaa is A or G or is absent
XGXAEVVMDSMEGIXXXXXXXXXMIQITINSLRAPVXXSAP

SEQ ID NO: 75483 - protein, 40 aa, Artificial Sequence; identical to SEQ ID NO: 18034
  GFR-binding peptide
  MOD_RES (1), (3), (37): Xaa is C or S

SEQ ID NO: 75484 - protein, 39 aa, Artificial Sequence; identical to SEQ ID NO: 18036
  GFR-binding peptide
  MOD_RES (34), (34): Xaa is C or S

SEQ ID NO: 75485 - protein, 38 aa, Artificial Sequence
  GFR-binding peptide
  MOD_RES (2), (4), (37), (38): Xaa is C or S
  MOD_RES (15), (16), (17), (18), (19): Xaa is A or G
  MOD_RES (20), (21), (22), (23): Xaa is A or G or is absent
SXKXSKVIMSMEGLXXXXXXXXXMIQITINSLDQSVXX

SEQ ID NO: 75486 - protein, 33 aa, Artificial Sequence
  GFR-binding peptide
  MOD_RES (31), (32): Xaa is C or S
SRVIMSMEGLVKPKRGVMIQITINSLAQPVXXP

SEQ ID NO: 75487 - protein, 33 aa, Artificial Sequence; identical to SEQ ID NO: 18039
  GFR-binding peptide
  MOD_RES (33), (33): Xaa is C or S
  MOD_RES (11), (12), (13), (14), (15): Xaa is A or G
  MOD_RES (16), (17), (18), (19): Xaa is A or G or is absent

SEQ ID NO: 75488 - protein, 33 aa, Artificial Sequence; identical to SEQ ID NO: 18040
  GFR-binding peptide

SEQ ID NO: 75489 - protein, 40 aa, Artificial Sequence
  GFR-binding peptide
  MOD_RES (1), (3), (37), (38): Xaa is C or S
  MOD_RES (15), (16), (17), (18), (19): Xaa is A or G
  MOD_RES (20), (21), (22), (23): Xaa is A or G or is absent
XGXSEVVMDSMEGIXXXXXXXXXMIQITINSLRTPVXXTP

SEQ ID NO: 75490 - protein, 37 aa, Artificial Sequence
  GFR-binding peptide
  MOD_RES (2), (34), (35): Xaa is C or S
GXSEVVMDSMEGLVVNNASDMIQITINSLRTPVXXTP

SEQ ID NO: 75491 - protein, 36 aa, Artificial Sequence
  GFR-binding peptide
  MOD_RES (2), (4), (36): Xaa is C or S
HXGXSRVVMNSMEGLIVNSSDDMIQVTINSLKTPAX

SEQ ID NO: 75492 - protein, 38 aa, Artificial Sequence; identical to SEQ ID NO: 18042
  GFR-binding peptide
  MOD_RES (36), (36): Xaa is C or S
  MOD_RES (12), (13), (14), (15), (16): Xaa is A or G
  MOD_RES (17), (18), (19), (20): Xaa is A or G or is absent

SEQ ID NO: 75493 - protein, 40 aa, Artificial Sequence; identical to SEQ ID NO: 18044
  GFR-binding peptide
  MOD_RES (2), (39): Xaa is C or S

SEQ ID NO: 75494 - protein, 38 aa, Artificial Sequence; identical to SEQ ID NO: 47863
  GFR-binding peptide
  MOD_RES (2), (4), (35), (36): Xaa is C or S

SEQ ID NO: 75495 - protein, 37 aa, Artificial Sequence; identical to SEQ ID NO: 18046
  GFR-binding peptide
  MOD_RES (33), (33): Xaa is C or S

SEQ ID NO: 75496 - protein, 35 aa, Artificial Sequence; identical to SEQ ID NO: 18047
  GFR-binding peptide

SEQ ID NO: 75497 - protein, 36 aa, Artificial Sequence; identical to SEQ ID NO: 18050
  GFR-binding peptide
  MOD_RES (35), (35): Xaa is C or S
  MOD_RES (11), (12), (13), (14), (15): Xaa is A or G
  MOD_RES (16), (17), (18), (19): Xaa is A or G or is absent

SEQ ID NO: 75498 - protein, 37 aa, Artificial Sequence
  GFR-binding peptide
  MOD_RES (1), (32), (33): Xaa is C or S
XSKVVMSMEGLVKPTRGVMIQITINSLDQPVXXPSAS

SEQ ID NO: 75499 - protein, 38 aa, Artificial Sequence
  GFR-binding peptide
  MOD_RES (34), (35): Xaa is C or S
  MOD_RES (12), (13), (14), (15), (16): Xaa is A or G
  MOD_RES (17), (18), (19), (20): Xaa is A or G or is absent
AEVVMDSMEGLXXXXXXXXXMIQITINSLRAPVXXSAP

SEQ ID NO: 75500 - protein, 42 aa, Artificial Sequence
  GFR-binding peptide
  MOD_RES (2), (4), (38), (39): Xaa is C or S
  MOD_RES (16), (17), (18), (19), (20): Xaa is A or G
  MOD_RES (21), (22), (23), (24): Xaa is A or G or is absent
RXGXSEVVMDSMEGIXXXXXXXXXMIQITINSLRTPVXXTPP

SEQ ID NO: 75501 - protein, 34 aa, Artificial Sequence
  GFR-binding peptide
  MOD_RES (1), (3), (34): Xaa is C or S
XKXSRVIMSMEGLVKPKRGVMIQITINSLAQPVX

SEQ ID NO: 75502 - protein, 38 aa, Artificial Sequence
  GFR-binding peptide
  MOD_RES (1), (34), (35): Xaa is C or S
  MOD_RES (12), (13), (14), (15), (16): Xaa is A or G
  MOD_RES (17), (18), (19), (20): Xaa is A or G or is absent
XSKVIMSMEGLXXXXXXXXXMIQITINSLDQSVXXPSA

SEQ ID NO: 75503 - protein, 43 aa, Artificial Sequence; identical to SEQ ID NO: 50415
  GFR-binding peptide
  MOD_RES (2), (4), (37), (38): Xaa is C or S
  MOD_RES (15), (16), (17), (18), (19): Xaa is A or G
  MOD_RES (20), (21), (22), (23): Xaa is A or G or is absent

SEQ ID NO: 75504 - protein, 37 aa, Artificial Sequence
  GFR-binding peptide
  MOD_RES (1), (35), (36): Xaa is C or S
  MOD_RES (13), (14), (15), (16), (17): Xaa is A or G
  MOD_RES (18), (19), (20), (21): Xaa is A or G or is absent
XAEVVMDSMEGLXXXXXXXXXMIQITINSLRAPVXXS

SEQ ID NO: 75505 - protein, 36 aa, Artificial Sequence; identical to SEQ ID NO: 18058
  GFR-binding peptide
  MOD_RES (1), (35): Xaa is C or S
  MOD_RES (13), (14), (15), (16), (17): Xaa is A or G
  MOD_RES (18), (19), (20), (21): Xaa is A or G or is absent

SEQ ID NO: 75506 - protein, 35 aa, Artificial Sequence
  GFR-binding peptide
  MOD_RES (1), (35): Xaa is C or S
  MOD_RES (13), (14), (15), (16), (17): Xaa is A or G
  MOD_RES (18), (19), (20), (21): Xaa is A or G or is absent
XAEVVMDSMEGIXXXXXXXXXMIQITINSLRAPVX

SEQ ID NO: 75507 - protein, 38 aa, Artificial Sequence; identical to SEQ ID NO: 18060
  GFR-binding peptide
  MOD_RES (1), (3), (37): Xaa is C or S
  MOD_RES (15), (16), (17), (18), (19): Xaa is A or G
  MOD_RES (20), (21), (22), (23): Xaa is A or G or is absent

SEQ ID NO: 75508 - protein, 38 aa, Artificial Sequence; identical to SEQ ID NO: 47876
  GFR-binding peptide
  MOD_RES (2), (4), (36), (37): Xaa is C or S

SEQ ID NO: 75509 - protein, 35 aa, Artificial Sequence
  GFR-binding peptide
  MOD_RES (34), (35): Xaa is C or S
  MOD_RES (12), (13), (14), (15), (16): Xaa is A or G
  MOD_RES (17), (18), (19), (20): Xaa is A or G or is absent
AEVVMDSMEGIXXXXXXXXXMIQITINSLRAPVXX

SEQ ID NO: 75510 - protein, 40 aa, Artificial Sequence
  GFR-binding peptide
  MOD_RES (2), (4), (35), (36): Xaa is C or S
SXKXSKVVMSMEGLVKPTRGVMIQITINSLDQPVXXPSAS

SEQ ID NO: 75511 - protein, 33 aa, Artificial Sequence; identical to SEQ ID NO: 18062
  GFR-binding peptide
  MOD_RES (11), (12), (13), (14), (15): Xaa is A or G
  MOD_RES (16), (17), (18), (19): Xaa is A or G or is absent

SEQ ID NO: 75512 - protein, 33 aa, Artificial Sequence
  GFR-binding peptide
  MOD_RES (1), (3): Xaa is C or S
XKXSKVVMSMEGLVKPTRGVMIQITINSLDQPV

SEQ ID NO: 75513 - protein, 38 aa, Artificial Sequence; identical to SEQ ID NO: 18063
  GFR-binding peptide
  MOD_RES (1), (38): Xaa is C or S

SEQ ID NO: 75514 - protein, 42 aa, Artificial Sequence; identical to SEQ ID NO: 18064
  GFR-binding peptide
  MOD_RES (1), (3), (40): Xaa is C or S

SEQ ID NO: 75515 - protein, 40 aa, Artificial Sequence; identical to SEQ ID NO: 18065
  GFR-binding peptide
  MOD_RES (1), (35): Xaa is C or S

SEQ ID NO: 75516 - protein, 35 aa, Artificial Sequence
  GFR-binding peptide
  MOD_RES (1), (32), (33): Xaa is C or S
XEEVIMSMEGILLVRGNDMIQMTINSTKVPAXXTS

SEQ ID NO: 75517 - protein, 41 aa, Artificial Sequence
  GFR-binding peptide
  MOD_RES (1), (35), (36): Xaa is C or S
  MOD_RES (13), (14), (15), (16), (17): Xaa is A or G
  MOD_RES (18), (19), (20), (21): Xaa is A or G or is absent
XSRVVMNSMEGLXXXXXXXXXMIQVTINSLKTPAXXPKPVH

SEQ ID NO: 75518 - protein, 36 aa, Artificial Sequence
  GFR-binding peptide
  MOD_RES (33), (34): Xaa is C or S
  MOD_RES (11), (12), (13), (14), (15): Xaa is A or G
  MOD_RES (16), (17), (18), (19): Xaa is A or G or is absent
RVVMNSMEGLXXXXXXXXXMIQVTINSLKTPAXXPK

SEQ ID NO: 75519 - protein, 37 aa, Artificial Sequence; identical to SEQ ID NO: 50425
  GFR-binding peptide
  MOD_RES (33), (34): Xaa is C or S
  MOD_RES (11), (12), (13), (14), (15): Xaa is A or G
  MOD_RES (16), (17), (18), (19): Xaa is A or G or is absent

SEQ ID NO: 75520 - protein, 43 aa, Artificial Sequence
  GFR-binding peptide
  MOD_RES (2), (4), (37), (38): Xaa is C or S
  MOD_RES (15), (16), (17), (18), (19): Xaa is A or G
  MOD_RES (20), (21), (22), (23): Xaa is A or G or is absent
SXKXSRVIMSMEGLXXXXXXXXXMIQITINSLAQPVXXPAASA

SEQ ID NO: 75521 - protein, 31 aa, Artificial Sequence; identical to SEQ ID NO: 50427
  GFR-binding peptide

SEQ ID NO: 75522 - protein, 37 aa, Artificial Sequence; identical to SEQ ID NO: 50431
  GFR-binding peptide
  MOD_RES (1), (3), (36), (37): Xaa is C or S
  MOD_RES (14), (15), (16), (17), (18): Xaa is A or G
  MOD_RES (19), (20), (21), (22): Xaa is A or G or is absent

SEQ ID NO: 75523 - protein, 38 aa, Artificial Sequence; identical to SEQ ID NO: 50434
  GFR-binding peptide
  MOD_RES (33), (34): Xaa is C or S
  MOD_RES (11), (12), (13), (14), (15): Xaa is A or G
  MOD_RES (16), (17), (18), (19): Xaa is A or G or is absent

SEQ ID NO: 75524 - protein, 37 aa, Artificial Sequence; identical to SEQ ID NO: 50436
  GFR-binding peptide
  MOD_RES (2), (34), (35): Xaa is C or S

SEQ ID NO: 75525 - protein, 34 aa, Artificial Sequence
  GFR-binding peptide
  MOD_RES (2), (33), (34): Xaa is C or S
KXSKVIMSMEGLIKPTKGIMIQITINSLDQSVXX

SEQ ID NO: 75526 - protein, 37 aa, Artificial Sequence
  GFR-binding peptide
  MOD_RES (32), (33): Xaa is C or S
RDVVMGSMEGIIIQQKDNMIQMTINSMKTPTXXPGAS

SEQ ID NO: 75527 - protein, 37 aa, Artificial Sequence
  GFR-binding peptide
  MOD_RES (2), (4), (37): Xaa is C or S
  MOD_RES (15), (16), (17), (18), (19): Xaa is A or G
  MOD_RES (20), (21), (22), (23): Xaa is A or G or is absent
SXKXSRVIMSMEGLXXXXXXXXXMIQITINSLAQPVX

SEQ ID NO: 75528 - protein, 38 aa, Artificial Sequence
  GFR-binding peptide
  MOD_RES (1), (3), (35), (36): Xaa is C or S
XGXAEVVMDSMEGIVVNNAADMIQITINSLRAPVXXSA

SEQ ID NO: 75529 - protein, 33 aa, Artificial Sequence; identical to SEQ ID NO: 47891
  GFR-binding peptide
  MOD_RES (32), (33): Xaa is C or S

SEQ ID NO: 75530 - protein, 38 aa, Artificial Sequence
  GFR-binding peptide
  MOD_RES (1), (3), (37), (38): Xaa is C or S
  MOD_RES (15), (16), (17), (18), (19): Xaa is A or G
  MOD_RES (20), (21), (22), (23): Xaa is A or G or is absent
XGXSEVVMDSMEGIXXXXXXXXXMIQITINSLRTPVXX

SEQ ID NO: 75531 - protein, 32 aa, Artificial Sequence
  GFR-binding peptide
  MOD_RES (1), (1): Xaa is C or S
XAEVVMDSMEGLVVNNAADMIQITINSLRAPV

SEQ ID NO: 75532 - protein, 36 aa, Artificial Sequence
  GFR-binding peptide
  MOD_RES (33), (34): Xaa is C or S
  MOD_RES (11), (12), (13), (14), (15): Xaa is A or G
  MOD_RES (16), (17), (18), (19): Xaa is A or G or is absent
EVVMDSMEGLXXXXXXXXXMIQITINSLRAPVXXSA

SEQ ID NO: 75533 - protein, 38 aa, Artificial Sequence
  GFR-binding peptide
  MOD_RES (32), (33): Xaa is C or S
AEVVMDSMEGLVVNNAADMIQITINSLRAPVXXSAPAA

SEQ ID NO: 75534 - protein, 38 aa, Artificial Sequence; identical to SEQ ID NO: 50443
  GFR-binding peptide
  MOD_RES (1), (35), (36): Xaa is C or S
  MOD_RES (13), (14), (15), (16), (17): Xaa is A or G
  MOD_RES (18), (19), (20), (21): Xaa is A or G or is absent

SEQ ID NO: 75535 - protein, 39 aa, Artificial Sequence
  GFR-binding peptide
  MOD_RES (2), (4), (37), (38): Xaa is C or S
  MOD_RES (15), (16), (17), (18), (19): Xaa is A or G
  MOD_RES (20), (21), (22), (23): Xaa is A or G or is absent
LXGXEEVIMSMEGLXXXXXXXXXMIQMTINSTKVPAXXT

SEQ ID NO: 75536 - protein, 35 aa, Artificial Sequence; identical to SEQ ID NO: 18073
  GFR-binding peptide
  MOD_RES (34), (34): Xaa is C or S

SEQ ID NO: 75537 - protein, 36 aa, Artificial Sequence
  GFR-binding peptide
  MOD_RES (1), (3), (36): Xaa is C or S
  MOD_RES (14), (15), (16), (17), (18): Xaa is A or G
  MOD_RES (19), (20), (21), (22): Xaa is A or G or is absent
XGXEEVIMSMEGLXXXXXXXXXMIQMTINSTKVPAX

SEQ ID NO: 75538 - protein, 33 aa, Artificial Sequence
  GFR-binding peptide
  MOD_RES (31), (32): Xaa is C or S
DVVMGSMEGIIIQQKDNMIQMTINSMKTPTXXP

SEQ ID NO: 75539 - protein, 37 aa, Artificial Sequence
  GFR-binding peptide
  MOD_RES (2), (33), (34): Xaa is C or S
KXSKVVMSMEGLVKPTRGVMIQITINSLDQPVXXPSA

SEQ ID NO: 75540 - protein, 37 aa, Artificial Sequence
  GFR-binding peptide
  MOD_RES (2), (4): Xaa is C or S
  MOD_RES (16), (17), (18), (19), (20): Xaa is A or G
  MOD_RES (21), (22), (23), (24): Xaa is A or G or is absent
RXGXSEVVMDSMEGIXXXXXXXXXMIQITINSLRTPV

SEQ ID NO: 75541 - protein, 36 aa, Artificial Sequence
  GFR-binding peptide
  MOD_RES (32), (33): Xaa is C or S
SRVVMNSMEGLIVNSSDDMIQVTINSLKTPAXXPKP

SEQ ID NO: 75542 - protein, 43 aa, Artificial Sequence; identical to SEQ ID NO: 18079
  GFR-binding peptide
  MOD_RES (2), (4), (38): Xaa is C or S
  MOD_RES (16), (17), (18), (19), (20): Xaa is A or G
  MOD_RES (21), (22), (23), (24): Xaa is A or G or is absent

SEQ ID NO: 75543 - protein, 33 aa, Artificial Sequence; identical to SEQ ID NO: 47912
  GFR-binding peptide
  MOD_RES (33), (33): Xaa is C or S
  MOD_RES (11), (12), (13), (14), (15): Xaa is A or G
  MOD_RES (16), (17), (18), (19): Xaa is A or G or is absent

SEQ ID NO: 75544 - protein, 34 aa, Artificial Sequence
  GFR-binding peptide
  MOD_RES (2), (4): Xaa is C or S
SXKXSKVVMSMEGLVKPTRGVMIQITINSLDQPV

SEQ ID NO: 75545 - protein, 37 aa, Artificial Sequence; identical to SEQ ID NO: 18080
  GFR-binding peptide
  MOD_RES (2), (4): Xaa is C or S

SEQ ID NO: 75546 - protein, 40 aa, Artificial Sequence
  GFR-binding peptide
  MOD_RES (2), (34), (35): Xaa is C or S
GXRDVVMGSMEGIIIQQKDNMIQMTINSMKTPTXXPGASG

SEQ ID NO: 75547 - protein, 38 aa, Artificial Sequence
  GFR-binding peptide
  MOD_RES (1), (3), (34), (35): Xaa is C or S
XGXEEVIMSMEGILLVRGNDMIQMTINSTKVPAXXTSP

SEQ ID NO: 75548 - protein, 40 aa, Artificial Sequence; identical to SEQ ID NO: 18083
  GFR-binding peptide
  MOD_RES (2), (39): Xaa is C or S
  MOD_RES (15), (16), (17), (18), (19): Xaa is A or G
  MOD_RES (20), (21), (22), (23): Xaa is A or G or is absent

SEQ ID NO: 75549 - protein, 40 aa, Artificial Sequence
  GFR-binding peptide
  MOD_RES (1), (3), (35), (36): Xaa is C or S
XGXAEVVMDSMEGLVVNNAADMIQITINSLRAPVXXSAPA

SEQ ID NO: 75550 - protein, 39 aa, Artificial Sequence; identical to SEQ ID NO: 18084
  GFR-binding peptide
  MOD_RES (33), (33): Xaa is C or S
  MOD_RES (11), (12), (13), (14), (15): Xaa is A or G
  MOD_RES (16), (17), (18), (19): Xaa is A or G or is absent

SEQ ID NO: 75551 - protein, 35 aa, Artificial Sequence
  GFR-binding peptide
  MOD_RES (1), (32), (33): Xaa is C or S
XSKVIMSMEGLIKPTKGIMIQITINSLDQSVXXPS

SEQ ID NO: 75552 - protein, 39 aa, Artificial Sequence
  GFR-binding peptide
  MOD_RES (2), (4), (38), (39): Xaa is C or S
  MOD_RES (16), (17), (18), (19), (20): Xaa is A or G
  MOD_RES (21), (22), (23), (24): Xaa is A or G or is absent
RXGXAEVVMDSMEGIXXXXXXXXXMIQITINSLRAPVXX

SEQ ID NO: 75553 - protein, 31 aa, Artificial Sequence
  GFR-binding peptide
RDVVMGSMEGLIIQQKDNMIQMTINSMKTPT

SEQ ID NO: 75554 - protein, 40 aa, Artificial Sequence; identical to SEQ ID NO: 18085
  GFR-binding peptide
  MOD_RES (2), (4): Xaa is C or S
  MOD_RES (17), (18), (19), (20), (21): Xaa is A or G
  MOD_RES (22), (23), (24), (25): Xaa is A or G or is absent

SEQ ID NO: 75555 - protein, 31 aa, Artificial Sequence
  GFR-binding peptide
  MOD_RES (31), (31): Xaa is C or S
DVVMGSMEGLIIQQKDNMIQMTINSMKTPTX

SEQ ID NO: 75556 - protein, 37 aa, Artificial Sequence
  GFR-binding peptide
  MOD_RES (1), (33), (34): Xaa is C or S
XAEVVMDSMEGIVVNNAADMIQITINSLRAPVXXSAP

SEQ ID NO: 75557 - protein, 38 aa, Artificial Sequence; identical to SEQ ID NO: 18086
  GFR-binding peptide
  MOD_RES (1), (3): Xaa is C or S

SEQ ID NO: 75558 - protein, 36 aa, Artificial Sequence; identical to SEQ ID NO: 50471
  GFR-binding peptide
  MOD_RES (1), (3), (36): Xaa is C or S
  MOD_RES (14), (15), (16), (17), (18): Xaa is A or G
  MOD_RES (19), (20), (21), (22): Xaa is A or G or is absent

SEQ ID NO: 75559 - protein, 42 aa, Artificial Sequence; identical to SEQ ID NO: 18088
  GFR-binding peptide
  MOD_RES (1), (3), (37): Xaa is C or S
  MOD_RES (15), (16), (17), (18), (19): Xaa is A or G
  MOD_RES (20), (21), (22), (23): Xaa is A or G or is absent

SEQ ID NO: 75560 - protein, 34 aa, Artificial Sequence
  GFR-binding peptide
  MOD_RES (34), (34): Xaa is C or S
  MOD_RES (12), (13), (14), (15), (16): Xaa is A or G
  MOD_RES (17), (18), (19), (20): Xaa is A or G or is absent
AEVVMDSMEGLXXXXXXXXXMIQITINSLRAPVX

SEQ ID NO: 75561 - protein, 38 aa, Artificial Sequence; identical to SEQ ID NO: 18090
  GFR-binding peptide
  MOD_RES (1), (3): Xaa is C or S
  MOD_RES (16), (17), (18), (19), (20): Xaa is A or G
  MOD_RES (21), (22), (23), (24): Xaa is A or G or is absent

SEQ ID NO: 75562 - protein, 37 aa, Artificial Sequence
  GFR-binding peptide
  MOD_RES (2), (4), (36), (37): Xaa is C or S
HXGXSRVVMNSMEGLIVNSSDDMIQVTINSLKTPAXX

SEQ ID NO: 75563 - protein, 33 aa, Artificial Sequence; identical to SEQ ID NO: 47933
  GFR-binding peptide
  MOD_RES (1), (3): Xaa is C or S

SEQ ID NO: 75564 - protein, 34 aa, Artificial Sequence
  GFR-binding peptide
  MOD_RES (33), (34): Xaa is C or S
  MOD_RES (11), (12), (13), (14), (15): Xaa is A or G
  MOD_RES (16), (17), (18), (19): Xaa is A or G or is absent
SRVIMSMEGLXXXXXXXXXMIQITINSLAQPVXX

SEQ ID NO: 75565 - protein, 34 aa, Artificial Sequence
  GFR-binding peptide
  MOD_RES (2), (34): Xaa is C or S
GXAEVVMDSMEGLVVNNAADMIQITINSLRAPVX

SEQ ID NO: 75566 - protein, 39 aa, Artificial Sequence; identical to SEQ ID NO: 18096
  GFR-binding peptide
  MOD_RES (34), (34): Xaa is C or S
  MOD_RES (12), (13), (14), (15), (16): Xaa is A or G
  MOD_RES (17), (18), (19), (20): Xaa is A or G or is absent

SEQ ID NO: 75567 - protein, 35 aa, Artificial Sequence
  GFR-binding peptide
  MOD_RES (1), (3): Xaa is C or S
  MOD_RES (14), (15), (16), (17), (18): Xaa is A or G
  MOD_RES (19), (20), (21), (22): Xaa is A or G or is absent
XGXEEVIMSMEGLXXXXXXXXXMIQMTINSTKVPA

SEQ ID NO: 75568 - protein, 39 aa, Artificial Sequence
  GFR-binding peptide
  MOD_RES (1), (3), (35), (36): Xaa is C or S
XGXSEVVMDSMEGLVVNNASDMIQITINSLRTPVXXTPP

SEQ ID NO: 75569 - protein, 32 aa, Artificial Sequence; identical to SEQ ID NO: 18098
  GFR-binding peptide
  MOD_RES (11), (12), (13), (14), (15): Xaa is A or G
  MOD_RES (16), (17), (18), (19): Xaa is A or G or is absent

SEQ ID NO: 75570 - protein, 34 aa, Artificial Sequence
  GFR-binding peptide
  MOD_RES (2), (4): Xaa is C or S
SXKXSKVIMSMEGLIKPTKGIMIQITINSLDQSV

SEQ ID NO: 75571 - protein, 33 aa, Artificial Sequence
  GFR-binding peptide
  MOD_RES (32), (33): Xaa is C or S
RDVVMGSMEGIIIQQKDNMIQMTINSMKTPTXX

SEQ ID NO: 75572 - protein, 36 aa, Artificial Sequence
  GFR-binding peptide
  MOD_RES (2), (4): Xaa is C or S
  MOD_RES (15), (16), (17), (18), (19): Xaa is A or G
  MOD_RES (20), (21), (22), (23): Xaa is A or G or is absent
LXGXEEVIMSMEGIXXXXXXXXXMIQMTINSTKVPA

SEQ ID NO: 75573 - protein, 32 aa, Artificial Sequence
  GFR-binding peptide
  MOD_RES (11), (12), (13), (14), (15): Xaa is A or G
  MOD_RES (16), (17), (18), (19): Xaa is A or G or is absent
RVVMNSMEGLXXXXXXXXXMIQVTINSLKTPA

SEQ ID NO: 75574 - protein, 36 aa, Artificial Sequence; identical to SEQ ID NO: 18102
  GFR-binding peptide

SEQ ID NO: 75575 - protein, 31 aa, Artificial Sequence
  GFR-binding peptide
  MOD_RES (1), (1): Xaa is C or S
XSRVIMSMEGLVKPKRGVMIQITINSLAQPV

SEQ ID NO: 75576 - protein, 39 aa, Artificial Sequence
  GFR-binding peptide
  MOD_RES (2), (4), (35), (36): Xaa is C or S
SXKXSRVIMSMEGLVKPKRGVMIQITINSLAQPVXXPAA

SEQ ID NO: 75577 - protein, 36 aa, Artificial Sequence
  GFR-binding peptide
  MOD_RES (2), (36): Xaa is C or S
  MOD_RES (14), (15), (16), (17), (18): Xaa is A or G
  MOD_RES (19), (20), (21), (22): Xaa is A or G or is absent
GXRDVVMGSMEGLXXXXXXXXXMIQMTINSMKTPTX

SEQ ID NO: 75578 - protein, 43 aa, Artificial Sequence; identical to SEQ ID NO: 18105
  GFR-binding peptide
  MOD_RES (2), (39): Xaa is C or S
  MOD_RES (15), (16), (17), (18), (19): Xaa is A or G
  MOD_RES (20), (21), (22), (23): Xaa is A or G or is absent

SEQ ID NO: 75579 - protein, 44 aa, Artificial Sequence; identical to SEQ ID NO: 18107
  GFR-binding peptide
  MOD_RES (2), (4), (41): Xaa is C or S

SEQ ID NO: 75580 - protein, 37 aa, Artificial Sequence; identical to SEQ ID NO: 18109
  GFR-binding peptide
  MOD_RES (1), (35): Xaa is C or S
  MOD_RES (13), (14), (15), (16), (17): Xaa is A or G
  MOD_RES (18), (19), (20), (21): Xaa is A or G or is absent

SEQ ID NO: 75581 - protein, 35 aa, Artificial Sequence; identical to SEQ ID NO: 50509
  GFR-binding peptide
  MOD_RES (2), (33), (34): Xaa is C or S

SEQ ID NO: 75582 - protein, 38 aa, Artificial Sequence; identical to SEQ ID NO: 18111
  GFR-binding peptide
  MOD_RES (1), (3), (37): Xaa is C or S

SEQ ID NO: 75583 - protein, 39 aa, Artificial Sequence
  GFR-binding peptide
  MOD_RES (1), (3), (34), (35): Xaa is C or S
XKXSKVIMSMEGLIKPTKGIMIQITINSLDQSVXXPSAS

SEQ ID NO: 75584 - protein, 39 aa, Artificial Sequence
  GFR-binding peptide
  MOD_RES (33), (34): Xaa is C or S
  MOD_RES (11), (12), (13), (14), (15): Xaa is A or G
  MOD_RES (16), (17), (18), (19): Xaa is A or G or is absent
EVVMDSMEGIXXXXXXXXXMIQITINSLRTPVXXTPPTS

SEQ ID NO: 75585 - protein, 36 aa, Artificial Sequence
  GFR-binding peptide
  MOD_RES (2), (36): Xaa is C or S
  MOD_RES (14), (15), (16), (17), (18): Xaa is A or G
  MOD_RES (19), (20), (21), (22): Xaa is A or G or is absent
GXSRVVMNSMEGLXXXXXXXXXMIQVTINSLKTPAX

SEQ ID NO: 75586 - protein, 39 aa, Artificial Sequence
  GFR-binding peptide
  MOD_RES (1), (3), (37), (38): Xaa is C or S
  MOD_RES (15), (16), (17), (18), (19): Xaa is A or G
  MOD_RES (20), (21), (22), (23): Xaa is A or G or is absent
XGXSRVVMNSMEGLXXXXXXXXXMIQVTINSLKTPAXXP

SEQ ID NO: 75587 - protein, 38 aa, Artificial Sequence; identical to SEQ ID NO: 50513
  GFR-binding peptide
  MOD_RES (2), (35), (36): Xaa is C or S
  MOD_RES (13), (14), (15), (16), (17): Xaa is A or G
  MOD_RES (18), (19), (20), (21): Xaa is A or G or is absent

SEQ ID NO: 75588 - protein, 36 aa, Artificial Sequence; identical to SEQ ID NO: 18115
  GFR-binding peptide
  MOD_RES (35), (35): Xaa is C or S
  MOD_RES (11), (12), (13), (14), (15): Xaa is A or G
  MOD_RES (16), (17), (18), (19): Xaa is A or G or is absent

SEQ ID NO: 75589 - protein, 41 aa, Artificial Sequence; identical to SEQ ID NO: 18116
  GFR-binding peptide
  MOD_RES (2), (4), (41): Xaa is C or S

SEQ ID NO: 75590 - protein, 39 aa, Artificial Sequence
  GFR-binding peptide
  MOD_RES (1), (35), (36): Xaa is C or S
  MOD_RES (13), (14), (15), (16), (17): Xaa is A or G
  MOD_RES (18), (19), (20), (21): Xaa is A or G or is absent
XAEVVMDSMEGLXXXXXXXXXMIQITINSLRAPVXXSAP

SEQ ID NO: 75591 - protein, 39 aa, Artificial Sequence
  GFR-binding peptide
  MOD_RES (2), (36), (37): Xaa is C or S
  MOD_RES (14), (15), (16), (17), (18): Xaa is A or G
  MOD_RES (19), (20), (21), (22): Xaa is A or G or is absent
GXAEVVMDSMEGIXXXXXXXXXMIQITINSLRAPVXXSA

SEQ ID NO: 75592 - protein, 42 aa, Artificial Sequence; identical to SEQ ID NO: 50517
  GFR-binding peptide
  MOD_RES (1), (3), (36), (37): Xaa is C or S
  MOD_RES (14), (15), (16), (17), (18): Xaa is A or G
  MOD_RES (19), (20), (21), (22): Xaa is A or G or is absent

SEQ ID NO: 75593 - protein, 38 aa, Artificial Sequence
  GFR-binding peptide
  MOD_RES (33), (34): Xaa is C or S
  MOD_RES (11), (12), (13), (14), (15): Xaa is A or G
  MOD_RES (16), (17), (18), (19): Xaa is A or G or is absent
SKVIMSMEGLXXXXXXXXXMIQITINSLDQSVXXPSAS

SEQ ID NO: 75594 - protein, 34 aa, Artificial Sequence; identical to SEQ ID NO: 50519
  GFR-binding peptide
  MOD_RES (33), (34): Xaa is C or S
  MOD_RES (11), (12), (13), (14), (15): Xaa is A or G
  MOD_RES (16), (17), (18), (19): Xaa is A or G or is absent

SEQ ID NO: 75595 - protein, 40 aa, Artificial Sequence
  GFR-binding peptide
  MOD_RES (2), (36), (37): Xaa is C or S
  MOD_RES (14), (15), (16), (17), (18): Xaa is A or G
  MOD_RES (19), (20), (21), (22): Xaa is A or G or is absent
GXSRVVMNSMEGLXXXXXXXXXMIQVTINSLKTPAXXPKP

SEQ ID NO: 75596 - protein, 44 aa, Artificial Sequence
  GFR-binding peptide
  MOD_RES (2), (4), (38), (39): Xaa is C or S
  MOD_RES (16), (17), (18), (19), (20): Xaa is A or G
  MOD_RES (21), (22), (23), (24): Xaa is A or G or is absent
RXGXSEVVMDSMEGIXXXXXXXXXMIQITINSLRTPVXXTPPTS

SEQ ID NO: 75597 - protein, 38 aa, Artificial Sequence; identical to SEQ ID NO: 18122
  GFR-binding peptide
  MOD_RES (2), (4), (38): Xaa is C or S
  MOD_RES (16), (17), (18), (19), (20): Xaa is A or G
  MOD_RES (21), (22), (23), (24): Xaa is A or G or is absent

SEQ ID NO: 75598 - protein, 36 aa, Artificial Sequence
  GFR-binding peptide
  MOD_RES (31), (32): Xaa is C or S
SRVIMSMEGLVKPKRGVMIQITINSLAQPVXXPAAS

SEQ ID NO: 75599 - protein, 38 aa, Artificial Sequence
  GFR-binding peptide
  MOD_RES (34), (35): Xaa is C or S
  MOD_RES (12), (13), (14), (15), (16): Xaa is A or G
  MOD_RES (17), (18), (19), (20): Xaa is A or G or is absent
RDVVMGSMEGLXXXXXXXXXMIQMTINSMKTPTXXPGA

SEQ ID NO: 75600 - protein, 38 aa, Artificial Sequence; identical to SEQ ID NO: 50524
  GFR-binding peptide
  MOD_RES (33), (34): Xaa is C or S
  MOD_RES (11), (12), (13), (14), (15): Xaa is A or G
  MOD_RES (16), (17), (18), (19): Xaa is A or G or is absent

SEQ ID NO: 75601 - protein, 37 aa, Artificial Sequence
  GFR-binding peptide
  MOD_RES (1), (32), (33): Xaa is C or S
XEEVIMSMEGLLLVRGNDMIQMTINSTKVPAXXTSPV

SEQ ID NO: 75602 - protein, 35 aa, Artificial Sequence
  GFR-binding peptide
  MOD_RES (1), (32), (33): Xaa is C or S
XSRVIMSMEGLVKPKRGVMIQITINSLAQPVXXPA

SEQ ID NO: 75603 - protein, 30 aa, Artificial Sequence
  GFR-binding peptide
EVVMDSMEGIVVNNAADMIQITINSLRAPV

SEQ ID NO: 75604 - protein, 33 aa, Artificial Sequence
  GFR-binding peptide
  MOD_RES (1), (32), (33): Xaa is C or S
XEEVIMSMEGILLVRGNDMIQMTINSTKVPAXX

SEQ ID NO: 75605 - protein, 44 aa, Artificial Sequence; identical to SEQ ID NO: 18124
  GFR-binding peptide
  MOD_RES (2), (4), (41): Xaa is C or S
  MOD_RES (17), (18), (19), (20), (21): Xaa is A or G
  MOD_RES (22), (23), (24), (25): Xaa is A or G or is absent

SEQ ID NO: 75606 - protein, 34 aa, Artificial Sequence
  GFR-binding peptide
  MOD_RES (31), (32): Xaa is C or S
EEVIMSMEGILLVRGNDMIQMTINSTKVPAXXTS

SEQ ID NO: 75607 - protein, 37 aa, Artificial Sequence; identical to SEQ ID NO: 18127
  GFR-binding peptide
  MOD_RES (1), (3): Xaa is C or S

SEQ ID NO: 75608 - protein, 38 aa, Artificial Sequence
  GFR-binding peptide
  MOD_RES (2), (4), (35), (36): Xaa is C or S
LXGXEEVIMSMEGLLLVRGNDMIQMTINSTKVPAXXTS

SEQ ID NO: 75609 - protein, 40 aa, Artificial Sequence; identical to SEQ ID NO: 18128
  GFR-binding peptide
  MOD_RES (2), (4), (38): Xaa is C or S
  MOD_RES (16), (17), (18), (19), (20): Xaa is A or G
  MOD_RES (21), (22), (23), (24): Xaa is A or G or is absent

SEQ ID NO: 75610 - protein, 39 aa, Artificial Sequence
  GFR-binding peptide
  MOD_RES (33), (34): Xaa is C or S
  MOD_RES (11), (12), (13), (14), (15): Xaa is A or G
  MOD_RES (16), (17), (18), (19): Xaa is A or G or is absent
RVVMNSMEGIXXXXXXXXXMIQVTINSLKTPAXXPKPVH

SEQ ID NO: 75611 - protein, 44 aa, Artificial Sequence; identical to SEQ ID NO: 18130
  GFR-binding peptide
  MOD_RES (2), (4), (38): Xaa is C or S
  MOD_RES (16), (17), (18), (19), (20): Xaa is A or G
  MOD_RES (21), (22), (23), (24): Xaa is A or G or is absent

SEQ ID NO: 75612 - protein, 41 aa, Artificial Sequence
  GFR-binding peptide
  MOD_RES (2), (4), (36), (37): Xaa is C or S
RXGXSEVVMDSMEGIVVNNASDMIQITINSLRTPVXXTPPT

SEQ ID NO: 75613 - protein, 40 aa, Artificial Sequence; identical to SEQ ID NO: 18133
  GFR-binding peptide
  MOD_RES (34), (34): Xaa is C or S

SEQ ID NO: 75614 - protein, 41 aa, Artificial Sequence
  GFR-binding peptide
  MOD_RES (2), (4), (38), (39): Xaa is C or S
  MOD_RES (16), (17), (18), (19), (20): Xaa is A or G
  MOD_RES (21), (22), (23), (24): Xaa is A or G or is absent
SXGXRDVVMGSMEGIXXXXXXXXXMIQMTINSMKTPTXXPG

SEQ ID NO: 75615 - protein, 40 aa, Artificial Sequence
  GFR-binding peptide
  MOD_RES (2), (4), (38), (39): Xaa is C or S
  MOD_RES (16), (17), (18), (19), (20): Xaa is A or G
  MOD_RES (21), (22), (23), (24): Xaa is A or G or is absent
RXGXAEVVMDSMEGLXXXXXXXXXMIQITINSLRAPVXXS

SEQ ID NO: 75616 - protein, 40 aa, Artificial Sequence; identical to SEQ ID NO: 18135
  GFR-binding peptide
  MOD_RES (2), (36): Xaa is C or S

SEQ ID NO: 75617 - protein, 41 aa, Artificial Sequence; identical to SEQ ID NO: 18137
  GFR-binding peptide
  MOD_RES (1), (38): Xaa is C or S

SEQ ID NO: 75618 - protein, 33 aa, Artificial Sequence
  GFR-binding peptide
  MOD_RES (33), (33): Xaa is C or S
  MOD_RES (11), (12), (13), (14), (15): Xaa is A or G
  MOD_RES (16), (17), (18), (19): Xaa is A or G or is absent
DVVMGSMEGIXXXXXXXXXMIQMTINSMKTPTX

SEQ ID NO: 75619 - protein, 43 aa, Artificial Sequence; identical to SEQ ID NO: 18138
  GFR-binding peptide
  MOD_RES (1), (3), (40): Xaa is C or S
  MOD_RES (16), (17), (18), (19), (20): Xaa is A or G
  MOD_RES (21), (22), (23), (24): Xaa is A or G or is absent

SEQ ID NO: 75620 - protein, 41 aa, Artificial Sequence; identical to SEQ ID NO: 18139
  GFR-binding peptide
  MOD_RES (1), (38): Xaa is C or S
  MOD_RES (14), (15), (16), (17), (18): Xaa is A or G
  MOD_RES (19), (20), (21), (22): Xaa is A or G or is absent

SEQ ID NO: 75621 - protein, 39 aa, Artificial Sequence
  GFR-binding peptide
  MOD_RES (34), (35): Xaa is C or S
  MOD_RES (12), (13), (14), (15), (16): Xaa is A or G
  MOD_RES (17), (18), (19), (20): Xaa is A or G or is absent
RDVVMGSMEGIXXXXXXXXXMIQMTINSMKTPTXXPGAS

SEQ ID NO: 75622 - protein, 40 aa, Artificial Sequence
  GFR-binding peptide
  MOD_RES (2), (4), (36), (37): Xaa is C or S
SXGXRDVVMGSMEGLIIQQKDNMIQMTINSMKTPTXXPGA

SEQ ID NO: 75623 - protein, 37 aa, Artificial Sequence
  GFR-binding peptide
  MOD_RES (33), (34): Xaa is C or S
  MOD_RES (11), (12), (13), (14), (15): Xaa is A or G
  MOD_RES (16), (17), (18), (19): Xaa is A or G or is absent
SRVIMSMEGLXXXXXXXXXMIQITINSLAQPVXXPAA

SEQ ID NO: 75624 - protein, 38 aa, Artificial Sequence
  GFR-binding peptide
  MOD_RES (2), (4), (35), (36): Xaa is C or S
LXGXEEVIMSMEGILLVRGNDMIQMTINSTKVPAXXTS

SEQ ID NO: 75625 - protein, 32 aa, Artificial Sequence; identical to SEQ ID NO: 18141
  GFR-binding peptide

SEQ ID NO: 75626 - protein, 36 aa, Artificial Sequence
  GFR-binding peptide
  MOD_RES (2), (4), (35), (36): Xaa is C or S
LXGXEEVIMSMEGILLVRGNDMIQMTINSTKVPAXX

SEQ ID NO: 75627 - protein, 39 aa, Artificial Sequence
  GFR-binding peptide
  MOD_RES (2), (4), (38), (39): Xaa is C or S
  MOD_RES (16), (17), (18), (19), (20): Xaa is A or G
  MOD_RES (21), (22), (23), (24): Xaa is A or G or is absent
SXGXRDVVMGSMEGLXXXXXXXXXMIQMTINSMKTPTXX

SEQ ID NO: 75628 - protein, 37 aa, Artificial Sequence
  GFR-binding peptide
  MOD_RES (1), (3), (34), (35): Xaa is C or S
XKXSRVIMSMEGLVKPKRGVMIQITINSLAQPVXXPA

SEQ ID NO: 75629 - protein, 36 aa, Artificial Sequence; identical to SEQ ID NO: 48006
  GFR-binding peptide
  MOD_RES (34), (35): Xaa is C or S
  MOD_RES (12), (13), (14), (15), (16): Xaa is A or G
  MOD_RES (17), (18), (19), (20): Xaa is A or G or is absent

SEQ ID NO: 75630 - protein, 41 aa, Artificial Sequence
  GFR-binding peptide
  MOD_RES (2), (4), (38), (39): Xaa is C or S
  MOD_RES (16), (17), (18), (19), (20): Xaa is A or G
  MOD_RES (21), (22), (23), (24): Xaa is A or G or is absent
RXGXAEVVMDSMEGLXXXXXXXXXMIQITINSLRAPVXXSA

SEQ ID NO: 75631 - protein, 33 aa, Artificial Sequence; identical to SEQ ID NO: 18143
  GFR-binding peptide
  MOD_RES (11), (12), (13), (14), (15): Xaa is A or G
  MOD_RES (16), (17), (18), (19): Xaa is A or G or is absent

SEQ ID NO: 75632 - protein, 32 aa, Artificial Sequence
  GFR-binding peptide
  MOD_RES (32), (32): Xaa is C or S
AEVVMDSMEGLVVNNAADMIQITINSLRAPVX

SEQ ID NO: 75633 - protein, 44 aa, Artificial Sequence; identical to SEQ ID NO: 18145
  GFR-binding peptide
  MOD_RES (2), (4), (38): Xaa is C or S

SEQ ID NO: 75634 - protein, 37 aa, Artificial Sequence; identical to SEQ ID NO: 50563
  GFR-binding peptide
  MOD_RES (2), (4): Xaa is C or S
  MOD_RES (16), (17), (18), (19), (20): Xaa is A or G
  MOD_RES (21), (22), (23), (24): Xaa is A or G or is absent

SEQ ID NO: 75635 - protein, 38 aa, Artificial Sequence; identical to SEQ ID NO: 50565
  GFR-binding peptide
  MOD_RES (1), (32), (33): Xaa is C or S

SEQ ID NO: 75636 - protein, 36 aa, Artificial Sequence
  GFR-binding peptide
  MOD_RES (2), (4), (35), (36): Xaa is C or S
SXKXSKVIMSMEGLIKPTKGIMIQITINSLDQSVXX

SEQ ID NO: 75637 - protein, 34 aa, Artificial Sequence
  GFR-binding peptide
  MOD_RES (1), (33), (34): Xaa is C or S
XSEVVMDSMEGLVVNNASDMIQITINSLRTPVXX

SEQ ID NO: 75638 - protein, 36 aa, Artificial Sequence; identical to SEQ ID NO: 18146
  GFR-binding peptide
  MOD_RES (1), (1): Xaa is C or S

SEQ ID NO: 75639 - protein, 40 aa, Artificial Sequence
  GFR-binding peptide
  MOD_RES (1), (35), (36): Xaa is C or S
  MOD_RES (13), (14), (15), (16), (17): Xaa is A or G
  MOD_RES (18), (19), (20), (21): Xaa is A or G or is absent
XRDVVMGSMEGIXXXXXXXXXMIQMTINSMKTPTXXPGAS

SEQ ID NO: 75640 - protein, 40 aa, Artificial Sequence; identical to SEQ ID NO: 18147
  GFR-binding peptide
  MOD_RES (1), (35): Xaa is C or S
  MOD_RES (13), (14), (15), (16), (17): Xaa is A or G
  MOD_RES (18), (19), (20), (21): Xaa is A or G or is absent

SEQ ID NO: 75641 - protein, 42 aa, Artificial Sequence; identical to SEQ ID NO: 18148
  GFR-binding peptide
  MOD_RES (2), (36): Xaa is C or S

SEQ ID NO: 75642 - protein, 34 aa, Artificial Sequence; identical to SEQ ID NO: 48023
  GFR-binding peptide
  MOD_RES (1), (34): Xaa is C or S
  MOD_RES (12), (13), (14), (15), (16): Xaa is A or G
  MOD_RES (17), (18), (19), (20): Xaa is A or G or is absent

SEQ ID NO: 75643 - protein, 39 aa, Artificial Sequence; identical to SEQ ID NO: 18150
  GFR-binding peptide
  MOD_RES (1), (3): Xaa is C or S
  MOD_RES (16), (17), (18), (19), (20): Xaa is A or G
  MOD_RES (21), (22), (23), (24): Xaa is A or G or is absent

SEQ ID NO: 75644 - protein, 38 aa, Artificial Sequence; identical to SEQ ID NO: 18151
  GFR-binding peptide
  MOD_RES (1), (3): Xaa is C or S

SEQ ID NO: 75645 - protein, 40 aa, Artificial Sequence; identical to SEQ ID NO: 18154
  GFR-binding peptide
  MOD_RES (1), (3), (40): Xaa is C or S
  MOD_RES (16), (17), (18), (19), (20): Xaa is A or G
  MOD_RES (21), (22), (23), (24): Xaa is A or G or is absent

SEQ ID NO: 75646 - protein, 39 aa, Artificial Sequence
  GFR-binding peptide
  MOD_RES (33), (34): Xaa is C or S
  MOD_RES (11), (12), (13), (14), (15): Xaa is A or G
  MOD_RES (16), (17), (18), (19): Xaa is A or G or is absent
DVVMGSMEGLXXXXXXXXXMIQMTINSMKTPTXXPGASG

SEQ ID NO: 75647 - protein, 36 aa, Artificial Sequence
  GFR-binding peptide
  MOD_RES (31), (32): Xaa is C or S
DVVMGSMEGLIIQQKDNMIQMTINSMKTPTXXPGAS

SEQ ID NO: 75648 - protein, 34 aa, Artificial Sequence
  GFR-binding peptide
  MOD_RES (1), (32), (33): Xaa is C or S
XSKVVMSMEGLVKPTRGVMIQITINSLDQPVXXP

SEQ ID NO: 75649 - protein, 39 aa, Artificial Sequence; identical to SEQ ID NO: 48032
  GFR-binding peptide
  MOD_RES (33), (34): Xaa is C or S
  MOD_RES (11), (12), (13), (14), (15): Xaa is A or G
  MOD_RES (16), (17), (18), (19): Xaa is A or G or is absent

SEQ ID NO: 75650 - protein, 40 aa, Artificial Sequence; identical to SEQ ID NO: 18158
  GFR-binding peptide
  MOD_RES (1), (3), (37): Xaa is C or S

SEQ ID NO: 75651 - protein, 33 aa, Artificial Sequence; identical to SEQ ID NO: 18159
  GFR-binding peptide
  MOD_RES (12), (13), (14), (15), (16): Xaa is A or G
  MOD_RES (17), (18), (19), (20): Xaa is A or G or is absent

SEQ ID NO: 75652 - protein, 43 aa, Artificial Sequence; identical to SEQ ID NO: 18160
  GFR-binding peptide
  MOD_RES (2), (4), (38): Xaa is C or S

SEQ ID NO: 75653 - protein, 30 aa, Artificial Sequence; identical to SEQ ID NO: 50580
  GFR-binding peptide

SEQ ID NO: 75654 - protein, 41 aa, Artificial Sequence
  GFR-binding peptide
  MOD_RES (2), (35), (36): Xaa is C or S
  MOD_RES (13), (14), (15), (16), (17): Xaa is A or G
  MOD_RES (18), (19), (20), (21): Xaa is A or G or is absent
KXSKVIMSMEGLXXXXXXXXXMIQITINSLDQSVXXPSASA

SEQ ID NO: 75655 - protein, 34 aa, Artificial Sequence; identical to SEQ ID NO: 48042
  GFR-binding peptide
  MOD_RES (2), (33), (34): Xaa is C or S

SEQ ID NO: 75656 - protein, 40 aa, Artificial Sequence
  GFR-binding peptide
  MOD_RES (1), (35), (36): Xaa is C or S
  MOD_RES (13), (14), (15), (16), (17): Xaa is A or G
  MOD_RES (18), (19), (20), (21): Xaa is A or G or is absent
XSEVVMDSMEGLXXXXXXXXXMIQITINSLRTPVXXTPPT

SEQ ID NO: 75657 - protein, 35 aa, Artificial Sequence; identical to SEQ ID NO: 50586
  GFR-binding peptide
  MOD_RES (1), (34), (35): Xaa is C or S
  MOD_RES (12), (13), (14), (15), (16): Xaa is A or G
  MOD_RES (17), (18), (19), (20): Xaa is A or G or is absent

SEQ ID NO: 75658 - protein, 37 aa, Artificial Sequence
  GFR-binding peptide
  MOD_RES (32), (33): Xaa is C or S
AEVVMDSMEGIVVNNAADMIQITINSLRAPVXXSAPA

SEQ ID NO: 75659 - protein, 39 aa, Artificial Sequence
  GFR-binding peptide
  MOD_RES (33), (34): Xaa is C or S
  MOD_RES (11), (12), (13), (14), (15): Xaa is A or G
  MOD_RES (16), (17), (18), (19): Xaa is A or G or is absent
EEVIMSMEGIXXXXXXXXXMIQMTINSTKVPAXXTSPVR

SEQ ID NO: 75660 - protein, 32 aa, Artificial Sequence; identical to SEQ ID NO: 50592
  GFR-binding peptide
  MOD_RES (2), (2): Xaa is C or S

SEQ ID NO: 75661 - protein, 35 aa, Artificial Sequence; identical to SEQ ID NO: 48047
  GFR-binding peptide
  MOD_RES (1), (34), (35): Xaa is C or S
  MOD_RES (12), (13), (14), (15), (16): Xaa is A or G
  MOD_RES (17), (18), (19), (20): Xaa is A or G or is absent

SEQ ID NO: 75662 - protein, 40 aa, Artificial Sequence; identical to SEQ ID NO: 18163
  GFR-binding peptide
  MOD_RES (34), (34): Xaa is C or S
  MOD_RES (12), (13), (14), (15), (16): Xaa is A or G
  MOD_RES (17), (18), (19), (20): Xaa is A or G or is absent

SEQ ID NO: 75663 - protein, 40 aa, Artificial Sequence; identical to SEQ ID NO: 50595
  GFR-binding peptide
  MOD_RES (2), (35), (36): Xaa is C or S
  MOD_RES (13), (14), (15), (16), (17): Xaa is A or G
  MOD_RES (18), (19), (20), (21): Xaa is A or G or is absent

SEQ ID NO: 75664 - protein, 37 aa, Artificial Sequence; identical to SEQ ID NO: 18164
  GFR-binding peptide
  MOD_RES (2), (36): Xaa is C or S
  MOD_RES (14), (15), (16), (17), (18): Xaa is A or G
  MOD_RES (19), (20), (21), (22): Xaa is A or G or is absent

SEQ ID NO: 75665 - protein, 43 aa, Artificial Sequence
  GFR-binding peptide
  MOD_RES (2), (4), (38), (39): Xaa is C or S
  MOD_RES (16), (17), (18), (19), (20): Xaa is A or G
  MOD_RES (21), (22), (23), (24): Xaa is A or G or is absent
RXGXSEVVMDSMEGIXXXXXXXXXMIQITINSLRTPVXXTPPT

SEQ ID NO: 75666 - protein, 40 aa, Artificial Sequence; identical to SEQ ID NO: 48052
  GFR-binding peptide
  MOD_RES (1), (3), (35), (36): Xaa is C or S

SEQ ID NO: 75667 - protein, 41 aa, Artificial Sequence; identical to SEQ ID NO: 18165
  GFR-binding peptide
  MOD_RES (1), (35): Xaa is C or S
  MOD_RES (13), (14), (15), (16), (17): Xaa is A or G
  MOD_RES (18), (19), (20), (21): Xaa is A or G or is absent

SEQ ID NO: 75668 - protein, 38 aa, Artificial Sequence; identical to SEQ ID NO: 48058
  GFR-binding peptide
  MOD_RES (2), (4), (38): Xaa is C or S
  MOD_RES (16), (17), (18), (19), (20): Xaa is A or G
  MOD_RES (21), (22), (23), (24): Xaa is A or G or is absent

SEQ ID NO: 75669 - protein, 36 aa, Artificial Sequence; identical to SEQ ID NO: 50602
  GFR-binding peptide
  MOD_RES (31), (32): Xaa is C or S

SEQ ID NO: 75670 - protein, 38 aa, Artificial Sequence; identical to SEQ ID NO: 18167
  GFR-binding peptide
  MOD_RES (35), (35): Xaa is C or S

SEQ ID NO: 75671 - protein, 40 aa, Artificial Sequence
  GFR-binding peptide
  MOD_RES (1), (35), (36): Xaa is C or S
  MOD_RES (13), (14), (15), (16), (17): Xaa is A or G
  MOD_RES (18), (19), (20), (21): Xaa is A or G or is absent
XSRVVMNSMEGLXXXXXXXXXMIQVTINSLKTPAXXPKPV

SEQ ID NO: 75672 - protein, 40 aa, Artificial Sequence
  GFR-binding peptide
  MOD_RES (2), (4), (36), (37): Xaa is C or S
RXGXSEVVMDSMEGIVVNNASDMIQITINSLRTPVXXTPP

SEQ ID NO: 75673 - protein, 38 aa, Artificial Sequence
  GFR-binding peptide
  MOD_RES (1), (3), (35), (36): Xaa is C or S
XGXAEVVMDSMEGLVVNNAADMIQITINSLRAPVXXSA

SEQ ID NO: 75674 - protein, 37 aa, Artificial Sequence; identical to SEQ ID NO: 48062
  GFR-binding peptide
  MOD_RES (2), (4), (37): Xaa is C or S
  MOD_RES (15), (16), (17), (18), (19): Xaa is A or G
  MOD_RES (20), (21), (22), (23): Xaa is A or G or is absent

SEQ ID NO: 75675 - protein, 36 aa, Artificial Sequence; identical to SEQ ID NO: 18170
  GFR-binding peptide
  MOD_RES (2), (36): Xaa is C or S
  MOD_RES (14), (15), (16), (17), (18): Xaa is A or G
  MOD_RES (19), (20), (21), (22): Xaa is A or G or is absent

SEQ ID NO: 75676 - protein, 35 aa, Artificial Sequence; identical to SEQ ID NO: 18171
  GFR-binding peptide
  MOD_RES (1), (1): Xaa is C or S

SEQ ID NO: 75677 - protein, 37 aa, Artificial Sequence
  GFR-binding peptide
  MOD_RES (1), (34), (35): Xaa is C or S
  MOD_RES (12), (13), (14), (15), (16): Xaa is A or G
  MOD_RES (17), (18), (19), (20): Xaa is A or G or is absent
XEEVIMSMEGLXXXXXXXXXMIQMTINSTKVPAXXTS

SEQ ID NO: 75678 - protein, 40 aa, Artificial Sequence; identical to SEQ ID NO: 18172
  GFR-binding peptide
  MOD_RES (2), (4), (38): Xaa is C or S

SEQ ID NO: 75679 - protein, 41 aa, Artificial Sequence; identical to SEQ ID NO: 18173
  GFR-binding peptide
  MOD_RES (1), (3), (37): Xaa is C or S

SEQ ID NO: 75680 - protein, 38 aa, Artificial Sequence; identical to SEQ ID NO: 18174
  GFR-binding peptide
  MOD_RES (2), (4): Xaa is C or S
  MOD_RES (17), (18), (19), (20), (21): Xaa is A or G
  MOD_RES (22), (23), (24), (25): Xaa is A or G or is absent

SEQ ID NO: 75681 - protein, 37 aa, Artificial Sequence; identical to SEQ ID NO: 50613
  GFR-binding peptide
  MOD_RES (1), (32), (33): Xaa is C or S

SEQ ID NO: 75682 - protein, 37 aa, Artificial Sequence
  GFR-binding peptide
  MOD_RES (34), (35): Xaa is C or S
  MOD_RES (12), (13), (14), (15), (16): Xaa is A or G
  MOD_RES (17), (18), (19), (20): Xaa is A or G or is absent
AEVVMDSMEGLXXXXXXXXXMIQITINSLRAPVXXSA

SEQ ID NO: 75683 - protein, 35 aa, Artificial Sequence
  GFR-binding peptide
  MOD_RES (2), (4): Xaa is C or S
HXGXSRVVMNSMEGLIVNSSDDMIQVTINSLKTPA

SEQ ID NO: 75684 - protein, 39 aa, Artificial Sequence; identical to SEQ ID NO: 18175
  GFR-binding peptide
  MOD_RES (35), (35): Xaa is C or S

SEQ ID NO: 75685 - protein, 40 aa, Artificial Sequence; identical to SEQ ID NO: 18176
  GFR-binding peptide
  MOD_RES (2), (39): Xaa is C or S

SEQ ID NO: 75686 - protein, 38 aa, Artificial Sequence; identical to SEQ ID NO: 18177
  GFR-binding peptide
  MOD_RES (2), (2): Xaa is C or S

SEQ ID NO: 75687 - protein, 35 aa, Artificial Sequence
  GFR-binding peptide
  MOD_RES (1), (33), (34): Xaa is C or S
XRDVVMGSMEGIIIQQKDNMIQMTINSMKTPTXXP

SEQ ID NO: 75688 - protein, 38 aa, Artificial Sequence; identical to SEQ ID NO: 18178
  GFR-binding peptide
  MOD_RES (1), (3), (37): Xaa is C or S
  MOD_RES (15), (16), (17), (18), (19): Xaa is A or G
  MOD_RES (20), (21), (22), (23): Xaa is A or G or is absent

SEQ ID NO: 75689 - protein, 39 aa, Artificial Sequence; identical to SEQ ID NO: 18180
  GFR-binding peptide
  MOD_RES (2), (4), (38): Xaa is C or S

SEQ ID NO: 75690 - protein, 35 aa, Artificial Sequence; identical to SEQ ID NO: 18181
  GFR-binding peptide
  MOD_RES (1), (35): Xaa is C or S
  MOD_RES (13), (14), (15), (16), (17): Xaa is A or G
  MOD_RES (18), (19), (20), (21): Xaa is A or G or is absent

SEQ ID NO: 75691 - protein, 38 aa, Artificial Sequence
  GFR-binding peptide
  MOD_RES (1), (3), (37), (38): Xaa is C or S
  MOD_RES (15), (16), (17), (18), (19): Xaa is A or G
  MOD_RES (20), (21), (22), (23): Xaa is A or G or is absent
XGXSEVVMDSMEGLXXXXXXXXXMIQITINSLRTPVXX

SEQ ID NO: 75692 - protein, 39 aa, Artificial Sequence
  GFR-binding peptide
  MOD_RES (2), (4), (37), (38): Xaa is C or S
  MOD_RES (15), (16), (17), (18), (19): Xaa is A or G
  MOD_RES (20), (21), (22), (23): Xaa is A or G or is absent
LXGXEEVIMSMEGIXXXXXXXXXMIQMTINSTKVPAXXT

SEQ ID NO: 75693 - protein, 39 aa, Artificial Sequence; identical to SEQ ID NO: 18183
  GFR-binding peptide
  MOD_RES (35), (35): Xaa is C or S

SEQ ID NO: 75694 - protein, 42 aa, Artificial Sequence; identical to SEQ ID NO: 18184
  GFR-binding peptide
  MOD_RES (1), (3), (37): Xaa is C or S

SEQ ID NO: 75695 - protein, 33 aa, Artificial Sequence; identical to SEQ ID NO: 48076
  GFR-binding peptide
  MOD_RES (2), (33): Xaa is C or S

SEQ ID NO: 75696 - protein, 40 aa, Artificial Sequence; identical to SEQ ID NO: 18186
  GFR-binding peptide
  MOD_RES (36), (36): Xaa is C or S

SEQ ID NO: 75697 - protein, 40 aa, Artificial Sequence; identical to SEQ ID NO: 18187
  GFR-binding peptide
  MOD_RES (1), (3), (40): Xaa is C or S

SEQ ID NO: 75698 - protein, 38 aa, Artificial Sequence; identical to SEQ ID NO: 18188
  GFR-binding peptide
  MOD_RES (1), (38): Xaa is C or S
  MOD_RES (14), (15), (16), (17), (18): Xaa is A or G
  MOD_RES (19), (20), (21), (22): Xaa is A or G or is absent

SEQ ID NO: 75699 - protein, 41 aa, Artificial Sequence; identical to SEQ ID NO: 18189
  GFR-binding peptide
  MOD_RES (2), (4), (41): Xaa is C or S

SEQ ID NO: 75700 - protein, 38 aa, Artificial Sequence
  GFR-binding peptide
  MOD_RES (1), (3), (37), (38): Xaa is C or S
  MOD_RES (15), (16), (17), (18), (19): Xaa is A or G
  MOD_RES (20), (21), (22), (23): Xaa is A or G or is absent
XGXAEVVMDSMEGIXXXXXXXXXMIQITINSLRAPVXX

SEQ ID NO: 75701 - protein, 30 aa, Artificial Sequence; identical to SEQ ID NO: 50627
  GFR-binding peptide

SEQ ID NO: 75702 - protein, 37 aa, Artificial Sequence; identical to SEQ ID NO: 18190
  GFR-binding peptide
  MOD_RES (1), (3), (37): Xaa is C or S
  MOD_RES (15), (16), (17), (18), (19): Xaa is A or G
  MOD_RES (20), (21), (22), (23): Xaa is A or G or is absent

SEQ ID NO: 75703 - protein, 42 aa, Artificial Sequence; identical to SEQ ID NO: 18191
  GFR-binding peptide
  MOD_RES (2), (4), (38): Xaa is C or S
  MOD_RES (16), (17), (18), (19), (20): Xaa is A or G
  MOD_RES (21), (22), (23), (24): Xaa is A or G or is absent

SEQ ID NO: 75704 - protein, 37 aa, Artificial Sequence; identical to SEQ ID NO: 18192
  GFR-binding peptide
  MOD_RES (37), (37): Xaa is C or S

SEQ ID NO: 75705 - protein, 33 aa, Artificial Sequence; identical to SEQ ID NO: 18193
  GFR-binding peptide
  MOD_RES (12), (13), (14), (15), (16): Xaa is A or G
  MOD_RES (17), (18), (19), (20): Xaa is A or G or is absent

SEQ ID NO: 75706 - protein, 33 aa, Artificial Sequence
  GFR-binding peptide
  MOD_RES (1), (32), (33): Xaa is C or S
XSRVIMSMEGLVKPKRGVMIQITINSLAQPVXX

SEQ ID NO: 75707 - protein, 39 aa, Artificial Sequence; identical to SEQ ID NO: 18195
  GFR-binding peptide
  MOD_RES (2), (4): Xaa is C or S
  MOD_RES (17), (18), (19), (20), (21): Xaa is A or G
  MOD_RES (22), (23), (24), (25): Xaa is A or G or is absent

SEQ ID NO: 75708 - protein, 35 aa, Artificial Sequence
  GFR-binding peptide
  MOD_RES (2), (2): Xaa is C or S
  MOD_RES (14), (15), (16), (17), (18): Xaa is A or G
  MOD_RES (19), (20), (21), (22): Xaa is A or G or is absent
GXAEVVMDSMEGLXXXXXXXXXMIQITINSLRAPV

SEQ ID NO: 75709 - protein, 36 aa, Artificial Sequence
  GFR-binding peptide
  MOD_RES (1), (33), (34): Xaa is C or S
XSEVVMDSMEGIVVNNASDMIQITINSLRTPVXXTP

SEQ ID NO: 75710 - protein, 36 aa, Artificial Sequence; identical to SEQ ID NO: 18196
  GFR-binding peptide
  MOD_RES (2), (2): Xaa is C or S

SEQ ID NO: 75711 - protein, 34 aa, Artificial Sequence; identical to SEQ ID NO: 48085
  GFR-binding peptide
  MOD_RES (33), (34): Xaa is C or S
  MOD_RES (11), (12), (13), (14), (15): Xaa is A or G
  MOD_RES (16), (17), (18), (19): Xaa is A or G or is absent

SEQ ID NO: 75712 - protein, 39 aa, Artificial Sequence
  GFR-binding peptide
  MOD_RES (1), (3), (37), (38): Xaa is C or S
  MOD_RES (15), (16), (17), (18), (19): Xaa is A or G
  MOD_RES (20), (21), (22), (23): Xaa is A or G or is absent
XGXSEVVMDSMEGLXXXXXXXXXMIQITINSLRTPVXXT

SEQ ID NO: 75713 - protein, 33 aa, Artificial Sequence; identical to SEQ ID NO: 18197
  GFR-binding peptide
  MOD_RES (12), (13), (14), (15), (16): Xaa is A or G
  MOD_RES (17), (18), (19), (20): Xaa is A or G or is absent

SEQ ID NO: 75714 - protein, 41 aa, Artificial Sequence; identical to SEQ ID NO: 48092
  GFR-binding peptide
  MOD_RES (2), (4), (35), (36): Xaa is C or S

SEQ ID NO: 75715 - protein, 36 aa, Artificial Sequence; identical to SEQ ID NO: 48093
  GFR-binding peptide
  MOD_RES (2), (4), (35), (36): Xaa is C or S

SEQ ID NO: 75716 - protein, 37 aa, Artificial Sequence; identical to SEQ ID NO: 18199
  GFR-binding peptide
  MOD_RES (34), (34): Xaa is C or S
  MOD_RES (12), (13), (14), (15), (16): Xaa is A or G
  MOD_RES (17), (18), (19), (20): Xaa is A or G or is absent

SEQ ID NO: 75717 - protein, 38 aa, Artificial Sequence; identical to SEQ ID NO: 50642
  GFR-binding peptide
  MOD_RES (2), (33), (34): Xaa is C or S

SEQ ID NO: 75718 - protein, 37 aa, Artificial Sequence
  GFR-binding peptide
  MOD_RES (1), (3), (36), (37): Xaa is C or S
  MOD_RES (14), (15), (16), (17), (18): Xaa is A or G
  MOD_RES (19), (20), (21), (22): Xaa is A or G or is absent
XGXEEVIMSMEGLXXXXXXXXXMIQMTINSTKVPAXX

SEQ ID NO: 75719 - protein, 38 aa, Artificial Sequence; identical to SEQ ID NO: 18202
  GFR-binding peptide
  MOD_RES (37), (37): Xaa is C or S
  MOD_RES (13), (14), (15), (16), (17): Xaa is A or G
  MOD_RES (18), (19), (20), (21): Xaa is A or G or is absent

SEQ ID NO: 75720 - protein, 40 aa, Artificial Sequence
  GFR-binding peptide
  MOD_RES (2), (36), (37): Xaa is C or S
  MOD_RES (14), (15), (16), (17), (18): Xaa is A or G
  MOD_RES (19), (20), (21), (22): Xaa is A or G or is absent
GXRDVVMGSMEGIXXXXXXXXXMIQMTINSMKTPTXXPGA

SEQ ID NO: 75721 - protein, 35 aa, Artificial Sequence
  GFR-binding peptide
  MOD_RES (32), (33): Xaa is C or S
RDVVMGSMEGIIIQQKDNMIQMTINSMKTPTXXPG

SEQ ID NO: 75722 - protein, 38 aa, Artificial Sequence
  GFR-binding peptide
  MOD_RES (1), (33), (34): Xaa is C or S
XSEVVMDSMEGIVVNNASDMIQITINSLRTPVXXTPPT

SEQ ID NO: 75723 - protein, 41 aa, Artificial Sequence; identical to SEQ ID NO: 18204
  GFR-binding peptide
  MOD_RES (1), (3), (40): Xaa is C or S

SEQ ID NO: 75724 - protein, 39 aa, Artificial Sequence
  GFR-binding peptide
  MOD_RES (1), (3), (35), (36): Xaa is C or S
XGXRDVVMGSMEGIIIQQKDNMIQMTINSMKTPTXXPGA

SEQ ID NO: 75725 - protein, 34 aa, Artificial Sequence; identical to SEQ ID NO: 18206
  GFR-binding peptide
  MOD_RES (1), (1): Xaa is C or S

SEQ ID NO: 75726 - protein, 33 aa, Artificial Sequence; identical to SEQ ID NO: 18208
  GFR-binding peptide

SEQ ID NO: 75727 - protein, 42 aa, Artificial Sequence; identical to SEQ ID NO: 18209
  GFR-binding peptide
  MOD_RES (1), (3), (37): Xaa is C or S
  MOD_RES (15), (16), (17), (18), (19): Xaa is A or G
  MOD_RES (20), (21), (22), (23): Xaa is A or G or is absent

SEQ ID NO: 75728 - protein, 39 aa, Artificial Sequence; identical to SEQ ID NO: 18210
  GFR-binding peptide
  MOD_RES (2), (4): Xaa is C or S

SEQ ID NO: 75729 - protein, 30 aa, Artificial Sequence
  GFR-binding peptide
EVVMDSMEGLVVNNASDMIQITINSLRTPV

SEQ ID NO: 75730 - protein, 38 aa, Artificial Sequence; identical to SEQ ID NO: 18212
  GFR-binding peptide
  MOD_RES (33), (33): Xaa is C or S
  MOD_RES (11), (12), (13), (14), (15): Xaa is A or G
  MOD_RES (16), (17), (18), (19): Xaa is A or G or is absent

SEQ ID NO: 75731 - protein, 34 aa, Artificial Sequence
  GFR-binding peptide
  MOD_RES (33), (34): Xaa is C or S
  MOD_RES (11), (12), (13), (14), (15): Xaa is A or G
  MOD_RES (16), (17), (18), (19): Xaa is A or G or is absent
DVVMGSMEGIXXXXXXXXXMIQMTINSMKTPTXX

SEQ ID NO: 75732 - protein, 36 aa, Artificial Sequence
  GFR-binding peptide
  MOD_RES (1), (3), (35), (36): Xaa is C or S
XGXAEVVMDSMEGLVVNNAADMIQITINSLRAPVXX

SEQ ID NO: 75733 - protein, 36 aa, Artificial Sequence
  GFR-binding peptide
  MOD_RES (2), (36): Xaa is C or S
  MOD_RES (14), (15), (16), (17), (18): Xaa is A or G
  MOD_RES (19), (20), (21), (22): Xaa is A or G or is absent
GXSEVVMDSMEGLXXXXXXXXXMIQITINSLRTPVX

SEQ ID NO: 75734 - protein, 38 aa, Artificial Sequence; identical to SEQ ID NO: 48114
  GFR-binding peptide
  MOD_RES (1), (3), (37), (38): Xaa is C or S
  MOD_RES (15), (16), (17), (18), (19): Xaa is A or G
  MOD_RES (20), (21), (22), (23): Xaa is A or G or is absent

SEQ ID NO: 75735 - protein, 34 aa, Artificial Sequence; identical to SEQ ID NO: 18216
  GFR-binding peptide
  MOD_RES (34), (34): Xaa is C or S

SEQ ID NO: 75736 - protein, 36 aa, Artificial Sequence; identical to SEQ ID NO: 18217
  GFR-binding peptide
  MOD_RES (1), (3): Xaa is C or S

SEQ ID NO: 75737 - protein, 38 aa, Artificial Sequence; identical to SEQ ID NO: 18218
  GFR-binding peptide
  MOD_RES (1), (38): Xaa is C or S

SEQ ID NO: 75738 - protein, 38 aa, Artificial Sequence; identical to SEQ ID NO: 18219
  GFR-binding peptide
  MOD_RES (1), (35): Xaa is C or S

SEQ ID NO: 75739 - protein, 37 aa, Artificial Sequence
  GFR-binding peptide
  MOD_RES (34), (35): Xaa is C or S
  MOD_RES (12), (13), (14), (15), (16): Xaa is A or G
  MOD_RES (17), (18), (19), (20): Xaa is A or G or is absent
RDVVMGSMEGIXXXXXXXXXMIQMTINSMKTPTXXPG

SEQ ID NO: 75740 - protein, 40 aa, Artificial Sequence; identical to SEQ ID NO: 18221
  GFR-binding peptide
  MOD_RES (1), (3), (37): Xaa is C or S
  MOD_RES (15), (16), (17), (18), (19): Xaa is A or G
  MOD_RES (20), (21), (22), (23): Xaa is A or G or is absent

SEQ ID NO: 75741 - protein, 38 aa, Artificial Sequence
  GFR-binding peptide
  MOD_RES (2), (4), (37), (38): Xaa is C or S
  MOD_RES (15), (16), (17), (18), (19): Xaa is A or G
  MOD_RES (20), (21), (22), (23): Xaa is A or G or is absent
LXGXEEVIMSMEGIXXXXXXXXXMIQMTINSTKVPAXX

SEQ ID NO: 75742 - protein, 34 aa, Artificial Sequence; identical to SEQ ID NO: 18224
  GFR-binding peptide
  MOD_RES (33), (33): Xaa is C or S

SEQ ID NO: 75743 - protein, 38 aa, Artificial Sequence; identical to SEQ ID NO: 50676
  GFR-binding peptide
  MOD_RES (1), (32), (33): Xaa is C or S

SEQ ID NO: 75744 - protein, 42 aa, Artificial Sequence
  GFR-binding peptide
  MOD_RES (1), (3), (37), (38): Xaa is C or S
  MOD_RES (15), (16), (17), (18), (19): Xaa is A or G
  MOD_RES (20), (21), (22), (23): Xaa is A or G or is absent
XGXRDVVMGSMEGIXXXXXXXXXMIQMTINSMKTPTXXPGAS

SEQ ID NO: 75745 - protein, 42 aa, Artificial Sequence
  GFR-binding peptide
  MOD_RES (2), (4), (36), (37): Xaa is C or S
RXGXSEVVMDSMEGLVVNNASDMIQITINSLRTPVXXTPPTS

SEQ ID NO: 75746 - protein, 40 aa, Artificial Sequence; identical to SEQ ID NO: 18228
  GFR-binding peptide
  MOD_RES (1), (35): Xaa is C or S

SEQ ID NO: 75747 - protein, 38 aa, Artificial Sequence
  GFR-binding peptide
  MOD_RES (1), (35), (36): Xaa is C or S
  MOD_RES (13), (14), (15), (16), (17): Xaa is A or G
  MOD_RES (18), (19), (20), (21): Xaa is A or G or is absent
XSEVVMDSMEGIXXXXXXXXXMIQITINSLRTPVXXTP

SEQ ID NO: 75748 - protein, 40 aa, Artificial Sequence; identical to SEQ ID NO: 18229
  GFR-binding peptide
  MOD_RES (36), (36): Xaa is C or S
  MOD_RES (12), (13), (14), (15), (16): Xaa is A or G
  MOD_RES (17), (18), (19), (20): Xaa is A or G or is absent

SEQ ID NO: 75749 - protein, 39 aa, Artificial Sequence; identical to SEQ ID NO: 18230
  GFR-binding peptide
  MOD_RES (33), (33): Xaa is C or S
  MOD_RES (11), (12), (13), (14), (15): Xaa is A or G
  MOD_RES (16), (17), (18), (19): Xaa is A or G or is absent

SEQ ID NO: 75750 - protein, 41 aa, Artificial Sequence; identical to SEQ ID NO: 18231
  GFR-binding peptide
  MOD_RES (1), (3), (40): Xaa is C or S

SEQ ID NO: 75751 - protein, 37 aa, Artificial Sequence; identical to SEQ ID NO: 18232
  GFR-binding peptide
  MOD_RES (1), (35): Xaa is C or S

SEQ ID NO: 75752 - protein, 35 aa, Artificial Sequence; identical to SEQ ID NO: 18233
  GFR-binding peptide
  MOD_RES (1), (35): Xaa is C or S

SEQ ID NO: 75753 - protein, 35 aa, Artificial Sequence; identical to SEQ ID NO: 18234
  GFR-binding peptide
  MOD_RES (33), (33): Xaa is C or S

SEQ ID NO: 75754 - protein, 35 aa, Artificial Sequence; identical to SEQ ID NO: 18235
  GFR-binding peptide
  MOD_RES (33), (33): Xaa is C or S
  MOD_RES (11), (12), (13), (14), (15): Xaa is A or G
  MOD_RES (16), (17), (18), (19): Xaa is A or G or is absent

SEQ ID NO: 75755 - protein, 39 aa, Artificial Sequence; identical to SEQ ID NO: 18236
  GFR-binding peptide
  MOD_RES (2), (36): Xaa is C or S

SEQ ID NO: 75756 - protein, 40 aa, Artificial Sequence
  GFR-binding peptide
  MOD_RES (2), (34), (35): Xaa is C or S
GXAEVVMDSMEGIVVNNAADMIQITINSLRAPVXXSAPAA

SEQ ID NO: 75757 - protein, 34 aa, Artificial Sequence
  GFR-binding peptide
  MOD_RES (2), (34): Xaa is C or S
GXRDVVMGSMEGIIIQQKDNMIQMTINSMKTPTX

SEQ ID NO: 75758 - protein, 34 aa, Artificial Sequence; identical to SEQ ID NO: 18237
  GFR-binding peptide
  MOD_RES (1), (1): Xaa is C or S
  MOD_RES (13), (14), (15), (16), (17): Xaa is A or G
  MOD_RES (18), (19), (20), (21): Xaa is A or G or is absent

SEQ ID NO: 75759 - protein, 41 aa, Artificial Sequence; identical to SEQ ID NO: 18238
  GFR-binding peptide
  MOD_RES (1), (35): Xaa is C or S
  MOD_RES (13), (14), (15), (16), (17): Xaa is A or G
  MOD_RES (18), (19), (20), (21): Xaa is A or G or is absent

SEQ ID NO: 75760 - protein, 37 aa, Artificial Sequence; identical to SEQ ID NO: 18239
  GFR-binding peptide
  MOD_RES (2), (36): Xaa is C or S
  MOD_RES (14), (15), (16), (17), (18): Xaa is A or G
  MOD_RES (19), (20), (21), (22): Xaa is A or G or is absent

SEQ ID NO: 75761 - protein, 35 aa, Artificial Sequence; identical to SEQ ID NO: 50689
  GFR-binding peptide
  MOD_RES (1), (34), (35): Xaa is C or S
  MOD_RES (12), (13), (14), (15), (16): Xaa is A or G
  MOD_RES (17), (18), (19), (20): Xaa is A or G or is absent

SEQ ID NO: 75762 - protein, 43 aa, Artificial Sequence; identical to SEQ ID NO: 18241
  GFR-binding peptide
  MOD_RES (2), (39): Xaa is C or S
  MOD_RES (15), (16), (17), (18), (19): Xaa is A or G
  MOD_RES (20), (21), (22), (23): Xaa is A or G or is absent

SEQ ID NO: 75763 - protein, 38 aa, Artificial Sequence; identical to SEQ ID NO: 18242
  GFR-binding peptide
  MOD_RES (33), (33): Xaa is C or S

SEQ ID NO: 75764 - protein, 37 aa, Artificial Sequence
  GFR-binding peptide
  MOD_RES (2), (4), (35), (36): Xaa is C or S
LXGXEEVIMSMEGLLLVRGNDMIQMTINSTKVPAXXT

SEQ ID NO: 75765 - protein, 37 aa, Artificial Sequence
  GFR-binding peptide
  MOD_RES (31), (32): Xaa is C or S
EEVIMSMEGILLVRGNDMIQMTINSTKVPAXXTSPVR

SEQ ID NO: 75766 - protein, 38 aa, Artificial Sequence
  GFR-binding peptide
  MOD_RES (2), (4), (36), (37): Xaa is C or S
RXGXSEVVMDSMEGIVVNNASDMIQITINSLRTPVXXT

SEQ ID NO: 75767 - protein, 45 aa, Artificial Sequence; identical to SEQ ID NO: 18245
  GFR-binding peptide
  MOD_RES (2), (4), (41): Xaa is C or S
  MOD_RES (17), (18), (19), (20), (21): Xaa is A or G
  MOD_RES (22), (23), (24), (25): Xaa is A or G or is absent

SEQ ID NO: 75768 - protein, 37 aa, Artificial Sequence; identical to SEQ ID NO: 50700
  GFR-binding peptide
  MOD_RES (1), (3), (34), (35): Xaa is C or S

SEQ ID NO: 75769 - protein, 42 aa, Artificial Sequence
  GFR-binding peptide
  MOD_RES (1), (3), (37), (38): Xaa is C or S
  MOD_RES (15), (16), (17), (18), (19): Xaa is A or G
  MOD_RES (20), (21), (22), (23): Xaa is A or G or is absent
XGXSEVVMDSMEGIXXXXXXXXXMIQITINSLRTPVXXTPPT

SEQ ID NO: 75770 - protein, 37 aa, Artificial Sequence; identical to SEQ ID NO: 18246
  GFR-binding peptide
  MOD_RES (1), (1): Xaa is C or S
  MOD_RES (14), (15), (16), (17), (18): Xaa is A or G
  MOD_RES (19), (20), (21), (22): Xaa is A or G or is absent

SEQ ID NO: 75771 - protein, 41 aa, Artificial Sequence; identical to SEQ ID NO: 18247
  GFR-binding peptide
  MOD_RES (2), (36): Xaa is C or S
  MOD_RES (14), (15), (16), (17), (18): Xaa is A or G
  MOD_RES (19), (20), (21), (22): Xaa is A or G or is absent

SEQ ID NO: 75772 - protein, 40 aa, Artificial Sequence; identical to SEQ ID NO: 48154
  GFR-binding peptide
  MOD_RES (1), (34), (35): Xaa is C or S
  MOD_RES (12), (13), (14), (15), (16): Xaa is A or G
  MOD_RES (17), (18), (19), (20): Xaa is A or G or is absent

SEQ ID NO: 75773 - protein, 32 aa, Artificial Sequence
  GFR-binding peptide
  MOD_RES (32), (32): Xaa is C or S
SEVVMDSMEGLVVNNASDMIQITINSLRTPVX

SEQ ID NO: 75774 - protein, 35 aa, Artificial Sequence
  GFR-binding peptide
  MOD_RES (33), (34): Xaa is C or S
  MOD_RES (11), (12), (13), (14), (15): Xaa is A or G
  MOD_RES (16), (17), (18), (19): Xaa is A or G or is absent
RVVMNSMEGLXXXXXXXXXMIQVTINSLKTPAXXP

SEQ ID NO: 75775 - protein, 42 aa, Artificial Sequence; identical to SEQ ID NO: 18248
  GFR-binding peptide
  MOD_RES (2), (4), (38): Xaa is C or S

SEQ ID NO: 75776 - protein, 36 aa, Artificial Sequence
  GFR-binding peptide
  MOD_RES (2), (34), (35): Xaa is C or S
GXSEVVMDSMEGIVVNNASDMIQITINSLRTPVXXT

SEQ ID NO: 75777 - protein, 37 aa, Artificial Sequence; identical to SEQ ID NO: 48163
  GFR-binding peptide
  MOD_RES (1), (32), (33): Xaa is C or S

SEQ ID NO: 75778 - protein, 37 aa, Artificial Sequence; identical to SEQ ID NO: 50709
  GFR-binding peptide
  MOD_RES (1), (3), (34), (35): Xaa is C or S

SEQ ID NO: 75779 - protein, 36 aa, Artificial Sequence
  GFR-binding peptide
  MOD_RES (1), (35), (36): Xaa is C or S
  MOD_RES (13), (14), (15), (16), (17): Xaa is A or G
  MOD_RES (18), (19), (20), (21): Xaa is A or G or is absent
XAEVVMDSMEGIXXXXXXXXXMIQITINSLRAPVXX

SEQ ID NO: 75780 - protein, 41 aa, Artificial Sequence; identical to SEQ ID NO: 18249
  GFR-binding peptide
  MOD_RES (1), (3), (37): Xaa is C or S
  MOD_RES (15), (16), (17), (18), (19): Xaa is A or G
  MOD_RES (20), (21), (22), (23): Xaa is A or G or is absent

SEQ ID NO: 75781 - protein, 37 aa, Artificial Sequence
  GFR-binding peptide
  MOD_RES (2), (34), (35): Xaa is C or S
GXRDVVMGSMEGLIIQQKDNMIQMTINSMKTPTXXPG

SEQ ID NO: 75782 - protein, 39 aa, Artificial Sequence
  GFR-binding peptide
  MOD_RES (1), (34), (35): Xaa is C or S
  MOD_RES (12), (13), (14), (15), (16): Xaa is A or G
  MOD_RES (17), (18), (19), (20): Xaa is A or G or is absent
XEEVIMSMEGIXXXXXXXXXMIQMTINSTKVPAXXTSPV

SEQ ID NO: 75783 - protein, 34 aa, Artificial Sequence
  GFR-binding peptide
  MOD_RES (31), (32): Xaa is C or S
DVVMGSMEGLIIQQKDNMIQMTINSMKTPTXXPG

SEQ ID NO: 75784 - protein, 39 aa, Artificial Sequence; identical to SEQ ID NO: 18251
  GFR-binding peptide
  MOD_RES (37), (37): Xaa is C or S

SEQ ID NO: 75785 - protein, 41 aa, Artificial Sequence; identical to SEQ ID NO: 18253
  GFR-binding peptide
  MOD_RES (2), (4), (38): Xaa is C or S
  MOD_RES (16), (17), (18), (19), (20): Xaa is A or G
  MOD_RES (21), (22), (23), (24): Xaa is A or G or is absent

SEQ ID NO: 75786 - protein, 35 aa, Artificial Sequence
  GFR-binding peptide
  MOD_RES (1), (3), (34), (35): Xaa is C or S
XKXSRVIMSMEGLVKPKRGVMIQITINSLAQPVXX

SEQ ID NO: 75787 - protein, 40 aa, Artificial Sequence
  GFR-binding peptide
  MOD_RES (34), (35): Xaa is C or S
  MOD_RES (12), (13), (14), (15), (16): Xaa is A or G
  MOD_RES (17), (18), (19), (20): Xaa is A or G or is absent
SRVVMNSMEGLXXXXXXXXXMIQVTINSLKTPAXXPKPVH

SEQ ID NO: 75788 - protein, 36 aa, Artificial Sequence
  GFR-binding peptide
  MOD_RES (1), (32), (33): Xaa is C or S
XSRVIMSMEGLVKPKRGVMIQITINSLAQPVXXPAA

SEQ ID NO: 75789 - protein, 38 aa, Artificial Sequence
  GFR-binding peptide
  MOD_RES (2), (4), (35), (36): Xaa is C or S
SXKXSKVIMSMEGLIKPTKGIMIQITINSLDQSVXXPS

SEQ ID NO: 75790 - protein, 38 aa, Artificial Sequence
  GFR-binding peptide
  MOD_RES (2), (34), (35): Xaa is C or S
GXRDVVMGSMEGLIIQQKDNMIQMTINSMKTPTXXPGA

SEQ ID NO: 75791 - protein, 38 aa, Artificial Sequence; identical to SEQ ID NO: 50725
  GFR-binding peptide
  MOD_RES (1), (3), (36), (37): Xaa is C or S
  MOD_RES (14), (15), (16), (17), (18): Xaa is A or G
  MOD_RES (19), (20), (21), (22): Xaa is A or G or is absent

SEQ ID NO: 75792 - protein, 39 aa, Artificial Sequence
  GFR-binding peptide
  MOD_RES (1), (33), (34): Xaa is C or S
XSRVVMNSMEGLIVNSSDDMIQVTINSLKTPAXXPKPVH

SEQ ID NO: 75793 - protein, 34 aa, Artificial Sequence; identical to SEQ ID NO: 18257
  GFR-binding peptide

SEQ ID NO: 75794 - protein, 40 aa, Artificial Sequence; identical to SEQ ID NO: 18260
  GFR-binding peptide
  MOD_RES (37), (37): Xaa is C or S

SEQ ID NO: 75795 - protein, 42 aa, Artificial Sequence; identical to SEQ ID NO: 18261
  GFR-binding peptide
  MOD_RES (2), (4), (41): Xaa is C or S

SEQ ID NO: 75796 - protein, 35 aa, Artificial Sequence; identical to SEQ ID NO: 18262
  GFR-binding peptide
  MOD_RES (1), (1): Xaa is C or S

SEQ ID NO: 75797 - protein, 36 aa, Artificial Sequence; identical to SEQ ID NO: 50733
  GFR-binding peptide
  MOD_RES (1), (32), (33): Xaa is C or S

SEQ ID NO: 75798 - protein, 41 aa, Artificial Sequence
  GFR-binding peptide
  MOD_RES (1), (35), (36): Xaa is C or S
  MOD_RES (13), (14), (15), (16), (17): Xaa is A or G
  MOD_RES (18), (19), (20), (21): Xaa is A or G or is absent
XRDVVMGSMEGIXXXXXXXXXMIQMTINSMKTPTXXPGASG

SEQ ID NO: 75799 - protein, 34 aa, Artificial Sequence
  GFR-binding peptide
  MOD_RES (1), (32), (33): Xaa is C or S
XEEVIMSMEGLLLVRGNDMIQMTINSTKVPAXXT

SEQ ID NO: 75800 - protein, 33 aa, Artificial Sequence
  GFR-binding peptide
  MOD_RES (31), (32): Xaa is C or S
EEVIMSMEGLLLVRGNDMIQMTINSTKVPAXXT

SEQ ID NO: 75801 - protein, 36 aa, Artificial Sequence
  GFR-binding peptide
  MOD_RES (1), (32), (33): Xaa is C or S
XSKVIMSMEGLIKPTKGIMIQITINSLDQSVXXPSA

SEQ ID NO: 75802 - protein, 33 aa, Artificial Sequence
  GFR-binding peptide
  MOD_RES (12), (13), (14), (15), (16): Xaa is A or G
  MOD_RES (17), (18), (19), (20): Xaa is A or G or is absent
AEVVMDSMEGIXXXXXXXXXMIQITINSLRAPV

SEQ ID NO: 75803 - protein, 44 aa, Artificial Sequence; identical to SEQ ID NO: 18267
  GFR-binding peptide
  MOD_RES (2), (4), (41): Xaa is C or S
  MOD_RES (17), (18), (19), (20), (21): Xaa is A or G
  MOD_RES (22), (23), (24), (25): Xaa is A or G or is absent

SEQ ID NO: 75804 - protein, 39 aa, Artificial Sequence
  GFR-binding peptide
  MOD_RES (1), (35), (36): Xaa is C or S
  MOD_RES (13), (14), (15), (16), (17): Xaa is A or G
  MOD_RES (18), (19), (20), (21): Xaa is A or G or is absent
XSRVVMNSMEGLXXXXXXXXXMIQVTINSLKTPAXXPKP

SEQ ID NO: 75805 - protein, 38 aa, Artificial Sequence; identical to SEQ ID NO: 50744
  GFR-binding peptide
  MOD_RES (1), (3), (34), (35): Xaa is C or S

SEQ ID NO: 75806 - protein, 37 aa, Artificial Sequence; identical to SEQ ID NO: 18272
  GFR-binding peptide
  MOD_RES (2), (4): Xaa is C or S
  MOD_RES (16), (17), (18), (19), (20): Xaa is A or G
  MOD_RES (21), (22), (23), (24): Xaa is A or G or is absent

SEQ ID NO: 75807 - protein, 41 aa, Artificial Sequence; identical to SEQ ID NO: 18274
  GFR-binding peptide
  MOD_RES (2), (39): Xaa is C or S
  MOD_RES (15), (16), (17), (18), (19): Xaa is A or G
  MOD_RES (20), (21), (22), (23): Xaa is A or G or is absent

SEQ ID NO: 75808 - protein, 33 aa, Artificial Sequence
  GFR-binding peptide
  MOD_RES (1), (1): Xaa is C or S
  MOD_RES (12), (13), (14), (15), (16): Xaa is A or G
  MOD_RES (17), (18), (19), (20): Xaa is A or G or is absent
XEEVIMSMEGLXXXXXXXXXMIQMTINSTKVPA

SEQ ID NO: 75809 - protein, 41 aa, Artificial Sequence; identical to SEQ ID NO: 50751
  GFR-binding peptide
  MOD_RES (2), (4), (38), (39): Xaa is C or S
  MOD_RES (16), (17), (18), (19), (20): Xaa is A or G
  MOD_RES (21), (22), (23), (24): Xaa is A or G or is absent

SEQ ID NO: 75810 - protein, 38 aa, Artificial Sequence
  GFR-binding peptide
  MOD_RES (2), (35), (36): Xaa is C or S
  MOD_RES (13), (14), (15), (16), (17): Xaa is A or G
  MOD_RES (18), (19), (20), (21): Xaa is A or G or is absent
GXEEVIMSMEGIXXXXXXXXXMIQMTINSTKVPAXXTS

SEQ ID NO: 75811 - protein, 40 aa, Artificial Sequence
  GFR-binding peptide
  MOD_RES (2), (4), (36), (37): Xaa is C or S
HXGXSRVVMNSMEGLIVNSSDDMIQVTINSLKTPAXXPKP

SEQ ID NO: 75812 - protein, 36 aa, Artificial Sequence
  GFR-binding peptide
  MOD_RES (2), (34), (35): Xaa is C or S
GXSEVVMDSMEGLVVNNASDMIQITINSLRTPVXXT

SEQ ID NO: 75813 - protein, 38 aa, Artificial Sequence; identical to SEQ ID NO: 18276
  GFR-binding peptide
  MOD_RES (35), (35): Xaa is C or S
  MOD_RES (11), (12), (13), (14), (15): Xaa is A or G
  MOD_RES (16), (17), (18), (19): Xaa is A or G or is absent

SEQ ID NO: 75814 - protein, 37 aa, Artificial Sequence; identical to SEQ ID NO: 18279
  GFR-binding peptide
  MOD_RES (2), (2): Xaa is C or S
  MOD_RES (15), (16), (17), (18), (19): Xaa is A or G
  MOD_RES (20), (21), (22), (23): Xaa is A or G or is absent

SEQ ID NO: 75815 - protein, 32 aa, Artificial Sequence
  GFR-binding peptide
  MOD_RES (31), (32): Xaa is C or S
EVVMDSMEGIVVNNAADMIQITINSLRAPVXX

SEQ ID NO: 75816 - protein, 32 aa, Artificial Sequence
  GFR-binding peptide
  MOD_RES (11), (12), (13), (14), (15): Xaa is A or G
  MOD_RES (16), (17), (18), (19): Xaa is A or G or is absent
SKVIMSMEGLXXXXXXXXXMIQITINSLDQSV

SEQ ID NO: 75817 - protein, 37 aa, Artificial Sequence
  GFR-binding peptide
  MOD_RES (33), (34): Xaa is C or S
  MOD_RES (11), (12), (13), (14), (15): Xaa is A or G
  MOD_RES (16), (17), (18), (19): Xaa is A or G or is absent
DVVMGSMEGLXXXXXXXXXMIQMTINSMKTPTXXPGA

SEQ ID NO: 75818 - protein, 43 aa, Artificial Sequence
  GFR-binding peptide
  MOD_RES (2), (4), (37), (38): Xaa is C or S
  MOD_RES (15), (16), (17), (18), (19): Xaa is A or G
  MOD_RES (20), (21), (22), (23): Xaa is A or G or is absent
SXKXSKVIMSMEGLXXXXXXXXXMIQITINSLDQSVXXPSASA

SEQ ID NO: 75819 - protein, 36 aa, Artificial Sequence; identical to SEQ ID NO: 48215
  GFR-binding peptide
  MOD_RES (1), (3): Xaa is C or S
  MOD_RES (15), (16), (17), (18), (19): Xaa is A or G
  MOD_RES (20), (21), (22), (23): Xaa is A or G or is absent

SEQ ID NO: 75820 - protein, 38 aa, Artificial Sequence; identical to SEQ ID NO: 18283
  GFR-binding peptide
  MOD_RES (34), (34): Xaa is C or S
  MOD_RES (12), (13), (14), (15), (16): Xaa is A or G
  MOD_RES (17), (18), (19), (20): Xaa is A or G or is absent

SEQ ID NO: 75821 - protein, 36 aa, Artificial Sequence
  GFR-binding peptide
  MOD_RES (2), (4), (36): Xaa is C or S
SXGXRDVVMGSMEGIIIQQKDNMIQMTINSMKTPTX

SEQ ID NO: 75822 - protein, 36 aa, Artificial Sequence; identical to SEQ ID NO: 18284
  GFR-binding peptide
  MOD_RES (2), (2): Xaa is C or S

SEQ ID NO: 75823 - protein, 41 aa, Artificial Sequence; identical to SEQ ID NO: 18285
  GFR-binding peptide
  MOD_RES (37), (37): Xaa is C or S
  MOD_RES (13), (14), (15), (16), (17): Xaa is A or G
  MOD_RES (18), (19), (20), (21): Xaa is A or G or is absent

SEQ ID NO: 75824 - protein, 38 aa, Artificial Sequence
  GFR-binding peptide
  MOD_RES (2), (35), (36): Xaa is C or S
  MOD_RES (13), (14), (15), (16), (17): Xaa is A or G
  MOD_RES (18), (19), (20), (21): Xaa is A or G or is absent
GXEEVIMSMEGLXXXXXXXXXMIQMTINSTKVPAXXTS

SEQ ID NO: 75825 - protein, 34 aa, Artificial Sequence
  GFR-binding peptide
  MOD_RES (31), (32): Xaa is C or S
SKVVMSMEGLVKPTRGVMIQITINSLDQPVXXPS

SEQ ID NO: 75826 - protein, 34 aa, Artificial Sequence
  GFR-binding peptide
  MOD_RES (1), (1): Xaa is C or S
  MOD_RES (13), (14), (15), (16), (17): Xaa is A or G
  MOD_RES (18), (19), (20), (21): Xaa is A or G or is absent
XAEVVMDSMEGLXXXXXXXXXMIQITINSLRAPV

SEQ ID NO: 75827 - protein, 39 aa, Artificial Sequence; identical to SEQ ID NO: 18286
  GFR-binding peptide
  MOD_RES (37), (37): Xaa is C or S
  MOD_RES (13), (14), (15), (16), (17): Xaa is A or G
  MOD_RES (18), (19), (20), (21): Xaa is A or G or is absent

SEQ ID NO: 75828 - protein, 41 aa, Artificial Sequence; identical to SEQ ID NO: 18287
  GFR-binding peptide
  MOD_RES (2), (4), (38): Xaa is C or S

SEQ ID NO: 75829 - protein, 38 aa, Artificial Sequence; identical to SEQ ID NO: 18288
  GFR-binding peptide
  MOD_RES (36), (36): Xaa is C or S
  MOD_RES (12), (13), (14), (15), (16): Xaa is A or G
  MOD_RES (17), (18), (19), (20): Xaa is A or G or is absent

SEQ ID NO: 75830 - protein, 36 aa, Artificial Sequence; identical to SEQ ID NO: 48223
  GFR-binding peptide
  MOD_RES (2), (33), (34): Xaa is C or S

SEQ ID NO: 75831 - protein, 38 aa, Artificial Sequence; identical to SEQ ID NO: 18289
  GFR-binding peptide
  MOD_RES (37), (37): Xaa is C or S
  MOD_RES (13), (14), (15), (16), (17): Xaa is A or G
  MOD_RES (18), (19), (20), (21): Xaa is A or G or is absent

SEQ ID NO: 75832 - protein, 38 aa, Artificial Sequence
  GFR-binding peptide
  MOD_RES (32), (33): Xaa is C or S
RDVVMGSMEGLIIQQKDNMIQMTINSMKTPTXXPGASG

SEQ ID NO: 75833 - protein, 41 aa, Artificial Sequence; identical to SEQ ID NO: 18291
  GFR-binding peptide
  MOD_RES (37), (37): Xaa is C or S

SEQ ID NO: 75834 - protein, 35 aa, Artificial Sequence; identical to SEQ ID NO: 18293
  GFR-binding peptide
  MOD_RES (34), (34): Xaa is C or S
  MOD_RES (12), (13), (14), (15), (16): Xaa is A or G
  MOD_RES (17), (18), (19), (20): Xaa is A or G or is absent

SEQ ID NO: 75835 - protein, 30 aa, Artificial Sequence
  GFR-binding peptide
SKVIMSMEGLIKPTKGIMIQITINSLDQSV

SEQ ID NO: 75836 - protein, 36 aa, Artificial Sequence; identical to SEQ ID NO: 18296
  GFR-binding peptide
  MOD_RES (2), (2): Xaa is C or S
  MOD_RES (15), (16), (17), (18), (19): Xaa is A or G
  MOD_RES (20), (21), (22), (23): Xaa is A or G or is absent

SEQ ID NO: 75837 - protein, 39 aa, Artificial Sequence
  GFR-binding peptide
  MOD_RES (1), (3), (37), (38): Xaa is C or S
  MOD_RES (15), (16), (17), (18), (19): Xaa is A or G
  MOD_RES (20), (21), (22), (23): Xaa is A or G or is absent
XGXSEVVMDSMEGIXXXXXXXXXMIQITINSLRTPVXXT

SEQ ID NO: 75838 - protein, 34 aa, Artificial Sequence
  GFR-binding peptide
  MOD_RES (2), (34): Xaa is C or S
GXSEVVMDSMEGLVVNNASDMIQITINSLRTPVX

SEQ ID NO: 75839 - protein, 39 aa, Artificial Sequence
  GFR-binding peptide
  MOD_RES (2), (35), (36): Xaa is C or S
  MOD_RES (13), (14), (15), (16), (17): Xaa is A or G
  MOD_RES (18), (19), (20), (21): Xaa is A or G or is absent
KXSRVIMSMEGLXXXXXXXXXMIQITINSLAQPVXXPAA

SEQ ID NO: 75840 - protein, 44 aa, Artificial Sequence; identical to SEQ ID NO: 18298
  GFR-binding peptide
  MOD_RES (2), (4), (38): Xaa is C or S
  MOD_RES (16), (17), (18), (19), (20): Xaa is A or G
  MOD_RES (21), (22), (23), (24): Xaa is A or G or is absent

SEQ ID NO: 75841 - protein, 39 aa, Artificial Sequence; identical to SEQ ID NO: 50780
  GFR-binding peptide
  MOD_RES (2), (35), (36): Xaa is C or S
  MOD_RES (13), (14), (15), (16), (17): Xaa is A or G
  MOD_RES (18), (19), (20), (21): Xaa is A or G or is absent

SEQ ID NO: 75842 - protein, 35 aa, Artificial Sequence
  GFR-binding peptide
  MOD_RES (31), (32): Xaa is C or S
SRVIMSMEGLVKPKRGVMIQITINSLAQPVXXPAA

SEQ ID NO: 75843 - protein, 42 aa, Artificial Sequence; identical to SEQ ID NO: 18300
  GFR-binding peptide
  MOD_RES (1), (3), (40): Xaa is C or S

SEQ ID NO: 75844 - protein, 38 aa, Artificial Sequence
  GFR-binding peptide
  MOD_RES (32), (33): Xaa is C or S
SRVVMNSMEGIIVNSSDDMIQVTINSLKTPAXXPKPVH

SEQ ID NO: 75845 - protein, 32 aa, Artificial Sequence; identical to SEQ ID NO: 48247
  GFR-binding peptide
  MOD_RES (11), (12), (13), (14), (15): Xaa is A or G
  MOD_RES (16), (17), (18), (19): Xaa is A or G or is absent

SEQ ID NO: 75846 - protein, 42 aa, Artificial Sequence
  GFR-binding peptide
  MOD_RES (1), (3), (36), (37): Xaa is C or S
  MOD_RES (14), (15), (16), (17), (18): Xaa is A or G
  MOD_RES (19), (20), (21), (22): Xaa is A or G or is absent
XGXEEVIMSMEGLXXXXXXXXXMIQMTINSTKVPAXXTSPVR

SEQ ID NO: 75847 - protein, 40 aa, Artificial Sequence
  GFR-binding peptide
  MOD_RES (1), (34), (35): Xaa is C or S
  MOD_RES (12), (13), (14), (15), (16): Xaa is A or G
  MOD_RES (17), (18), (19), (20): Xaa is A or G or is absent
XSKVVMSMEGLXXXXXXXXXMIQITINSLDQPVXXPSASA

SEQ ID NO: 75848 - protein, 39 aa, Artificial Sequence
  GFR-binding peptide
  MOD_RES (2), (35), (36): Xaa is C or S
  MOD_RES (13), (14), (15), (16), (17): Xaa is A or G
  MOD_RES (18), (19), (20), (21): Xaa is A or G or is absent
KXSKVVMSMEGLXXXXXXXXXMIQITINSLDQPVXXPSA

SEQ ID NO: 75849 - protein, 37 aa, Artificial Sequence
  GFR-binding peptide
  MOD_RES (1), (35), (36): Xaa is C or S
  MOD_RES (13), (14), (15), (16), (17): Xaa is A or G
  MOD_RES (18), (19), (20), (21): Xaa is A or G or is absent
XSEVVMDSMEGIXXXXXXXXXMIQITINSLRTPVXXT

SEQ ID NO: 75850 - protein, 40 aa, Artificial Sequence; identical to SEQ ID NO: 48252
  GFR-binding peptide
  MOD_RES (1), (34), (35): Xaa is C or S
  MOD_RES (12), (13), (14), (15), (16): Xaa is A or G
  MOD_RES (17), (18), (19), (20): Xaa is A or G or is absent

SEQ ID NO: 75851 - protein, 39 aa, Artificial Sequence; identical to SEQ ID NO: 48255
  GFR-binding peptide
  MOD_RES (2), (35), (36): Xaa is C or S
  MOD_RES (13), (14), (15), (16), (17): Xaa is A or G
  MOD_RES (18), (19), (20), (21): Xaa is A or G or is absent

SEQ ID NO: 75852 - protein, 35 aa, Artificial Sequence
  GFR-binding peptide
  MOD_RES (1), (3), (35): Xaa is C or S
XGXAEVVMDSMEGIVVNNAADMIQITINSLRAPVX

SEQ ID NO: 75853 - protein, 41 aa, Artificial Sequence
  GFR-binding peptide
  MOD_RES (2), (36), (37): Xaa is C or S
  MOD_RES (14), (15), (16), (17), (18): Xaa is A or G
  MOD_RES (19), (20), (21), (22): Xaa is A or G or is absent
GXSEVVMDSMEGIXXXXXXXXXMIQITINSLRTPVXXTPPT

SEQ ID NO: 75854 - protein, 34 aa, Artificial Sequence
  GFR-binding peptide
  MOD_RES (33), (34): Xaa is C or S
  MOD_RES (11), (12), (13), (14), (15): Xaa is A or G
  MOD_RES (16), (17), (18), (19): Xaa is A or G or is absent
EVVMDSMEGLXXXXXXXXXMIQITINSLRAPVXX

SEQ ID NO: 75855 - protein, 37 aa, Artificial Sequence
  GFR-binding peptide
  MOD_RES (33), (34): Xaa is C or S
  MOD_RES (11), (12), (13), (14), (15): Xaa is A or G
  MOD_RES (16), (17), (18), (19): Xaa is A or G or is absent
SKVVMSMEGLXXXXXXXXXMIQITINSLDQPVXXPSA

SEQ ID NO: 75856 - protein, 40 aa, Artificial Sequence; identical to SEQ ID NO: 18305
  GFR-binding peptide
  MOD_RES (2), (36): Xaa is C or S
  MOD_RES (14), (15), (16), (17), (18): Xaa is A or G
  MOD_RES (19), (20), (21), (22): Xaa is A or G or is absent

SEQ ID NO: 75857 - protein, 33 aa, Artificial Sequence
  GFR-binding peptide
  MOD_RES (1), (1): Xaa is C or S
  MOD_RES (12), (13), (14), (15), (16): Xaa is A or G
  MOD_RES (17), (18), (19), (20): Xaa is A or G or is absent
XSRVIMSMEGLXXXXXXXXXMIQITINSLAQPV

SEQ ID NO: 75858 - protein, 36 aa, Artificial Sequence; identical to SEQ ID NO: 18306
  GFR-binding peptide
  MOD_RES (35), (35): Xaa is C or S

SEQ ID NO: 75859 - protein, 36 aa, Artificial Sequence
  GFR-binding peptide
  MOD_RES (31), (32): Xaa is C or S
EVVMDSMEGLVVNNAADMIQITINSLRAPVXXSAPA

SEQ ID NO: 75860 - protein, 42 aa, Artificial Sequence
  GFR-binding peptide
  MOD_RES (2), (4), (36), (37): Xaa is C or S
RXGXAEVVMDSMEGLVVNNAADMIQITINSLRAPVXXSAPAA

SEQ ID NO: 75861 - protein, 34 aa, Artificial Sequence
  GFR-binding peptide
  MOD_RES (1), (1): Xaa is C or S
  MOD_RES (13), (14), (15), (16), (17): Xaa is A or G
  MOD_RES (18), (19), (20), (21): Xaa is A or G or is absent
XAEVVMDSMEGIXXXXXXXXXMIQITINSLRAPV

SEQ ID NO: 75862 - protein, 37 aa, Artificial Sequence; identical to SEQ ID NO: 48270
  GFR-binding peptide
  MOD_RES (33), (34): Xaa is C or S
  MOD_RES (11), (12), (13), (14), (15): Xaa is A or G
  MOD_RES (16), (17), (18), (19): Xaa is A or G or is absent

SEQ ID NO: 75863 - protein, 41 aa, Artificial Sequence
  GFR-binding peptide
  MOD_RES (1), (3), (35), (36): Xaa is C or S
XGXRDVVMGSMEGIIIQQKDNMIQMTINSMKTPTXXPGASG

SEQ ID NO: 75864 - protein, 38 aa, Artificial Sequence; identical to SEQ ID NO: 18315
  GFR-binding peptide
  MOD_RES (2), (4), (38): Xaa is C or S

SEQ ID NO: 75865 - protein, 38 aa, Artificial Sequence
  GFR-binding peptide
  MOD_RES (2), (36), (37): Xaa is C or S
  MOD_RES (14), (15), (16), (17), (18): Xaa is A or G
  MOD_RES (19), (20), (21), (22): Xaa is A or G or is absent
GXSEVVMDSMEGIXXXXXXXXXMIQITINSLRTPVXXT

SEQ ID NO: 75866 - protein, 40 aa, Artificial Sequence; identical to SEQ ID NO: 18318
  GFR-binding peptide
  MOD_RES (2), (39): Xaa is C or S
  MOD_RES (15), (16), (17), (18), (19): Xaa is A or G
  MOD_RES (20), (21), (22), (23): Xaa is A or G or is absent

SEQ ID NO: 75867 - protein, 42 aa, Artificial Sequence
  GFR-binding peptide
  MOD_RES (1), (3), (36), (37): Xaa is C or S
  MOD_RES (14), (15), (16), (17), (18): Xaa is A or G
  MOD_RES (19), (20), (21), (22): Xaa is A or G or is absent
XKXSKVVMSMEGLXXXXXXXXXMIQITINSLDQPVXXPSASA

SEQ ID NO: 75868 - protein, 41 aa, Artificial Sequence
  GFR-binding peptide
  MOD_RES (2), (4), (38), (39): Xaa is C or S
  MOD_RES (16), (17), (18), (19), (20): Xaa is A or G
  MOD_RES (21), (22), (23), (24): Xaa is A or G or is absent
HXGXSRVVMNSMEGLXXXXXXXXXMIQVTINSLKTPAXXPK

SEQ ID NO: 75869 - protein, 37 aa, Artificial Sequence
  GFR-binding peptide
  MOD_RES (1), (35), (36): Xaa is C or S
  MOD_RES (13), (14), (15), (16), (17): Xaa is A or G
  MOD_RES (18), (19), (20), (21): Xaa is A or G or is absent
XSEVVMDSMEGLXXXXXXXXXMIQITINSLRTPVXXT

SEQ ID NO: 75870 - protein, 42 aa, Artificial Sequence; identical to SEQ ID NO: 18322
  GFR-binding peptide
  MOD_RES (2), (4), (38): Xaa is C or S

SEQ ID NO: 75871 - protein, 39 aa, Artificial Sequence; identical to SEQ ID NO: 18323
  GFR-binding peptide
  MOD_RES (2), (36): Xaa is C or S

SEQ ID NO: 75872 - protein, 43 aa, Artificial Sequence; identical to SEQ ID NO: 18324
  GFR-binding peptide
  MOD_RES (2), (4), (41): Xaa is C or S

SEQ ID NO: 75873 - protein, 36 aa, Artificial Sequence; identical to SEQ ID NO: 18325
  GFR-binding peptide
  MOD_RES (1), (35): Xaa is C or S

SEQ ID NO: 75874 - protein, 34 aa, Artificial Sequence
  GFR-binding peptide
  MOD_RES (1), (1): Xaa is C or S
  MOD_RES (13), (14), (15), (16), (17): Xaa is A or G
  MOD_RES (18), (19), (20), (21): Xaa is A or G or is absent
XSEVVMDSMEGLXXXXXXXXXMIQITINSLRTPV

SEQ ID NO: 75875 - protein, 42 aa, Artificial Sequence; identical to SEQ ID NO: 18326
  GFR-binding peptide
  MOD_RES (2), (4), (38): Xaa is C or S

SEQ ID NO: 75876 - protein, 39 aa, Artificial Sequence
  GFR-binding peptide
  MOD_RES (2), (33), (34): Xaa is C or S
KXSKVVMSMEGLVKPTRGVMIQITINSLDQPVXXPSASA

SEQ ID NO: 75877 - protein, 41 aa, Artificial Sequence; identical to SEQ ID NO: 18327
  GFR-binding peptide
  MOD_RES (1), (38): Xaa is C or S
  MOD_RES (14), (15), (16), (17), (18): Xaa is A or G
  MOD_RES (19), (20), (21), (22): Xaa is A or G or is absent

SEQ ID NO: 75878 - protein, 37 aa, Artificial Sequence; identical to SEQ ID NO: 50829
  GFR-binding peptide
  MOD_RES (34), (35): Xaa is C or S
  MOD_RES (12), (13), (14), (15), (16): Xaa is A or G
  MOD_RES (17), (18), (19), (20): Xaa is A or G or is absent

SEQ ID NO: 75879 - protein, 39 aa, Artificial Sequence; identical to SEQ ID NO: 50830
  GFR-binding peptide
  MOD_RES (1), (3), (36), (37): Xaa is C or S
  MOD_RES (14), (15), (16), (17), (18): Xaa is A or G
  MOD_RES (19), (20), (21), (22): Xaa is A or G or is absent

SEQ ID NO: 75880 - protein, 37 aa, Artificial Sequence
  GFR-binding peptide
  MOD_RES (2), (36), (37): Xaa is C or S
  MOD_RES (14), (15), (16), (17), (18): Xaa is A or G
  MOD_RES (19), (20), (21), (22): Xaa is A or G or is absent
GXSEVVMDSMEGIXXXXXXXXXMIQITINSLRTPVXX

SEQ ID NO: 75881 - protein, 34 aa, Artificial Sequence; identical to SEQ ID NO: 18329
  GFR-binding peptide
  MOD_RES (33), (33): Xaa is C or S
  MOD_RES (11), (12), (13), (14), (15): Xaa is A or G
  MOD_RES (16), (17), (18), (19): Xaa is A or G or is absent

SEQ ID NO: 75882 - protein, 40 aa, Artificial Sequence; identical to SEQ ID NO: 18330
  GFR-binding peptide
  MOD_RES (2), (36): Xaa is C or S
  MOD_RES (14), (15), (16), (17), (18): Xaa is A or G
  MOD_RES (19), (20), (21), (22): Xaa is A or G or is absent

SEQ ID NO: 75883 - protein, 42 aa, Artificial Sequence
  GFR-binding peptide
  MOD_RES (2), (4), (37), (38): Xaa is C or S
  MOD_RES (15), (16), (17), (18), (19): Xaa is A or G
  MOD_RES (20), (21), (22), (23): Xaa is A or G or is absent
LXGXEEVIMSMEGLXXXXXXXXXMIQMTINSTKVPAXXTSPV

SEQ ID NO: 75884 - protein, 38 aa, Artificial Sequence
  GFR-binding peptide
  MOD_RES (1), (32), (33): Xaa is C or S
XEEVIMSMEGILLVRGNDMIQMTINSTKVPAXXTSPVR

SEQ ID NO: 75885 - protein, 30 aa, Artificial Sequence
  GFR-binding peptide
SRVIMSMEGLVKPKRGVMIQITINSLAQPV

SEQ ID NO: 75886 - protein, 35 aa, Artificial Sequence
  GFR-binding peptide
  MOD_RES (1), (34), (35): Xaa is C or S
  MOD_RES (12), (13), (14), (15), (16): Xaa is A or G
  MOD_RES (17), (18), (19), (20): Xaa is A or G or is absent
XSKVVMSMEGLXXXXXXXXXMIQITINSLDQPVXX

SEQ ID NO: 75887 - protein, 31 aa, Artificial Sequence
  GFR-binding peptide
  MOD_RES (1), (1): Xaa is C or S
XSKVIMSMEGLIKPTKGIMIQITINSLDQSV

SEQ ID NO: 75888 - protein, 37 aa, Artificial Sequence; identical to SEQ ID NO: 18333
  GFR-binding peptide
  MOD_RES (2), (2): Xaa is C or S

SEQ ID NO: 75889 - protein, 39 aa, Artificial Sequence
  GFR-binding peptide
  MOD_RES (1), (35), (36): Xaa is C or S
  MOD_RES (13), (14), (15), (16), (17): Xaa is A or G
  MOD_RES (18), (19), (20), (21): Xaa is A or G or is absent
XSEVVMDSMEGIXXXXXXXXXMIQITINSLRTPVXXTPP

SEQ ID NO: 75890 - protein, 39 aa, Artificial Sequence
  GFR-binding peptide
  MOD_RES (1), (3), (37), (38): Xaa is C or S
  MOD_RES (15), (16), (17), (18), (19): Xaa is A or G
  MOD_RES (20), (21), (22), (23): Xaa is A or G or is absent
XGXAEVVMDSMEGLXXXXXXXXXMIQITINSLRAPVXXS

SEQ ID NO: 75891 - protein, 37 aa, Artificial Sequence
  GFR-binding peptide
  MOD_RES (34), (35): Xaa is C or S
  MOD_RES (12), (13), (14), (15), (16): Xaa is A or G
  MOD_RES (17), (18), (19), (20): Xaa is A or G or is absent
SEVVMDSMEGLXXXXXXXXXMIQITINSLRTPVXXTP

SEQ ID NO: 75892 - protein, 32 aa, Artificial Sequence
  GFR-binding peptide
  MOD_RES (31), (32): Xaa is C or S
EVVMDSMEGLVVNNASDMIQITINSLRTPVXX

SEQ ID NO: 75893 - protein, 34 aa, Artificial Sequence
  GFR-binding peptide
  MOD_RES (1), (34): Xaa is C or S
  MOD_RES (12), (13), (14), (15), (16): Xaa is A or G
  MOD_RES (17), (18), (19), (20): Xaa is A or G or is absent
XEEVIMSMEGIXXXXXXXXXMIQMTINSTKVPAX

SEQ ID NO: 75894 - protein, 38 aa, Artificial Sequence
  GFR-binding peptide
  MOD_RES (2), (34), (35): Xaa is C or S
GXSRVVMNSMEGLIVNSSDDMIQVTINSLKTPAXXPKP

SEQ ID NO: 75895 - protein, 38 aa, Artificial Sequence; identical to SEQ ID NO: 18338
  GFR-binding peptide
  MOD_RES (2), (36): Xaa is C or S
  MOD_RES (14), (15), (16), (17), (18): Xaa is A or G
  MOD_RES (19), (20), (21), (22): Xaa is A or G or is absent

SEQ ID NO: 75896 - protein, 39 aa, Artificial Sequence; identical to SEQ ID NO: 18340
  GFR-binding peptide
  MOD_RES (2), (39): Xaa is C or S

SEQ ID NO: 75897 - protein, 36 aa, Artificial Sequence
  GFR-binding peptide
  MOD_RES (2), (36): Xaa is C or S
  MOD_RES (14), (15), (16), (17), (18): Xaa is A or G
  MOD_RES (19), (20), (21), (22): Xaa is A or G or is absent
GXAEVVMDSMEGLXXXXXXXXXMIQITINSLRAPVX

SEQ ID NO: 75898 - protein, 38 aa, Artificial Sequence; identical to SEQ ID NO: 18341
  GFR-binding peptide
  MOD_RES (35), (35): Xaa is C or S
  MOD_RES (11), (12), (13), (14), (15): Xaa is A or G
  MOD_RES (16), (17), (18), (19): Xaa is A or G or is absent

SEQ ID NO: 75899 - protein, 34 aa, Artificial Sequence; identical to SEQ ID NO: 50853
  GFR-binding peptide
  MOD_RES (1), (32), (33): Xaa is C or S

SEQ ID NO: 75900 - protein, 34 aa, Artificial Sequence
  GFR-binding peptide
  MOD_RES (1), (3): Xaa is C or S
XGXSRVVMNSMEGLIVNSSDDMIQVTINSLKTPA

SEQ ID NO: 75901 - protein, 34 aa, Artificial Sequence; identical to SEQ ID NO: 18344
  GFR-binding peptide
  MOD_RES (13), (14), (15), (16), (17): Xaa is A or G
  MOD_RES (18), (19), (20), (21): Xaa is A or G or is absent

SEQ ID NO: 75902 - protein, 38 aa, Artificial Sequence
  GFR-binding peptide
  MOD_RES (2), (4), (35), (36): Xaa is C or S
SXKXSRVIMSMEGLVKPKRGVMIQITINSLAQPVXXPA

SEQ ID NO: 75903 - protein, 34 aa, Artificial Sequence
  GFR-binding peptide
  MOD_RES (1), (1): Xaa is C or S
  MOD_RES (13), (14), (15), (16), (17): Xaa is A or G
  MOD_RES (18), (19), (20), (21): Xaa is A or G or is absent
XRDVVMGSMEGLXXXXXXXXXMIQMTINSMKTPT

SEQ ID NO: 75904 - protein, 41 aa, Artificial Sequence; identical to SEQ ID NO: 18352
  GFR-binding peptide
  MOD_RES (1), (38): Xaa is C or S
  MOD_RES (14), (15), (16), (17), (18): Xaa is A or G
  MOD_RES (19), (20), (21), (22): Xaa is A or G or is absent

SEQ ID NO: 75905 - protein, 37 aa, Artificial Sequence; identical to SEQ ID NO: 18353
  GFR-binding peptide
  MOD_RES (1), (3): Xaa is C or S
  MOD_RES (16), (17), (18), (19), (20): Xaa is A or G
  MOD_RES (21), (22), (23), (24): Xaa is A or G or is absent

SEQ ID NO: 75906 - protein, 43 aa, Artificial Sequence
  GFR-binding peptide
  MOD_RES (2), (4), (38), (39): Xaa is C or S
  MOD_RES (16), (17), (18), (19), (20): Xaa is A or G
  MOD_RES (21), (22), (23), (24): Xaa is A or G or is absent
SXGXRDVVMGSMEGLXXXXXXXXXMIQMTINSMKTPTXXPGAS

SEQ ID NO: 75907 - protein, 36 aa, Artificial Sequence
  GFR-binding peptide
  MOD_RES (34), (35): Xaa is C or S
  MOD_RES (12), (13), (14), (15), (16): Xaa is A or G
  MOD_RES (17), (18), (19), (20): Xaa is A or G or is absent
RDVVMGSMEGLXXXXXXXXXMIQMTINSMKTPTXXP

SEQ ID NO: 75908 - protein, 43 aa, Artificial Sequence; identical to SEQ ID NO: 18355
  GFR-binding peptide
  MOD_RES (1), (3), (40): Xaa is C or S

SEQ ID NO: 75909 - protein, 37 aa, Artificial Sequence; identical to SEQ ID NO: 18358
  GFR-binding peptide
  MOD_RES (1), (3), (37): Xaa is C or S
  MOD_RES (15), (16), (17), (18), (19): Xaa is A or G
  MOD_RES (20), (21), (22), (23): Xaa is A or G or is absent

SEQ ID NO: 75910 - protein, 37 aa, Artificial Sequence
  GFR-binding peptide
  MOD_RES (2), (36), (37): Xaa is C or S
  MOD_RES (14), (15), (16), (17), (18): Xaa is A or G
  MOD_RES (19), (20), (21), (22): Xaa is A or G or is absent
GXSEVVMDSMEGLXXXXXXXXXMIQITINSLRTPVXX

SEQ ID NO: 75911 - protein, 37 aa, Artificial Sequence; identical to SEQ ID NO: 18362
  GFR-binding peptide
  MOD_RES (35), (35): Xaa is C or S
  MOD_RES (11), (12), (13), (14), (15): Xaa is A or G
  MOD_RES (16), (17), (18), (19): Xaa is A or G or is absent

SEQ ID NO: 75912 - protein, 35 aa, Artificial Sequence; identical to SEQ ID NO: 18363
  GFR-binding peptide
  MOD_RES (34), (34): Xaa is C or S

SEQ ID NO: 75913 - protein, 36 aa, Artificial Sequence
  GFR-binding peptide
  MOD_RES (2), (33), (34): Xaa is C or S
KXSKVVMSMEGLVKPTRGVMIQITINSLDQPVXXPS

SEQ ID NO: 75914 - protein, 38 aa, Artificial Sequence; identical to SEQ ID NO: 18364
  GFR-binding peptide
  MOD_RES (35), (35): Xaa is C or S
  MOD_RES (11), (12), (13), (14), (15): Xaa is A or G
  MOD_RES (16), (17), (18), (19): Xaa is A or G or is absent

SEQ ID NO: 75915 - protein, 37 aa, Artificial Sequence
  GFR-binding peptide
  MOD_RES (31), (32): Xaa is C or S
EVVMDSMEGIVVNNAADMIQITINSLRAPVXXSAPAA

SEQ ID NO: 75916 - protein, 33 aa, Artificial Sequence
  GFR-binding peptide
  MOD_RES (2), (2): Xaa is C or S
GXSRVVMNSMEGLIVNSSDDMIQVTINSLKTPA

SEQ ID NO: 75917 - protein, 30 aa, Artificial Sequence
  GFR-binding peptide
EVVMDSMEGLVVNNAADMIQITINSLRAPV

SEQ ID NO: 75918 - protein, 41 aa, Artificial Sequence
  GFR-binding peptide
  MOD_RES (1), (35), (36): Xaa is C or S
  MOD_RES (13), (14), (15), (16), (17): Xaa is A or G
  MOD_RES (18), (19), (20), (21): Xaa is A or G or is absent
XRDVVMGSMEGLXXXXXXXXXMIQMTINSMKTPTXXPGASG

SEQ ID NO: 75919 - protein, 34 aa, Artificial Sequence
  GFR-binding peptide
  MOD_RES (1), (3): Xaa is C or S
XGXSEVVMDSMEGIVVNNASDMIQITINSLRTPV

SEQ ID NO: 75920 - protein, 39 aa, Artificial Sequence
  GFR-binding peptide
  MOD_RES (2), (33), (34): Xaa is C or S
KXSKVIMSMEGLIKPTKGIMIQITINSLDQSVXXPSASA

SEQ ID NO: 75921 - protein, 39 aa, Artificial Sequence; identical to SEQ ID NO: 18370
  GFR-binding peptide
  MOD_RES (36), (36): Xaa is C or S
  MOD_RES (12), (13), (14), (15), (16): Xaa is A or G
  MOD_RES (17), (18), (19), (20): Xaa is A or G or is absent

SEQ ID NO: 75922 - protein, 40 aa, Artificial Sequence; identical to SEQ ID NO: 18371
  GFR-binding peptide
  MOD_RES (2), (4): Xaa is C or S

SEQ ID NO: 75923 - protein, 37 aa, Artificial Sequence
  GFR-binding peptide
  MOD_RES (1), (35), (36): Xaa is C or S
  MOD_RES (13), (14), (15), (16), (17): Xaa is A or G
  MOD_RES (18), (19), (20), (21): Xaa is A or G or is absent
XRDVVMGSMEGIXXXXXXXXXMIQMTINSMKTPTXXP

SEQ ID NO: 75924 - protein, 39 aa, Artificial Sequence
  GFR-binding peptide
  MOD_RES (33), (34): Xaa is C or S
  MOD_RES (11), (12), (13), (14), (15): Xaa is A or G
  MOD_RES (16), (17), (18), (19): Xaa is A or G or is absent
RVVMNSMEGLXXXXXXXXXMIQVTINSLKTPAXXPKPVH

SEQ ID NO: 75925 - protein, 38 aa, Artificial Sequence
  GFR-binding peptide
  MOD_RES (1), (32), (33): Xaa is C or S
XSKVIMSMEGLIKPTKGIMIQITINSLDQSVXXPSASA

SEQ ID NO: 75926 - protein, 37 aa, Artificial Sequence; identical to SEQ ID NO: 48360
  GFR-binding peptide
  MOD_RES (2), (4), (35), (36): Xaa is C or S

SEQ ID NO: 75927 - protein, 37 aa, Artificial Sequence
  GFR-binding peptide
  MOD_RES (1), (3), (34), (35): Xaa is C or S
XGXEEVIMSMEGILLVRGNDMIQMTINSTKVPAXXTS

SEQ ID NO: 75928 - protein, 33 aa, Artificial Sequence
  GFR-binding peptide
  MOD_RES (2), (2): Xaa is C or S
GXAEVVMDSMEGIVVNNAADMIQITINSLRAPV

SEQ ID NO: 75929 - protein, 35 aa, Artificial Sequence; identical to SEQ ID NO: 18374
  GFR-binding peptide

SEQ ID NO: 75930 - protein, 39 aa, Artificial Sequence; identical to SEQ ID NO: 18375
  GFR-binding peptide
  MOD_RES (34), (34): Xaa is C or S

SEQ ID NO: 75931 - protein, 35 aa, Artificial Sequence
  GFR-binding peptide
  MOD_RES (33), (34): Xaa is C or S
  MOD_RES (11), (12), (13), (14), (15): Xaa is A or G
  MOD_RES (16), (17), (18), (19): Xaa is A or G or is absent
DVVMGSMEGIXXXXXXXXXMIQMTINSMKTPTXXP

SEQ ID NO: 75932 - protein, 38 aa, Artificial Sequence; identical to SEQ ID NO: 18376
  GFR-binding peptide
  MOD_RES (2), (4): Xaa is C or S
  MOD_RES (17), (18), (19), (20), (21): Xaa is A or G
  MOD_RES (22), (23), (24), (25): Xaa is A or G or is absent

SEQ ID NO: 75933 - protein, 40 aa, Artificial Sequence; identical to SEQ ID NO: 18378
  GFR-binding peptide
  MOD_RES (1), (3), (40): Xaa is C or S

SEQ ID NO: 75934 - protein, 40 aa, Artificial Sequence; identical to SEQ ID NO: 18379
  GFR-binding peptide
  MOD_RES (1), (3), (40): Xaa is C or S

SEQ ID NO: 75935 - protein, 37 aa, Artificial Sequence; identical to SEQ ID NO: 18381
  GFR-binding peptide
  MOD_RES (1), (3), (37): Xaa is C or S

SEQ ID NO: 75936 - protein, 33 aa, Artificial Sequence; identical to SEQ ID NO: 50895
  GFR-binding peptide
  MOD_RES (33), (33): Xaa is C or S
  MOD_RES (11), (12), (13), (14), (15): Xaa is A or G
  MOD_RES (16), (17), (18), (19): Xaa is A or G or is absent

SEQ ID NO: 75937 - protein, 33 aa, Artificial Sequence; identical to SEQ ID NO: 18384
  GFR-binding peptide

SEQ ID NO: 75938 - protein, 36 aa, Artificial Sequence; identical to SEQ ID NO: 18385
  GFR-binding peptide
  MOD_RES (36), (36): Xaa is C or S

SEQ ID NO: 75939 - protein, 37 aa, Artificial Sequence; identical to SEQ ID NO: 18386
  GFR-binding peptide
  MOD_RES (2), (36): Xaa is C or S

SEQ ID NO: 75940 - protein, 36 aa, Artificial Sequence
  GFR-binding peptide
  MOD_RES (2), (33), (34): Xaa is C or S
KXSKVIMSMEGLIKPTKGIMIQITINSLDQSVXXPS

SEQ ID NO: 75941 - protein, 33 aa, Artificial Sequence; identical to SEQ ID NO: 48379
  GFR-binding peptide
  MOD_RES (2), (2): Xaa is C or S

SEQ ID NO: 75942 - protein, 34 aa, Artificial Sequence; identical to SEQ ID NO: 18389
  GFR-binding peptide

SEQ ID NO: 75943 - protein, 37 aa, Artificial Sequence
  GFR-binding peptide
  MOD_RES (1), (35), (36): Xaa is C or S
  MOD_RES (13), (14), (15), (16), (17): Xaa is A or G
  MOD_RES (18), (19), (20), (21): Xaa is A or G or is absent
XRDVVMGSMEGLXXXXXXXXXMIQMTINSMKTPTXXP

SEQ ID NO: 75944 - protein, 40 aa, Artificial Sequence; identical to SEQ ID NO: 18391
  GFR-binding peptide
  MOD_RES (37), (37): Xaa is C or S

SEQ ID NO: 75945 - protein, 35 aa, Artificial Sequence
  GFR-binding peptide
  MOD_RES (31), (32): Xaa is C or S
DVVMGSMEGIIIQQKDNMIQMTINSMKTPTXXPGA

SEQ ID NO: 75946 - protein, 31 aa, Artificial Sequence
  GFR-binding peptide
SEVVMDSMEGLVVNNASDMIQITINSLRTPV

SEQ ID NO: 75947 - protein, 35 aa, Artificial Sequence; identical to SEQ ID NO: 18392
  GFR-binding peptide
  MOD_RES (13), (14), (15), (16), (17): Xaa is A or G
  MOD_RES (18), (19), (20), (21): Xaa is A or G or is absent

SEQ ID NO: 75948 - protein, 39 aa, Artificial Sequence; identical to SEQ ID NO: 50908
  GFR-binding peptide
  MOD_RES (1), (3), (34), (35): Xaa is C or S

SEQ ID NO: 75949 - protein, 39 aa, Artificial Sequence
  GFR-binding peptide
  MOD_RES (1), (3), (36), (37): Xaa is C or S
  MOD_RES (14), (15), (16), (17), (18): Xaa is A or G
  MOD_RES (19), (20), (21), (22): Xaa is A or G or is absent
XKXSKVVMSMEGLXXXXXXXXXMIQITINSLDQPVXXPS

SEQ ID NO: 75950 - protein, 34 aa, Artificial Sequence; identical to SEQ ID NO: 18393
  GFR-binding peptide
  MOD_RES (1), (1): Xaa is C or S

SEQ ID NO: 75951 - protein, 38 aa, Artificial Sequence
  GFR-binding peptide
  MOD_RES (2), (34), (35): Xaa is C or S
GXAEVVMDSMEGIVVNNAADMIQITINSLRAPVXXSAP

SEQ ID NO: 75952 - protein, 37 aa, Artificial Sequence
  GFR-binding peptide
  MOD_RES (33), (34): Xaa is C or S
  MOD_RES (11), (12), (13), (14), (15): Xaa is A or G
  MOD_RES (16), (17), (18), (19): Xaa is A or G or is absent
SKVIMSMEGLXXXXXXXXXMIQITINSLDQSVXXPSA

SEQ ID NO: 75953 - protein, 40 aa, Artificial Sequence; identical to SEQ ID NO: 50911
  GFR-binding peptide
  MOD_RES (1), (3), (34), (35): Xaa is C or S

SEQ ID NO: 75954 - protein, 34 aa, Artificial Sequence; identical to SEQ ID NO: 18396
  GFR-binding peptide
  MOD_RES (1), (1): Xaa is C or S

SEQ ID NO: 75955 - protein, 37 aa, Artificial Sequence
  GFR-binding peptide
  MOD_RES (33), (34): Xaa is C or S
  MOD_RES (11), (12), (13), (14), (15): Xaa is A or G
  MOD_RES (16), (17), (18), (19): Xaa is A or G or is absent
EVVMDSMEGIXXXXXXXXXMIQITINSLRTPVXXTPP

SEQ ID NO: 75956 - protein, 41 aa, Artificial Sequence
  GFR-binding peptide
  MOD_RES (2), (36), (37): Xaa is C or S
  MOD_RES (14), (15), (16), (17), (18): Xaa is A or G
  MOD_RES (19), (20), (21), (22): Xaa is A or G or is absent
GXSEVVMDSMEGLXXXXXXXXXMIQITINSLRTPVXXTPPT

SEQ ID NO: 75957 - protein, 31 aa, Artificial Sequence
  GFR-binding peptide
  MOD_RES (31), (31): Xaa is C or S
EVVMDSMEGLVVNNAADMIQITINSLRAPVX

SEQ ID NO: 75958 - protein, 36 aa, Artificial Sequence; identical to SEQ ID NO: 18397
  GFR-binding peptide
  MOD_RES (35), (35): Xaa is C or S

SEQ ID NO: 75959 - protein, 37 aa, Artificial Sequence; identical to SEQ ID NO: 18398
  GFR-binding peptide
  MOD_RES (2), (4): Xaa is C or S

SEQ ID NO: 75960 - protein, 33 aa, Artificial Sequence
  GFR-binding peptide
  MOD_RES (2), (2): Xaa is C or S
GXRDVVMGSMEGIIIQQKDNMIQMTINSMKTPT

SEQ ID NO: 75961 - protein, 35 aa, Artificial Sequence; identical to SEQ ID NO: 48399
  GFR-binding peptide
  MOD_RES (2), (35): Xaa is C or S
  MOD_RES (13), (14), (15), (16), (17): Xaa is A or G
  MOD_RES (18), (19), (20), (21): Xaa is A or G or is absent

SEQ ID NO: 75962 - protein, 39 aa, Artificial Sequence
  GFR-binding peptide
  MOD_RES (1), (34), (35): Xaa is C or S
  MOD_RES (12), (13), (14), (15), (16): Xaa is A or G
  MOD_RES (17), (18), (19), (20): Xaa is A or G or is absent
XSKVVMSMEGLXXXXXXXXXMIQITINSLDQPVXXPSAS

SEQ ID NO: 75963 - protein, 36 aa, Artificial Sequence
  GFR-binding peptide
  MOD_RES (2), (35), (36): Xaa is C or S
  MOD_RES (13), (14), (15), (16), (17): Xaa is A or G
  MOD_RES (18), (19), (20), (21): Xaa is A or G or is absent
KXSRVIMSMEGLXXXXXXXXXMIQITINSLAQPVXX

SEQ ID NO: 75964 - protein, 37 aa, Artificial Sequence; identical to SEQ ID NO: 18405
  GFR-binding peptide
  MOD_RES (1), (1): Xaa is C or S
  MOD_RES (14), (15), (16), (17), (18): Xaa is A or G
  MOD_RES (19), (20), (21), (22): Xaa is A or G or is absent

SEQ ID NO: 75965 - protein, 40 aa, Artificial Sequence
  GFR-binding peptide
  MOD_RES (2), (4), (35), (36): Xaa is C or S
LXGXEEVIMSMEGLLLVRGNDMIQMTINSTKVPAXXTSPV

SEQ ID NO: 75966 - protein, 32 aa, Artificial Sequence
  GFR-binding peptide
  MOD_RES (1), (1): Xaa is C or S
XSEVVMDSMEGIVVNNASDMIQITINSLRTPV

SEQ ID NO: 75967 - protein, 34 aa, Artificial Sequence; identical to SEQ ID NO: 18406
  GFR-binding peptide
  MOD_RES (1), (1): Xaa is C or S
  MOD_RES (13), (14), (15), (16), (17): Xaa is A or G
  MOD_RES (18), (19), (20), (21): Xaa is A or G or is absent

SEQ ID NO: 75968 - protein, 34 aa, Artificial Sequence; identical to SEQ ID NO: 18407
  GFR-binding peptide
  MOD_RES (12), (13), (14), (15), (16): Xaa is A or G
  MOD_RES (17), (18), (19), (20): Xaa is A or G or is absent

SEQ ID NO: 75969 - protein, 40 aa, Artificial Sequence; identical to SEQ ID NO: 18409
  GFR-binding peptide
  MOD_RES (2), (39): Xaa is C or S

SEQ ID NO: 75970 - protein, 33 aa, Artificial Sequence
  GFR-binding peptide
  MOD_RES (33), (33): Xaa is C or S
  MOD_RES (11), (12), (13), (14), (15): Xaa is A or G
  MOD_RES (16), (17), (18), (19): Xaa is A or G or is absent
EEVIMSMEGLXXXXXXXXXMIQMTINSTKVPAX

SEQ ID NO: 75971 - protein, 35 aa, Artificial Sequence
  GFR-binding peptide
  MOD_RES (34), (35): Xaa is C or S
  MOD_RES (12), (13), (14), (15), (16): Xaa is A or G
  MOD_RES (17), (18), (19), (20): Xaa is A or G or is absent
RDVVMGSMEGIXXXXXXXXXMIQMTINSMKTPTXX

SEQ ID NO: 75972 - protein, 44 aa, Artificial Sequence
  GFR-binding peptide
  MOD_RES (2), (4), (38), (39): Xaa is C or S
  MOD_RES (16), (17), (18), (19), (20): Xaa is A or G
  MOD_RES (21), (22), (23), (24): Xaa is A or G or is absent
RXGXAEVVMDSMEGIXXXXXXXXXMIQITINSLRAPVXXSAPAA

SEQ ID NO: 75973 - protein, 38 aa, Artificial Sequence; identical to SEQ ID NO: 18415
  GFR-binding peptide
  MOD_RES (2), (4), (38): Xaa is C or S

SEQ ID NO: 75974 - protein, 43 aa, Artificial Sequence; identical to SEQ ID NO: 18416
  GFR-binding peptide
  MOD_RES (1), (3), (40): Xaa is C or S

SEQ ID NO: 75975 - protein, 43 aa, Artificial Sequence; identical to SEQ ID NO: 18418
  GFR-binding peptide
  MOD_RES (1), (3), (40): Xaa is C or S

SEQ ID NO: 75976 - protein, 37 aa, Artificial Sequence
  GFR-binding peptide
  MOD_RES (1), (3), (35), (36): Xaa is C or S
XGXRDVVMGSMEGIIIQQKDNMIQMTINSMKTPTXXP

SEQ ID NO: 75977 - protein, 34 aa, Artificial Sequence; identical to SEQ ID NO: 18419
  GFR-binding peptide
  MOD_RES (1), (1): Xaa is C or S
  MOD_RES (13), (14), (15), (16), (17): Xaa is A or G
  MOD_RES (18), (19), (20), (21): Xaa is A or G or is absent

SEQ ID NO: 75978 - protein, 33 aa, Artificial Sequence
  GFR-binding peptide
  MOD_RES (33), (33): Xaa is C or S
  MOD_RES (11), (12), (13), (14), (15): Xaa is A or G
  MOD_RES (16), (17), (18), (19): Xaa is A or G or is absent
EEVIMSMEGIXXXXXXXXXMIQMTINSTKVPAX

SEQ ID NO: 75979 - protein, 39 aa, Artificial Sequence; identical to SEQ ID NO: 18420
  GFR-binding peptide
  MOD_RES (2), (36): Xaa is C or S

SEQ ID NO: 75980 - protein, 43 aa, Artificial Sequence
  GFR-binding peptide
  MOD_RES (1), (3), (37), (38): Xaa is C or S
  MOD_RES (15), (16), (17), (18), (19): Xaa is A or G
  MOD_RES (20), (21), (22), (23): Xaa is A or G or is absent
XGXSRVVMNSMEGLXXXXXXXXXMIQVTINSLKTPAXXPKPVH

SEQ ID NO: 75981 - protein, 35 aa, Artificial Sequence
  GFR-binding peptide
  MOD_RES (2), (33), (34): Xaa is C or S
KXSKVVMSMEGLVKPTRGVMIQITINSLDQPVXXP

SEQ ID NO: 75982 - protein, 36 aa, Artificial Sequence
  GFR-binding peptide
  MOD_RES (34), (35): Xaa is C or S
  MOD_RES (12), (13), (14), (15), (16): Xaa is A or G
  MOD_RES (17), (18), (19), (20): Xaa is A or G or is absent
AEVVMDSMEGLXXXXXXXXXMIQITINSLRAPVXXS

SEQ ID NO: 75983 - protein, 43 aa, Artificial Sequence
  GFR-binding peptide
  MOD_RES (1), (3), (37), (38): Xaa is C or S
  MOD_RES (15), (16), (17), (18), (19): Xaa is A or G
  MOD_RES (20), (21), (22), (23): Xaa is A or G or is absent
XGXSEVVMDSMEGIXXXXXXXXXMIQITINSLRTPVXXTPPTS

SEQ ID NO: 75984 - protein, 34 aa, Artificial Sequence
  GFR-binding peptide
  MOD_RES (32), (33): Xaa is C or S
SEVVMDSMEGLVVNNASDMIQITINSLRTPVXXT

SEQ ID NO: 75985 - protein, 33 aa, Artificial Sequence; identical to SEQ ID NO: 50946
  GFR-binding peptide
  MOD_RES (33), (33): Xaa is C or S
  MOD_RES (11), (12), (13), (14), (15): Xaa is A or G
  MOD_RES (16), (17), (18), (19): Xaa is A or G or is absent

SEQ ID NO: 75986 - protein, 33 aa, Artificial Sequence
  GFR-binding peptide
  MOD_RES (2), (2): Xaa is C or S
GXAEVVMDSMEGLVVNNAADMIQITINSLRAPV

SEQ ID NO: 75987 - protein, 40 aa, Artificial Sequence; identical to SEQ ID NO: 18424
  GFR-binding peptide
  MOD_RES (34), (34): Xaa is C or S
  MOD_RES (12), (13), (14), (15), (16): Xaa is A or G
  MOD_RES (17), (18), (19), (20): Xaa is A or G or is absent

SEQ ID NO: 75988 - protein, 40 aa, Artificial Sequence; identical to SEQ ID NO: 18425
  GFR-binding peptide
  MOD_RES (1), (3), (37): Xaa is C or S
  MOD_RES (15), (16), (17), (18), (19): Xaa is A or G
  MOD_RES (20), (21), (22), (23): Xaa is A or G or is absent

SEQ ID NO: 75989 - protein, 33 aa, Artificial Sequence
  GFR-binding peptide
  MOD_RES (1), (32), (33): Xaa is C or S
XEEVIMSMEGLLLVRGNDMIQMTINSTKVPAXX

SEQ ID NO: 75990 - protein, 35 aa, Artificial Sequence
  GFR-binding peptide
  MOD_RES (31), (32): Xaa is C or S
DVVMGSMEGLIIQQKDNMIQMTINSMKTPTXXPGA

SEQ ID NO: 75991 - protein, 42 aa, Artificial Sequence; identical to SEQ ID NO: 50958
  GFR-binding peptide
  MOD_RES (1), (3), (36), (37): Xaa is C or S
  MOD_RES (14), (15), (16), (17), (18): Xaa is A or G
  MOD_RES (19), (20), (21), (22): Xaa is A or G or is absent

SEQ ID NO: 75992 - protein, 36 aa, Artificial Sequence; identical to SEQ ID NO: 50961
  GFR-binding peptide
  MOD_RES (1), (3), (34), (35): Xaa is C or S

SEQ ID NO: 75993 - protein, 35 aa, Artificial Sequence; identical to SEQ ID NO: 18429
  GFR-binding peptide
  MOD_RES (35), (35): Xaa is C or S
  MOD_RES (11), (12), (13), (14), (15): Xaa is A or G
  MOD_RES (16), (17), (18), (19): Xaa is A or G or is absent

SEQ ID NO: 75994 - protein, 36 aa, Artificial Sequence; identical to SEQ ID NO: 18431
  GFR-binding peptide
  MOD_RES (2), (36): Xaa is C or S

SEQ ID NO: 75995 - protein, 37 aa, Artificial Sequence
  GFR-binding peptide
  MOD_RES (33), (34): Xaa is C or S
  MOD_RES (11), (12), (13), (14), (15): Xaa is A or G
  MOD_RES (16), (17), (18), (19): Xaa is A or G or is absent
EVVMDSMEGLXXXXXXXXXMIQITINSLRTPVXXTPP

SEQ ID NO: 75996 - protein, 37 aa, Artificial Sequence; identical to SEQ ID NO: 18434
  GFR-binding peptide
  MOD_RES (37), (37): Xaa is C or S
  MOD_RES (13), (14), (15), (16), (17): Xaa is A or G
  MOD_RES (18), (19), (20), (21): Xaa is A or G or is absent

SEQ ID NO: 75997 - protein, 35 aa, Artificial Sequence; identical to SEQ ID NO: 50968
  GFR-binding peptide
  MOD_RES (2), (33), (34): Xaa is C or S

SEQ ID NO: 75998 - protein, 31 aa, Artificial Sequence
  GFR-binding peptide
  MOD_RES (1), (1): Xaa is C or S
XEEVIMSMEGILLVRGNDMIQMTINSTKVPA

SEQ ID NO: 75999 - protein, 40 aa, Artificial Sequence; identical to SEQ ID NO: 48449
  GFR-binding peptide
  MOD_RES (2), (36), (37): Xaa is C or S
  MOD_RES (14), (15), (16), (17), (18): Xaa is A or G
  MOD_RES (19), (20), (21), (22): Xaa is A or G or is absent

SEQ ID NO: 76000 - protein, 30 aa, Artificial Sequence; identical to SEQ ID NO: 50971
  GFR-binding peptide

SEQ ID NO: 76001 - protein, 32 aa, Artificial Sequence
  GFR-binding peptide
  MOD_RES (1), (32): Xaa is C or S
XSKVVMSMEGLVKPTRGVMIQITINSLDQPVX

SEQ ID NO: 76002 - protein, 39 aa, Artificial Sequence; identical to SEQ ID NO: 50972
  GFR-binding peptide
  MOD_RES (2), (33), (34): Xaa is C or S

SEQ ID NO: 76003 - protein, 33 aa, Artificial Sequence; identical to SEQ ID NO: 18437
  GFR-binding peptide
  MOD_RES (12), (13), (14), (15), (16): Xaa is A or G
  MOD_RES (17), (18), (19), (20): Xaa is A or G or is absent

SEQ ID NO: 76004 - protein, 35 aa, Artificial Sequence
  GFR-binding peptide
  MOD_RES (33), (34): Xaa is C or S
  MOD_RES (11), (12), (13), (14), (15): Xaa is A or G
  MOD_RES (16), (17), (18), (19): Xaa is A or G or is absent
DVVMGSMEGLXXXXXXXXXMIQMTINSMKTPTXXP

SEQ ID NO: 76005 - protein, 40 aa, Artificial Sequence; identical to SEQ ID NO: 18438
  GFR-binding peptide
  MOD_RES (37), (37): Xaa is C or S
  MOD_RES (13), (14), (15), (16), (17): Xaa is A or G
  MOD_RES (18), (19), (20), (21): Xaa is A or G or is absent

SEQ ID NO: 76006 - protein, 38 aa, Artificial Sequence
  GFR-binding peptide
  MOD_RES (2), (34), (35): Xaa is C or S
GXRDVVMGSMEGIIIQQKDNMIQMTINSMKTPTXXPGA

SEQ ID NO: 76007 - protein, 37 aa, Artificial Sequence
  GFR-binding peptide
  MOD_RES (2), (4), (35), (36): Xaa is C or S
LXGXEEVIMSMEGILLVRGNDMIQMTINSTKVPAXXT

SEQ ID NO: 76008 - protein, 42 aa, Artificial Sequence; identical to SEQ ID NO: 50979
  GFR-binding peptide
  MOD_RES (1), (3), (36), (37): Xaa is C or S
  MOD_RES (14), (15), (16), (17), (18): Xaa is A or G
  MOD_RES (19), (20), (21), (22): Xaa is A or G or is absent

SEQ ID NO: 76009 - protein, 33 aa, Artificial Sequence
  GFR-binding peptide
  MOD_RES (33), (33): Xaa is C or S
  MOD_RES (11), (12), (13), (14), (15): Xaa is A or G
  MOD_RES (16), (17), (18), (19): Xaa is A or G or is absent
RVVMNSMEGLXXXXXXXXXMIQVTINSLKTPAX

SEQ ID NO: 76010 - protein, 41 aa, Artificial Sequence; identical to SEQ ID NO: 18440
  GFR-binding peptide
  MOD_RES (1), (3), (37): Xaa is C or S

SEQ ID NO: 76011 - protein, 34 aa, Artificial Sequence; identical to SEQ ID NO: 50985
  GFR-binding peptide
  MOD_RES (31), (32): Xaa is C or S

SEQ ID NO: 76012 - protein, 41 aa, Artificial Sequence; identical to SEQ ID NO: 50987
  GFR-binding peptide
  MOD_RES (1), (3), (37), (38): Xaa is C or S
  MOD_RES (15), (16), (17), (18), (19): Xaa is A or G
  MOD_RES (20), (21), (22), (23): Xaa is A or G or is absent

SEQ ID NO: 76013 - protein, 36 aa, Artificial Sequence
  GFR-binding peptide
  MOD_RES (1), (34), (35): Xaa is C or S
  MOD_RES (12), (13), (14), (15), (16): Xaa is A or G
  MOD_RES (17), (18), (19), (20): Xaa is A or G or is absent
XEEVIMSMEGIXXXXXXXXXMIQMTINSTKVPAXXT

SEQ ID NO: 76014 - protein, 42 aa, Artificial Sequence
  GFR-binding peptide
  MOD_RES (2), (4), (38), (39): Xaa is C or S
  MOD_RES (16), (17), (18), (19), (20): Xaa is A or G
  MOD_RES (21), (22), (23), (24): Xaa is A or G or is absent
RXGXAEVVMDSMEGIXXXXXXXXXMIQITINSLRAPVXXSAP

SEQ ID NO: 76015 - protein, 33 aa, Artificial Sequence
  GFR-binding peptide
  MOD_RES (12), (13), (14), (15), (16): Xaa is A or G
  MOD_RES (17), (18), (19), (20): Xaa is A or G or is absent
SEVVMDSMEGIXXXXXXXXXMIQITINSLRTPV

SEQ ID NO: 76016 - protein, 37 aa, Artificial Sequence
  GFR-binding peptide
  MOD_RES (1), (3), (36), (37): Xaa is C or S
  MOD_RES (14), (15), (16), (17), (18): Xaa is A or G
  MOD_RES (19), (20), (21), (22): Xaa is A or G or is absent
XKXSRVIMSMEGLXXXXXXXXXMIQITINSLAQPVXX

SEQ ID NO: 76017 - protein, 34 aa, Artificial Sequence; identical to SEQ ID NO: 50996
  GFR-binding peptide
  MOD_RES (1), (32), (33): Xaa is C or S

SEQ ID NO: 76018 - protein, 40 aa, Artificial Sequence; identical to SEQ ID NO: 18449
  GFR-binding peptide
  MOD_RES (36), (36): Xaa is C or S

SEQ ID NO: 76019 - protein, 42 aa, Artificial Sequence
  GFR-binding peptide
  MOD_RES (2), (4), (36), (37): Xaa is C or S
HXGXSRVVMNSMEGIIVNSSDDMIQVTINSLKTPAXXPKPVH

SEQ ID NO: 76020 - protein, 40 aa, Artificial Sequence
  GFR-binding peptide
  MOD_RES (2), (4), (37), (38): Xaa is C or S
  MOD_RES (15), (16), (17), (18), (19): Xaa is A or G
  MOD_RES (20), (21), (22), (23): Xaa is A or G or is absent
SXKXSRVIMSMEGLXXXXXXXXXMIQITINSLAQPVXXPA

SEQ ID NO: 76021 - protein, 39 aa, Artificial Sequence; identical to SEQ ID NO: 51004
  GFR-binding peptide
  MOD_RES (1), (34), (35): Xaa is C or S
  MOD_RES (12), (13), (14), (15), (16): Xaa is A or G
  MOD_RES (17), (18), (19), (20): Xaa is A or G or is absent

SEQ ID NO: 76022 - protein, 42 aa, Artificial Sequence; identical to SEQ ID NO: 18453
  GFR-binding peptide
  MOD_RES (2), (4), (38): Xaa is C or S
  MOD_RES (16), (17), (18), (19), (20): Xaa is A or G
  MOD_RES (21), (22), (23), (24): Xaa is A or G or is absent

SEQ ID NO: 76023 - protein, 39 aa, Artificial Sequence
  GFR-binding peptide
  MOD_RES (2), (4), (36), (37): Xaa is C or S
RXGXAEVVMDSMEGIVVNNAADMIQITINSLRAPVXXSA

SEQ ID NO: 76024 - protein, 39 aa, Artificial Sequence; identical to SEQ ID NO: 48481
  GFR-binding peptide
  MOD_RES (1), (3), (35), (36): Xaa is C or S

SEQ ID NO: 76025 - protein, 35 aa, Artificial Sequence; identical to SEQ ID NO: 18455
  GFR-binding peptide
  MOD_RES (35), (35): Xaa is C or S
  MOD_RES (11), (12), (13), (14), (15): Xaa is A or G
  MOD_RES (16), (17), (18), (19): Xaa is A or G or is absent

SEQ ID NO: 76026 - protein, 38 aa, Artificial Sequence; identical to SEQ ID NO: 51014
  GFR-binding peptide
  MOD_RES (1), (3), (34), (35): Xaa is C or S

SEQ ID NO: 76027 - protein, 38 aa, Artificial Sequence; identical to SEQ ID NO: 18456
  GFR-binding peptide
  MOD_RES (1), (38): Xaa is C or S
  MOD_RES (14), (15), (16), (17), (18): Xaa is A or G
  MOD_RES (19), (20), (21), (22): Xaa is A or G or is absent

SEQ ID NO: 76028 - protein, 42 aa, Artificial Sequence; identical to SEQ ID NO: 18457
  GFR-binding peptide
  MOD_RES (2), (4), (41): Xaa is C or S

SEQ ID NO: 76029 - protein, 38 aa, Artificial Sequence
  GFR-binding peptide
  MOD_RES (2), (4), (37), (38): Xaa is C or S
  MOD_RES (15), (16), (17), (18), (19): Xaa is A or G
  MOD_RES (20), (21), (22), (23): Xaa is A or G or is absent
SXKXSRVIMSMEGLXXXXXXXXXMIQITINSLAQPVXX

SEQ ID NO: 76030 - protein, 39 aa, Artificial Sequence; identical to SEQ ID NO: 48492
  GFR-binding peptide
  MOD_RES (2), (36), (37): Xaa is C or S
  MOD_RES (14), (15), (16), (17), (18): Xaa is A or G
  MOD_RES (19), (20), (21), (22): Xaa is A or G or is absent

SEQ ID NO: 76031 - protein, 34 aa, Artificial Sequence; identical to SEQ ID NO: 18460
  GFR-binding peptide
  MOD_RES (34), (34): Xaa is C or S
  MOD_RES (12), (13), (14), (15), (16): Xaa is A or G
  MOD_RES (17), (18), (19), (20): Xaa is A or G or is absent

SEQ ID NO: 76032 - protein, 41 aa, Artificial Sequence; identical to SEQ ID NO: 48493
  GFR-binding peptide
  MOD_RES (1), (3), (36), (37): Xaa is C or S
  MOD_RES (14), (15), (16), (17), (18): Xaa is A or G
  MOD_RES (19), (20), (21), (22): Xaa is A or G or is absent

SEQ ID NO: 76033 - protein, 42 aa, Artificial Sequence
  GFR-binding peptide
  MOD_RES (1), (3), (37), (38): Xaa is C or S
  MOD_RES (15), (16), (17), (18), (19): Xaa is A or G
  MOD_RES (20), (21), (22), (23): Xaa is A or G or is absent
XGXSRVVMNSMEGLXXXXXXXXXMIQVTINSLKTPAXXPKPV

SEQ ID NO: 76034 - protein, 40 aa, Artificial Sequence; identical to SEQ ID NO: 18462
  GFR-binding peptide
  MOD_RES (2), (4), (38): Xaa is C or S

SEQ ID NO: 76035 - protein, 40 aa, Artificial Sequence
  GFR-binding peptide
  MOD_RES (1), (3), (37), (38): Xaa is C or S
  MOD_RES (15), (16), (17), (18), (19): Xaa is A or G
  MOD_RES (20), (21), (22), (23): Xaa is A or G or is absent
XGXRDVVMGSMEGIXXXXXXXXXMIQMTINSMKTPTXXPG

SEQ ID NO: 76036 - protein, 41 aa, Artificial Sequence; identical to SEQ ID NO: 18463
  GFR-binding peptide
  MOD_RES (2), (39): Xaa is C or S
  MOD_RES (15), (16), (17), (18), (19): Xaa is A or G
  MOD_RES (20), (21), (22), (23): Xaa is A or G or is absent

SEQ ID NO: 76037 - protein, 34 aa, Artificial Sequence
  GFR-binding peptide
  MOD_RES (1), (1): Xaa is C or S
  MOD_RES (13), (14), (15), (16), (17): Xaa is A or G
  MOD_RES (18), (19), (20), (21): Xaa is A or G or is absent
XRDVVMGSMEGIXXXXXXXXXMIQMTINSMKTPT

SEQ ID NO: 76038 - protein, 42 aa, Artificial Sequence; identical to SEQ ID NO: 18464
  GFR-binding peptide
  MOD_RES (1), (3), (40): Xaa is C or S
  MOD_RES (16), (17), (18), (19), (20): Xaa is A or G
  MOD_RES (21), (22), (23), (24): Xaa is A or G or is absent

SEQ ID NO: 76039 - protein, 35 aa, Artificial Sequence
  GFR-binding peptide
  MOD_RES (31), (32): Xaa is C or S
EVVMDSMEGLVVNNAADMIQITINSLRAPVXXSAP

SEQ ID NO: 76040 - protein, 42 aa, Artificial Sequence; identical to SEQ ID NO: 18465
  GFR-binding peptide
  MOD_RES (1), (3), (40): Xaa is C or S
  MOD_RES (16), (17), (18), (19), (20): Xaa is A or G
  MOD_RES (21), (22), (23), (24): Xaa is A or G or is absent

SEQ ID NO: 76041 - protein, 34 aa, Artificial Sequence
  GFR-binding peptide
  MOD_RES (2), (33), (34): Xaa is C or S
KXSKVVMSMEGLVKPTRGVMIQITINSLDQPVXX

SEQ ID NO: 76042 - protein, 40 aa, Artificial Sequence; identical to SEQ ID NO: 18466
  GFR-binding peptide
  MOD_RES (1), (35): Xaa is C or S
  MOD_RES (13), (14), (15), (16), (17): Xaa is A or G
  MOD_RES (18), (19), (20), (21): Xaa is A or G or is absent

SEQ ID NO: 76043 - protein, 41 aa, Artificial Sequence; identical to SEQ ID NO: 18467
  GFR-binding peptide
  MOD_RES (2), (4), (38): Xaa is C or S

SEQ ID NO: 76044 - protein, 36 aa, Artificial Sequence
  GFR-binding peptide
  MOD_RES (1), (3), (35), (36): Xaa is C or S
XGXSRVVMNSMEGLIVNSSDDMIQVTINSLKTPAXX

SEQ ID NO: 76045 - protein, 38 aa, Artificial Sequence; identical to SEQ ID NO: 18468
  GFR-binding peptide
  MOD_RES (2), (4): Xaa is C or S
  MOD_RES (17), (18), (19), (20), (21): Xaa is A or G
  MOD_RES (22), (23), (24), (25): Xaa is A or G or is absent

SEQ ID NO: 76046 - protein, 41 aa, Artificial Sequence; identical to SEQ ID NO: 18470
  GFR-binding peptide
  MOD_RES (1), (3), (40): Xaa is C or S
  MOD_RES (16), (17), (18), (19), (20): Xaa is A or G
  MOD_RES (21), (22), (23), (24): Xaa is A or G or is absent

SEQ ID NO: 76047 - protein, 39 aa, Artificial Sequence; identical to SEQ ID NO: 51033
  GFR-binding peptide
  MOD_RES (2), (33), (34): Xaa is C or S

SEQ ID NO: 76048 - protein, 39 aa, Artificial Sequence; identical to SEQ ID NO: 18471
  GFR-binding peptide
  MOD_RES (1), (3): Xaa is C or S
  MOD_RES (16), (17), (18), (19), (20): Xaa is A or G
  MOD_RES (21), (22), (23), (24): Xaa is A or G or is absent

SEQ ID NO: 76049 - protein, 39 aa, Artificial Sequence
  GFR-binding peptide
  MOD_RES (34), (35): Xaa is C or S
  MOD_RES (12), (13), (14), (15), (16): Xaa is A or G
  MOD_RES (17), (18), (19), (20): Xaa is A or G or is absent
AEVVMDSMEGLXXXXXXXXXMIQITINSLRAPVXXSAPA

SEQ ID NO: 76050 - protein, 41 aa, Artificial Sequence; identical to SEQ ID NO: 18472
  GFR-binding peptide
  MOD_RES (1), (3), (37): Xaa is C or S
  MOD_RES (15), (16), (17), (18), (19): Xaa is A or G
  MOD_RES (20), (21), (22), (23): Xaa is A or G or is absent

SEQ ID NO: 76051 - protein, 40 aa, Artificial Sequence
  GFR-binding peptide
  MOD_RES (34), (35): Xaa is C or S
  MOD_RES (12), (13), (14), (15), (16): Xaa is A or G
  MOD_RES (17), (18), (19), (20): Xaa is A or G or is absent
SEVVMDSMEGLXXXXXXXXXMIQITINSLRTPVXXTPPTS

SEQ ID NO: 76052 - protein, 42 aa, Artificial Sequence; identical to SEQ ID NO: 18474
  GFR-binding peptide
  MOD_RES (2), (36): Xaa is C or S

SEQ ID NO: 76053 - protein, 38 aa, Artificial Sequence
  GFR-binding peptide
  MOD_RES (1), (3), (34), (35): Xaa is C or S
XKXSKVVMSMEGLVKPTRGVMIQITINSLDQPVXXPSA

SEQ ID NO: 76054 - protein, 37 aa, Artificial Sequence
  GFR-binding peptide
  MOD_RES (2), (4), (35), (36): Xaa is C or S
SXKXSKVVMSMEGLVKPTRGVMIQITINSLDQPVXXP

SEQ ID NO: 76055 - protein, 40 aa, Artificial Sequence; identical to SEQ ID NO: 18475
  GFR-binding peptide
  MOD_RES (34), (34): Xaa is C or S
  MOD_RES (12), (13), (14), (15), (16): Xaa is A or G
  MOD_RES (17), (18), (19), (20): Xaa is A or G or is absent

SEQ ID NO: 76056 - protein, 34 aa, Artificial Sequence
  GFR-binding peptide
  MOD_RES (31), (32): Xaa is C or S
SRVIMSMEGLVKPKRGVMIQITINSLAQPVXXPA

SEQ ID NO: 76057 - protein, 40 aa, Artificial Sequence; identical to SEQ ID NO: 18477
  GFR-binding peptide
  MOD_RES (1), (38): Xaa is C or S

SEQ ID NO: 76058 - protein, 44 aa, Artificial Sequence; identical to SEQ ID NO: 18478
  GFR-binding peptide
  MOD_RES (2), (4), (38): Xaa is C or S

SEQ ID NO: 76059 - protein, 40 aa, Artificial Sequence
  GFR-binding peptide
  MOD_RES (1), (35), (36): Xaa is C or S
  MOD_RES (13), (14), (15), (16), (17): Xaa is A or G
  MOD_RES (18), (19), (20), (21): Xaa is A or G or is absent
XSEVVMDSMEGIXXXXXXXXXMIQITINSLRTPVXXTPPT

SEQ ID NO: 76060 - protein, 34 aa, Artificial Sequence
  GFR-binding peptide
  MOD_RES (32), (33): Xaa is C or S
RDVVMGSMEGLIIQQKDNMIQMTINSMKTPTXXP

SEQ ID NO: 76061 - protein, 37 aa, Artificial Sequence; identical to SEQ ID NO: 18481
  GFR-binding peptide
  MOD_RES (34), (34): Xaa is C or S
  MOD_RES (12), (13), (14), (15), (16): Xaa is A or G
  MOD_RES (17), (18), (19), (20): Xaa is A or G or is absent

SEQ ID NO: 76062 - protein, 39 aa, Artificial Sequence; identical to SEQ ID NO: 18482
  GFR-binding peptide
  MOD_RES (1), (38): Xaa is C or S
  MOD_RES (14), (15), (16), (17), (18): Xaa is A or G
  MOD_RES (19), (20), (21), (22): Xaa is A or G or is absent

SEQ ID NO: 76063 - protein, 38 aa, Artificial Sequence
  GFR-binding peptide
  MOD_RES (1), (33), (34): Xaa is C or S
XRDVVMGSMEGLIIQQKDNMIQMTINSMKTPTXXPGAS

SEQ ID NO: 76064 - protein, 33 aa, Artificial Sequence; identical to SEQ ID NO: 18483
  GFR-binding peptide

SEQ ID NO: 76065 - protein, 40 aa, Artificial Sequence; identical to SEQ ID NO: 18484
  GFR-binding peptide
  MOD_RES (36), (36): Xaa is C or S

SEQ ID NO: 76066 - protein, 36 aa, Artificial Sequence; identical to SEQ ID NO: 18485
  GFR-binding peptide
  MOD_RES (1), (1): Xaa is C or S

SEQ ID NO: 76067 - protein, 43 aa, Artificial Sequence; identical to SEQ ID NO: 18486
  GFR-binding peptide
  MOD_RES (2), (4), (38): Xaa is C or S

SEQ ID NO: 76068 - protein, 37 aa, Artificial Sequence
  GFR-binding peptide
  MOD_RES (33), (34): Xaa is C or S
  MOD_RES (11), (12), (13), (14), (15): Xaa is A or G
  MOD_RES (16), (17), (18), (19): Xaa is A or G or is absent
EVVMDSMEGLXXXXXXXXXMIQITINSLRAPVXXSAP

SEQ ID NO: 76069 - protein, 40 aa, Artificial Sequence
  GFR-binding peptide
  MOD_RES (34), (35): Xaa is C or S
  MOD_RES (12), (13), (14), (15), (16): Xaa is A or G
  MOD_RES (17), (18), (19), (20): Xaa is A or G or is absent
AEVVMDSMEGLXXXXXXXXXMIQITINSLRAPVXXSAPAA

SEQ ID NO: 76070 - protein, 42 aa, Artificial Sequence; identical to SEQ ID NO: 18488
  GFR-binding peptide
  MOD_RES (1), (3), (40): Xaa is C or S
  MOD_RES (16), (17), (18), (19), (20): Xaa is A or G
  MOD_RES (21), (22), (23), (24): Xaa is A or G or is absent

SEQ ID NO: 76071 - protein, 39 aa, Artificial Sequence
  GFR-binding peptide
  MOD_RES (1), (35), (36): Xaa is C or S
  MOD_RES (13), (14), (15), (16), (17): Xaa is A or G
  MOD_RES (18), (19), (20), (21): Xaa is A or G or is absent
XRDVVMGSMEGIXXXXXXXXXMIQMTINSMKTPTXXPGA

SEQ ID NO: 76072 - protein, 34 aa, Artificial Sequence; identical to SEQ ID NO: 48538
  GFR-binding peptide
  MOD_RES (1), (32), (33): Xaa is C or S

SEQ ID NO: 76073 - protein, 39 aa, Artificial Sequence
  GFR-binding peptide
  MOD_RES (1), (34), (35): Xaa is C or S
  MOD_RES (12), (13), (14), (15), (16): Xaa is A or G
  MOD_RES (17), (18), (19), (20): Xaa is A or G or is absent
XSRVIMSMEGLXXXXXXXXXMIQITINSLAQPVXXPAAS

SEQ ID NO: 76074 - protein, 37 aa, Artificial Sequence; identical to SEQ ID NO: 48542
  GFR-binding peptide
  MOD_RES (32), (33): Xaa is C or S

SEQ ID NO: 76075 - protein, 34 aa, Artificial Sequence
  GFR-binding peptide
  MOD_RES (2), (33), (34): Xaa is C or S
GXEEVIMSMEGLLLVRGNDMIQMTINSTKVPAXX

SEQ ID NO: 76076 - protein, 32 aa, Artificial Sequence
  GFR-binding peptide
  MOD_RES (1), (1): Xaa is C or S
XAEVVMDSMEGIVVNNAADMIQITINSLRAPV

SEQ ID NO: 76077 - protein, 32 aa, Artificial Sequence
  GFR-binding peptide
  MOD_RES (31), (32): Xaa is C or S
EVVMDSMEGIVVNNASDMIQITINSLRTPVXX

SEQ ID NO: 76078 - protein, 34 aa, Artificial Sequence
  GFR-binding peptide
  MOD_RES (32), (33): Xaa is C or S
AEVVMDSMEGIVVNNAADMIQITINSLRAPVXXS

SEQ ID NO: 76079 - protein, 34 aa, Artificial Sequence; identical to SEQ ID NO: 48549
  GFR-binding peptide
  MOD_RES (34), (34): Xaa is C or S
  MOD_RES (12), (13), (14), (15), (16): Xaa is A or G
  MOD_RES (17), (18), (19), (20): Xaa is A or G or is absent

SEQ ID NO: 76080 - protein, 32 aa, Artificial Sequence; identical to SEQ ID NO: 18496
  GFR-binding peptide
  MOD_RES (11), (12), (13), (14), (15): Xaa is A or G
  MOD_RES (16), (17), (18), (19): Xaa is A or G or is absent

SEQ ID NO: 76081 - protein, 34 aa, Artificial Sequence
  GFR-binding peptide
  MOD_RES (2), (33), (34): Xaa is C or S
GXEEVIMSMEGILLVRGNDMIQMTINSTKVPAXX

SEQ ID NO: 76082 - protein, 37 aa, Artificial Sequence
  GFR-binding peptide
  MOD_RES (2), (4): Xaa is C or S
  MOD_RES (16), (17), (18), (19), (20): Xaa is A or G
  MOD_RES (21), (22), (23), (24): Xaa is A or G or is absent
RXGXSEVVMDSMEGLXXXXXXXXXMIQITINSLRTPV

SEQ ID NO: 76083 - protein, 41 aa, Artificial Sequence; identical to SEQ ID NO: 18497
  GFR-binding peptide
  MOD_RES (37), (37): Xaa is C or S
  MOD_RES (13), (14), (15), (16), (17): Xaa is A or G
  MOD_RES (18), (19), (20), (21): Xaa is A or G or is absent

SEQ ID NO: 76084 - protein, 38 aa, Artificial Sequence
  GFR-binding peptide
  MOD_RES (1), (3), (36), (37): Xaa is C or S
  MOD_RES (14), (15), (16), (17), (18): Xaa is A or G
  MOD_RES (19), (20), (21), (22): Xaa is A or G or is absent
XGXEEVIMSMEGLXXXXXXXXXMIQMTINSTKVPAXXT

SEQ ID NO: 76085 - protein, 37 aa, Artificial Sequence; identical to SEQ ID NO: 18498
  GFR-binding peptide
  MOD_RES (1), (3): Xaa is C or S
  MOD_RES (16), (17), (18), (19), (20): Xaa is A or G
  MOD_RES (21), (22), (23), (24): Xaa is A or G or is absent

SEQ ID NO: 76086 - protein, 37 aa, Artificial Sequence
  GFR-binding peptide
  MOD_RES (33), (34): Xaa is C or S
  MOD_RES (11), (12), (13), (14), (15): Xaa is A or G
  MOD_RES (16), (17), (18), (19): Xaa is A or G or is absent
RVVMNSMEGLXXXXXXXXXMIQVTINSLKTPAXXPKP

SEQ ID NO: 76087 - protein, 33 aa, Artificial Sequence; identical to SEQ ID NO: 18499
  GFR-binding peptide

SEQ ID NO: 76088 - protein, 32 aa, Artificial Sequence; identical to SEQ ID NO: 51079
  GFR-binding peptide
  MOD_RES (2), (2): Xaa is C or S

SEQ ID NO: 76089 - protein, 35 aa, Artificial Sequence
  GFR-binding peptide
  MOD_RES (33), (34): Xaa is C or S
  MOD_RES (11), (12), (13), (14), (15): Xaa is A or G
  MOD_RES (16), (17), (18), (19): Xaa is A or G or is absent
EEVIMSMEGLXXXXXXXXXMIQMTINSTKVPAXXT

SEQ ID NO: 76090 - protein, 44 aa, Artificial Sequence
  GFR-binding peptide
  MOD_RES (2), (4), (38), (39): Xaa is C or S
  MOD_RES (16), (17), (18), (19), (20): Xaa is A or G
  MOD_RES (21), (22), (23), (24): Xaa is A or G or is absent
SXGXRDVVMGSMEGLXXXXXXXXXMIQMTINSMKTPTXXPGASG

SEQ ID NO: 76091 - protein, 43 aa, Artificial Sequence
  GFR-binding peptide
  MOD_RES (1), (3), (37), (38): Xaa is C or S
  MOD_RES (15), (16), (17), (18), (19): Xaa is A or G
  MOD_RES (20), (21), (22), (23): Xaa is A or G or is absent
XGXAEVVMDSMEGLXXXXXXXXXMIQITINSLRAPVXXSAPAA

SEQ ID NO: 76092 - protein, 36 aa, Artificial Sequence; identical to SEQ ID NO: 18501
  GFR-binding peptide
  MOD_RES (1), (3): Xaa is C or S
  MOD_RES (15), (16), (17), (18), (19): Xaa is A or G
  MOD_RES (20), (21), (22), (23): Xaa is A or G or is absent

SEQ ID NO: 76093 - protein, 38 aa, Artificial Sequence; identical to SEQ ID NO: 18502
  GFR-binding peptide
  MOD_RES (1), (3): Xaa is C or S

SEQ ID NO: 76094 - protein, 37 aa, Artificial Sequence
  GFR-binding peptide
  MOD_RES (2), (34), (35): Xaa is C or S
GXRDVVMGSMEGIIIQQKDNMIQMTINSMKTPTXXPG

SEQ ID NO: 76095 - protein, 40 aa, Artificial Sequence; identical to SEQ ID NO: 18503
  GFR-binding peptide
  MOD_RES (1), (3), (37): Xaa is C or S
  MOD_RES (15), (16), (17), (18), (19): Xaa is A or G
  MOD_RES (20), (21), (22), (23): Xaa is A or G or is absent

SEQ ID NO: 76096 - protein, 41 aa, Artificial Sequence; identical to SEQ ID NO: 18505
  GFR-binding peptide
  MOD_RES (2), (36): Xaa is C or S
  MOD_RES (14), (15), (16), (17), (18): Xaa is A or G
  MOD_RES (19), (20), (21), (22): Xaa is A or G or is absent

SEQ ID NO: 76097 - protein, 37 aa, Artificial Sequence; identical to SEQ ID NO: 18506
  GFR-binding peptide
  MOD_RES (35), (35): Xaa is C or S

SEQ ID NO: 76098 - protein, 33 aa, Artificial Sequence
  GFR-binding peptide
  MOD_RES (31), (32): Xaa is C or S
EVVMDSMEGLVVNNAADMIQITINSLRAPVXXS

SEQ ID NO: 76099 - protein, 38 aa, Artificial Sequence
  GFR-binding peptide
  MOD_RES (1), (35), (36): Xaa is C or S
  MOD_RES (13), (14), (15), (16), (17): Xaa is A or G
  MOD_RES (18), (19), (20), (21): Xaa is A or G or is absent
XRDVVMGSMEGIXXXXXXXXXMIQMTINSMKTPTXXPG

SEQ ID NO: 76100 - protein, 37 aa, Artificial Sequence
  GFR-binding peptide
  MOD_RES (2), (34), (35): Xaa is C or S
GXAEVVMDSMEGLVVNNAADMIQITINSLRAPVXXSA

SEQ ID NO: 76101 - protein, 40 aa, Artificial Sequence
  GFR-binding peptide
  MOD_RES (2), (4), (36), (37): Xaa is C or S
RXGXAEVVMDSMEGLVVNNAADMIQITINSLRAPVXXSAP

SEQ ID NO: 76102 - protein, 38 aa, Artificial Sequence; identical to SEQ ID NO: 18510
  GFR-binding peptide
  MOD_RES (34), (34): Xaa is C or S
  MOD_RES (12), (13), (14), (15), (16): Xaa is A or G
  MOD_RES (17), (18), (19), (20): Xaa is A or G or is absent

SEQ ID NO: 76103 - protein, 39 aa, Artificial Sequence
  GFR-binding peptide
  MOD_RES (2), (4), (37), (38): Xaa is C or S
  MOD_RES (15), (16), (17), (18), (19): Xaa is A or G
  MOD_RES (20), (21), (22), (23): Xaa is A or G or is absent
SXKXSRVIMSMEGLXXXXXXXXXMIQITINSLAQPVXXP

SEQ ID NO: 76104 - protein, 32 aa, Artificial Sequence
  GFR-binding peptide
  MOD_RES (1), (32): Xaa is C or S
XEEVIMSMEGILLVRGNDMIQMTINSTKVPAX

SEQ ID NO: 76105 - protein, 39 aa, Artificial Sequence
  GFR-binding peptide
  MOD_RES (2), (36), (37): Xaa is C or S
  MOD_RES (14), (15), (16), (17), (18): Xaa is A or G
  MOD_RES (19), (20), (21), (22): Xaa is A or G or is absent
GXAEVVMDSMEGLXXXXXXXXXMIQITINSLRAPVXXSA

SEQ ID NO: 76106 - protein, 35 aa, Artificial Sequence; identical to SEQ ID NO: 18512
  GFR-binding peptide
  MOD_RES (1), (1): Xaa is C or S

SEQ ID NO: 76107 - protein, 41 aa, Artificial Sequence
  GFR-binding peptide
  MOD_RES (1), (3), (37), (38): Xaa is C or S
  MOD_RES (15), (16), (17), (18), (19): Xaa is A or G
  MOD_RES (20), (21), (22), (23): Xaa is A or G or is absent
XGXSEVVMDSMEGIXXXXXXXXXMIQITINSLRTPVXXTPP

SEQ ID NO: 76108 - protein, 31 aa, Artificial Sequence
  GFR-binding peptide
  MOD_RES (1), (1): Xaa is C or S
XSKVVMSMEGLVKPTRGVMIQITINSLDQPV

SEQ ID NO: 76109 - protein, 38 aa, Artificial Sequence; identical to SEQ ID NO: 18513
  GFR-binding peptide
  MOD_RES (36), (36): Xaa is C or S

SEQ ID NO: 76110 - protein, 36 aa, Artificial Sequence
  GFR-binding peptide
  MOD_RES (33), (34): Xaa is C or S
  MOD_RES (11), (12), (13), (14), (15): Xaa is A or G
  MOD_RES (16), (17), (18), (19): Xaa is A or G or is absent
DVVMGSMEGLXXXXXXXXXMIQMTINSMKTPTXXPG

SEQ ID NO: 76111 - protein, 39 aa, Artificial Sequence
  GFR-binding peptide
  MOD_RES (2), (4), (38), (39): Xaa is C or S
  MOD_RES (16), (17), (18), (19), (20): Xaa is A or G
  MOD_RES (21), (22), (23), (24): Xaa is A or G or is absent
RXGXSEVVMDSMEGIXXXXXXXXXMIQITINSLRTPVXX

SEQ ID NO: 76112 - protein, 42 aa, Artificial Sequence; identical to SEQ ID NO: 18517
  GFR-binding peptide
  MOD_RES (2), (39): Xaa is C or S

SEQ ID NO: 76113 - protein, 40 aa, Artificial Sequence
  GFR-binding peptide
  MOD_RES (1), (3), (35), (36): Xaa is C or S
XGXSRVVMNSMEGLIVNSSDDMIQVTINSLKTPAXXPKPV

SEQ ID NO: 76114 - protein, 38 aa, Artificial Sequence
  GFR-binding peptide
  MOD_RES (2), (4), (38): Xaa is C or S
  MOD_RES (16), (17), (18), (19), (20): Xaa is A or G
  MOD_RES (21), (22), (23), (24): Xaa is A or G or is absent
RXGXAEVVMDSMEGIXXXXXXXXXMIQITINSLRAPVX

SEQ ID NO: 76115 - protein, 38 aa, Artificial Sequence; identical to SEQ ID NO: 18518
  GFR-binding peptide
  MOD_RES (34), (34): Xaa is C or S

SEQ ID NO: 76116 - protein, 33 aa, Artificial Sequence; identical to SEQ ID NO: 51104
  GFR-binding peptide
  MOD_RES (2), (33): Xaa is C or S

SEQ ID NO: 76117 - protein, 36 aa, Artificial Sequence; identical to SEQ ID NO: 18520
  GFR-binding peptide
  MOD_RES (1), (1): Xaa is C or S

SEQ ID NO: 76118 - protein, 36 aa, Artificial Sequence; identical to SEQ ID NO: 18524
  GFR-binding peptide
  MOD_RES (35), (35): Xaa is C or S

SEQ ID NO: 76119 - protein, 37 aa, Artificial Sequence; identical to SEQ ID NO: 18525
  GFR-binding peptide
  MOD_RES (2), (2): Xaa is C or S
  MOD_RES (15), (16), (17), (18), (19): Xaa is A or G
  MOD_RES (20), (21), (22), (23): Xaa is A or G or is absent

SEQ ID NO: 76120 - protein, 33 aa, Artificial Sequence; identical to SEQ ID NO: 18526
  GFR-binding peptide

SEQ ID NO: 76121 - protein, 37 aa, Artificial Sequence
  GFR-binding peptide
  MOD_RES (2), (34), (35): Xaa is C or S
GXSRVVMNSMEGLIVNSSDDMIQVTINSLKTPAXXPK

SEQ ID NO: 76122 - protein, 34 aa, Artificial Sequence; identical to SEQ ID NO: 18527
  GFR-binding peptide

SEQ ID NO: 76123 - protein, 34 aa, Artificial Sequence
  GFR-binding peptide
  MOD_RES (2), (34): Xaa is C or S
GXRDVVMGSMEGLIIQQKDNMIQMTINSMKTPTX

SEQ ID NO: 76124 - protein, 36 aa, Artificial Sequence; identical to SEQ ID NO: 18529
  GFR-binding peptide
  MOD_RES (35), (35): Xaa is C or S

SEQ ID NO: 76125 - protein, 37 aa, Artificial Sequence; identical to SEQ ID NO: 51117
  GFR-binding peptide
  MOD_RES (2), (33), (34): Xaa is C or S

SEQ ID NO: 76126 - protein, 42 aa, Artificial Sequence
  GFR-binding peptide
  MOD_RES (2), (4), (37), (38): Xaa is C or S
  MOD_RES (15), (16), (17), (18), (19): Xaa is A or G
  MOD_RES (20), (21), (22), (23): Xaa is A or G or is absent
SXKXSRVIMSMEGLXXXXXXXXXMIQITINSLAQPVXXPAAS

SEQ ID NO: 76127 - protein, 38 aa, Artificial Sequence
  GFR-binding peptide
  MOD_RES (2), (35), (36): Xaa is C or S
  MOD_RES (13), (14), (15), (16), (17): Xaa is A or G
  MOD_RES (18), (19), (20), (21): Xaa is A or G or is absent
KXSKVIMSMEGLXXXXXXXXXMIQITINSLDQSVXXPS

SEQ ID NO: 76128 - protein, 38 aa, Artificial Sequence
  GFR-binding peptide
  MOD_RES (2), (36), (37): Xaa is C or S
  MOD_RES (14), (15), (16), (17), (18): Xaa is A or G
  MOD_RES (19), (20), (21), (22): Xaa is A or G or is absent
GXAEVVMDSMEGIXXXXXXXXXMIQITINSLRAPVXXS

SEQ ID NO: 76129 - protein, 37 aa, Artificial Sequence
  GFR-binding peptide
  MOD_RES (2), (33), (34): Xaa is C or S
KXSRVIMSMEGLVKPKRGVMIQITINSLAQPVXXPAA

SEQ ID NO: 76130 - protein, 35 aa, Artificial Sequence
  GFR-binding peptide
  MOD_RES (2), (4), (35): Xaa is C or S
LXGXEEVIMSMEGILLVRGNDMIQMTINSTKVPAX

SEQ ID NO: 76131 - protein, 38 aa, Artificial Sequence; identical to SEQ ID NO: 18533
  GFR-binding peptide
  MOD_RES (35), (35): Xaa is C or S
  MOD_RES (11), (12), (13), (14), (15): Xaa is A or G
  MOD_RES (16), (17), (18), (19): Xaa is A or G or is absent

SEQ ID NO: 76132 - protein, 33 aa, Artificial Sequence
  GFR-binding peptide
  MOD_RES (1), (33): Xaa is C or S
XRDVVMGSMEGLIIQQKDNMIQMTINSMKTPTX

SEQ ID NO: 76133 - protein, 32 aa, Artificial Sequence; identical to SEQ ID NO: 51128
  GFR-binding peptide
  MOD_RES (11), (12), (13), (14), (15): Xaa is A or G
  MOD_RES (16), (17), (18), (19): Xaa is A or G or is absent

SEQ ID NO: 76134 - protein, 35 aa, Artificial Sequence
  GFR-binding peptide
  MOD_RES (2), (2): Xaa is C or S
  MOD_RES (14), (15), (16), (17), (18): Xaa is A or G
  MOD_RES (19), (20), (21), (22): Xaa is A or G or is absent
GXAEVVMDSMEGIXXXXXXXXXMIQITINSLRAPV

SEQ ID NO: 76135 - protein, 38 aa, Artificial Sequence; identical to SEQ ID NO: 51132
  GFR-binding peptide
  MOD_RES (2), (4), (37), (38): Xaa is C or S
  MOD_RES (15), (16), (17), (18), (19): Xaa is A or G
  MOD_RES (20), (21), (22), (23): Xaa is A or G or is absent

SEQ ID NO: 76136 - protein, 38 aa, Artificial Sequence; identical to SEQ ID NO: 18537
  GFR-binding peptide
  MOD_RES (2), (4), (38): Xaa is C or S
  MOD_RES (16), (17), (18), (19), (20): Xaa is A or G
  MOD_RES (21), (22), (23), (24): Xaa is A or G or is absent

SEQ ID NO: 76137 - protein, 41 aa, Artificial Sequence; identical to SEQ ID NO: 48620
  GFR-binding peptide
  MOD_RES (1), (3), (36), (37): Xaa is C or S
  MOD_RES (14), (15), (16), (17), (18): Xaa is A or G
  MOD_RES (19), (20), (21), (22): Xaa is A or G or is absent

SEQ ID NO: 76138 - protein, 40 aa, Artificial Sequence; identical to SEQ ID NO: 18542
  GFR-binding peptide
  MOD_RES (2), (4), (38): Xaa is C or S
  MOD_RES (16), (17), (18), (19), (20): Xaa is A or G
  MOD_RES (21), (22), (23), (24): Xaa is A or G or is absent

SEQ ID NO: 76139 - protein, 38 aa, Artificial Sequence
  GFR-binding peptide
  MOD_RES (1), (3), (35), (36): Xaa is C or S
XGXSEVVMDSMEGIVVNNASDMIQITINSLRTPVXXTP

SEQ ID NO: 76140 - protein, 41 aa, Artificial Sequence; identical to SEQ ID NO: 18544
  GFR-binding peptide
  MOD_RES (2), (4), (38): Xaa is C or S
  MOD_RES (16), (17), (18), (19), (20): Xaa is A or G
  MOD_RES (21), (22), (23), (24): Xaa is A or G or is absent

SEQ ID NO: 76141 - protein, 34 aa, Artificial Sequence
  GFR-binding peptide
  MOD_RES (1), (33), (34): Xaa is C or S
XAEVVMDSMEGIVVNNAADMIQITINSLRAPVXX

SEQ ID NO: 76142 - protein, 36 aa, Artificial Sequence
  GFR-binding peptide
  MOD_RES (2), (4), (36): Xaa is C or S
RXGXAEVVMDSMEGLVVNNAADMIQITINSLRAPVX

SEQ ID NO: 76143 - protein, 36 aa, Artificial Sequence
  GFR-binding peptide
  MOD_RES (33), (34): Xaa is C or S
  MOD_RES (11), (12), (13), (14), (15): Xaa is A or G
  MOD_RES (16), (17), (18), (19): Xaa is A or G or is absent
SKVVMSMEGLXXXXXXXXXMIQITINSLDQPVXXPS

SEQ ID NO: 76144 - protein, 41 aa, Artificial Sequence; identical to SEQ ID NO: 18546
  GFR-binding peptide
  MOD_RES (2), (36): Xaa is C or S

SEQ ID NO: 76145 - protein, 41 aa, Artificial Sequence
  GFR-binding peptide
  MOD_RES (2), (4), (38), (39): Xaa is C or S
  MOD_RES (16), (17), (18), (19), (20): Xaa is A or G
  MOD_RES (21), (22), (23), (24): Xaa is A or G or is absent
RXGXSEVVMDSMEGLXXXXXXXXXMIQITINSLRTPVXXTP

SEQ ID NO: 76146 - protein, 36 aa, Artificial Sequence; identical to SEQ ID NO: 18549
  GFR-binding peptide
  MOD_RES (36), (36): Xaa is C or S
  MOD_RES (12), (13), (14), (15), (16): Xaa is A or G
  MOD_RES (17), (18), (19), (20): Xaa is A or G or is absent

SEQ ID NO: 76147 - protein, 37 aa, Artificial Sequence; identical to SEQ ID NO: 18550
  GFR-binding peptide
  MOD_RES (1), (3): Xaa is C or S

SEQ ID NO: 76148 - protein, 41 aa, Artificial Sequence
  GFR-binding peptide
  MOD_RES (1), (3), (37), (38): Xaa is C or S
  MOD_RES (15), (16), (17), (18), (19): Xaa is A or G
  MOD_RES (20), (21), (22), (23): Xaa is A or G or is absent
XGXSEVVMDSMEGLXXXXXXXXXMIQITINSLRTPVXXTPP

SEQ ID NO: 76149 - protein, 36 aa, Artificial Sequence
  GFR-binding peptide
  MOD_RES (1), (32), (33): Xaa is C or S
XEEVIMSMEGILLVRGNDMIQMTINSTKVPAXXTSP

SEQ ID NO: 76150 - protein, 36 aa, Artificial Sequence; identical to SEQ ID NO: 48640
  GFR-binding peptide
  MOD_RES (2), (4), (35), (36): Xaa is C or S

SEQ ID NO: 76151 - protein, 43 aa, Artificial Sequence; identical to SEQ ID NO: 18553
  GFR-binding peptide
  MOD_RES (1), (3), (37): Xaa is C or S

SEQ ID NO: 76152 - protein, 45 aa, Artificial Sequence; identical to SEQ ID NO: 18554
  GFR-binding peptide
  MOD_RES (2), (4), (41): Xaa is C or S

SEQ ID NO: 76153 - protein, 37 aa, Artificial Sequence
  GFR-binding peptide
  MOD_RES (2), (34), (35): Xaa is C or S
GXAEVVMDSMEGIVVNNAADMIQITINSLRAPVXXSA

SEQ ID NO: 76154 - protein, 38 aa, Artificial Sequence; identical to SEQ ID NO: 18555
  GFR-binding peptide
  MOD_RES (1), (38): Xaa is C or S
  MOD_RES (14), (15), (16), (17), (18): Xaa is A or G
  MOD_RES (19), (20), (21), (22): Xaa is A or G or is absent

SEQ ID NO: 76155 - protein, 34 aa, Artificial Sequence; identical to SEQ ID NO: 18559
  GFR-binding peptide

SEQ ID NO: 76156 - protein, 37 aa, Artificial Sequence; identical to SEQ ID NO: 18560
  GFR-binding peptide
  MOD_RES (34), (34): Xaa is C or S

SEQ ID NO: 76157 - protein, 40 aa, Artificial Sequence
  GFR-binding peptide
  MOD_RES (2), (4), (38), (39): Xaa is C or S
  MOD_RES (16), (17), (18), (19), (20): Xaa is A or G
  MOD_RES (21), (22), (23), (24): Xaa is A or G or is absent
RXGXAEVVMDSMEGIXXXXXXXXXMIQITINSLRAPVXXS

SEQ ID NO: 76158 - protein, 37 aa, Artificial Sequence; identical to SEQ ID NO: 51162
  GFR-binding peptide
  MOD_RES (1), (3), (36), (37): Xaa is C or S
  MOD_RES (14), (15), (16), (17), (18): Xaa is A or G
  MOD_RES (19), (20), (21), (22): Xaa is A or G or is absent

SEQ ID NO: 76159 - protein, 38 aa, Artificial Sequence
  GFR-binding peptide
  MOD_RES (1), (34), (35): Xaa is C or S
  MOD_RES (12), (13), (14), (15), (16): Xaa is A or G
  MOD_RES (17), (18), (19), (20): Xaa is A or G or is absent
XEEVIMSMEGLXXXXXXXXXMIQMTINSTKVPAXXTSP

SEQ ID NO: 76160 - protein, 42 aa, Artificial Sequence; identical to SEQ ID NO: 18563
  GFR-binding peptide
  MOD_RES (1), (3), (37): Xaa is C or S
  MOD_RES (15), (16), (17), (18), (19): Xaa is A or G
  MOD_RES (20), (21), (22), (23): Xaa is A or G or is absent

SEQ ID NO: 76161 - protein, 39 aa, Artificial Sequence
  GFR-binding peptide
  MOD_RES (1), (3), (36), (37): Xaa is C or S
  MOD_RES (14), (15), (16), (17), (18): Xaa is A or G
  MOD_RES (19), (20), (21), (22): Xaa is A or G or is absent
XGXEEVIMSMEGIXXXXXXXXXMIQMTINSTKVPAXXTS

SEQ ID NO: 76162 - protein, 32 aa, Artificial Sequence; identical to SEQ ID NO: 51165
  GFR-binding peptide
  MOD_RES (11), (12), (13), (14), (15): Xaa is A or G
  MOD_RES (16), (17), (18), (19): Xaa is A or G or is absent

SEQ ID NO: 76163 - protein, 36 aa, Artificial Sequence; identical to SEQ ID NO: 48654
  GFR-binding peptide
  MOD_RES (1), (34), (35): Xaa is C or S
  MOD_RES (12), (13), (14), (15), (16): Xaa is A or G
  MOD_RES (17), (18), (19), (20): Xaa is A or G or is absent

SEQ ID NO: 76164 - protein, 34 aa, Artificial Sequence; identical to SEQ ID NO: 18565
  GFR-binding peptide
  MOD_RES (13), (14), (15), (16), (17): Xaa is A or G
  MOD_RES (18), (19), (20), (21): Xaa is A or G or is absent

SEQ ID NO: 76165 - protein, 44 aa, Artificial Sequence; identical to SEQ ID NO: 18566
  GFR-binding peptide
  MOD_RES (2), (4), (41): Xaa is C or S
  MOD_RES (17), (18), (19), (20), (21): Xaa is A or G
  MOD_RES (22), (23), (24), (25): Xaa is A or G or is absent

SEQ ID NO: 76166 - protein, 38 aa, Artificial Sequence
  GFR-binding peptide
  MOD_RES (2), (36), (37): Xaa is C or S
  MOD_RES (14), (15), (16), (17), (18): Xaa is A or G
  MOD_RES (19), (20), (21), (22): Xaa is A or G or is absent
GXRDVVMGSMEGIXXXXXXXXXMIQMTINSMKTPTXXP

SEQ ID NO: 76167 - protein, 42 aa, Artificial Sequence; identical to SEQ ID NO: 18568
  GFR-binding peptide
  MOD_RES (1), (3), (37): Xaa is C or S
  MOD_RES (15), (16), (17), (18), (19): Xaa is A or G
  MOD_RES (20), (21), (22), (23): Xaa is A or G or is absent

SEQ ID NO: 76168 - protein, 39 aa, Artificial Sequence
  GFR-binding peptide
  MOD_RES (2), (4), (38), (39): Xaa is C or S
  MOD_RES (16), (17), (18), (19), (20): Xaa is A or G
  MOD_RES (21), (22), (23), (24): Xaa is A or G or is absent
RXGXAEVVMDSMEGLXXXXXXXXXMIQITINSLRAPVXX

SEQ ID NO: 76169 - protein, 39 aa, Artificial Sequence
  GFR-binding peptide
  MOD_RES (2), (4), (38), (39): Xaa is C or S
  MOD_RES (16), (17), (18), (19), (20): Xaa is A or G
  MOD_RES (21), (22), (23), (24): Xaa is A or G or is absent
SXGXRDVVMGSMEGIXXXXXXXXXMIQMTINSMKTPTXX

SEQ ID NO: 76170 - protein, 37 aa, Artificial Sequence
  GFR-binding peptide
  MOD_RES (2), (36), (37): Xaa is C or S
  MOD_RES (14), (15), (16), (17), (18): Xaa is A or G
  MOD_RES (19), (20), (21), (22): Xaa is A or G or is absent
GXRDVVMGSMEGLXXXXXXXXXMIQMTINSMKTPTXX

SEQ ID NO: 76171 - protein, 35 aa, Artificial Sequence; identical to SEQ ID NO: 51176
  GFR-binding peptide
  MOD_RES (31), (32): Xaa is C or S

SEQ ID NO: 76172 - protein, 34 aa, Artificial Sequence; identical to SEQ ID NO: 51177
  GFR-binding peptide
  MOD_RES (2), (4): Xaa is C or S

SEQ ID NO: 76173 - protein, 31 aa, Artificial Sequence
  GFR-binding peptide
  MOD_RES (31), (31): Xaa is C or S
EVVMDSMEGLVVNNASDMIQITINSLRTPVX

SEQ ID NO: 76174 - protein, 41 aa, Artificial Sequence; identical to SEQ ID NO: 18570
  GFR-binding peptide
  MOD_RES (2), (36): Xaa is C or S

SEQ ID NO: 76175 - protein, 34 aa, Artificial Sequence
  GFR-binding peptide
  MOD_RES (33), (34): Xaa is C or S
  MOD_RES (11), (12), (13), (14), (15): Xaa is A or G
  MOD_RES (16), (17), (18), (19): Xaa is A or G or is absent
EVVMDSMEGIXXXXXXXXXMIQITINSLRAPVXX

SEQ ID NO: 76176 - protein, 33 aa, Artificial Sequence
  GFR-binding peptide
  MOD_RES (2), (33): Xaa is C or S
GXEEVIMSMEGLLLVRGNDMIQMTINSTKVPAX

SEQ ID NO: 76177 - protein, 36 aa, Artificial Sequence
  GFR-binding peptide
  MOD_RES (2), (36): Xaa is C or S
  MOD_RES (14), (15), (16), (17), (18): Xaa is A or G
  MOD_RES (19), (20), (21), (22): Xaa is A or G or is absent
GXRDVVMGSMEGIXXXXXXXXXMIQMTINSMKTPTX

SEQ ID NO: 76178 - protein, 35 aa, Artificial Sequence; identical to SEQ ID NO: 18572
  GFR-binding peptide
  MOD_RES (12), (13), (14), (15), (16): Xaa is A or G
  MOD_RES (17), (18), (19), (20): Xaa is A or G or is absent

SEQ ID NO: 76179 - protein, 39 aa, Artificial Sequence; identical to SEQ ID NO: 18573
  GFR-binding peptide
  MOD_RES (1), (3): Xaa is C or S
  MOD_RES (16), (17), (18), (19), (20): Xaa is A or G
  MOD_RES (21), (22), (23), (24): Xaa is A or G or is absent

SEQ ID NO: 76180 - protein, 33 aa, Artificial Sequence; identical to SEQ ID NO: 51187
  GFR-binding peptide
  MOD_RES (1), (32), (33): Xaa is C or S

SEQ ID NO: 76181 - protein, 39 aa, Artificial Sequence
  GFR-binding peptide
  MOD_RES (2), (35), (36): Xaa is C or S
  MOD_RES (13), (14), (15), (16), (17): Xaa is A or G
  MOD_RES (18), (19), (20), (21): Xaa is A or G or is absent
KXSKVIMSMEGLXXXXXXXXXMIQITINSLDQSVXXPSA

SEQ ID NO: 76182 - protein, 36 aa, Artificial Sequence
  GFR-binding peptide
  MOD_RES (2), (4): Xaa is C or S
  MOD_RES (15), (16), (17), (18), (19): Xaa is A or G
  MOD_RES (20), (21), (22), (23): Xaa is A or G or is absent
SXKXSRVIMSMEGLXXXXXXXXXMIQITINSLAQPV

SEQ ID NO: 76183 - protein, 33 aa, Artificial Sequence
  GFR-binding peptide
  MOD_RES (32), (33): Xaa is C or S
AEVVMDSMEGLVVNNAADMIQITINSLRAPVXX

SEQ ID NO: 76184 - protein, 39 aa, Artificial Sequence; identical to SEQ ID NO: 18574
  GFR-binding peptide
  MOD_RES (2), (39): Xaa is C or S

SEQ ID NO: 76185 - protein, 37 aa, Artificial Sequence
  GFR-binding peptide
  MOD_RES (2), (4): Xaa is C or S
  MOD_RES (16), (17), (18), (19), (20): Xaa is A or G
  MOD_RES (21), (22), (23), (24): Xaa is A or G or is absent
HXGXSRVVMNSMEGLXXXXXXXXXMIQVTINSLKTPA

SEQ ID NO: 76186 - protein, 41 aa, Artificial Sequence; identical to SEQ ID NO: 18575
  GFR-binding peptide
  MOD_RES (2), (39): Xaa is C or S

SEQ ID NO: 76187 - protein, 39 aa, Artificial Sequence; identical to SEQ ID NO: 18577
  GFR-binding peptide
  MOD_RES (34), (34): Xaa is C or S
  MOD_RES (12), (13), (14), (15), (16): Xaa is A or G
  MOD_RES (17), (18), (19), (20): Xaa is A or G or is absent

SEQ ID NO: 76188 - protein, 39 aa, Artificial Sequence; identical to SEQ ID NO: 18578
  GFR-binding peptide
  MOD_RES (1), (3), (37): Xaa is C or S

SEQ ID NO: 76189 - protein, 39 aa, Artificial Sequence; identical to SEQ ID NO: 18579
  GFR-binding peptide
  MOD_RES (2), (36): Xaa is C or S
  MOD_RES (14), (15), (16), (17), (18): Xaa is A or G
  MOD_RES (19), (20), (21), (22): Xaa is A or G or is absent

SEQ ID NO: 76190 - protein, 38 aa, Artificial Sequence
  GFR-binding peptide
  MOD_RES (1), (33), (34): Xaa is C or S
XRDVVMGSMEGIIIQQKDNMIQMTINSMKTPTXXPGAS

SEQ ID NO: 76191 - protein, 33 aa, Artificial Sequence
  GFR-binding peptide
  MOD_RES (33), (33): Xaa is C or S
  MOD_RES (11), (12), (13), (14), (15): Xaa is A or G
  MOD_RES (16), (17), (18), (19): Xaa is A or G or is absent
EVVMDSMEGIXXXXXXXXXMIQITINSLRTPVX

SEQ ID NO: 76192 - protein, 34 aa, Artificial Sequence; identical to SEQ ID NO: 51202
  GFR-binding peptide
  MOD_RES (2), (33), (34): Xaa is C or S

SEQ ID NO: 76193 - protein, 36 aa, Artificial Sequence
  GFR-binding peptide
  MOD_RES (2), (4), (35), (36): Xaa is C or S
SXKXSRVIMSMEGLVKPKRGVMIQITINSLAQPVXX

SEQ ID NO: 76194 - protein, 38 aa, Artificial Sequence; identical to SEQ ID NO: 48679
  GFR-binding peptide
  MOD_RES (1), (3), (35), (36): Xaa is C or S

SEQ ID NO: 76195 - protein, 38 aa, Artificial Sequence; identical to SEQ ID NO: 18580
  GFR-binding peptide
  MOD_RES (2), (2): Xaa is C or S

SEQ ID NO: 76196 - protein, 35 aa, Artificial Sequence; identical to SEQ ID NO: 18581
  GFR-binding peptide
  MOD_RES (13), (14), (15), (16), (17): Xaa is A or G
  MOD_RES (18), (19), (20), (21): Xaa is A or G or is absent

SEQ ID NO: 76197 - protein, 40 aa, Artificial Sequence; identical to SEQ ID NO: 18583
  GFR-binding peptide
  MOD_RES (1), (3), (40): Xaa is C or S
  MOD_RES (16), (17), (18), (19), (20): Xaa is A or G
  MOD_RES (21), (22), (23), (24): Xaa is A or G or is absent

SEQ ID NO: 76198 - protein, 39 aa, Artificial Sequence; identical to SEQ ID NO: 18584
  GFR-binding peptide
  MOD_RES (2), (4): Xaa is C or S
  MOD_RES (17), (18), (19), (20), (21): Xaa is A or G
  MOD_RES (22), (23), (24), (25): Xaa is A or G or is absent

SEQ ID NO: 76199 - protein, 35 aa, Artificial Sequence
  GFR-binding peptide
  MOD_RES (2), (4), (35): Xaa is C or S
LXGXEEVIMSMEGLLLVRGNDMIQMTINSTKVPAX

SEQ ID NO: 76200 - protein, 34 aa, Artificial Sequence; identical to SEQ ID NO: 18590
  GFR-binding peptide
  MOD_RES (12), (13), (14), (15), (16): Xaa is A or G
  MOD_RES (17), (18), (19), (20): Xaa is A or G or is absent

SEQ ID NO: 76201 - protein, 39 aa, Artificial Sequence; identical to SEQ ID NO: 18591
  GFR-binding peptide
  MOD_RES (1), (38): Xaa is C or S

SEQ ID NO: 76202 - protein, 43 aa, Artificial Sequence
  GFR-binding peptide
  MOD_RES (2), (4), (38), (39): Xaa is C or S
  MOD_RES (16), (17), (18), (19), (20): Xaa is A or G
  MOD_RES (21), (22), (23), (24): Xaa is A or G or is absent
RXGXSEVVMDSMEGLXXXXXXXXXMIQITINSLRTPVXXTPPT

SEQ ID NO: 76203 - protein, 42 aa, Artificial Sequence; identical to SEQ ID NO: 18592
  GFR-binding peptide
  MOD_RES (1), (38): Xaa is C or S

SEQ ID NO: 76204 - protein, 33 aa, Artificial Sequence; identical to SEQ ID NO: 18598
  GFR-binding peptide
  MOD_RES (12), (13), (14), (15), (16): Xaa is A or G
  MOD_RES (17), (18), (19), (20): Xaa is A or G or is absent

SEQ ID NO: 76205 - protein, 37 aa, Artificial Sequence
  GFR-binding peptide
  MOD_RES (2), (4): Xaa is C or S
  MOD_RES (16), (17), (18), (19), (20): Xaa is A or G
  MOD_RES (21), (22), (23), (24): Xaa is A or G or is absent
SXGXRDVVMGSMEGLXXXXXXXXXMIQMTINSMKTPT

SEQ ID NO: 76206 - protein, 30 aa, Artificial Sequence; identical to SEQ ID NO: 48699
  GFR-binding peptide

SEQ ID NO: 76207 - protein, 32 aa, Artificial Sequence
  GFR-binding peptide
  MOD_RES (1), (32): Xaa is C or S
XSKVIMSMEGLIKPTKGIMIQITINSLDQSVX

SEQ ID NO: 76208 - protein, 36 aa, Artificial Sequence; identical to SEQ ID NO: 18599
  GFR-binding peptide
  MOD_RES (1), (35): Xaa is C or S
  MOD_RES (13), (14), (15), (16), (17): Xaa is A or G
  MOD_RES (18), (19), (20), (21): Xaa is A or G or is absent

SEQ ID NO: 76209 - protein, 36 aa, Artificial Sequence; identical to SEQ ID NO: 48702
  GFR-binding peptide
  MOD_RES (2), (33), (34): Xaa is C or S

SEQ ID NO: 76210 - protein, 40 aa, Artificial Sequence; identical to SEQ ID NO: 18600
  GFR-binding peptide
  MOD_RES (2), (4), (38): Xaa is C or S

SEQ ID NO: 76211 - protein, 38 aa, Artificial Sequence; identical to SEQ ID NO: 51221
  GFR-binding peptide
  MOD_RES (2), (34), (35): Xaa is C or S

SEQ ID NO: 76212 - protein, 42 aa, Artificial Sequence; identical to SEQ ID NO: 18601
  GFR-binding peptide
  MOD_RES (2), (4), (38): Xaa is C or S
  MOD_RES (16), (17), (18), (19), (20): Xaa is A or G
  MOD_RES (21), (22), (23), (24): Xaa is A or G or is absent

SEQ ID NO: 76213 - protein, 34 aa, Artificial Sequence; identical to SEQ ID NO: 18602
  GFR-binding peptide
  MOD_RES (11), (12), (13), (14), (15): Xaa is A or G
  MOD_RES (16), (17), (18), (19): Xaa is A or G or is absent

SEQ ID NO: 76214 - protein, 35 aa, Artificial Sequence; identical to SEQ ID NO: 48709
  GFR-binding peptide
  MOD_RES (2), (4): Xaa is C or S

SEQ ID NO: 76215 - protein, 35 aa, Artificial Sequence
  GFR-binding peptide
  MOD_RES (34), (35): Xaa is C or S
  MOD_RES (12), (13), (14), (15), (16): Xaa is A or G
  MOD_RES (17), (18), (19), (20): Xaa is A or G or is absent
SEVVMDSMEGIXXXXXXXXXMIQITINSLRTPVXX

SEQ ID NO: 76216 - protein, 35 aa, Artificial Sequence; identical to SEQ ID NO: 18603
  GFR-binding peptide
  MOD_RES (12), (13), (14), (15), (16): Xaa is A or G
  MOD_RES (17), (18), (19), (20): Xaa is A or G or is absent

SEQ ID NO: 76217 - protein, 43 aa, Artificial Sequence; identical to SEQ ID NO: 18604
  GFR-binding peptide
  MOD_RES (2), (4), (41): Xaa is C or S
  MOD_RES (17), (18), (19), (20), (21): Xaa is A or G
  MOD_RES (22), (23), (24), (25): Xaa is A or G or is absent

SEQ ID NO: 76218 - protein, 39 aa, Artificial Sequence; identical to SEQ ID NO: 18606
  GFR-binding peptide
  MOD_RES (2), (4), (38): Xaa is C or S

SEQ ID NO: 76219 - protein, 36 aa, Artificial Sequence; identical to SEQ ID NO: 18607
  GFR-binding peptide
  MOD_RES (1), (35): Xaa is C or S
  MOD_RES (13), (14), (15), (16), (17): Xaa is A or G
  MOD_RES (18), (19), (20), (21): Xaa is A or G or is absent

SEQ ID NO: 76220 - protein, 38 aa, Artificial Sequence
  GFR-binding peptide
  MOD_RES (2), (4), (35), (36): Xaa is C or S
SXKXSKVVMSMEGLVKPTRGVMIQITINSLDQPVXXPS

SEQ ID NO: 76221 - protein, 33 aa, Artificial Sequence
  GFR-binding peptide
  MOD_RES (33), (33): Xaa is C or S
  MOD_RES (11), (12), (13), (14), (15): Xaa is A or G
  MOD_RES (16), (17), (18), (19): Xaa is A or G or is absent
EVVMDSMEGLXXXXXXXXXMIQITINSLRTPVX

SEQ ID NO: 76222 - protein, 34 aa, Artificial Sequence
  GFR-binding peptide
  MOD_RES (1), (34): Xaa is C or S
  MOD_RES (12), (13), (14), (15), (16): Xaa is A or G
  MOD_RES (17), (18), (19), (20): Xaa is A or G or is absent
XSKVIMSMEGLXXXXXXXXXMIQITINSLDQSVX

SEQ ID NO: 76223 - protein, 39 aa, Artificial Sequence; identical to SEQ ID NO: 18612
  GFR-binding peptide
  MOD_RES (1), (3), (37): Xaa is C or S
  MOD_RES (15), (16), (17), (18), (19): Xaa is A or G
  MOD_RES (20), (21), (22), (23): Xaa is A or G or is absent

SEQ ID NO: 76224 - protein, 40 aa, Artificial Sequence; identical to SEQ ID NO: 18613
  GFR-binding peptide
  MOD_RES (1), (3), (40): Xaa is C or S

SEQ ID NO: 76225 - protein, 39 aa, Artificial Sequence
  GFR-binding peptide
  MOD_RES (2), (34), (35): Xaa is C or S
GXAEVVMDSMEGIVVNNAADMIQITINSLRAPVXXSAPA

SEQ ID NO: 76226 - protein, 44 aa, Artificial Sequence; identical to SEQ ID NO: 18615
  GFR-binding peptide
  MOD_RES (1), (3), (40): Xaa is C or S

SEQ ID NO: 76227 - protein, 33 aa, Artificial Sequence; identical to SEQ ID NO: 48730
  GFR-binding peptide
  MOD_RES (1), (1): Xaa is C or S
  MOD_RES (12), (13), (14), (15), (16): Xaa is A or G
  MOD_RES (17), (18), (19), (20): Xaa is A or G or is absent

SEQ ID NO: 76228 - protein, 42 aa, Artificial Sequence; identical to SEQ ID NO: 18616
  GFR-binding peptide
  MOD_RES (2), (36): Xaa is C or S
  MOD_RES (14), (15), (16), (17), (18): Xaa is A or G
  MOD_RES (19), (20), (21), (22): Xaa is A or G or is absent

SEQ ID NO: 76229 - protein, 34 aa, Artificial Sequence
  GFR-binding peptide
  MOD_RES (1), (33), (34): Xaa is C or S
XRDVVMGSMEGLIIQQKDNMIQMTINSMKTPTXX

SEQ ID NO: 76230 - protein, 42 aa, Artificial Sequence
  GFR-binding peptide
  MOD_RES (2), (36), (37): Xaa is C or S
  MOD_RES (14), (15), (16), (17), (18): Xaa is A or G
  MOD_RES (19), (20), (21), (22): Xaa is A or G or is absent
GXRDVVMGSMEGLXXXXXXXXXMIQMTINSMKTPTXXPGASG

SEQ ID NO: 76231 - protein, 34 aa, Artificial Sequence
  GFR-binding peptide
  MOD_RES (1), (33), (34): Xaa is C or S
XRDVVMGSMEGIIIQQKDNMIQMTINSMKTPTXX

SEQ ID NO: 76232 - protein, 33 aa, Artificial Sequence
  GFR-binding peptide
  MOD_RES (1), (33): Xaa is C or S
XAEVVMDSMEGIVVNNAADMIQITINSLRAPVX

SEQ ID NO: 76233 - protein, 37 aa, Artificial Sequence
  GFR-binding peptide
  MOD_RES (2), (4), (36), (37): Xaa is C or S
SXGXRDVVMGSMEGLIIQQKDNMIQMTINSMKTPTXX

SEQ ID NO: 76234 - protein, 37 aa, Artificial Sequence
  GFR-binding peptide
  MOD_RES (1), (3), (37): Xaa is C or S
  MOD_RES (15), (16), (17), (18), (19): Xaa is A or G
  MOD_RES (20), (21), (22), (23): Xaa is A or G or is absent
XGXAEVVMDSMEGIXXXXXXXXXMIQITINSLRAPVX

SEQ ID NO: 76235 - protein, 35 aa, Artificial Sequence
  GFR-binding peptide
  MOD_RES (1), (35): Xaa is C or S
  MOD_RES (13), (14), (15), (16), (17): Xaa is A or G
  MOD_RES (18), (19), (20), (21): Xaa is A or G or is absent
XSEVVMDSMEGLXXXXXXXXXMIQITINSLRTPVX

SEQ ID NO: 76236 - protein, 37 aa, Artificial Sequence; identical to SEQ ID NO: 18617
  GFR-binding peptide
  MOD_RES (35), (35): Xaa is C or S

SEQ ID NO: 76237 - protein, 35 aa, Artificial Sequence
  GFR-binding peptide
  MOD_RES (1), (35): Xaa is C or S
  MOD_RES (13), (14), (15), (16), (17): Xaa is A or G
  MOD_RES (18), (19), (20), (21): Xaa is A or G or is absent
XSEVVMDSMEGIXXXXXXXXXMIQITINSLRTPVX

SEQ ID NO: 76238 - protein, 37 aa, Artificial Sequence; identical to SEQ ID NO: 18619
  GFR-binding peptide
  MOD_RES (35), (35): Xaa is C or S

SEQ ID NO: 76239 - protein, 33 aa, Artificial Sequence
  GFR-binding peptide
  MOD_RES (1), (33): Xaa is C or S
XAEVVMDSMEGLVVNNAADMIQITINSLRAPVX

SEQ ID NO: 76240 - protein, 36 aa, Artificial Sequence; identical to SEQ ID NO: 18620
  GFR-binding peptide
  MOD_RES (2), (2): Xaa is C or S
  MOD_RES (15), (16), (17), (18), (19): Xaa is A or G
  MOD_RES (20), (21), (22), (23): Xaa is A or G or is absent

SEQ ID NO: 76241 - protein, 37 aa, Artificial Sequence
  GFR-binding peptide
  MOD_RES (1), (3), (34), (35): Xaa is C or S
XGXEEVIMSMEGLLLVRGNDMIQMTINSTKVPAXXTS

SEQ ID NO: 76242 - protein, 35 aa, Artificial Sequence
  GFR-binding peptide
  MOD_RES (2), (35): Xaa is C or S
  MOD_RES (13), (14), (15), (16), (17): Xaa is A or G
  MOD_RES (18), (19), (20), (21): Xaa is A or G or is absent
KXSRVIMSMEGLXXXXXXXXXMIQITINSLAQPVX

SEQ ID NO: 76243 - protein, 32 aa, Artificial Sequence
  GFR-binding peptide
  MOD_RES (1), (1): Xaa is C or S
XSEVVMDSMEGLVVNNASDMIQITINSLRTPV

SEQ ID NO: 76244 - protein, 41 aa, Artificial Sequence; identical to SEQ ID NO: 18621
  GFR-binding peptide
  MOD_RES (1), (3), (40): Xaa is C or S

SEQ ID NO: 76245 - protein, 39 aa, Artificial Sequence
  GFR-binding peptide
  MOD_RES (1), (3), (35), (36): Xaa is C or S
XGXSEVVMDSMEGIVVNNASDMIQITINSLRTPVXXTPP

SEQ ID NO: 76246 - protein, 39 aa, Artificial Sequence
  GFR-binding peptide
  MOD_RES (2), (4), (36), (37): Xaa is C or S
RXGXSEVVMDSMEGLVVNNASDMIQITINSLRTPVXXTP

SEQ ID NO: 76247 - protein, 36 aa, Artificial Sequence
  GFR-binding peptide
  MOD_RES (33), (34): Xaa is C or S
  MOD_RES (11), (12), (13), (14), (15): Xaa is A or G
  MOD_RES (16), (17), (18), (19): Xaa is A or G or is absent
DVVMGSMEGIXXXXXXXXXMIQMTINSMKTPTXXPG

SEQ ID NO: 76248 - protein, 36 aa, Artificial Sequence
  GFR-binding peptide
  MOD_RES (2), (4), (35), (36): Xaa is C or S
SXKXSKVVMSMEGLVKPTRGVMIQITINSLDQPVXX

SEQ ID NO: 76249 - protein, 40 aa, Artificial Sequence; identical to SEQ ID NO: 18624
  GFR-binding peptide
  MOD_RES (1), (3), (37): Xaa is C or S

SEQ ID NO: 76250 - protein, 41 aa, Artificial Sequence; identical to SEQ ID NO: 18625
  GFR-binding peptide
  MOD_RES (2), (39): Xaa is C or S

SEQ ID NO: 76251 - protein, 33 aa, Artificial Sequence
  GFR-binding peptide
  MOD_RES (1), (1): Xaa is C or S
  MOD_RES (12), (13), (14), (15), (16): Xaa is A or G
  MOD_RES (17), (18), (19), (20): Xaa is A or G or is absent
XSKVVMSMEGLXXXXXXXXXMIQITINSLDQPV

SEQ ID NO: 76252 - protein, 37 aa, Artificial Sequence; identical to SEQ ID NO: 18627
  GFR-binding peptide
  MOD_RES (36), (36): Xaa is C or S
  MOD_RES (12), (13), (14), (15), (16): Xaa is A or G
  MOD_RES (17), (18), (19), (20): Xaa is A or G or is absent

SEQ ID NO: 76253 - protein, 37 aa, Artificial Sequence; identical to SEQ ID NO: 48766
  GFR-binding peptide
  MOD_RES (33), (34): Xaa is C or S
  MOD_RES (11), (12), (13), (14), (15): Xaa is A or G
  MOD_RES (16), (17), (18), (19): Xaa is A or G or is absent

SEQ ID NO: 76254 - protein, 38 aa, Artificial Sequence; identical to SEQ ID NO: 18630
  GFR-binding peptide
  MOD_RES (1), (35): Xaa is C or S

SEQ ID NO: 76255 - protein, 35 aa, Artificial Sequence
  GFR-binding peptide
  MOD_RES (33), (34): Xaa is C or S
  MOD_RES (11), (12), (13), (14), (15): Xaa is A or G
  MOD_RES (16), (17), (18), (19): Xaa is A or G or is absent
EEVIMSMEGIXXXXXXXXXMIQMTINSTKVPAXXT

SEQ ID NO: 76256 - protein, 38 aa, Artificial Sequence; identical to SEQ ID NO: 18634
  GFR-binding peptide
  MOD_RES (1), (3), (37): Xaa is C or S
  MOD_RES (15), (16), (17), (18), (19): Xaa is A or G
  MOD_RES (20), (21), (22), (23): Xaa is A or G or is absent

SEQ ID NO: 76257 - protein, 37 aa, Artificial Sequence
  GFR-binding peptide
  MOD_RES (32), (33): Xaa is C or S
SEVVMDSMEGLVVNNASDMIQITINSLRTPVXXTPPT

SEQ ID NO: 76258 - protein, 36 aa, Artificial Sequence; identical to SEQ ID NO: 18636
  GFR-binding peptide
  MOD_RES (1), (3): Xaa is C or S
  MOD_RES (15), (16), (17), (18), (19): Xaa is A or G
  MOD_RES (20), (21), (22), (23): Xaa is A or G or is absent

SEQ ID NO: 76259 - protein, 41 aa, Artificial Sequence; identical to SEQ ID NO: 18637
  GFR-binding peptide
  MOD_RES (1), (3), (37): Xaa is C or S
  MOD_RES (15), (16), (17), (18), (19): Xaa is A or G
  MOD_RES (20), (21), (22), (23): Xaa is A or G or is absent

SEQ ID NO: 76260 - protein, 39 aa, Artificial Sequence; identical to SEQ ID NO: 18641
  GFR-binding peptide
  MOD_RES (2), (4): Xaa is C or S
  MOD_RES (17), (18), (19), (20), (21): Xaa is A or G
  MOD_RES (22), (23), (24), (25): Xaa is A or G or is absent

SEQ ID NO: 76261 - protein, 41 aa, Artificial Sequence
  GFR-binding peptide
  MOD_RES (2), (36), (37): Xaa is C or S
  MOD_RES (14), (15), (16), (17), (18): Xaa is A or G
  MOD_RES (19), (20), (21), (22): Xaa is A or G or is absent
GXAEVVMDSMEGLXXXXXXXXXMIQITINSLRAPVXXSAPA

SEQ ID NO: 76262 - protein, 33 aa, Artificial Sequence; identical to SEQ ID NO: 48776
  GFR-binding peptide
  MOD_RES (12), (13), (14), (15), (16): Xaa is A or G
  MOD_RES (17), (18), (19), (20): Xaa is A or G or is absent

SEQ ID NO: 76263 - protein, 35 aa, Artificial Sequence; identical to SEQ ID NO: 18642
  GFR-binding peptide

SEQ ID NO: 76264 - protein, 41 aa, Artificial Sequence; identical to SEQ ID NO: 48777
  GFR-binding peptide
  MOD_RES (2), (4), (36), (37): Xaa is C or S

SEQ ID NO: 76265 - protein, 38 aa, Artificial Sequence
  GFR-binding peptide
  MOD_RES (32), (33): Xaa is C or S
SEVVMDSMEGIVVNNASDMIQITINSLRTPVXXTPPTS

SEQ ID NO: 76266 - protein, 40 aa, Artificial Sequence; identical to SEQ ID NO: 18643
  GFR-binding peptide
  MOD_RES (36), (36): Xaa is C or S
  MOD_RES (12), (13), (14), (15), (16): Xaa is A or G
  MOD_RES (17), (18), (19), (20): Xaa is A or G or is absent

SEQ ID NO: 76267 - protein, 35 aa, Artificial Sequence; identical to SEQ ID NO: 51273
  GFR-binding peptide
  MOD_RES (1), (3), (34), (35): Xaa is C or S

SEQ ID NO: 76268 - protein, 41 aa, Artificial Sequence
  GFR-binding peptide
  MOD_RES (1), (3), (37), (38): Xaa is C or S
  MOD_RES (15), (16), (17), (18), (19): Xaa is A or G
  MOD_RES (20), (21), (22), (23): Xaa is A or G or is absent
XGXSRVVMNSMEGLXXXXXXXXXMIQVTINSLKTPAXXPKP

SEQ ID NO: 76269 - protein, 43 aa, Artificial Sequence; identical to SEQ ID NO: 18645
  GFR-binding peptide
  MOD_RES (2), (39): Xaa is C or S
  MOD_RES (15), (16), (17), (18), (19): Xaa is A or G
  MOD_RES (20), (21), (22), (23): Xaa is A or G or is absent

SEQ ID NO: 76270 - protein, 35 aa, Artificial Sequence
  GFR-binding peptide
  MOD_RES (1), (34), (35): Xaa is C or S
  MOD_RES (12), (13), (14), (15), (16): Xaa is A or G
  MOD_RES (17), (18), (19), (20): Xaa is A or G or is absent
XEEVIMSMEGLXXXXXXXXXMIQMTINSTKVPAXX

SEQ ID NO: 76271 - protein, 41 aa, Artificial Sequence; identical to SEQ ID NO: 18646
  GFR-binding peptide
  MOD_RES (1), (38): Xaa is C or S
  MOD_RES (14), (15), (16), (17), (18): Xaa is A or G
  MOD_RES (19), (20), (21), (22): Xaa is A or G or is absent

SEQ ID NO: 76272 - protein, 38 aa, Artificial Sequence; identical to SEQ ID NO: 51283
  GFR-binding peptide
  MOD_RES (2), (33), (34): Xaa is C or S

SEQ ID NO: 76273 - protein, 38 aa, Artificial Sequence
  GFR-binding peptide
  MOD_RES (2), (4), (36), (37): Xaa is C or S
RXGXSEVVMDSMEGLVVNNASDMIQITINSLRTPVXXT

SEQ ID NO: 76274 - protein, 37 aa, Artificial Sequence
  GFR-binding peptide
  MOD_RES (33), (34): Xaa is C or S
  MOD_RES (11), (12), (13), (14), (15): Xaa is A or G
  MOD_RES (16), (17), (18), (19): Xaa is A or G or is absent
DVVMGSMEGIXXXXXXXXXMIQMTINSMKTPTXXPGA

SEQ ID NO: 76275 - protein, 41 aa, Artificial Sequence
  GFR-binding peptide
  MOD_RES (1), (3), (36), (37): Xaa is C or S
  MOD_RES (14), (15), (16), (17), (18): Xaa is A or G
  MOD_RES (19), (20), (21), (22): Xaa is A or G or is absent
XGXEEVIMSMEGIXXXXXXXXXMIQMTINSTKVPAXXTSPV

SEQ ID NO: 76276 - protein, 38 aa, Artificial Sequence; identical to SEQ ID NO: 18648
  GFR-binding peptide
  MOD_RES (2), (2): Xaa is C or S
  MOD_RES (15), (16), (17), (18), (19): Xaa is A or G
  MOD_RES (20), (21), (22), (23): Xaa is A or G or is absent

SEQ ID NO: 76277 - protein, 34 aa, Artificial Sequence
  GFR-binding peptide
  MOD_RES (1), (33), (34): Xaa is C or S
XAEVVMDSMEGLVVNNAADMIQITINSLRAPVXX

SEQ ID NO: 76278 - protein, 41 aa, Artificial Sequence; identical to SEQ ID NO: 18651
  GFR-binding peptide
  MOD_RES (2), (39): Xaa is C or S
  MOD_RES (15), (16), (17), (18), (19): Xaa is A or G
  MOD_RES (20), (21), (22), (23): Xaa is A or G or is absent

SEQ ID NO: 76279 - protein, 35 aa, Artificial Sequence
  GFR-binding peptide
  MOD_RES (1), (3), (35): Xaa is C or S
XGXRDVVMGSMEGIIIQQKDNMIQMTINSMKTPTX

SEQ ID NO: 76280 - protein, 40 aa, Artificial Sequence
  GFR-binding peptide
  MOD_RES (2), (34), (35): Xaa is C or S
GXRDVVMGSMEGLIIQQKDNMIQMTINSMKTPTXXPGASG

SEQ ID NO: 76281 - protein, 38 aa, Artificial Sequence
  GFR-binding peptide
  MOD_RES (2), (34), (35): Xaa is C or S
GXSEVVMDSMEGLVVNNASDMIQITINSLRTPVXXTPP

SEQ ID NO: 76282 - protein, 39 aa, Artificial Sequence; identical to SEQ ID NO: 18653
  GFR-binding peptide
  MOD_RES (36), (36): Xaa is C or S

SEQ ID NO: 76283 - protein, 37 aa, Artificial Sequence
  GFR-binding peptide
  MOD_RES (33), (34): Xaa is C or S
  MOD_RES (11), (12), (13), (14), (15): Xaa is A or G
  MOD_RES (16), (17), (18), (19): Xaa is A or G or is absent
EVVMDSMEGIXXXXXXXXXMIQITINSLRAPVXXSAP

SEQ ID NO: 76284 - protein, 33 aa, Artificial Sequence
  GFR-binding peptide
  MOD_RES (1), (33): Xaa is C or S
XRDVVMGSMEGIIIQQKDNMIQMTINSMKTPTX

SEQ ID NO: 76285 - protein, 37 aa, Artificial Sequence
  GFR-binding peptide
  MOD_RES (1), (3), (34), (35): Xaa is C or S
XKXSKVIMSMEGLIKPTKGIMIQITINSLDQSVXXPS

SEQ ID NO: 76286 - protein, 37 aa, Artificial Sequence; identical to SEQ ID NO: 18656
  GFR-binding peptide
  MOD_RES (2), (2): Xaa is C or S

SEQ ID NO: 76287 - protein, 40 aa, Artificial Sequence
  GFR-binding peptide
  MOD_RES (2), (36), (37): Xaa is C or S
  MOD_RES (14), (15), (16), (17), (18): Xaa is A or G
  MOD_RES (19), (20), (21), (22): Xaa is A or G or is absent
GXAEVVMDSMEGLXXXXXXXXXMIQITINSLRAPVXXSAP

SEQ ID NO: 76288 - protein, 42 aa, Artificial Sequence; identical to SEQ ID NO: 18657
  GFR-binding peptide
  MOD_RES (2), (36): Xaa is C or S

SEQ ID NO: 76289 - protein, 41 aa, Artificial Sequence; identical to SEQ ID NO: 18658
  GFR-binding peptide
  MOD_RES (2), (4), (41): Xaa is C or S
  MOD_RES (17), (18), (19), (20), (21): Xaa is A or G
  MOD_RES (22), (23), (24), (25): Xaa is A or G or is absent

SEQ ID NO: 76290 - protein, 40 aa, Artificial Sequence; identical to SEQ ID NO: 51298
  GFR-binding peptide
  MOD_RES (1), (3), (36), (37): Xaa is C or S
  MOD_RES (14), (15), (16), (17), (18): Xaa is A or G
  MOD_RES (19), (20), (21), (22): Xaa is A or G or is absent

SEQ ID NO: 76291 - protein, 38 aa, Artificial Sequence
  GFR-binding peptide
  MOD_RES (1), (3), (36), (37): Xaa is C or S
  MOD_RES (14), (15), (16), (17), (18): Xaa is A or G
  MOD_RES (19), (20), (21), (22): Xaa is A or G or is absent
XKXSKVIMSMEGLXXXXXXXXXMIQITINSLDQSVXXP

SEQ ID NO: 76292 - protein, 35 aa, Artificial Sequence
  GFR-binding peptide
  MOD_RES (2), (4): Xaa is C or S
RXGXSEVVMDSMEGIVVNNASDMIQITINSLRTPV

SEQ ID NO: 76293 - protein, 40 aa, Artificial Sequence
  GFR-binding peptide
  MOD_RES (1), (3), (37), (38): Xaa is C or S
  MOD_RES (15), (16), (17), (18), (19): Xaa is A or G
  MOD_RES (20), (21), (22), (23): Xaa is A or G or is absent
XGXAEVVMDSMEGIXXXXXXXXXMIQITINSLRAPVXXSA

SEQ ID NO: 76294 - protein, 39 aa, Artificial Sequence; identical to SEQ ID NO: 51301
  GFR-binding peptide
  MOD_RES (2), (4), (37), (38): Xaa is C or S
  MOD_RES (15), (16), (17), (18), (19): Xaa is A or G
  MOD_RES (20), (21), (22), (23): Xaa is A or G or is absent

SEQ ID NO: 76295 - protein, 35 aa, Artificial Sequence; identical to SEQ ID NO: 51302
  GFR-binding peptide
  MOD_RES (32), (33): Xaa is C or S

SEQ ID NO: 76296 - protein, 36 aa, Artificial Sequence; identical to SEQ ID NO: 18659
  GFR-binding peptide
  MOD_RES (1), (3): Xaa is C or S

SEQ ID NO: 76297 - protein, 37 aa, Artificial Sequence; identical to SEQ ID NO: 18660
  GFR-binding peptide
  MOD_RES (37), (37): Xaa is C or S
  MOD_RES (13), (14), (15), (16), (17): Xaa is A or G
  MOD_RES (18), (19), (20), (21): Xaa is A or G or is absent

SEQ ID NO: 76298 - protein, 41 aa, Artificial Sequence; identical to SEQ ID NO: 18662
  GFR-binding peptide
  MOD_RES (1), (3), (37): Xaa is C or S

SEQ ID NO: 76299 - protein, 34 aa, Artificial Sequence
  GFR-binding peptide
  MOD_RES (1), (1): Xaa is C or S
  MOD_RES (13), (14), (15), (16), (17): Xaa is A or G
  MOD_RES (18), (19), (20), (21): Xaa is A or G or is absent
XSEVVMDSMEGIXXXXXXXXXMIQITINSLRTPV

SEQ ID NO: 76300 - protein, 36 aa, Artificial Sequence; identical to SEQ ID NO: 18664
  GFR-binding peptide
  MOD_RES (1), (35): Xaa is C or S

SEQ ID NO: 76301 - protein, 39 aa, Artificial Sequence; identical to SEQ ID NO: 48814
  GFR-binding peptide
  MOD_RES (34), (35): Xaa is C or S
  MOD_RES (12), (13), (14), (15), (16): Xaa is A or G
  MOD_RES (17), (18), (19), (20): Xaa is A or G or is absent

SEQ ID NO: 76302 - protein, 35 aa, Artificial Sequence; identical to SEQ ID NO: 48815
  GFR-binding peptide
  MOD_RES (31), (32): Xaa is C or S

SEQ ID NO: 76303 - protein, 40 aa, Artificial Sequence
  GFR-binding peptide
  MOD_RES (1), (3), (37), (38): Xaa is C or S
  MOD_RES (15), (16), (17), (18), (19): Xaa is A or G
  MOD_RES (20), (21), (22), (23): Xaa is A or G or is absent
XGXRDVVMGSMEGLXXXXXXXXXMIQMTINSMKTPTXXPG

SEQ ID NO: 76304 - protein, 36 aa, Artificial Sequence
  GFR-binding peptide
  MOD_RES (1), (3), (36): Xaa is C or S
  MOD_RES (14), (15), (16), (17), (18): Xaa is A or G
  MOD_RES (19), (20), (21), (22): Xaa is A or G or is absent
XGXEEVIMSMEGIXXXXXXXXXMIQMTINSTKVPAX

SEQ ID NO: 76305 - protein, 43 aa, Artificial Sequence; identical to SEQ ID NO: 18666
  GFR-binding peptide
  MOD_RES (2), (39): Xaa is C or S

SEQ ID NO: 76306 - protein, 43 aa, Artificial Sequence
  GFR-binding peptide
  MOD_RES (2), (4), (37), (38): Xaa is C or S
  MOD_RES (15), (16), (17), (18), (19): Xaa is A or G
  MOD_RES (20), (21), (22), (23): Xaa is A or G or is absent
SXKXSKVVMSMEGLXXXXXXXXXMIQITINSLDQPVXXPSASA

SEQ ID NO: 76307 - protein, 33 aa, Artificial Sequence
  GFR-binding peptide
  MOD_RES (2), (33): Xaa is C or S
GXEEVIMSMEGILLVRGNDMIQMTINSTKVPAX

SEQ ID NO: 76308 - protein, 39 aa, Artificial Sequence; identical to SEQ ID NO: 18672
  GFR-binding peptide
  MOD_RES (35), (35): Xaa is C or S
  MOD_RES (11), (12), (13), (14), (15): Xaa is A or G
  MOD_RES (16), (17), (18), (19): Xaa is A or G or is absent

SEQ ID NO: 76309 - protein, 40 aa, Artificial Sequence
  GFR-binding peptide
  MOD_RES (2), (4), (35), (36): Xaa is C or S
SXKXSRVIMSMEGLVKPKRGVMIQITINSLAQPVXXPAAS

SEQ ID NO: 76310 - protein, 36 aa, Artificial Sequence; identical to SEQ ID NO: 18674
  GFR-binding peptide
  MOD_RES (34), (34): Xaa is C or S

SEQ ID NO: 76311 - protein, 37 aa, Artificial Sequence
  GFR-binding peptide
  MOD_RES (31), (32): Xaa is C or S
EVVMDSMEGLVVNNASDMIQITINSLRTPVXXTPPTS

SEQ ID NO: 76312 - protein, 37 aa, Artificial Sequence; identical to SEQ ID NO: 18675
  GFR-binding peptide
  MOD_RES (1), (1): Xaa is C or S
  MOD_RES (14), (15), (16), (17), (18): Xaa is A or G
  MOD_RES (19), (20), (21), (22): Xaa is A or G or is absent

SEQ ID NO: 76313 - protein, 39 aa, Artificial Sequence; identical to SEQ ID NO: 18676
  GFR-binding peptide
  MOD_RES (35), (35): Xaa is C or S
  MOD_RES (11), (12), (13), (14), (15): Xaa is A or G
  MOD_RES (16), (17), (18), (19): Xaa is A or G or is absent

SEQ ID NO: 76314 - protein, 38 aa, Artificial Sequence
  GFR-binding peptide
  MOD_RES (1), (35), (36): Xaa is C or S
  MOD_RES (13), (14), (15), (16), (17): Xaa is A or G
  MOD_RES (18), (19), (20), (21): Xaa is A or G or is absent
XRDVVMGSMEGLXXXXXXXXXMIQMTINSMKTPTXXPG

SEQ ID NO: 76315 - protein, 36 aa, Artificial Sequence; identical to SEQ ID NO: 18677
  GFR-binding peptide
  MOD_RES (2), (36): Xaa is C or S

SEQ ID NO: 76316 - protein, 43 aa, Artificial Sequence
  GFR-binding peptide
  MOD_RES (1), (3), (37), (38): Xaa is C or S
  MOD_RES (15), (16), (17), (18), (19): Xaa is A or G
  MOD_RES (20), (21), (22), (23): Xaa is A or G or is absent
XGXSRVVMNSMEGIXXXXXXXXXMIQVTINSLKTPAXXPKPVH

SEQ ID NO: 76317 - protein, 39 aa, Artificial Sequence; identical to SEQ ID NO: 18679
  GFR-binding peptide
  MOD_RES (1), (35): Xaa is C or S

SEQ ID NO: 76318 - protein, 36 aa, Artificial Sequence; identical to SEQ ID NO: 18680
  GFR-binding peptide

SEQ ID NO: 76319 - protein, 32 aa, Artificial Sequence
  GFR-binding peptide
  MOD_RES (2), (2): Xaa is C or S
KXSKVVMSMEGLVKPTRGVMIQITINSLDQPV

SEQ ID NO: 76320 - protein, 34 aa, Artificial Sequence; identical to SEQ ID NO: 51327
  GFR-binding peptide
  MOD_RES (31), (32): Xaa is C or S

SEQ ID NO: 76321 - protein, 42 aa, Artificial Sequence; identical to SEQ ID NO: 18683
  GFR-binding peptide
  MOD_RES (2), (4), (41): Xaa is C or S

SEQ ID NO: 76322 - protein, 34 aa, Artificial Sequence; identical to SEQ ID NO: 18685
  GFR-binding peptide
  MOD_RES (11), (12), (13), (14), (15): Xaa is A or G
  MOD_RES (16), (17), (18), (19): Xaa is A or G or is absent

SEQ ID NO: 76323 - protein, 36 aa, Artificial Sequence; identical to SEQ ID NO: 18687
  GFR-binding peptide
  MOD_RES (36), (36): Xaa is C or S
  MOD_RES (12), (13), (14), (15), (16): Xaa is A or G
  MOD_RES (17), (18), (19), (20): Xaa is A or G or is absent

SEQ ID NO: 76324 - protein, 36 aa, Artificial Sequence; identical to SEQ ID NO: 18689
  GFR-binding peptide
  MOD_RES (34), (34): Xaa is C or S
  MOD_RES (12), (13), (14), (15), (16): Xaa is A or G
  MOD_RES (17), (18), (19), (20): Xaa is A or G or is absent

SEQ ID NO: 76325 - protein, 37 aa, Artificial Sequence
  GFR-binding peptide
  MOD_RES (1), (34), (35): Xaa is C or S
  MOD_RES (12), (13), (14), (15), (16): Xaa is A or G
  MOD_RES (17), (18), (19), (20): Xaa is A or G or is absent
XSRVIMSMEGLXXXXXXXXXMIQITINSLAQPVXXPA

SEQ ID NO: 76326 - protein, 39 aa, Artificial Sequence; identical to SEQ ID NO: 51335
  GFR-binding peptide
  MOD_RES (1), (3), (36), (37): Xaa is C or S
  MOD_RES (14), (15), (16), (17), (18): Xaa is A or G
  MOD_RES (19), (20), (21), (22): Xaa is A or G or is absent

SEQ ID NO: 76327 - protein, 39 aa, Artificial Sequence; identical to SEQ ID NO: 18690
  GFR-binding peptide
  MOD_RES (37), (37): Xaa is C or S

SEQ ID NO: 76328 - protein, 40 aa, Artificial Sequence; identical to SEQ ID NO: 18691
  GFR-binding peptide
  MOD_RES (1), (38): Xaa is C or S
  MOD_RES (14), (15), (16), (17), (18): Xaa is A or G
  MOD_RES (19), (20), (21), (22): Xaa is A or G or is absent

SEQ ID NO: 76329 - protein, 39 aa, Artificial Sequence; identical to SEQ ID NO: 51342
  GFR-binding peptide
  MOD_RES (2), (35), (36): Xaa is C or S
  MOD_RES (13), (14), (15), (16), (17): Xaa is A or G
  MOD_RES (18), (19), (20), (21): Xaa is A or G or is absent

SEQ ID NO: 76330 - protein, 39 aa, Artificial Sequence
  GFR-binding peptide
  MOD_RES (1), (3), (35), (36): Xaa is C or S
XGXSRVVMNSMEGLIVNSSDDMIQVTINSLKTPAXXPKP

SEQ ID NO: 76331 - protein, 38 aa, Artificial Sequence
  GFR-binding peptide
  MOD_RES (2), (36), (37): Xaa is C or S
  MOD_RES (14), (15), (16), (17), (18): Xaa is A or G
  MOD_RES (19), (20), (21), (22): Xaa is A or G or is absent
GXSEVVMDSMEGLXXXXXXXXXMIQITINSLRTPVXXT

SEQ ID NO: 76332 - protein, 35 aa, Artificial Sequence; identical to SEQ ID NO: 18692
  GFR-binding peptide
  MOD_RES (1), (1): Xaa is C or S
  MOD_RES (14), (15), (16), (17), (18): Xaa is A or G
  MOD_RES (19), (20), (21), (22): Xaa is A or G or is absent

SEQ ID NO: 76333 - protein, 34 aa, Artificial Sequence; identical to SEQ ID NO: 18693
  GFR-binding peptide
  MOD_RES (34), (34): Xaa is C or S

SEQ ID NO: 76334 - protein, 38 aa, Artificial Sequence
  GFR-binding peptide
  MOD_RES (1), (34), (35): Xaa is C or S
  MOD_RES (12), (13), (14), (15), (16): Xaa is A or G
  MOD_RES (17), (18), (19), (20): Xaa is A or G or is absent
XSRVIMSMEGLXXXXXXXXXMIQITINSLAQPVXXPAA

SEQ ID NO: 76335 - protein, 35 aa, Artificial Sequence
  GFR-binding peptide
  MOD_RES (31), (32): Xaa is C or S
SKVVMSMEGLVKPTRGVMIQITINSLDQPVXXPSA

SEQ ID NO: 76336 - protein, 34 aa, Artificial Sequence
  GFR-binding peptide
  MOD_RES (34), (34): Xaa is C or S
  MOD_RES (12), (13), (14), (15), (16): Xaa is A or G
  MOD_RES (17), (18), (19), (20): Xaa is A or G or is absent
SEVVMDSMEGIXXXXXXXXXMIQITINSLRTPVX

SEQ ID NO: 76337 - protein, 37 aa, Artificial Sequence
  GFR-binding peptide
  MOD_RES (31), (32): Xaa is C or S
EVVMDSMEGIVVNNASDMIQITINSLRTPVXXTPPTS

SEQ ID NO: 76338 - protein, 35 aa, Artificial Sequence; identical to SEQ ID NO: 18698
  GFR-binding peptide
  MOD_RES (2), (2): Xaa is C or S
  MOD_RES (14), (15), (16), (17), (18): Xaa is A or G
  MOD_RES (19), (20), (21), (22): Xaa is A or G or is absent

SEQ ID NO: 76339 - protein, 39 aa, Artificial Sequence; identical to SEQ ID NO: 18699
  GFR-binding peptide
  MOD_RES (1), (35): Xaa is C or S
  MOD_RES (13), (14), (15), (16), (17): Xaa is A or G
  MOD_RES (18), (19), (20), (21): Xaa is A or G or is absent

SEQ ID NO: 76340 - protein, 34 aa, Artificial Sequence
  GFR-binding peptide
  MOD_RES (2), (2): Xaa is C or S
  MOD_RES (13), (14), (15), (16), (17): Xaa is A or G
  MOD_RES (18), (19), (20), (21): Xaa is A or G or is absent
KXSRVIMSMEGLXXXXXXXXXMIQITINSLAQPV

SEQ ID NO: 76341 - protein, 38 aa, Artificial Sequence; identical to SEQ ID NO: 2269
  GFR-binding peptide
  MOD_RES (32), (33): Xaa is C or S

SEQ ID NO: 76342 - protein, 38 aa, Artificial Sequence; identical to SEQ ID NO: 4227
  GFR-binding peptide
  MOD_RES (1), (34), (35): Xaa is C or S
  MOD_RES (12), (13), (14), (15), (16): Xaa is A or G
  MOD_RES (17), (18), (19), (20): Xaa is A or G or is absent

SEQ ID NO: 76343 - protein, 43 aa, Artificial Sequence; identical to SEQ ID NO: 2270
  GFR-binding peptide
  MOD_RES (2), (4), (38), (39): Xaa is C or S
  MOD_RES (16), (17), (18), (19), (20): Xaa is A or G
  MOD_RES (21), (22), (23), (24): Xaa is A or G or is absent

SEQ ID NO: 76344 - protein, 35 aa, Artificial Sequence; identical to SEQ ID NO: 2271
  GFR-binding peptide
  MOD_RES (2), (4): Xaa is C or S

SEQ ID NO: 76345 - protein, 34 aa, Artificial Sequence; identical to SEQ ID NO: 2272
  GFR-binding peptide
  MOD_RES (13), (14), (15), (16), (17): Xaa is A or G
  MOD_RES (18), (19), (20), (21): Xaa is A or G or is absent

SEQ ID NO: 76346 - protein, 42 aa, Artificial Sequence; identical to SEQ ID NO: 2274
  GFR-binding peptide
  MOD_RES (1), (3), (38), (39): Xaa is C or S
  MOD_RES (16), (17), (18), (19), (20): Xaa is A or G
  MOD_RES (21), (22), (23), (24): Xaa is A or G or is absent

SEQ ID NO: 76347 - protein, 40 aa, Artificial Sequence; identical to SEQ ID NO: 2275
  GFR-binding peptide
  MOD_RES (1), (3), (36), (37): Xaa is C or S
  MOD_RES (14), (15), (16), (17), (18): Xaa is A or G
  MOD_RES (19), (20), (21), (22): Xaa is A or G or is absent

SEQ ID NO: 76348 - protein, 39 aa, Artificial Sequence; identical to SEQ ID NO: 4229
  GFR-binding peptide
  MOD_RES (1), (33), (34): Xaa is C or S

SEQ ID NO: 76349 - protein, 31 aa, Artificial Sequence; identical to SEQ ID NO: 61720
  GFR-binding peptide
  MOD_RES (31), (31): Xaa is C or S

SEQ ID NO: 76350 - protein, 37 aa, Artificial Sequence
  GFR-binding peptide
  MOD_RES (31), (32): Xaa is C or S
DVVMGQYNKLIIQQKDNLYLMSIASMKTPTXXPGASG

SEQ ID NO: 76351 - protein, 33 aa, Artificial Sequence; identical to SEQ ID NO: 2277
  GFR-binding peptide
  MOD_RES (2), (2): Xaa is C or S

SEQ ID NO: 76352 - protein, 38 aa, Artificial Sequence; identical to SEQ ID NO: 2279
  GFR-binding peptide
  MOD_RES (1), (3), (37), (38): Xaa is C or S
  MOD_RES (15), (16), (17), (18), (19): Xaa is A or G
  MOD_RES (20), (21), (22), (23): Xaa is A or G or is absent

SEQ ID NO: 76353 - protein, 44 aa, Artificial Sequence; identical to SEQ ID NO: 56141
  GFR-binding peptide
  MOD_RES (2), (4), (38), (39): Xaa is C or S
  MOD_RES (16), (17), (18), (19), (20): Xaa is A or G
  MOD_RES (21), (22), (23), (24): Xaa is A or G or is absent

SEQ ID NO: 76354 - protein, 38 aa, Artificial Sequence; identical to SEQ ID NO: 56142
  GFR-binding peptide
  MOD_RES (1), (3), (37), (38): Xaa is C or S
  MOD_RES (15), (16), (17), (18), (19): Xaa is A or G
  MOD_RES (20), (21), (22), (23): Xaa is A or G or is absent

SEQ ID NO: 76355 - protein, 38 aa, Artificial Sequence; identical to SEQ ID NO: 25289
  GFR-binding peptide
  MOD_RES (2), (4), (38): Xaa is C or S
  MOD_RES (16), (17), (18), (19), (20): Xaa is A or G
  MOD_RES (21), (22), (23), (24): Xaa is A or G or is absent

SEQ ID NO: 76356 - protein, 39 aa, Artificial Sequence
  GFR-binding peptide
  MOD_RES (1), (3), (37), (38): Xaa is C or S
  MOD_RES (15), (16), (17), (18), (19): Xaa is A or G
  MOD_RES (20), (21), (22), (23): Xaa is A or G or is absent
XGXRDVVMGQYNKLXXXXXXXXXLYLMSIASMKTPTXXP

SEQ ID NO: 76357 - protein, 37 aa, Artificial Sequence; identical to SEQ ID NO: 4230
  GFR-binding peptide
  MOD_RES (2), (4), (35), (36): Xaa is C or S

SEQ ID NO: 76358 - protein, 36 aa, Artificial Sequence; identical to SEQ ID NO: 11646
  GFR-binding peptide
  MOD_RES (1), (3): Xaa is C or S
  MOD_RES (15), (16), (17), (18), (19): Xaa is A or G
  MOD_RES (20), (21), (22), (23): Xaa is A or G or is absent

SEQ ID NO: 76359 - protein, 39 aa, Artificial Sequence; identical to SEQ ID NO: 58209
  GFR-binding peptide
  MOD_RES (1), (33), (34): Xaa is C or S

SEQ ID NO: 76360 - protein, 38 aa, Artificial Sequence; identical to SEQ ID NO: 2284
  GFR-binding peptide
  MOD_RES (1), (3), (34), (35): Xaa is C or S

SEQ ID NO: 76361 - protein, 42 aa, Artificial Sequence; identical to SEQ ID NO: 4234
  GFR-binding peptide
  MOD_RES (2), (4), (37), (38): Xaa is C or S
  MOD_RES (15), (16), (17), (18), (19): Xaa is A or G
  MOD_RES (20), (21), (22), (23): Xaa is A or G or is absent

SEQ ID NO: 76362 - protein, 38 aa, Artificial Sequence; identical to SEQ ID NO: 4236
  GFR-binding peptide
  MOD_RES (1), (33), (34): Xaa is C or S

SEQ ID NO: 76363 - protein, 37 aa, Artificial Sequence
  GFR-binding peptide
  MOD_RES (33), (34): Xaa is C or S
  MOD_RES (11), (12), (13), (14), (15): Xaa is A or G
  MOD_RES (16), (17), (18), (19): Xaa is A or G or is absent
SVAMGQYNKLXXXXXXXXXLYLISIASLKTPVXXAKS

SEQ ID NO: 76364 - protein, 43 aa, Artificial Sequence; identical to SEQ ID NO: 4238
  GFR-binding peptide
  MOD_RES (1), (3), (37): Xaa is C or S
  MOD_RES (15), (16), (17), (18), (19): Xaa is A or G
  MOD_RES (20), (21), (22), (23): Xaa is A or G or is absent

SEQ ID NO: 76365 - protein, 36 aa, Artificial Sequence
  GFR-binding peptide
  MOD_RES (1), (35), (36): Xaa is C or S
  MOD_RES (13), (14), (15), (16), (17): Xaa is A or G
  MOD_RES (18), (19), (20), (21): Xaa is A or G or is absent
XSEVTMNQYNKLXXXXXXXXXLYLISIASMKEPVXX

SEQ ID NO: 76366 - protein, 36 aa, Artificial Sequence; identical to SEQ ID NO: 56147
  GFR-binding peptide
  MOD_RES (33), (34): Xaa is C or S
  MOD_RES (11), (12), (13), (14), (15): Xaa is A or G
  MOD_RES (16), (17), (18), (19): Xaa is A or G or is absent

SEQ ID NO: 76367 - protein, 41 aa, Artificial Sequence; identical to SEQ ID NO: 56148
  GFR-binding peptide
  MOD_RES (2), (36), (37): Xaa is C or S
  MOD_RES (14), (15), (16), (17), (18): Xaa is A or G
  MOD_RES (19), (20), (21), (22): Xaa is A or G or is absent

SEQ ID NO: 76368 - protein, 35 aa, Artificial Sequence; identical to SEQ ID NO: 2288
  GFR-binding peptide
  MOD_RES (31), (32): Xaa is C or S

SEQ ID NO: 76369 - protein, 44 aa, Artificial Sequence; identical to SEQ ID NO: 4243
  GFR-binding peptide
  MOD_RES (2), (4), (38), (39): Xaa is C or S
  MOD_RES (16), (17), (18), (19), (20): Xaa is A or G
  MOD_RES (21), (22), (23), (24): Xaa is A or G or is absent

SEQ ID NO: 76370 - protein, 30 aa, Artificial Sequence; identical to SEQ ID NO: 2292
  GFR-binding peptide

SEQ ID NO: 76371 - protein, 42 aa, Artificial Sequence; identical to SEQ ID NO: 2293
  GFR-binding peptide
  MOD_RES (2), (4), (36), (37): Xaa is C or S

SEQ ID NO: 76372 - protein, 39 aa, Artificial Sequence; identical to SEQ ID NO: 2295
  GFR-binding peptide
  MOD_RES (1), (3), (38), (39): Xaa is C or S
  MOD_RES (16), (17), (18), (19), (20): Xaa is A or G
  MOD_RES (21), (22), (23), (24): Xaa is A or G or is absent

SEQ ID NO: 76373 - protein, 32 aa, Artificial Sequence; identical to SEQ ID NO: 2297
  GFR-binding peptide
  MOD_RES (11), (12), (13), (14), (15): Xaa is A or G
  MOD_RES (16), (17), (18), (19): Xaa is A or G or is absent

SEQ ID NO: 76374 - protein, 31 aa, Artificial Sequence; identical to SEQ ID NO: 56159
  GFR-binding peptide
  MOD_RES (1), (1): Xaa is C or S

SEQ ID NO: 76375 - protein, 39 aa, Artificial Sequence; identical to SEQ ID NO: 2299
  GFR-binding peptide
  MOD_RES (1), (3), (35), (36): Xaa is C or S

SEQ ID NO: 76376 - protein, 35 aa, Artificial Sequence; identical to SEQ ID NO: 2300
  GFR-binding peptide
  MOD_RES (1), (32), (33): Xaa is C or S

SEQ ID NO: 76377 - protein, 33 aa, Artificial Sequence
  GFR-binding peptide
  MOD_RES (1), (1): Xaa is C or S
  MOD_RES (12), (13), (14), (15), (16): Xaa is A or G
  MOD_RES (17), (18), (19), (20): Xaa is A or G or is absent
XEEVIMQYNKLXXXXXXXXXLYLMSIASTKVPA

SEQ ID NO: 76378 - protein, 35 aa, Artificial Sequence; identical to SEQ ID NO: 23287
  GFR-binding peptide
  MOD_RES (33), (34): Xaa is C or S
  MOD_RES (11), (12), (13), (14), (15): Xaa is A or G
  MOD_RES (16), (17), (18), (19): Xaa is A or G or is absent

SEQ ID NO: 76379 - protein, 35 aa, Artificial Sequence; identical to SEQ ID NO: 25301
  GFR-binding peptide
  MOD_RES (1), (3), (35): Xaa is C or S

SEQ ID NO: 76380 - protein, 35 aa, Artificial Sequence; identical to SEQ ID NO: 4251
  GFR-binding peptide
  MOD_RES (2), (4), (35): Xaa is C or S

SEQ ID NO: 76381 - protein, 40 aa, Artificial Sequence; identical to SEQ ID NO: 2303
  GFR-binding peptide
  MOD_RES (1), (3), (36), (37): Xaa is C or S
  MOD_RES (14), (15), (16), (17), (18): Xaa is A or G
  MOD_RES (19), (20), (21), (22): Xaa is A or G or is absent

SEQ ID NO: 76382 - protein, 38 aa, Artificial Sequence
  GFR-binding peptide
  MOD_RES (2), (4), (36), (37): Xaa is C or S
RXAXSEVTMNQYNKLVVNKNEDLYLISIASMKEPVXXP

SEQ ID NO: 76383 - protein, 34 aa, Artificial Sequence; identical to SEQ ID NO: 25303
  GFR-binding peptide
  MOD_RES (1), (33), (34): Xaa is C or S

SEQ ID NO: 76384 - protein, 34 aa, Artificial Sequence; identical to SEQ ID NO: 2305
  GFR-binding peptide
  MOD_RES (2), (2): Xaa is C or S
  MOD_RES (13), (14), (15), (16), (17): Xaa is A or G
  MOD_RES (18), (19), (20), (21): Xaa is A or G or is absent

SEQ ID NO: 76385 - protein, 35 aa, Artificial Sequence; identical to SEQ ID NO: 4253
  GFR-binding peptide
  MOD_RES (2), (35): Xaa is C or S

SEQ ID NO: 76386 - protein, 39 aa, Artificial Sequence
  GFR-binding peptide
  MOD_RES (33), (34): Xaa is C or S
  MOD_RES (11), (12), (13), (14), (15): Xaa is A or G
  MOD_RES (16), (17), (18), (19): Xaa is A or G or is absent
SVAMGQYNKLXXXXXXXXXLYLISIASLKTPVXXAKSAK

SEQ ID NO: 76387 - protein, 36 aa, Artificial Sequence; identical to SEQ ID NO: 9808
  GFR-binding peptide
  MOD_RES (2), (36): Xaa is C or S
  MOD_RES (14), (15), (16), (17), (18): Xaa is A or G
  MOD_RES (19), (20), (21), (22): Xaa is A or G or is absent

SEQ ID NO: 76388 - protein, 40 aa, Artificial Sequence
  GFR-binding peptide
  MOD_RES (2), (4), (38), (39): Xaa is C or S
  MOD_RES (16), (17), (18), (19), (20): Xaa is A or G
  MOD_RES (21), (22), (23), (24): Xaa is A or G or is absent
RXGXESVAMGQYNKLXXXXXXXXXLYLISIASLKTPVXXA

SEQ ID NO: 76389 - protein, 39 aa, Artificial Sequence; identical to SEQ ID NO: 25305
  GFR-binding peptide
  MOD_RES (1), (3), (37), (38): Xaa is C or S
  MOD_RES (15), (16), (17), (18), (19): Xaa is A or G
  MOD_RES (20), (21), (22), (23): Xaa is A or G or is absent

SEQ ID NO: 76390 - protein, 37 aa, Artificial Sequence; identical to SEQ ID NO: 2310
  GFR-binding peptide
  MOD_RES (31), (32): Xaa is C or S

SEQ ID NO: 76391 - protein, 41 aa, Artificial Sequence; identical to SEQ ID NO: 4256
  GFR-binding peptide
  MOD_RES (2), (4), (36), (37): Xaa is C or S

SEQ ID NO: 76392 - protein, 44 aa, Artificial Sequence; identical to SEQ ID NO: 2311
  GFR-binding peptide
  MOD_RES (2), (4), (38), (39): Xaa is C or S
  MOD_RES (16), (17), (18), (19), (20): Xaa is A or G
  MOD_RES (21), (22), (23), (24): Xaa is A or G or is absent

SEQ ID NO: 76393 - protein, 40 aa, Artificial Sequence
  GFR-binding peptide
  MOD_RES (1), (35), (36): Xaa is C or S
  MOD_RES (13), (14), (15), (16), (17): Xaa is A or G
  MOD_RES (18), (19), (20), (21): Xaa is A or G or is absent
XESVAMGQYNKLXXXXXXXXXLYLISIASLKTPVXXAKSA

SEQ ID NO: 76394 - protein, 32 aa, Artificial Sequence; identical to SEQ ID NO: 25312
  GFR-binding peptide
  MOD_RES (11), (12), (13), (14), (15): Xaa is A or G
  MOD_RES (16), (17), (18), (19): Xaa is A or G or is absent

SEQ ID NO: 76395 - protein, 37 aa, Artificial Sequence; identical to SEQ ID NO: 58241
  GFR-binding peptide
  MOD_RES (32), (33): Xaa is C or S

SEQ ID NO: 76396 - protein, 31 aa, Artificial Sequence; identical to SEQ ID NO: 23296
  GFR-binding peptide
  MOD_RES (31), (31): Xaa is C or S

SEQ ID NO: 76397 - protein, 38 aa, Artificial Sequence; identical to SEQ ID NO: 2316
  GFR-binding peptide
  MOD_RES (32), (32): Xaa is C or S

SEQ ID NO: 76398 - protein, 37 aa, Artificial Sequence
  GFR-binding peptide
  MOD_RES (1), (3), (37): Xaa is C or S
  MOD_RES (15), (16), (17), (18), (19): Xaa is A or G
  MOD_RES (20), (21), (22), (23): Xaa is A or G or is absent
XGXRDVVMGQYNKLXXXXXXXXXLYLMSIASMKTPTX

SEQ ID NO: 76399 - protein, 33 aa, Artificial Sequence; identical to SEQ ID NO: 11675
  GFR-binding peptide
  MOD_RES (1), (33): Xaa is C or S

SEQ ID NO: 76400 - protein, 40 aa, Artificial Sequence; identical to SEQ ID NO: 23297
  GFR-binding peptide
  MOD_RES (1), (35), (36): Xaa is C or S
  MOD_RES (13), (14), (15), (16), (17): Xaa is A or G
  MOD_RES (18), (19), (20), (21): Xaa is A or G or is absent

SEQ ID NO: 76401 - protein, 41 aa, Artificial Sequence
  GFR-binding peptide
  MOD_RES (1), (3), (37), (38): Xaa is C or S
  MOD_RES (15), (16), (17), (18), (19): Xaa is A or G
  MOD_RES (20), (21), (22), (23): Xaa is A or G or is absent
XGXAEVVMDQYNKLXXXXXXXXXLYLISIASLRAPVXXSAP

SEQ ID NO: 76402 - protein, 40 aa, Artificial Sequence; identical to SEQ ID NO: 2319
  GFR-binding peptide
  MOD_RES (2), (35), (36): Xaa is C or S

SEQ ID NO: 76403 - protein, 41 aa, Artificial Sequence; identical to SEQ ID NO: 56183
  GFR-binding peptide
  MOD_RES (1), (3), (35), (36): Xaa is C or S

SEQ ID NO: 76404 - protein, 37 aa, Artificial Sequence; identical to SEQ ID NO: 2323
  GFR-binding peptide
  MOD_RES (2), (4): Xaa is C or S
  MOD_RES (16), (17), (18), (19), (20): Xaa is A or G
  MOD_RES (21), (22), (23), (24): Xaa is A or G or is absent

SEQ ID NO: 76405 - protein, 36 aa, Artificial Sequence
  GFR-binding peptide
  MOD_RES (2), (34), (35): Xaa is C or S
AXSEVTMNQYNKLVVNKNEDLYLISIASMKEPVXXP

SEQ ID NO: 76406 - protein, 37 aa, Artificial Sequence; identical to SEQ ID NO: 4263
  GFR-binding peptide
  MOD_RES (34), (34): Xaa is C or S
  MOD_RES (12), (13), (14), (15), (16): Xaa is A or G
  MOD_RES (17), (18), (19), (20): Xaa is A or G or is absent

SEQ ID NO: 76407 - protein, 36 aa, Artificial Sequence; identical to SEQ ID NO: 4265
  GFR-binding peptide
  MOD_RES (2), (33), (34): Xaa is C or S

SEQ ID NO: 76408 - protein, 32 aa, Artificial Sequence; identical to SEQ ID NO: 2327
  GFR-binding peptide
  MOD_RES (31), (32): Xaa is C or S

SEQ ID NO: 76409 - protein, 36 aa, Artificial Sequence; identical to SEQ ID NO: 4266
  GFR-binding peptide
  MOD_RES (2), (35), (36): Xaa is C or S

SEQ ID NO: 76410 - protein, 41 aa, Artificial Sequence; identical to SEQ ID NO: 9821
  GFR-binding peptide
  MOD_RES (1), (3), (35), (36): Xaa is C or S

SEQ ID NO: 76411 - protein, 36 aa, Artificial Sequence; identical to SEQ ID NO: 11684
  GFR-binding peptide
  MOD_RES (1), (3), (35), (36): Xaa is C or S

SEQ ID NO: 76412 - protein, 34 aa, Artificial Sequence; identical to SEQ ID NO: 56192
  GFR-binding peptide
  MOD_RES (1), (32), (33): Xaa is C or S

SEQ ID NO: 76413 - protein, 40 aa, Artificial Sequence; identical to SEQ ID NO: 25322
  GFR-binding peptide
  MOD_RES (2), (4), (38), (39): Xaa is C or S
  MOD_RES (16), (17), (18), (19), (20): Xaa is A or G
  MOD_RES (21), (22), (23), (24): Xaa is A or G or is absent

SEQ ID NO: 76414 - protein, 35 aa, Artificial Sequence; identical to SEQ ID NO: 11686
  GFR-binding peptide
  MOD_RES (33), (34): Xaa is C or S
  MOD_RES (11), (12), (13), (14), (15): Xaa is A or G
  MOD_RES (16), (17), (18), (19): Xaa is A or G or is absent

SEQ ID NO: 76415 - protein, 35 aa, Artificial Sequence; identical to SEQ ID NO: 2332
  GFR-binding peptide
  MOD_RES (2), (4), (35): Xaa is C or S

SEQ ID NO: 76416 - protein, 35 aa, Artificial Sequence; identical to SEQ ID NO: 56197
  GFR-binding peptide
  MOD_RES (2), (34), (35): Xaa is C or S

SEQ ID NO: 76417 - protein, 40 aa, Artificial Sequence; identical to SEQ ID NO: 2333
  GFR-binding peptide
  MOD_RES (1), (3), (36), (37): Xaa is C or S

SEQ ID NO: 76418 - protein, 37 aa, Artificial Sequence; identical to SEQ ID NO: 23318
  GFR-binding peptide
  MOD_RES (1), (33), (34): Xaa is C or S

SEQ ID NO: 76419 - protein, 42 aa, Artificial Sequence; identical to SEQ ID NO: 4271
  GFR-binding peptide
  MOD_RES (1), (3), (37), (38): Xaa is C or S
  MOD_RES (15), (16), (17), (18), (19): Xaa is A or G
  MOD_RES (20), (21), (22), (23): Xaa is A or G or is absent

SEQ ID NO: 76420 - protein, 34 aa, Artificial Sequence; identical to SEQ ID NO: 4272
  GFR-binding peptide
  MOD_RES (1), (32), (33): Xaa is C or S

SEQ ID NO: 76421 - protein, 33 aa, Artificial Sequence
  GFR-binding peptide
  MOD_RES (32), (33): Xaa is C or S
RDVVMGQYNKLIIQQKDNLYLMSIASMKTPTXX

SEQ ID NO: 76422 - protein, 39 aa, Artificial Sequence; identical to SEQ ID NO: 2336
  GFR-binding peptide
  MOD_RES (2), (35), (36): Xaa is C or S
  MOD_RES (13), (14), (15), (16), (17): Xaa is A or G
  MOD_RES (18), (19), (20), (21): Xaa is A or G or is absent

SEQ ID NO: 76423 - protein, 37 aa, Artificial Sequence; identical to SEQ ID NO: 2337
  GFR-binding peptide
  MOD_RES (1), (3), (35), (36): Xaa is C or S

SEQ ID NO: 76424 - protein, 42 aa, Artificial Sequence; identical to SEQ ID NO: 4274
  GFR-binding peptide
  MOD_RES (2), (4), (37), (38): Xaa is C or S

SEQ ID NO: 76425 - protein, 39 aa, Artificial Sequence; identical to SEQ ID NO: 2338
  GFR-binding peptide
  MOD_RES (2), (36), (37): Xaa is C or S
  MOD_RES (14), (15), (16), (17), (18): Xaa is A or G
  MOD_RES (19), (20), (21), (22): Xaa is A or G or is absent

SEQ ID NO: 76426 - protein, 39 aa, Artificial Sequence; identical to SEQ ID NO: 4275
  GFR-binding peptide
  MOD_RES (2), (36), (37): Xaa is C or S
  MOD_RES (14), (15), (16), (17), (18): Xaa is A or G
  MOD_RES (19), (20), (21), (22): Xaa is A or G or is absent

SEQ ID NO: 76427 - protein, 34 aa, Artificial Sequence; identical to SEQ ID NO: 4277
  GFR-binding peptide
  MOD_RES (1), (1): Xaa is C or S
  MOD_RES (13), (14), (15), (16), (17): Xaa is A or G
  MOD_RES (18), (19), (20), (21): Xaa is A or G or is absent

SEQ ID NO: 76428 - protein, 39 aa, Artificial Sequence; identical to SEQ ID NO: 4278
  GFR-binding peptide
  MOD_RES (1), (33): Xaa is C or S

SEQ ID NO: 76429 - protein, 31 aa, Artificial Sequence; identical to SEQ ID NO: 11698
  GFR-binding peptide
  MOD_RES (31), (31): Xaa is C or S

SEQ ID NO: 76430 - protein, 40 aa, Artificial Sequence; identical to SEQ ID NO: 4280
  GFR-binding peptide
  MOD_RES (34), (34): Xaa is C or S
  MOD_RES (12), (13), (14), (15), (16): Xaa is A or G
  MOD_RES (17), (18), (19), (20): Xaa is A or G or is absent

SEQ ID NO: 76431 - protein, 37 aa, Artificial Sequence; identical to SEQ ID NO: 2340
  GFR-binding peptide
  MOD_RES (1), (33), (34): Xaa is C or S

SEQ ID NO: 76432 - protein, 32 aa, Artificial Sequence; identical to SEQ ID NO: 56211
  GFR-binding peptide
  MOD_RES (32), (32): Xaa is C or S

SEQ ID NO: 76433 - protein, 34 aa, Artificial Sequence
  GFR-binding peptide
  MOD_RES (1), (34): Xaa is C or S
  MOD_RES (12), (13), (14), (15), (16): Xaa is A or G
  MOD_RES (17), (18), (19), (20): Xaa is A or G or is absent
XEEVIMQYNKLXXXXXXXXXLYLMSIASTKVPAX

SEQ ID NO: 76434 - protein, 36 aa, Artificial Sequence
  GFR-binding peptide
  MOD_RES (1), (33), (34): Xaa is C or S
XSEVTMNQYNKLVVNKNEDLYLISIASMKEPVXXPE

SEQ ID NO: 76435 - protein, 41 aa, Artificial Sequence; identical to SEQ ID NO: 2343
  GFR-binding peptide
  MOD_RES (1), (3), (37): Xaa is C or S
  MOD_RES (15), (16), (17), (18), (19): Xaa is A or G
  MOD_RES (20), (21), (22), (23): Xaa is A or G or is absent

SEQ ID NO: 76436 - protein, 35 aa, Artificial Sequence
  GFR-binding peptide
  MOD_RES (32), (33): Xaa is C or S
SEVTMNQYNKLVVNKNEDLYLISIASMKEPVXXPE

SEQ ID NO: 76437 - protein, 34 aa, Artificial Sequence; identical to SEQ ID NO: 2344
  GFR-binding peptide
  MOD_RES (31), (32): Xaa is C or S

SEQ ID NO: 76438 - protein, 38 aa, Artificial Sequence; identical to SEQ ID NO: 25331
  GFR-binding peptide
  MOD_RES (32), (33): Xaa is C or S

SEQ ID NO: 76439 - protein, 41 aa, Artificial Sequence
  GFR-binding peptide
  MOD_RES (2), (36), (37): Xaa is C or S
  MOD_RES (14), (15), (16), (17), (18): Xaa is A or G
  MOD_RES (19), (20), (21), (22): Xaa is A or G or is absent
GXAEVVMDQYNKLXXXXXXXXXLYLISIASLRAPVXXSAPA

SEQ ID NO: 76440 - protein, 39 aa, Artificial Sequence; identical to SEQ ID NO: 4283
  GFR-binding peptide
  MOD_RES (2), (33), (34): Xaa is C or S

SEQ ID NO: 76441 - protein, 38 aa, Artificial Sequence; identical to SEQ ID NO: 2349
  GFR-binding peptide
  MOD_RES (34), (35): Xaa is C or S
  MOD_RES (12), (13), (14), (15), (16): Xaa is A or G
  MOD_RES (17), (18), (19), (20): Xaa is A or G or is absent

SEQ ID NO: 76442 - protein, 34 aa, Artificial Sequence
  GFR-binding peptide
  MOD_RES (1), (32), (33): Xaa is C or S
XEEVIMQYNKLLLVRGNDLYLMSIASTKVPAXXT

SEQ ID NO: 76443 - protein, 39 aa, Artificial Sequence; identical to SEQ ID NO: 2350
  GFR-binding peptide
  MOD_RES (2), (4), (36), (37): Xaa is C or S

SEQ ID NO: 76444 - protein, 38 aa, Artificial Sequence; identical to SEQ ID NO: 2351
  GFR-binding peptide
  MOD_RES (1), (3), (35), (36): Xaa is C or S

SEQ ID NO: 76445 - protein, 34 aa, Artificial Sequence
  GFR-binding peptide
  MOD_RES (32), (33): Xaa is C or S
AEVVMDQYNKLVVNNAADLYLISIASLRAPVXXS

SEQ ID NO: 76446 - protein, 42 aa, Artificial Sequence; identical to SEQ ID NO: 2353
  GFR-binding peptide
  MOD_RES (1), (3), (37), (38): Xaa is C or S
  MOD_RES (15), (16), (17), (18), (19): Xaa is A or G
  MOD_RES (20), (21), (22), (23): Xaa is A or G or is absent

SEQ ID NO: 76447 - protein, 37 aa, Artificial Sequence; identical to SEQ ID NO: 4286
  GFR-binding peptide
  MOD_RES (1), (3), (37): Xaa is C or S
  MOD_RES (15), (16), (17), (18), (19): Xaa is A or G
  MOD_RES (20), (21), (22), (23): Xaa is A or G or is absent

SEQ ID NO: 76448 - protein, 34 aa, Artificial Sequence; identical to SEQ ID NO: 2356
  GFR-binding peptide
  MOD_RES (1), (34): Xaa is C or S
  MOD_RES (12), (13), (14), (15), (16): Xaa is A or G
  MOD_RES (17), (18), (19), (20): Xaa is A or G or is absent

SEQ ID NO: 76449 - protein, 38 aa, Artificial Sequence
  GFR-binding peptide
  MOD_RES (33), (34): Xaa is C or S
  MOD_RES (11), (12), (13), (14), (15): Xaa is A or G
  MOD_RES (16), (17), (18), (19): Xaa is A or G or is absent
EEVIMQYNKLXXXXXXXXXLYLMSIASTKVPAXXTSPV

SEQ ID NO: 76450 - protein, 43 aa, Artificial Sequence; identical to SEQ ID NO: 2357
  GFR-binding peptide
  MOD_RES (2), (4), (38), (39): Xaa is C or S
  MOD_RES (16), (17), (18), (19), (20): Xaa is A or G
  MOD_RES (21), (22), (23), (24): Xaa is A or G or is absent

SEQ ID NO: 76451 - protein, 33 aa, Artificial Sequence; identical to SEQ ID NO: 2358
  GFR-binding peptide
  MOD_RES (33), (33): Xaa is C or S
  MOD_RES (11), (12), (13), (14), (15): Xaa is A or G
  MOD_RES (16), (17), (18), (19): Xaa is A or G or is absent

SEQ ID NO: 76452 - protein, 38 aa, Artificial Sequence; identical to SEQ ID NO: 2359
  GFR-binding peptide
  MOD_RES (1), (34), (35): Xaa is C or S
  MOD_RES (12), (13), (14), (15), (16): Xaa is A or G
  MOD_RES (17), (18), (19), (20): Xaa is A or G or is absent

SEQ ID NO: 76453 - protein, 42 aa, Artificial Sequence; identical to SEQ ID NO: 56227
  GFR-binding peptide
  MOD_RES (2), (36), (37): Xaa is C or S
  MOD_RES (14), (15), (16), (17), (18): Xaa is A or G
  MOD_RES (19), (20), (21), (22): Xaa is A or G or is absent

SEQ ID NO: 76454 - protein, 38 aa, Artificial Sequence
  GFR-binding peptide
  MOD_RES (2), (4), (38): Xaa is C or S
  MOD_RES (16), (17), (18), (19), (20): Xaa is A or G
  MOD_RES (21), (22), (23), (24): Xaa is A or G or is absent
RXAXSEVTMNQYNKLXXXXXXXXXLYLISIASMKEPVX

SEQ ID NO: 76455 - protein, 37 aa, Artificial Sequence; identical to SEQ ID NO: 2360
  GFR-binding peptide
  MOD_RES (1), (3), (37): Xaa is C or S
  MOD_RES (15), (16), (17), (18), (19): Xaa is A or G
  MOD_RES (20), (21), (22), (23): Xaa is A or G or is absent

SEQ ID NO: 76456 - protein, 40 aa, Artificial Sequence; identical to SEQ ID NO: 4291
  GFR-binding peptide
  MOD_RES (2), (4), (36), (37): Xaa is C or S

SEQ ID NO: 76457 - protein, 35 aa, Artificial Sequence
  GFR-binding peptide
  MOD_RES (2), (2): Xaa is C or S
  MOD_RES (14), (15), (16), (17), (18): Xaa is A or G
  MOD_RES (19), (20), (21), (22): Xaa is A or G or is absent
GXAEVVMDQYNKLXXXXXXXXXLYLISIASLRAPV

SEQ ID NO: 76458 - protein, 34 aa, Artificial Sequence; identical to SEQ ID NO: 56229
  GFR-binding peptide
  MOD_RES (2), (4): Xaa is C or S

SEQ ID NO: 76459 - protein, 34 aa, Artificial Sequence; identical to SEQ ID NO: 2362
  GFR-binding peptide
  MOD_RES (1), (33), (34): Xaa is C or S

SEQ ID NO: 76460 - protein, 39 aa, Artificial Sequence; identical to SEQ ID NO: 2363
  GFR-binding peptide
  MOD_RES (33), (34): Xaa is C or S
  MOD_RES (11), (12), (13), (14), (15): Xaa is A or G
  MOD_RES (16), (17), (18), (19): Xaa is A or G or is absent

SEQ ID NO: 76461 - protein, 38 aa, Artificial Sequence; identical to SEQ ID NO: 4294
  GFR-binding peptide
  MOD_RES (33), (34): Xaa is C or S
  MOD_RES (11), (12), (13), (14), (15): Xaa is A or G
  MOD_RES (16), (17), (18), (19): Xaa is A or G or is absent

SEQ ID NO: 76462 - protein, 33 aa, Artificial Sequence; identical to SEQ ID NO: 4295
  GFR-binding peptide
  MOD_RES (2), (33): Xaa is C or S

SEQ ID NO: 76463 - protein, 39 aa, Artificial Sequence; identical to SEQ ID NO: 56235
  GFR-binding peptide
  MOD_RES (2), (36), (37): Xaa is C or S
  MOD_RES (14), (15), (16), (17), (18): Xaa is A or G
  MOD_RES (19), (20), (21), (22): Xaa is A or G or is absent

SEQ ID NO: 76464 - protein, 36 aa, Artificial Sequence; identical to SEQ ID NO: 60015
  GFR-binding peptide
  MOD_RES (31), (32): Xaa is C or S

SEQ ID NO: 76465 - protein, 41 aa, Artificial Sequence; identical to SEQ ID NO: 2364
  GFR-binding peptide
  MOD_RES (2), (4), (37), (38): Xaa is C or S
  MOD_RES (15), (16), (17), (18), (19): Xaa is A or G
  MOD_RES (20), (21), (22), (23): Xaa is A or G or is absent

SEQ ID NO: 76466 - protein, 35 aa, Artificial Sequence; identical to SEQ ID NO: 2367
  GFR-binding peptide
  MOD_RES (34), (35): Xaa is C or S
  MOD_RES (12), (13), (14), (15), (16): Xaa is A or G
  MOD_RES (17), (18), (19), (20): Xaa is A or G or is absent

SEQ ID NO: 76467 - protein, 39 aa, Artificial Sequence; identical to SEQ ID NO: 4297
  GFR-binding peptide
  MOD_RES (2), (4), (38), (39): Xaa is C or S
  MOD_RES (16), (17), (18), (19), (20): Xaa is A or G
  MOD_RES (21), (22), (23), (24): Xaa is A or G or is absent

SEQ ID NO: 76468 - protein, 34 aa, Artificial Sequence; identical to SEQ ID NO: 2368
  GFR-binding peptide
  MOD_RES (32), (33): Xaa is C or S

SEQ ID NO: 76469 - protein, 33 aa, Artificial Sequence; identical to SEQ ID NO: 4298
  GFR-binding peptide
  MOD_RES (2), (33): Xaa is C or S

SEQ ID NO: 76470 - protein, 37 aa, Artificial Sequence; identical to SEQ ID NO: 4299
  GFR-binding peptide
  MOD_RES (2), (36), (37): Xaa is C or S
  MOD_RES (14), (15), (16), (17), (18): Xaa is A or G
  MOD_RES (19), (20), (21), (22): Xaa is A or G or is absent

SEQ ID NO: 76471 - protein, 38 aa, Artificial Sequence
  GFR-binding peptide
  MOD_RES (1), (33), (34): Xaa is C or S
XAEVVMDQYNKLVVNNAADLYLISIASLRAPVXXSAPA

SEQ ID NO: 76472 - protein, 41 aa, Artificial Sequence; identical to SEQ ID NO: 58290
  GFR-binding peptide
  MOD_RES (2), (4), (38), (39): Xaa is C or S
  MOD_RES (16), (17), (18), (19), (20): Xaa is A or G
  MOD_RES (21), (22), (23), (24): Xaa is A or G or is absent

SEQ ID NO: 76473 - protein, 37 aa, Artificial Sequence; identical to SEQ ID NO: 4303
  GFR-binding peptide
  MOD_RES (2), (34), (35): Xaa is C or S

SEQ ID NO: 76474 - protein, 38 aa, Artificial Sequence; identical to SEQ ID NO: 4304
  GFR-binding peptide
  MOD_RES (1), (35), (36): Xaa is C or S
  MOD_RES (13), (14), (15), (16), (17): Xaa is A or G
  MOD_RES (18), (19), (20), (21): Xaa is A or G or is absent

SEQ ID NO: 76475 - protein, 40 aa, Artificial Sequence; identical to SEQ ID NO: 4305
  GFR-binding peptide
  MOD_RES (2), (4), (36), (37): Xaa is C or S

SEQ ID NO: 76476 - protein, 36 aa, Artificial Sequence; identical to SEQ ID NO: 4306
  GFR-binding peptide
  MOD_RES (2), (4), (35), (36): Xaa is C or S

SEQ ID NO: 76477 - protein, 37 aa, Artificial Sequence; identical to SEQ ID NO: 2377
  GFR-binding peptide
  MOD_RES (1), (33), (34): Xaa is C or S

SEQ ID NO: 76478 - protein, 42 aa, Artificial Sequence; identical to SEQ ID NO: 2379
  GFR-binding peptide
  MOD_RES (2), (4), (38), (39): Xaa is C or S
  MOD_RES (16), (17), (18), (19), (20): Xaa is A or G
  MOD_RES (21), (22), (23), (24): Xaa is A or G or is absent

SEQ ID NO: 76479 - protein, 39 aa, Artificial Sequence; identical to SEQ ID NO: 2381
  GFR-binding peptide
  MOD_RES (2), (36), (37): Xaa is C or S
  MOD_RES (14), (15), (16), (17), (18): Xaa is A or G
  MOD_RES (19), (20), (21), (22): Xaa is A or G or is absent

SEQ ID NO: 76480 - protein, 32 aa, Artificial Sequence; identical to SEQ ID NO: 4308
  GFR-binding peptide
  MOD_RES (31), (32): Xaa is C or S

SEQ ID NO: 76481 - protein, 38 aa, Artificial Sequence; identical to SEQ ID NO: 2382
  GFR-binding peptide
  MOD_RES (1), (3), (37), (38): Xaa is C or S
  MOD_RES (15), (16), (17), (18), (19): Xaa is A or G
  MOD_RES (20), (21), (22), (23): Xaa is A or G or is absent

SEQ ID NO: 76482 - protein, 33 aa, Artificial Sequence; identical to SEQ ID NO: 4310
  GFR-binding peptide
  MOD_RES (33), (33): Xaa is C or S
  MOD_RES (11), (12), (13), (14), (15): Xaa is A or G
  MOD_RES (16), (17), (18), (19): Xaa is A or G or is absent

SEQ ID NO: 76483 - protein, 32 aa, Artificial Sequence; identical to SEQ ID NO: 4313
  GFR-binding peptide
  MOD_RES (1), (1): Xaa is C or S

SEQ ID NO: 76484 - protein, 40 aa, Artificial Sequence; identical to SEQ ID NO: 58296
  GFR-binding peptide
  MOD_RES (2), (4), (38), (39): Xaa is C or S
  MOD_RES (16), (17), (18), (19), (20): Xaa is A or G
  MOD_RES (21), (22), (23), (24): Xaa is A or G or is absent

SEQ ID NO: 76485 - protein, 40 aa, Artificial Sequence; identical to SEQ ID NO: 56247
  GFR-binding peptide
  MOD_RES (1), (3), (35), (36): Xaa is C or S

SEQ ID NO: 76486 - protein, 41 aa, Artificial Sequence; identical to SEQ ID NO: 4314
  GFR-binding peptide
  MOD_RES (1), (3), (35), (36): Xaa is C or S

SEQ ID NO: 76487 - protein, 34 aa, Artificial Sequence; identical to SEQ ID NO: 2387
  GFR-binding peptide
  MOD_RES (33), (34): Xaa is C or S
  MOD_RES (11), (12), (13), (14), (15): Xaa is A or G
  MOD_RES (16), (17), (18), (19): Xaa is A or G or is absent

SEQ ID NO: 76488 - protein, 44 aa, Artificial Sequence; identical to SEQ ID NO: 2388
  GFR-binding peptide
  MOD_RES (1), (3), (38), (39): Xaa is C or S
  MOD_RES (16), (17), (18), (19), (20): Xaa is A or G
  MOD_RES (21), (22), (23), (24): Xaa is A or G or is absent

SEQ ID NO: 76489 - protein, 35 aa, Artificial Sequence; identical to SEQ ID NO: 2390
  GFR-binding peptide
  MOD_RES (1), (32), (33): Xaa is C or S

SEQ ID NO: 76490 - protein, 41 aa, Artificial Sequence; identical to SEQ ID NO: 2394
  GFR-binding peptide
  MOD_RES (2), (36), (37): Xaa is C or S
  MOD_RES (14), (15), (16), (17), (18): Xaa is A or G
  MOD_RES (19), (20), (21), (22): Xaa is A or G or is absent

SEQ ID NO: 76491 - protein, 36 aa, Artificial Sequence; identical to SEQ ID NO: 4320
  GFR-binding peptide
  MOD_RES (2), (36): Xaa is C or S
  MOD_RES (14), (15), (16), (17), (18): Xaa is A or G
  MOD_RES (19), (20), (21), (22): Xaa is A or G or is absent

SEQ ID NO: 76492 - protein, 36 aa, Artificial Sequence; identical to SEQ ID NO: 2398
  GFR-binding peptide
  MOD_RES (1), (34), (35): Xaa is C or S
  MOD_RES (12), (13), (14), (15), (16): Xaa is A or G
  MOD_RES (17), (18), (19), (20): Xaa is A or G or is absent

SEQ ID NO: 76493 - protein, 38 aa, Artificial Sequence; identical to SEQ ID NO: 4322
  GFR-binding peptide
  MOD_RES (33), (34): Xaa is C or S
  MOD_RES (11), (12), (13), (14), (15): Xaa is A or G
  MOD_RES (16), (17), (18), (19): Xaa is A or G or is absent

SEQ ID NO: 76494 - protein, 38 aa, Artificial Sequence; identical to SEQ ID NO: 4324
  GFR-binding peptide
  MOD_RES (2), (34), (35): Xaa is C or S

SEQ ID NO: 76495 - protein, 39 aa, Artificial Sequence; identical to SEQ ID NO: 61809
  GFR-binding peptide
  MOD_RES (2), (36), (37): Xaa is C or S
  MOD_RES (14), (15), (16), (17), (18): Xaa is A or G
  MOD_RES (19), (20), (21), (22): Xaa is A or G or is absent

SEQ ID NO: 76496 - protein, 38 aa, Artificial Sequence; identical to SEQ ID NO: 9895
  GFR-binding peptide
  MOD_RES (1), (33), (34): Xaa is C or S

SEQ ID NO: 76497 - protein, 42 aa, Artificial Sequence
  GFR-binding peptide
  MOD_RES (2), (36), (37): Xaa is C or S
  MOD_RES (14), (15), (16), (17), (18): Xaa is A or G
  MOD_RES (19), (20), (21), (22): Xaa is A or G or is absent
GXAEVVMDQYNKLXXXXXXXXXLYLISIASLRAPVXXSAPAA

SEQ ID NO: 76498 - protein, 34 aa, Artificial Sequence
  GFR-binding peptide
  MOD_RES (1), (33), (34): Xaa is C or S
XESVAMGQYNKLYTVVGKDLYLISIASLKTPVXX

SEQ ID NO: 76499 - protein, 40 aa, Artificial Sequence
  GFR-binding peptide
  MOD_RES (34), (35): Xaa is C or S
  MOD_RES (12), (13), (14), (15), (16): Xaa is A or G
  MOD_RES (17), (18), (19), (20): Xaa is A or G or is absent
AEVVMDQYNKLXXXXXXXXXLYLISIASLRAPVXXSAPAA

SEQ ID NO: 76500 - protein, 36 aa, Artificial Sequence
  GFR-binding peptide
  MOD_RES (2), (35), (36): Xaa is C or S
  MOD_RES (13), (14), (15), (16), (17): Xaa is A or G
  MOD_RES (18), (19), (20), (21): Xaa is A or G or is absent
GXEEVIMQYNKLXXXXXXXXXLYLMSIASTKVPAXX

SEQ ID NO: 76501 - protein, 38 aa, Artificial Sequence; identical to SEQ ID NO: 4329
  GFR-binding peptide
  MOD_RES (1), (33), (34): Xaa is C or S

SEQ ID NO: 76502 - protein, 38 aa, Artificial Sequence; identical to SEQ ID NO: 2402
  GFR-binding peptide
  MOD_RES (2), (4), (36), (37): Xaa is C or S

SEQ ID NO: 76503 - protein, 35 aa, Artificial Sequence; identical to SEQ ID NO: 4331
  GFR-binding peptide
  MOD_RES (34), (35): Xaa is C or S
  MOD_RES (12), (13), (14), (15), (16): Xaa is A or G
  MOD_RES (17), (18), (19), (20): Xaa is A or G or is absent

SEQ ID NO: 76504 - protein, 36 aa, Artificial Sequence; identical to SEQ ID NO: 4332
  GFR-binding peptide
  MOD_RES (2), (36): Xaa is C or S
  MOD_RES (14), (15), (16), (17), (18): Xaa is A or G
  MOD_RES (19), (20), (21), (22): Xaa is A or G or is absent

SEQ ID NO: 76505 - protein, 35 aa, Artificial Sequence
  GFR-binding peptide
  MOD_RES (1), (33), (34): Xaa is C or S
XRDVVMGQYNKLIIQQKDNLYLMSIASMKTPTXXP

SEQ ID NO: 76506 - protein, 33 aa, Artificial Sequence; identical to SEQ ID NO: 4335
  GFR-binding peptide
  MOD_RES (1), (1): Xaa is C or S
  MOD_RES (12), (13), (14), (15), (16): Xaa is A or G
  MOD_RES (17), (18), (19), (20): Xaa is A or G or is absent

SEQ ID NO: 76507 - protein, 34 aa, Artificial Sequence; identical to SEQ ID NO: 2403
  GFR-binding peptide
  MOD_RES (33), (34): Xaa is C or S
  MOD_RES (11), (12), (13), (14), (15): Xaa is A or G
  MOD_RES (16), (17), (18), (19): Xaa is A or G or is absent

SEQ ID NO: 76508 - protein, 39 aa, Artificial Sequence
  GFR-binding peptide
  MOD_RES (2), (34), (35): Xaa is C or S
GXESVAMGQYNKLYTVVGKDLYLISIASLKTPVXXAKSA

SEQ ID NO: 76509 - protein, 35 aa, Artificial Sequence; identical to SEQ ID NO: 4337
  GFR-binding peptide
  MOD_RES (2), (2): Xaa is C or S
  MOD_RES (14), (15), (16), (17), (18): Xaa is A or G
  MOD_RES (19), (20), (21), (22): Xaa is A or G or is absent

SEQ ID NO: 76510 - protein, 39 aa, Artificial Sequence; identical to SEQ ID NO: 2406
  GFR-binding peptide
  MOD_RES (2), (4), (38), (39): Xaa is C or S
  MOD_RES (16), (17), (18), (19), (20): Xaa is A or G
  MOD_RES (21), (22), (23), (24): Xaa is A or G or is absent

SEQ ID NO: 76511 - protein, 34 aa, Artificial Sequence; identical to SEQ ID NO: 4338
  GFR-binding peptide
  MOD_RES (1), (34): Xaa is C or S
  MOD_RES (12), (13), (14), (15), (16): Xaa is A or G
  MOD_RES (17), (18), (19), (20): Xaa is A or G or is absent

SEQ ID NO: 76512 - protein, 38 aa, Artificial Sequence; identical to SEQ ID NO: 2407
  GFR-binding peptide
  MOD_RES (33), (34): Xaa is C or S
  MOD_RES (11), (12), (13), (14), (15): Xaa is A or G
  MOD_RES (16), (17), (18), (19): Xaa is A or G or is absent

SEQ ID NO: 76513 - protein, 34 aa, Artificial Sequence; identical to SEQ ID NO: 2408
  GFR-binding peptide
  MOD_RES (33), (34): Xaa is C or S
  MOD_RES (11), (12), (13), (14), (15): Xaa is A or G
  MOD_RES (16), (17), (18), (19): Xaa is A or G or is absent

SEQ ID NO: 76514 - protein, 38 aa, Artificial Sequence; identical to SEQ ID NO: 56275
  GFR-binding peptide
  MOD_RES (2), (36), (37): Xaa is C or S
  MOD_RES (14), (15), (16), (17), (18): Xaa is A or G
  MOD_RES (19), (20), (21), (22): Xaa is A or G or is absent

SEQ ID NO: 76515 - protein, 32 aa, Artificial Sequence; identical to SEQ ID NO: 2409
  GFR-binding peptide
  MOD_RES (31), (31): Xaa is C or S

SEQ ID NO: 76516 - protein, 41 aa, Artificial Sequence; identical to SEQ ID NO: 2410
  GFR-binding peptide
  MOD_RES (1), (3), (35), (36): Xaa is C or S

SEQ ID NO: 76517 - protein, 37 aa, Artificial Sequence
  GFR-binding peptide
  MOD_RES (1), (34), (35): Xaa is C or S
  MOD_RES (12), (13), (14), (15), (16): Xaa is A or G
  MOD_RES (17), (18), (19), (20): Xaa is A or G or is absent
XEEVIMQYNKLXXXXXXXXXLYLMSIASTKVPAXXTS

SEQ ID NO: 76518 - protein, 37 aa, Artificial Sequence
  GFR-binding peptide
  MOD_RES (2), (36), (37): Xaa is C or S
  MOD_RES (14), (15), (16), (17), (18): Xaa is A or G
  MOD_RES (19), (20), (21), (22): Xaa is A or G or is absent
GXRDVVMGQYNKLXXXXXXXXXLYLMSIASMKTPTXX

SEQ ID NO: 76519 - protein, 32 aa, Artificial Sequence; identical to SEQ ID NO: 4346
  GFR-binding peptide
  MOD_RES (11), (12), (13), (14), (15): Xaa is A or G
  MOD_RES (16), (17), (18), (19): Xaa is A or G or is absent

SEQ ID NO: 76520 - protein, 33 aa, Artificial Sequence
  GFR-binding peptide
  MOD_RES (2), (33): Xaa is C or S
GXEEVIMQYNKLLLVRGNDLYLMSIASTKVPAX

SEQ ID NO: 76521 - protein, 40 aa, Artificial Sequence; identical to SEQ ID NO: 9911
  GFR-binding peptide
  MOD_RES (2), (34), (35): Xaa is C or S

SEQ ID NO: 76522 - protein, 35 aa, Artificial Sequence; identical to SEQ ID NO: 63566
  GFR-binding peptide
  MOD_RES (2), (34), (35): Xaa is C or S

SEQ ID NO: 76523 - protein, 35 aa, Artificial Sequence
  GFR-binding peptide
  MOD_RES (32), (33): Xaa is C or S
RDVVMGQYNKLIIQQKDNLYLMSIASMKTPTXXPG

SEQ ID NO: 76524 - protein, 38 aa, Artificial Sequence
  GFR-binding peptide
  MOD_RES (1), (3), (37), (38): Xaa is C or S
  MOD_RES (15), (16), (17), (18), (19): Xaa is A or G
  MOD_RES (20), (21), (22), (23): Xaa is A or G or is absent
XGXESVAMGQYNKLXXXXXXXXXLYLISIASLKTPVXX

SEQ ID NO: 76525 - protein, 37 aa, Artificial Sequence; identical to SEQ ID NO: 23395
  GFR-binding peptide
  MOD_RES (2), (34), (35): Xaa is C or S

SEQ ID NO: 76526 - protein, 37 aa, Artificial Sequence
  GFR-binding peptide
  MOD_RES (2), (36), (37): Xaa is C or S
  MOD_RES (14), (15), (16), (17), (18): Xaa is A or G
  MOD_RES (19), (20), (21), (22): Xaa is A or G or is absent
GXAEVVMDQYNKLXXXXXXXXXLYLISIASLRAPVXX

SEQ ID NO: 76527 - protein, 36 aa, Artificial Sequence; identical to SEQ ID NO: 2418
  GFR-binding peptide
  MOD_RES (1), (32), (33): Xaa is C or S

SEQ ID NO: 76528 - protein, 36 aa, Artificial Sequence
  GFR-binding peptide
  MOD_RES (33), (34): Xaa is C or S
  MOD_RES (11), (12), (13), (14), (15): Xaa is A or G
  MOD_RES (16), (17), (18), (19): Xaa is A or G or is absent
SVAMGQYNKLXXXXXXXXXLYLISIASLKTPVXXAK

SEQ ID NO: 76529 - protein, 39 aa, Artificial Sequence; identical to SEQ ID NO: 4349
  GFR-binding peptide
  MOD_RES (1), (3), (37), (38): Xaa is C or S
  MOD_RES (15), (16), (17), (18), (19): Xaa is A or G
  MOD_RES (20), (21), (22), (23): Xaa is A or G or is absent

SEQ ID NO: 76530 - protein, 38 aa, Artificial Sequence; identical to SEQ ID NO: 23400
  GFR-binding peptide
  MOD_RES (2), (34), (35): Xaa is C or S

SEQ ID NO: 76531 - protein, 33 aa, Artificial Sequence; identical to SEQ ID NO: 4350
  GFR-binding peptide
  MOD_RES (33), (33): Xaa is C or S
  MOD_RES (11), (12), (13), (14), (15): Xaa is A or G
  MOD_RES (16), (17), (18), (19): Xaa is A or G or is absent

SEQ ID NO: 76532 - protein, 34 aa, Artificial Sequence; identical to SEQ ID NO: 4351
  GFR-binding peptide
  MOD_RES (1), (32), (33): Xaa is C or S

SEQ ID NO: 76533 - protein, 37 aa, Artificial Sequence; identical to SEQ ID NO: 2423
  GFR-binding peptide
  MOD_RES (1), (35), (36): Xaa is C or S
  MOD_RES (13), (14), (15), (16), (17): Xaa is A or G
  MOD_RES (18), (19), (20), (21): Xaa is A or G or is absent

SEQ ID NO: 76534 - protein, 37 aa, Artificial Sequence; identical to SEQ ID NO: 56284
  GFR-binding peptide
  MOD_RES (1), (34), (35): Xaa is C or S
  MOD_RES (12), (13), (14), (15), (16): Xaa is A or G
  MOD_RES (17), (18), (19), (20): Xaa is A or G or is absent

SEQ ID NO: 76535 - protein, 35 aa, Artificial Sequence; identical to SEQ ID NO: 2424
  GFR-binding peptide
  MOD_RES (2), (35): Xaa is C or S
  MOD_RES (13), (14), (15), (16), (17): Xaa is A or G
  MOD_RES (18), (19), (20), (21): Xaa is A or G or is absent

SEQ ID NO: 76536 - protein, 33 aa, Artificial Sequence; identical to SEQ ID NO: 4354
  GFR-binding peptide
  MOD_RES (1), (1): Xaa is C or S

SEQ ID NO: 76537 - protein, 35 aa, Artificial Sequence; identical to SEQ ID NO: 2426
  GFR-binding peptide
  MOD_RES (2), (2): Xaa is C or S
  MOD_RES (14), (15), (16), (17), (18): Xaa is A or G
  MOD_RES (19), (20), (21), (22): Xaa is A or G or is absent

SEQ ID NO: 76538 - protein, 33 aa, Artificial Sequence; identical to SEQ ID NO: 61832
  GFR-binding peptide
  MOD_RES (12), (13), (14), (15), (16): Xaa is A or G
  MOD_RES (17), (18), (19), (20): Xaa is A or G or is absent

SEQ ID NO: 76539 - protein, 37 aa, Artificial Sequence; identical to SEQ ID NO: 4357
  GFR-binding peptide
  MOD_RES (2), (4): Xaa is C or S
  MOD_RES (16), (17), (18), (19), (20): Xaa is A or G
  MOD_RES (21), (22), (23), (24): Xaa is A or G or is absent

SEQ ID NO: 76540 - protein, 38 aa, Artificial Sequence; identical to SEQ ID NO: 56288
  GFR-binding peptide
  MOD_RES (2), (34), (35): Xaa is C or S

SEQ ID NO: 76541 - protein, 39 aa, Artificial Sequence
  GFR-binding peptide
  MOD_RES (2), (34), (35): Xaa is C or S
GXRDVVMGQYNKLIIQQKDNLYLMSIASMKTPTXXPGAS

SEQ ID NO: 76542 - protein, 36 aa, Artificial Sequence; identical to SEQ ID NO: 4358
  GFR-binding peptide
  MOD_RES (2), (36): Xaa is C or S
  MOD_RES (14), (15), (16), (17), (18): Xaa is A or G
  MOD_RES (19), (20), (21), (22): Xaa is A or G or is absent

SEQ ID NO: 76543 - protein, 42 aa, Artificial Sequence; identical to SEQ ID NO: 4359
  GFR-binding peptide
  MOD_RES (2), (4), (38), (39): Xaa is C or S
  MOD_RES (16), (17), (18), (19), (20): Xaa is A or G
  MOD_RES (21), (22), (23), (24): Xaa is A or G or is absent

SEQ ID NO: 76544 - protein, 42 aa, Artificial Sequence; identical to SEQ ID NO: 4360
  GFR-binding peptide
  MOD_RES (2), (36), (37): Xaa is C or S
  MOD_RES (14), (15), (16), (17), (18): Xaa is A or G
  MOD_RES (19), (20), (21), (22): Xaa is A or G or is absent

SEQ ID NO: 76545 - protein, 36 aa, Artificial Sequence; identical to SEQ ID NO: 56293
  GFR-binding peptide
  MOD_RES (31), (32): Xaa is C or S

SEQ ID NO: 76546 - protein, 36 aa, Artificial Sequence; identical to SEQ ID NO: 25421
  GFR-binding peptide
  MOD_RES (2), (34), (35): Xaa is C or S

SEQ ID NO: 76547 - protein, 41 aa, Artificial Sequence; identical to SEQ ID NO: 56295
  GFR-binding peptide
  MOD_RES (1), (3), (36), (37): Xaa is C or S
  MOD_RES (14), (15), (16), (17), (18): Xaa is A or G
  MOD_RES (19), (20), (21), (22): Xaa is A or G or is absent

SEQ ID NO: 76548 - protein, 33 aa, Artificial Sequence; identical to SEQ ID NO: 23412
  GFR-binding peptide
  MOD_RES (31), (32): Xaa is C or S

SEQ ID NO: 76549 - protein, 38 aa, Artificial Sequence; identical to SEQ ID NO: 25425
  GFR-binding peptide
  MOD_RES (1), (3), (35), (36): Xaa is C or S

SEQ ID NO: 76550 - protein, 40 aa, Artificial Sequence; identical to SEQ ID NO: 58347
  GFR-binding peptide
  MOD_RES (2), (34), (35): Xaa is C or S

SEQ ID NO: 76551 - protein, 39 aa, Artificial Sequence; identical to SEQ ID NO: 4365
  GFR-binding peptide
  MOD_RES (1), (35), (36): Xaa is C or S
  MOD_RES (13), (14), (15), (16), (17): Xaa is A or G
  MOD_RES (18), (19), (20), (21): Xaa is A or G or is absent

SEQ ID NO: 76552 - protein, 43 aa, Artificial Sequence
  GFR-binding peptide
  MOD_RES (1), (3), (37), (38): Xaa is C or S
  MOD_RES (15), (16), (17), (18), (19): Xaa is A or G
  MOD_RES (20), (21), (22), (23): Xaa is A or G or is absent
XGXSRVVMNQYNKLXXXXXXXXXLYLVSIASLKTPAXXPKPVH

SEQ ID NO: 76553 - protein, 34 aa, Artificial Sequence; identical to SEQ ID NO: 2438
  GFR-binding peptide
  MOD_RES (1), (3), (34): Xaa is C or S

SEQ ID NO: 76554 - protein, 33 aa, Artificial Sequence; identical to SEQ ID NO: 2439
  GFR-binding peptide
  MOD_RES (31), (32): Xaa is C or S

SEQ ID NO: 76555 - protein, 39 aa, Artificial Sequence; identical to SEQ ID NO: 4368
  GFR-binding peptide
  MOD_RES (2), (35), (36): Xaa is C or S

SEQ ID NO: 76556 - protein, 42 aa, Artificial Sequence; identical to SEQ ID NO: 25430
  GFR-binding peptide
  MOD_RES (2), (4), (36), (37): Xaa is C or S

SEQ ID NO: 76557 - protein, 38 aa, Artificial Sequence; identical to SEQ ID NO: 9939
  GFR-binding peptide
  MOD_RES (33), (34): Xaa is C or S
  MOD_RES (11), (12), (13), (14), (15): Xaa is A or G
  MOD_RES (16), (17), (18), (19): Xaa is A or G or is absent

SEQ ID NO: 76558 - protein, 40 aa, Artificial Sequence; identical to SEQ ID NO: 11794
  GFR-binding peptide
  MOD_RES (2), (4), (38), (39): Xaa is C or S
  MOD_RES (16), (17), (18), (19), (20): Xaa is A or G
  MOD_RES (21), (22), (23), (24): Xaa is A or G or is absent

SEQ ID NO: 76559 - protein, 32 aa, Artificial Sequence
  GFR-binding peptide
  MOD_RES (11), (12), (13), (14), (15): Xaa is A or G
  MOD_RES (16), (17), (18), (19): Xaa is A or G or is absent
DVVMGQYNKLXXXXXXXXXLYLMSIASMKTPT

SEQ ID NO: 76560 - protein, 36 aa, Artificial Sequence; identical to SEQ ID NO: 63590
  GFR-binding peptide
  MOD_RES (1), (3): Xaa is C or S
  MOD_RES (15), (16), (17), (18), (19): Xaa is A or G
  MOD_RES (20), (21), (22), (23): Xaa is A or G or is absent

SEQ ID NO: 76561 - protein, 39 aa, Artificial Sequence; identical to SEQ ID NO: 4370
  GFR-binding peptide
  MOD_RES (2), (36): Xaa is C or S
  MOD_RES (14), (15), (16), (17), (18): Xaa is A or G
  MOD_RES (19), (20), (21), (22): Xaa is A or G or is absent

SEQ ID NO: 76562 - protein, 39 aa, Artificial Sequence; identical to SEQ ID NO: 4371
  GFR-binding peptide
  MOD_RES (34), (35): Xaa is C or S
  MOD_RES (12), (13), (14), (15), (16): Xaa is A or G
  MOD_RES (17), (18), (19), (20): Xaa is A or G or is absent

SEQ ID NO: 76563 - protein, 35 aa, Artificial Sequence; identical to SEQ ID NO: 11800
  GFR-binding peptide
  MOD_RES (2), (4): Xaa is C or S

SEQ ID NO: 76564 - protein, 35 aa, Artificial Sequence; identical to SEQ ID NO: 4372
  GFR-binding peptide
  MOD_RES (35), (35): Xaa is C or S
  MOD_RES (13), (14), (15), (16), (17): Xaa is A or G
  MOD_RES (18), (19), (20), (21): Xaa is A or G or is absent

SEQ ID NO: 76565 - protein, 36 aa, Artificial Sequence; identical to SEQ ID NO: 4373
  GFR-binding peptide
  MOD_RES (2), (34): Xaa is C or S

SEQ ID NO: 76566 - protein, 39 aa, Artificial Sequence; identical to SEQ ID NO: 4375
  GFR-binding peptide
  MOD_RES (1), (33), (34): Xaa is C or S

SEQ ID NO: 76567 - protein, 31 aa, Artificial Sequence; identical to SEQ ID NO: 2448
  GFR-binding peptide
  MOD_RES (31), (31): Xaa is C or S

SEQ ID NO: 76568 - protein, 34 aa, Artificial Sequence; identical to SEQ ID NO: 9950
  GFR-binding peptide
  MOD_RES (32), (33): Xaa is C or S

SEQ ID NO: 76569 - protein, 34 aa, Artificial Sequence
  GFR-binding peptide
  MOD_RES (1), (33), (34): Xaa is C or S
XSEVTMNQYNKLVVNKNEDLYLISIASMKEPVXX

SEQ ID NO: 76570 - protein, 40 aa, Artificial Sequence; identical to SEQ ID NO: 4376
  GFR-binding peptide
  MOD_RES (2), (34), (35): Xaa is C or S

SEQ ID NO: 76571 - protein, 38 aa, Artificial Sequence; identical to SEQ ID NO: 11805
  GFR-binding peptide
  MOD_RES (34), (35): Xaa is C or S
  MOD_RES (12), (13), (14), (15), (16): Xaa is A or G
  MOD_RES (17), (18), (19), (20): Xaa is A or G or is absent

SEQ ID NO: 76572 - protein, 35 aa, Artificial Sequence; identical to SEQ ID NO: 4381
  GFR-binding peptide
  MOD_RES (1), (3): Xaa is C or S
  MOD_RES (14), (15), (16), (17), (18): Xaa is A or G
  MOD_RES (19), (20), (21), (22): Xaa is A or G or is absent

SEQ ID NO: 76573 - protein, 44 aa, Artificial Sequence; identical to SEQ ID NO: 56331
  GFR-binding peptide
  MOD_RES (2), (4), (38), (39): Xaa is C or S
  MOD_RES (16), (17), (18), (19), (20): Xaa is A or G
  MOD_RES (21), (22), (23), (24): Xaa is A or G or is absent

SEQ ID NO: 76574 - protein, 40 aa, Artificial Sequence
  GFR-binding peptide
  MOD_RES (2), (34), (35): Xaa is C or S
GXRDVVMGQYNKLIIQQKDNLYLMSIASMKTPTXXPGASG

SEQ ID NO: 76575 - protein, 41 aa, Artificial Sequence
  GFR-binding peptide
  MOD_RES (2), (4), (38), (39): Xaa is C or S
  MOD_RES (16), (17), (18), (19), (20): Xaa is A or G
  MOD_RES (21), (22), (23), (24): Xaa is A or G or is absent
RXGXESVAMGQYNKLXXXXXXXXXLYLISIASLKTPVXXAK

SEQ ID NO: 76576 - protein, 40 aa, Artificial Sequence; identical to SEQ ID NO: 4384
  GFR-binding peptide
  MOD_RES (2), (4), (38), (39): Xaa is C or S
  MOD_RES (16), (17), (18), (19), (20): Xaa is A or G
  MOD_RES (21), (22), (23), (24): Xaa is A or G or is absent

SEQ ID NO: 76577 - protein, 35 aa, Artificial Sequence
  GFR-binding peptide
  MOD_RES (1), (3), (35): Xaa is C or S
XAXSEVTMNQYNKLVVNKNEDLYLISIASMKEPVX

SEQ ID NO: 76578 - protein, 38 aa, Artificial Sequence; identical to SEQ ID NO: 2453
  GFR-binding peptide
  MOD_RES (33), (34): Xaa is C or S
  MOD_RES (11), (12), (13), (14), (15): Xaa is A or G
  MOD_RES (16), (17), (18), (19): Xaa is A or G or is absent

SEQ ID NO: 76579 - protein, 40 aa, Artificial Sequence
  GFR-binding peptide
  MOD_RES (34), (35): Xaa is C or S
  MOD_RES (12), (13), (14), (15), (16): Xaa is A or G
  MOD_RES (17), (18), (19), (20): Xaa is A or G or is absent
SRVVMNQYNKLXXXXXXXXXLYLVSIASLKTPAXXPKPVH

SEQ ID NO: 76580 - protein, 38 aa, Artificial Sequence; identical to SEQ ID NO: 60099
  GFR-binding peptide
  MOD_RES (1), (33), (34): Xaa is C or S

SEQ ID NO: 76581 - protein, 40 aa, Artificial Sequence; identical to SEQ ID NO: 2454
  GFR-binding peptide
  MOD_RES (2), (4), (36), (37): Xaa is C or S

SEQ ID NO: 76582 - protein, 34 aa, Artificial Sequence
  GFR-binding peptide
  MOD_RES (32), (33): Xaa is C or S
ESVAMGQYNKLYTVVGKDLYLISIASLKTPVXXA

SEQ ID NO: 76583 - protein, 30 aa, Artificial Sequence; identical to SEQ ID NO: 25446
  GFR-binding peptide

SEQ ID NO: 76584 - protein, 36 aa, Artificial Sequence; identical to SEQ ID NO: 4386
  GFR-binding peptide
  MOD_RES (2), (4): Xaa is C or S
  MOD_RES (15), (16), (17), (18), (19): Xaa is A or G
  MOD_RES (20), (21), (22), (23): Xaa is A or G or is absent

SEQ ID NO: 76585 - protein, 42 aa, Artificial Sequence; identical to SEQ ID NO: 4387
  GFR-binding peptide
  MOD_RES (2), (4), (38): Xaa is C or S
  MOD_RES (16), (17), (18), (19), (20): Xaa is A or G
  MOD_RES (21), (22), (23), (24): Xaa is A or G or is absent

SEQ ID NO: 76586 - protein, 32 aa, Artificial Sequence; identical to SEQ ID NO: 2456
  GFR-binding peptide
  MOD_RES (31), (32): Xaa is C or S

SEQ ID NO: 76587 - protein, 42 aa, Artificial Sequence; identical to SEQ ID NO: 4388
  GFR-binding peptide
  MOD_RES (2), (4), (38), (39): Xaa is C or S
  MOD_RES (16), (17), (18), (19), (20): Xaa is A or G
  MOD_RES (21), (22), (23), (24): Xaa is A or G or is absent

SEQ ID NO: 76588 - protein, 33 aa, Artificial Sequence; identical to SEQ ID NO: 4389
  GFR-binding peptide
  MOD_RES (32), (33): Xaa is C or S

SEQ ID NO: 76589 - protein, 36 aa, Artificial Sequence; identical to SEQ ID NO: 11819
  GFR-binding peptide
  MOD_RES (34), (35): Xaa is C or S
  MOD_RES (12), (13), (14), (15), (16): Xaa is A or G
  MOD_RES (17), (18), (19), (20): Xaa is A or G or is absent

SEQ ID NO: 76590 - protein, 33 aa, Artificial Sequence; identical to SEQ ID NO: 2458
  GFR-binding peptide
  MOD_RES (33), (33): Xaa is C or S
  MOD_RES (11), (12), (13), (14), (15): Xaa is A or G
  MOD_RES (16), (17), (18), (19): Xaa is A or G or is absent

SEQ ID NO: 76591 - protein, 33 aa, Artificial Sequence; identical to SEQ ID NO: 4390
  GFR-binding peptide
  MOD_RES (1), (3): Xaa is C or S

SEQ ID NO: 76592 - protein, 41 aa, Artificial Sequence; identical to SEQ ID NO: 23439
  GFR-binding peptide
  MOD_RES (1), (3), (37), (38): Xaa is C or S
  MOD_RES (15), (16), (17), (18), (19): Xaa is A or G
  MOD_RES (20), (21), (22), (23): Xaa is A or G or is absent

SEQ ID NO: 76593 - protein, 37 aa, Artificial Sequence; identical to SEQ ID NO: 11821
  GFR-binding peptide
  MOD_RES (33), (34): Xaa is C or S
  MOD_RES (11), (12), (13), (14), (15): Xaa is A or G
  MOD_RES (16), (17), (18), (19): Xaa is A or G or is absent

SEQ ID NO: 76594 - protein, 38 aa, Artificial Sequence; identical to SEQ ID NO: 2462
  GFR-binding peptide
  MOD_RES (1), (32), (33): Xaa is C or S

SEQ ID NO: 76595 - protein, 38 aa, Artificial Sequence; identical to SEQ ID NO: 4394
  GFR-binding peptide
  MOD_RES (33), (34): Xaa is C or S
  MOD_RES (11), (12), (13), (14), (15): Xaa is A or G
  MOD_RES (16), (17), (18), (19): Xaa is A or G or is absent

SEQ ID NO: 76596 - protein, 43 aa, Artificial Sequence; identical to SEQ ID NO: 61867
  GFR-binding peptide
  MOD_RES (1), (3), (37), (38): Xaa is C or S
  MOD_RES (15), (16), (17), (18), (19): Xaa is A or G
  MOD_RES (20), (21), (22), (23): Xaa is A or G or is absent

SEQ ID NO: 76597 - protein, 39 aa, Artificial Sequence; identical to SEQ ID NO: 4397
  GFR-binding peptide
  MOD_RES (33), (34): Xaa is C or S
  MOD_RES (11), (12), (13), (14), (15): Xaa is A or G
  MOD_RES (16), (17), (18), (19): Xaa is A or G or is absent

SEQ ID NO: 76598 - protein, 33 aa, Artificial Sequence; identical to SEQ ID NO: 2464
  GFR-binding peptide
  MOD_RES (33), (33): Xaa is C or S
  MOD_RES (11), (12), (13), (14), (15): Xaa is A or G
  MOD_RES (16), (17), (18), (19): Xaa is A or G or is absent

SEQ ID NO: 76599 - protein, 42 aa, Artificial Sequence; identical to SEQ ID NO: 23444
  GFR-binding peptide
  MOD_RES (1), (3), (37), (38): Xaa is C or S
  MOD_RES (15), (16), (17), (18), (19): Xaa is A or G
  MOD_RES (20), (21), (22), (23): Xaa is A or G or is absent

SEQ ID NO: 76600 - protein, 37 aa, Artificial Sequence; identical to SEQ ID NO: 23446
  GFR-binding peptide
  MOD_RES (1), (3), (37): Xaa is C or S
  MOD_RES (15), (16), (17), (18), (19): Xaa is A or G
  MOD_RES (20), (21), (22), (23): Xaa is A or G or is absent

SEQ ID NO: 76601 - protein, 35 aa, Artificial Sequence; identical to SEQ ID NO: 2465
  GFR-binding peptide
  MOD_RES (35), (35): Xaa is C or S
  MOD_RES (13), (14), (15), (16), (17): Xaa is A or G
  MOD_RES (18), (19), (20), (21): Xaa is A or G or is absent

SEQ ID NO: 76602 - protein, 34 aa, Artificial Sequence; identical to SEQ ID NO: 4402
  GFR-binding peptide
  MOD_RES (1), (3): Xaa is C or S

SEQ ID NO: 76603 - protein, 32 aa, Artificial Sequence; identical to SEQ ID NO: 2466
  GFR-binding peptide
  MOD_RES (1), (32): Xaa is C or S

SEQ ID NO: 76604 - protein, 40 aa, Artificial Sequence; identical to SEQ ID NO: 23447
  GFR-binding peptide
  MOD_RES (1), (3), (37), (38): Xaa is C or S
  MOD_RES (15), (16), (17), (18), (19): Xaa is A or G
  MOD_RES (20), (21), (22), (23): Xaa is A or G or is absent

SEQ ID NO: 76605 - protein, 40 aa, Artificial Sequence
  GFR-binding peptide
  MOD_RES (2), (4), (38), (39): Xaa is C or S
  MOD_RES (16), (17), (18), (19), (20): Xaa is A or G
  MOD_RES (21), (22), (23), (24): Xaa is A or G or is absent
SXGXRDVVMGQYNKLXXXXXXXXXLYLMSIASMKTPTXXP

SEQ ID NO: 76606 - protein, 32 aa, Artificial Sequence; identical to SEQ ID NO: 2470
  GFR-binding peptide
  MOD_RES (11), (12), (13), (14), (15): Xaa is A or G
  MOD_RES (16), (17), (18), (19): Xaa is A or G or is absent

SEQ ID NO: 76607 - protein, 35 aa, Artificial Sequence; identical to SEQ ID NO: 2471
  GFR-binding peptide
  MOD_RES (34), (35): Xaa is C or S
  MOD_RES (12), (13), (14), (15), (16): Xaa is A or G
  MOD_RES (17), (18), (19), (20): Xaa is A or G or is absent

SEQ ID NO: 76608 - protein, 43 aa, Artificial Sequence; identical to SEQ ID NO: 2473
  GFR-binding peptide
  MOD_RES (2), (4), (39), (40): Xaa is C or S
  MOD_RES (17), (18), (19), (20), (21): Xaa is A or G
  MOD_RES (22), (23), (24), (25): Xaa is A or G or is absent

SEQ ID NO: 76609 - protein, 31 aa, Artificial Sequence; identical to SEQ ID NO: 2474
  GFR-binding peptide
  MOD_RES (1), (1): Xaa is C or S

SEQ ID NO: 76610 - protein, 39 aa, Artificial Sequence; identical to SEQ ID NO: 2476
  GFR-binding peptide
  MOD_RES (2), (36), (37): Xaa is C or S
  MOD_RES (14), (15), (16), (17), (18): Xaa is A or G
  MOD_RES (19), (20), (21), (22): Xaa is A or G or is absent

SEQ ID NO: 76611 - protein, 38 aa, Artificial Sequence; identical to SEQ ID NO: 2477
  GFR-binding peptide
  MOD_RES (2), (4): Xaa is C or S
  MOD_RES (17), (18), (19), (20), (21): Xaa is A or G
  MOD_RES (22), (23), (24), (25): Xaa is A or G or is absent

SEQ ID NO: 76612 - protein, 40 aa, Artificial Sequence; identical to SEQ ID NO: 4406
  GFR-binding peptide
  MOD_RES (2), (4), (36), (37): Xaa is C or S

SEQ ID NO: 76613 - protein, 40 aa, Artificial Sequence; identical to SEQ ID NO: 2479
  GFR-binding peptide
  MOD_RES (2), (34), (35): Xaa is C or S

SEQ ID NO: 76614 - protein, 43 aa, Artificial Sequence; identical to SEQ ID NO: 4407
  GFR-binding peptide
  MOD_RES (2), (37), (38): Xaa is C or S
  MOD_RES (15), (16), (17), (18), (19): Xaa is A or G
  MOD_RES (20), (21), (22), (23): Xaa is A or G or is absent

SEQ ID NO: 76615 - protein, 34 aa, Artificial Sequence; identical to SEQ ID NO: 4409
  GFR-binding peptide
  MOD_RES (2), (34): Xaa is C or S

SEQ ID NO: 76616 - protein, 38 aa, Artificial Sequence; identical to SEQ ID NO: 4410
  GFR-binding peptide
  MOD_RES (33), (34): Xaa is C or S
  MOD_RES (11), (12), (13), (14), (15): Xaa is A or G
  MOD_RES (16), (17), (18), (19): Xaa is A or G or is absent

SEQ ID NO: 76617 - protein, 35 aa, Artificial Sequence; identical to SEQ ID NO: 2482
  GFR-binding peptide
  MOD_RES (1), (1): Xaa is C or S
  MOD_RES (14), (15), (16), (17), (18): Xaa is A or G
  MOD_RES (19), (20), (21), (22): Xaa is A or G or is absent

SEQ ID NO: 76618 - protein, 36 aa, Artificial Sequence
  GFR-binding peptide
  MOD_RES (32), (33): Xaa is C or S
AEVVMDQYNKLVVNNAADLYLISIASLRAPVXXSAP

SEQ ID NO: 76619 - protein, 35 aa, Artificial Sequence; identical to SEQ ID NO: 4412
  GFR-binding peptide
  MOD_RES (2), (33), (34): Xaa is C or S

SEQ ID NO: 76620 - protein, 41 aa, Artificial Sequence; identical to SEQ ID NO: 25475
  GFR-binding peptide
  MOD_RES (2), (4), (36), (37): Xaa is C or S

SEQ ID NO: 76621 - protein, 35 aa, Artificial Sequence; identical to SEQ ID NO: 4414
  GFR-binding peptide
  MOD_RES (1), (3), (34), (35): Xaa is C or S

SEQ ID NO: 76622 - protein, 40 aa, Artificial Sequence; identical to SEQ ID NO: 2484
  GFR-binding peptide
  MOD_RES (2), (4), (37), (38): Xaa is C or S
  MOD_RES (15), (16), (17), (18), (19): Xaa is A or G
  MOD_RES (20), (21), (22), (23): Xaa is A or G or is absent

SEQ ID NO: 76623 - protein, 38 aa, Artificial Sequence; identical to SEQ ID NO: 2485
  GFR-binding peptide
  MOD_RES (32), (33): Xaa is C or S

SEQ ID NO: 76624 - protein, 35 aa, Artificial Sequence; identical to SEQ ID NO: 4415
  GFR-binding peptide
  MOD_RES (31), (32): Xaa is C or S

SEQ ID NO: 76625 - protein, 39 aa, Artificial Sequence; identical to SEQ ID NO: 2487
  GFR-binding peptide
  MOD_RES (2), (4), (35), (36): Xaa is C or S

SEQ ID NO: 76626 - protein, 34 aa, Artificial Sequence; identical to SEQ ID NO: 56377
  GFR-binding peptide
  MOD_RES (31), (32): Xaa is C or S

SEQ ID NO: 76627 - protein, 39 aa, Artificial Sequence; identical to SEQ ID NO: 2489
  GFR-binding peptide
  MOD_RES (34), (35): Xaa is C or S
  MOD_RES (12), (13), (14), (15), (16): Xaa is A or G
  MOD_RES (17), (18), (19), (20): Xaa is A or G or is absent

SEQ ID NO: 76628 - protein, 35 aa, Artificial Sequence; identical to SEQ ID NO: 2490
  GFR-binding peptide
  MOD_RES (1), (3): Xaa is C or S
  MOD_RES (14), (15), (16), (17), (18): Xaa is A or G
  MOD_RES (19), (20), (21), (22): Xaa is A or G or is absent

SEQ ID NO: 76629 - protein, 35 aa, Artificial Sequence; identical to SEQ ID NO: 56379
  GFR-binding peptide
  MOD_RES (2), (35): Xaa is C or S
  MOD_RES (13), (14), (15), (16), (17): Xaa is A or G
  MOD_RES (18), (19), (20), (21): Xaa is A or G or is absent

SEQ ID NO: 76630 - protein, 33 aa, Artificial Sequence; identical to SEQ ID NO: 4417
  GFR-binding peptide
  MOD_RES (31), (32): Xaa is C or S

SEQ ID NO: 76631 - protein, 36 aa, Artificial Sequence; identical to SEQ ID NO: 4418
  GFR-binding peptide
  MOD_RES (2), (35), (36): Xaa is C or S
  MOD_RES (13), (14), (15), (16), (17): Xaa is A or G
  MOD_RES (18), (19), (20), (21): Xaa is A or G or is absent

SEQ ID NO: 76632 - protein, 33 aa, Artificial Sequence; identical to SEQ ID NO: 4419
  GFR-binding peptide
  MOD_RES (31), (32): Xaa is C or S

SEQ ID NO: 76633 - protein, 40 aa, Artificial Sequence; identical to SEQ ID NO: 4420
  GFR-binding peptide
  MOD_RES (35), (36): Xaa is C or S
  MOD_RES (13), (14), (15), (16), (17): Xaa is A or G
  MOD_RES (18), (19), (20), (21): Xaa is A or G or is absent

SEQ ID NO: 76634 - protein, 32 aa, Artificial Sequence
  GFR-binding peptide
  MOD_RES (11), (12), (13), (14), (15): Xaa is A or G
  MOD_RES (16), (17), (18), (19): Xaa is A or G or is absent
SVAMGQYNKLXXXXXXXXXLYLISIASLKTPV

SEQ ID NO: 76635 - protein, 40 aa, Artificial Sequence; identical to SEQ ID NO: 4422
  GFR-binding peptide
  MOD_RES (2), (36): Xaa is C or S
  MOD_RES (14), (15), (16), (17), (18): Xaa is A or G
  MOD_RES (19), (20), (21), (22): Xaa is A or G or is absent

SEQ ID NO: 76636 - protein, 40 aa, Artificial Sequence; identical to SEQ ID NO: 11845
  GFR-binding peptide
  MOD_RES (2), (4), (36), (37): Xaa is C or S

SEQ ID NO: 76637 - protein, 40 aa, Artificial Sequence; identical to SEQ ID NO: 2493
  GFR-binding peptide
  MOD_RES (2), (34): Xaa is C or S

SEQ ID NO: 76638 - protein, 36 aa, Artificial Sequence; identical to SEQ ID NO: 4425
  GFR-binding peptide
  MOD_RES (2), (4): Xaa is C or S

SEQ ID NO: 76639 - protein, 33 aa, Artificial Sequence; identical to SEQ ID NO: 4426
  GFR-binding peptide
  MOD_RES (31), (32): Xaa is C or S

SEQ ID NO: 76640 - protein, 39 aa, Artificial Sequence; identical to SEQ ID NO: 9998
  GFR-binding peptide
  MOD_RES (33), (34): Xaa is C or S
  MOD_RES (11), (12), (13), (14), (15): Xaa is A or G
  MOD_RES (16), (17), (18), (19): Xaa is A or G or is absent

SEQ ID NO: 76641 - protein, 41 aa, Artificial Sequence; identical to SEQ ID NO: 4427
  GFR-binding peptide
  MOD_RES (2), (36), (37): Xaa is C or S
  MOD_RES (14), (15), (16), (17), (18): Xaa is A or G
  MOD_RES (19), (20), (21), (22): Xaa is A or G or is absent

SEQ ID NO: 76642 - protein, 38 aa, Artificial Sequence; identical to SEQ ID NO: 4428
  GFR-binding peptide
  MOD_RES (2), (33), (34): Xaa is C or S

SEQ ID NO: 76643 - protein, 39 aa, Artificial Sequence
  GFR-binding peptide
  MOD_RES (2), (36), (37): Xaa is C or S
  MOD_RES (14), (15), (16), (17), (18): Xaa is A or G
  MOD_RES (19), (20), (21), (22): Xaa is A or G or is absent
GXESVAMGQYNKLXXXXXXXXXLYLISIASLKTPVXXAK

SEQ ID NO: 76644 - protein, 36 aa, Artificial Sequence; identical to SEQ ID NO: 4429
  GFR-binding peptide
  MOD_RES (1), (34), (35): Xaa is C or S
  MOD_RES (12), (13), (14), (15), (16): Xaa is A or G
  MOD_RES (17), (18), (19), (20): Xaa is A or G or is absent

SEQ ID NO: 76645 - protein, 34 aa, Artificial Sequence; identical to SEQ ID NO: 2498
  GFR-binding peptide
  MOD_RES (1), (3): Xaa is C or S

SEQ ID NO: 76646 - protein, 41 aa, Artificial Sequence; identical to SEQ ID NO: 10000
  GFR-binding peptide
  MOD_RES (2), (4), (36), (37): Xaa is C or S

SEQ ID NO: 76647 - protein, 38 aa, Artificial Sequence; identical to SEQ ID NO: 2500
  GFR-binding peptide
  MOD_RES (2), (4), (35), (36): Xaa is C or S

SEQ ID NO: 76648 - protein, 38 aa, Artificial Sequence
  GFR-binding peptide
  MOD_RES (1), (32), (33): Xaa is C or S
XEEVIMQYNKLLLVRGNDLYLMSIASTKVPAXXTSPVR

SEQ ID NO: 76649 - protein, 36 aa, Artificial Sequence
  GFR-binding peptide
  MOD_RES (1), (3), (35), (36): Xaa is C or S
XGXAEVVMDQYNKLVVNNAADLYLISIASLRAPVXX

SEQ ID NO: 76650 - protein, 36 aa, Artificial Sequence; identical to SEQ ID NO: 4430
  GFR-binding peptide
  MOD_RES (33), (34): Xaa is C or S
  MOD_RES (11), (12), (13), (14), (15): Xaa is A or G
  MOD_RES (16), (17), (18), (19): Xaa is A or G or is absent

SEQ ID NO: 76651 - protein, 37 aa, Artificial Sequence; identical to SEQ ID NO: 23481
  GFR-binding peptide
  MOD_RES (2), (36), (37): Xaa is C or S
  MOD_RES (14), (15), (16), (17), (18): Xaa is A or G
  MOD_RES (19), (20), (21), (22): Xaa is A or G or is absent

SEQ ID NO: 76652 - protein, 39 aa, Artificial Sequence; identical to SEQ ID NO: 56393
  GFR-binding peptide
  MOD_RES (1), (35), (36): Xaa is C or S
  MOD_RES (13), (14), (15), (16), (17): Xaa is A or G
  MOD_RES (18), (19), (20), (21): Xaa is A or G or is absent

SEQ ID NO: 76653 - protein, 34 aa, Artificial Sequence; identical to SEQ ID NO: 4432
  GFR-binding peptide
  MOD_RES (2), (2): Xaa is C or S
  MOD_RES (13), (14), (15), (16), (17): Xaa is A or G
  MOD_RES (18), (19), (20), (21): Xaa is A or G or is absent

SEQ ID NO: 76654 - protein, 33 aa, Artificial Sequence; identical to SEQ ID NO: 10006
  GFR-binding peptide
  MOD_RES (31), (32): Xaa is C or S

SEQ ID NO: 76655 - protein, 33 aa, Artificial Sequence; identical to SEQ ID NO: 4435
  GFR-binding peptide
  MOD_RES (1), (32), (33): Xaa is C or S

SEQ ID NO: 76656 - protein, 36 aa, Artificial Sequence; identical to SEQ ID NO: 2510
  GFR-binding peptide
  MOD_RES (2), (36): Xaa is C or S
  MOD_RES (14), (15), (16), (17), (18): Xaa is A or G
  MOD_RES (19), (20), (21), (22): Xaa is A or G or is absent

SEQ ID NO: 76657 - protein, 41 aa, Artificial Sequence
  GFR-binding peptide
  MOD_RES (1), (3), (35), (36): Xaa is C or S
XGXAEVVMDQYNKLVVNNAADLYLISIASLRAPVXXSAPAA

SEQ ID NO: 76658 - protein, 38 aa, Artificial Sequence; identical to SEQ ID NO: 4437
  GFR-binding peptide
  MOD_RES (1), (3), (36), (37): Xaa is C or S

SEQ ID NO: 76659 - protein, 41 aa, Artificial Sequence; identical to SEQ ID NO: 4438
  GFR-binding peptide
  MOD_RES (2), (36), (37): Xaa is C or S
  MOD_RES (14), (15), (16), (17), (18): Xaa is A or G
  MOD_RES (19), (20), (21), (22): Xaa is A or G or is absent

SEQ ID NO: 76660 - protein, 38 aa, Artificial Sequence; identical to SEQ ID NO: 2511
  GFR-binding peptide
  MOD_RES (2), (35), (36): Xaa is C or S

SEQ ID NO: 76661 - protein, 34 aa, Artificial Sequence; identical to SEQ ID NO: 56399
  GFR-binding peptide
  MOD_RES (32), (33): Xaa is C or S

SEQ ID NO: 76662 - protein, 42 aa, Artificial Sequence; identical to SEQ ID NO: 25516
  GFR-binding peptide
  MOD_RES (2), (36), (37): Xaa is C or S
  MOD_RES (14), (15), (16), (17), (18): Xaa is A or G
  MOD_RES (19), (20), (21), (22): Xaa is A or G or is absent

SEQ ID NO: 76663 - protein, 38 aa, Artificial Sequence
  GFR-binding peptide
  MOD_RES (2), (4), (37), (38): Xaa is C or S
  MOD_RES (15), (16), (17), (18), (19): Xaa is A or G
  MOD_RES (20), (21), (22), (23): Xaa is A or G or is absent
LXGXEEVIMQYNKLXXXXXXXXXLYLMSIASTKVPAXX

SEQ ID NO: 76664 - protein, 35 aa, Artificial Sequence
  GFR-binding peptide
  MOD_RES (1), (35): Xaa is C or S
  MOD_RES (13), (14), (15), (16), (17): Xaa is A or G
  MOD_RES (18), (19), (20), (21): Xaa is A or G or is absent
XSEVTMNQYNKLXXXXXXXXXLYLISIASMKEPVX

SEQ ID NO: 76665 - protein, 41 aa, Artificial Sequence; identical to SEQ ID NO: 25518
  GFR-binding peptide
  MOD_RES (2), (4), (38), (39): Xaa is C or S
  MOD_RES (16), (17), (18), (19), (20): Xaa is A or G
  MOD_RES (21), (22), (23), (24): Xaa is A or G or is absent

SEQ ID NO: 76666 - protein, 39 aa, Artificial Sequence; identical to SEQ ID NO: 2514
  GFR-binding peptide
  MOD_RES (35), (36): Xaa is C or S
  MOD_RES (13), (14), (15), (16), (17): Xaa is A or G
  MOD_RES (18), (19), (20), (21): Xaa is A or G or is absent

SEQ ID NO: 76667 - protein, 42 aa, Artificial Sequence; identical to SEQ ID NO: 10009
  GFR-binding peptide
  MOD_RES (1), (3), (37), (38): Xaa is C or S
  MOD_RES (15), (16), (17), (18), (19): Xaa is A or G
  MOD_RES (20), (21), (22), (23): Xaa is A or G or is absent

SEQ ID NO: 76668 - protein, 44 aa, Artificial Sequence; identical to SEQ ID NO: 25519
  GFR-binding peptide
  MOD_RES (2), (4), (38), (39): Xaa is C or S
  MOD_RES (16), (17), (18), (19), (20): Xaa is A or G
  MOD_RES (21), (22), (23), (24): Xaa is A or G or is absent

SEQ ID NO: 76669 - protein, 33 aa, Artificial Sequence; identical to SEQ ID NO: 2515
  GFR-binding peptide
  MOD_RES (32), (32): Xaa is C or S

SEQ ID NO: 76670 - protein, 32 aa, Artificial Sequence; identical to SEQ ID NO: 4443
  GFR-binding peptide
  MOD_RES (2), (2): Xaa is C or S

SEQ ID NO: 76671 - protein, 34 aa, Artificial Sequence; identical to SEQ ID NO: 4444
  GFR-binding peptide
  MOD_RES (33), (34): Xaa is C or S

SEQ ID NO: 76672 - protein, 34 aa, Artificial Sequence
  GFR-binding peptide
  MOD_RES (1), (3): Xaa is C or S
XGXRDVVMGQYNKLIIQQKDNLYLMSIASMKTPT

SEQ ID NO: 76673 - protein, 38 aa, Artificial Sequence; identical to SEQ ID NO: 56408
  GFR-binding peptide
  MOD_RES (34), (35): Xaa is C or S
  MOD_RES (12), (13), (14), (15), (16): Xaa is A or G
  MOD_RES (17), (18), (19), (20): Xaa is A or G or is absent

SEQ ID NO: 76674 - protein, 37 aa, Artificial Sequence; identical to SEQ ID NO: 2518
  GFR-binding peptide
  MOD_RES (33), (34): Xaa is C or S
  MOD_RES (11), (12), (13), (14), (15): Xaa is A or G
  MOD_RES (16), (17), (18), (19): Xaa is A or G or is absent

SEQ ID NO: 76675 - protein, 38 aa, Artificial Sequence; identical to SEQ ID NO: 4448
  GFR-binding peptide
  MOD_RES (2), (34), (35): Xaa is C or S

SEQ ID NO: 76676 - protein, 38 aa, Artificial Sequence; identical to SEQ ID NO: 56411
  GFR-binding peptide
  MOD_RES (1), (3), (35), (36): Xaa is C or S

SEQ ID NO: 76677 - protein, 39 aa, Artificial Sequence; identical to SEQ ID NO: 4450
  GFR-binding peptide
  MOD_RES (2), (4), (35), (36): Xaa is C or S

SEQ ID NO: 76678 - protein, 35 aa, Artificial Sequence; identical to SEQ ID NO: 4451
  GFR-binding peptide
  MOD_RES (33), (34): Xaa is C or S
  MOD_RES (11), (12), (13), (14), (15): Xaa is A or G
  MOD_RES (16), (17), (18), (19): Xaa is A or G or is absent

SEQ ID NO: 76679 - protein, 36 aa, Artificial Sequence; identical to SEQ ID NO: 60159
  GFR-binding peptide
  MOD_RES (1), (35), (36): Xaa is C or S
  MOD_RES (13), (14), (15), (16), (17): Xaa is A or G
  MOD_RES (18), (19), (20), (21): Xaa is A or G or is absent

SEQ ID NO: 76680 - protein, 34 aa, Artificial Sequence; identical to SEQ ID NO: 2522
  GFR-binding peptide
  MOD_RES (34), (34): Xaa is C or S
  MOD_RES (12), (13), (14), (15), (16): Xaa is A or G
  MOD_RES (17), (18), (19), (20): Xaa is A or G or is absent

SEQ ID NO: 76681 - protein, 38 aa, Artificial Sequence
  GFR-binding peptide
  MOD_RES (2), (34), (35): Xaa is C or S
AXSEVTMNQYNKLVVNKNEDLYLISIASMKEPVXXPEP

SEQ ID NO: 76682 - protein, 34 aa, Artificial Sequence; identical to SEQ ID NO: 10019
  GFR-binding peptide
  MOD_RES (1), (3): Xaa is C or S

SEQ ID NO: 76683 - protein, 34 aa, Artificial Sequence
  GFR-binding peptide
  MOD_RES (2), (34): Xaa is C or S
AXSEVTMNQYNKLVVNKNEDLYLISIASMKEPVX

SEQ ID NO: 76684 - protein, 39 aa, Artificial Sequence; identical to SEQ ID NO: 2525
  GFR-binding peptide
  MOD_RES (1), (3), (34), (35): Xaa is C or S

SEQ ID NO: 76685 - protein, 32 aa, Artificial Sequence; identical to SEQ ID NO: 4453
  GFR-binding peptide
  MOD_RES (11), (12), (13), (14), (15): Xaa is A or G
  MOD_RES (16), (17), (18), (19): Xaa is A or G or is absent

SEQ ID NO: 76686 - protein, 42 aa, Artificial Sequence
  GFR-binding peptide
  MOD_RES (1), (3), (37), (38): Xaa is C or S
  MOD_RES (15), (16), (17), (18), (19): Xaa is A or G
  MOD_RES (20), (21), (22), (23): Xaa is A or G or is absent
XAXSEVTMNQYNKLXXXXXXXXXLYLISIASMKEPVXXPEPI

SEQ ID NO: 76687 - protein, 37 aa, Artificial Sequence; identical to SEQ ID NO: 11880
  GFR-binding peptide
  MOD_RES (2), (4), (36), (37): Xaa is C or S

SEQ ID NO: 76688 - protein, 37 aa, Artificial Sequence; identical to SEQ ID NO: 2526
  GFR-binding peptide
  MOD_RES (2), (36): Xaa is C or S
  MOD_RES (14), (15), (16), (17), (18): Xaa is A or G
  MOD_RES (19), (20), (21), (22): Xaa is A or G or is absent

SEQ ID NO: 76689 - protein, 43 aa, Artificial Sequence; identical to SEQ ID NO: 4454
  GFR-binding peptide
  MOD_RES (2), (4), (37), (38): Xaa is C or S
  MOD_RES (15), (16), (17), (18), (19): Xaa is A or G
  MOD_RES (20), (21), (22), (23): Xaa is A or G or is absent

SEQ ID NO: 76690 - protein, 38 aa, Artificial Sequence; identical to SEQ ID NO: 4456
  GFR-binding peptide
  MOD_RES (1), (34), (35): Xaa is C or S

SEQ ID NO: 76691 - protein, 37 aa, Artificial Sequence
  GFR-binding peptide
  MOD_RES (2), (33), (34): Xaa is C or S
GXEEVIMQYNKLLLVRGNDLYLMSIASTKVPAXXTSP

SEQ ID NO: 76692 - protein, 39 aa, Artificial Sequence; identical to SEQ ID NO: 4457
  GFR-binding peptide
  MOD_RES (2), (34), (35): Xaa is C or S

SEQ ID NO: 76693 - protein, 41 aa, Artificial Sequence; identical to SEQ ID NO: 4458
  GFR-binding peptide
  MOD_RES (2), (36), (37): Xaa is C or S
  MOD_RES (14), (15), (16), (17), (18): Xaa is A or G
  MOD_RES (19), (20), (21), (22): Xaa is A or G or is absent

SEQ ID NO: 76694 - protein, 36 aa, Artificial Sequence; identical to SEQ ID NO: 4459
  GFR-binding peptide
  MOD_RES (2), (4): Xaa is C or S
  MOD_RES (15), (16), (17), (18), (19): Xaa is A or G
  MOD_RES (20), (21), (22), (23): Xaa is A or G or is absent

SEQ ID NO: 76695 - protein, 35 aa, Artificial Sequence; identical to SEQ ID NO: 10025
  GFR-binding peptide
  MOD_RES (1), (33), (34): Xaa is C or S

SEQ ID NO: 76696 - protein, 34 aa, Artificial Sequence
  GFR-binding peptide
  MOD_RES (1), (1): Xaa is C or S
  MOD_RES (13), (14), (15), (16), (17): Xaa is A or G
  MOD_RES (18), (19), (20), (21): Xaa is A or G or is absent
XRDVVMGQYNKLXXXXXXXXXLYLMSIASMKTPT

SEQ ID NO: 76697 - protein, 39 aa, Artificial Sequence; identical to SEQ ID NO: 2531
  GFR-binding peptide
  MOD_RES (2), (4), (38): Xaa is C or S
  MOD_RES (16), (17), (18), (19), (20): Xaa is A or G
  MOD_RES (21), (22), (23), (24): Xaa is A or G or is absent

SEQ ID NO: 76698 - protein, 34 aa, Artificial Sequence; identical to SEQ ID NO: 56431
  GFR-binding peptide
  MOD_RES (1), (33), (34): Xaa is C or S

SEQ ID NO: 76699 - protein, 30 aa, Artificial Sequence; identical to SEQ ID NO: 11889
  GFR-binding peptide

SEQ ID NO: 76700 - protein, 37 aa, Artificial Sequence
  GFR-binding peptide
  MOD_RES (1), (3), (37): Xaa is C or S
  MOD_RES (15), (16), (17), (18), (19): Xaa is A or G
  MOD_RES (20), (21), (22), (23): Xaa is A or G or is absent
XAXSEVTMNQYNKLXXXXXXXXXLYLISIASMKEPVX

SEQ ID NO: 76701 - protein, 34 aa, Artificial Sequence; identical to SEQ ID NO: 4461
  GFR-binding peptide
  MOD_RES (1), (3), (34): Xaa is C or S

SEQ ID NO: 76702 - protein, 38 aa, Artificial Sequence; identical to SEQ ID NO: 2535
  GFR-binding peptide
  MOD_RES (1), (34), (35): Xaa is C or S
  MOD_RES (12), (13), (14), (15), (16): Xaa is A or G
  MOD_RES (17), (18), (19), (20): Xaa is A or G or is absent

SEQ ID NO: 76703 - protein, 34 aa, Artificial Sequence; identical to SEQ ID NO: 4462
  GFR-binding peptide
  MOD_RES (13), (14), (15), (16), (17): Xaa is A or G
  MOD_RES (18), (19), (20), (21): Xaa is A or G or is absent

SEQ ID NO: 76704 - protein, 38 aa, Artificial Sequence; identical to SEQ ID NO: 25549
  GFR-binding peptide
  MOD_RES (32), (33): Xaa is C or S

SEQ ID NO: 76705 - protein, 40 aa, Artificial Sequence; identical to SEQ ID NO: 4463
  GFR-binding peptide
  MOD_RES (2), (4), (37), (38): Xaa is C or S
  MOD_RES (15), (16), (17), (18), (19): Xaa is A or G
  MOD_RES (20), (21), (22), (23): Xaa is A or G or is absent

SEQ ID NO: 76706 - protein, 33 aa, Artificial Sequence; identical to SEQ ID NO: 2537
  GFR-binding peptide
  MOD_RES (2), (2): Xaa is C or S

SEQ ID NO: 76707 - protein, 36 aa, Artificial Sequence; identical to SEQ ID NO: 2538
  GFR-binding peptide
  MOD_RES (1), (3), (35), (36): Xaa is C or S

SEQ ID NO: 76708 - protein, 39 aa, Artificial Sequence
  GFR-binding peptide
  MOD_RES (2), (36), (37): Xaa is C or S
  MOD_RES (14), (15), (16), (17), (18): Xaa is A or G
  MOD_RES (19), (20), (21), (22): Xaa is A or G or is absent
AXSEVTMNQYNKLXXXXXXXXXLYLISIASMKEPVXXPE

SEQ ID NO: 76709 - protein, 34 aa, Artificial Sequence; identical to SEQ ID NO: 4466
  GFR-binding peptide
  MOD_RES (31), (32): Xaa is C or S

SEQ ID NO: 76710 - protein, 34 aa, Artificial Sequence; identical to SEQ ID NO: 56440
  GFR-binding peptide
  MOD_RES (1), (1): Xaa is C or S
  MOD_RES (13), (14), (15), (16), (17): Xaa is A or G
  MOD_RES (18), (19), (20), (21): Xaa is A or G or is absent

SEQ ID NO: 76711 - protein, 37 aa, Artificial Sequence; identical to SEQ ID NO: 2539
  GFR-binding peptide
  MOD_RES (2), (33), (34): Xaa is C or S

SEQ ID NO: 76712 - protein, 32 aa, Artificial Sequence; identical to SEQ ID NO: 10038
  GFR-binding peptide
  MOD_RES (31), (32): Xaa is C or S

SEQ ID NO: 76713 - protein, 43 aa, Artificial Sequence; identical to SEQ ID NO: 2540
  GFR-binding peptide
  MOD_RES (1), (3), (37), (38): Xaa is C or S
  MOD_RES (15), (16), (17), (18), (19): Xaa is A or G
  MOD_RES (20), (21), (22), (23): Xaa is A or G or is absent

SEQ ID NO: 76714 - protein, 44 aa, Artificial Sequence; identical to SEQ ID NO: 4467
  GFR-binding peptide
  MOD_RES (2), (4), (38), (39): Xaa is C or S
  MOD_RES (16), (17), (18), (19), (20): Xaa is A or G
  MOD_RES (21), (22), (23), (24): Xaa is A or G or is absent

SEQ ID NO: 76715 - protein, 39 aa, Artificial Sequence; identical to SEQ ID NO: 56442
  GFR-binding peptide
  MOD_RES (2), (4), (35), (36): Xaa is C or S

SEQ ID NO: 76716 - protein, 40 aa, Artificial Sequence; identical to SEQ ID NO: 2541
  GFR-binding peptide
  MOD_RES (34), (35): Xaa is C or S
  MOD_RES (12), (13), (14), (15), (16): Xaa is A or G
  MOD_RES (17), (18), (19), (20): Xaa is A or G or is absent

SEQ ID NO: 76717 - protein, 40 aa, Artificial Sequence; identical to SEQ ID NO: 2542
  GFR-binding peptide
  MOD_RES (1), (3), (35), (36): Xaa is C or S

SEQ ID NO: 76718 - protein, 41 aa, Artificial Sequence; identical to SEQ ID NO: 2543
  GFR-binding peptide
  MOD_RES (1), (3), (37), (38): Xaa is C or S
  MOD_RES (15), (16), (17), (18), (19): Xaa is A or G
  MOD_RES (20), (21), (22), (23): Xaa is A or G or is absent

SEQ ID NO: 76719 - protein, 41 aa, Artificial Sequence; identical to SEQ ID NO: 2544
  GFR-binding peptide
  MOD_RES (2), (4), (36), (37): Xaa is C or S

SEQ ID NO: 76720 - protein, 41 aa, Artificial Sequence; identical to SEQ ID NO: 2545
  GFR-binding peptide
  MOD_RES (2), (4), (38), (39): Xaa is C or S
  MOD_RES (16), (17), (18), (19), (20): Xaa is A or G
  MOD_RES (21), (22), (23), (24): Xaa is A or G or is absent

SEQ ID NO: 76721 - protein, 38 aa, Artificial Sequence; identical to SEQ ID NO: 4470
  GFR-binding peptide
  MOD_RES (2), (35), (36): Xaa is C or S
  MOD_RES (13), (14), (15), (16), (17): Xaa is A or G
  MOD_RES (18), (19), (20), (21): Xaa is A or G or is absent

SEQ ID NO: 76722 - protein, 38 aa, Artificial Sequence; identical to SEQ ID NO: 2549
  GFR-binding peptide
  MOD_RES (2), (35), (36): Xaa is C or S
  MOD_RES (13), (14), (15), (16), (17): Xaa is A or G
  MOD_RES (18), (19), (20), (21): Xaa is A or G or is absent

SEQ ID NO: 76723 - protein, 37 aa, Artificial Sequence; identical to SEQ ID NO: 4472
  GFR-binding peptide
  MOD_RES (2), (34), (35): Xaa is C or S

SEQ ID NO: 76724 - protein, 40 aa, Artificial Sequence; identical to SEQ ID NO: 4474
  GFR-binding peptide
  MOD_RES (2), (4), (39), (40): Xaa is C or S
  MOD_RES (17), (18), (19), (20), (21): Xaa is A or G
  MOD_RES (22), (23), (24), (25): Xaa is A or G or is absent

SEQ ID NO: 76725 - protein, 34 aa, Artificial Sequence; identical to SEQ ID NO: 2550
  GFR-binding peptide
  MOD_RES (1), (33): Xaa is C or S

SEQ ID NO: 76726 - protein, 32 aa, Artificial Sequence; identical to SEQ ID NO: 25563
  GFR-binding peptide
  MOD_RES (31), (32): Xaa is C or S

SEQ ID NO: 76727 - protein, 34 aa, Artificial Sequence
  GFR-binding peptide
  MOD_RES (2), (33), (34): Xaa is C or S
GXEEVIMQYNKLLLVRGNDLYLMSIASTKVPAXX

SEQ ID NO: 76728 - protein, 41 aa, Artificial Sequence; identical to SEQ ID NO: 2551
  GFR-binding peptide
  MOD_RES (2), (4), (38), (39): Xaa is C or S
  MOD_RES (16), (17), (18), (19), (20): Xaa is A or G
  MOD_RES (21), (22), (23), (24): Xaa is A or G or is absent

SEQ ID NO: 76729 - protein, 33 aa, Artificial Sequence; identical to SEQ ID NO: 56455
  GFR-binding peptide
  MOD_RES (1), (3): Xaa is C or S

SEQ ID NO: 76730 - protein, 33 aa, Artificial Sequence; identical to SEQ ID NO: 56456
  GFR-binding peptide
  MOD_RES (31), (32): Xaa is C or S

SEQ ID NO: 76731 - protein, 36 aa, Artificial Sequence; identical to SEQ ID NO: 56458
  GFR-binding peptide
  MOD_RES (33), (34): Xaa is C or S
  MOD_RES (11), (12), (13), (14), (15): Xaa is A or G
  MOD_RES (16), (17), (18), (19): Xaa is A or G or is absent

SEQ ID NO: 76732 - protein, 34 aa, Artificial Sequence; identical to SEQ ID NO: 4479
  GFR-binding peptide
  MOD_RES (33), (34): Xaa is C or S
  MOD_RES (11), (12), (13), (14), (15): Xaa is A or G
  MOD_RES (16), (17), (18), (19): Xaa is A or G or is absent

SEQ ID NO: 76733 - protein, 36 aa, Artificial Sequence; identical to SEQ ID NO: 2554
  GFR-binding peptide
  MOD_RES (32), (33): Xaa is C or S

SEQ ID NO: 76734 - protein, 32 aa, Artificial Sequence
  GFR-binding peptide
  MOD_RES (1), (1): Xaa is C or S
XAEVVMDQYNKLVVNNAADLYLISIASLRAPV

SEQ ID NO: 76735 - protein, 36 aa, Artificial Sequence
  GFR-binding peptide
  MOD_RES (1), (35), (36): Xaa is C or S
  MOD_RES (13), (14), (15), (16), (17): Xaa is A or G
  MOD_RES (18), (19), (20), (21): Xaa is A or G or is absent
XAEVVMDQYNKLXXXXXXXXXLYLISIASLRAPVXX

SEQ ID NO: 76736 - protein, 34 aa, Artificial Sequence
  GFR-binding peptide
  MOD_RES (33), (34): Xaa is C or S
  MOD_RES (11), (12), (13), (14), (15): Xaa is A or G
  MOD_RES (16), (17), (18), (19): Xaa is A or G or is absent
DVVMGQYNKLXXXXXXXXXLYLMSIASMKTPTXX

SEQ ID NO: 76737 - protein, 37 aa, Artificial Sequence; identical to SEQ ID NO: 2557
  GFR-binding peptide
  MOD_RES (2), (4): Xaa is C or S
  MOD_RES (16), (17), (18), (19), (20): Xaa is A or G
  MOD_RES (21), (22), (23), (24): Xaa is A or G or is absent

SEQ ID NO: 76738 - protein, 38 aa, Artificial Sequence; identical to SEQ ID NO: 11913
  GFR-binding peptide
  MOD_RES (1), (3), (35), (36): Xaa is C or S

SEQ ID NO: 76739 - protein, 34 aa, Artificial Sequence; identical to SEQ ID NO: 2558
  GFR-binding peptide
  MOD_RES (2), (4): Xaa is C or S

SEQ ID NO: 76740 - protein, 39 aa, Artificial Sequence; identical to SEQ ID NO: 4483
  GFR-binding peptide
  MOD_RES (1), (34), (35): Xaa is C or S
  MOD_RES (12), (13), (14), (15), (16): Xaa is A or G
  MOD_RES (17), (18), (19), (20): Xaa is A or G or is absent

SEQ ID NO: 76741 - protein, 38 aa, Artificial Sequence; identical to SEQ ID NO: 2559
  GFR-binding peptide
  MOD_RES (33), (34): Xaa is C or S

SEQ ID NO: 76742 - protein, 36 aa, Artificial Sequence; identical to SEQ ID NO: 11916
  GFR-binding peptide
  MOD_RES (2), (4), (36): Xaa is C or S

SEQ ID NO: 76743 - protein, 34 aa, Artificial Sequence; identical to SEQ ID NO: 4486
  GFR-binding peptide
  MOD_RES (2), (33), (34): Xaa is C or S

SEQ ID NO: 76744 - protein, 40 aa, Artificial Sequence; identical to SEQ ID NO: 2563
  GFR-binding peptide
  MOD_RES (1), (3), (35), (36): Xaa is C or S

SEQ ID NO: 76745 - protein, 41 aa, Artificial Sequence; identical to SEQ ID NO: 4488
  GFR-binding peptide
  MOD_RES (1), (3), (35), (36): Xaa is C or S

SEQ ID NO: 76746 - protein, 36 aa, Artificial Sequence; identical to SEQ ID NO: 56466
  GFR-binding peptide
  MOD_RES (1), (33), (34): Xaa is C or S

SEQ ID NO: 76747 - protein, 33 aa, Artificial Sequence; identical to SEQ ID NO: 4489
  GFR-binding peptide
  MOD_RES (32), (33): Xaa is C or S

SEQ ID NO: 76748 - protein, 40 aa, Artificial Sequence; identical to SEQ ID NO: 25580
  GFR-binding peptide
  MOD_RES (2), (36), (37): Xaa is C or S
  MOD_RES (14), (15), (16), (17), (18): Xaa is A or G
  MOD_RES (19), (20), (21), (22): Xaa is A or G or is absent

SEQ ID NO: 76749 - protein, 38 aa, Artificial Sequence; identical to SEQ ID NO: 4490
  GFR-binding peptide
  MOD_RES (1), (32), (33): Xaa is C or S

SEQ ID NO: 76750 - protein, 42 aa, Artificial Sequence
  GFR-binding peptide
  MOD_RES (1), (3), (37), (38): Xaa is C or S
  MOD_RES (15), (16), (17), (18), (19): Xaa is A or G
  MOD_RES (20), (21), (22), (23): Xaa is A or G or is absent
XGXAEVVMDQYNKLXXXXXXXXXLYLISIASLRAPVXXSAPA

SEQ ID NO: 76751 - protein, 39 aa, Artificial Sequence
  GFR-binding peptide
  MOD_RES (1), (33), (34): Xaa is C or S
XSRVVMNQYNKLIVNSSDDLYLVSIASLKTPAXXPKPVH

SEQ ID NO: 76752 - protein, 42 aa, Artificial Sequence; identical to SEQ ID NO: 61954
  GFR-binding peptide
  MOD_RES (2), (36), (37): Xaa is C or S
  MOD_RES (14), (15), (16), (17), (18): Xaa is A or G
  MOD_RES (19), (20), (21), (22): Xaa is A or G or is absent

SEQ ID NO: 76753 - protein, 35 aa, Artificial Sequence; identical to SEQ ID NO: 2569
  GFR-binding peptide
  MOD_RES (1), (33), (34): Xaa is C or S

SEQ ID NO: 76754 - protein, 37 aa, Artificial Sequence; identical to SEQ ID NO: 23565
  GFR-binding peptide
  MOD_RES (1), (3), (37): Xaa is C or S
  MOD_RES (15), (16), (17), (18), (19): Xaa is A or G
  MOD_RES (20), (21), (22), (23): Xaa is A or G or is absent

SEQ ID NO: 76755 - protein, 39 aa, Artificial Sequence
  GFR-binding peptide
  MOD_RES (1), (3), (35), (36): Xaa is C or S
XGXAEVVMDQYNKLVVNNAADLYLISIASLRAPVXXSAP

SEQ ID NO: 76756 - protein, 38 aa, Artificial Sequence; identical to SEQ ID NO: 4492
  GFR-binding peptide
  MOD_RES (1), (3), (34), (35): Xaa is C or S

SEQ ID NO: 76757 - protein, 38 aa, Artificial Sequence; identical to SEQ ID NO: 25584
  GFR-binding peptide
  MOD_RES (2), (36), (37): Xaa is C or S
  MOD_RES (14), (15), (16), (17), (18): Xaa is A or G
  MOD_RES (19), (20), (21), (22): Xaa is A or G or is absent

SEQ ID NO: 76758 - protein, 39 aa, Artificial Sequence; identical to SEQ ID NO: 2573
  GFR-binding peptide
  MOD_RES (1), (3), (34), (35): Xaa is C or S

SEQ ID NO: 76759 - protein, 41 aa, Artificial Sequence; identical to SEQ ID NO: 63722
  GFR-binding peptide
  MOD_RES (2), (4), (36), (37): Xaa is C or S

SEQ ID NO: 76760 - protein, 35 aa, Artificial Sequence
  GFR-binding peptide
  MOD_RES (2), (4): Xaa is C or S
SXGXRDVVMGQYNKLIIQQKDNLYLMSIASMKTPT

SEQ ID NO: 76761 - protein, 37 aa, Artificial Sequence
  GFR-binding peptide
  MOD_RES (2), (34), (35): Xaa is C or S
GXAEVVMDQYNKLVVNNAADLYLISIASLRAPVXXSA

SEQ ID NO: 76762 - protein, 36 aa, Artificial Sequence; identical to SEQ ID NO: 4495
  GFR-binding peptide
  MOD_RES (1), (34), (35): Xaa is C or S
  MOD_RES (12), (13), (14), (15), (16): Xaa is A or G
  MOD_RES (17), (18), (19), (20): Xaa is A or G or is absent

SEQ ID NO: 76763 - protein, 40 aa, Artificial Sequence; identical to SEQ ID NO: 4498
  GFR-binding peptide
  MOD_RES (2), (35), (36): Xaa is C or S
  MOD_RES (13), (14), (15), (16), (17): Xaa is A or G
  MOD_RES (18), (19), (20), (21): Xaa is A or G or is absent

SEQ ID NO: 76764 - protein, 37 aa, Artificial Sequence; identical to SEQ ID NO: 56479
  GFR-binding peptide
  MOD_RES (1), (3), (35), (36): Xaa is C or S

SEQ ID NO: 76765 - protein, 36 aa, Artificial Sequence; identical to SEQ ID NO: 11935
  GFR-binding peptide
  MOD_RES (2), (36): Xaa is C or S
  MOD_RES (14), (15), (16), (17), (18): Xaa is A or G
  MOD_RES (19), (20), (21), (22): Xaa is A or G or is absent

SEQ ID NO: 76766 - protein, 30 aa, Artificial Sequence
  GFR-binding peptide
SVAMGQYNKLYTVVGKDLYLISIASLKTPV

SEQ ID NO: 76767 - protein, 41 aa, Artificial Sequence
  GFR-binding peptide
  MOD_RES (1), (35), (36): Xaa is C or S
  MOD_RES (13), (14), (15), (16), (17): Xaa is A or G
  MOD_RES (18), (19), (20), (21): Xaa is A or G or is absent
XRDVVMGQYNKLXXXXXXXXXLYLMSIASMKTPTXXPGASG

SEQ ID NO: 76768 - protein, 37 aa, Artificial Sequence; identical to SEQ ID NO: 4499
  GFR-binding peptide
  MOD_RES (2), (34), (35): Xaa is C or S

SEQ ID NO: 76769 - protein, 33 aa, Artificial Sequence
  GFR-binding peptide
  MOD_RES (33), (33): Xaa is C or S
  MOD_RES (11), (12), (13), (14), (15): Xaa is A or G
  MOD_RES (16), (17), (18), (19): Xaa is A or G or is absent
DVVMGQYNKLXXXXXXXXXLYLMSIASMKTPTX

SEQ ID NO: 76770 - protein, 37 aa, Artificial Sequence; identical to SEQ ID NO: 23574
  GFR-binding peptide
  MOD_RES (34), (35): Xaa is C or S
  MOD_RES (12), (13), (14), (15), (16): Xaa is A or G
  MOD_RES (17), (18), (19), (20): Xaa is A or G or is absent

SEQ ID NO: 76771 - protein, 38 aa, Artificial Sequence; identical to SEQ ID NO: 63728
  GFR-binding peptide
  MOD_RES (1), (3), (37), (38): Xaa is C or S
  MOD_RES (15), (16), (17), (18), (19): Xaa is A or G
  MOD_RES (20), (21), (22), (23): Xaa is A or G or is absent

SEQ ID NO: 76772 - protein, 38 aa, Artificial Sequence; identical to SEQ ID NO: 2579
  GFR-binding peptide
  MOD_RES (1), (3), (36), (37): Xaa is C or S
  MOD_RES (14), (15), (16), (17), (18): Xaa is A or G
  MOD_RES (19), (20), (21), (22): Xaa is A or G or is absent

SEQ ID NO: 76773 - protein, 34 aa, Artificial Sequence; identical to SEQ ID NO: 4501
  GFR-binding peptide
  MOD_RES (2), (2): Xaa is C or S
  MOD_RES (13), (14), (15), (16), (17): Xaa is A or G
  MOD_RES (18), (19), (20), (21): Xaa is A or G or is absent

SEQ ID NO: 76774 - protein, 35 aa, Artificial Sequence; identical to SEQ ID NO: 23578
  GFR-binding peptide
  MOD_RES (1), (35): Xaa is C or S
  MOD_RES (13), (14), (15), (16), (17): Xaa is A or G
  MOD_RES (18), (19), (20), (21): Xaa is A or G or is absent

SEQ ID NO: 76775 - protein, 36 aa, Artificial Sequence; identical to SEQ ID NO: 2582
  GFR-binding peptide
  MOD_RES (1), (3): Xaa is C or S
  MOD_RES (15), (16), (17), (18), (19): Xaa is A or G
  MOD_RES (20), (21), (22), (23): Xaa is A or G or is absent

SEQ ID NO: 76776 - protein, 39 aa, Artificial Sequence; identical to SEQ ID NO: 23580
  GFR-binding peptide
  MOD_RES (1), (3), (37), (38): Xaa is C or S
  MOD_RES (15), (16), (17), (18), (19): Xaa is A or G
  MOD_RES (20), (21), (22), (23): Xaa is A or G or is absent

SEQ ID NO: 76777 - protein, 40 aa, Artificial Sequence; identical to SEQ ID NO: 4502
  GFR-binding peptide
  MOD_RES (2), (36), (37): Xaa is C or S
  MOD_RES (14), (15), (16), (17), (18): Xaa is A or G
  MOD_RES (19), (20), (21), (22): Xaa is A or G or is absent

SEQ ID NO: 76778 - protein, 36 aa, Artificial Sequence
  GFR-binding peptide
  MOD_RES (1), (3): Xaa is C or S
  MOD_RES (15), (16), (17), (18), (19): Xaa is A or G
  MOD_RES (20), (21), (22), (23): Xaa is A or G or is absent
XGXESVAMGQYNKLXXXXXXXXXLYLISIASLKTPV

SEQ ID NO: 76779 - protein, 36 aa, Artificial Sequence; identical to SEQ ID NO: 2585
  GFR-binding peptide
  MOD_RES (1), (32), (33): Xaa is C or S

SEQ ID NO: 76780 - protein, 36 aa, Artificial Sequence; identical to SEQ ID NO: 56490
  GFR-binding peptide
  MOD_RES (1), (32), (33): Xaa is C or S

SEQ ID NO: 76781 - protein, 37 aa, Artificial Sequence
  GFR-binding peptide
  MOD_RES (32), (33): Xaa is C or S
ESVAMGQYNKLYTVVGKDLYLISIASLKTPVXXAKSA

SEQ ID NO: 76782 - protein, 37 aa, Artificial Sequence
  GFR-binding peptide
  MOD_RES (2), (4), (35), (36): Xaa is C or S
LXGXEEVIMQYNKLLLVRGNDLYLMSIASTKVPAXXT

SEQ ID NO: 76783 - protein, 37 aa, Artificial Sequence; identical to SEQ ID NO: 2589
  GFR-binding peptide
  MOD_RES (1), (3), (36), (37): Xaa is C or S
  MOD_RES (14), (15), (16), (17), (18): Xaa is A or G
  MOD_RES (19), (20), (21), (22): Xaa is A or G or is absent

SEQ ID NO: 76784 - protein, 33 aa, Artificial Sequence; identical to SEQ ID NO: 2590
  GFR-binding peptide
  MOD_RES (31), (32): Xaa is C or S

SEQ ID NO: 76785 - protein, 37 aa, Artificial Sequence; identical to SEQ ID NO: 4505
  GFR-binding peptide
  MOD_RES (2), (4), (35), (36): Xaa is C or S

SEQ ID NO: 76786 - protein, 43 aa, Artificial Sequence; identical to SEQ ID NO: 4506
  GFR-binding peptide
  MOD_RES (2), (4), (39), (40): Xaa is C or S
  MOD_RES (17), (18), (19), (20), (21): Xaa is A or G
  MOD_RES (22), (23), (24), (25): Xaa is A or G or is absent

SEQ ID NO: 76787 - protein, 36 aa, Artificial Sequence; identical to SEQ ID NO: 10081
  GFR-binding peptide
  MOD_RES (33), (34): Xaa is C or S
  MOD_RES (11), (12), (13), (14), (15): Xaa is A or G
  MOD_RES (16), (17), (18), (19): Xaa is A or G or is absent

SEQ ID NO: 76788 - protein, 42 aa, Artificial Sequence; identical to SEQ ID NO: 2592
  GFR-binding peptide
  MOD_RES (2), (4), (36): Xaa is C or S

SEQ ID NO: 76789 - protein, 37 aa, Artificial Sequence; identical to SEQ ID NO: 11946
  GFR-binding peptide
  MOD_RES (2), (4), (36), (37): Xaa is C or S

SEQ ID NO: 76790 - protein, 36 aa, Artificial Sequence; identical to SEQ ID NO: 4509
  GFR-binding peptide
  MOD_RES (1), (35): Xaa is C or S
  MOD_RES (13), (14), (15), (16), (17): Xaa is A or G
  MOD_RES (18), (19), (20), (21): Xaa is A or G or is absent

SEQ ID NO: 76791 - protein, 41 aa, Artificial Sequence; identical to SEQ ID NO: 2593
  GFR-binding peptide
  MOD_RES (2), (36): Xaa is C or S
  MOD_RES (14), (15), (16), (17), (18): Xaa is A or G
  MOD_RES (19), (20), (21), (22): Xaa is A or G or is absent

SEQ ID NO: 76792 - protein, 37 aa, Artificial Sequence
  GFR-binding peptide
  MOD_RES (2), (4): Xaa is C or S
  MOD_RES (16), (17), (18), (19), (20): Xaa is A or G
  MOD_RES (21), (22), (23), (24): Xaa is A or G or is absent
RXGXAEVVMDQYNKLXXXXXXXXXLYLISIASLRAPV

SEQ ID NO: 76793 - protein, 34 aa, Artificial Sequence; identical to SEQ ID NO: 4512
  GFR-binding peptide
  MOD_RES (1), (1): Xaa is C or S
  MOD_RES (13), (14), (15), (16), (17): Xaa is A or G
  MOD_RES (18), (19), (20), (21): Xaa is A or G or is absent

SEQ ID NO: 76794 - protein, 35 aa, Artificial Sequence; identical to SEQ ID NO: 4513
  GFR-binding peptide
  MOD_RES (34), (35): Xaa is C or S
  MOD_RES (12), (13), (14), (15), (16): Xaa is A or G
  MOD_RES (17), (18), (19), (20): Xaa is A or G or is absent

SEQ ID NO: 76795 - protein, 34 aa, Artificial Sequence; identical to SEQ ID NO: 2599
  GFR-binding peptide
  MOD_RES (1), (33), (34): Xaa is C or S

SEQ ID NO: 76796 - protein, 39 aa, Artificial Sequence; identical to SEQ ID NO: 4514
  GFR-binding peptide
  MOD_RES (2), (36), (37): Xaa is C or S
  MOD_RES (14), (15), (16), (17), (18): Xaa is A or G
  MOD_RES (19), (20), (21), (22): Xaa is A or G or is absent

SEQ ID NO: 76797 - protein, 39 aa, Artificial Sequence
  GFR-binding peptide
  MOD_RES (2), (4), (35), (36): Xaa is C or S
LXGXEEVIMQYNKLLLVRGNDLYLMSIASTKVPAXXTSP

SEQ ID NO: 76798 - protein, 37 aa, Artificial Sequence; identical to SEQ ID NO: 56505
  GFR-binding peptide
  MOD_RES (31), (32): Xaa is C or S

SEQ ID NO: 76799 - protein, 35 aa, Artificial Sequence
  GFR-binding peptide
  MOD_RES (1), (33), (34): Xaa is C or S
XESVAMGQYNKLYTVVGKDLYLISIASLKTPVXXA

SEQ ID NO: 76800 - protein, 32 aa, Artificial Sequence; identical to SEQ ID NO: 56508
  GFR-binding peptide
  MOD_RES (1), (1): Xaa is C or S

SEQ ID NO: 76801 - protein, 44 aa, Artificial Sequence; identical to SEQ ID NO: 2603
  GFR-binding peptide
  MOD_RES (2), (4), (38), (39): Xaa is C or S
  MOD_RES (16), (17), (18), (19), (20): Xaa is A or G
  MOD_RES (21), (22), (23), (24): Xaa is A or G or is absent

SEQ ID NO: 76802 - protein, 37 aa, Artificial Sequence; identical to SEQ ID NO: 58521
  GFR-binding peptide
  MOD_RES (34), (35): Xaa is C or S
  MOD_RES (12), (13), (14), (15), (16): Xaa is A or G
  MOD_RES (17), (18), (19), (20): Xaa is A or G or is absent

SEQ ID NO: 76803 - protein, 36 aa, Artificial Sequence; identical to SEQ ID NO: 11961
  GFR-binding peptide
  MOD_RES (31), (32): Xaa is C or S

SEQ ID NO: 76804 - protein, 39 aa, Artificial Sequence; identical to SEQ ID NO: 11962
  GFR-binding peptide
  MOD_RES (2), (4), (38), (39): Xaa is C or S
  MOD_RES (16), (17), (18), (19), (20): Xaa is A or G
  MOD_RES (21), (22), (23), (24): Xaa is A or G or is absent

SEQ ID NO: 76805 - protein, 36 aa, Artificial Sequence; identical to SEQ ID NO: 4522
  GFR-binding peptide
  MOD_RES (1), (33): Xaa is C or S

SEQ ID NO: 76806 - protein, 35 aa, Artificial Sequence; identical to SEQ ID NO: 4523
  GFR-binding peptide
  MOD_RES (33), (34): Xaa is C or S
  MOD_RES (11), (12), (13), (14), (15): Xaa is A or G
  MOD_RES (16), (17), (18), (19): Xaa is A or G or is absent

SEQ ID NO: 76807 - protein, 36 aa, Artificial Sequence
  GFR-binding peptide
  MOD_RES (1), (32), (33): Xaa is C or S
XEEVIMQYNKLLLVRGNDLYLMSIASTKVPAXXTSP

SEQ ID NO: 76808 - protein, 35 aa, Artificial Sequence
  GFR-binding peptide
  MOD_RES (1), (35): Xaa is C or S
  MOD_RES (13), (14), (15), (16), (17): Xaa is A or G
  MOD_RES (18), (19), (20), (21): Xaa is A or G or is absent
XAEVVMDQYNKLXXXXXXXXXLYLISIASLRAPVX

SEQ ID NO: 76809 - protein, 31 aa, Artificial Sequence
  GFR-binding peptide
  MOD_RES (31), (31): Xaa is C or S
DVVMGQYNKLIIQQKDNLYLMSIASMKTPTX

SEQ ID NO: 76810 - protein, 33 aa, Artificial Sequence; identical to SEQ ID NO: 23612
  GFR-binding peptide
  MOD_RES (33), (33): Xaa is C or S
  MOD_RES (11), (12), (13), (14), (15): Xaa is A or G
  MOD_RES (16), (17), (18), (19): Xaa is A or G or is absent

SEQ ID NO: 76811 - protein, 31 aa, Artificial Sequence; identical to SEQ ID NO: 11968
  GFR-binding peptide

SEQ ID NO: 76812 - protein, 41 aa, Artificial Sequence; identical to SEQ ID NO: 56516
  GFR-binding peptide
  MOD_RES (2), (4), (37), (38): Xaa is C or S
  MOD_RES (15), (16), (17), (18), (19): Xaa is A or G
  MOD_RES (20), (21), (22), (23): Xaa is A or G or is absent

SEQ ID NO: 76813 - protein, 36 aa, Artificial Sequence
  GFR-binding peptide
  MOD_RES (31), (32): Xaa is C or S
SVAMGQYNKLYTVVGKDLYLISIASLKTPVXXAKSA

SEQ ID NO: 76814 - protein, 32 aa, Artificial Sequence; identical to SEQ ID NO: 61998
  GFR-binding peptide
  MOD_RES (32), (32): Xaa is C or S

SEQ ID NO: 76815 - protein, 32 aa, Artificial Sequence; identical to SEQ ID NO: 2610
  GFR-binding peptide
  MOD_RES (11), (12), (13), (14), (15): Xaa is A or G
  MOD_RES (16), (17), (18), (19): Xaa is A or G or is absent

SEQ ID NO: 76816 - protein, 33 aa, Artificial Sequence; identical to SEQ ID NO: 2612
  GFR-binding peptide
  MOD_RES (1), (1): Xaa is C or S
  MOD_RES (12), (13), (14), (15), (16): Xaa is A or G
  MOD_RES (17), (18), (19), (20): Xaa is A or G or is absent

SEQ ID NO: 76817 - protein, 34 aa, Artificial Sequence; identical to SEQ ID NO: 4529
  GFR-binding peptide
  MOD_RES (2), (4): Xaa is C or S

SEQ ID NO: 76818 - protein, 42 aa, Artificial Sequence
  GFR-binding peptide
  MOD_RES (2), (4), (37), (38): Xaa is C or S
  MOD_RES (15), (16), (17), (18), (19): Xaa is A or G
  MOD_RES (20), (21), (22), (23): Xaa is A or G or is absent
LXGXEEVIMQYNKLXXXXXXXXXLYLMSIASTKVPAXXTSPV

SEQ ID NO: 76819 - protein, 35 aa, Artificial Sequence; identical to SEQ ID NO: 2614
  GFR-binding peptide
  MOD_RES (33), (34): Xaa is C or S
  MOD_RES (11), (12), (13), (14), (15): Xaa is A or G
  MOD_RES (16), (17), (18), (19): Xaa is A or G or is absent

SEQ ID NO: 76820 - protein, 37 aa, Artificial Sequence; identical to SEQ ID NO: 4531
  GFR-binding peptide
  MOD_RES (33), (33): Xaa is C or S
  MOD_RES (11), (12), (13), (14), (15): Xaa is A or G
  MOD_RES (16), (17), (18), (19): Xaa is A or G or is absent

SEQ ID NO: 76821 - protein, 41 aa, Artificial Sequence
  GFR-binding peptide
  MOD_RES (2), (36), (37): Xaa is C or S
  MOD_RES (14), (15), (16), (17), (18): Xaa is A or G
  MOD_RES (19), (20), (21), (22): Xaa is A or G or is absent
GXRDVVMGQYNKLXXXXXXXXXLYLMSIASMKTPTXXPGAS

SEQ ID NO: 76822 - protein, 36 aa, Artificial Sequence; identical to SEQ ID NO: 4534
  GFR-binding peptide
  MOD_RES (32), (33): Xaa is C or S

SEQ ID NO: 76823 - protein, 40 aa, Artificial Sequence; identical to SEQ ID NO: 2618
  GFR-binding peptide
  MOD_RES (2), (4), (35), (36): Xaa is C or S

SEQ ID NO: 76824 - protein, 34 aa, Artificial Sequence; identical to SEQ ID NO: 4538
  GFR-binding peptide
  MOD_RES (2), (33), (34): Xaa is C or S

SEQ ID NO: 76825 - protein, 41 aa, Artificial Sequence; identical to SEQ ID NO: 56522
  GFR-binding peptide
  MOD_RES (2), (4), (35), (36): Xaa is C or S

SEQ ID NO: 76826 - protein, 34 aa, Artificial Sequence
  GFR-binding peptide
  MOD_RES (1), (3): Xaa is C or S
XGXESVAMGQYNKLYTVVGKDLYLISIASLKTPV

SEQ ID NO: 76827 - protein, 34 aa, Artificial Sequence; identical to SEQ ID NO: 4540
  GFR-binding peptide
  MOD_RES (2), (34): Xaa is C or S

SEQ ID NO: 76828 - protein, 43 aa, Artificial Sequence
  GFR-binding peptide
  MOD_RES (2), (4), (37), (38): Xaa is C or S
  MOD_RES (15), (16), (17), (18), (19): Xaa is A or G
  MOD_RES (20), (21), (22), (23): Xaa is A or G or is absent
LXGXEEVIMQYNKLXXXXXXXXXLYLMSIASTKVPAXXTSPVR

SEQ ID NO: 76829 - protein, 36 aa, Artificial Sequence; identical to SEQ ID NO: 2620
  GFR-binding peptide
  MOD_RES (1), (34), (35): Xaa is C or S
  MOD_RES (12), (13), (14), (15), (16): Xaa is A or G
  MOD_RES (17), (18), (19), (20): Xaa is A or G or is absent

SEQ ID NO: 76830 - protein, 37 aa, Artificial Sequence; identical to SEQ ID NO: 25637
  GFR-binding peptide
  MOD_RES (2), (4), (36), (37): Xaa is C or S

SEQ ID NO: 76831 - protein, 38 aa, Artificial Sequence; identical to SEQ ID NO: 4542
  GFR-binding peptide
  MOD_RES (2), (34): Xaa is C or S

SEQ ID NO: 76832 - protein, 34 aa, Artificial Sequence; identical to SEQ ID NO: 2621
  GFR-binding peptide
  MOD_RES (31), (32): Xaa is C or S

SEQ ID NO: 76833 - protein, 41 aa, Artificial Sequence; identical to SEQ ID NO: 2622
  GFR-binding peptide
  MOD_RES (1), (3), (35), (36): Xaa is C or S

SEQ ID NO: 76834 - protein, 39 aa, Artificial Sequence; identical to SEQ ID NO: 4545
  GFR-binding peptide
  MOD_RES (2), (4), (36), (37): Xaa is C or S

SEQ ID NO: 76835 - protein, 36 aa, Artificial Sequence; identical to SEQ ID NO: 4546
  GFR-binding peptide
  MOD_RES (2), (4), (36): Xaa is C or S

SEQ ID NO: 76836 - protein, 33 aa, Artificial Sequence; identical to SEQ ID NO: 2623
  GFR-binding peptide
  MOD_RES (1), (33): Xaa is C or S

SEQ ID NO: 76837 - protein, 37 aa, Artificial Sequence; identical to SEQ ID NO: 23627
  GFR-binding peptide
  MOD_RES (1), (35), (36): Xaa is C or S
  MOD_RES (13), (14), (15), (16), (17): Xaa is A or G
  MOD_RES (18), (19), (20), (21): Xaa is A or G or is absent

SEQ ID NO: 76838 - protein, 39 aa, Artificial Sequence; identical to SEQ ID NO: 25644
  GFR-binding peptide
  MOD_RES (1), (3), (35), (36): Xaa is C or S

SEQ ID NO: 76839 - protein, 31 aa, Artificial Sequence; identical to SEQ ID NO: 2628
  GFR-binding peptide
  MOD_RES (31), (31): Xaa is C or S

SEQ ID NO: 76840 - protein, 37 aa, Artificial Sequence; identical to SEQ ID NO: 2629
  GFR-binding peptide
  MOD_RES (32), (32): Xaa is C or S

SEQ ID NO: 76841 - protein, 41 aa, Artificial Sequence; identical to SEQ ID NO: 4549
  GFR-binding peptide
  MOD_RES (1), (35): Xaa is C or S
  MOD_RES (13), (14), (15), (16), (17): Xaa is A or G
  MOD_RES (18), (19), (20), (21): Xaa is A or G or is absent

SEQ ID NO: 76842 - protein, 35 aa, Artificial Sequence; identical to SEQ ID NO: 2630
  GFR-binding peptide
  MOD_RES (34), (34): Xaa is C or S
  MOD_RES (12), (13), (14), (15), (16): Xaa is A or G
  MOD_RES (17), (18), (19), (20): Xaa is A or G or is absent

SEQ ID NO: 76843 - protein, 34 aa, Artificial Sequence; identical to SEQ ID NO: 56536
  GFR-binding peptide
  MOD_RES (1), (3), (34): Xaa is C or S

SEQ ID NO: 76844 - protein, 40 aa, Artificial Sequence; identical to SEQ ID NO: 4553
  GFR-binding peptide
  MOD_RES (34), (35): Xaa is C or S
  MOD_RES (12), (13), (14), (15), (16): Xaa is A or G
  MOD_RES (17), (18), (19), (20): Xaa is A or G or is absent

SEQ ID NO: 76845 - protein, 41 aa, Artificial Sequence; identical to SEQ ID NO: 2632
  GFR-binding peptide
  MOD_RES (2), (4), (36), (37): Xaa is C or S

SEQ ID NO: 76846 - protein, 33 aa, Artificial Sequence; identical to SEQ ID NO: 4554
  GFR-binding peptide
  MOD_RES (33), (33): Xaa is C or S
  MOD_RES (11), (12), (13), (14), (15): Xaa is A or G
  MOD_RES (16), (17), (18), (19): Xaa is A or G or is absent

SEQ ID NO: 76847 - protein, 41 aa, Artificial Sequence; identical to SEQ ID NO: 2634
  GFR-binding peptide
  MOD_RES (2), (35), (36): Xaa is C or S
  MOD_RES (13), (14), (15), (16), (17): Xaa is A or G
  MOD_RES (18), (19), (20), (21): Xaa is A or G or is absent

SEQ ID NO: 76848 - protein, 36 aa, Artificial Sequence; identical to SEQ ID NO: 4556
  GFR-binding peptide
  MOD_RES (1), (33), (34): Xaa is C or S

SEQ ID NO: 76849 - protein, 33 aa, Artificial Sequence; identical to SEQ ID NO: 4557
  GFR-binding peptide
  MOD_RES (33), (33): Xaa is C or S
  MOD_RES (11), (12), (13), (14), (15): Xaa is A or G
  MOD_RES (16), (17), (18), (19): Xaa is A or G or is absent

SEQ ID NO: 76850 - protein, 35 aa, Artificial Sequence; identical to SEQ ID NO: 4558
  GFR-binding peptide
  MOD_RES (2), (2): Xaa is C or S
  MOD_RES (14), (15), (16), (17), (18): Xaa is A or G
  MOD_RES (19), (20), (21), (22): Xaa is A or G or is absent

SEQ ID NO: 76851 - protein, 37 aa, Artificial Sequence; identical to SEQ ID NO: 23636
  GFR-binding peptide
  MOD_RES (34), (35): Xaa is C or S
  MOD_RES (12), (13), (14), (15), (16): Xaa is A or G
  MOD_RES (17), (18), (19), (20): Xaa is A or G or is absent

SEQ ID NO: 76852 - protein, 39 aa, Artificial Sequence; identical to SEQ ID NO: 2637
  GFR-binding peptide
  MOD_RES (2), (4), (37), (38): Xaa is C or S
  MOD_RES (15), (16), (17), (18), (19): Xaa is A or G
  MOD_RES (20), (21), (22), (23): Xaa is A or G or is absent

SEQ ID NO: 76853 - protein, 37 aa, Artificial Sequence; identical to SEQ ID NO: 2638
  GFR-binding peptide
  MOD_RES (1), (33), (34): Xaa is C or S

SEQ ID NO: 76854 - protein, 38 aa, Artificial Sequence; identical to SEQ ID NO: 2639
  GFR-binding peptide
  MOD_RES (34), (34): Xaa is C or S
  MOD_RES (12), (13), (14), (15), (16): Xaa is A or G
  MOD_RES (17), (18), (19), (20): Xaa is A or G or is absent

SEQ ID NO: 76855 - protein, 31 aa, Artificial Sequence; identical to SEQ ID NO: 23644
  GFR-binding peptide

SEQ ID NO: 76856 - protein, 37 aa, Artificial Sequence; identical to SEQ ID NO: 2642
  GFR-binding peptide
  MOD_RES (31), (32): Xaa is C or S

SEQ ID NO: 76857 - protein, 35 aa, Artificial Sequence; identical to SEQ ID NO: 56553
  GFR-binding peptide
  MOD_RES (1), (3), (34), (35): Xaa is C or S

SEQ ID NO: 76858 - protein, 38 aa, Artificial Sequence; identical to SEQ ID NO: 4566
  GFR-binding peptide
  MOD_RES (1), (3), (36), (37): Xaa is C or S
  MOD_RES (14), (15), (16), (17), (18): Xaa is A or G
  MOD_RES (19), (20), (21), (22): Xaa is A or G or is absent

SEQ ID NO: 76859 - protein, 41 aa, Artificial Sequence
  GFR-binding peptide
  MOD_RES (2), (4), (36), (37): Xaa is C or S
RXGXESVAMGQYNKLYTVVGKDLYLISIASLKTPVXXAKSA

SEQ ID NO: 76860 - protein, 37 aa, Artificial Sequence; identical to SEQ ID NO: 2645
  GFR-binding peptide
  MOD_RES (1), (33): Xaa is C or S

SEQ ID NO: 76861 - protein, 32 aa, Artificial Sequence; identical to SEQ ID NO: 2646
  GFR-binding peptide
  MOD_RES (1), (1): Xaa is C or S

SEQ ID NO: 76862 - protein, 37 aa, Artificial Sequence; identical to SEQ ID NO: 60248
  GFR-binding peptide
  MOD_RES (2), (36), (37): Xaa is C or S
  MOD_RES (14), (15), (16), (17), (18): Xaa is A or G
  MOD_RES (19), (20), (21), (22): Xaa is A or G or is absent

SEQ ID NO: 76863 - protein, 38 aa, Artificial Sequence
  GFR-binding peptide
  MOD_RES (34), (35): Xaa is C or S
  MOD_RES (12), (13), (14), (15), (16): Xaa is A or G
  MOD_RES (17), (18), (19), (20): Xaa is A or G or is absent
SEVTMNQYNKLXXXXXXXXXLYLISIASMKEPVXXPEP

SEQ ID NO: 76864 - protein, 39 aa, Artificial Sequence; identical to SEQ ID NO: 4570
  GFR-binding peptide
  MOD_RES (1), (3), (35), (36): Xaa is C or S

SEQ ID NO: 76865 - protein, 36 aa, Artificial Sequence
  GFR-binding peptide
  MOD_RES (2), (4): Xaa is C or S
  MOD_RES (15), (16), (17), (18), (19): Xaa is A or G
  MOD_RES (20), (21), (22), (23): Xaa is A or G or is absent
LXGXEEVIMQYNKLXXXXXXXXXLYLMSIASTKVPA

SEQ ID NO: 76866 - protein, 43 aa, Artificial Sequence; identical to SEQ ID NO: 4571
  GFR-binding peptide
  MOD_RES (2), (4), (38), (39): Xaa is C or S
  MOD_RES (16), (17), (18), (19), (20): Xaa is A or G
  MOD_RES (21), (22), (23), (24): Xaa is A or G or is absent

SEQ ID NO: 76867 - protein, 39 aa, Artificial Sequence; identical to SEQ ID NO: 2652
  GFR-binding peptide
  MOD_RES (2), (4), (35), (36): Xaa is C or S

SEQ ID NO: 76868 - protein, 36 aa, Artificial Sequence; identical to SEQ ID NO: 56558
  GFR-binding peptide
  MOD_RES (2), (4), (35), (36): Xaa is C or S

SEQ ID NO: 76869 - protein, 35 aa, Artificial Sequence; identical to SEQ ID NO: 12006
  GFR-binding peptide
  MOD_RES (2), (2): Xaa is C or S
  MOD_RES (14), (15), (16), (17), (18): Xaa is A or G
  MOD_RES (19), (20), (21), (22): Xaa is A or G or is absent

SEQ ID NO: 76870 - protein, 36 aa, Artificial Sequence; identical to SEQ ID NO: 10135
  GFR-binding peptide
  MOD_RES (2), (34), (35): Xaa is C or S

SEQ ID NO: 76871 - protein, 36 aa, Artificial Sequence; identical to SEQ ID NO: 56563
  GFR-binding peptide
  MOD_RES (1), (3): Xaa is C or S
  MOD_RES (15), (16), (17), (18), (19): Xaa is A or G
  MOD_RES (20), (21), (22), (23): Xaa is A or G or is absent

SEQ ID NO: 76872 - protein, 40 aa, Artificial Sequence; identical to SEQ ID NO: 4578
  GFR-binding peptide
  MOD_RES (1), (3), (36), (37): Xaa is C or S
  MOD_RES (14), (15), (16), (17), (18): Xaa is A or G
  MOD_RES (19), (20), (21), (22): Xaa is A or G or is absent

SEQ ID NO: 76873 - protein, 36 aa, Artificial Sequence; identical to SEQ ID NO: 2657
  GFR-binding peptide
  MOD_RES (1), (3): Xaa is C or S
  MOD_RES (15), (16), (17), (18), (19): Xaa is A or G
  MOD_RES (20), (21), (22), (23): Xaa is A or G or is absent

SEQ ID NO: 76874 - protein, 38 aa, Artificial Sequence; identical to SEQ ID NO: 2658
  GFR-binding peptide
  MOD_RES (1), (3), (37), (38): Xaa is C or S
  MOD_RES (15), (16), (17), (18), (19): Xaa is A or G
  MOD_RES (20), (21), (22), (23): Xaa is A or G or is absent

SEQ ID NO: 76875 - protein, 36 aa, Artificial Sequence; identical to SEQ ID NO: 56567
  GFR-binding peptide
  MOD_RES (2), (35), (36): Xaa is C or S
  MOD_RES (13), (14), (15), (16), (17): Xaa is A or G
  MOD_RES (18), (19), (20), (21): Xaa is A or G or is absent

SEQ ID NO: 76876 - protein, 40 aa, Artificial Sequence; identical to SEQ ID NO: 63794
  GFR-binding peptide
  MOD_RES (2), (4), (36), (37): Xaa is C or S

SEQ ID NO: 76877 - protein, 35 aa, Artificial Sequence; identical to SEQ ID NO: 2659
  GFR-binding peptide
  MOD_RES (2), (4), (35): Xaa is C or S

SEQ ID NO: 76878 - protein, 37 aa, Artificial Sequence; identical to SEQ ID NO: 2660
  GFR-binding peptide
  MOD_RES (2), (33), (34): Xaa is C or S

SEQ ID NO: 76879 - protein, 35 aa, Artificial Sequence; identical to SEQ ID NO: 2661
  GFR-binding peptide
  MOD_RES (1), (3), (34), (35): Xaa is C or S

SEQ ID NO: 76880 - protein, 42 aa, Artificial Sequence; identical to SEQ ID NO: 25670
  GFR-binding peptide
  MOD_RES (2), (4), (38), (39): Xaa is C or S
  MOD_RES (16), (17), (18), (19), (20): Xaa is A or G
  MOD_RES (21), (22), (23), (24): Xaa is A or G or is absent

SEQ ID NO: 76881 - protein, 38 aa, Artificial Sequence; identical to SEQ ID NO: 2662
  GFR-binding peptide
  MOD_RES (1), (3), (37), (38): Xaa is C or S
  MOD_RES (15), (16), (17), (18), (19): Xaa is A or G
  MOD_RES (20), (21), (22), (23): Xaa is A or G or is absent

SEQ ID NO: 76882 - protein, 34 aa, Artificial Sequence; identical to SEQ ID NO: 25672
  GFR-binding peptide
  MOD_RES (34), (34): Xaa is C or S
  MOD_RES (12), (13), (14), (15), (16): Xaa is A or G
  MOD_RES (17), (18), (19), (20): Xaa is A or G or is absent

SEQ ID NO: 76883 - protein, 33 aa, Artificial Sequence
  GFR-binding peptide
  MOD_RES (32), (33): Xaa is C or S
SEVTMNQYNKLVVNKNEDLYLISIASMKEPVXX

SEQ ID NO: 76884 - protein, 37 aa, Artificial Sequence; identical to SEQ ID NO: 4583
  GFR-binding peptide
  MOD_RES (2), (35), (36): Xaa is C or S
  MOD_RES (13), (14), (15), (16), (17): Xaa is A or G
  MOD_RES (18), (19), (20), (21): Xaa is A or G or is absent

SEQ ID NO: 76885 - protein, 37 aa, Artificial Sequence; identical to SEQ ID NO: 2663
  GFR-binding peptide
  MOD_RES (33), (34): Xaa is C or S
  MOD_RES (11), (12), (13), (14), (15): Xaa is A or G
  MOD_RES (16), (17), (18), (19): Xaa is A or G or is absent

SEQ ID NO: 76886 - protein, 36 aa, Artificial Sequence; identical to SEQ ID NO: 2664
  GFR-binding peptide
  MOD_RES (2), (36): Xaa is C or S
  MOD_RES (14), (15), (16), (17), (18): Xaa is A or G
  MOD_RES (19), (20), (21), (22): Xaa is A or G or is absent

SEQ ID NO: 76887 - protein, 38 aa, Artificial Sequence; identical to SEQ ID NO: 56577
  GFR-binding peptide
  MOD_RES (1), (33), (34): Xaa is C or S

SEQ ID NO: 76888 - protein, 31 aa, Artificial Sequence; identical to SEQ ID NO: 4585
  GFR-binding peptide

SEQ ID NO: 76889 - protein, 35 aa, Artificial Sequence; identical to SEQ ID NO: 10150
  GFR-binding peptide
  MOD_RES (1), (35): Xaa is C or S
  MOD_RES (13), (14), (15), (16), (17): Xaa is A or G
  MOD_RES (18), (19), (20), (21): Xaa is A or G or is absent

SEQ ID NO: 76890 - protein, 35 aa, Artificial Sequence; identical to SEQ ID NO: 4588
  GFR-binding peptide
  MOD_RES (2), (35): Xaa is C or S
  MOD_RES (13), (14), (15), (16), (17): Xaa is A or G
  MOD_RES (18), (19), (20), (21): Xaa is A or G or is absent

SEQ ID NO: 76891 - protein, 33 aa, Artificial Sequence; identical to SEQ ID NO: 2667
  GFR-binding peptide
  MOD_RES (1), (1): Xaa is C or S
  MOD_RES (12), (13), (14), (15), (16): Xaa is A or G
  MOD_RES (17), (18), (19), (20): Xaa is A or G or is absent

SEQ ID NO: 76892 - protein, 39 aa, Artificial Sequence; identical to SEQ ID NO: 23667
  GFR-binding peptide
  MOD_RES (33), (34): Xaa is C or S
  MOD_RES (11), (12), (13), (14), (15): Xaa is A or G
  MOD_RES (16), (17), (18), (19): Xaa is A or G or is absent

SEQ ID NO: 76893 - protein, 34 aa, Artificial Sequence; identical to SEQ ID NO: 2668
  GFR-binding peptide
  MOD_RES (31), (31): Xaa is C or S

SEQ ID NO: 76894 - protein, 39 aa, Artificial Sequence; identical to SEQ ID NO: 2672
  GFR-binding peptide
  MOD_RES (1), (33), (34): Xaa is C or S

SEQ ID NO: 76895 - protein, 37 aa, Artificial Sequence; identical to SEQ ID NO: 4589
  GFR-binding peptide
  MOD_RES (1), (35), (36): Xaa is C or S
  MOD_RES (13), (14), (15), (16), (17): Xaa is A or G
  MOD_RES (18), (19), (20), (21): Xaa is A or G or is absent

SEQ ID NO: 76896 - protein, 38 aa, Artificial Sequence; identical to SEQ ID NO: 10159
  GFR-binding peptide
  MOD_RES (34), (35): Xaa is C or S
  MOD_RES (12), (13), (14), (15), (16): Xaa is A or G
  MOD_RES (17), (18), (19), (20): Xaa is A or G or is absent

SEQ ID NO: 76897 - protein, 38 aa, Artificial Sequence; identical to SEQ ID NO: 2675
  GFR-binding peptide
  MOD_RES (2), (4), (38): Xaa is C or S
  MOD_RES (16), (17), (18), (19), (20): Xaa is A or G
  MOD_RES (21), (22), (23), (24): Xaa is A or G or is absent

SEQ ID NO: 76898 - protein, 33 aa, Artificial Sequence; identical to SEQ ID NO: 4591
  GFR-binding peptide
  MOD_RES (31), (31): Xaa is C or S

SEQ ID NO: 76899 - protein, 33 aa, Artificial Sequence; identical to SEQ ID NO: 4592
  GFR-binding peptide
  MOD_RES (1), (32), (33): Xaa is C or S

SEQ ID NO: 76900 - protein, 37 aa, Artificial Sequence; identical to SEQ ID NO: 12023
  GFR-binding peptide
  MOD_RES (1), (3), (35), (36): Xaa is C or S

SEQ ID NO: 76901 - protein, 36 aa, Artificial Sequence; identical to SEQ ID NO: 2677
  GFR-binding peptide
  MOD_RES (1), (3), (36): Xaa is C or S
  MOD_RES (14), (15), (16), (17), (18): Xaa is A or G
  MOD_RES (19), (20), (21), (22): Xaa is A or G or is absent

SEQ ID NO: 76902 - protein, 41 aa, Artificial Sequence; identical to SEQ ID NO: 4595
  GFR-binding peptide
  MOD_RES (1), (35), (36): Xaa is C or S
  MOD_RES (13), (14), (15), (16), (17): Xaa is A or G
  MOD_RES (18), (19), (20), (21): Xaa is A or G or is absent

SEQ ID NO: 76903 - protein, 42 aa, Artificial Sequence; identical to SEQ ID NO: 56589
  GFR-binding peptide
  MOD_RES (2), (4), (38), (39): Xaa is C or S
  MOD_RES (16), (17), (18), (19), (20): Xaa is A or G
  MOD_RES (21), (22), (23), (24): Xaa is A or G or is absent

SEQ ID NO: 76904 - protein, 36 aa, Artificial Sequence; identical to SEQ ID NO: 4596
  GFR-binding peptide
  MOD_RES (1), (33), (34): Xaa is C or S

SEQ ID NO: 76905 - protein, 38 aa, Artificial Sequence; identical to SEQ ID NO: 12026
  GFR-binding peptide
  MOD_RES (1), (3), (37), (38): Xaa is C or S
  MOD_RES (15), (16), (17), (18), (19): Xaa is A or G
  MOD_RES (20), (21), (22), (23): Xaa is A or G or is absent

SEQ ID NO: 76906 - protein, 37 aa, Artificial Sequence; identical to SEQ ID NO: 56590
  GFR-binding peptide
  MOD_RES (2), (36), (37): Xaa is C or S
  MOD_RES (14), (15), (16), (17), (18): Xaa is A or G
  MOD_RES (19), (20), (21), (22): Xaa is A or G or is absent

SEQ ID NO: 76907 - protein, 36 aa, Artificial Sequence; identical to SEQ ID NO: 4597
  GFR-binding peptide
  MOD_RES (33), (34): Xaa is C or S
  MOD_RES (11), (12), (13), (14), (15): Xaa is A or G
  MOD_RES (16), (17), (18), (19): Xaa is A or G or is absent

SEQ ID NO: 76908 - protein, 35 aa, Artificial Sequence; identical to SEQ ID NO: 2680
  GFR-binding peptide
  MOD_RES (1), (3), (35): Xaa is C or S

SEQ ID NO: 76909 - protein, 36 aa, Artificial Sequence; identical to SEQ ID NO: 2681
  GFR-binding peptide
  MOD_RES (32), (33): Xaa is C or S

SEQ ID NO: 76910 - protein, 34 aa, Artificial Sequence; identical to SEQ ID NO: 4601
  GFR-binding peptide
  MOD_RES (1), (3), (34): Xaa is C or S

SEQ ID NO: 76911 - protein, 36 aa, Artificial Sequence; identical to SEQ ID NO: 12031
  GFR-binding peptide
  MOD_RES (2), (4), (36): Xaa is C or S

SEQ ID NO: 76912 - protein, 35 aa, Artificial Sequence
  GFR-binding peptide
  MOD_RES (1), (33), (34): Xaa is C or S
XAEVVMDQYNKLVVNNAADLYLISIASLRAPVXXS

SEQ ID NO: 76913 - protein, 34 aa, Artificial Sequence; identical to SEQ ID NO: 56596
  GFR-binding peptide
  MOD_RES (34), (34): Xaa is C or S
  MOD_RES (12), (13), (14), (15), (16): Xaa is A or G
  MOD_RES (17), (18), (19), (20): Xaa is A or G or is absent

SEQ ID NO: 76914 - protein, 32 aa, Artificial Sequence
  GFR-binding peptide
  MOD_RES (31), (32): Xaa is C or S
DVVMGQYNKLIIQQKDNLYLMSIASMKTPTXX

SEQ ID NO: 76915 - protein, 40 aa, Artificial Sequence
  GFR-binding peptide
  MOD_RES (1), (3), (35), (36): Xaa is C or S
XGXAEVVMDQYNKLVVNNAADLYLISIASLRAPVXXSAPA

SEQ ID NO: 76916 - protein, 33 aa, Artificial Sequence
  GFR-binding peptide
  MOD_RES (1), (3): Xaa is C or S
XGXEEVIMQYNKLLLVRGNDLYLMSIASTKVPA

SEQ ID NO: 76917 - protein, 39 aa, Artificial Sequence; identical to SEQ ID NO: 4606
  GFR-binding peptide
  MOD_RES (2), (34), (35): Xaa is C or S

SEQ ID NO: 76918 - protein, 35 aa, Artificial Sequence; identical to SEQ ID NO: 2683
  GFR-binding peptide
  MOD_RES (32), (32): Xaa is C or S

SEQ ID NO: 76919 - protein, 38 aa, Artificial Sequence; identical to SEQ ID NO: 4609
  GFR-binding peptide
  MOD_RES (1), (36), (37): Xaa is C or S
  MOD_RES (14), (15), (16), (17), (18): Xaa is A or G
  MOD_RES (19), (20), (21), (22): Xaa is A or G or is absent

SEQ ID NO: 76920 - protein, 33 aa, Artificial Sequence
  GFR-binding peptide
  MOD_RES (31), (32): Xaa is C or S
EEVIMQYNKLLLVRGNDLYLMSIASTKVPAXXT

SEQ ID NO: 76921 - protein, 35 aa, Artificial Sequence
  GFR-binding peptide
  MOD_RES (2), (2): Xaa is C or S
  MOD_RES (14), (15), (16), (17), (18): Xaa is A or G
  MOD_RES (19), (20), (21), (22): Xaa is A or G or is absent
AXSEVTMNQYNKLXXXXXXXXXLYLISIASMKEPV

SEQ ID NO: 76922 - protein, 43 aa, Artificial Sequence; identical to SEQ ID NO: 23694
  GFR-binding peptide
  MOD_RES (2), (4), (38), (39): Xaa is C or S
  MOD_RES (16), (17), (18), (19), (20): Xaa is A or G
  MOD_RES (21), (22), (23), (24): Xaa is A or G or is absent

SEQ ID NO: 76923 - protein, 36 aa, Artificial Sequence; identical to SEQ ID NO: 2695
  GFR-binding peptide
  MOD_RES (32), (33): Xaa is C or S

SEQ ID NO: 76924 - protein, 33 aa, Artificial Sequence; identical to SEQ ID NO: 12037
  GFR-binding peptide
  MOD_RES (33), (33): Xaa is C or S
  MOD_RES (11), (12), (13), (14), (15): Xaa is A or G
  MOD_RES (16), (17), (18), (19): Xaa is A or G or is absent

SEQ ID NO: 76925 - protein, 36 aa, Artificial Sequence; identical to SEQ ID NO: 4614
  GFR-binding peptide
  MOD_RES (1), (3), (35), (36): Xaa is C or S

SEQ ID NO: 76926 - protein, 37 aa, Artificial Sequence; identical to SEQ ID NO: 25707
  GFR-binding peptide
  MOD_RES (2), (4): Xaa is C or S
  MOD_RES (16), (17), (18), (19), (20): Xaa is A or G
  MOD_RES (21), (22), (23), (24): Xaa is A or G or is absent

SEQ ID NO: 76927 - protein, 37 aa, Artificial Sequence; identical to SEQ ID NO: 4616
  GFR-binding peptide
  MOD_RES (2), (34), (35): Xaa is C or S

SEQ ID NO: 76928 - protein, 43 aa, Artificial Sequence; identical to SEQ ID NO: 2696
  GFR-binding peptide
  MOD_RES (1), (3), (38), (39): Xaa is C or S
  MOD_RES (16), (17), (18), (19), (20): Xaa is A or G
  MOD_RES (21), (22), (23), (24): Xaa is A or G or is absent

SEQ ID NO: 76929 - protein, 41 aa, Artificial Sequence; identical to SEQ ID NO: 2697
  GFR-binding peptide
  MOD_RES (1), (35), (36): Xaa is C or S
  MOD_RES (13), (14), (15), (16), (17): Xaa is A or G
  MOD_RES (18), (19), (20), (21): Xaa is A or G or is absent

SEQ ID NO: 76930 - protein, 34 aa, Artificial Sequence; identical to SEQ ID NO: 2698
  GFR-binding peptide
  MOD_RES (2), (4): Xaa is C or S

SEQ ID NO: 76931 - protein, 38 aa, Artificial Sequence; identical to SEQ ID NO: 4620
  GFR-binding peptide
  MOD_RES (1), (3), (36), (37): Xaa is C or S

SEQ ID NO: 76932 - protein, 34 aa, Artificial Sequence
  GFR-binding peptide
  MOD_RES (34), (34): Xaa is C or S
  MOD_RES (12), (13), (14), (15), (16): Xaa is A or G
  MOD_RES (17), (18), (19), (20): Xaa is A or G or is absent
AEVVMDQYNKLXXXXXXXXXLYLISIASLRAPVX

SEQ ID NO: 76933 - protein, 37 aa, Artificial Sequence; identical to SEQ ID NO: 4624
  GFR-binding peptide
  MOD_RES (1), (3), (35): Xaa is C or S

SEQ ID NO: 76934 - protein, 30 aa, Artificial Sequence; identical to SEQ ID NO: 2703
  GFR-binding peptide

SEQ ID NO: 76935 - protein, 36 aa, Artificial Sequence; identical to SEQ ID NO: 4625
  GFR-binding peptide
  MOD_RES (1), (32), (33): Xaa is C or S

SEQ ID NO: 76936 - protein, 35 aa, Artificial Sequence; identical to SEQ ID NO: 2705
  GFR-binding peptide
  MOD_RES (2), (34), (35): Xaa is C or S

SEQ ID NO: 76937 - protein, 34 aa, Artificial Sequence; identical to SEQ ID NO: 4626
  GFR-binding peptide
  MOD_RES (31), (32): Xaa is C or S

SEQ ID NO: 76938 - protein, 41 aa, Artificial Sequence
  GFR-binding peptide
  MOD_RES (1), (3), (37), (38): Xaa is C or S
  MOD_RES (15), (16), (17), (18), (19): Xaa is A or G
  MOD_RES (20), (21), (22), (23): Xaa is A or G or is absent
XAXSEVTMNQYNKLXXXXXXXXXLYLISIASMKEPVXXPEP

SEQ ID NO: 76939 - protein, 38 aa, Artificial Sequence; identical to SEQ ID NO: 56620
  GFR-binding peptide
  MOD_RES (1), (34), (35): Xaa is C or S
  MOD_RES (12), (13), (14), (15), (16): Xaa is A or G
  MOD_RES (17), (18), (19), (20): Xaa is A or G or is absent

SEQ ID NO: 76940 - protein, 33 aa, Artificial Sequence; identical to SEQ ID NO: 4627
  GFR-binding peptide
  MOD_RES (1), (3): Xaa is C or S

SEQ ID NO: 76941 - protein, 33 aa, Artificial Sequence; identical to SEQ ID NO: 10191
  GFR-binding peptide
  MOD_RES (32), (33): Xaa is C or S

SEQ ID NO: 76942 - protein, 37 aa, Artificial Sequence; identical to SEQ ID NO: 4629
  GFR-binding peptide
  MOD_RES (2), (34), (35): Xaa is C or S

SEQ ID NO: 76943 - protein, 39 aa, Artificial Sequence; identical to SEQ ID NO: 4630
  GFR-binding peptide
  MOD_RES (1), (34), (35): Xaa is C or S
  MOD_RES (12), (13), (14), (15), (16): Xaa is A or G
  MOD_RES (17), (18), (19), (20): Xaa is A or G or is absent

SEQ ID NO: 76944 - protein, 37 aa, Artificial Sequence; identical to SEQ ID NO: 4631
  GFR-binding peptide
  MOD_RES (1), (3), (37): Xaa is C or S
  MOD_RES (15), (16), (17), (18), (19): Xaa is A or G
  MOD_RES (20), (21), (22), (23): Xaa is A or G or is absent

SEQ ID NO: 76945 - protein, 34 aa, Artificial Sequence; identical to SEQ ID NO: 56623
  GFR-binding peptide
  MOD_RES (33), (34): Xaa is C or S
  MOD_RES (11), (12), (13), (14), (15): Xaa is A or G
  MOD_RES (16), (17), (18), (19): Xaa is A or G or is absent

SEQ ID NO: 76946 - protein, 42 aa, Artificial Sequence; identical to SEQ ID NO: 4632
  GFR-binding peptide
  MOD_RES (1), (3), (37), (38): Xaa is C or S
  MOD_RES (15), (16), (17), (18), (19): Xaa is A or G
  MOD_RES (20), (21), (22), (23): Xaa is A or G or is absent

SEQ ID NO: 76947 - protein, 41 aa, Artificial Sequence; identical to SEQ ID NO: 25720
  GFR-binding peptide
  MOD_RES (2), (36), (37): Xaa is C or S
  MOD_RES (14), (15), (16), (17), (18): Xaa is A or G
  MOD_RES (19), (20), (21), (22): Xaa is A or G or is absent

SEQ ID NO: 76948 - protein, 34 aa, Artificial Sequence; identical to SEQ ID NO: 25721
  GFR-binding peptide
  MOD_RES (33), (34): Xaa is C or S
  MOD_RES (11), (12), (13), (14), (15): Xaa is A or G
  MOD_RES (16), (17), (18), (19): Xaa is A or G or is absent

SEQ ID NO: 76949 - protein, 34 aa, Artificial Sequence; identical to SEQ ID NO: 2709
  GFR-binding peptide
  MOD_RES (1), (1): Xaa is C or S
  MOD_RES (13), (14), (15), (16), (17): Xaa is A or G
  MOD_RES (18), (19), (20), (21): Xaa is A or G or is absent

SEQ ID NO: 76950 - protein, 39 aa, Artificial Sequence; identical to SEQ ID NO: 2710
  GFR-binding peptide
  MOD_RES (1), (3), (35), (36): Xaa is C or S

SEQ ID NO: 76951 - protein, 38 aa, Artificial Sequence
  GFR-binding peptide
  MOD_RES (2), (36), (37): Xaa is C or S
  MOD_RES (14), (15), (16), (17), (18): Xaa is A or G
  MOD_RES (19), (20), (21), (22): Xaa is A or G or is absent
GXRDVVMGQYNKLXXXXXXXXXLYLMSIASMKTPTXXP

SEQ ID NO: 76952 - protein, 38 aa, Artificial Sequence; identical to SEQ ID NO: 4633
  GFR-binding peptide
  MOD_RES (2), (4), (36), (37): Xaa is C or S

SEQ ID NO: 76953 - protein, 36 aa, Artificial Sequence
  GFR-binding peptide
  MOD_RES (1), (3), (35), (36): Xaa is C or S
XGXRDVVMGQYNKLIIQQKDNLYLMSIASMKTPTXX

SEQ ID NO: 76954 - protein, 34 aa, Artificial Sequence; identical to SEQ ID NO: 2714
  GFR-binding peptide
  MOD_RES (34), (34): Xaa is C or S
  MOD_RES (12), (13), (14), (15), (16): Xaa is A or G
  MOD_RES (17), (18), (19), (20): Xaa is A or G or is absent

SEQ ID NO: 76955 - protein, 34 aa, Artificial Sequence; identical to SEQ ID NO: 2715
  GFR-binding peptide
  MOD_RES (1), (34): Xaa is C or S

SEQ ID NO: 76956 - protein, 33 aa, Artificial Sequence
  GFR-binding peptide
  MOD_RES (12), (13), (14), (15), (16): Xaa is A or G
  MOD_RES (17), (18), (19), (20): Xaa is A or G or is absent
SEVTMNQYNKLXXXXXXXXXLYLISIASMKEPV

SEQ ID NO: 76957 - protein, 39 aa, Artificial Sequence; identical to SEQ ID NO: 4637
  GFR-binding peptide
  MOD_RES (2), (4), (36), (37): Xaa is C or S

SEQ ID NO: 76958 - protein, 39 aa, Artificial Sequence; identical to SEQ ID NO: 2718
  GFR-binding peptide
  MOD_RES (1), (3), (37), (38): Xaa is C or S
  MOD_RES (15), (16), (17), (18), (19): Xaa is A or G
  MOD_RES (20), (21), (22), (23): Xaa is A or G or is absent

SEQ ID NO: 76959 - protein, 36 aa, Artificial Sequence
  GFR-binding peptide
  MOD_RES (32), (33): Xaa is C or S
RDVVMGQYNKLIIQQKDNLYLMSIASMKTPTXXPGA

SEQ ID NO: 76960 - protein, 34 aa, Artificial Sequence; identical to SEQ ID NO: 4638
  GFR-binding peptide
  MOD_RES (2), (2): Xaa is C or S

SEQ ID NO: 76961 - protein, 35 aa, Artificial Sequence
  GFR-binding peptide
  MOD_RES (2), (2): Xaa is C or S
  MOD_RES (14), (15), (16), (17), (18): Xaa is A or G
  MOD_RES (19), (20), (21), (22): Xaa is A or G or is absent
GXRDVVMGQYNKLXXXXXXXXXLYLMSIASMKTPT

SEQ ID NO: 76962 - protein, 35 aa, Artificial Sequence; identical to SEQ ID NO: 2719
  GFR-binding peptide
  MOD_RES (34), (35): Xaa is C or S
  MOD_RES (12), (13), (14), (15), (16): Xaa is A or G
  MOD_RES (17), (18), (19), (20): Xaa is A or G or is absent

SEQ ID NO: 76963 - protein, 32 aa, Artificial Sequence; identical to SEQ ID NO: 10203
  GFR-binding peptide
  MOD_RES (32), (32): Xaa is C or S

SEQ ID NO: 76964 - protein, 41 aa, Artificial Sequence; identical to SEQ ID NO: 4639
  GFR-binding peptide
  MOD_RES (2), (4), (36), (37): Xaa is C or S

SEQ ID NO: 76965 - protein, 38 aa, Artificial Sequence; identical to SEQ ID NO: 4641
  GFR-binding peptide
  MOD_RES (1), (3), (34), (35): Xaa is C or S

SEQ ID NO: 76966 - protein, 40 aa, Artificial Sequence
  GFR-binding peptide
  MOD_RES (2), (4), (36), (37): Xaa is C or S
RXAXSEVTMNQYNKLVVNKNEDLYLISIASMKEPVXXPEP

SEQ ID NO: 76967 - protein, 38 aa, Artificial Sequence; identical to SEQ ID NO: 56640
  GFR-binding peptide
  MOD_RES (2), (33), (34): Xaa is C or S

SEQ ID NO: 76968 - protein, 34 aa, Artificial Sequence; identical to SEQ ID NO: 56641
  GFR-binding peptide
  MOD_RES (1), (34): Xaa is C or S
  MOD_RES (12), (13), (14), (15), (16): Xaa is A or G
  MOD_RES (17), (18), (19), (20): Xaa is A or G or is absent

SEQ ID NO: 76969 - protein, 39 aa, Artificial Sequence; identical to SEQ ID NO: 4643
  GFR-binding peptide
  MOD_RES (2), (35), (36): Xaa is C or S
  MOD_RES (13), (14), (15), (16), (17): Xaa is A or G
  MOD_RES (18), (19), (20), (21): Xaa is A or G or is absent

SEQ ID NO: 76970 - protein, 38 aa, Artificial Sequence; identical to SEQ ID NO: 56642
  GFR-binding peptide
  MOD_RES (1), (35), (36): Xaa is C or S
  MOD_RES (13), (14), (15), (16), (17): Xaa is A or G
  MOD_RES (18), (19), (20), (21): Xaa is A or G or is absent

SEQ ID NO: 76971 - protein, 34 aa, Artificial Sequence; identical to SEQ ID NO: 25734
  GFR-binding peptide
  MOD_RES (31), (32): Xaa is C or S

SEQ ID NO: 76972 - protein, 38 aa, Artificial Sequence; identical to SEQ ID NO: 4645
  GFR-binding peptide
  MOD_RES (1), (34), (35): Xaa is C or S
  MOD_RES (12), (13), (14), (15), (16): Xaa is A or G
  MOD_RES (17), (18), (19), (20): Xaa is A or G or is absent

SEQ ID NO: 76973 - protein, 33 aa, Artificial Sequence; identical to SEQ ID NO: 25738
  GFR-binding peptide
  MOD_RES (1), (33): Xaa is C or S

SEQ ID NO: 76974 - protein, 36 aa, Artificial Sequence; identical to SEQ ID NO: 2728
  GFR-binding peptide
  MOD_RES (2), (35), (36): Xaa is C or S
  MOD_RES (13), (14), (15), (16), (17): Xaa is A or G
  MOD_RES (18), (19), (20), (21): Xaa is A or G or is absent

SEQ ID NO: 76975 - protein, 40 aa, Artificial Sequence; identical to SEQ ID NO: 12079
  GFR-binding peptide
  MOD_RES (1), (3), (37), (38): Xaa is C or S
  MOD_RES (15), (16), (17), (18), (19): Xaa is A or G
  MOD_RES (20), (21), (22), (23): Xaa is A or G or is absent

SEQ ID NO: 76976 - protein, 39 aa, Artificial Sequence; identical to SEQ ID NO: 56648
  GFR-binding peptide
  MOD_RES (1), (33), (34): Xaa is C or S

SEQ ID NO: 76977 - protein, 38 aa, Artificial Sequence; identical to SEQ ID NO: 4649
  GFR-binding peptide
  MOD_RES (1), (3), (34), (35): Xaa is C or S

SEQ ID NO: 76978 - protein, 35 aa, Artificial Sequence; identical to SEQ ID NO: 23722
  GFR-binding peptide
  MOD_RES (1), (3), (35): Xaa is C or S

SEQ ID NO: 76979 - protein, 35 aa, Artificial Sequence; identical to SEQ ID NO: 4652
  GFR-binding peptide
  MOD_RES (33), (34): Xaa is C or S
  MOD_RES (11), (12), (13), (14), (15): Xaa is A or G
  MOD_RES (16), (17), (18), (19): Xaa is A or G or is absent

SEQ ID NO: 76980 - protein, 31 aa, Artificial Sequence
  GFR-binding peptide
RDVVMGQYNKLIIQQKDNLYLMSIASMKTPT

SEQ ID NO: 76981 - protein, 41 aa, Artificial Sequence; identical to SEQ ID NO: 10215
  GFR-binding peptide
  MOD_RES (1), (35), (36): Xaa is C or S
  MOD_RES (13), (14), (15), (16), (17): Xaa is A or G
  MOD_RES (18), (19), (20), (21): Xaa is A or G or is absent

SEQ ID NO: 76982 - protein, 36 aa, Artificial Sequence; identical to SEQ ID NO: 2734
  GFR-binding peptide
  MOD_RES (2), (34), (35): Xaa is C or S

SEQ ID NO: 76983 - protein, 36 aa, Artificial Sequence; identical to SEQ ID NO: 2735
  GFR-binding peptide
  MOD_RES (2), (34), (35): Xaa is C or S

SEQ ID NO: 76984 - protein, 36 aa, Artificial Sequence; identical to SEQ ID NO: 25749
  GFR-binding peptide
  MOD_RES (1), (35), (36): Xaa is C or S
  MOD_RES (13), (14), (15), (16), (17): Xaa is A or G
  MOD_RES (18), (19), (20), (21): Xaa is A or G or is absent

SEQ ID NO: 76985 - protein, 32 aa, Artificial Sequence; identical to SEQ ID NO: 2736
  GFR-binding peptide
  MOD_RES (31), (32): Xaa is C or S

SEQ ID NO: 76986 - protein, 30 aa, Artificial Sequence; identical to SEQ ID NO: 2738
  GFR-binding peptide

SEQ ID NO: 76987 - protein, 40 aa, Artificial Sequence; identical to SEQ ID NO: 2739
  GFR-binding peptide
  MOD_RES (2), (4), (36), (37): Xaa is C or S

SEQ ID NO: 76988 - protein, 33 aa, Artificial Sequence; identical to SEQ ID NO: 2740
  GFR-binding peptide
  MOD_RES (32), (33): Xaa is C or S

SEQ ID NO: 76989 - protein, 38 aa, Artificial Sequence; identical to SEQ ID NO: 60327
  GFR-binding peptide
  MOD_RES (2), (34), (35): Xaa is C or S

SEQ ID NO: 76990 - protein, 34 aa, Artificial Sequence; identical to SEQ ID NO: 4658
  GFR-binding peptide
  MOD_RES (34), (34): Xaa is C or S
  MOD_RES (12), (13), (14), (15), (16): Xaa is A or G
  MOD_RES (17), (18), (19), (20): Xaa is A or G or is absent

SEQ ID NO: 76991 - protein, 36 aa, Artificial Sequence
  GFR-binding peptide
  MOD_RES (2), (36): Xaa is C or S
  MOD_RES (14), (15), (16), (17), (18): Xaa is A or G
  MOD_RES (19), (20), (21), (22): Xaa is A or G or is absent
GXESVAMGQYNKLXXXXXXXXXLYLISIASLKTPVX

SEQ ID NO: 76992 - protein, 39 aa, Artificial Sequence; identical to SEQ ID NO: 4659
  GFR-binding peptide
  MOD_RES (2), (37), (38): Xaa is C or S
  MOD_RES (15), (16), (17), (18), (19): Xaa is A or G
  MOD_RES (20), (21), (22), (23): Xaa is A or G or is absent

SEQ ID NO: 76993 - protein, 33 aa, Artificial Sequence; identical to SEQ ID NO: 2741
  GFR-binding peptide
  MOD_RES (1), (33): Xaa is C or S

SEQ ID NO: 76994 - protein, 36 aa, Artificial Sequence
  GFR-binding peptide
  MOD_RES (32), (33): Xaa is C or S
ESVAMGQYNKLYTVVGKDLYLISIASLKTPVXXAKS

SEQ ID NO: 76995 - protein, 32 aa, Artificial Sequence; identical to SEQ ID NO: 10224
  GFR-binding peptide
  MOD_RES (11), (12), (13), (14), (15): Xaa is A or G
  MOD_RES (16), (17), (18), (19): Xaa is A or G or is absent

SEQ ID NO: 76996 - protein, 31 aa, Artificial Sequence; identical to SEQ ID NO: 4662
  GFR-binding peptide

SEQ ID NO: 76997 - protein, 35 aa, Artificial Sequence; identical to SEQ ID NO: 4663
  GFR-binding peptide
  MOD_RES (33), (34): Xaa is C or S
  MOD_RES (11), (12), (13), (14), (15): Xaa is A or G
  MOD_RES (16), (17), (18), (19): Xaa is A or G or is absent

SEQ ID NO: 76998 - protein, 31 aa, Artificial Sequence; identical to SEQ ID NO: 2743
  GFR-binding peptide
  MOD_RES (31), (31): Xaa is C or S

SEQ ID NO: 76999 - protein, 35 aa, Artificial Sequence; identical to SEQ ID NO: 2745
  GFR-binding peptide
  MOD_RES (1), (33), (34): Xaa is C or S

SEQ ID NO: 77000 - protein, 36 aa, Artificial Sequence
  GFR-binding peptide
  MOD_RES (1), (33), (34): Xaa is C or S
XRDVVMGQYNKLIIQQKDNLYLMSIASMKTPTXXPG

SEQ ID NO: 77001 - protein, 40 aa, Artificial Sequence; identical to SEQ ID NO: 4666
  GFR-binding peptide
  MOD_RES (1), (3), (35), (36): Xaa is C or S

SEQ ID NO: 77002 - protein, 31 aa, Artificial Sequence; identical to SEQ ID NO: 2746
  GFR-binding peptide
  MOD_RES (1), (1): Xaa is C or S

SEQ ID NO: 77003 - protein, 38 aa, Artificial Sequence; identical to SEQ ID NO: 4667
  GFR-binding peptide
  MOD_RES (33), (34): Xaa is C or S
  MOD_RES (11), (12), (13), (14), (15): Xaa is A or G
  MOD_RES (16), (17), (18), (19): Xaa is A or G or is absent

SEQ ID NO: 77004 - protein, 36 aa, Artificial Sequence; identical to SEQ ID NO: 56670
  GFR-binding peptide
  MOD_RES (1), (3), (34), (35): Xaa is C or S

SEQ ID NO: 77005 - protein, 39 aa, Artificial Sequence; identical to SEQ ID NO: 2747
  GFR-binding peptide
  MOD_RES (1), (34), (35): Xaa is C or S
  MOD_RES (12), (13), (14), (15), (16): Xaa is A or G
  MOD_RES (17), (18), (19), (20): Xaa is A or G or is absent

SEQ ID NO: 77006 - protein, 38 aa, Artificial Sequence; identical to SEQ ID NO: 60340
  GFR-binding peptide
  MOD_RES (34), (35): Xaa is C or S
  MOD_RES (12), (13), (14), (15), (16): Xaa is A or G
  MOD_RES (17), (18), (19), (20): Xaa is A or G or is absent

SEQ ID NO: 77007 - protein, 38 aa, Artificial Sequence; identical to SEQ ID NO: 56673
  GFR-binding peptide
  MOD_RES (2), (35), (36): Xaa is C or S
  MOD_RES (13), (14), (15), (16), (17): Xaa is A or G
  MOD_RES (18), (19), (20), (21): Xaa is A or G or is absent

SEQ ID NO: 77008 - protein, 38 aa, Artificial Sequence
  GFR-binding peptide
  MOD_RES (2), (4), (38): Xaa is C or S
  MOD_RES (16), (17), (18), (19), (20): Xaa is A or G
  MOD_RES (21), (22), (23), (24): Xaa is A or G or is absent
RXGXAEVVMDQYNKLXXXXXXXXXLYLISIASLRAPVX

SEQ ID NO: 77009 - protein, 39 aa, Artificial Sequence; identical to SEQ ID NO: 56674
  GFR-binding peptide
  MOD_RES (2), (4), (38), (39): Xaa is C or S
  MOD_RES (16), (17), (18), (19), (20): Xaa is A or G
  MOD_RES (21), (22), (23), (24): Xaa is A or G or is absent

SEQ ID NO: 77010 - protein, 40 aa, Artificial Sequence; identical to SEQ ID NO: 56675
  GFR-binding peptide
  MOD_RES (1), (3), (37), (38): Xaa is C or S
  MOD_RES (15), (16), (17), (18), (19): Xaa is A or G
  MOD_RES (20), (21), (22), (23): Xaa is A or G or is absent

SEQ ID NO: 77011 - protein, 38 aa, Artificial Sequence; identical to SEQ ID NO: 63887
  GFR-binding peptide
  MOD_RES (33), (34): Xaa is C or S
  MOD_RES (11), (12), (13), (14), (15): Xaa is A or G
  MOD_RES (16), (17), (18), (19): Xaa is A or G or is absent

SEQ ID NO: 77012 - protein, 38 aa, Artificial Sequence
  GFR-binding peptide
  MOD_RES (1), (35), (36): Xaa is C or S
  MOD_RES (13), (14), (15), (16), (17): Xaa is A or G
  MOD_RES (18), (19), (20), (21): Xaa is A or G or is absent
XAEVVMDQYNKLXXXXXXXXXLYLISIASLRAPVXXSA

SEQ ID NO: 77013 - protein, 33 aa, Artificial Sequence; identical to SEQ ID NO: 4674
  GFR-binding peptide
  MOD_RES (1), (1): Xaa is C or S
  MOD_RES (12), (13), (14), (15), (16): Xaa is A or G
  MOD_RES (17), (18), (19), (20): Xaa is A or G or is absent

SEQ ID NO: 77014 - protein, 41 aa, Artificial Sequence; identical to SEQ ID NO: 2751
  GFR-binding peptide
  MOD_RES (2), (4), (37), (38): Xaa is C or S
  MOD_RES (15), (16), (17), (18), (19): Xaa is A or G
  MOD_RES (20), (21), (22), (23): Xaa is A or G or is absent

SEQ ID NO: 77015 - protein, 32 aa, Artificial Sequence
  GFR-binding peptide
  MOD_RES (1), (1): Xaa is C or S
XRDVVMGQYNKLIIQQKDNLYLMSIASMKTPT

SEQ ID NO: 77016 - protein, 39 aa, Artificial Sequence; identical to SEQ ID NO: 2753
  GFR-binding peptide
  MOD_RES (33), (34): Xaa is C or S
  MOD_RES (11), (12), (13), (14), (15): Xaa is A or G
  MOD_RES (16), (17), (18), (19): Xaa is A or G or is absent

SEQ ID NO: 77017 - protein, 36 aa, Artificial Sequence; identical to SEQ ID NO: 2754
  GFR-binding peptide
  MOD_RES (2), (4): Xaa is C or S

SEQ ID NO: 77018 - protein, 36 aa, Artificial Sequence; identical to SEQ ID NO: 12104
  GFR-binding peptide
  MOD_RES (1), (35), (36): Xaa is C or S
  MOD_RES (13), (14), (15), (16), (17): Xaa is A or G
  MOD_RES (18), (19), (20), (21): Xaa is A or G or is absent

SEQ ID NO: 77019 - protein, 39 aa, Artificial Sequence
  GFR-binding peptide
  MOD_RES (2), (36), (37): Xaa is C or S
  MOD_RES (14), (15), (16), (17), (18): Xaa is A or G
  MOD_RES (19), (20), (21), (22): Xaa is A or G or is absent
GXRDVVMGQYNKLXXXXXXXXXLYLMSIASMKTPTXXPG

SEQ ID NO: 77020 - protein, 39 aa, Artificial Sequence
  GFR-binding peptide
  MOD_RES (33), (34): Xaa is C or S
  MOD_RES (11), (12), (13), (14), (15): Xaa is A or G
  MOD_RES (16), (17), (18), (19): Xaa is A or G or is absent
EVTMNQYNKLXXXXXXXXXLYLISIASMKEPVXXPEPIG

SEQ ID NO: 77021 - protein, 37 aa, Artificial Sequence; identical to SEQ ID NO: 2756
  GFR-binding peptide
  MOD_RES (2), (35), (36): Xaa is C or S

SEQ ID NO: 77022 - protein, 33 aa, Artificial Sequence; identical to SEQ ID NO: 2757
  GFR-binding peptide
  MOD_RES (1), (33): Xaa is C or S

SEQ ID NO: 77023 - protein, 35 aa, Artificial Sequence; identical to SEQ ID NO: 12106
  GFR-binding peptide
  MOD_RES (2), (34), (35): Xaa is C or S

SEQ ID NO: 77024 - protein, 32 aa, Artificial Sequence
  GFR-binding peptide
  MOD_RES (32), (32): Xaa is C or S
AEVVMDQYNKLVVNNAADLYLISIASLRAPVX

SEQ ID NO: 77025 - protein, 36 aa, Artificial Sequence; identical to SEQ ID NO: 4682
  GFR-binding peptide
  MOD_RES (2), (33), (34): Xaa is C or S

SEQ ID NO: 77026 - protein, 39 aa, Artificial Sequence
  GFR-binding peptide
  MOD_RES (2), (4), (36), (37): Xaa is C or S
RXAXSEVTMNQYNKLVVNKNEDLYLISIASMKEPVXXPE

SEQ ID NO: 77027 - protein, 32 aa, Artificial Sequence; identical to SEQ ID NO: 4685
  GFR-binding peptide
  MOD_RES (1), (32): Xaa is C or S

SEQ ID NO: 77028 - protein, 34 aa, Artificial Sequence
  GFR-binding peptide
  MOD_RES (34), (34): Xaa is C or S
  MOD_RES (12), (13), (14), (15), (16): Xaa is A or G
  MOD_RES (17), (18), (19), (20): Xaa is A or G or is absent
RDVVMGQYNKLXXXXXXXXXLYLMSIASMKTPTX

SEQ ID NO: 77029 - protein, 38 aa, Artificial Sequence; identical to SEQ ID NO: 56688
  GFR-binding peptide
  MOD_RES (1), (32), (33): Xaa is C or S

SEQ ID NO: 77030 - protein, 36 aa, Artificial Sequence; identical to SEQ ID NO: 4686
  GFR-binding peptide
  MOD_RES (2), (35), (36): Xaa is C or S
  MOD_RES (13), (14), (15), (16), (17): Xaa is A or G
  MOD_RES (18), (19), (20), (21): Xaa is A or G or is absent

SEQ ID NO: 77031 - protein, 38 aa, Artificial Sequence
  GFR-binding peptide
  MOD_RES (1), (34), (35): Xaa is C or S
  MOD_RES (12), (13), (14), (15), (16): Xaa is A or G
  MOD_RES (17), (18), (19), (20): Xaa is A or G or is absent
XEEVIMQYNKLXXXXXXXXXLYLMSIASTKVPAXXTSP

SEQ ID NO: 77032 - protein, 37 aa, Artificial Sequence
  GFR-binding peptide
  MOD_RES (34), (35): Xaa is C or S
  MOD_RES (12), (13), (14), (15), (16): Xaa is A or G
  MOD_RES (17), (18), (19), (20): Xaa is A or G or is absent
SEVTMNQYNKLXXXXXXXXXLYLISIASMKEPVXXPE

SEQ ID NO: 77033 - protein, 36 aa, Artificial Sequence
  GFR-binding peptide
  MOD_RES (1), (33), (34): Xaa is C or S
XAEVVMDQYNKLVVNNAADLYLISIASLRAPVXXSA

SEQ ID NO: 77034 - protein, 37 aa, Artificial Sequence; identical to SEQ ID NO: 12118
  GFR-binding peptide
  MOD_RES (1), (3), (37): Xaa is C or S
  MOD_RES (15), (16), (17), (18), (19): Xaa is A or G
  MOD_RES (20), (21), (22), (23): Xaa is A or G or is absent

SEQ ID NO: 77035 - protein, 35 aa, Artificial Sequence; identical to SEQ ID NO: 56700
  GFR-binding peptide
  MOD_RES (31), (32): Xaa is C or S

SEQ ID NO: 77036 - protein, 40 aa, Artificial Sequence; identical to SEQ ID NO: 10251
  GFR-binding peptide
  MOD_RES (2), (36), (37): Xaa is C or S
  MOD_RES (14), (15), (16), (17), (18): Xaa is A or G
  MOD_RES (19), (20), (21), (22): Xaa is A or G or is absent

SEQ ID NO: 77037 - protein, 39 aa, Artificial Sequence; identical to SEQ ID NO: 58660
  GFR-binding peptide
  MOD_RES (2), (4), (38), (39): Xaa is C or S
  MOD_RES (16), (17), (18), (19), (20): Xaa is A or G
  MOD_RES (21), (22), (23), (24): Xaa is A or G or is absent

SEQ ID NO: 77038 - protein, 37 aa, Artificial Sequence; identical to SEQ ID NO: 2766
  GFR-binding peptide
  MOD_RES (1), (35), (36): Xaa is C or S
  MOD_RES (13), (14), (15), (16), (17): Xaa is A or G
  MOD_RES (18), (19), (20), (21): Xaa is A or G or is absent

SEQ ID NO: 77039 - protein, 33 aa, Artificial Sequence; identical to SEQ ID NO: 56708
  GFR-binding peptide
  MOD_RES (2), (33): Xaa is C or S

SEQ ID NO: 77040 - protein, 36 aa, Artificial Sequence; identical to SEQ ID NO: 4696
  GFR-binding peptide
  MOD_RES (1), (34), (35): Xaa is C or S
  MOD_RES (12), (13), (14), (15), (16): Xaa is A or G
  MOD_RES (17), (18), (19), (20): Xaa is A or G or is absent

SEQ ID NO: 77041 - protein, 40 aa, Artificial Sequence; identical to SEQ ID NO: 2769
  GFR-binding peptide
  MOD_RES (1), (34), (35): Xaa is C or S
  MOD_RES (12), (13), (14), (15), (16): Xaa is A or G
  MOD_RES (17), (18), (19), (20): Xaa is A or G or is absent

SEQ ID NO: 77042 - protein, 32 aa, Artificial Sequence; identical to SEQ ID NO: 2771
  GFR-binding peptide
  MOD_RES (11), (12), (13), (14), (15): Xaa is A or G
  MOD_RES (16), (17), (18), (19): Xaa is A or G or is absent

SEQ ID NO: 77043 - protein, 39 aa, Artificial Sequence; identical to SEQ ID NO: 4698
  GFR-binding peptide
  MOD_RES (1), (33), (34): Xaa is C or S

SEQ ID NO: 77044 - protein, 33 aa, Artificial Sequence; identical to SEQ ID NO: 23765
  GFR-binding peptide
  MOD_RES (12), (13), (14), (15), (16): Xaa is A or G
  MOD_RES (17), (18), (19), (20): Xaa is A or G or is absent

SEQ ID NO: 77045 - protein, 34 aa, Artificial Sequence; identical to SEQ ID NO: 4699
  GFR-binding peptide
  MOD_RES (2), (33), (34): Xaa is C or S

SEQ ID NO: 77046 - protein, 37 aa, Artificial Sequence; identical to SEQ ID NO: 4700
  GFR-binding peptide
  MOD_RES (2), (36), (37): Xaa is C or S
  MOD_RES (14), (15), (16), (17), (18): Xaa is A or G
  MOD_RES (19), (20), (21), (22): Xaa is A or G or is absent

SEQ ID NO: 77047 - protein, 33 aa, Artificial Sequence; identical to SEQ ID NO: 2773
  GFR-binding peptide
  MOD_RES (1), (33): Xaa is C or S

SEQ ID NO: 77048 - protein, 38 aa, Artificial Sequence; identical to SEQ ID NO: 4701
  GFR-binding peptide
  MOD_RES (1), (33), (34): Xaa is C or S

SEQ ID NO: 77049 - protein, 33 aa, Artificial Sequence
  GFR-binding peptide
  MOD_RES (12), (13), (14), (15), (16): Xaa is A or G
  MOD_RES (17), (18), (19), (20): Xaa is A or G or is absent
ESVAMGQYNKLXXXXXXXXXLYLISIASLKTPV

SEQ ID NO: 77050 - protein, 36 aa, Artificial Sequence; identical to SEQ ID NO: 4702
  GFR-binding peptide
  MOD_RES (1), (33), (34): Xaa is C or S

SEQ ID NO: 77051 - protein, 40 aa, Artificial Sequence; identical to SEQ ID NO: 56718
  GFR-binding peptide
  MOD_RES (1), (3), (36), (37): Xaa is C or S
  MOD_RES (14), (15), (16), (17), (18): Xaa is A or G
  MOD_RES (19), (20), (21), (22): Xaa is A or G or is absent

SEQ ID NO: 77052 - protein, 37 aa, Artificial Sequence; identical to SEQ ID NO: 2780
  GFR-binding peptide
  MOD_RES (1), (34), (35): Xaa is C or S
  MOD_RES (12), (13), (14), (15), (16): Xaa is A or G
  MOD_RES (17), (18), (19), (20): Xaa is A or G or is absent

SEQ ID NO: 77053 - protein, 31 aa, Artificial Sequence; identical to SEQ ID NO: 4704
  GFR-binding peptide
  MOD_RES (31), (31): Xaa is C or S

SEQ ID NO: 77054 - protein, 34 aa, Artificial Sequence; identical to SEQ ID NO: 4705
  GFR-binding peptide
  MOD_RES (2), (34): Xaa is C or S

SEQ ID NO: 77055 - protein, 36 aa, Artificial Sequence; identical to SEQ ID NO: 4708
  GFR-binding peptide
  MOD_RES (1), (35), (36): Xaa is C or S
  MOD_RES (13), (14), (15), (16), (17): Xaa is A or G
  MOD_RES (18), (19), (20), (21): Xaa is A or G or is absent

SEQ ID NO: 77056 - protein, 39 aa, Artificial Sequence; identical to SEQ ID NO: 4709
  GFR-binding peptide
  MOD_RES (2), (4), (36), (37): Xaa is C or S

SEQ ID NO: 77057 - protein, 35 aa, Artificial Sequence; identical to SEQ ID NO: 4710
  GFR-binding peptide
  MOD_RES (1), (3), (34), (35): Xaa is C or S

SEQ ID NO: 77058 - protein, 35 aa, Artificial Sequence
  GFR-binding peptide
  MOD_RES (1), (3), (35): Xaa is C or S
XGXESVAMGQYNKLYTVVGKDLYLISIASLKTPVX

SEQ ID NO: 77059 - protein, 35 aa, Artificial Sequence
  GFR-binding peptide
  MOD_RES (31), (32): Xaa is C or S
EVTMNQYNKLVVNKNEDLYLISIASMKEPVXXPEP

SEQ ID NO: 77060 - protein, 38 aa, Artificial Sequence; identical to SEQ ID NO: 4711
  GFR-binding peptide
  MOD_RES (2), (4), (35), (36): Xaa is C or S

SEQ ID NO: 77061 - protein, 34 aa, Artificial Sequence; identical to SEQ ID NO: 4712
  GFR-binding peptide
  MOD_RES (1), (33), (34): Xaa is C or S

SEQ ID NO: 77062 - protein, 32 aa, Artificial Sequence; identical to SEQ ID NO: 2782
  GFR-binding peptide
  MOD_RES (32), (32): Xaa is C or S

SEQ ID NO: 77063 - protein, 31 aa, Artificial Sequence; identical to SEQ ID NO: 56733
  GFR-binding peptide
  MOD_RES (31), (31): Xaa is C or S

SEQ ID NO: 77064 - protein, 41 aa, Artificial Sequence; identical to SEQ ID NO: 2786
  GFR-binding peptide
  MOD_RES (1), (3), (37), (38): Xaa is C or S
  MOD_RES (15), (16), (17), (18), (19): Xaa is A or G
  MOD_RES (20), (21), (22), (23): Xaa is A or G or is absent

SEQ ID NO: 77065 - protein, 38 aa, Artificial Sequence; identical to SEQ ID NO: 4716
  GFR-binding peptide
  MOD_RES (2), (37), (38): Xaa is C or S
  MOD_RES (15), (16), (17), (18), (19): Xaa is A or G
  MOD_RES (20), (21), (22), (23): Xaa is A or G or is absent

SEQ ID NO: 77066 - protein, 35 aa, Artificial Sequence; identical to SEQ ID NO: 25797
  GFR-binding peptide
  MOD_RES (2), (4): Xaa is C or S

SEQ ID NO: 77067 - protein, 32 aa, Artificial Sequence; identical to SEQ ID NO: 25798
  GFR-binding peptide
  MOD_RES (31), (32): Xaa is C or S

SEQ ID NO: 77068 - protein, 44 aa, Artificial Sequence; identical to SEQ ID NO: 4717
  GFR-binding peptide
  MOD_RES (2), (4), (38): Xaa is C or S
  MOD_RES (16), (17), (18), (19), (20): Xaa is A or G
  MOD_RES (21), (22), (23), (24): Xaa is A or G or is absent

SEQ ID NO: 77069 - protein, 35 aa, Artificial Sequence; identical to SEQ ID NO: 2789
  GFR-binding peptide
  MOD_RES (33), (34): Xaa is C or S
  MOD_RES (11), (12), (13), (14), (15): Xaa is A or G
  MOD_RES (16), (17), (18), (19): Xaa is A or G or is absent

SEQ ID NO: 77070 - protein, 36 aa, Artificial Sequence; identical to SEQ ID NO: 4719
  GFR-binding peptide
  MOD_RES (1), (3), (35), (36): Xaa is C or S

SEQ ID NO: 77071 - protein, 37 aa, Artificial Sequence; identical to SEQ ID NO: 2791
  GFR-binding peptide
  MOD_RES (1), (3), (34), (35): Xaa is C or S

SEQ ID NO: 77072 - protein, 36 aa, Artificial Sequence; identical to SEQ ID NO: 2792
  GFR-binding peptide
  MOD_RES (32), (33): Xaa is C or S

SEQ ID NO: 77073 - protein, 41 aa, Artificial Sequence; identical to SEQ ID NO: 4720
  GFR-binding peptide
  MOD_RES (1), (3), (37), (38): Xaa is C or S
  MOD_RES (15), (16), (17), (18), (19): Xaa is A or G
  MOD_RES (20), (21), (22), (23): Xaa is A or G or is absent

SEQ ID NO: 77074 - protein, 32 aa, Artificial Sequence; identical to SEQ ID NO: 2794
  GFR-binding peptide
  MOD_RES (31), (32): Xaa is C or S

SEQ ID NO: 77075 - protein, 37 aa, Artificial Sequence; identical to SEQ ID NO: 25802
  GFR-binding peptide
  MOD_RES (31), (32): Xaa is C or S

SEQ ID NO: 77076 - protein, 37 aa, Artificial Sequence; identical to SEQ ID NO: 4723
  GFR-binding peptide
  MOD_RES (1), (32), (33): Xaa is C or S

SEQ ID NO: 77077 - protein, 43 aa, Artificial Sequence; identical to SEQ ID NO: 2795
  GFR-binding peptide
  MOD_RES (2), (4), (38), (39): Xaa is C or S
  MOD_RES (16), (17), (18), (19), (20): Xaa is A or G
  MOD_RES (21), (22), (23), (24): Xaa is A or G or is absent

SEQ ID NO: 77078 - protein, 33 aa, Artificial Sequence; identical to SEQ ID NO: 4724
  GFR-binding peptide
  MOD_RES (33), (33): Xaa is C or S
  MOD_RES (11), (12), (13), (14), (15): Xaa is A or G
  MOD_RES (16), (17), (18), (19): Xaa is A or G or is absent

SEQ ID NO: 77079 - protein, 37 aa, Artificial Sequence; identical to SEQ ID NO: 25806
  GFR-binding peptide
  MOD_RES (1), (3), (35), (36): Xaa is C or S

SEQ ID NO: 77080 - protein, 41 aa, Artificial Sequence; identical to SEQ ID NO: 4727
  GFR-binding peptide
  MOD_RES (2), (4), (38), (39): Xaa is C or S
  MOD_RES (16), (17), (18), (19), (20): Xaa is A or G
  MOD_RES (21), (22), (23), (24): Xaa is A or G or is absent

SEQ ID NO: 77081 - protein, 35 aa, Artificial Sequence
  GFR-binding peptide
  MOD_RES (33), (34): Xaa is C or S
  MOD_RES (11), (12), (13), (14), (15): Xaa is A or G
  MOD_RES (16), (17), (18), (19): Xaa is A or G or is absent
EEVIMQYNKLXXXXXXXXXLYLMSIASTKVPAXXT

SEQ ID NO: 77082 - protein, 36 aa, Artificial Sequence; identical to SEQ ID NO: 25809
  GFR-binding peptide
  MOD_RES (2), (36): Xaa is C or S
  MOD_RES (14), (15), (16), (17), (18): Xaa is A or G
  MOD_RES (19), (20), (21), (22): Xaa is A or G or is absent

SEQ ID NO: 77083 - protein, 37 aa, Artificial Sequence; identical to SEQ ID NO: 4731
  GFR-binding peptide
  MOD_RES (32), (33): Xaa is C or S

SEQ ID NO: 77084 - protein, 34 aa, Artificial Sequence; identical to SEQ ID NO: 2801
  GFR-binding peptide
  MOD_RES (2), (34): Xaa is C or S

SEQ ID NO: 77085 - protein, 37 aa, Artificial Sequence; identical to SEQ ID NO: 2802
  GFR-binding peptide
  MOD_RES (33), (34): Xaa is C or S

SEQ ID NO: 77086 - protein, 38 aa, Artificial Sequence; identical to SEQ ID NO: 4733
  GFR-binding peptide
  MOD_RES (2), (4), (37), (38): Xaa is C or S
  MOD_RES (15), (16), (17), (18), (19): Xaa is A or G
  MOD_RES (20), (21), (22), (23): Xaa is A or G or is absent

SEQ ID NO: 77087 - protein, 33 aa, Artificial Sequence; identical to SEQ ID NO: 25813
  GFR-binding peptide
  MOD_RES (32), (33): Xaa is C or S

SEQ ID NO: 77088 - protein, 32 aa, Artificial Sequence; identical to SEQ ID NO: 4735
  GFR-binding peptide
  MOD_RES (31), (32): Xaa is C or S

SEQ ID NO: 77089 - protein, 34 aa, Artificial Sequence; identical to SEQ ID NO: 4737
  GFR-binding peptide
  MOD_RES (1), (3): Xaa is C or S

SEQ ID NO: 77090 - protein, 37 aa, Artificial Sequence
  GFR-binding peptide
  MOD_RES (1), (32), (33): Xaa is C or S
XEEVIMQYNKLLLVRGNDLYLMSIASTKVPAXXTSPV

SEQ ID NO: 77091 - protein, 40 aa, Artificial Sequence; identical to SEQ ID NO: 2809
  GFR-binding peptide
  MOD_RES (1), (35), (36): Xaa is C or S
  MOD_RES (13), (14), (15), (16), (17): Xaa is A or G
  MOD_RES (18), (19), (20), (21): Xaa is A or G or is absent

SEQ ID NO: 77092 - protein, 34 aa, Artificial Sequence; identical to SEQ ID NO: 4738
  GFR-binding peptide
  MOD_RES (34), (34): Xaa is C or S
  MOD_RES (12), (13), (14), (15), (16): Xaa is A or G
  MOD_RES (17), (18), (19), (20): Xaa is A or G or is absent

SEQ ID NO: 77093 - protein, 35 aa, Artificial Sequence; identical to SEQ ID NO: 2810
  GFR-binding peptide
  MOD_RES (32), (33): Xaa is C or S

SEQ ID NO: 77094 - protein, 40 aa, Artificial Sequence
  GFR-binding peptide
  MOD_RES (1), (3), (35), (36): Xaa is C or S
XGXRDVVMGQYNKLIIQQKDNLYLMSIASMKTPTXXPGAS

SEQ ID NO: 77095 - protein, 38 aa, Artificial Sequence; identical to SEQ ID NO: 10287
  GFR-binding peptide
  MOD_RES (32), (33): Xaa is C or S

SEQ ID NO: 77096 - protein, 40 aa, Artificial Sequence
  GFR-binding peptide
  MOD_RES (1), (3), (35), (36): Xaa is C or S
XAXSEVTMNQYNKLVVNKNEDLYLISIASMKEPVXXPEPI

SEQ ID NO: 77097 - protein, 38 aa, Artificial Sequence; identical to SEQ ID NO: 12169
  GFR-binding peptide
  MOD_RES (1), (35), (36): Xaa is C or S
  MOD_RES (13), (14), (15), (16), (17): Xaa is A or G
  MOD_RES (18), (19), (20), (21): Xaa is A or G or is absent

SEQ ID NO: 77098 - protein, 36 aa, Artificial Sequence; identical to SEQ ID NO: 2811
  GFR-binding peptide
  MOD_RES (2), (36): Xaa is C or S
  MOD_RES (14), (15), (16), (17), (18): Xaa is A or G
  MOD_RES (19), (20), (21), (22): Xaa is A or G or is absent

SEQ ID NO: 77099 - protein, 33 aa, Artificial Sequence; identical to SEQ ID NO: 2812
  GFR-binding peptide
  MOD_RES (1), (1): Xaa is C or S
  MOD_RES (12), (13), (14), (15), (16): Xaa is A or G
  MOD_RES (17), (18), (19), (20): Xaa is A or G or is absent

SEQ ID NO: 77100 - protein, 34 aa, Artificial Sequence; identical to SEQ ID NO: 2814
  GFR-binding peptide
  MOD_RES (34), (34): Xaa is C or S
  MOD_RES (12), (13), (14), (15), (16): Xaa is A or G
  MOD_RES (17), (18), (19), (20): Xaa is A or G or is absent

SEQ ID NO: 77101 - protein, 40 aa, Artificial Sequence
  GFR-binding peptide
  MOD_RES (2), (4), (36), (37): Xaa is C or S
SXGXRDVVMGQYNKLIIQQKDNLYLMSIASMKTPTXXPGA

SEQ ID NO: 77102 - protein, 39 aa, Artificial Sequence; identical to SEQ ID NO: 23807
  GFR-binding peptide
  MOD_RES (1), (35), (36): Xaa is C or S
  MOD_RES (13), (14), (15), (16), (17): Xaa is A or G
  MOD_RES (18), (19), (20), (21): Xaa is A or G or is absent

SEQ ID NO: 77103 - protein, 40 aa, Artificial Sequence; identical to SEQ ID NO: 12178
  GFR-binding peptide
  MOD_RES (1), (35), (36): Xaa is C or S
  MOD_RES (13), (14), (15), (16), (17): Xaa is A or G
  MOD_RES (18), (19), (20), (21): Xaa is A or G or is absent

SEQ ID NO: 77104 - protein, 36 aa, Artificial Sequence; identical to SEQ ID NO: 56773
  GFR-binding peptide
  MOD_RES (34), (35): Xaa is C or S
  MOD_RES (12), (13), (14), (15), (16): Xaa is A or G
  MOD_RES (17), (18), (19), (20): Xaa is A or G or is absent

SEQ ID NO: 77105 - protein, 38 aa, Artificial Sequence; identical to SEQ ID NO: 2817
  GFR-binding peptide
  MOD_RES (2), (36), (37): Xaa is C or S
  MOD_RES (14), (15), (16), (17), (18): Xaa is A or G
  MOD_RES (19), (20), (21), (22): Xaa is A or G or is absent

SEQ ID NO: 77106 - protein, 33 aa, Artificial Sequence; identical to SEQ ID NO: 4745
  GFR-binding peptide
  MOD_RES (32), (33): Xaa is C or S

SEQ ID NO: 77107 - protein, 33 aa, Artificial Sequence; identical to SEQ ID NO: 2819
  GFR-binding peptide
  MOD_RES (32), (33): Xaa is C or S

SEQ ID NO: 77108 - protein, 39 aa, Artificial Sequence; identical to SEQ ID NO: 25827
  GFR-binding peptide
  MOD_RES (2), (4), (38), (39): Xaa is C or S
  MOD_RES (16), (17), (18), (19), (20): Xaa is A or G
  MOD_RES (21), (22), (23), (24): Xaa is A or G or is absent

SEQ ID NO: 77109 - protein, 38 aa, Artificial Sequence
  GFR-binding peptide
  MOD_RES (1), (3), (35), (36): Xaa is C or S
XGXRDVVMGQYNKLIIQQKDNLYLMSIASMKTPTXXPG

SEQ ID NO: 77110 - protein, 39 aa, Artificial Sequence; identical to SEQ ID NO: 2829
  GFR-binding peptide
  MOD_RES (2), (4), (37), (38): Xaa is C or S
  MOD_RES (15), (16), (17), (18), (19): Xaa is A or G
  MOD_RES (20), (21), (22), (23): Xaa is A or G or is absent

SEQ ID NO: 77111 - protein, 40 aa, Artificial Sequence; identical to SEQ ID NO: 2830
  GFR-binding peptide
  MOD_RES (1), (3), (37), (38): Xaa is C or S
  MOD_RES (15), (16), (17), (18), (19): Xaa is A or G
  MOD_RES (20), (21), (22), (23): Xaa is A or G or is absent

SEQ ID NO: 77112 - protein, 39 aa, Artificial Sequence; identical to SEQ ID NO: 4751
  GFR-binding peptide
  MOD_RES (1), (3), (37), (38): Xaa is C or S
  MOD_RES (15), (16), (17), (18), (19): Xaa is A or G
  MOD_RES (20), (21), (22), (23): Xaa is A or G or is absent

SEQ ID NO: 77113 - protein, 40 aa, Artificial Sequence
  GFR-binding peptide
  MOD_RES (1), (35), (36): Xaa is C or S
  MOD_RES (13), (14), (15), (16), (17): Xaa is A or G
  MOD_RES (18), (19), (20), (21): Xaa is A or G or is absent
XRDVVMGQYNKLXXXXXXXXXLYLMSIASMKTPTXXPGAS

SEQ ID NO: 77114 - protein, 37 aa, Artificial Sequence; identical to SEQ ID NO: 4752
  GFR-binding peptide
  MOD_RES (31), (32): Xaa is C or S

SEQ ID NO: 77115 - protein, 35 aa, Artificial Sequence; identical to SEQ ID NO: 4754
  GFR-binding peptide
  MOD_RES (1), (3), (35): Xaa is C or S

SEQ ID NO: 77116 - protein, 37 aa, Artificial Sequence; identical to SEQ ID NO: 2833
  GFR-binding peptide
  MOD_RES (1), (36), (37): Xaa is C or S
  MOD_RES (14), (15), (16), (17), (18): Xaa is A or G
  MOD_RES (19), (20), (21), (22): Xaa is A or G or is absent

SEQ ID NO: 77117 - protein, 36 aa, Artificial Sequence
  GFR-binding peptide
  MOD_RES (2), (36): Xaa is C or S
  MOD_RES (14), (15), (16), (17), (18): Xaa is A or G
  MOD_RES (19), (20), (21), (22): Xaa is A or G or is absent
GXRDVVMGQYNKLXXXXXXXXXLYLMSIASMKTPTX

SEQ ID NO: 77118 - protein, 36 aa, Artificial Sequence; identical to SEQ ID NO: 10309
  GFR-binding peptide
  MOD_RES (2), (34), (35): Xaa is C or S

SEQ ID NO: 77119 - protein, 33 aa, Artificial Sequence; identical to SEQ ID NO: 4755
  GFR-binding peptide
  MOD_RES (31), (32): Xaa is C or S

SEQ ID NO: 77120 - protein, 42 aa, Artificial Sequence
  GFR-binding peptide
  MOD_RES (2), (36), (37): Xaa is C or S
  MOD_RES (14), (15), (16), (17), (18): Xaa is A or G
  MOD_RES (19), (20), (21), (22): Xaa is A or G or is absent
AXSEVTMNQYNKLXXXXXXXXXLYLISIASMKEPVXXPEPIG

SEQ ID NO: 77121 - protein, 37 aa, Artificial Sequence; identical to SEQ ID NO: 4757
  GFR-binding peptide
  MOD_RES (1), (3), (35), (36): Xaa is C or S

SEQ ID NO: 77122 - protein, 36 aa, Artificial Sequence; identical to SEQ ID NO: 62220
  GFR-binding peptide
  MOD_RES (1), (33), (34): Xaa is C or S

SEQ ID NO: 77123 - protein, 32 aa, Artificial Sequence; identical to SEQ ID NO: 4760
  GFR-binding peptide
  MOD_RES (32), (32): Xaa is C or S

SEQ ID NO: 77124 - protein, 36 aa, Artificial Sequence; identical to SEQ ID NO: 25841
  GFR-binding peptide
  MOD_RES (2), (4), (36): Xaa is C or S

SEQ ID NO: 77125 - protein, 38 aa, Artificial Sequence; identical to SEQ ID NO: 25842
  GFR-binding peptide
  MOD_RES (33), (34): Xaa is C or S
  MOD_RES (11), (12), (13), (14), (15): Xaa is A or G
  MOD_RES (16), (17), (18), (19): Xaa is A or G or is absent

SEQ ID NO: 77126 - protein, 34 aa, Artificial Sequence; identical to SEQ ID NO: 4761
  GFR-binding peptide
  MOD_RES (31), (32): Xaa is C or S

SEQ ID NO: 77127 - protein, 33 aa, Artificial Sequence; identical to SEQ ID NO: 2848
  GFR-binding peptide
  MOD_RES (1), (3): Xaa is C or S

SEQ ID NO: 77128 - protein, 40 aa, Artificial Sequence; identical to SEQ ID NO: 2850
  GFR-binding peptide
  MOD_RES (1), (3), (37), (38): Xaa is C or S
  MOD_RES (15), (16), (17), (18), (19): Xaa is A or G
  MOD_RES (20), (21), (22), (23): Xaa is A or G or is absent

SEQ ID NO: 77129 - protein, 43 aa, Artificial Sequence; identical to SEQ ID NO: 2853
  GFR-binding peptide
  MOD_RES (1), (3), (37), (38): Xaa is C or S
  MOD_RES (15), (16), (17), (18), (19): Xaa is A or G
  MOD_RES (20), (21), (22), (23): Xaa is A or G or is absent

SEQ ID NO: 77130 - protein, 33 aa, Artificial Sequence; identical to SEQ ID NO: 4770
  GFR-binding peptide
  MOD_RES (1), (3): Xaa is C or S

SEQ ID NO: 77131 - protein, 40 aa, Artificial Sequence; identical to SEQ ID NO: 4771
  GFR-binding peptide
  MOD_RES (1), (3), (37), (38): Xaa is C or S
  MOD_RES (15), (16), (17), (18), (19): Xaa is A or G
  MOD_RES (20), (21), (22), (23): Xaa is A or G or is absent

SEQ ID NO: 77132 - protein, 38 aa, Artificial Sequence; identical to SEQ ID NO: 10322
  GFR-binding peptide
  MOD_RES (2), (4), (38): Xaa is C or S
  MOD_RES (16), (17), (18), (19), (20): Xaa is A or G
  MOD_RES (21), (22), (23), (24): Xaa is A or G or is absent

SEQ ID NO: 77133 - protein, 39 aa, Artificial Sequence; identical to SEQ ID NO: 4773
  GFR-binding peptide
  MOD_RES (1), (3), (34), (35): Xaa is C or S

SEQ ID NO: 77134 - protein, 36 aa, Artificial Sequence
  GFR-binding peptide
  MOD_RES (2), (34), (35): Xaa is C or S
GXAEVVMDQYNKLVVNNAADLYLISIASLRAPVXXS

SEQ ID NO: 77135 - protein, 38 aa, Artificial Sequence; identical to SEQ ID NO: 2855
  GFR-binding peptide
  MOD_RES (2), (4), (36), (37): Xaa is C or S

SEQ ID NO: 77136 - protein, 37 aa, Artificial Sequence; identical to SEQ ID NO: 12213
  GFR-binding peptide
  MOD_RES (2), (34), (35): Xaa is C or S

SEQ ID NO: 77137 - protein, 37 aa, Artificial Sequence; identical to SEQ ID NO: 56806
  GFR-binding peptide
  MOD_RES (2), (35), (36): Xaa is C or S
  MOD_RES (13), (14), (15), (16), (17): Xaa is A or G
  MOD_RES (18), (19), (20), (21): Xaa is A or G or is absent

SEQ ID NO: 77138 - protein, 40 aa, Artificial Sequence; identical to SEQ ID NO: 4777
  GFR-binding peptide
  MOD_RES (2), (4), (35), (36): Xaa is C or S

SEQ ID NO: 77139 - protein, 35 aa, Artificial Sequence; identical to SEQ ID NO: 56807
  GFR-binding peptide
  MOD_RES (2), (2): Xaa is C or S
  MOD_RES (14), (15), (16), (17), (18): Xaa is A or G
  MOD_RES (19), (20), (21), (22): Xaa is A or G or is absent

SEQ ID NO: 77140 - protein, 38 aa, Artificial Sequence; identical to SEQ ID NO: 2858
  GFR-binding peptide
  MOD_RES (1), (3), (35), (36): Xaa is C or S

SEQ ID NO: 77141 - protein, 37 aa, Artificial Sequence; identical to SEQ ID NO: 2859
  GFR-binding peptide
  MOD_RES (1), (33), (34): Xaa is C or S

SEQ ID NO: 77142 - protein, 34 aa, Artificial Sequence; identical to SEQ ID NO: 60439
  GFR-binding peptide
  MOD_RES (33), (34): Xaa is C or S
  MOD_RES (11), (12), (13), (14), (15): Xaa is A or G
  MOD_RES (16), (17), (18), (19): Xaa is A or G or is absent

SEQ ID NO: 77143 - protein, 33 aa, Artificial Sequence; identical to SEQ ID NO: 56810
  GFR-binding peptide
  MOD_RES (33), (33): Xaa is C or S
  MOD_RES (11), (12), (13), (14), (15): Xaa is A or G
  MOD_RES (16), (17), (18), (19): Xaa is A or G or is absent

SEQ ID NO: 77144 - protein, 39 aa, Artificial Sequence; identical to SEQ ID NO: 4779
  GFR-binding peptide
  MOD_RES (1), (3), (35), (36): Xaa is C or S

SEQ ID NO: 77145 - protein, 38 aa, Artificial Sequence
  GFR-binding peptide
  MOD_RES (1), (35), (36): Xaa is C or S
  MOD_RES (13), (14), (15), (16), (17): Xaa is A or G
  MOD_RES (18), (19), (20), (21): Xaa is A or G or is absent
XSEVTMNQYNKLXXXXXXXXXLYLISIASMKEPVXXPE

SEQ ID NO: 77146 - protein, 33 aa, Artificial Sequence; identical to SEQ ID NO: 4783
  GFR-binding peptide
  MOD_RES (31), (32): Xaa is C or S

SEQ ID NO: 77147 - protein, 35 aa, Artificial Sequence; identical to SEQ ID NO: 2863
  GFR-binding peptide
  MOD_RES (2), (4), (35): Xaa is C or S

SEQ ID NO: 77148 - protein, 44 aa, Artificial Sequence; identical to SEQ ID NO: 2864
  GFR-binding peptide
  MOD_RES (2), (4), (38): Xaa is C or S
  MOD_RES (16), (17), (18), (19), (20): Xaa is A or G
  MOD_RES (21), (22), (23), (24): Xaa is A or G or is absent

SEQ ID NO: 77149 - protein, 39 aa, Artificial Sequence; identical to SEQ ID NO: 10331
  GFR-binding peptide
  MOD_RES (2), (36), (37): Xaa is C or S
  MOD_RES (14), (15), (16), (17), (18): Xaa is A or G
  MOD_RES (19), (20), (21), (22): Xaa is A or G or is absent

SEQ ID NO: 77150 - protein, 37 aa, Artificial Sequence; identical to SEQ ID NO: 2866
  GFR-binding peptide
  MOD_RES (1), (3): Xaa is C or S
  MOD_RES (16), (17), (18), (19), (20): Xaa is A or G
  MOD_RES (21), (22), (23), (24): Xaa is A or G or is absent

SEQ ID NO: 77151 - protein, 32 aa, Artificial Sequence
  GFR-binding peptide
  MOD_RES (11), (12), (13), (14), (15): Xaa is A or G
  MOD_RES (16), (17), (18), (19): Xaa is A or G or is absent
EEVIMQYNKLXXXXXXXXXLYLMSIASTKVPA

SEQ ID NO: 77152 - protein, 38 aa, Artificial Sequence
  GFR-binding peptide
  MOD_RES (1), (3), (35), (36): Xaa is C or S
XGXESVAMGQYNKLYTVVGKDLYLISIASLKTPVXXAK

SEQ ID NO: 77153 - protein, 35 aa, Artificial Sequence; identical to SEQ ID NO: 4789
  GFR-binding peptide
  MOD_RES (1), (35): Xaa is C or S
  MOD_RES (13), (14), (15), (16), (17): Xaa is A or G
  MOD_RES (18), (19), (20), (21): Xaa is A or G or is absent

SEQ ID NO: 77154 - protein, 34 aa, Artificial Sequence; identical to SEQ ID NO: 12224
  GFR-binding peptide
  MOD_RES (31), (32): Xaa is C or S

SEQ ID NO: 77155 - protein, 39 aa, Artificial Sequence; identical to SEQ ID NO: 2870
  GFR-binding peptide
  MOD_RES (1), (34), (35): Xaa is C or S
  MOD_RES (12), (13), (14), (15), (16): Xaa is A or G
  MOD_RES (17), (18), (19), (20): Xaa is A or G or is absent

SEQ ID NO: 77156 - protein, 35 aa, Artificial Sequence; identical to SEQ ID NO: 2871
  GFR-binding peptide
  MOD_RES (1), (34), (35): Xaa is C or S
  MOD_RES (12), (13), (14), (15), (16): Xaa is A or G
  MOD_RES (17), (18), (19), (20): Xaa is A or G or is absent

SEQ ID NO: 77157 - protein, 37 aa, Artificial Sequence
  GFR-binding peptide
  MOD_RES (1), (35), (36): Xaa is C or S
  MOD_RES (13), (14), (15), (16), (17): Xaa is A or G
  MOD_RES (18), (19), (20), (21): Xaa is A or G or is absent
XSEVTMNQYNKLXXXXXXXXXLYLISIASMKEPVXXP

SEQ ID NO: 77158 - protein, 38 aa, Artificial Sequence; identical to SEQ ID NO: 4795
  GFR-binding peptide
  MOD_RES (2), (4), (38): Xaa is C or S
  MOD_RES (16), (17), (18), (19), (20): Xaa is A or G
  MOD_RES (21), (22), (23), (24): Xaa is A or G or is absent

SEQ ID NO: 77159 - protein, 38 aa, Artificial Sequence; identical to SEQ ID NO: 4796
  GFR-binding peptide
  MOD_RES (2), (33), (34): Xaa is C or S

SEQ ID NO: 77160 - protein, 39 aa, Artificial Sequence; identical to SEQ ID NO: 23864
  GFR-binding peptide
  MOD_RES (1), (33), (34): Xaa is C or S

SEQ ID NO: 77161 - protein, 36 aa, Artificial Sequence; identical to SEQ ID NO: 4799
  GFR-binding peptide
  MOD_RES (31), (32): Xaa is C or S

SEQ ID NO: 77162 - protein, 34 aa, Artificial Sequence; identical to SEQ ID NO: 2876
  GFR-binding peptide
  MOD_RES (32), (33): Xaa is C or S

SEQ ID NO: 77163 - protein, 42 aa, Artificial Sequence; identical to SEQ ID NO: 23866
  GFR-binding peptide
  MOD_RES (2), (4), (38), (39): Xaa is C or S
  MOD_RES (16), (17), (18), (19), (20): Xaa is A or G
  MOD_RES (21), (22), (23), (24): Xaa is A or G or is absent

SEQ ID NO: 77164 - protein, 33 aa, Artificial Sequence; identical to SEQ ID NO: 2877
  GFR-binding peptide
  MOD_RES (32), (33): Xaa is C or S

SEQ ID NO: 77165 - protein, 34 aa, Artificial Sequence; identical to SEQ ID NO: 4805
  GFR-binding peptide
  MOD_RES (31), (32): Xaa is C or S

SEQ ID NO: 77166 - protein, 36 aa, Artificial Sequence
  GFR-binding peptide
  MOD_RES (1), (3), (35), (36): Xaa is C or S
XAXSEVTMNQYNKLVVNKNEDLYLISIASMKEPVXX

SEQ ID NO: 77167 - protein, 37 aa, Artificial Sequence; identical to SEQ ID NO: 2879
  GFR-binding peptide
  MOD_RES (2), (36), (37): Xaa is C or S
  MOD_RES (14), (15), (16), (17), (18): Xaa is A or G
  MOD_RES (19), (20), (21), (22): Xaa is A or G or is absent

SEQ ID NO: 77168 - protein, 33 aa, Artificial Sequence; identical to SEQ ID NO: 2880
  GFR-binding peptide
  MOD_RES (1), (33): Xaa is C or S

SEQ ID NO: 77169 - protein, 40 aa, Artificial Sequence
  GFR-binding peptide
  MOD_RES (1), (3), (35), (36): Xaa is C or S
XGXESVAMGQYNKLYTVVGKDLYLISIASLKTPVXXAKSA

SEQ ID NO: 77170 - protein, 39 aa, Artificial Sequence; identical to SEQ ID NO: 25890
  GFR-binding peptide
  MOD_RES (2), (36), (37): Xaa is C or S
  MOD_RES (14), (15), (16), (17), (18): Xaa is A or G
  MOD_RES (19), (20), (21), (22): Xaa is A or G or is absent

SEQ ID NO: 77171 - protein, 38 aa, Artificial Sequence
  GFR-binding peptide
  MOD_RES (1), (35), (36): Xaa is C or S
  MOD_RES (13), (14), (15), (16), (17): Xaa is A or G
  MOD_RES (18), (19), (20), (21): Xaa is A or G or is absent
XESVAMGQYNKLXXXXXXXXXLYLISIASLKTPVXXAK

SEQ ID NO: 77172 - protein, 37 aa, Artificial Sequence; identical to SEQ ID NO: 4813
  GFR-binding peptide
  MOD_RES (1), (3), (35), (36): Xaa is C or S

SEQ ID NO: 77173 - protein, 36 aa, Artificial Sequence; identical to SEQ ID NO: 10346
  GFR-binding peptide
  MOD_RES (1), (33), (34): Xaa is C or S

SEQ ID NO: 77174 - protein, 38 aa, Artificial Sequence; identical to SEQ ID NO: 10348
  GFR-binding peptide
  MOD_RES (33), (34): Xaa is C or S
  MOD_RES (11), (12), (13), (14), (15): Xaa is A or G
  MOD_RES (16), (17), (18), (19): Xaa is A or G or is absent

SEQ ID NO: 77175 - protein, 37 aa, Artificial Sequence
  GFR-binding peptide
  MOD_RES (33), (34): Xaa is C or S
  MOD_RES (11), (12), (13), (14), (15): Xaa is A or G
  MOD_RES (16), (17), (18), (19): Xaa is A or G or is absent
EVTMNQYNKLXXXXXXXXXLYLISIASMKEPVXXPEP

SEQ ID NO: 77176 - protein, 37 aa, Artificial Sequence; identical to SEQ ID NO: 4814
  GFR-binding peptide
  MOD_RES (31), (32): Xaa is C or S

SEQ ID NO: 77177 - protein, 39 aa, Artificial Sequence
  GFR-binding peptide
  MOD_RES (1), (33), (34): Xaa is C or S
XRDVVMGQYNKLIIQQKDNLYLMSIASMKTPTXXPGASG

SEQ ID NO: 77178 - protein, 36 aa, Artificial Sequence; identical to SEQ ID NO: 4818
  GFR-binding peptide
  MOD_RES (33), (34): Xaa is C or S
  MOD_RES (11), (12), (13), (14), (15): Xaa is A or G
  MOD_RES (16), (17), (18), (19): Xaa is A or G or is absent

SEQ ID NO: 77179 - protein, 32 aa, Artificial Sequence; identical to SEQ ID NO: 2891
  GFR-binding peptide
  MOD_RES (11), (12), (13), (14), (15): Xaa is A or G
  MOD_RES (16), (17), (18), (19): Xaa is A or G or is absent

SEQ ID NO: 77180 - protein, 36 aa, Artificial Sequence
  GFR-binding peptide
  MOD_RES (33), (34): Xaa is C or S
  MOD_RES (11), (12), (13), (14), (15): Xaa is A or G
  MOD_RES (16), (17), (18), (19): Xaa is A or G or is absent
DVVMGQYNKLXXXXXXXXXLYLMSIASMKTPTXXPG

SEQ ID NO: 77181 - protein, 39 aa, Artificial Sequence; identical to SEQ ID NO: 2892
  GFR-binding peptide
  MOD_RES (1), (34), (35): Xaa is C or S
  MOD_RES (12), (13), (14), (15), (16): Xaa is A or G
  MOD_RES (17), (18), (19), (20): Xaa is A or G or is absent

SEQ ID NO: 77182 - protein, 37 aa, Artificial Sequence
  GFR-binding peptide
  MOD_RES (32), (33): Xaa is C or S
RDVVMGQYNKLIIQQKDNLYLMSIASMKTPTXXPGAS

SEQ ID NO: 77183 - protein, 36 aa, Artificial Sequence
  GFR-binding peptide
  MOD_RES (34), (35): Xaa is C or S
  MOD_RES (12), (13), (14), (15), (16): Xaa is A or G
  MOD_RES (17), (18), (19), (20): Xaa is A or G or is absent
AEVVMDQYNKLXXXXXXXXXLYLISIASLRAPVXXS

SEQ ID NO: 77184 - protein, 37 aa, Artificial Sequence; identical to SEQ ID NO: 4819
  GFR-binding peptide
  MOD_RES (33), (34): Xaa is C or S
  MOD_RES (11), (12), (13), (14), (15): Xaa is A or G
  MOD_RES (16), (17), (18), (19): Xaa is A or G or is absent

SEQ ID NO: 77185 - protein, 40 aa, Artificial Sequence; identical to SEQ ID NO: 4824
  GFR-binding peptide
  MOD_RES (1), (36), (37): Xaa is C or S
  MOD_RES (14), (15), (16), (17), (18): Xaa is A or G
  MOD_RES (19), (20), (21), (22): Xaa is A or G or is absent

SEQ ID NO: 77186 - protein, 37 aa, Artificial Sequence; identical to SEQ ID NO: 4825
  GFR-binding peptide
  MOD_RES (32), (33): Xaa is C or S

SEQ ID NO: 77187 - protein, 39 aa, Artificial Sequence; identical to SEQ ID NO: 4826
  GFR-binding peptide
  MOD_RES (2), (35), (36): Xaa is C or S

SEQ ID NO: 77188 - protein, 33 aa, Artificial Sequence; identical to SEQ ID NO: 4827
  GFR-binding peptide
  MOD_RES (1), (32), (33): Xaa is C or S

SEQ ID NO: 77189 - protein, 36 aa, Artificial Sequence; identical to SEQ ID NO: 4829
  GFR-binding peptide
  MOD_RES (2), (34), (35): Xaa is C or S

SEQ ID NO: 77190 - protein, 33 aa, Artificial Sequence
  GFR-binding peptide
  MOD_RES (32), (33): Xaa is C or S
ESVAMGQYNKLYTVVGKDLYLISIASLKTPVXX

SEQ ID NO: 77191 - protein, 37 aa, Artificial Sequence; identical to SEQ ID NO: 2894
  GFR-binding peptide
  MOD_RES (2), (35), (36): Xaa is C or S
  MOD_RES (13), (14), (15), (16), (17): Xaa is A or G
  MOD_RES (18), (19), (20), (21): Xaa is A or G or is absent

SEQ ID NO: 77192 - protein, 42 aa, Artificial Sequence; identical to SEQ ID NO: 12259
  GFR-binding peptide
  MOD_RES (2), (4), (36), (37): Xaa is C or S

SEQ ID NO: 77193 - protein, 33 aa, Artificial Sequence; identical to SEQ ID NO: 4831
  GFR-binding peptide
  MOD_RES (2), (33): Xaa is C or S

SEQ ID NO: 77194 - protein, 35 aa, Artificial Sequence; identical to SEQ ID NO: 12261
  GFR-binding peptide
  MOD_RES (1), (35): Xaa is C or S
  MOD_RES (13), (14), (15), (16), (17): Xaa is A or G
  MOD_RES (18), (19), (20), (21): Xaa is A or G or is absent

SEQ ID NO: 77195 - protein, 37 aa, Artificial Sequence; identical to SEQ ID NO: 4832
  GFR-binding peptide
  MOD_RES (32), (33): Xaa is C or S

SEQ ID NO: 77196 - protein, 38 aa, Artificial Sequence; identical to SEQ ID NO: 12264
  GFR-binding peptide
  MOD_RES (2), (4), (36), (37): Xaa is C or S

SEQ ID NO: 77197 - protein, 36 aa, Artificial Sequence
  GFR-binding peptide
  MOD_RES (1), (3), (34), (35): Xaa is C or S
XGXEEVIMQYNKLLLVRGNDLYLMSIASTKVPAXXT

SEQ ID NO: 77198 - protein, 37 aa, Artificial Sequence; identical to SEQ ID NO: 2896
  GFR-binding peptide
  MOD_RES (2), (4), (35), (36): Xaa is C or S

SEQ ID NO: 77199 - protein, 36 aa, Artificial Sequence; identical to SEQ ID NO: 2897
  GFR-binding peptide
  MOD_RES (1), (35), (36): Xaa is C or S
  MOD_RES (13), (14), (15), (16), (17): Xaa is A or G
  MOD_RES (18), (19), (20), (21): Xaa is A or G or is absent

SEQ ID NO: 77200 - protein, 41 aa, Artificial Sequence; identical to SEQ ID NO: 4836
  GFR-binding peptide
  MOD_RES (2), (4), (36), (37): Xaa is C or S

SEQ ID NO: 77201 - protein, 38 aa, Artificial Sequence; identical to SEQ ID NO: 4837
  GFR-binding peptide
  MOD_RES (2), (4), (37), (38): Xaa is C or S
  MOD_RES (15), (16), (17), (18), (19): Xaa is A or G
  MOD_RES (20), (21), (22), (23): Xaa is A or G or is absent

SEQ ID NO: 77202 - protein, 39 aa, Artificial Sequence; identical to SEQ ID NO: 4838
  GFR-binding peptide
  MOD_RES (1), (33), (34): Xaa is C or S

SEQ ID NO: 77203 - protein, 36 aa, Artificial Sequence; identical to SEQ ID NO: 4839
  GFR-binding peptide
  MOD_RES (31), (32): Xaa is C or S

SEQ ID NO: 77204 - protein, 40 aa, Artificial Sequence; identical to SEQ ID NO: 62278
  GFR-binding peptide
  MOD_RES (1), (3), (37), (38): Xaa is C or S
  MOD_RES (15), (16), (17), (18), (19): Xaa is A or G
  MOD_RES (20), (21), (22), (23): Xaa is A or G or is absent

SEQ ID NO: 77205 - protein, 38 aa, Artificial Sequence; identical to SEQ ID NO: 10361
  GFR-binding peptide
  MOD_RES (32), (33): Xaa is C or S

SEQ ID NO: 77206 - protein, 43 aa, Artificial Sequence
  GFR-binding peptide
  MOD_RES (2), (4), (38), (39): Xaa is C or S
  MOD_RES (16), (17), (18), (19), (20): Xaa is A or G
  MOD_RES (21), (22), (23), (24): Xaa is A or G or is absent
RXAXSEVTMNQYNKLXXXXXXXXXLYLISIASMKEPVXXPEPI

SEQ ID NO: 77207 - protein, 37 aa, Artificial Sequence; identical to SEQ ID NO: 4841
  GFR-binding peptide
  MOD_RES (31), (32): Xaa is C or S

SEQ ID NO: 77208 - protein, 42 aa, Artificial Sequence; identical to SEQ ID NO: 2900
  GFR-binding peptide
  MOD_RES (2), (36), (37): Xaa is C or S
  MOD_RES (14), (15), (16), (17), (18): Xaa is A or G
  MOD_RES (19), (20), (21), (22): Xaa is A or G or is absent

SEQ ID NO: 77209 - protein, 37 aa, Artificial Sequence; identical to SEQ ID NO: 4844
  GFR-binding peptide
  MOD_RES (33), (34): Xaa is C or S
  MOD_RES (11), (12), (13), (14), (15): Xaa is A or G
  MOD_RES (16), (17), (18), (19): Xaa is A or G or is absent

SEQ ID NO: 77210 - protein, 38 aa, Artificial Sequence; identical to SEQ ID NO: 56853
  GFR-binding peptide
  MOD_RES (33), (34): Xaa is C or S
  MOD_RES (11), (12), (13), (14), (15): Xaa is A or G
  MOD_RES (16), (17), (18), (19): Xaa is A or G or is absent

SEQ ID NO: 77211 - protein, 33 aa, Artificial Sequence; identical to SEQ ID NO: 12275
  GFR-binding peptide
  MOD_RES (33), (33): Xaa is C or S
  MOD_RES (11), (12), (13), (14), (15): Xaa is A or G
  MOD_RES (16), (17), (18), (19): Xaa is A or G or is absent

SEQ ID NO: 77212 - protein, 34 aa, Artificial Sequence; identical to SEQ ID NO: 2903
  GFR-binding peptide
  MOD_RES (33), (34): Xaa is C or S
  MOD_RES (11), (12), (13), (14), (15): Xaa is A or G
  MOD_RES (16), (17), (18), (19): Xaa is A or G or is absent

SEQ ID NO: 77213 - protein, 37 aa, Artificial Sequence; identical to SEQ ID NO: 4848
  GFR-binding peptide
  MOD_RES (1), (35), (36): Xaa is C or S
  MOD_RES (13), (14), (15), (16), (17): Xaa is A or G
  MOD_RES (18), (19), (20), (21): Xaa is A or G or is absent

SEQ ID NO: 77214 - protein, 39 aa, Artificial Sequence; identical to SEQ ID NO: 60501
  GFR-binding peptide
  MOD_RES (2), (4), (36), (37): Xaa is C or S

SEQ ID NO: 77215 - protein, 32 aa, Artificial Sequence; identical to SEQ ID NO: 2904
  GFR-binding peptide
  MOD_RES (32), (32): Xaa is C or S

SEQ ID NO: 77216 - protein, 39 aa, Artificial Sequence; identical to SEQ ID NO: 4849
  GFR-binding peptide
  MOD_RES (2), (4), (35), (36): Xaa is C or S

SEQ ID NO: 77217 - protein, 36 aa, Artificial Sequence; identical to SEQ ID NO: 25924
  GFR-binding peptide
  MOD_RES (1), (3): Xaa is C or S
  MOD_RES (15), (16), (17), (18), (19): Xaa is A or G
  MOD_RES (20), (21), (22), (23): Xaa is A or G or is absent

SEQ ID NO: 77218 - protein, 39 aa, Artificial Sequence; identical to SEQ ID NO: 12281
  GFR-binding peptide
  MOD_RES (2), (4), (36), (37): Xaa is C or S

SEQ ID NO: 77219 - protein, 32 aa, Artificial Sequence; identical to SEQ ID NO: 4852
  GFR-binding peptide
  MOD_RES (32), (32): Xaa is C or S

SEQ ID NO: 77220 - protein, 39 aa, Artificial Sequence; identical to SEQ ID NO: 4853
  GFR-binding peptide
  MOD_RES (35), (36): Xaa is C or S
  MOD_RES (13), (14), (15), (16), (17): Xaa is A or G
  MOD_RES (18), (19), (20), (21): Xaa is A or G or is absent

SEQ ID NO: 77221 - protein, 35 aa, Artificial Sequence; identical to SEQ ID NO: 2911
  GFR-binding peptide
  MOD_RES (31), (32): Xaa is C or S

SEQ ID NO: 77222 - protein, 39 aa, Artificial Sequence; identical to SEQ ID NO: 2912
  GFR-binding peptide
  MOD_RES (33), (34): Xaa is C or S
  MOD_RES (11), (12), (13), (14), (15): Xaa is A or G
  MOD_RES (16), (17), (18), (19): Xaa is A or G or is absent

SEQ ID NO: 77223 - protein, 37 aa, Artificial Sequence; identical to SEQ ID NO: 4854
  GFR-binding peptide
  MOD_RES (1), (3), (35), (36): Xaa is C or S

SEQ ID NO: 77224 - protein, 38 aa, Artificial Sequence; identical to SEQ ID NO: 4855
  GFR-binding peptide
  MOD_RES (1), (33), (34): Xaa is C or S

SEQ ID NO: 77225 - protein, 38 aa, Artificial Sequence; identical to SEQ ID NO: 25927
  GFR-binding peptide
  MOD_RES (1), (33), (34): Xaa is C or S

SEQ ID NO: 77226 - protein, 36 aa, Artificial Sequence; identical to SEQ ID NO: 10376
  GFR-binding peptide
  MOD_RES (31), (32): Xaa is C or S

SEQ ID NO: 77227 - protein, 38 aa, Artificial Sequence; identical to SEQ ID NO: 4857
  GFR-binding peptide
  MOD_RES (2), (34), (35): Xaa is C or S

SEQ ID NO: 77228 - protein, 37 aa, Artificial Sequence; identical to SEQ ID NO: 4858
  GFR-binding peptide
  MOD_RES (33), (34): Xaa is C or S
  MOD_RES (11), (12), (13), (14), (15): Xaa is A or G
  MOD_RES (16), (17), (18), (19): Xaa is A or G or is absent

SEQ ID NO: 77229 - protein, 42 aa, Artificial Sequence; identical to SEQ ID NO: 2913
  GFR-binding peptide
  MOD_RES (2), (4), (37), (38): Xaa is C or S
  MOD_RES (15), (16), (17), (18), (19): Xaa is A or G
  MOD_RES (20), (21), (22), (23): Xaa is A or G or is absent

SEQ ID NO: 77230 - protein, 38 aa, Artificial Sequence; identical to SEQ ID NO: 2914
  GFR-binding peptide
  MOD_RES (1), (3), (37), (38): Xaa is C or S
  MOD_RES (15), (16), (17), (18), (19): Xaa is A or G
  MOD_RES (20), (21), (22), (23): Xaa is A or G or is absent

SEQ ID NO: 77231 - protein, 37 aa, Artificial Sequence; identical to SEQ ID NO: 56866
  GFR-binding peptide
  MOD_RES (1), (3), (34), (35): Xaa is C or S

SEQ ID NO: 77232 - protein, 41 aa, Artificial Sequence; identical to SEQ ID NO: 4860
  GFR-binding peptide
  MOD_RES (1), (35), (36): Xaa is C or S
  MOD_RES (13), (14), (15), (16), (17): Xaa is A or G
  MOD_RES (18), (19), (20), (21): Xaa is A or G or is absent

SEQ ID NO: 77233 - protein, 35 aa, Artificial Sequence; identical to SEQ ID NO: 10383
  GFR-binding peptide
  MOD_RES (2), (2): Xaa is C or S
  MOD_RES (14), (15), (16), (17), (18): Xaa is A or G
  MOD_RES (19), (20), (21), (22): Xaa is A or G or is absent

SEQ ID NO: 77234 - protein, 41 aa, Artificial Sequence; identical to SEQ ID NO: 4861
  GFR-binding peptide
  MOD_RES (2), (4), (38), (39): Xaa is C or S
  MOD_RES (16), (17), (18), (19), (20): Xaa is A or G
  MOD_RES (21), (22), (23), (24): Xaa is A or G or is absent

SEQ ID NO: 77235 - protein, 40 aa, Artificial Sequence; identical to SEQ ID NO: 2916
  GFR-binding peptide
  MOD_RES (1), (3), (36), (37): Xaa is C or S

SEQ ID NO: 77236 - protein, 33 aa, Artificial Sequence; identical to SEQ ID NO: 2917
  GFR-binding peptide
  MOD_RES (33), (33): Xaa is C or S

SEQ ID NO: 77237 - protein, 32 aa, Artificial Sequence; identical to SEQ ID NO: 4862
  GFR-binding peptide
  MOD_RES (32), (32): Xaa is C or S

SEQ ID NO: 77238 - protein, 35 aa, Artificial Sequence; identical to SEQ ID NO: 2918
  GFR-binding peptide
  MOD_RES (33), (34): Xaa is C or S
  MOD_RES (11), (12), (13), (14), (15): Xaa is A or G
  MOD_RES (16), (17), (18), (19): Xaa is A or G or is absent

SEQ ID NO: 77239 - protein, 40 aa, Artificial Sequence; identical to SEQ ID NO: 56872
  GFR-binding peptide
  MOD_RES (2), (4), (37), (38): Xaa is C or S
  MOD_RES (15), (16), (17), (18), (19): Xaa is A or G
  MOD_RES (20), (21), (22), (23): Xaa is A or G or is absent

SEQ ID NO: 77240 - protein, 40 aa, Artificial Sequence; identical to SEQ ID NO: 4864
  GFR-binding peptide
  MOD_RES (2), (35), (36): Xaa is C or S
  MOD_RES (13), (14), (15), (16), (17): Xaa is A or G
  MOD_RES (18), (19), (20), (21): Xaa is A or G or is absent

SEQ ID NO: 77241 - protein, 36 aa, Artificial Sequence; identical to SEQ ID NO: 4865
  GFR-binding peptide
  MOD_RES (1), (3), (34), (35): Xaa is C or S

SEQ ID NO: 77242 - protein, 37 aa, Artificial Sequence; identical to SEQ ID NO: 2920
  GFR-binding peptide
  MOD_RES (32), (33): Xaa is C or S

SEQ ID NO: 77243 - protein, 37 aa, Artificial Sequence; identical to SEQ ID NO: 4867
  GFR-binding peptide
  MOD_RES (2), (4): Xaa is C or S
  MOD_RES (16), (17), (18), (19), (20): Xaa is A or G
  MOD_RES (21), (22), (23), (24): Xaa is A or G or is absent

SEQ ID NO: 77244 - protein, 36 aa, Artificial Sequence; identical to SEQ ID NO: 4868
  GFR-binding peptide
  MOD_RES (1), (3), (34), (35): Xaa is C or S

SEQ ID NO: 77245 - protein, 41 aa, Artificial Sequence; identical to SEQ ID NO: 2921
  GFR-binding peptide
  MOD_RES (2), (35), (36): Xaa is C or S

SEQ ID NO: 77246 - protein, 36 aa, Artificial Sequence; identical to SEQ ID NO: 4869
  GFR-binding peptide
  MOD_RES (1), (3), (36): Xaa is C or S

SEQ ID NO: 77247 - protein, 37 aa, Artificial Sequence
  GFR-binding peptide
  MOD_RES (2), (4), (36), (37): Xaa is C or S
SXGXRDVVMGQYNKLIIQQKDNLYLMSIASMKTPTXX

SEQ ID NO: 77248 - protein, 39 aa, Artificial Sequence; identical to SEQ ID NO: 2922
  GFR-binding peptide
  MOD_RES (2), (4), (38), (39): Xaa is C or S
  MOD_RES (16), (17), (18), (19), (20): Xaa is A or G
  MOD_RES (21), (22), (23), (24): Xaa is A or G or is absent

SEQ ID NO: 77249 - protein, 41 aa, Artificial Sequence; identical to SEQ ID NO: 2923
  GFR-binding peptide
  MOD_RES (2), (4), (39), (40): Xaa is C or S
  MOD_RES (17), (18), (19), (20), (21): Xaa is A or G
  MOD_RES (22), (23), (24), (25): Xaa is A or G or is absent

SEQ ID NO: 77250 - protein, 39 aa, Artificial Sequence; identical to SEQ ID NO: 23921
  GFR-binding peptide
  MOD_RES (34), (35): Xaa is C or S
  MOD_RES (12), (13), (14), (15), (16): Xaa is A or G
  MOD_RES (17), (18), (19), (20): Xaa is A or G or is absent

SEQ ID NO: 77251 - protein, 40 aa, Artificial Sequence; identical to SEQ ID NO: 4870
  GFR-binding peptide
  MOD_RES (2), (34), (35): Xaa is C or S

SEQ ID NO: 77252 - protein, 42 aa, Artificial Sequence
  GFR-binding peptide
  MOD_RES (2), (36), (37): Xaa is C or S
  MOD_RES (14), (15), (16), (17), (18): Xaa is A or G
  MOD_RES (19), (20), (21), (22): Xaa is A or G or is absent
GXSRVVMNQYNKLXXXXXXXXXLYLVSIASLKTPAXXPKPVH

SEQ ID NO: 77253 - protein, 37 aa, Artificial Sequence
  GFR-binding peptide
  MOD_RES (1), (33), (34): Xaa is C or S
XESVAMGQYNKLYTVVGKDLYLISIASLKTPVXXAKS

SEQ ID NO: 77254 - protein, 40 aa, Artificial Sequence; identical to SEQ ID NO: 2924
  GFR-binding peptide
  MOD_RES (2), (4), (37), (38): Xaa is C or S
  MOD_RES (15), (16), (17), (18), (19): Xaa is A or G
  MOD_RES (20), (21), (22), (23): Xaa is A or G or is absent

SEQ ID NO: 77255 - protein, 39 aa, Artificial Sequence
  GFR-binding peptide
  MOD_RES (2), (4), (38), (39): Xaa is C or S
  MOD_RES (16), (17), (18), (19), (20): Xaa is A or G
  MOD_RES (21), (22), (23), (24): Xaa is A or G or is absent
RXAXSEVTMNQYNKLXXXXXXXXXLYLISIASMKEPVXX

SEQ ID NO: 77256 - protein, 42 aa, Artificial Sequence; identical to SEQ ID NO: 2927
  GFR-binding peptide
  MOD_RES (2), (37), (38): Xaa is C or S
  MOD_RES (15), (16), (17), (18), (19): Xaa is A or G
  MOD_RES (20), (21), (22), (23): Xaa is A or G or is absent

SEQ ID NO: 77257 - protein, 36 aa, Artificial Sequence; identical to SEQ ID NO: 23928
  GFR-binding peptide
  MOD_RES (1), (3), (35), (36): Xaa is C or S

SEQ ID NO: 77258 - protein, 35 aa, Artificial Sequence; identical to SEQ ID NO: 56888
  GFR-binding peptide
  MOD_RES (1), (35): Xaa is C or S
  MOD_RES (13), (14), (15), (16), (17): Xaa is A or G
  MOD_RES (18), (19), (20), (21): Xaa is A or G or is absent

SEQ ID NO: 77259 - protein, 40 aa, Artificial Sequence; identical to SEQ ID NO: 2929
  GFR-binding peptide
  MOD_RES (1), (3), (34), (35): Xaa is C or S

SEQ ID NO: 77260 - protein, 41 aa, Artificial Sequence; identical to SEQ ID NO: 10392
  GFR-binding peptide
  MOD_RES (1), (3), (37), (38): Xaa is C or S
  MOD_RES (15), (16), (17), (18), (19): Xaa is A or G
  MOD_RES (20), (21), (22), (23): Xaa is A or G or is absent

SEQ ID NO: 77261 - protein, 38 aa, Artificial Sequence
  GFR-binding peptide
  MOD_RES (1), (33), (34): Xaa is C or S
XESVAMGQYNKLYTVVGKDLYLISIASLKTPVXXAKSA

SEQ ID NO: 77262 - protein, 40 aa, Artificial Sequence; identical to SEQ ID NO: 2930
  GFR-binding peptide
  MOD_RES (1), (3), (38), (39): Xaa is C or S
  MOD_RES (16), (17), (18), (19), (20): Xaa is A or G
  MOD_RES (21), (22), (23), (24): Xaa is A or G or is absent

SEQ ID NO: 77263 - protein, 34 aa, Artificial Sequence; identical to SEQ ID NO: 64026
  GFR-binding peptide
  MOD_RES (31), (32): Xaa is C or S

SEQ ID NO: 77264 - protein, 41 aa, Artificial Sequence; identical to SEQ ID NO: 25946
  GFR-binding peptide
  MOD_RES (2), (4), (36), (37): Xaa is C or S

SEQ ID NO: 77265 - protein, 37 aa, Artificial Sequence; identical to SEQ ID NO: 4872
  GFR-binding peptide
  MOD_RES (2), (36), (37): Xaa is C or S
  MOD_RES (14), (15), (16), (17), (18): Xaa is A or G
  MOD_RES (19), (20), (21), (22): Xaa is A or G or is absent

SEQ ID NO: 77266 - protein, 37 aa, Artificial Sequence; identical to SEQ ID NO: 2931
  GFR-binding peptide
  MOD_RES (2), (4): Xaa is C or S
  MOD_RES (16), (17), (18), (19), (20): Xaa is A or G
  MOD_RES (21), (22), (23), (24): Xaa is A or G or is absent

SEQ ID NO: 77267 - protein, 35 aa, Artificial Sequence; identical to SEQ ID NO: 2932
  GFR-binding peptide
  MOD_RES (1), (34), (35): Xaa is C or S

SEQ ID NO: 77268 - protein, 37 aa, Artificial Sequence; identical to SEQ ID NO: 2935
  GFR-binding peptide
  MOD_RES (2), (4), (37): Xaa is C or S
  MOD_RES (15), (16), (17), (18), (19): Xaa is A or G
  MOD_RES (20), (21), (22), (23): Xaa is A or G or is absent

SEQ ID NO: 77269 - protein, 36 aa, Artificial Sequence; identical to SEQ ID NO: 2936
  GFR-binding peptide
  MOD_RES (34), (35): Xaa is C or S
  MOD_RES (12), (13), (14), (15), (16): Xaa is A or G
  MOD_RES (17), (18), (19), (20): Xaa is A or G or is absent

SEQ ID NO: 77270 - protein, 35 aa, Artificial Sequence; identical to SEQ ID NO: 4875
  GFR-binding peptide
  MOD_RES (1), (3): Xaa is C or S
  MOD_RES (14), (15), (16), (17), (18): Xaa is A or G
  MOD_RES (19), (20), (21), (22): Xaa is A or G or is absent

SEQ ID NO: 77271 - protein, 39 aa, Artificial Sequence
  GFR-binding peptide
  MOD_RES (34), (35): Xaa is C or S
  MOD_RES (12), (13), (14), (15), (16): Xaa is A or G
  MOD_RES (17), (18), (19), (20): Xaa is A or G or is absent
RDVVMGQYNKLXXXXXXXXXLYLMSIASMKTPTXXPGAS

SEQ ID NO: 77272 - protein, 37 aa, Artificial Sequence; identical to SEQ ID NO: 2938
  GFR-binding peptide
  MOD_RES (1), (33), (34): Xaa is C or S

SEQ ID NO: 77273 - protein, 35 aa, Artificial Sequence; identical to SEQ ID NO: 2943
  GFR-binding peptide
  MOD_RES (32), (33): Xaa is C or S

SEQ ID NO: 77274 - protein, 41 aa, Artificial Sequence; identical to SEQ ID NO: 4876
  GFR-binding peptide
  MOD_RES (1), (3), (35), (36): Xaa is C or S

SEQ ID NO: 77275 - protein, 32 aa, Artificial Sequence; identical to SEQ ID NO: 10407
  GFR-binding peptide
  MOD_RES (11), (12), (13), (14), (15): Xaa is A or G
  MOD_RES (16), (17), (18), (19): Xaa is A or G or is absent

SEQ ID NO: 77276 - protein, 33 aa, Artificial Sequence; identical to SEQ ID NO: 62318
  GFR-binding peptide
  MOD_RES (2), (2): Xaa is C or S

SEQ ID NO: 77277 - protein, 40 aa, Artificial Sequence; identical to SEQ ID NO: 4878
  GFR-binding peptide
  MOD_RES (2), (4), (36), (37): Xaa is C or S

SEQ ID NO: 77278 - protein, 37 aa, Artificial Sequence; identical to SEQ ID NO: 4879
  GFR-binding peptide
  MOD_RES (1), (32), (33): Xaa is C or S

SEQ ID NO: 77279 - protein, 37 aa, Artificial Sequence; identical to SEQ ID NO: 4880
  GFR-binding peptide
  MOD_RES (2), (4), (35), (36): Xaa is C or S

SEQ ID NO: 77280 - protein, 31 aa, Artificial Sequence; identical to SEQ ID NO: 4881
  GFR-binding peptide
  MOD_RES (31), (31): Xaa is C or S

SEQ ID NO: 77281 - protein, 34 aa, Artificial Sequence; identical to SEQ ID NO: 56906
  GFR-binding peptide
  MOD_RES (2), (2): Xaa is C or S
  MOD_RES (13), (14), (15), (16), (17): Xaa is A or G
  MOD_RES (18), (19), (20), (21): Xaa is A or G or is absent

SEQ ID NO: 77282 - protein, 37 aa, Artificial Sequence; identical to SEQ ID NO: 2946
  GFR-binding peptide
  MOD_RES (2), (4), (36), (37): Xaa is C or S

SEQ ID NO: 77283 - protein, 34 aa, Artificial Sequence; identical to SEQ ID NO: 2947
  GFR-binding peptide
  MOD_RES (1), (1): Xaa is C or S
  MOD_RES (13), (14), (15), (16), (17): Xaa is A or G
  MOD_RES (18), (19), (20), (21): Xaa is A or G or is absent

SEQ ID NO: 77284 - protein, 39 aa, Artificial Sequence; identical to SEQ ID NO: 4885
  GFR-binding peptide
  MOD_RES (2), (4), (36), (37): Xaa is C or S

SEQ ID NO: 77285 - protein, 32 aa, Artificial Sequence
  GFR-binding peptide
  MOD_RES (31), (32): Xaa is C or S
EEVIMQYNKLLLVRGNDLYLMSIASTKVPAXX

SEQ ID NO: 77286 - protein, 38 aa, Artificial Sequence; identical to SEQ ID NO: 2952
  GFR-binding peptide
  MOD_RES (1), (34), (35): Xaa is C or S
  MOD_RES (12), (13), (14), (15), (16): Xaa is A or G
  MOD_RES (17), (18), (19), (20): Xaa is A or G or is absent

SEQ ID NO: 77287 - protein, 31 aa, Artificial Sequence; identical to SEQ ID NO: 2956
  GFR-binding peptide
  MOD_RES (31), (31): Xaa is C or S

SEQ ID NO: 77288 - protein, 34 aa, Artificial Sequence; identical to SEQ ID NO: 4886
  GFR-binding peptide
  MOD_RES (2), (34): Xaa is C or S

SEQ ID NO: 77289 - protein, 38 aa, Artificial Sequence
  GFR-binding peptide
  MOD_RES (2), (33), (34): Xaa is C or S
GXEEVIMQYNKLLLVRGNDLYLMSIASTKVPAXXTSPV

SEQ ID NO: 77290 - protein, 41 aa, Artificial Sequence; identical to SEQ ID NO: 56923
  GFR-binding peptide
  MOD_RES (2), (4), (36), (37): Xaa is C or S

SEQ ID NO: 77291 - protein, 31 aa, Artificial Sequence; identical to SEQ ID NO: 2959
  GFR-binding peptide
  MOD_RES (31), (31): Xaa is C or S

SEQ ID NO: 77292 - protein, 38 aa, Artificial Sequence
  GFR-binding peptide
  MOD_RES (1), (35), (36): Xaa is C or S
  MOD_RES (13), (14), (15), (16), (17): Xaa is A or G
  MOD_RES (18), (19), (20), (21): Xaa is A or G or is absent
XRDVVMGQYNKLXXXXXXXXXLYLMSIASMKTPTXXPG

SEQ ID NO: 77293 - protein, 42 aa, Artificial Sequence; identical to SEQ ID NO: 4890
  GFR-binding peptide
  MOD_RES (1), (3), (36), (37): Xaa is C or S
  MOD_RES (14), (15), (16), (17), (18): Xaa is A or G
  MOD_RES (19), (20), (21), (22): Xaa is A or G or is absent

SEQ ID NO: 77294 - protein, 41 aa, Artificial Sequence; identical to SEQ ID NO: 4891
  GFR-binding peptide
  MOD_RES (1), (3), (36), (37): Xaa is C or S
  MOD_RES (14), (15), (16), (17), (18): Xaa is A or G
  MOD_RES (19), (20), (21), (22): Xaa is A or G or is absent

SEQ ID NO: 77295 - protein, 37 aa, Artificial Sequence; identical to SEQ ID NO: 56925
  GFR-binding peptide
  MOD_RES (32), (33): Xaa is C or S

SEQ ID NO: 77296 - protein, 41 aa, Artificial Sequence; identical to SEQ ID NO: 4893
  GFR-binding peptide
  MOD_RES (1), (3), (37), (38): Xaa is C or S
  MOD_RES (15), (16), (17), (18), (19): Xaa is A or G
  MOD_RES (20), (21), (22), (23): Xaa is A or G or is absent

SEQ ID NO: 77297 - protein, 34 aa, Artificial Sequence
  GFR-binding peptide
  MOD_RES (1), (1): Xaa is C or S
  MOD_RES (13), (14), (15), (16), (17): Xaa is A or G
  MOD_RES (18), (19), (20), (21): Xaa is A or G or is absent
XSEVTMNQYNKLXXXXXXXXXLYLISIASMKEPV

SEQ ID NO: 77298 - protein, 34 aa, Artificial Sequence; identical to SEQ ID NO: 2966
  GFR-binding peptide
  MOD_RES (32), (33): Xaa is C or S

SEQ ID NO: 77299 - protein, 37 aa, Artificial Sequence; identical to SEQ ID NO: 4895
  GFR-binding peptide
  MOD_RES (1), (3), (34), (35): Xaa is C or S

SEQ ID NO: 77300 - protein, 36 aa, Artificial Sequence; identical to SEQ ID NO: 2967
  GFR-binding peptide
  MOD_RES (33), (34): Xaa is C or S
  MOD_RES (11), (12), (13), (14), (15): Xaa is A or G
  MOD_RES (16), (17), (18), (19): Xaa is A or G or is absent

SEQ ID NO: 77301 - protein, 41 aa, Artificial Sequence
  GFR-binding peptide
  MOD_RES (2), (36), (37): Xaa is C or S
  MOD_RES (14), (15), (16), (17), (18): Xaa is A or G
  MOD_RES (19), (20), (21), (22): Xaa is A or G or is absent
AXSEVTMNQYNKLXXXXXXXXXLYLISIASMKEPVXXPEPI

SEQ ID NO: 77302 - protein, 41 aa, Artificial Sequence; identical to SEQ ID NO: 2968
  GFR-binding peptide
  MOD_RES (2), (4), (36), (37): Xaa is C or S

SEQ ID NO: 77303 - protein, 38 aa, Artificial Sequence
  GFR-binding peptide
  MOD_RES (32), (33): Xaa is C or S
SRVVMNQYNKLIVNSSDDLYLVSIASLKTPAXXPKPVH

SEQ ID NO: 77304 - protein, 41 aa, Artificial Sequence; identical to SEQ ID NO: 64051
  GFR-binding peptide
  MOD_RES (1), (35), (36): Xaa is C or S
  MOD_RES (13), (14), (15), (16), (17): Xaa is A or G
  MOD_RES (18), (19), (20), (21): Xaa is A or G or is absent

SEQ ID NO: 77305 - protein, 39 aa, Artificial Sequence; identical to SEQ ID NO: 4897
  GFR-binding peptide
  MOD_RES (2), (4), (37), (38): Xaa is C or S
  MOD_RES (15), (16), (17), (18), (19): Xaa is A or G
  MOD_RES (20), (21), (22), (23): Xaa is A or G or is absent

SEQ ID NO: 77306 - protein, 43 aa, Artificial Sequence; identical to SEQ ID NO: 4898
  GFR-binding peptide
  MOD_RES (1), (3), (38), (39): Xaa is C or S
  MOD_RES (16), (17), (18), (19), (20): Xaa is A or G
  MOD_RES (21), (22), (23), (24): Xaa is A or G or is absent

SEQ ID NO: 77307 - protein, 35 aa, Artificial Sequence; identical to SEQ ID NO: 4899
  GFR-binding peptide
  MOD_RES (2), (35): Xaa is C or S
  MOD_RES (13), (14), (15), (16), (17): Xaa is A or G
  MOD_RES (18), (19), (20), (21): Xaa is A or G or is absent

SEQ ID NO: 77308 - protein, 35 aa, Artificial Sequence; identical to SEQ ID NO: 12340
  GFR-binding peptide
  MOD_RES (33), (34): Xaa is C or S
  MOD_RES (11), (12), (13), (14), (15): Xaa is A or G
  MOD_RES (16), (17), (18), (19): Xaa is A or G or is absent

SEQ ID NO: 77309 - protein, 37 aa, Artificial Sequence; identical to SEQ ID NO: 25985
  GFR-binding peptide
  MOD_RES (1), (33), (34): Xaa is C or S

SEQ ID NO: 77310 - protein, 32 aa, Artificial Sequence
  GFR-binding peptide
  MOD_RES (11), (12), (13), (14), (15): Xaa is A or G
  MOD_RES (16), (17), (18), (19): Xaa is A or G or is absent
EVTMNQYNKLXXXXXXXXXLYLISIASMKEPV

SEQ ID NO: 77311 - protein, 37 aa, Artificial Sequence; identical to SEQ ID NO: 4902
  GFR-binding peptide
  MOD_RES (2), (37): Xaa is C or S
  MOD_RES (15), (16), (17), (18), (19): Xaa is A or G
  MOD_RES (20), (21), (22), (23): Xaa is A or G or is absent

SEQ ID NO: 77312 - protein, 36 aa, Artificial Sequence; identical to SEQ ID NO: 23971
  GFR-binding peptide
  MOD_RES (34), (35): Xaa is C or S
  MOD_RES (12), (13), (14), (15), (16): Xaa is A or G
  MOD_RES (17), (18), (19), (20): Xaa is A or G or is absent

SEQ ID NO: 77313 - protein, 42 aa, Artificial Sequence; identical to SEQ ID NO: 4906
  GFR-binding peptide
  MOD_RES (1), (3), (36), (37): Xaa is C or S
  MOD_RES (14), (15), (16), (17), (18): Xaa is A or G
  MOD_RES (19), (20), (21), (22): Xaa is A or G or is absent

SEQ ID NO: 77314 - protein, 35 aa, Artificial Sequence; identical to SEQ ID NO: 25995
  GFR-binding peptide
  MOD_RES (1), (35): Xaa is C or S
  MOD_RES (13), (14), (15), (16), (17): Xaa is A or G
  MOD_RES (18), (19), (20), (21): Xaa is A or G or is absent

SEQ ID NO: 77315 - protein, 42 aa, Artificial Sequence
  GFR-binding peptide
  MOD_RES (1), (3), (37), (38): Xaa is C or S
  MOD_RES (15), (16), (17), (18), (19): Xaa is A or G
  MOD_RES (20), (21), (22), (23): Xaa is A or G or is absent
XGXRDVVMGQYNKLXXXXXXXXXLYLMSIASMKTPTXXPGAS

SEQ ID NO: 77316 - protein, 38 aa, Artificial Sequence; identical to SEQ ID NO: 2976
  GFR-binding peptide
  MOD_RES (2), (4), (37), (38): Xaa is C or S
  MOD_RES (15), (16), (17), (18), (19): Xaa is A or G
  MOD_RES (20), (21), (22), (23): Xaa is A or G or is absent

SEQ ID NO: 77317 - protein, 36 aa, Artificial Sequence; identical to SEQ ID NO: 10433
  GFR-binding peptide
  MOD_RES (32), (33): Xaa is C or S

SEQ ID NO: 77318 - protein, 42 aa, Artificial Sequence; identical to SEQ ID NO: 56948
  GFR-binding peptide
  MOD_RES (1), (3), (37), (38): Xaa is C or S
  MOD_RES (15), (16), (17), (18), (19): Xaa is A or G
  MOD_RES (20), (21), (22), (23): Xaa is A or G or is absent

SEQ ID NO: 77319 - protein, 40 aa, Artificial Sequence; identical to SEQ ID NO: 2983
  GFR-binding peptide
  MOD_RES (1), (3), (34), (35): Xaa is C or S

SEQ ID NO: 77320 - protein, 38 aa, Artificial Sequence
  GFR-binding peptide
  MOD_RES (2), (4), (36), (37): Xaa is C or S
RXGXESVAMGQYNKLYTVVGKDLYLISIASLKTPVXXA

SEQ ID NO: 77321 - protein, 44 aa, Artificial Sequence; identical to SEQ ID NO: 26002
  GFR-binding peptide
  MOD_RES (2), (4), (38), (39): Xaa is C or S
  MOD_RES (16), (17), (18), (19), (20): Xaa is A or G
  MOD_RES (21), (22), (23), (24): Xaa is A or G or is absent

SEQ ID NO: 77322 - protein, 37 aa, Artificial Sequence
  GFR-binding peptide
  MOD_RES (34), (35): Xaa is C or S
  MOD_RES (12), (13), (14), (15), (16): Xaa is A or G
  MOD_RES (17), (18), (19), (20): Xaa is A or G or is absent
ESVAMGQYNKLXXXXXXXXXLYLISIASLKTPVXXAK

SEQ ID NO: 77323 - protein, 37 aa, Artificial Sequence; identical to SEQ ID NO: 12350
  GFR-binding peptide
  MOD_RES (34), (35): Xaa is C or S
  MOD_RES (12), (13), (14), (15), (16): Xaa is A or G
  MOD_RES (17), (18), (19), (20): Xaa is A or G or is absent

SEQ ID NO: 77324 - protein, 30 aa, Artificial Sequence; identical to SEQ ID NO: 2986
  GFR-binding peptide

SEQ ID NO: 77325 - protein, 34 aa, Artificial Sequence
  GFR-binding peptide
  MOD_RES (2), (34): Xaa is C or S
GXESVAMGQYNKLYTVVGKDLYLISIASLKTPVX

SEQ ID NO: 77326 - protein, 38 aa, Artificial Sequence
  GFR-binding peptide
  MOD_RES (2), (35), (36): Xaa is C or S
  MOD_RES (13), (14), (15), (16), (17): Xaa is A or G
  MOD_RES (18), (19), (20), (21): Xaa is A or G or is absent
GXEEVIMQYNKLXXXXXXXXXLYLMSIASTKVPAXXTS

SEQ ID NO: 77327 - protein, 39 aa, Artificial Sequence; identical to SEQ ID NO: 2987
  GFR-binding peptide
  MOD_RES (34), (34): Xaa is C or S
  MOD_RES (12), (13), (14), (15), (16): Xaa is A or G
  MOD_RES (17), (18), (19), (20): Xaa is A or G or is absent

SEQ ID NO: 77328 - protein, 34 aa, Artificial Sequence; identical to SEQ ID NO: 4913
  GFR-binding peptide
  MOD_RES (1), (3), (34): Xaa is C or S

SEQ ID NO: 77329 - protein, 42 aa, Artificial Sequence; identical to SEQ ID NO: 4914
  GFR-binding peptide
  MOD_RES (1), (36), (37): Xaa is C or S
  MOD_RES (14), (15), (16), (17), (18): Xaa is A or G
  MOD_RES (19), (20), (21), (22): Xaa is A or G or is absent

SEQ ID NO: 77330 - protein, 39 aa, Artificial Sequence; identical to SEQ ID NO: 4915
  GFR-binding peptide
  MOD_RES (2), (33), (34): Xaa is C or S

SEQ ID NO: 77331 - protein, 40 aa, Artificial Sequence; identical to SEQ ID NO: 2989
  GFR-binding peptide
  MOD_RES (1), (35), (36): Xaa is C or S
  MOD_RES (13), (14), (15), (16), (17): Xaa is A or G
  MOD_RES (18), (19), (20), (21): Xaa is A or G or is absent

SEQ ID NO: 77332 - protein, 38 aa, Artificial Sequence; identical to SEQ ID NO: 4918
  GFR-binding peptide
  MOD_RES (2), (35), (36): Xaa is C or S
  MOD_RES (13), (14), (15), (16), (17): Xaa is A or G
  MOD_RES (18), (19), (20), (21): Xaa is A or G or is absent

SEQ ID NO: 77333 - protein, 32 aa, Artificial Sequence
  GFR-binding peptide
  MOD_RES (32), (32): Xaa is C or S
SEVTMNQYNKLVVNKNEDLYLISIASMKEPVX

SEQ ID NO: 77334 - protein, 39 aa, Artificial Sequence; identical to SEQ ID NO: 4920
  GFR-binding peptide
  MOD_RES (2), (4), (38), (39): Xaa is C or S
  MOD_RES (16), (17), (18), (19), (20): Xaa is A or G
  MOD_RES (21), (22), (23), (24): Xaa is A or G or is absent

SEQ ID NO: 77335 - protein, 36 aa, Artificial Sequence; identical to SEQ ID NO: 10446
  GFR-binding peptide
  MOD_RES (1), (35), (36): Xaa is C or S
  MOD_RES (13), (14), (15), (16), (17): Xaa is A or G
  MOD_RES (18), (19), (20), (21): Xaa is A or G or is absent

SEQ ID NO: 77336 - protein, 36 aa, Artificial Sequence; identical to SEQ ID NO: 56957
  GFR-binding peptide
  MOD_RES (2), (34), (35): Xaa is C or S

SEQ ID NO: 77337 - protein, 37 aa, Artificial Sequence; identical to SEQ ID NO: 26017
  GFR-binding peptide
  MOD_RES (33), (34): Xaa is C or S
  MOD_RES (11), (12), (13), (14), (15): Xaa is A or G
  MOD_RES (16), (17), (18), (19): Xaa is A or G or is absent

SEQ ID NO: 77338 - protein, 34 aa, Artificial Sequence; identical to SEQ ID NO: 10448
  GFR-binding peptide
  MOD_RES (33), (34): Xaa is C or S
  MOD_RES (11), (12), (13), (14), (15): Xaa is A or G
  MOD_RES (16), (17), (18), (19): Xaa is A or G or is absent

SEQ ID NO: 77339 - protein, 33 aa, Artificial Sequence; identical to SEQ ID NO: 2995
  GFR-binding peptide
  MOD_RES (1), (32), (33): Xaa is C or S

SEQ ID NO: 77340 - protein, 37 aa, Artificial Sequence; identical to SEQ ID NO: 23996
  GFR-binding peptide
  MOD_RES (2), (34), (35): Xaa is C or S

SEQ ID NO: 77341 - protein, 30 aa, Artificial Sequence; identical to SEQ ID NO: 2998
  GFR-binding peptide

SEQ ID NO: 77342 - protein, 38 aa, Artificial Sequence; identical to SEQ ID NO: 2999
  GFR-binding peptide
  MOD_RES (2), (4), (38): Xaa is C or S
  MOD_RES (16), (17), (18), (19), (20): Xaa is A or G
  MOD_RES (21), (22), (23), (24): Xaa is A or G or is absent

SEQ ID NO: 77343 - protein, 38 aa, Artificial Sequence; identical to SEQ ID NO: 3000
  GFR-binding peptide
  MOD_RES (1), (35), (36): Xaa is C or S
  MOD_RES (13), (14), (15), (16), (17): Xaa is A or G
  MOD_RES (18), (19), (20), (21): Xaa is A or G or is absent

SEQ ID NO: 77344 - protein, 37 aa, Artificial Sequence; identical to SEQ ID NO: 56966
  GFR-binding peptide
  MOD_RES (2), (4), (37): Xaa is C or S
  MOD_RES (15), (16), (17), (18), (19): Xaa is A or G
  MOD_RES (20), (21), (22), (23): Xaa is A or G or is absent

SEQ ID NO: 77345 - protein, 35 aa, Artificial Sequence
  GFR-binding peptide
  MOD_RES (2), (2): Xaa is C or S
  MOD_RES (14), (15), (16), (17), (18): Xaa is A or G
  MOD_RES (19), (20), (21), (22): Xaa is A or G or is absent
GXESVAMGQYNKLXXXXXXXXXLYLISIASLKTPV

SEQ ID NO: 77346 - protein, 38 aa, Artificial Sequence; identical to SEQ ID NO: 26024
  GFR-binding peptide
  MOD_RES (2), (4), (38): Xaa is C or S
  MOD_RES (16), (17), (18), (19), (20): Xaa is A or G
  MOD_RES (21), (22), (23), (24): Xaa is A or G or is absent

SEQ ID NO: 77347 - protein, 38 aa, Artificial Sequence
  GFR-binding peptide
  MOD_RES (1), (3), (37), (38): Xaa is C or S
  MOD_RES (15), (16), (17), (18), (19): Xaa is A or G
  MOD_RES (20), (21), (22), (23): Xaa is A or G or is absent
XGXAEVVMDQYNKLXXXXXXXXXLYLISIASLRAPVXX

SEQ ID NO: 77348 - protein, 32 aa, Artificial Sequence; identical to SEQ ID NO: 4933
  GFR-binding peptide
  MOD_RES (1), (1): Xaa is C or S

SEQ ID NO: 77349 - protein, 40 aa, Artificial Sequence; identical to SEQ ID NO: 56971
  GFR-binding peptide
  MOD_RES (2), (4), (35), (36): Xaa is C or S

SEQ ID NO: 77350 - protein, 35 aa, Artificial Sequence; identical to SEQ ID NO: 3004
  GFR-binding peptide
  MOD_RES (1), (34), (35): Xaa is C or S
  MOD_RES (12), (13), (14), (15), (16): Xaa is A or G
  MOD_RES (17), (18), (19), (20): Xaa is A or G or is absent

SEQ ID NO: 77351 - protein, 39 aa, Artificial Sequence
  GFR-binding peptide
  MOD_RES (2), (4), (38), (39): Xaa is C or S
  MOD_RES (16), (17), (18), (19), (20): Xaa is A or G
  MOD_RES (21), (22), (23), (24): Xaa is A or G or is absent
SXGXRDVVMGQYNKLXXXXXXXXXLYLMSIASMKTPTXX

SEQ ID NO: 77352 - protein, 38 aa, Artificial Sequence; identical to SEQ ID NO: 56973
  GFR-binding peptide
  MOD_RES (2), (4), (38): Xaa is C or S
  MOD_RES (16), (17), (18), (19), (20): Xaa is A or G
  MOD_RES (21), (22), (23), (24): Xaa is A or G or is absent

SEQ ID NO: 77353 - protein, 36 aa, Artificial Sequence; identical to SEQ ID NO: 3005
  GFR-binding peptide
  MOD_RES (33), (33): Xaa is C or S
  MOD_RES (11), (12), (13), (14), (15): Xaa is A or G
  MOD_RES (16), (17), (18), (19): Xaa is A or G or is absent

SEQ ID NO: 77354 - protein, 38 aa, Artificial Sequence; identical to SEQ ID NO: 4934
  GFR-binding peptide
  MOD_RES (1), (3), (38): Xaa is C or S
  MOD_RES (16), (17), (18), (19), (20): Xaa is A or G
  MOD_RES (21), (22), (23), (24): Xaa is A or G or is absent

SEQ ID NO: 77355 - protein, 37 aa, Artificial Sequence; identical to SEQ ID NO: 64092
  GFR-binding peptide
  MOD_RES (2), (34), (35): Xaa is C or S

SEQ ID NO: 77356 - protein, 36 aa, Artificial Sequence; identical to SEQ ID NO: 4935
  GFR-binding peptide
  MOD_RES (1), (3): Xaa is C or S
  MOD_RES (15), (16), (17), (18), (19): Xaa is A or G
  MOD_RES (20), (21), (22), (23): Xaa is A or G or is absent

SEQ ID NO: 77357 - protein, 38 aa, Artificial Sequence; identical to SEQ ID NO: 4936
  GFR-binding peptide
  MOD_RES (1), (3), (35), (36): Xaa is C or S

SEQ ID NO: 77358 - protein, 39 aa, Artificial Sequence
  GFR-binding peptide
  MOD_RES (2), (4), (38), (39): Xaa is C or S
  MOD_RES (16), (17), (18), (19), (20): Xaa is A or G
  MOD_RES (21), (22), (23), (24): Xaa is A or G or is absent
RXGXAEVVMDQYNKLXXXXXXXXXLYLISIASLRAPVXX

SEQ ID NO: 77359 - protein, 37 aa, Artificial Sequence; identical to SEQ ID NO: 4938
  GFR-binding peptide
  MOD_RES (2), (4), (37): Xaa is C or S
  MOD_RES (15), (16), (17), (18), (19): Xaa is A or G
  MOD_RES (20), (21), (22), (23): Xaa is A or G or is absent

SEQ ID NO: 77360 - protein, 42 aa, Artificial Sequence; identical to SEQ ID NO: 4940
  GFR-binding peptide
  MOD_RES (2), (4), (39), (40): Xaa is C or S
  MOD_RES (17), (18), (19), (20), (21): Xaa is A or G
  MOD_RES (22), (23), (24), (25): Xaa is A or G or is absent

SEQ ID NO: 77361 - protein, 37 aa, Artificial Sequence; identical to SEQ ID NO: 3008
  GFR-binding peptide
  MOD_RES (1), (35), (36): Xaa is C or S
  MOD_RES (13), (14), (15), (16), (17): Xaa is A or G
  MOD_RES (18), (19), (20), (21): Xaa is A or G or is absent

SEQ ID NO: 77362 - protein, 37 aa, Artificial Sequence; identical to SEQ ID NO: 4943
  GFR-binding peptide
  MOD_RES (32), (33): Xaa is C or S

SEQ ID NO: 77363 - protein, 36 aa, Artificial Sequence; identical to SEQ ID NO: 3011
  GFR-binding peptide
  MOD_RES (2), (34), (35): Xaa is C or S

SEQ ID NO: 77364 - protein, 36 aa, Artificial Sequence; identical to SEQ ID NO: 4944
  GFR-binding peptide
  MOD_RES (1), (33), (34): Xaa is C or S

SEQ ID NO: 77365 - protein, 40 aa, Artificial Sequence
  GFR-binding peptide
  MOD_RES (1), (3), (37), (38): Xaa is C or S
  MOD_RES (15), (16), (17), (18), (19): Xaa is A or G
  MOD_RES (20), (21), (22), (23): Xaa is A or G or is absent
XAXSEVTMNQYNKLXXXXXXXXXLYLISIASMKEPVXXPE

SEQ ID NO: 77366 - protein, 33 aa, Artificial Sequence; identical to SEQ ID NO: 3013
  GFR-binding peptide
  MOD_RES (2), (2): Xaa is C or S

SEQ ID NO: 77367 - protein, 37 aa, Artificial Sequence; identical to SEQ ID NO: 3014
  GFR-binding peptide
  MOD_RES (1), (3), (37): Xaa is C or S
  MOD_RES (15), (16), (17), (18), (19): Xaa is A or G
  MOD_RES (20), (21), (22), (23): Xaa is A or G or is absent

SEQ ID NO: 77368 - protein, 34 aa, Artificial Sequence; identical to SEQ ID NO: 12378
  GFR-binding peptide
  MOD_RES (2), (34): Xaa is C or S

SEQ ID NO: 77369 - protein, 39 aa, Artificial Sequence; identical to SEQ ID NO: 56984
  GFR-binding peptide
  MOD_RES (33), (34): Xaa is C or S
  MOD_RES (11), (12), (13), (14), (15): Xaa is A or G
  MOD_RES (16), (17), (18), (19): Xaa is A or G or is absent

SEQ ID NO: 77370 - protein, 38 aa, Artificial Sequence; identical to SEQ ID NO: 3018
  GFR-binding peptide
  MOD_RES (34), (35): Xaa is C or S
  MOD_RES (12), (13), (14), (15), (16): Xaa is A or G
  MOD_RES (17), (18), (19), (20): Xaa is A or G or is absent

SEQ ID NO: 77371 - protein, 43 aa, Artificial Sequence; identical to SEQ ID NO: 3020
  GFR-binding peptide
  MOD_RES (2), (4), (37), (38): Xaa is C or S
  MOD_RES (15), (16), (17), (18), (19): Xaa is A or G
  MOD_RES (20), (21), (22), (23): Xaa is A or G or is absent

SEQ ID NO: 77372 - protein, 35 aa, Artificial Sequence; identical to SEQ ID NO: 4954
  GFR-binding peptide
  MOD_RES (1), (33): Xaa is C or S

SEQ ID NO: 77373 - protein, 37 aa, Artificial Sequence; identical to SEQ ID NO: 12386
  GFR-binding peptide
  MOD_RES (2), (4): Xaa is C or S
  MOD_RES (16), (17), (18), (19), (20): Xaa is A or G
  MOD_RES (21), (22), (23), (24): Xaa is A or G or is absent

SEQ ID NO: 77374 - protein, 40 aa, Artificial Sequence; identical to SEQ ID NO: 12387
  GFR-binding peptide
  MOD_RES (2), (36), (37): Xaa is C or S
  MOD_RES (14), (15), (16), (17), (18): Xaa is A or G
  MOD_RES (19), (20), (21), (22): Xaa is A or G or is absent

SEQ ID NO: 77375 - protein, 37 aa, Artificial Sequence; identical to SEQ ID NO: 4955
  GFR-binding peptide
  MOD_RES (2), (34), (35): Xaa is C or S

SEQ ID NO: 77376 - protein, 36 aa, Artificial Sequence; identical to SEQ ID NO: 4957
  GFR-binding peptide
  MOD_RES (33), (34): Xaa is C or S
  MOD_RES (11), (12), (13), (14), (15): Xaa is A or G
  MOD_RES (16), (17), (18), (19): Xaa is A or G or is absent

SEQ ID NO: 77377 - protein, 35 aa, Artificial Sequence; identical to SEQ ID NO: 4959
  GFR-binding peptide
  MOD_RES (1), (32), (33): Xaa is C or S

SEQ ID NO: 77378 - protein, 40 aa, Artificial Sequence; identical to SEQ ID NO: 3025
  GFR-binding peptide
  MOD_RES (2), (4), (37), (38): Xaa is C or S
  MOD_RES (15), (16), (17), (18), (19): Xaa is A or G
  MOD_RES (20), (21), (22), (23): Xaa is A or G or is absent

SEQ ID NO: 77379 - protein, 39 aa, Artificial Sequence; identical to SEQ ID NO: 56996
  GFR-binding peptide
  MOD_RES (1), (3), (34), (35): Xaa is C or S

SEQ ID NO: 77380 - protein, 39 aa, Artificial Sequence; identical to SEQ ID NO: 4960
  GFR-binding peptide
  MOD_RES (33), (34): Xaa is C or S
  MOD_RES (11), (12), (13), (14), (15): Xaa is A or G
  MOD_RES (16), (17), (18), (19): Xaa is A or G or is absent

SEQ ID NO: 77381 - protein, 35 aa, Artificial Sequence; identical to SEQ ID NO: 3026
  GFR-binding peptide
  MOD_RES (1), (3), (35): Xaa is C or S

SEQ ID NO: 77382 - protein, 36 aa, Artificial Sequence; identical to SEQ ID NO: 24023
  GFR-binding peptide
  MOD_RES (1), (35), (36): Xaa is C or S
  MOD_RES (13), (14), (15), (16), (17): Xaa is A or G
  MOD_RES (18), (19), (20), (21): Xaa is A or G or is absent

SEQ ID NO: 77383 - protein, 41 aa, Artificial Sequence; identical to SEQ ID NO: 56998
  GFR-binding peptide
  MOD_RES (1), (35), (36): Xaa is C or S
  MOD_RES (13), (14), (15), (16), (17): Xaa is A or G
  MOD_RES (18), (19), (20), (21): Xaa is A or G or is absent

SEQ ID NO: 77384 - protein, 34 aa, Artificial Sequence
  GFR-binding peptide
  MOD_RES (2), (34): Xaa is C or S
GXAEVVMDQYNKLVVNNAADLYLISIASLRAPVX

SEQ ID NO: 77385 - protein, 35 aa, Artificial Sequence; identical to SEQ ID NO: 12395
  GFR-binding peptide
  MOD_RES (2), (34), (35): Xaa is C or S

SEQ ID NO: 77386 - protein, 35 aa, Artificial Sequence; identical to SEQ ID NO: 3028
  GFR-binding peptide
  MOD_RES (32), (33): Xaa is C or S

SEQ ID NO: 77387 - protein, 38 aa, Artificial Sequence; identical to SEQ ID NO: 3029
  GFR-binding peptide
  MOD_RES (35), (36): Xaa is C or S
  MOD_RES (13), (14), (15), (16), (17): Xaa is A or G
  MOD_RES (18), (19), (20), (21): Xaa is A or G or is absent

SEQ ID NO: 77388 - protein, 38 aa, Artificial Sequence; identical to SEQ ID NO: 4964
  GFR-binding peptide
  MOD_RES (34), (35): Xaa is C or S
  MOD_RES (12), (13), (14), (15), (16): Xaa is A or G
  MOD_RES (17), (18), (19), (20): Xaa is A or G or is absent

SEQ ID NO: 77389 - protein, 33 aa, Artificial Sequence; identical to SEQ ID NO: 4967
  GFR-binding peptide
  MOD_RES (1), (32), (33): Xaa is C or S

SEQ ID NO: 77390 - protein, 35 aa, Artificial Sequence; identical to SEQ ID NO: 3031
  GFR-binding peptide
  MOD_RES (1), (34), (35): Xaa is C or S
  MOD_RES (12), (13), (14), (15), (16): Xaa is A or G
  MOD_RES (17), (18), (19), (20): Xaa is A or G or is absent

SEQ ID NO: 77391 - protein, 40 aa, Artificial Sequence; identical to SEQ ID NO: 4968
  GFR-binding peptide
  MOD_RES (2), (37), (38): Xaa is C or S
  MOD_RES (15), (16), (17), (18), (19): Xaa is A or G
  MOD_RES (20), (21), (22), (23): Xaa is A or G or is absent

SEQ ID NO: 77392 - protein, 37 aa, Artificial Sequence
  GFR-binding peptide
  MOD_RES (33), (34): Xaa is C or S
  MOD_RES (11), (12), (13), (14), (15): Xaa is A or G
  MOD_RES (16), (17), (18), (19): Xaa is A or G or is absent
DVVMGQYNKLXXXXXXXXXLYLMSIASMKTPTXXPGA

SEQ ID NO: 77393 - protein, 34 aa, Artificial Sequence; identical to SEQ ID NO: 4969
  GFR-binding peptide
  MOD_RES (34), (34): Xaa is C or S
  MOD_RES (12), (13), (14), (15), (16): Xaa is A or G
  MOD_RES (17), (18), (19), (20): Xaa is A or G or is absent

SEQ ID NO: 77394 - protein, 38 aa, Artificial Sequence; identical to SEQ ID NO: 4970
  GFR-binding peptide
  MOD_RES (34), (35): Xaa is C or S
  MOD_RES (12), (13), (14), (15), (16): Xaa is A or G
  MOD_RES (17), (18), (19), (20): Xaa is A or G or is absent

SEQ ID NO: 77395 - protein, 35 aa, Artificial Sequence; identical to SEQ ID NO: 3033
  GFR-binding peptide
  MOD_RES (2), (33), (34): Xaa is C or S

SEQ ID NO: 77396 - protein, 35 aa, Artificial Sequence; identical to SEQ ID NO: 4974
  GFR-binding peptide
  MOD_RES (2), (4): Xaa is C or S

SEQ ID NO: 77397 - protein, 38 aa, Artificial Sequence; identical to SEQ ID NO: 4977
  GFR-binding peptide
  MOD_RES (2), (36), (37): Xaa is C or S
  MOD_RES (14), (15), (16), (17), (18): Xaa is A or G
  MOD_RES (19), (20), (21), (22): Xaa is A or G or is absent

SEQ ID NO: 77398 - protein, 36 aa, Artificial Sequence; identical to SEQ ID NO: 26069
  GFR-binding peptide
  MOD_RES (34), (35): Xaa is C or S
  MOD_RES (12), (13), (14), (15), (16): Xaa is A or G
  MOD_RES (17), (18), (19), (20): Xaa is A or G or is absent

SEQ ID NO: 77399 - protein, 38 aa, Artificial Sequence; identical to SEQ ID NO: 4980
  GFR-binding peptide
  MOD_RES (32), (33): Xaa is C or S

SEQ ID NO: 77400 - protein, 43 aa, Artificial Sequence; identical to SEQ ID NO: 4981
  GFR-binding peptide
  MOD_RES (1), (3), (37), (38): Xaa is C or S
  MOD_RES (15), (16), (17), (18), (19): Xaa is A or G
  MOD_RES (20), (21), (22), (23): Xaa is A or G or is absent

SEQ ID NO: 77401 - protein, 37 aa, Artificial Sequence
  GFR-binding peptide
  MOD_RES (34), (35): Xaa is C or S
  MOD_RES (12), (13), (14), (15), (16): Xaa is A or G
  MOD_RES (17), (18), (19), (20): Xaa is A or G or is absent
AEVVMDQYNKLXXXXXXXXXLYLISIASLRAPVXXSA

SEQ ID NO: 77402 - protein, 35 aa, Artificial Sequence; identical to SEQ ID NO: 57011
  GFR-binding peptide
  MOD_RES (2), (33), (34): Xaa is C or S

SEQ ID NO: 77403 - protein, 43 aa, Artificial Sequence; identical to SEQ ID NO: 12416
  GFR-binding peptide
  MOD_RES (1), (3), (37), (38): Xaa is C or S
  MOD_RES (15), (16), (17), (18), (19): Xaa is A or G
  MOD_RES (20), (21), (22), (23): Xaa is A or G or is absent

SEQ ID NO: 77404 - protein, 39 aa, Artificial Sequence; identical to SEQ ID NO: 3039
  GFR-binding peptide
  MOD_RES (2), (35), (36): Xaa is C or S
  MOD_RES (13), (14), (15), (16), (17): Xaa is A or G
  MOD_RES (18), (19), (20), (21): Xaa is A or G or is absent

SEQ ID NO: 77405 - protein, 33 aa, Artificial Sequence
  GFR-binding peptide
  MOD_RES (33), (33): Xaa is C or S
  MOD_RES (11), (12), (13), (14), (15): Xaa is A or G
  MOD_RES (16), (17), (18), (19): Xaa is A or G or is absent
EVTMNQYNKLXXXXXXXXXLYLISIASMKEPVX

SEQ ID NO: 77406 - protein, 38 aa, Artificial Sequence; identical to SEQ ID NO: 3041
  GFR-binding peptide
  MOD_RES (1), (3), (35): Xaa is C or S

SEQ ID NO: 77407 - protein, 35 aa, Artificial Sequence; identical to SEQ ID NO: 3042
  GFR-binding peptide
  MOD_RES (32), (33): Xaa is C or S

SEQ ID NO: 77408 - protein, 44 aa, Artificial Sequence
  GFR-binding peptide
  MOD_RES (2), (4), (38), (39): Xaa is C or S
  MOD_RES (16), (17), (18), (19), (20): Xaa is A or G
  MOD_RES (21), (22), (23), (24): Xaa is A or G or is absent
SXGXRDVVMGQYNKLXXXXXXXXXLYLMSIASMKTPTXXPGASG

SEQ ID NO: 77409 - protein, 38 aa, Artificial Sequence; identical to SEQ ID NO: 4985
  GFR-binding peptide
  MOD_RES (2), (4), (35), (36): Xaa is C or S

SEQ ID NO: 77410 - protein, 39 aa, Artificial Sequence
  GFR-binding peptide
  MOD_RES (1), (3), (37), (38): Xaa is C or S
  MOD_RES (15), (16), (17), (18), (19): Xaa is A or G
  MOD_RES (20), (21), (22), (23): Xaa is A or G or is absent
XAXSEVTMNQYNKLXXXXXXXXXLYLISIASMKEPVXXP

SEQ ID NO: 77411 - protein, 37 aa, Artificial Sequence; identical to SEQ ID NO: 3046
  GFR-binding peptide
  MOD_RES (2), (33), (34): Xaa is C or S

SEQ ID NO: 77412 - protein, 32 aa, Artificial Sequence; identical to SEQ ID NO: 57023
  GFR-binding peptide
  MOD_RES (1), (32): Xaa is C or S

SEQ ID NO: 77413 - protein, 35 aa, Artificial Sequence
  GFR-binding peptide
  MOD_RES (32), (33): Xaa is C or S
ESVAMGQYNKLYTVVGKDLYLISIASLKTPVXXAK

SEQ ID NO: 77414 - protein, 40 aa, Artificial Sequence
  GFR-binding peptide
  MOD_RES (1), (3), (37), (38): Xaa is C or S
  MOD_RES (15), (16), (17), (18), (19): Xaa is A or G
  MOD_RES (20), (21), (22), (23): Xaa is A or G or is absent
XGXRDVVMGQYNKLXXXXXXXXXLYLMSIASMKTPTXXPG

SEQ ID NO: 77415 - protein, 32 aa, Artificial Sequence
  GFR-binding peptide
  MOD_RES (32), (32): Xaa is C or S
ESVAMGQYNKLYTVVGKDLYLISIASLKTPVX

SEQ ID NO: 77416 - protein, 43 aa, Artificial Sequence
  GFR-binding peptide
  MOD_RES (1), (3), (37), (38): Xaa is C or S
  MOD_RES (15), (16), (17), (18), (19): Xaa is A or G
  MOD_RES (20), (21), (22), (23): Xaa is A or G or is absent
XGXESVAMGQYNKLXXXXXXXXXLYLISIASLKTPVXXAKSAK

SEQ ID NO: 77417 - protein, 39 aa, Artificial Sequence; identical to SEQ ID NO: 12424
  GFR-binding peptide
  MOD_RES (1), (35), (36): Xaa is C or S
  MOD_RES (13), (14), (15), (16), (17): Xaa is A or G
  MOD_RES (18), (19), (20), (21): Xaa is A or G or is absent

SEQ ID NO: 77418 - protein, 41 aa, Artificial Sequence; identical to SEQ ID NO: 3049
  GFR-binding peptide
  MOD_RES (2), (4), (35), (36): Xaa is C or S

SEQ ID NO: 77419 - protein, 44 aa, Artificial Sequence; identical to SEQ ID NO: 3051
  GFR-binding peptide
  MOD_RES (2), (4), (38), (39): Xaa is C or S
  MOD_RES (16), (17), (18), (19), (20): Xaa is A or G
  MOD_RES (21), (22), (23), (24): Xaa is A or G or is absent

SEQ ID NO: 77420 - protein, 38 aa, Artificial Sequence; identical to SEQ ID NO: 26081
  GFR-binding peptide
  MOD_RES (34), (35): Xaa is C or S
  MOD_RES (12), (13), (14), (15), (16): Xaa is A or G
  MOD_RES (17), (18), (19), (20): Xaa is A or G or is absent

SEQ ID NO: 77421 - protein, 36 aa, Artificial Sequence; identical to SEQ ID NO: 4988
  GFR-binding peptide
  MOD_RES (35), (36): Xaa is C or S
  MOD_RES (13), (14), (15), (16), (17): Xaa is A or G
  MOD_RES (18), (19), (20), (21): Xaa is A or G or is absent

SEQ ID NO: 77422 - protein, 39 aa, Artificial Sequence; identical to SEQ ID NO: 3052
  GFR-binding peptide
  MOD_RES (1), (35), (36): Xaa is C or S
  MOD_RES (13), (14), (15), (16), (17): Xaa is A or G
  MOD_RES (18), (19), (20), (21): Xaa is A or G or is absent

SEQ ID NO: 77423 - protein, 34 aa, Artificial Sequence; identical to SEQ ID NO: 12427
  GFR-binding peptide
  MOD_RES (1), (1): Xaa is C or S
  MOD_RES (13), (14), (15), (16), (17): Xaa is A or G
  MOD_RES (18), (19), (20), (21): Xaa is A or G or is absent

SEQ ID NO: 77424 - protein, 43 aa, Artificial Sequence; identical to SEQ ID NO: 3053
  GFR-binding peptide
  MOD_RES (2), (4), (38), (39): Xaa is C or S
  MOD_RES (16), (17), (18), (19), (20): Xaa is A or G
  MOD_RES (21), (22), (23), (24): Xaa is A or G or is absent

SEQ ID NO: 77425 - protein, 38 aa, Artificial Sequence; identical to SEQ ID NO: 3054
  GFR-binding peptide
  MOD_RES (1), (3), (36), (37): Xaa is C or S
  MOD_RES (14), (15), (16), (17), (18): Xaa is A or G
  MOD_RES (19), (20), (21), (22): Xaa is A or G or is absent

SEQ ID NO: 77426 - protein, 35 aa, Artificial Sequence; identical to SEQ ID NO: 24056
  GFR-binding peptide
  MOD_RES (32), (33): Xaa is C or S

SEQ ID NO: 77427 - protein, 36 aa, Artificial Sequence
  GFR-binding peptide
  MOD_RES (2), (33), (34): Xaa is C or S
GXEEVIMQYNKLLLVRGNDLYLMSIASTKVPAXXTS

SEQ ID NO: 77428 - protein, 39 aa, Artificial Sequence; identical to SEQ ID NO: 12430
  GFR-binding peptide
  MOD_RES (2), (36), (37): Xaa is C or S
  MOD_RES (14), (15), (16), (17), (18): Xaa is A or G
  MOD_RES (19), (20), (21), (22): Xaa is A or G or is absent

SEQ ID NO: 77429 - protein, 37 aa, Artificial Sequence; identical to SEQ ID NO: 3057
  GFR-binding peptide
  MOD_RES (34), (35): Xaa is C or S
  MOD_RES (12), (13), (14), (15), (16): Xaa is A or G
  MOD_RES (17), (18), (19), (20): Xaa is A or G or is absent

SEQ ID NO: 77430 - protein, 40 aa, Artificial Sequence; identical to SEQ ID NO: 3058
  GFR-binding peptide
  MOD_RES (2), (4), (38), (39): Xaa is C or S
  MOD_RES (16), (17), (18), (19), (20): Xaa is A or G
  MOD_RES (21), (22), (23), (24): Xaa is A or G or is absent

SEQ ID NO: 77431 - protein, 39 aa, Artificial Sequence; identical to SEQ ID NO: 12433
  GFR-binding peptide
  MOD_RES (1), (3), (35), (36): Xaa is C or S

SEQ ID NO: 77432 - protein, 38 aa, Artificial Sequence; identical to SEQ ID NO: 4991
  GFR-binding peptide
  MOD_RES (2), (33), (34): Xaa is C or S

SEQ ID NO: 77433 - protein, 42 aa, Artificial Sequence
  GFR-binding peptide
  MOD_RES (2), (4), (36), (37): Xaa is C or S
RXGXESVAMGQYNKLYTVVGKDLYLISIASLKTPVXXAKSAK

SEQ ID NO: 77434 - protein, 42 aa, Artificial Sequence; identical to SEQ ID NO: 57042
  GFR-binding peptide
  MOD_RES (1), (3), (36), (37): Xaa is C or S
  MOD_RES (14), (15), (16), (17), (18): Xaa is A or G
  MOD_RES (19), (20), (21), (22): Xaa is A or G or is absent

SEQ ID NO: 77435 - protein, 35 aa, Artificial Sequence
  GFR-binding peptide
  MOD_RES (1), (3), (34), (35): Xaa is C or S
XGXEEVIMQYNKLLLVRGNDLYLMSIASTKVPAXX

SEQ ID NO: 77436 - protein, 40 aa, Artificial Sequence; identical to SEQ ID NO: 3059
  GFR-binding peptide
  MOD_RES (1), (3), (37): Xaa is C or S
  MOD_RES (15), (16), (17), (18), (19): Xaa is A or G
  MOD_RES (20), (21), (22), (23): Xaa is A or G or is absent

SEQ ID NO: 77437 - protein, 32 aa, Artificial Sequence; identical to SEQ ID NO: 3061
  GFR-binding peptide
  MOD_RES (11), (12), (13), (14), (15): Xaa is A or G
  MOD_RES (16), (17), (18), (19): Xaa is A or G or is absent

SEQ ID NO: 77438 - protein, 35 aa, Artificial Sequence; identical to SEQ ID NO: 57048
  GFR-binding peptide
  MOD_RES (2), (4), (35): Xaa is C or S

SEQ ID NO: 77439 - protein, 41 aa, Artificial Sequence; identical to SEQ ID NO: 57050
  GFR-binding peptide
  MOD_RES (1), (3), (37), (38): Xaa is C or S
  MOD_RES (15), (16), (17), (18), (19): Xaa is A or G
  MOD_RES (20), (21), (22), (23): Xaa is A or G or is absent

SEQ ID NO: 77440 - protein, 37 aa, Artificial Sequence
  GFR-binding peptide
  MOD_RES (1), (3), (35), (36): Xaa is C or S
XAXSEVTMNQYNKLVVNKNEDLYLISIASMKEPVXXP

SEQ ID NO: 77441 - protein, 33 aa, Artificial Sequence; identical to SEQ ID NO: 26093
  GFR-binding peptide
  MOD_RES (1), (33): Xaa is C or S

SEQ ID NO: 77442 - protein, 35 aa, Artificial Sequence; identical to SEQ ID NO: 5000
  GFR-binding peptide
  MOD_RES (2), (34), (35): Xaa is C or S

SEQ ID NO: 77443 - protein, 39 aa, Artificial Sequence; identical to SEQ ID NO: 5004
  GFR-binding peptide
  MOD_RES (1), (3), (35), (36): Xaa is C or S

SEQ ID NO: 77444 - protein, 44 aa, Artificial Sequence; identical to SEQ ID NO: 64166
  GFR-binding peptide
  MOD_RES (2), (4), (38), (39): Xaa is C or S
  MOD_RES (16), (17), (18), (19), (20): Xaa is A or G
  MOD_RES (21), (22), (23), (24): Xaa is A or G or is absent

SEQ ID NO: 77445 - protein, 37 aa, Artificial Sequence; identical to SEQ ID NO: 5006
  GFR-binding peptide
  MOD_RES (1), (3), (34), (35): Xaa is C or S

SEQ ID NO: 77446 - protein, 31 aa, Artificial Sequence; identical to SEQ ID NO: 3074
  GFR-binding peptide
  MOD_RES (31), (31): Xaa is C or S

SEQ ID NO: 77447 - protein, 37 aa, Artificial Sequence; identical to SEQ ID NO: 10532
  GFR-binding peptide
  MOD_RES (34), (35): Xaa is C or S
  MOD_RES (12), (13), (14), (15), (16): Xaa is A or G
  MOD_RES (17), (18), (19), (20): Xaa is A or G or is absent

SEQ ID NO: 77448 - protein, 41 aa, Artificial Sequence; identical to SEQ ID NO: 3075
  GFR-binding peptide
  MOD_RES (2), (37), (38): Xaa is C or S
  MOD_RES (15), (16), (17), (18), (19): Xaa is A or G
  MOD_RES (20), (21), (22), (23): Xaa is A or G or is absent

SEQ ID NO: 77449 - protein, 37 aa, Artificial Sequence; identical to SEQ ID NO: 5008
  GFR-binding peptide
  MOD_RES (1), (3), (36), (37): Xaa is C or S

SEQ ID NO: 77450 - protein, 37 aa, Artificial Sequence; identical to SEQ ID NO: 5009
  GFR-binding peptide
  MOD_RES (1), (3), (36), (37): Xaa is C or S
  MOD_RES (14), (15), (16), (17), (18): Xaa is A or G
  MOD_RES (19), (20), (21), (22): Xaa is A or G or is absent

SEQ ID NO: 77451 - protein, 36 aa, Artificial Sequence; identical to SEQ ID NO: 26101
  GFR-binding peptide
  MOD_RES (33), (34): Xaa is C or S
  MOD_RES (11), (12), (13), (14), (15): Xaa is A or G
  MOD_RES (16), (17), (18), (19): Xaa is A or G or is absent

SEQ ID NO: 77452 - protein, 39 aa, Artificial Sequence
  GFR-binding peptide
  MOD_RES (1), (3), (37), (38): Xaa is C or S
  MOD_RES (15), (16), (17), (18), (19): Xaa is A or G
  MOD_RES (20), (21), (22), (23): Xaa is A or G or is absent
XGXAEVVMDQYNKLXXXXXXXXXLYLISIASLRAPVXXS

SEQ ID NO: 77453 - protein, 35 aa, Artificial Sequence; identical to SEQ ID NO: 5010
  GFR-binding peptide
  MOD_RES (1), (33), (34): Xaa is C or S

SEQ ID NO: 77454 - protein, 40 aa, Artificial Sequence
  GFR-binding peptide
  MOD_RES (1), (34), (35): Xaa is C or S
  MOD_RES (12), (13), (14), (15), (16): Xaa is A or G
  MOD_RES (17), (18), (19), (20): Xaa is A or G or is absent
XEEVIMQYNKLXXXXXXXXXLYLMSIASTKVPAXXTSPVR

SEQ ID NO: 77455 - protein, 34 aa, Artificial Sequence; identical to SEQ ID NO: 3078
  GFR-binding peptide
  MOD_RES (33), (34): Xaa is C or S
  MOD_RES (11), (12), (13), (14), (15): Xaa is A or G
  MOD_RES (16), (17), (18), (19): Xaa is A or G or is absent

SEQ ID NO: 77456 - protein, 34 aa, Artificial Sequence; identical to SEQ ID NO: 5011
  GFR-binding peptide
  MOD_RES (1), (34): Xaa is C or S
  MOD_RES (12), (13), (14), (15), (16): Xaa is A or G
  MOD_RES (17), (18), (19), (20): Xaa is A or G or is absent

SEQ ID NO: 77457 - protein, 39 aa, Artificial Sequence
  GFR-binding peptide
  MOD_RES (1), (3), (36), (37): Xaa is C or S
  MOD_RES (14), (15), (16), (17), (18): Xaa is A or G
  MOD_RES (19), (20), (21), (22): Xaa is A or G or is absent
XGXEEVIMQYNKLXXXXXXXXXLYLMSIASTKVPAXXTS

SEQ ID NO: 77458 - protein, 42 aa, Artificial Sequence; identical to SEQ ID NO: 57063
  GFR-binding peptide
  MOD_RES (2), (4), (36), (37): Xaa is C or S

SEQ ID NO: 77459 - protein, 37 aa, Artificial Sequence; identical to SEQ ID NO: 5013
  GFR-binding peptide
  MOD_RES (2), (4), (37): Xaa is C or S

SEQ ID NO: 77460 - protein, 35 aa, Artificial Sequence; identical to SEQ ID NO: 3082
  GFR-binding peptide
  MOD_RES (1), (33), (34): Xaa is C or S

SEQ ID NO: 77461 - protein, 39 aa, Artificial Sequence; identical to SEQ ID NO: 5016
  GFR-binding peptide
  MOD_RES (1), (35), (36): Xaa is C or S
  MOD_RES (13), (14), (15), (16), (17): Xaa is A or G
  MOD_RES (18), (19), (20), (21): Xaa is A or G or is absent

SEQ ID NO: 77462 - protein, 35 aa, Artificial Sequence; identical to SEQ ID NO: 57068
  GFR-binding peptide
  MOD_RES (31), (32): Xaa is C or S

SEQ ID NO: 77463 - protein, 43 aa, Artificial Sequence; identical to SEQ ID NO: 26109
  GFR-binding peptide
  MOD_RES (2), (4), (38), (39): Xaa is C or S
  MOD_RES (16), (17), (18), (19), (20): Xaa is A or G
  MOD_RES (21), (22), (23), (24): Xaa is A or G or is absent

SEQ ID NO: 77464 - protein, 43 aa, Artificial Sequence; identical to SEQ ID NO: 57070
  GFR-binding peptide
  MOD_RES (1), (3), (37), (38): Xaa is C or S
  MOD_RES (15), (16), (17), (18), (19): Xaa is A or G
  MOD_RES (20), (21), (22), (23): Xaa is A or G or is absent

SEQ ID NO: 77465 - protein, 34 aa, Artificial Sequence; identical to SEQ ID NO: 3087
  GFR-binding peptide
  MOD_RES (1), (32), (33): Xaa is C or S

SEQ ID NO: 77466 - protein, 40 aa, Artificial Sequence; identical to SEQ ID NO: 26111
  GFR-binding peptide
  MOD_RES (2), (4), (36), (37): Xaa is C or S

SEQ ID NO: 77467 - protein, 43 aa, Artificial Sequence; identical to SEQ ID NO: 5020
  GFR-binding peptide
  MOD_RES (2), (4), (38), (39): Xaa is C or S
  MOD_RES (16), (17), (18), (19), (20): Xaa is A or G
  MOD_RES (21), (22), (23), (24): Xaa is A or G or is absent

SEQ ID NO: 77468 - protein, 35 aa, Artificial Sequence
  GFR-binding peptide
  MOD_RES (32), (33): Xaa is C or S
AEVVMDQYNKLVVNNAADLYLISIASLRAPVXXSA

SEQ ID NO: 77469 - protein, 38 aa, Artificial Sequence; identical to SEQ ID NO: 3088
  GFR-binding peptide
  MOD_RES (1), (32), (33): Xaa is C or S

SEQ ID NO: 77470 - protein, 34 aa, Artificial Sequence
  GFR-binding peptide
  MOD_RES (2), (34): Xaa is C or S
GXRDVVMGQYNKLIIQQKDNLYLMSIASMKTPTX

SEQ ID NO: 77471 - protein, 34 aa, Artificial Sequence
  GFR-binding peptide
  MOD_RES (33), (34): Xaa is C or S
  MOD_RES (11), (12), (13), (14), (15): Xaa is A or G
  MOD_RES (16), (17), (18), (19): Xaa is A or G or is absent
EVVMDQYNKLXXXXXXXXXLYLISIASLRAPVXX

SEQ ID NO: 77472 - protein, 33 aa, Artificial Sequence; identical to SEQ ID NO: 3092
  GFR-binding peptide
  MOD_RES (12), (13), (14), (15), (16): Xaa is A or G
  MOD_RES (17), (18), (19), (20): Xaa is A or G or is absent

SEQ ID NO: 77473 - protein, 36 aa, Artificial Sequence; identical to SEQ ID NO: 5025
  GFR-binding peptide
  MOD_RES (2), (35), (36): Xaa is C or S
  MOD_RES (13), (14), (15), (16), (17): Xaa is A or G
  MOD_RES (18), (19), (20), (21): Xaa is A or G or is absent

SEQ ID NO: 77474 - protein, 39 aa, Artificial Sequence; identical to SEQ ID NO: 3093
  GFR-binding peptide
  MOD_RES (2), (4), (38), (39): Xaa is C or S
  MOD_RES (16), (17), (18), (19), (20): Xaa is A or G
  MOD_RES (21), (22), (23), (24): Xaa is A or G or is absent

SEQ ID NO: 77475 - protein, 32 aa, Artificial Sequence; identical to SEQ ID NO: 5029
  GFR-binding peptide
  MOD_RES (32), (32): Xaa is C or S

SEQ ID NO: 77476 - protein, 37 aa, Artificial Sequence; identical to SEQ ID NO: 60671
  GFR-binding peptide
  MOD_RES (2), (4), (36), (37): Xaa is C or S

SEQ ID NO: 77477 - protein, 39 aa, Artificial Sequence; identical to SEQ ID NO: 64193
  GFR-binding peptide
  MOD_RES (1), (35), (36): Xaa is C or S
  MOD_RES (13), (14), (15), (16), (17): Xaa is A or G
  MOD_RES (18), (19), (20), (21): Xaa is A or G or is absent

SEQ ID NO: 77478 - protein, 42 aa, Artificial Sequence; identical to SEQ ID NO: 57078
  GFR-binding peptide
  MOD_RES (2), (4), (37), (38): Xaa is C or S
  MOD_RES (15), (16), (17), (18), (19): Xaa is A or G
  MOD_RES (20), (21), (22), (23): Xaa is A or G or is absent

SEQ ID NO: 77479 - protein, 32 aa, Artificial Sequence; identical to SEQ ID NO: 5034
  GFR-binding peptide
  MOD_RES (32), (32): Xaa is C or S

SEQ ID NO: 77480 - protein, 40 aa, Artificial Sequence
  GFR-binding peptide
  MOD_RES (2), (36), (37): Xaa is C or S
  MOD_RES (14), (15), (16), (17), (18): Xaa is A or G
  MOD_RES (19), (20), (21), (22): Xaa is A or G or is absent
GXESVAMGQYNKLXXXXXXXXXLYLISIASLKTPVXXAKS

SEQ ID NO: 77481 - protein, 37 aa, Artificial Sequence; identical to SEQ ID NO: 3101
  GFR-binding peptide
  MOD_RES (1), (3), (35), (36): Xaa is C or S

SEQ ID NO: 77482 - protein, 37 aa, Artificial Sequence
  GFR-binding peptide
  MOD_RES (1), (35), (36): Xaa is C or S
  MOD_RES (13), (14), (15), (16), (17): Xaa is A or G
  MOD_RES (18), (19), (20), (21): Xaa is A or G or is absent
XESVAMGQYNKLXXXXXXXXXLYLISIASLKTPVXXA

SEQ ID NO: 77483 - protein, 41 aa, Artificial Sequence; identical to SEQ ID NO: 5035
  GFR-binding peptide
  MOD_RES (2), (4), (38), (39): Xaa is C or S
  MOD_RES (16), (17), (18), (19), (20): Xaa is A or G
  MOD_RES (21), (22), (23), (24): Xaa is A or G or is absent

SEQ ID NO: 77484 - protein, 40 aa, Artificial Sequence; identical to SEQ ID NO: 3102
  GFR-binding peptide
  MOD_RES (34), (35): Xaa is C or S
  MOD_RES (12), (13), (14), (15), (16): Xaa is A or G
  MOD_RES (17), (18), (19), (20): Xaa is A or G or is absent

SEQ ID NO: 77485 - protein, 40 aa, Artificial Sequence; identical to SEQ ID NO: 5036
  GFR-binding peptide
  MOD_RES (34), (35): Xaa is C or S
  MOD_RES (12), (13), (14), (15), (16): Xaa is A or G
  MOD_RES (17), (18), (19), (20): Xaa is A or G or is absent

SEQ ID NO: 77486 - protein, 43 aa, Artificial Sequence; identical to SEQ ID NO: 57084
  GFR-binding peptide
  MOD_RES (2), (4), (37), (38): Xaa is C or S
  MOD_RES (15), (16), (17), (18), (19): Xaa is A or G
  MOD_RES (20), (21), (22), (23): Xaa is A or G or is absent

SEQ ID NO: 77487 - protein, 40 aa, Artificial Sequence; identical to SEQ ID NO: 3107
  GFR-binding peptide
  MOD_RES (1), (3), (34), (35): Xaa is C or S

SEQ ID NO: 77488 - protein, 37 aa, Artificial Sequence; identical to SEQ ID NO: 3108
  GFR-binding peptide
  MOD_RES (34), (35): Xaa is C or S
  MOD_RES (12), (13), (14), (15), (16): Xaa is A or G
  MOD_RES (17), (18), (19), (20): Xaa is A or G or is absent

SEQ ID NO: 77489 - protein, 38 aa, Artificial Sequence; identical to SEQ ID NO: 5040
  GFR-binding peptide
  MOD_RES (2), (4), (37), (38): Xaa is C or S

SEQ ID NO: 77490 - protein, 42 aa, Artificial Sequence; identical to SEQ ID NO: 5041
  GFR-binding peptide
  MOD_RES (1), (3), (36), (37): Xaa is C or S

SEQ ID NO: 77491 - protein, 37 aa, Artificial Sequence
  GFR-binding peptide
  MOD_RES (1), (3), (37): Xaa is C or S
  MOD_RES (15), (16), (17), (18), (19): Xaa is A or G
  MOD_RES (20), (21), (22), (23): Xaa is A or G or is absent
XGXAEVVMDQYNKLXXXXXXXXXLYLISIASLRAPVX

SEQ ID NO: 77492 - protein, 35 aa, Artificial Sequence
  GFR-binding peptide
  MOD_RES (33), (34): Xaa is C or S
  MOD_RES (11), (12), (13), (14), (15): Xaa is A or G
  MOD_RES (16), (17), (18), (19): Xaa is A or G or is absent
EVVMDQYNKLXXXXXXXXXLYLISIASLRAPVXXS

SEQ ID NO: 77493 - protein, 37 aa, Artificial Sequence; identical to SEQ ID NO: 5044
  GFR-binding peptide
  MOD_RES (32), (33): Xaa is C or S

SEQ ID NO: 77494 - protein, 38 aa, Artificial Sequence
  GFR-binding peptide
  MOD_RES (34), (35): Xaa is C or S
  MOD_RES (12), (13), (14), (15), (16): Xaa is A or G
  MOD_RES (17), (18), (19), (20): Xaa is A or G or is absent
AEVVMDQYNKLXXXXXXXXXLYLISIASLRAPVXXSAP

SEQ ID NO: 77495 - protein, 42 aa, Artificial Sequence
  GFR-binding peptide
  MOD_RES (2), (4), (36), (37): Xaa is C or S
RXGXAEVVMDQYNKLVVNNAADLYLISIASLRAPVXXSAPAA

SEQ ID NO: 77496 - protein, 40 aa, Artificial Sequence; identical to SEQ ID NO: 3117
  GFR-binding peptide
  MOD_RES (2), (36), (37): Xaa is C or S
  MOD_RES (14), (15), (16), (17), (18): Xaa is A or G
  MOD_RES (19), (20), (21), (22): Xaa is A or G or is absent

SEQ ID NO: 77497 - protein, 37 aa, Artificial Sequence; identical to SEQ ID NO: 3118
  GFR-binding peptide
  MOD_RES (33), (34): Xaa is C or S
  MOD_RES (11), (12), (13), (14), (15): Xaa is A or G
  MOD_RES (16), (17), (18), (19): Xaa is A or G or is absent

SEQ ID NO: 77498 - protein, 39 aa, Artificial Sequence; identical to SEQ ID NO: 3121
  GFR-binding peptide
  MOD_RES (2), (35), (36): Xaa is C or S
  MOD_RES (13), (14), (15), (16), (17): Xaa is A or G
  MOD_RES (18), (19), (20), (21): Xaa is A or G or is absent

SEQ ID NO: 77499 - protein, 33 aa, Artificial Sequence; identical to SEQ ID NO: 3123
  GFR-binding peptide
  MOD_RES (2), (2): Xaa is C or S

SEQ ID NO: 77500 - protein, 37 aa, Artificial Sequence; identical to SEQ ID NO: 3124
  GFR-binding peptide
  MOD_RES (2), (4), (37): Xaa is C or S
  MOD_RES (15), (16), (17), (18), (19): Xaa is A or G
  MOD_RES (20), (21), (22), (23): Xaa is A or G or is absent

SEQ ID NO: 77501 - protein, 42 aa, Artificial Sequence; identical to SEQ ID NO: 26139
  GFR-binding peptide
  MOD_RES (1), (3), (37), (38): Xaa is C or S
  MOD_RES (15), (16), (17), (18), (19): Xaa is A or G
  MOD_RES (20), (21), (22), (23): Xaa is A or G or is absent

SEQ ID NO: 77502 - protein, 40 aa, Artificial Sequence; identical to SEQ ID NO: 3125
  GFR-binding peptide
  MOD_RES (1), (34), (35): Xaa is C or S
  MOD_RES (12), (13), (14), (15), (16): Xaa is A or G
  MOD_RES (17), (18), (19), (20): Xaa is A or G or is absent

SEQ ID NO: 77503 - protein, 37 aa, Artificial Sequence
  GFR-binding peptide
  MOD_RES (1), (3), (35), (36): Xaa is C or S
XGXAEVVMDQYNKLVVNNAADLYLISIASLRAPVXXS

SEQ ID NO: 77504 - protein, 38 aa, Artificial Sequence
  GFR-binding peptide
  MOD_RES (1), (3), (35), (36): Xaa is C or S
XAXSEVTMNQYNKLVVNKNEDLYLISIASMKEPVXXPE

SEQ ID NO: 77505 - protein, 37 aa, Artificial Sequence; identical to SEQ ID NO: 3128
  GFR-binding peptide
  MOD_RES (2), (36), (37): Xaa is C or S
  MOD_RES (14), (15), (16), (17), (18): Xaa is A or G
  MOD_RES (19), (20), (21), (22): Xaa is A or G or is absent

SEQ ID NO: 77506 - protein, 36 aa, Artificial Sequence
  GFR-binding peptide
  MOD_RES (34), (35): Xaa is C or S
  MOD_RES (12), (13), (14), (15), (16): Xaa is A or G
  MOD_RES (17), (18), (19), (20): Xaa is A or G or is absent
ESVAMGQYNKLXXXXXXXXXLYLISIASLKTPVXXA

SEQ ID NO: 77507 - protein, 40 aa, Artificial Sequence; identical to SEQ ID NO: 5053
  GFR-binding peptide
  MOD_RES (2), (34), (35): Xaa is C or S

SEQ ID NO: 77508 - protein, 38 aa, Artificial Sequence
  GFR-binding peptide
  MOD_RES (1), (3), (37), (38): Xaa is C or S
  MOD_RES (15), (16), (17), (18), (19): Xaa is A or G
  MOD_RES (20), (21), (22), (23): Xaa is A or G or is absent
XAXSEVTMNQYNKLXXXXXXXXXLYLISIASMKEPVXX

SEQ ID NO: 77509 - protein, 42 aa, Artificial Sequence; identical to SEQ ID NO: 5055
  GFR-binding peptide
  MOD_RES (2), (36), (37): Xaa is C or S
  MOD_RES (14), (15), (16), (17), (18): Xaa is A or G
  MOD_RES (19), (20), (21), (22): Xaa is A or G or is absent

SEQ ID NO: 77510 - protein, 35 aa, Artificial Sequence; identical to SEQ ID NO: 3133
  GFR-binding peptide
  MOD_RES (34), (35): Xaa is C or S
  MOD_RES (12), (13), (14), (15), (16): Xaa is A or G
  MOD_RES (17), (18), (19), (20): Xaa is A or G or is absent

SEQ ID NO: 77511 - protein, 35 aa, Artificial Sequence; identical to SEQ ID NO: 5056
  GFR-binding peptide
  MOD_RES (1), (3), (35): Xaa is C or S

SEQ ID NO: 77512 - protein, 39 aa, Artificial Sequence; identical to SEQ ID NO: 57103
  GFR-binding peptide
  MOD_RES (1), (34), (35): Xaa is C or S
  MOD_RES (12), (13), (14), (15), (16): Xaa is A or G
  MOD_RES (17), (18), (19), (20): Xaa is A or G or is absent

SEQ ID NO: 77513 - protein, 39 aa, Artificial Sequence; identical to SEQ ID NO: 5057
  GFR-binding peptide
  MOD_RES (34), (35): Xaa is C or S
  MOD_RES (12), (13), (14), (15), (16): Xaa is A or G
  MOD_RES (17), (18), (19), (20): Xaa is A or G or is absent

SEQ ID NO: 77514 - protein, 36 aa, Artificial Sequence; identical to SEQ ID NO: 3136
  GFR-binding peptide
  MOD_RES (1), (3): Xaa is C or S
  MOD_RES (15), (16), (17), (18), (19): Xaa is A or G
  MOD_RES (20), (21), (22), (23): Xaa is A or G or is absent

SEQ ID NO: 77515 - protein, 37 aa, Artificial Sequence; identical to SEQ ID NO: 3137
  GFR-binding peptide
  MOD_RES (1), (3), (35), (36): Xaa is C or S

SEQ ID NO: 77516 - protein, 38 aa, Artificial Sequence; identical to SEQ ID NO: 3138
  GFR-binding peptide
  MOD_RES (34), (35): Xaa is C or S
  MOD_RES (12), (13), (14), (15), (16): Xaa is A or G
  MOD_RES (17), (18), (19), (20): Xaa is A or G or is absent

SEQ ID NO: 77517 - protein, 35 aa, Artificial Sequence
  GFR-binding peptide
  MOD_RES (33), (34): Xaa is C or S
  MOD_RES (11), (12), (13), (14), (15): Xaa is A or G
  MOD_RES (16), (17), (18), (19): Xaa is A or G or is absent
DVVMGQYNKLXXXXXXXXXLYLMSIASMKTPTXXP

SEQ ID NO: 77518 - protein, 40 aa, Artificial Sequence; identical to SEQ ID NO: 12488
  GFR-binding peptide
  MOD_RES (2), (4), (36), (37): Xaa is C or S

SEQ ID NO: 77519 - protein, 32 aa, Artificial Sequence; identical to SEQ ID NO: 3139
  GFR-binding peptide
  MOD_RES (11), (12), (13), (14), (15): Xaa is A or G
  MOD_RES (16), (17), (18), (19): Xaa is A or G or is absent

SEQ ID NO: 77520 - protein, 41 aa, Artificial Sequence; identical to SEQ ID NO: 5059
  GFR-binding peptide
  MOD_RES (1), (3), (36), (37): Xaa is C or S
  MOD_RES (14), (15), (16), (17), (18): Xaa is A or G
  MOD_RES (19), (20), (21), (22): Xaa is A or G or is absent

SEQ ID NO: 77521 - protein, 35 aa, Artificial Sequence
  GFR-binding peptide
  MOD_RES (33), (34): Xaa is C or S
  MOD_RES (11), (12), (13), (14), (15): Xaa is A or G
  MOD_RES (16), (17), (18), (19): Xaa is A or G or is absent
SVAMGQYNKLXXXXXXXXXLYLISIASLKTPVXXA

SEQ ID NO: 77522 - protein, 36 aa, Artificial Sequence; identical to SEQ ID NO: 5060
  GFR-binding peptide
  MOD_RES (31), (32): Xaa is C or S

SEQ ID NO: 77523 - protein, 39 aa, Artificial Sequence
  GFR-binding peptide
  MOD_RES (1), (3), (35), (36): Xaa is C or S
XAXSEVTMNQYNKLVVNKNEDLYLISIASMKEPVXXPEP

SEQ ID NO: 77524 - protein, 33 aa, Artificial Sequence; identical to SEQ ID NO: 3144
  GFR-binding peptide
  MOD_RES (33), (33): Xaa is C or S
  MOD_RES (11), (12), (13), (14), (15): Xaa is A or G
  MOD_RES (16), (17), (18), (19): Xaa is A or G or is absent

SEQ ID NO: 77525 - protein, 38 aa, Artificial Sequence; identical to SEQ ID NO: 5067
  GFR-binding peptide
  MOD_RES (2), (36), (37): Xaa is C or S
  MOD_RES (14), (15), (16), (17), (18): Xaa is A or G
  MOD_RES (19), (20), (21), (22): Xaa is A or G or is absent

SEQ ID NO: 77526 - protein, 42 aa, Artificial Sequence; identical to SEQ ID NO: 5068
  GFR-binding peptide
  MOD_RES (2), (4), (36), (37): Xaa is C or S

SEQ ID NO: 77527 - protein, 36 aa, Artificial Sequence
  GFR-binding peptide
  MOD_RES (1), (3), (36): Xaa is C or S
  MOD_RES (14), (15), (16), (17), (18): Xaa is A or G
  MOD_RES (19), (20), (21), (22): Xaa is A or G or is absent
XGXEEVIMQYNKLXXXXXXXXXLYLMSIASTKVPAX

SEQ ID NO: 77528 - protein, 36 aa, Artificial Sequence; identical to SEQ ID NO: 57111
  GFR-binding peptide
  MOD_RES (2), (4), (36): Xaa is C or S

SEQ ID NO: 77529 - protein, 34 aa, Artificial Sequence; identical to SEQ ID NO: 3147
  GFR-binding peptide
  MOD_RES (31), (32): Xaa is C or S

SEQ ID NO: 77530 - protein, 36 aa, Artificial Sequence; identical to SEQ ID NO: 5069
  GFR-binding peptide
  MOD_RES (1), (33), (34): Xaa is C or S

SEQ ID NO: 77531 - protein, 32 aa, Artificial Sequence; identical to SEQ ID NO: 57113
  GFR-binding peptide
  MOD_RES (31), (32): Xaa is C or S

SEQ ID NO: 77532 - protein, 34 aa, Artificial Sequence; identical to SEQ ID NO: 12502
  GFR-binding peptide
  MOD_RES (1), (33), (34): Xaa is C or S

SEQ ID NO: 77533 - protein, 34 aa, Artificial Sequence
  GFR-binding peptide
  MOD_RES (2), (4): Xaa is C or S
LXGXEEVIMQYNKLLLVRGNDLYLMSIASTKVPA

SEQ ID NO: 77534 - protein, 31 aa, Artificial Sequence; identical to SEQ ID NO: 3149
  GFR-binding peptide
  MOD_RES (31), (31): Xaa is C or S

SEQ ID NO: 77535 - protein, 32 aa, Artificial Sequence
  GFR-binding peptide
  MOD_RES (1), (32): Xaa is C or S
XEEVIMQYNKLLLVRGNDLYLMSIASTKVPAX

SEQ ID NO: 77536 - protein, 41 aa, Artificial Sequence; identical to SEQ ID NO: 5070
  GFR-binding peptide
  MOD_RES (1), (36), (37): Xaa is C or S
  MOD_RES (14), (15), (16), (17), (18): Xaa is A or G
  MOD_RES (19), (20), (21), (22): Xaa is A or G or is absent

SEQ ID NO: 77537 - protein, 35 aa, Artificial Sequence; identical to SEQ ID NO: 5074
  GFR-binding peptide
  MOD_RES (1), (3), (34), (35): Xaa is C or S

SEQ ID NO: 77538 - protein, 40 aa, Artificial Sequence; identical to SEQ ID NO: 24141
  GFR-binding peptide
  MOD_RES (34), (35): Xaa is C or S
  MOD_RES (12), (13), (14), (15), (16): Xaa is A or G
  MOD_RES (17), (18), (19), (20): Xaa is A or G or is absent

SEQ ID NO: 77539 - protein, 35 aa, Artificial Sequence; identical to SEQ ID NO: 26177
  GFR-binding peptide
  MOD_RES (32), (33): Xaa is C or S

SEQ ID NO: 77540 - protein, 37 aa, Artificial Sequence
  GFR-binding peptide
  MOD_RES (2), (34), (35): Xaa is C or S
AXSEVTMNQYNKLVVNKNEDLYLISIASMKEPVXXPE

SEQ ID NO: 77541 - protein, 36 aa, Artificial Sequence; identical to SEQ ID NO: 62494
  GFR-binding peptide
  MOD_RES (33), (34): Xaa is C or S
  MOD_RES (11), (12), (13), (14), (15): Xaa is A or G
  MOD_RES (16), (17), (18), (19): Xaa is A or G or is absent

SEQ ID NO: 77542 - protein, 42 aa, Artificial Sequence; identical to SEQ ID NO: 5078
  GFR-binding peptide
  MOD_RES (2), (36), (37): Xaa is C or S
  MOD_RES (14), (15), (16), (17), (18): Xaa is A or G
  MOD_RES (19), (20), (21), (22): Xaa is A or G or is absent

SEQ ID NO: 77543 - protein, 35 aa, Artificial Sequence; identical to SEQ ID NO: 5079
  GFR-binding peptide
  MOD_RES (32), (33): Xaa is C or S

SEQ ID NO: 77544 - protein, 39 aa, Artificial Sequence
  GFR-binding peptide
  MOD_RES (1), (3), (35), (36): Xaa is C or S
XGXESVAMGQYNKLYTVVGKDLYLISIASLKTPVXXAKS

SEQ ID NO: 77545 - protein, 38 aa, Artificial Sequence; identical to SEQ ID NO: 5080
  GFR-binding peptide
  MOD_RES (1), (3), (37), (38): Xaa is C or S
  MOD_RES (15), (16), (17), (18), (19): Xaa is A or G
  MOD_RES (20), (21), (22), (23): Xaa is A or G or is absent

SEQ ID NO: 77546 - protein, 38 aa, Artificial Sequence; identical to SEQ ID NO: 3157
  GFR-binding peptide
  MOD_RES (32), (33): Xaa is C or S

SEQ ID NO: 77547 - protein, 38 aa, Artificial Sequence; identical to SEQ ID NO: 5081
  GFR-binding peptide
  MOD_RES (32), (33): Xaa is C or S

SEQ ID NO: 77548 - protein, 34 aa, Artificial Sequence; identical to SEQ ID NO: 60727
  GFR-binding peptide
  MOD_RES (1), (3): Xaa is C or S

SEQ ID NO: 77549 - protein, 34 aa, Artificial Sequence; identical to SEQ ID NO: 26189
  GFR-binding peptide
  MOD_RES (1), (33), (34): Xaa is C or S

SEQ ID NO: 77550 - protein, 36 aa, Artificial Sequence; identical to SEQ ID NO: 5086
  GFR-binding peptide
  MOD_RES (34), (35): Xaa is C or S
  MOD_RES (12), (13), (14), (15), (16): Xaa is A or G
  MOD_RES (17), (18), (19), (20): Xaa is A or G or is absent

SEQ ID NO: 77551 - protein, 35 aa, Artificial Sequence; identical to SEQ ID NO: 5088
  GFR-binding peptide
  MOD_RES (32), (33): Xaa is C or S

SEQ ID NO: 77552 - protein, 33 aa, Artificial Sequence; identical to SEQ ID NO: 3162
  GFR-binding peptide
  MOD_RES (12), (13), (14), (15), (16): Xaa is A or G
  MOD_RES (17), (18), (19), (20): Xaa is A or G or is absent

SEQ ID NO: 77553 - protein, 39 aa, Artificial Sequence
  GFR-binding peptide
  MOD_RES (34), (35): Xaa is C or S
  MOD_RES (12), (13), (14), (15), (16): Xaa is A or G
  MOD_RES (17), (18), (19), (20): Xaa is A or G or is absent
AEVVMDQYNKLXXXXXXXXXLYLISIASLRAPVXXSAPA

SEQ ID NO: 77554 - protein, 38 aa, Artificial Sequence; identical to SEQ ID NO: 5091
  GFR-binding peptide
  MOD_RES (2), (4), (36), (37): Xaa is C or S

SEQ ID NO: 77555 - protein, 36 aa, Artificial Sequence; identical to SEQ ID NO: 12523
  GFR-binding peptide
  MOD_RES (32), (33): Xaa is C or S

SEQ ID NO: 77556 - protein, 33 aa, Artificial Sequence; identical to SEQ ID NO: 5097
  GFR-binding peptide
  MOD_RES (2), (2): Xaa is C or S

SEQ ID NO: 77557 - protein, 36 aa, Artificial Sequence; identical to SEQ ID NO: 5098
  GFR-binding peptide
  MOD_RES (1), (32), (33): Xaa is C or S

SEQ ID NO: 77558 - protein, 36 aa, Artificial Sequence
  GFR-binding peptide
  MOD_RES (2), (4), (36): Xaa is C or S
RXAXSEVTMNQYNKLVVNKNEDLYLISIASMKEPVX

SEQ ID NO: 77559 - protein, 44 aa, Artificial Sequence
  GFR-binding peptide
  MOD_RES (2), (4), (38), (39): Xaa is C or S
  MOD_RES (16), (17), (18), (19), (20): Xaa is A or G
  MOD_RES (21), (22), (23), (24): Xaa is A or G or is absent
HXGXSRVVMNQYNKLXXXXXXXXXLYLVSIASLKTPAXXPKPVH

SEQ ID NO: 77560 - protein, 35 aa, Artificial Sequence; identical to SEQ ID NO: 57129
  GFR-binding peptide
  MOD_RES (1), (3), (35): Xaa is C or S

SEQ ID NO: 77561 - protein, 35 aa, Artificial Sequence; identical to SEQ ID NO: 3170
  GFR-binding peptide
  MOD_RES (1), (3): Xaa is C or S
  MOD_RES (14), (15), (16), (17), (18): Xaa is A or G
  MOD_RES (19), (20), (21), (22): Xaa is A or G or is absent

SEQ ID NO: 77562 - protein, 36 aa, Artificial Sequence; identical to SEQ ID NO: 3171
  GFR-binding peptide
  MOD_RES (2), (4), (35), (36): Xaa is C or S

SEQ ID NO: 77563 - protein, 40 aa, Artificial Sequence; identical to SEQ ID NO: 3172
  GFR-binding peptide
  MOD_RES (2), (4), (37), (38): Xaa is C or S

SEQ ID NO: 77564 - protein, 37 aa, Artificial Sequence
  GFR-binding peptide
  MOD_RES (2), (4), (36), (37): Xaa is C or S
RXGXESVAMGQYNKLYTVVGKDLYLISIASLKTPVXX

SEQ ID NO: 77565 - protein, 40 aa, Artificial Sequence; identical to SEQ ID NO: 57136
  GFR-binding peptide
  MOD_RES (1), (3), (34), (35): Xaa is C or S

SEQ ID NO: 77566 - protein, 38 aa, Artificial Sequence; identical to SEQ ID NO: 5102
  GFR-binding peptide
  MOD_RES (1), (35), (36): Xaa is C or S
  MOD_RES (13), (14), (15), (16), (17): Xaa is A or G
  MOD_RES (18), (19), (20), (21): Xaa is A or G or is absent

SEQ ID NO: 77567 - protein, 34 aa, Artificial Sequence; identical to SEQ ID NO: 3174
  GFR-binding peptide
  MOD_RES (1), (32), (33): Xaa is C or S

SEQ ID NO: 77568 - protein, 33 aa, Artificial Sequence; identical to SEQ ID NO: 3175
  GFR-binding peptide
  MOD_RES (33), (33): Xaa is C or S
  MOD_RES (11), (12), (13), (14), (15): Xaa is A or G
  MOD_RES (16), (17), (18), (19): Xaa is A or G or is absent

SEQ ID NO: 77569 - protein, 38 aa, Artificial Sequence; identical to SEQ ID NO: 5103
  GFR-binding peptide
  MOD_RES (33), (34): Xaa is C or S
  MOD_RES (11), (12), (13), (14), (15): Xaa is A or G
  MOD_RES (16), (17), (18), (19): Xaa is A or G or is absent

SEQ ID NO: 77570 - protein, 35 aa, Artificial Sequence; identical to SEQ ID NO: 5104
  GFR-binding peptide
  MOD_RES (31), (31): Xaa is C or S

SEQ ID NO: 77571 - protein, 30 aa, Artificial Sequence; identical to SEQ ID NO: 5105
  GFR-binding peptide

SEQ ID NO: 77572 - protein, 34 aa, Artificial Sequence
  GFR-binding peptide
  MOD_RES (1), (3): Xaa is C or S
XGXAEVVMDQYNKLVVNNAADLYLISIASLRAPV

SEQ ID NO: 77573 - protein, 39 aa, Artificial Sequence; identical to SEQ ID NO: 5106
  GFR-binding peptide
  MOD_RES (2), (34), (35): Xaa is C or S

SEQ ID NO: 77574 - protein, 35 aa, Artificial Sequence; identical to SEQ ID NO: 10629
  GFR-binding peptide
  MOD_RES (1), (3), (35): Xaa is C or S

SEQ ID NO: 77575 - protein, 39 aa, Artificial Sequence; identical to SEQ ID NO: 3179
  GFR-binding peptide
  MOD_RES (1), (3), (36), (37): Xaa is C or S
  MOD_RES (14), (15), (16), (17), (18): Xaa is A or G
  MOD_RES (19), (20), (21), (22): Xaa is A or G or is absent

SEQ ID NO: 77576 - protein, 37 aa, Artificial Sequence; identical to SEQ ID NO: 3181
  GFR-binding peptide
  MOD_RES (2), (4), (36), (37): Xaa is C or S

SEQ ID NO: 77577 - protein, 37 aa, Artificial Sequence
  GFR-binding peptide
  MOD_RES (2), (4): Xaa is C or S
  MOD_RES (16), (17), (18), (19), (20): Xaa is A or G
  MOD_RES (21), (22), (23), (24): Xaa is A or G or is absent
RXAXSEVTMNQYNKLXXXXXXXXXLYLISIASMKEPV

SEQ ID NO: 77578 - protein, 40 aa, Artificial Sequence; identical to SEQ ID NO: 12540
  GFR-binding peptide
  MOD_RES (1), (3), (35), (36): Xaa is C or S

SEQ ID NO: 77579 - protein, 36 aa, Artificial Sequence; identical to SEQ ID NO: 26210
  GFR-binding peptide
  MOD_RES (2), (34), (35): Xaa is C or S

SEQ ID NO: 77580 - protein, 36 aa, Artificial Sequence; identical to SEQ ID NO: 3182
  GFR-binding peptide
  MOD_RES (1), (34), (35): Xaa is C or S

SEQ ID NO: 77581 - protein, 34 aa, Artificial Sequence; identical to SEQ ID NO: 24177
  GFR-binding peptide
  MOD_RES (2), (34): Xaa is C or S

SEQ ID NO: 77582 - protein, 35 aa, Artificial Sequence
  GFR-binding peptide
  MOD_RES (31), (32): Xaa is C or S
EEVIMQYNKLLLVRGNDLYLMSIASTKVPAXXTSP

SEQ ID NO: 77583 - protein, 35 aa, Artificial Sequence; identical to SEQ ID NO: 5113
  GFR-binding peptide
  MOD_RES (1), (3): Xaa is C or S

SEQ ID NO: 77584 - protein, 36 aa, Artificial Sequence; identical to SEQ ID NO: 5114
  GFR-binding peptide
  MOD_RES (31), (32): Xaa is C or S

SEQ ID NO: 77585 - protein, 34 aa, Artificial Sequence; identical to SEQ ID NO: 3184
  GFR-binding peptide
  MOD_RES (1), (1): Xaa is C or S
  MOD_RES (13), (14), (15), (16), (17): Xaa is A or G
  MOD_RES (18), (19), (20), (21): Xaa is A or G or is absent

SEQ ID NO: 77586 - protein, 41 aa, Artificial Sequence; identical to SEQ ID NO: 3185
  GFR-binding peptide
  MOD_RES (2), (4), (38): Xaa is C or S
  MOD_RES (16), (17), (18), (19), (20): Xaa is A or G
  MOD_RES (21), (22), (23), (24): Xaa is A or G or is absent

SEQ ID NO: 77587 - protein, 35 aa, Artificial Sequence; identical to SEQ ID NO: 5116
  GFR-binding peptide
  MOD_RES (32), (33): Xaa is C or S

SEQ ID NO: 77588 - protein, 32 aa, Artificial Sequence; identical to SEQ ID NO: 5117
  GFR-binding peptide
  MOD_RES (31), (32): Xaa is C or S

SEQ ID NO: 77589 - protein, 43 aa, Artificial Sequence; identical to SEQ ID NO: 12546
  GFR-binding peptide
  MOD_RES (2), (4), (38), (39): Xaa is C or S
  MOD_RES (16), (17), (18), (19), (20): Xaa is A or G
  MOD_RES (21), (22), (23), (24): Xaa is A or G or is absent

SEQ ID NO: 77590 - protein, 37 aa, Artificial Sequence
  GFR-binding peptide
  MOD_RES (2), (34), (35): Xaa is C or S
GXESVAMGQYNKLYTVVGKDLYLISIASLKTPVXXAK

SEQ ID NO: 77591 - protein, 39 aa, Artificial Sequence; identical to SEQ ID NO: 12547
  GFR-binding peptide
  MOD_RES (2), (34), (35): Xaa is C or S

SEQ ID NO: 77592 - protein, 36 aa, Artificial Sequence; identical to SEQ ID NO: 3189
  GFR-binding peptide
  MOD_RES (1), (3), (35), (36): Xaa is C or S

SEQ ID NO: 77593 - protein, 42 aa, Artificial Sequence; identical to SEQ ID NO: 3190
  GFR-binding peptide
  MOD_RES (2), (4), (38), (39): Xaa is C or S
  MOD_RES (16), (17), (18), (19), (20): Xaa is A or G
  MOD_RES (21), (22), (23), (24): Xaa is A or G or is absent

SEQ ID NO: 77594 - protein, 35 aa, Artificial Sequence; identical to SEQ ID NO: 59024
  GFR-binding peptide
  MOD_RES (2), (2): Xaa is C or S
  MOD_RES (14), (15), (16), (17), (18): Xaa is A or G
  MOD_RES (19), (20), (21), (22): Xaa is A or G or is absent

SEQ ID NO: 77595 - protein, 34 aa, Artificial Sequence; identical to SEQ ID NO: 3192
  GFR-binding peptide
  MOD_RES (1), (34): Xaa is C or S
  MOD_RES (12), (13), (14), (15), (16): Xaa is A or G
  MOD_RES (17), (18), (19), (20): Xaa is A or G or is absent

SEQ ID NO: 77596 - protein, 41 aa, Artificial Sequence; identical to SEQ ID NO: 3195
  GFR-binding peptide
  MOD_RES (1), (3), (36), (37): Xaa is C or S
  MOD_RES (14), (15), (16), (17), (18): Xaa is A or G
  MOD_RES (19), (20), (21), (22): Xaa is A or G or is absent

SEQ ID NO: 77597 - protein, 36 aa, Artificial Sequence; identical to SEQ ID NO: 5122
  GFR-binding peptide
  MOD_RES (33), (34): Xaa is C or S
  MOD_RES (11), (12), (13), (14), (15): Xaa is A or G
  MOD_RES (16), (17), (18), (19): Xaa is A or G or is absent

SEQ ID NO: 77598 - protein, 39 aa, Artificial Sequence; identical to SEQ ID NO: 26225
  GFR-binding peptide
  MOD_RES (2), (4), (36), (37): Xaa is C or S

SEQ ID NO: 77599 - protein, 34 aa, Artificial Sequence; identical to SEQ ID NO: 5124
  GFR-binding peptide
  MOD_RES (33), (34): Xaa is C or S
  MOD_RES (11), (12), (13), (14), (15): Xaa is A or G
  MOD_RES (16), (17), (18), (19): Xaa is A or G or is absent

SEQ ID NO: 77600 - protein, 42 aa, Artificial Sequence; identical to SEQ ID NO: 3201
  GFR-binding peptide
  MOD_RES (1), (3), (37): Xaa is C or S
  MOD_RES (15), (16), (17), (18), (19): Xaa is A or G
  MOD_RES (20), (21), (22), (23): Xaa is A or G or is absent

SEQ ID NO: 77601 - protein, 38 aa, Artificial Sequence; identical to SEQ ID NO: 3203
  GFR-binding peptide
  MOD_RES (33), (34): Xaa is C or S

SEQ ID NO: 77602 - protein, 44 aa, Artificial Sequence; identical to SEQ ID NO: 5130
  GFR-binding peptide
  MOD_RES (2), (4), (38), (39): Xaa is C or S
  MOD_RES (16), (17), (18), (19), (20): Xaa is A or G
  MOD_RES (21), (22), (23), (24): Xaa is A or G or is absent

SEQ ID NO: 77603 - protein, 42 aa, Artificial Sequence; identical to SEQ ID NO: 5131
  GFR-binding peptide
  MOD_RES (2), (4), (37), (38): Xaa is C or S
  MOD_RES (15), (16), (17), (18), (19): Xaa is A or G
  MOD_RES (20), (21), (22), (23): Xaa is A or G or is absent

SEQ ID NO: 77604 - protein, 37 aa, Artificial Sequence; identical to SEQ ID NO: 5132
  GFR-binding peptide
  MOD_RES (32), (33): Xaa is C or S

SEQ ID NO: 77605 - protein, 39 aa, Artificial Sequence; identical to SEQ ID NO: 3207
  GFR-binding peptide
  MOD_RES (34), (35): Xaa is C or S
  MOD_RES (12), (13), (14), (15), (16): Xaa is A or G
  MOD_RES (17), (18), (19), (20): Xaa is A or G or is absent

SEQ ID NO: 77606 - protein, 34 aa, Artificial Sequence; identical to SEQ ID NO: 3208
  GFR-binding peptide
  MOD_RES (33), (34): Xaa is C or S
  MOD_RES (11), (12), (13), (14), (15): Xaa is A or G
  MOD_RES (16), (17), (18), (19): Xaa is A or G or is absent

SEQ ID NO: 77607 - protein, 40 aa, Artificial Sequence; identical to SEQ ID NO: 3209
  GFR-binding peptide
  MOD_RES (2), (4), (36), (37): Xaa is C or S

SEQ ID NO: 77608 - protein, 43 aa, Artificial Sequence; identical to SEQ ID NO: 5136
  GFR-binding peptide
  MOD_RES (1), (3), (37), (38): Xaa is C or S
  MOD_RES (15), (16), (17), (18), (19): Xaa is A or G
  MOD_RES (20), (21), (22), (23): Xaa is A or G or is absent

SEQ ID NO: 77609 - protein, 32 aa, Artificial Sequence; identical to SEQ ID NO: 5137
  GFR-binding peptide
  MOD_RES (11), (12), (13), (14), (15): Xaa is A or G
  MOD_RES (16), (17), (18), (19): Xaa is A or G or is absent

SEQ ID NO: 77610 - protein, 37 aa, Artificial Sequence; identical to SEQ ID NO: 3211
  GFR-binding peptide
  MOD_RES (1), (35): Xaa is C or S
  MOD_RES (13), (14), (15), (16), (17): Xaa is A or G
  MOD_RES (18), (19), (20), (21): Xaa is A or G or is absent

SEQ ID NO: 77611 - protein, 40 aa, Artificial Sequence; identical to SEQ ID NO: 26238
  GFR-binding peptide
  MOD_RES (2), (4), (38), (39): Xaa is C or S
  MOD_RES (16), (17), (18), (19), (20): Xaa is A or G
  MOD_RES (21), (22), (23), (24): Xaa is A or G or is absent

SEQ ID NO: 77612 - protein, 36 aa, Artificial Sequence
  GFR-binding peptide
  MOD_RES (2), (34), (35): Xaa is C or S
GXRDVVMGQYNKLIIQQKDNLYLMSIASMKTPTXXP

SEQ ID NO: 77613 - protein, 39 aa, Artificial Sequence; identical to SEQ ID NO: 12575
  GFR-binding peptide
  MOD_RES (1), (33), (34): Xaa is C or S

SEQ ID NO: 77614 - protein, 38 aa, Artificial Sequence; identical to SEQ ID NO: 5139
  GFR-binding peptide
  MOD_RES (2), (34), (35): Xaa is C or S

SEQ ID NO: 77615 - protein, 33 aa, Artificial Sequence; identical to SEQ ID NO: 5140
  GFR-binding peptide
  MOD_RES (12), (13), (14), (15), (16): Xaa is A or G
  MOD_RES (17), (18), (19), (20): Xaa is A or G or is absent

SEQ ID NO: 77616 - protein, 32 aa, Artificial Sequence; identical to SEQ ID NO: 5141
  GFR-binding peptide
  MOD_RES (1), (1): Xaa is C or S

SEQ ID NO: 77617 - protein, 40 aa, Artificial Sequence; identical to SEQ ID NO: 5142
  GFR-binding peptide
  MOD_RES (2), (4), (38), (39): Xaa is C or S
  MOD_RES (16), (17), (18), (19), (20): Xaa is A or G
  MOD_RES (21), (22), (23), (24): Xaa is A or G or is absent

SEQ ID NO: 77618 - protein, 37 aa, Artificial Sequence; identical to SEQ ID NO: 10656
  GFR-binding peptide
  MOD_RES (1), (33), (34): Xaa is C or S

SEQ ID NO: 77619 - protein, 36 aa, Artificial Sequence; identical to SEQ ID NO: 64277
  GFR-binding peptide
  MOD_RES (32), (33): Xaa is C or S

SEQ ID NO: 77620 - protein, 39 aa, Artificial Sequence; identical to SEQ ID NO: 10657
  GFR-binding peptide
  MOD_RES (33), (34): Xaa is C or S
  MOD_RES (11), (12), (13), (14), (15): Xaa is A or G
  MOD_RES (16), (17), (18), (19): Xaa is A or G or is absent

SEQ ID NO: 77621 - protein, 38 aa, Artificial Sequence
  GFR-binding peptide
  MOD_RES (1), (3), (34), (35): Xaa is C or S
XGXEEVIMQYNKLLLVRGNDLYLMSIASTKVPAXXTSP

SEQ ID NO: 77622 - protein, 32 aa, Artificial Sequence; identical to SEQ ID NO: 24211
  GFR-binding peptide
  MOD_RES (32), (32): Xaa is C or S

SEQ ID NO: 77623 - protein, 36 aa, Artificial Sequence; identical to SEQ ID NO: 57186
  GFR-binding peptide
  MOD_RES (1), (35), (36): Xaa is C or S
  MOD_RES (13), (14), (15), (16), (17): Xaa is A or G
  MOD_RES (18), (19), (20), (21): Xaa is A or G or is absent

SEQ ID NO: 77624 - protein, 30 aa, Artificial Sequence
  GFR-binding peptide
EVTMNQYNKLVVNKNEDLYLISIASMKEPV

SEQ ID NO: 77625 - protein, 35 aa, Artificial Sequence; identical to SEQ ID NO: 3218
  GFR-binding peptide
  MOD_RES (1), (34), (35): Xaa is C or S

SEQ ID NO: 77626 - protein, 40 aa, Artificial Sequence; identical to SEQ ID NO: 3219
  GFR-binding peptide
  MOD_RES (1), (3), (35), (36): Xaa is C or S

SEQ ID NO: 77627 - protein, 40 aa, Artificial Sequence
  GFR-binding peptide
  MOD_RES (2), (34), (35): Xaa is C or S
AXSEVTMNQYNKLVVNKNEDLYLISIASMKEPVXXPEPIG

SEQ ID NO: 77628 - protein, 37 aa, Artificial Sequence; identical to SEQ ID NO: 3222
  GFR-binding peptide
  MOD_RES (2), (36), (37): Xaa is C or S
  MOD_RES (14), (15), (16), (17), (18): Xaa is A or G
  MOD_RES (19), (20), (21), (22): Xaa is A or G or is absent

SEQ ID NO: 77629 - protein, 37 aa, Artificial Sequence; identical to SEQ ID NO: 3223
  GFR-binding peptide
  MOD_RES (2), (4), (36), (37): Xaa is C or S

SEQ ID NO: 77630 - protein, 33 aa, Artificial Sequence; identical to SEQ ID NO: 62550
  GFR-binding peptide
  MOD_RES (1), (33): Xaa is C or S

SEQ ID NO: 77631 - protein, 34 aa, Artificial Sequence
  GFR-binding peptide
  MOD_RES (33), (34): Xaa is C or S
  MOD_RES (11), (12), (13), (14), (15): Xaa is A or G
  MOD_RES (16), (17), (18), (19): Xaa is A or G or is absent
SVAMGQYNKLXXXXXXXXXLYLISIASLKTPVXX

SEQ ID NO: 77632 - protein, 37 aa, Artificial Sequence; identical to SEQ ID NO: 5143
  GFR-binding peptide
  MOD_RES (31), (32): Xaa is C or S

SEQ ID NO: 77633 - protein, 33 aa, Artificial Sequence
  GFR-binding peptide
  MOD_RES (2), (2): Xaa is C or S
AXSEVTMNQYNKLVVNKNEDLYLISIASMKEPV

SEQ ID NO: 77634 - protein, 40 aa, Artificial Sequence; identical to SEQ ID NO: 12587
  GFR-binding peptide
  MOD_RES (1), (3), (37), (38): Xaa is C or S
  MOD_RES (15), (16), (17), (18), (19): Xaa is A or G
  MOD_RES (20), (21), (22), (23): Xaa is A or G or is absent

SEQ ID NO: 77635 - protein, 34 aa, Artificial Sequence; identical to SEQ ID NO: 62555
  GFR-binding peptide
  MOD_RES (1), (33), (34): Xaa is C or S

SEQ ID NO: 77636 - protein, 39 aa, Artificial Sequence; identical to SEQ ID NO: 5147
  GFR-binding peptide
  MOD_RES (1), (33), (34): Xaa is C or S

SEQ ID NO: 77637 - protein, 36 aa, Artificial Sequence; identical to SEQ ID NO: 5148
  GFR-binding peptide
  MOD_RES (2), (4), (35), (36): Xaa is C or S

SEQ ID NO: 77638 - protein, 43 aa, Artificial Sequence; identical to SEQ ID NO: 3229
  GFR-binding peptide
  MOD_RES (2), (4), (37), (38): Xaa is C or S
  MOD_RES (15), (16), (17), (18), (19): Xaa is A or G
  MOD_RES (20), (21), (22), (23): Xaa is A or G or is absent

SEQ ID NO: 77639 - protein, 42 aa, Artificial Sequence; identical to SEQ ID NO: 3231
  GFR-binding peptide
  MOD_RES (2), (4), (36), (37): Xaa is C or S

SEQ ID NO: 77640 - protein, 37 aa, Artificial Sequence; identical to SEQ ID NO: 5149
  GFR-binding peptide
  MOD_RES (34), (35): Xaa is C or S
  MOD_RES (12), (13), (14), (15), (16): Xaa is A or G
  MOD_RES (17), (18), (19), (20): Xaa is A or G or is absent

SEQ ID NO: 77641 - protein, 41 aa, Artificial Sequence; identical to SEQ ID NO: 5150
  GFR-binding peptide
  MOD_RES (1), (3), (37), (38): Xaa is C or S
  MOD_RES (15), (16), (17), (18), (19): Xaa is A or G
  MOD_RES (20), (21), (22), (23): Xaa is A or G or is absent

SEQ ID NO: 77642 - protein, 34 aa, Artificial Sequence; identical to SEQ ID NO: 3234
  GFR-binding peptide
  MOD_RES (1), (1): Xaa is C or S
  MOD_RES (13), (14), (15), (16), (17): Xaa is A or G
  MOD_RES (18), (19), (20), (21): Xaa is A or G or is absent

SEQ ID NO: 77643 - protein, 41 aa, Artificial Sequence; identical to SEQ ID NO: 5151
  GFR-binding peptide
  MOD_RES (2), (36), (37): Xaa is C or S
  MOD_RES (14), (15), (16), (17), (18): Xaa is A or G
  MOD_RES (19), (20), (21), (22): Xaa is A or G or is absent

SEQ ID NO: 77644 - protein, 31 aa, Artificial Sequence; identical to SEQ ID NO: 5152
  GFR-binding peptide
  MOD_RES (31), (31): Xaa is C or S

SEQ ID NO: 77645 - protein, 36 aa, Artificial Sequence
  GFR-binding peptide
  MOD_RES (34), (35): Xaa is C or S
  MOD_RES (12), (13), (14), (15), (16): Xaa is A or G
  MOD_RES (17), (18), (19), (20): Xaa is A or G or is absent
RDVVMGQYNKLXXXXXXXXXLYLMSIASMKTPTXXP

SEQ ID NO: 77646 - protein, 33 aa, Artificial Sequence; identical to SEQ ID NO: 12596
  GFR-binding peptide
  MOD_RES (31), (32): Xaa is C or S

SEQ ID NO: 77647 - protein, 38 aa, Artificial Sequence; identical to SEQ ID NO: 5153
  GFR-binding peptide
  MOD_RES (32), (33): Xaa is C or S

SEQ ID NO: 77648 - protein, 42 aa, Artificial Sequence; identical to SEQ ID NO: 3238
  GFR-binding peptide
  MOD_RES (2), (4), (38), (39): Xaa is C or S
  MOD_RES (16), (17), (18), (19), (20): Xaa is A or G
  MOD_RES (21), (22), (23), (24): Xaa is A or G or is absent

SEQ ID NO: 77649 - protein, 36 aa, Artificial Sequence
  GFR-binding peptide
  MOD_RES (31), (32): Xaa is C or S
EEVIMQYNKLLLVRGNDLYLMSIASTKVPAXXTSPV

SEQ ID NO: 77650 - protein, 36 aa, Artificial Sequence; identical to SEQ ID NO: 5154
  GFR-binding peptide
  MOD_RES (2), (34), (35): Xaa is C or S

SEQ ID NO: 77651 - protein, 39 aa, Artificial Sequence
  GFR-binding peptide
  MOD_RES (1), (35), (36): Xaa is C or S
  MOD_RES (13), (14), (15), (16), (17): Xaa is A or G
  MOD_RES (18), (19), (20), (21): Xaa is A or G or is absent
XRDVVMGQYNKLXXXXXXXXXLYLMSIASMKTPTXXPGA

SEQ ID NO: 77652 - protein, 33 aa, Artificial Sequence; identical to SEQ ID NO: 3241
  GFR-binding peptide
  MOD_RES (1), (32), (33): Xaa is C or S

SEQ ID NO: 77653 - protein, 38 aa, Artificial Sequence; identical to SEQ ID NO: 5157
  GFR-binding peptide
  MOD_RES (2), (4), (36), (37): Xaa is C or S

SEQ ID NO: 77654 - protein, 42 aa, Artificial Sequence; identical to SEQ ID NO: 5160
  GFR-binding peptide
  MOD_RES (2), (36): Xaa is C or S
  MOD_RES (14), (15), (16), (17), (18): Xaa is A or G
  MOD_RES (19), (20), (21), (22): Xaa is A or G or is absent

SEQ ID NO: 77655 - protein, 36 aa, Artificial Sequence; identical to SEQ ID NO: 26269
  GFR-binding peptide
  MOD_RES (1), (3), (35), (36): Xaa is C or S

SEQ ID NO: 77656 - protein, 33 aa, Artificial Sequence; identical to SEQ ID NO: 57204
  GFR-binding peptide
  MOD_RES (33), (33): Xaa is C or S
  MOD_RES (11), (12), (13), (14), (15): Xaa is A or G
  MOD_RES (16), (17), (18), (19): Xaa is A or G or is absent

SEQ ID NO: 77657 - protein, 38 aa, Artificial Sequence; identical to SEQ ID NO: 5164
  GFR-binding peptide
  MOD_RES (33), (34): Xaa is C or S
  MOD_RES (11), (12), (13), (14), (15): Xaa is A or G
  MOD_RES (16), (17), (18), (19): Xaa is A or G or is absent

SEQ ID NO: 77658 - protein, 33 aa, Artificial Sequence; identical to SEQ ID NO: 3244
  GFR-binding peptide
  MOD_RES (33), (33): Xaa is C or S

SEQ ID NO: 77659 - protein, 43 aa, Artificial Sequence; identical to SEQ ID NO: 5165
  GFR-binding peptide
  MOD_RES (2), (4), (38): Xaa is C or S
  MOD_RES (16), (17), (18), (19), (20): Xaa is A or G
  MOD_RES (21), (22), (23), (24): Xaa is A or G or is absent

SEQ ID NO: 77660 - protein, 37 aa, Artificial Sequence; identical to SEQ ID NO: 57206
  GFR-binding peptide
  MOD_RES (1), (3), (36), (37): Xaa is C or S
  MOD_RES (14), (15), (16), (17), (18): Xaa is A or G
  MOD_RES (19), (20), (21), (22): Xaa is A or G or is absent

SEQ ID NO: 77661 - protein, 33 aa, Artificial Sequence; identical to SEQ ID NO: 3248
  GFR-binding peptide
  MOD_RES (31), (32): Xaa is C or S

SEQ ID NO: 77662 - protein, 41 aa, Artificial Sequence; identical to SEQ ID NO: 5167
  GFR-binding peptide
  MOD_RES (2), (4), (38), (39): Xaa is C or S
  MOD_RES (16), (17), (18), (19), (20): Xaa is A or G
  MOD_RES (21), (22), (23), (24): Xaa is A or G or is absent

SEQ ID NO: 77663 - protein, 37 aa, Artificial Sequence; identical to SEQ ID NO: 5168
  GFR-binding peptide
  MOD_RES (34), (35): Xaa is C or S
  MOD_RES (12), (13), (14), (15), (16): Xaa is A or G
  MOD_RES (17), (18), (19), (20): Xaa is A or G or is absent

SEQ ID NO: 77664 - protein, 33 aa, Artificial Sequence; identical to SEQ ID NO: 3250
  GFR-binding peptide
  MOD_RES (31), (32): Xaa is C or S

SEQ ID NO: 77665 - protein, 38 aa, Artificial Sequence; identical to SEQ ID NO: 57209
  GFR-binding peptide
  MOD_RES (2), (4), (36), (37): Xaa is C or S

SEQ ID NO: 77666 - protein, 32 aa, Artificial Sequence; identical to SEQ ID NO: 5171
  GFR-binding peptide
  MOD_RES (31), (32): Xaa is C or S

SEQ ID NO: 77667 - protein, 31 aa, Artificial Sequence
  GFR-binding peptide
  MOD_RES (1), (1): Xaa is C or S
XEEVIMQYNKLLLVRGNDLYLMSIASTKVPA

SEQ ID NO: 77668 - protein, 35 aa, Artificial Sequence; identical to SEQ ID NO: 3254
  GFR-binding peptide
  MOD_RES (31), (32): Xaa is C or S

SEQ ID NO: 77669 - protein, 30 aa, Artificial Sequence; identical to SEQ ID NO: 5173
  GFR-binding peptide

SEQ ID NO: 77670 - protein, 32 aa, Artificial Sequence; identical to SEQ ID NO: 3256
  GFR-binding peptide
  MOD_RES (2), (2): Xaa is C or S

SEQ ID NO: 77671 - protein, 41 aa, Artificial Sequence
  GFR-binding peptide
  MOD_RES (1), (3), (36), (37): Xaa is C or S
  MOD_RES (14), (15), (16), (17), (18): Xaa is A or G
  MOD_RES (19), (20), (21), (22): Xaa is A or G or is absent
XGXEEVIMQYNKLXXXXXXXXXLYLMSIASTKVPAXXTSPV

SEQ ID NO: 77672 - protein, 43 aa, Artificial Sequence
  GFR-binding peptide
  MOD_RES (1), (3), (37), (38): Xaa is C or S
  MOD_RES (15), (16), (17), (18), (19): Xaa is A or G
  MOD_RES (20), (21), (22), (23): Xaa is A or G or is absent
XGXAEVVMDQYNKLXXXXXXXXXLYLISIASLRAPVXXSAPAA

SEQ ID NO: 77673 - protein, 35 aa, Artificial Sequence; identical to SEQ ID NO: 3257
  GFR-binding peptide
  MOD_RES (1), (35): Xaa is C or S
  MOD_RES (13), (14), (15), (16), (17): Xaa is A or G
  MOD_RES (18), (19), (20), (21): Xaa is A or G or is absent

SEQ ID NO: 77674 - protein, 41 aa, Artificial Sequence; identical to SEQ ID NO: 10688
  GFR-binding peptide
  MOD_RES (2), (4), (38), (39): Xaa is C or S
  MOD_RES (16), (17), (18), (19), (20): Xaa is A or G
  MOD_RES (21), (22), (23), (24): Xaa is A or G or is absent

SEQ ID NO: 77675 - protein, 39 aa, Artificial Sequence; identical to SEQ ID NO: 3259
  GFR-binding peptide
  MOD_RES (1), (3), (36), (37): Xaa is C or S
  MOD_RES (14), (15), (16), (17), (18): Xaa is A or G
  MOD_RES (19), (20), (21), (22): Xaa is A or G or is absent

SEQ ID NO: 77676 - protein, 34 aa, Artificial Sequence; identical to SEQ ID NO: 5177
  GFR-binding peptide
  MOD_RES (33), (34): Xaa is C or S
  MOD_RES (11), (12), (13), (14), (15): Xaa is A or G
  MOD_RES (16), (17), (18), (19): Xaa is A or G or is absent

SEQ ID NO: 77677 - protein, 37 aa, Artificial Sequence; identical to SEQ ID NO: 57222
  GFR-binding peptide
  MOD_RES (33), (34): Xaa is C or S
  MOD_RES (11), (12), (13), (14), (15): Xaa is A or G
  MOD_RES (16), (17), (18), (19): Xaa is A or G or is absent

SEQ ID NO: 77678 - protein, 36 aa, Artificial Sequence; identical to SEQ ID NO: 3261
  GFR-binding peptide
  MOD_RES (2), (4), (36): Xaa is C or S

SEQ ID NO: 77679 - protein, 33 aa, Artificial Sequence; identical to SEQ ID NO: 5180
  GFR-binding peptide
  MOD_RES (12), (13), (14), (15), (16): Xaa is A or G
  MOD_RES (17), (18), (19), (20): Xaa is A or G or is absent

SEQ ID NO: 77680 - protein, 39 aa, Artificial Sequence
  GFR-binding peptide
  MOD_RES (34), (35): Xaa is C or S
  MOD_RES (12), (13), (14), (15), (16): Xaa is A or G
  MOD_RES (17), (18), (19), (20): Xaa is A or G or is absent
SEVTMNQYNKLXXXXXXXXXLYLISIASMKEPVXXPEPI

SEQ ID NO: 77681 - protein, 32 aa, Artificial Sequence; identical to SEQ ID NO: 57226
  GFR-binding peptide
  MOD_RES (11), (12), (13), (14), (15): Xaa is A or G
  MOD_RES (16), (17), (18), (19): Xaa is A or G or is absent

SEQ ID NO: 77682 - protein, 32 aa, Artificial Sequence; identical to SEQ ID NO: 3264
  GFR-binding peptide
  MOD_RES (11), (12), (13), (14), (15): Xaa is A or G
  MOD_RES (16), (17), (18), (19): Xaa is A or G or is absent

SEQ ID NO: 77683 - protein, 40 aa, Artificial Sequence
  GFR-binding peptide
  MOD_RES (1), (3), (37), (38): Xaa is C or S
  MOD_RES (15), (16), (17), (18), (19): Xaa is A or G
  MOD_RES (20), (21), (22), (23): Xaa is A or G or is absent
XGXESVAMGQYNKLXXXXXXXXXLYLISIASLKTPVXXAK

SEQ ID NO: 77684 - protein, 35 aa, Artificial Sequence; identical to SEQ ID NO: 5183
  GFR-binding peptide
  MOD_RES (1), (35): Xaa is C or S
  MOD_RES (13), (14), (15), (16), (17): Xaa is A or G
  MOD_RES (18), (19), (20), (21): Xaa is A or G or is absent

SEQ ID NO: 77685 - protein, 41 aa, Artificial Sequence; identical to SEQ ID NO: 57228
  GFR-binding peptide
  MOD_RES (2), (4), (38), (39): Xaa is C or S
  MOD_RES (16), (17), (18), (19), (20): Xaa is A or G
  MOD_RES (21), (22), (23), (24): Xaa is A or G or is absent

SEQ ID NO: 77686 - protein, 36 aa, Artificial Sequence; identical to SEQ ID NO: 5185
  GFR-binding peptide
  MOD_RES (2), (33), (34): Xaa is C or S

SEQ ID NO: 77687 - protein, 37 aa, Artificial Sequence
  GFR-binding peptide
  MOD_RES (33), (34): Xaa is C or S
  MOD_RES (11), (12), (13), (14), (15): Xaa is A or G
  MOD_RES (16), (17), (18), (19): Xaa is A or G or is absent
EVVMDQYNKLXXXXXXXXXLYLISIASLRAPVXXSAP

SEQ ID NO: 77688 - protein, 35 aa, Artificial Sequence; identical to SEQ ID NO: 10706
  GFR-binding peptide
  MOD_RES (31), (32): Xaa is C or S

SEQ ID NO: 77689 - protein, 32 aa, Artificial Sequence; identical to SEQ ID NO: 5188
  GFR-binding peptide

SEQ ID NO: 77690 - protein, 42 aa, Artificial Sequence; identical to SEQ ID NO: 3269
  GFR-binding peptide
  MOD_RES (2), (4), (36), (37): Xaa is C or S

SEQ ID NO: 77691 - protein, 40 aa, Artificial Sequence; identical to SEQ ID NO: 5190
  GFR-binding peptide
  MOD_RES (1), (3), (37), (38): Xaa is C or S
  MOD_RES (15), (16), (17), (18), (19): Xaa is A or G
  MOD_RES (20), (21), (22), (23): Xaa is A or G or is absent

SEQ ID NO: 77692 - protein, 42 aa, Artificial Sequence; identical to SEQ ID NO: 3271
  GFR-binding peptide
  MOD_RES (1), (3), (37), (38): Xaa is C or S
  MOD_RES (15), (16), (17), (18), (19): Xaa is A or G
  MOD_RES (20), (21), (22), (23): Xaa is A or G or is absent

SEQ ID NO: 77693 - protein, 35 aa, Artificial Sequence; identical to SEQ ID NO: 5192
  GFR-binding peptide
  MOD_RES (1), (3), (35): Xaa is C or S

SEQ ID NO: 77694 - protein, 33 aa, Artificial Sequence; identical to SEQ ID NO: 5193
  GFR-binding peptide
  MOD_RES (33), (33): Xaa is C or S
  MOD_RES (11), (12), (13), (14), (15): Xaa is A or G
  MOD_RES (16), (17), (18), (19): Xaa is A or G or is absent

SEQ ID NO: 77695 - protein, 31 aa, Artificial Sequence; identical to SEQ ID NO: 57231
  GFR-binding peptide
  MOD_RES (31), (31): Xaa is C or S

SEQ ID NO: 77696 - protein, 42 aa, Artificial Sequence; identical to SEQ ID NO: 3272
  GFR-binding peptide
  MOD_RES (2), (4), (36), (37): Xaa is C or S

SEQ ID NO: 77697 - protein, 35 aa, Artificial Sequence; identical to SEQ ID NO: 5195
  GFR-binding peptide
  MOD_RES (1), (32), (33): Xaa is C or S

SEQ ID NO: 77698 - protein, 39 aa, Artificial Sequence; identical to SEQ ID NO: 5197
  GFR-binding peptide
  MOD_RES (1), (3), (37), (38): Xaa is C or S
  MOD_RES (15), (16), (17), (18), (19): Xaa is A or G
  MOD_RES (20), (21), (22), (23): Xaa is A or G or is absent

SEQ ID NO: 77699 - protein, 43 aa, Artificial Sequence
  GFR-binding peptide
  MOD_RES (2), (4), (38), (39): Xaa is C or S
  MOD_RES (16), (17), (18), (19), (20): Xaa is A or G
  MOD_RES (21), (22), (23), (24): Xaa is A or G or is absent
RXGXAEVVMDQYNKLXXXXXXXXXLYLISIASLRAPVXXSAPA

SEQ ID NO: 77700 - protein, 34 aa, Artificial Sequence; identical to SEQ ID NO: 26309
  GFR-binding peptide
  MOD_RES (2), (34): Xaa is C or S

SEQ ID NO: 77701 - protein, 39 aa, Artificial Sequence
  GFR-binding peptide
  MOD_RES (2), (33), (34): Xaa is C or S
GXEEVIMQYNKLLLVRGNDLYLMSIASTKVPAXXTSPVR

SEQ ID NO: 77702 - protein, 36 aa, Artificial Sequence; identical to SEQ ID NO: 5201
  GFR-binding peptide
  MOD_RES (33), (34): Xaa is C or S

SEQ ID NO: 77703 - protein, 35 aa, Artificial Sequence; identical to SEQ ID NO: 3276
  GFR-binding peptide
  MOD_RES (33), (34): Xaa is C or S
  MOD_RES (11), (12), (13), (14), (15): Xaa is A or G
  MOD_RES (16), (17), (18), (19): Xaa is A or G or is absent

SEQ ID NO: 77704 - protein, 41 aa, Artificial Sequence; identical to SEQ ID NO: 3278
  GFR-binding peptide
  MOD_RES (2), (35), (36): Xaa is C or S

SEQ ID NO: 77705 - protein, 35 aa, Artificial Sequence; identical to SEQ ID NO: 5202
  GFR-binding peptide
  MOD_RES (1), (35): Xaa is C or S
  MOD_RES (13), (14), (15), (16), (17): Xaa is A or G
  MOD_RES (18), (19), (20), (21): Xaa is A or G or is absent

SEQ ID NO: 77706 - protein, 39 aa, Artificial Sequence; identical to SEQ ID NO: 5206
  GFR-binding peptide
  MOD_RES (33), (34): Xaa is C or S
  MOD_RES (11), (12), (13), (14), (15): Xaa is A or G
  MOD_RES (16), (17), (18), (19): Xaa is A or G or is absent

SEQ ID NO: 77707 - protein, 33 aa, Artificial Sequence; identical to SEQ ID NO: 3281
  GFR-binding peptide
  MOD_RES (2), (33): Xaa is C or S

SEQ ID NO: 77708 - protein, 35 aa, Artificial Sequence; identical to SEQ ID NO: 5208
  GFR-binding peptide
  MOD_RES (1), (34), (35): Xaa is C or S
  MOD_RES (12), (13), (14), (15), (16): Xaa is A or G
  MOD_RES (17), (18), (19), (20): Xaa is A or G or is absent

SEQ ID NO: 77709 - protein, 38 aa, Artificial Sequence
  GFR-binding peptide
  MOD_RES (1), (3), (37), (38): Xaa is C or S
  MOD_RES (15), (16), (17), (18), (19): Xaa is A or G
  MOD_RES (20), (21), (22), (23): Xaa is A or G or is absent
XGXRDVVMGQYNKLXXXXXXXXXLYLMSIASMKTPTXX

SEQ ID NO: 77710 - protein, 38 aa, Artificial Sequence; identical to SEQ ID NO: 56144
  GFR-binding peptide
  MOD_RES (32), (33): Xaa is C or S

SEQ ID NO: 77711 - protein, 36 aa, Artificial Sequence
  GFR-binding peptide
  MOD_RES (2), (4), (36): Xaa is C or S
RXGXESVAMGQYNKLYTVVGKDLYLISIASLKTPVX

SEQ ID NO: 77712 - protein, 35 aa, Artificial Sequence; identical to SEQ ID NO: 3283
  GFR-binding peptide
  MOD_RES (1), (35): Xaa is C or S
  MOD_RES (13), (14), (15), (16), (17): Xaa is A or G
  MOD_RES (18), (19), (20), (21): Xaa is A or G or is absent

SEQ ID NO: 77713 - protein, 36 aa, Artificial Sequence; identical to SEQ ID NO: 3288
  GFR-binding peptide
  MOD_RES (2), (4), (36): Xaa is C or S

SEQ ID NO: 77714 - protein, 34 aa, Artificial Sequence; identical to SEQ ID NO: 5213
  GFR-binding peptide
  MOD_RES (1), (3): Xaa is C or S

SEQ ID NO: 77715 - protein, 32 aa, Artificial Sequence; identical to SEQ ID NO: 5214
  GFR-binding peptide
  MOD_RES (31), (32): Xaa is C or S

SEQ ID NO: 77716 - protein, 41 aa, Artificial Sequence; identical to SEQ ID NO: 3292
  GFR-binding peptide
  MOD_RES (1), (3), (36), (37): Xaa is C or S
  MOD_RES (14), (15), (16), (17), (18): Xaa is A or G
  MOD_RES (19), (20), (21), (22): Xaa is A or G or is absent

SEQ ID NO: 77717 - protein, 41 aa, Artificial Sequence; identical to SEQ ID NO: 5216
  GFR-binding peptide
  MOD_RES (2), (37), (38): Xaa is C or S
  MOD_RES (15), (16), (17), (18), (19): Xaa is A or G
  MOD_RES (20), (21), (22), (23): Xaa is A or G or is absent

SEQ ID NO: 77718 - protein, 39 aa, Artificial Sequence; identical to SEQ ID NO: 56149
  GFR-binding peptide
  MOD_RES (1), (3), (36), (37): Xaa is C or S
  MOD_RES (14), (15), (16), (17), (18): Xaa is A or G
  MOD_RES (19), (20), (21), (22): Xaa is A or G or is absent

SEQ ID NO: 77719 - protein, 37 aa, Artificial Sequence; identical to SEQ ID NO: 5217
  GFR-binding peptide
  MOD_RES (1), (3), (36), (37): Xaa is C or S
  MOD_RES (14), (15), (16), (17), (18): Xaa is A or G
  MOD_RES (19), (20), (21), (22): Xaa is A or G or is absent

SEQ ID NO: 77720 - protein, 40 aa, Artificial Sequence; identical to SEQ ID NO: 5218
  GFR-binding peptide
  MOD_RES (1), (3), (35), (36): Xaa is C or S

SEQ ID NO: 77721 - protein, 37 aa, Artificial Sequence; identical to SEQ ID NO: 3297
  GFR-binding peptide
  MOD_RES (2), (4): Xaa is C or S
  MOD_RES (16), (17), (18), (19), (20): Xaa is A or G
  MOD_RES (21), (22), (23), (24): Xaa is A or G or is absent

SEQ ID NO: 77722 - protein, 35 aa, Artificial Sequence; identical to SEQ ID NO: 5219
  GFR-binding peptide
  MOD_RES (2), (34), (35): Xaa is C or S

SEQ ID NO: 77723 - protein, 36 aa, Artificial Sequence
  GFR-binding peptide
  MOD_RES (2), (36): Xaa is C or S
  MOD_RES (14), (15), (16), (17), (18): Xaa is A or G
  MOD_RES (19), (20), (21), (22): Xaa is A or G or is absent
AXSEVTMNQYNKLXXXXXXXXXLYLISIASMKEPVX

SEQ ID NO: 77724 - protein, 40 aa, Artificial Sequence; identical to SEQ ID NO: 5220
  GFR-binding peptide
  MOD_RES (2), (4), (35), (36): Xaa is C or S

SEQ ID NO: 77725 - protein, 36 aa, Artificial Sequence; identical to SEQ ID NO: 26332
  GFR-binding peptide
  MOD_RES (31), (32): Xaa is C or S

SEQ ID NO: 77726 - protein, 39 aa, Artificial Sequence; identical to SEQ ID NO: 3298
  GFR-binding peptide
  MOD_RES (1), (36), (37): Xaa is C or S
  MOD_RES (14), (15), (16), (17), (18): Xaa is A or G
  MOD_RES (19), (20), (21), (22): Xaa is A or G or is absent

SEQ ID NO: 77727 - protein, 37 aa, Artificial Sequence; identical to SEQ ID NO: 5223
  GFR-binding peptide
  MOD_RES (31), (32): Xaa is C or S

SEQ ID NO: 77728 - protein, 42 aa, Artificial Sequence; identical to SEQ ID NO: 5224
  GFR-binding peptide
  MOD_RES (2), (37), (38): Xaa is C or S
  MOD_RES (15), (16), (17), (18), (19): Xaa is A or G
  MOD_RES (20), (21), (22), (23): Xaa is A or G or is absent

SEQ ID NO: 77729 - protein, 40 aa, Artificial Sequence; identical to SEQ ID NO: 24290
  GFR-binding peptide
  MOD_RES (34), (35): Xaa is C or S
  MOD_RES (12), (13), (14), (15), (16): Xaa is A or G
  MOD_RES (17), (18), (19), (20): Xaa is A or G or is absent

SEQ ID NO: 77730 - protein, 40 aa, Artificial Sequence; identical to SEQ ID NO: 60860
  GFR-binding peptide
  MOD_RES (2), (36), (37): Xaa is C or S
  MOD_RES (14), (15), (16), (17), (18): Xaa is A or G
  MOD_RES (19), (20), (21), (22): Xaa is A or G or is absent

SEQ ID NO: 77731 - protein, 41 aa, Artificial Sequence; identical to SEQ ID NO: 5226
  GFR-binding peptide
  MOD_RES (2), (4), (35), (36): Xaa is C or S

SEQ ID NO: 77732 - protein, 35 aa, Artificial Sequence; identical to SEQ ID NO: 26339
  GFR-binding peptide
  MOD_RES (2), (34), (35): Xaa is C or S

SEQ ID NO: 77733 - protein, 39 aa, Artificial Sequence; identical to SEQ ID NO: 56165
  GFR-binding peptide
  MOD_RES (2), (35), (36): Xaa is C or S
  MOD_RES (13), (14), (15), (16), (17): Xaa is A or G
  MOD_RES (18), (19), (20), (21): Xaa is A or G or is absent

SEQ ID NO: 77734 - protein, 37 aa, Artificial Sequence; identical to SEQ ID NO: 56166
  GFR-binding peptide
  MOD_RES (2), (4), (36), (37): Xaa is C or S

SEQ ID NO: 77735 - protein, 36 aa, Artificial Sequence; identical to SEQ ID NO: 3301
  GFR-binding peptide
  MOD_RES (2), (34), (35): Xaa is C or S

SEQ ID NO: 77736 - protein, 37 aa, Artificial Sequence; identical to SEQ ID NO: 3302
  GFR-binding peptide
  MOD_RES (31), (31): Xaa is C or S

SEQ ID NO: 77737 - protein, 35 aa, Artificial Sequence; identical to SEQ ID NO: 5229
  GFR-binding peptide
  MOD_RES (33), (34): Xaa is C or S
  MOD_RES (11), (12), (13), (14), (15): Xaa is A or G
  MOD_RES (16), (17), (18), (19): Xaa is A or G or is absent

SEQ ID NO: 77738 - protein, 34 aa, Artificial Sequence
  GFR-binding peptide
  MOD_RES (31), (32): Xaa is C or S
EVTMNQYNKLVVNKNEDLYLISIASMKEPVXXPE

SEQ ID NO: 77739 - protein, 39 aa, Artificial Sequence; identical to SEQ ID NO: 5230
  GFR-binding peptide
  MOD_RES (2), (4), (38), (39): Xaa is C or S
  MOD_RES (16), (17), (18), (19), (20): Xaa is A or G
  MOD_RES (21), (22), (23), (24): Xaa is A or G or is absent

SEQ ID NO: 77740 - protein, 37 aa, Artificial Sequence; identical to SEQ ID NO: 56168
  GFR-binding peptide
  MOD_RES (2), (34), (35): Xaa is C or S

SEQ ID NO: 77741 - protein, 35 aa, Artificial Sequence; identical to SEQ ID NO: 5232
  GFR-binding peptide
  MOD_RES (33), (34): Xaa is C or S

SEQ ID NO: 77742 - protein, 30 aa, Artificial Sequence; identical to SEQ ID NO: 24301
  GFR-binding peptide

SEQ ID NO: 77743 - protein, 41 aa, Artificial Sequence; identical to SEQ ID NO: 3307
  GFR-binding peptide
  MOD_RES (35), (36): Xaa is C or S
  MOD_RES (13), (14), (15), (16), (17): Xaa is A or G
  MOD_RES (18), (19), (20), (21): Xaa is A or G or is absent

SEQ ID NO: 77744 - protein, 32 aa, Artificial Sequence; identical to SEQ ID NO: 10748
  GFR-binding peptide
  MOD_RES (32), (32): Xaa is C or S

SEQ ID NO: 77745 - protein, 37 aa, Artificial Sequence; identical to SEQ ID NO: 12669
  GFR-binding peptide
  MOD_RES (1), (3), (35), (36): Xaa is C or S

SEQ ID NO: 77746 - protein, 36 aa, Artificial Sequence; identical to SEQ ID NO: 5234
  GFR-binding peptide
  MOD_RES (1), (32), (33): Xaa is C or S

SEQ ID NO: 77747 - protein, 36 aa, Artificial Sequence; identical to SEQ ID NO: 64355
  GFR-binding peptide
  MOD_RES (1), (3), (35), (36): Xaa is C or S

SEQ ID NO: 77748 - protein, 34 aa, Artificial Sequence; identical to SEQ ID NO: 3316
  GFR-binding peptide
  MOD_RES (2), (2): Xaa is C or S

SEQ ID NO: 77749 - protein, 37 aa, Artificial Sequence; identical to SEQ ID NO: 62634
  GFR-binding peptide
  MOD_RES (2), (4): Xaa is C or S
  MOD_RES (16), (17), (18), (19), (20): Xaa is A or G
  MOD_RES (21), (22), (23), (24): Xaa is A or G or is absent

SEQ ID NO: 77750 - protein, 40 aa, Artificial Sequence; identical to SEQ ID NO: 56179
  GFR-binding peptide
  MOD_RES (2), (4), (36), (37): Xaa is C or S

SEQ ID NO: 77751 - protein, 33 aa, Artificial Sequence; identical to SEQ ID NO: 60884
  GFR-binding peptide
  MOD_RES (32), (33): Xaa is C or S

SEQ ID NO: 77752 - protein, 31 aa, Artificial Sequence; identical to SEQ ID NO: 5237
  GFR-binding peptide
  MOD_RES (31), (31): Xaa is C or S

SEQ ID NO: 77753 - protein, 36 aa, Artificial Sequence
  GFR-binding peptide
  MOD_RES (32), (33): Xaa is C or S
SEVTMNQYNKLVVNKNEDLYLISIASMKEPVXXPEP

SEQ ID NO: 77754 - protein, 40 aa, Artificial Sequence; identical to SEQ ID NO: 3321
  GFR-binding peptide
  MOD_RES (1), (3), (37), (38): Xaa is C or S
  MOD_RES (15), (16), (17), (18), (19): Xaa is A or G
  MOD_RES (20), (21), (22), (23): Xaa is A or G or is absent

SEQ ID NO: 77755 - protein, 37 aa, Artificial Sequence; identical to SEQ ID NO: 3322
  GFR-binding peptide
  MOD_RES (1), (3), (37): Xaa is C or S
  MOD_RES (15), (16), (17), (18), (19): Xaa is A or G
  MOD_RES (20), (21), (22), (23): Xaa is A or G or is absent

SEQ ID NO: 77756 - protein, 42 aa, Artificial Sequence; identical to SEQ ID NO: 5239
  GFR-binding peptide
  MOD_RES (2), (4), (37), (38): Xaa is C or S
  MOD_RES (15), (16), (17), (18), (19): Xaa is A or G
  MOD_RES (20), (21), (22), (23): Xaa is A or G or is absent

SEQ ID NO: 77757 - protein, 40 aa, Artificial Sequence
  GFR-binding peptide
  MOD_RES (2), (4), (35), (36): Xaa is C or S
LXGXEEVIMQYNKLLLVRGNDLYLMSIASTKVPAXXTSPV

SEQ ID NO: 77758 - protein, 43 aa, Artificial Sequence; identical to SEQ ID NO: 26358
  GFR-binding peptide
  MOD_RES (1), (3), (37), (38): Xaa is C or S
  MOD_RES (15), (16), (17), (18), (19): Xaa is A or G
  MOD_RES (20), (21), (22), (23): Xaa is A or G or is absent

SEQ ID NO: 77759 - protein, 36 aa, Artificial Sequence; identical to SEQ ID NO: 3323
  GFR-binding peptide
  MOD_RES (2), (4), (36): Xaa is C or S

SEQ ID NO: 77760 - protein, 41 aa, Artificial Sequence; identical to SEQ ID NO: 5241
  GFR-binding peptide
  MOD_RES (2), (35), (36): Xaa is C or S
  MOD_RES (13), (14), (15), (16), (17): Xaa is A or G
  MOD_RES (18), (19), (20), (21): Xaa is A or G or is absent

SEQ ID NO: 77761 - protein, 41 aa, Artificial Sequence; identical to SEQ ID NO: 5242
  GFR-binding peptide
  MOD_RES (2), (35), (36): Xaa is C or S
  MOD_RES (13), (14), (15), (16), (17): Xaa is A or G
  MOD_RES (18), (19), (20), (21): Xaa is A or G or is absent

SEQ ID NO: 77762 - protein, 39 aa, Artificial Sequence; identical to SEQ ID NO: 5244
  GFR-binding peptide
  MOD_RES (1), (3), (37), (38): Xaa is C or S
  MOD_RES (15), (16), (17), (18), (19): Xaa is A or G
  MOD_RES (20), (21), (22), (23): Xaa is A or G or is absent

SEQ ID NO: 77763 - protein, 35 aa, Artificial Sequence; identical to SEQ ID NO: 5245
  GFR-binding peptide
  MOD_RES (2), (4): Xaa is C or S

SEQ ID NO: 77764 - protein, 30 aa, Artificial Sequence; identical to SEQ ID NO: 64367
  GFR-binding peptide

SEQ ID NO: 77765 - protein, 39 aa, Artificial Sequence; identical to SEQ ID NO: 3326
  GFR-binding peptide
  MOD_RES (33), (34): Xaa is C or S

SEQ ID NO: 77766 - protein, 41 aa, Artificial Sequence
  GFR-binding peptide
  MOD_RES (2), (4), (36), (37): Xaa is C or S
RXGXAEVVMDQYNKLVVNNAADLYLISIASLRAPVXXSAPA

SEQ ID NO: 77767 - protein, 39 aa, Artificial Sequence; identical to SEQ ID NO: 3330
  GFR-binding peptide
  MOD_RES (1), (33), (34): Xaa is C or S

SEQ ID NO: 77768 - protein, 34 aa, Artificial Sequence; identical to SEQ ID NO: 26365
  GFR-binding peptide
  MOD_RES (32), (33): Xaa is C or S

SEQ ID NO: 77769 - protein, 42 aa, Artificial Sequence; identical to SEQ ID NO: 62646
  GFR-binding peptide
  MOD_RES (1), (3), (37), (38): Xaa is C or S
  MOD_RES (15), (16), (17), (18), (19): Xaa is A or G
  MOD_RES (20), (21), (22), (23): Xaa is A or G or is absent

SEQ ID NO: 77770 - protein, 36 aa, Artificial Sequence; identical to SEQ ID NO: 12680
  GFR-binding peptide
  MOD_RES (1), (3): Xaa is C or S
  MOD_RES (15), (16), (17), (18), (19): Xaa is A or G
  MOD_RES (20), (21), (22), (23): Xaa is A or G or is absent

SEQ ID NO: 77771 - protein, 37 aa, Artificial Sequence; identical to SEQ ID NO: 10765
  GFR-binding peptide
  MOD_RES (2), (34), (35): Xaa is C or S

SEQ ID NO: 77772 - protein, 37 aa, Artificial Sequence; identical to SEQ ID NO: 62649
  GFR-binding peptide
  MOD_RES (1), (33), (34): Xaa is C or S

SEQ ID NO: 77773 - protein, 33 aa, Artificial Sequence; identical to SEQ ID NO: 12682
  GFR-binding peptide
  MOD_RES (2), (2): Xaa is C or S

SEQ ID NO: 77774 - protein, 38 aa, Artificial Sequence; identical to SEQ ID NO: 3332
  GFR-binding peptide
  MOD_RES (1), (3), (36), (37): Xaa is C or S
  MOD_RES (14), (15), (16), (17), (18): Xaa is A or G
  MOD_RES (19), (20), (21), (22): Xaa is A or G or is absent

SEQ ID NO: 77775 - protein, 39 aa, Artificial Sequence
  GFR-binding peptide
  MOD_RES (2), (34), (35): Xaa is C or S
GXAEVVMDQYNKLVVNNAADLYLISIASLRAPVXXSAPA

SEQ ID NO: 77776 - protein, 39 aa, Artificial Sequence; identical to SEQ ID NO: 5249
  GFR-binding peptide
  MOD_RES (2), (4), (37), (38): Xaa is C or S

SEQ ID NO: 77777 - protein, 35 aa, Artificial Sequence; identical to SEQ ID NO: 56202
  GFR-binding peptide
  MOD_RES (1), (34), (35): Xaa is C or S
  MOD_RES (12), (13), (14), (15), (16): Xaa is A or G
  MOD_RES (17), (18), (19), (20): Xaa is A or G or is absent

SEQ ID NO: 77778 - protein, 38 aa, Artificial Sequence; identical to SEQ ID NO: 5250
  GFR-binding peptide
  MOD_RES (1), (3), (35), (36): Xaa is C or S

SEQ ID NO: 77779 - protein, 45 aa, Artificial Sequence; identical to SEQ ID NO: 5252
  GFR-binding peptide
  MOD_RES (2), (4), (39), (40): Xaa is C or S
  MOD_RES (17), (18), (19), (20), (21): Xaa is A or G
  MOD_RES (22), (23), (24), (25): Xaa is A or G or is absent

SEQ ID NO: 77780 - protein, 37 aa, Artificial Sequence; identical to SEQ ID NO: 5253
  GFR-binding peptide
  MOD_RES (1), (34), (35): Xaa is C or S

SEQ ID NO: 77781 - protein, 33 aa, Artificial Sequence; identical to SEQ ID NO: 5255
  GFR-binding peptide
  MOD_RES (33), (33): Xaa is C or S
  MOD_RES (11), (12), (13), (14), (15): Xaa is A or G
  MOD_RES (16), (17), (18), (19): Xaa is A or G or is absent

SEQ ID NO: 77782 - protein, 40 aa, Artificial Sequence; identical to SEQ ID NO: 5256
  GFR-binding peptide
  MOD_RES (1), (3), (35), (36): Xaa is C or S

SEQ ID NO: 77783 - protein, 37 aa, Artificial Sequence; identical to SEQ ID NO: 3339
  GFR-binding peptide
  MOD_RES (1), (32), (33): Xaa is C or S

SEQ ID NO: 77784 - protein, 39 aa, Artificial Sequence; identical to SEQ ID NO: 5257
  GFR-binding peptide
  MOD_RES (2), (33), (34): Xaa is C or S

SEQ ID NO: 77785 - protein, 37 aa, Artificial Sequence; identical to SEQ ID NO: 3341
  GFR-binding peptide
  MOD_RES (2), (35), (36): Xaa is C or S
  MOD_RES (13), (14), (15), (16), (17): Xaa is A or G
  MOD_RES (18), (19), (20), (21): Xaa is A or G or is absent

SEQ ID NO: 77786 - protein, 40 aa, Artificial Sequence; identical to SEQ ID NO: 5258
  GFR-binding peptide
  MOD_RES (2), (36), (37): Xaa is C or S
  MOD_RES (14), (15), (16), (17), (18): Xaa is A or G
  MOD_RES (19), (20), (21), (22): Xaa is A or G or is absent

SEQ ID NO: 77787 - protein, 35 aa, Artificial Sequence
  GFR-binding peptide
  MOD_RES (34), (35): Xaa is C or S
  MOD_RES (12), (13), (14), (15), (16): Xaa is A or G
  MOD_RES (17), (18), (19), (20): Xaa is A or G or is absent
ESVAMGQYNKLXXXXXXXXXLYLISIASLKTPVXX

SEQ ID NO: 77788 - protein, 37 aa, Artificial Sequence; identical to SEQ ID NO: 3342
  GFR-binding peptide
  MOD_RES (1), (32), (33): Xaa is C or S

SEQ ID NO: 77789 - protein, 41 aa, Artificial Sequence; identical to SEQ ID NO: 3344
  GFR-binding peptide
  MOD_RES (1), (35), (36): Xaa is C or S
  MOD_RES (13), (14), (15), (16), (17): Xaa is A or G
  MOD_RES (18), (19), (20), (21): Xaa is A or G or is absent

SEQ ID NO: 77790 - protein, 42 aa, Artificial Sequence; identical to SEQ ID NO: 12692
  GFR-binding peptide
  MOD_RES (2), (36), (37): Xaa is C or S
  MOD_RES (14), (15), (16), (17), (18): Xaa is A or G
  MOD_RES (19), (20), (21), (22): Xaa is A or G or is absent

SEQ ID NO: 77791 - protein, 33 aa, Artificial Sequence
  GFR-binding peptide
  MOD_RES (31), (32): Xaa is C or S
DVVMGQYNKLIIQQKDNLYLMSIASMKTPTXXP

SEQ ID NO: 77792 - protein, 39 aa, Artificial Sequence; identical to SEQ ID NO: 5265
  GFR-binding peptide
  MOD_RES (1), (3), (36), (37): Xaa is C or S
  MOD_RES (14), (15), (16), (17), (18): Xaa is A or G
  MOD_RES (19), (20), (21), (22): Xaa is A or G or is absent

SEQ ID NO: 77793 - protein, 43 aa, Artificial Sequence
  GFR-binding peptide
  MOD_RES (1), (3), (37), (38): Xaa is C or S
  MOD_RES (15), (16), (17), (18), (19): Xaa is A or G
  MOD_RES (20), (21), (22), (23): Xaa is A or G or is absent
XAXSEVTMNQYNKLXXXXXXXXXLYLISIASMKEPVXXPEPIG

SEQ ID NO: 77794 - protein, 35 aa, Artificial Sequence; identical to SEQ ID NO: 24332
  GFR-binding peptide
  MOD_RES (34), (35): Xaa is C or S
  MOD_RES (12), (13), (14), (15), (16): Xaa is A or G
  MOD_RES (17), (18), (19), (20): Xaa is A or G or is absent

SEQ ID NO: 77795 - protein, 35 aa, Artificial Sequence
  GFR-binding peptide
  MOD_RES (2), (4): Xaa is C or S
RXGXAEVVMDQYNKLVVNNAADLYLISIASLRAPV

SEQ ID NO: 77796 - protein, 37 aa, Artificial Sequence
  GFR-binding peptide
  MOD_RES (32), (33): Xaa is C or S
SEVTMNQYNKLVVNKNEDLYLISIASMKEPVXXPEPI

SEQ ID NO: 77797 - protein, 35 aa, Artificial Sequence; identical to SEQ ID NO: 5267
  GFR-binding peptide
  MOD_RES (2), (4), (35): Xaa is C or S

SEQ ID NO: 77798 - protein, 36 aa, Artificial Sequence; identical to SEQ ID NO: 3347
  GFR-binding peptide
  MOD_RES (2), (4): Xaa is C or S
  MOD_RES (15), (16), (17), (18), (19): Xaa is A or G
  MOD_RES (20), (21), (22), (23): Xaa is A or G or is absent

SEQ ID NO: 77799 - protein, 37 aa, Artificial Sequence; identical to SEQ ID NO: 3350
  GFR-binding peptide
  MOD_RES (2), (35), (36): Xaa is C or S
  MOD_RES (13), (14), (15), (16), (17): Xaa is A or G
  MOD_RES (18), (19), (20), (21): Xaa is A or G or is absent

SEQ ID NO: 77800 - protein, 40 aa, Artificial Sequence; identical to SEQ ID NO: 5268
  GFR-binding peptide
  MOD_RES (34), (35): Xaa is C or S
  MOD_RES (12), (13), (14), (15), (16): Xaa is A or G
  MOD_RES (17), (18), (19), (20): Xaa is A or G or is absent

SEQ ID NO: 77801 - protein, 37 aa, Artificial Sequence; identical to SEQ ID NO: 5269
  GFR-binding peptide
  MOD_RES (35), (36): Xaa is C or S
  MOD_RES (13), (14), (15), (16), (17): Xaa is A or G
  MOD_RES (18), (19), (20), (21): Xaa is A or G or is absent

SEQ ID NO: 77802 - protein, 37 aa, Artificial Sequence
  GFR-binding peptide
  MOD_RES (31), (32): Xaa is C or S
RVVMNQYNKLIVNSSDDLYLVSIASLKTPAXXPKPVH

SEQ ID NO: 77803 - protein, 35 aa, Artificial Sequence; identical to SEQ ID NO: 3354
  GFR-binding peptide
  MOD_RES (2), (4): Xaa is C or S

SEQ ID NO: 77804 - protein, 43 aa, Artificial Sequence; identical to SEQ ID NO: 3356
  GFR-binding peptide
  MOD_RES (1), (3), (37), (38): Xaa is C or S
  MOD_RES (15), (16), (17), (18), (19): Xaa is A or G
  MOD_RES (20), (21), (22), (23): Xaa is A or G or is absent

SEQ ID NO: 77805 - protein, 40 aa, Artificial Sequence
  GFR-binding peptide
  MOD_RES (2), (4), (38), (39): Xaa is C or S
  MOD_RES (16), (17), (18), (19), (20): Xaa is A or G
  MOD_RES (21), (22), (23), (24): Xaa is A or G or is absent
RXAXSEVTMNQYNKLXXXXXXXXXLYLISIASMKEPVXXP

SEQ ID NO: 77806 - protein, 35 aa, Artificial Sequence; identical to SEQ ID NO: 24338
  GFR-binding peptide
  MOD_RES (31), (32): Xaa is C or S

SEQ ID NO: 77807 - protein, 36 aa, Artificial Sequence; identical to SEQ ID NO: 3358
  GFR-binding peptide
  MOD_RES (1), (35), (36): Xaa is C or S
  MOD_RES (13), (14), (15), (16), (17): Xaa is A or G
  MOD_RES (18), (19), (20), (21): Xaa is A or G or is absent

SEQ ID NO: 77808 - protein, 37 aa, Artificial Sequence; identical to SEQ ID NO: 56221
  GFR-binding peptide
  MOD_RES (34), (35): Xaa is C or S
  MOD_RES (12), (13), (14), (15), (16): Xaa is A or G
  MOD_RES (17), (18), (19), (20): Xaa is A or G or is absent

SEQ ID NO: 77809 - protein, 41 aa, Artificial Sequence; identical to SEQ ID NO: 60916
  GFR-binding peptide
  MOD_RES (1), (3), (35), (36): Xaa is C or S

SEQ ID NO: 77810 - protein, 39 aa, Artificial Sequence; identical to SEQ ID NO: 24342
  GFR-binding peptide
  MOD_RES (1), (33), (34): Xaa is C or S

SEQ ID NO: 77811 - protein, 42 aa, Artificial Sequence
  GFR-binding peptide
  MOD_RES (2), (36), (37): Xaa is C or S
  MOD_RES (14), (15), (16), (17), (18): Xaa is A or G
  MOD_RES (19), (20), (21), (22): Xaa is A or G or is absent
GXESVAMGQYNKLXXXXXXXXXLYLISIASLKTPVXXAKSAK

SEQ ID NO: 77812 - protein, 33 aa, Artificial Sequence; identical to SEQ ID NO: 3364
  GFR-binding peptide
  MOD_RES (31), (32): Xaa is C or S

SEQ ID NO: 77813 - protein, 39 aa, Artificial Sequence; identical to SEQ ID NO: 59177
  GFR-binding peptide
  MOD_RES (34), (35): Xaa is C or S
  MOD_RES (12), (13), (14), (15), (16): Xaa is A or G
  MOD_RES (17), (18), (19), (20): Xaa is A or G or is absent

SEQ ID NO: 77814 - protein, 36 aa, Artificial Sequence; identical to SEQ ID NO: 5282
  GFR-binding peptide
  MOD_RES (34), (35): Xaa is C or S
  MOD_RES (12), (13), (14), (15), (16): Xaa is A or G
  MOD_RES (17), (18), (19), (20): Xaa is A or G or is absent

SEQ ID NO: 77815 - protein, 36 aa, Artificial Sequence; identical to SEQ ID NO: 3367
  GFR-binding peptide
  MOD_RES (1), (3), (35), (36): Xaa is C or S

SEQ ID NO: 77816 - protein, 38 aa, Artificial Sequence; identical to SEQ ID NO: 59179
  GFR-binding peptide
  MOD_RES (2), (4), (38): Xaa is C or S
  MOD_RES (16), (17), (18), (19), (20): Xaa is A or G
  MOD_RES (21), (22), (23), (24): Xaa is A or G or is absent

SEQ ID NO: 77817 - protein, 35 aa, Artificial Sequence; identical to SEQ ID NO: 5283
  GFR-binding peptide
  MOD_RES (1), (33), (34): Xaa is C or S

SEQ ID NO: 77818 - protein, 37 aa, Artificial Sequence; identical to SEQ ID NO: 3368
  GFR-binding peptide
  MOD_RES (2), (4), (36), (37): Xaa is C or S

SEQ ID NO: 77819 - protein, 36 aa, Artificial Sequence; identical to SEQ ID NO: 3370
  GFR-binding peptide
  MOD_RES (1), (35), (36): Xaa is C or S
  MOD_RES (13), (14), (15), (16), (17): Xaa is A or G
  MOD_RES (18), (19), (20), (21): Xaa is A or G or is absent

SEQ ID NO: 77820 - protein, 41 aa, Artificial Sequence; identical to SEQ ID NO: 24352
  GFR-binding peptide
  MOD_RES (1), (3), (35), (36): Xaa is C or S

SEQ ID NO: 77821 - protein, 37 aa, Artificial Sequence; identical to SEQ ID NO: 3372
  GFR-binding peptide
  MOD_RES (1), (3), (37): Xaa is C or S
  MOD_RES (15), (16), (17), (18), (19): Xaa is A or G
  MOD_RES (20), (21), (22), (23): Xaa is A or G or is absent

SEQ ID NO: 77822 - protein, 42 aa, Artificial Sequence; identical to SEQ ID NO: 5288
  GFR-binding peptide
  MOD_RES (2), (4), (36), (37): Xaa is C or S

SEQ ID NO: 77823 - protein, 42 aa, Artificial Sequence
  GFR-binding peptide
  MOD_RES (1), (3), (37), (38): Xaa is C or S
  MOD_RES (15), (16), (17), (18), (19): Xaa is A or G
  MOD_RES (20), (21), (22), (23): Xaa is A or G or is absent
XGXESVAMGQYNKLXXXXXXXXXLYLISIASLKTPVXXAKSA

SEQ ID NO: 77824 - protein, 37 aa, Artificial Sequence; identical to SEQ ID NO: 3373
  GFR-binding peptide
  MOD_RES (1), (3), (34), (35): Xaa is C or S

SEQ ID NO: 77825 - protein, 35 aa, Artificial Sequence; identical to SEQ ID NO: 5290
  GFR-binding peptide
  MOD_RES (1), (3), (35): Xaa is C or S

SEQ ID NO: 77826 - protein, 40 aa, Artificial Sequence; identical to SEQ ID NO: 5292
  GFR-binding peptide
  MOD_RES (2), (4), (37), (38): Xaa is C or S
  MOD_RES (15), (16), (17), (18), (19): Xaa is A or G
  MOD_RES (20), (21), (22), (23): Xaa is A or G or is absent

SEQ ID NO: 77827 - protein, 39 aa, Artificial Sequence; identical to SEQ ID NO: 5293
  GFR-binding peptide
  MOD_RES (2), (33), (34): Xaa is C or S

SEQ ID NO: 77828 - protein, 41 aa, Artificial Sequence
  GFR-binding peptide
  MOD_RES (1), (35), (36): Xaa is C or S
  MOD_RES (13), (14), (15), (16), (17): Xaa is A or G
  MOD_RES (18), (19), (20), (21): Xaa is A or G or is absent
XAEVVMDQYNKLXXXXXXXXXLYLISIASLRAPVXXSAPAA

SEQ ID NO: 77829 - protein, 38 aa, Artificial Sequence; identical to SEQ ID NO: 3376
  GFR-binding peptide
  MOD_RES (32), (33): Xaa is C or S

SEQ ID NO: 77830 - protein, 36 aa, Artificial Sequence; identical to SEQ ID NO: 3377
  GFR-binding peptide
  MOD_RES (2), (33), (34): Xaa is C or S

SEQ ID NO: 77831 - protein, 42 aa, Artificial Sequence
  GFR-binding peptide
  MOD_RES (2), (4), (38), (39): Xaa is C or S
  MOD_RES (16), (17), (18), (19), (20): Xaa is A or G
  MOD_RES (21), (22), (23), (24): Xaa is A or G or is absent
RXGXESVAMGQYNKLXXXXXXXXXLYLISIASLKTPVXXAKS

SEQ ID NO: 77832 - protein, 42 aa, Artificial Sequence; identical to SEQ ID NO: 3378
  GFR-binding peptide
  MOD_RES (1), (3), (37), (38): Xaa is C or S
  MOD_RES (15), (16), (17), (18), (19): Xaa is A or G
  MOD_RES (20), (21), (22), (23): Xaa is A or G or is absent

SEQ ID NO: 77833 - protein, 34 aa, Artificial Sequence; identical to SEQ ID NO: 5297
  GFR-binding peptide
  MOD_RES (1), (3): Xaa is C or S

SEQ ID NO: 77834 - protein, 34 aa, Artificial Sequence
  GFR-binding peptide
  MOD_RES (33), (34): Xaa is C or S
  MOD_RES (11), (12), (13), (14), (15): Xaa is A or G
  MOD_RES (16), (17), (18), (19): Xaa is A or G or is absent
EEVIMQYNKLXXXXXXXXXLYLMSIASTKVPAXX

SEQ ID NO: 77835 - protein, 36 aa, Artificial Sequence; identical to SEQ ID NO: 26419
  GFR-binding peptide
  MOD_RES (1), (33), (34): Xaa is C or S

SEQ ID NO: 77836 - protein, 35 aa, Artificial Sequence; identical to SEQ ID NO: 5301
  GFR-binding peptide
  MOD_RES (2), (4): Xaa is C or S

SEQ ID NO: 77837 - protein, 36 aa, Artificial Sequence; identical to SEQ ID NO: 3381
  GFR-binding peptide
  MOD_RES (1), (3), (34), (35): Xaa is C or S

SEQ ID NO: 77838 - protein, 36 aa, Artificial Sequence; identical to SEQ ID NO: 5304
  GFR-binding peptide
  MOD_RES (31), (32): Xaa is C or S

SEQ ID NO: 77839 - protein, 41 aa, Artificial Sequence; identical to SEQ ID NO: 5305
  GFR-binding peptide
  MOD_RES (2), (4), (37), (38): Xaa is C or S
  MOD_RES (15), (16), (17), (18), (19): Xaa is A or G
  MOD_RES (20), (21), (22), (23): Xaa is A or G or is absent

SEQ ID NO: 77840 - protein, 38 aa, Artificial Sequence; identical to SEQ ID NO: 3383
  GFR-binding peptide
  MOD_RES (2), (4), (38): Xaa is C or S
  MOD_RES (16), (17), (18), (19), (20): Xaa is A or G
  MOD_RES (21), (22), (23), (24): Xaa is A or G or is absent

SEQ ID NO: 77841 - protein, 39 aa, Artificial Sequence
  GFR-binding peptide
  MOD_RES (33), (34): Xaa is C or S
  MOD_RES (11), (12), (13), (14), (15): Xaa is A or G
  MOD_RES (16), (17), (18), (19): Xaa is A or G or is absent
EVVMDQYNKLXXXXXXXXXLYLISIASLRAPVXXSAPAA

SEQ ID NO: 77842 - protein, 39 aa, Artificial Sequence
  GFR-binding peptide
  MOD_RES (2), (35), (36): Xaa is C or S
  MOD_RES (13), (14), (15), (16), (17): Xaa is A or G
  MOD_RES (18), (19), (20), (21): Xaa is A or G or is absent
GXEEVIMQYNKLXXXXXXXXXLYLMSIASTKVPAXXTSP

SEQ ID NO: 77843 - protein, 39 aa, Artificial Sequence; identical to SEQ ID NO: 3384
  GFR-binding peptide
  MOD_RES (34), (35): Xaa is C or S
  MOD_RES (12), (13), (14), (15), (16): Xaa is A or G
  MOD_RES (17), (18), (19), (20): Xaa is A or G or is absent

SEQ ID NO: 77844 - protein, 40 aa, Artificial Sequence; identical to SEQ ID NO: 10810
  GFR-binding peptide
  MOD_RES (1), (3), (35), (36): Xaa is C or S

SEQ ID NO: 77845 - protein, 36 aa, Artificial Sequence; identical to SEQ ID NO: 3388
  GFR-binding peptide
  MOD_RES (2), (4), (36): Xaa is C or S

SEQ ID NO: 77846 - protein, 37 aa, Artificial Sequence; identical to SEQ ID NO: 56251
  GFR-binding peptide
  MOD_RES (1), (3), (37): Xaa is C or S
  MOD_RES (15), (16), (17), (18), (19): Xaa is A or G
  MOD_RES (20), (21), (22), (23): Xaa is A or G or is absent

SEQ ID NO: 77847 - protein, 33 aa, Artificial Sequence; identical to SEQ ID NO: 56252
  GFR-binding peptide
  MOD_RES (12), (13), (14), (15), (16): Xaa is A or G
  MOD_RES (17), (18), (19), (20): Xaa is A or G or is absent

SEQ ID NO: 77848 - protein, 40 aa, Artificial Sequence
  GFR-binding peptide
  MOD_RES (2), (4), (36), (37): Xaa is C or S
RXGXAEVVMDQYNKLVVNNAADLYLISIASLRAPVXXSAP

SEQ ID NO: 77849 - protein, 39 aa, Artificial Sequence; identical to SEQ ID NO: 10812
  GFR-binding peptide
  MOD_RES (2), (4), (38), (39): Xaa is C or S
  MOD_RES (16), (17), (18), (19), (20): Xaa is A or G
  MOD_RES (21), (22), (23), (24): Xaa is A or G or is absent

SEQ ID NO: 77850 - protein, 40 aa, Artificial Sequence
  GFR-binding peptide
  MOD_RES (2), (34), (35): Xaa is C or S
GXESVAMGQYNKLYTVVGKDLYLISIASLKTPVXXAKSAK

SEQ ID NO: 77851 - protein, 40 aa, Artificial Sequence; identical to SEQ ID NO: 62683
  GFR-binding peptide
  MOD_RES (1), (3), (35), (36): Xaa is C or S

SEQ ID NO: 77852 - protein, 44 aa, Artificial Sequence; identical to SEQ ID NO: 5309
  GFR-binding peptide
  MOD_RES (2), (4), (39), (40): Xaa is C or S
  MOD_RES (17), (18), (19), (20), (21): Xaa is A or G
  MOD_RES (22), (23), (24), (25): Xaa is A or G or is absent

SEQ ID NO: 77853 - protein, 39 aa, Artificial Sequence; identical to SEQ ID NO: 5310
  GFR-binding peptide
  MOD_RES (2), (4), (36), (37): Xaa is C or S

SEQ ID NO: 77854 - protein, 32 aa, Artificial Sequence; identical to SEQ ID NO: 3389
  GFR-binding peptide
  MOD_RES (11), (12), (13), (14), (15): Xaa is A or G
  MOD_RES (16), (17), (18), (19): Xaa is A or G or is absent

SEQ ID NO: 77855 - protein, 42 aa, Artificial Sequence; identical to SEQ ID NO: 5312
  GFR-binding peptide
  MOD_RES (2), (36), (37): Xaa is C or S
  MOD_RES (14), (15), (16), (17), (18): Xaa is A or G
  MOD_RES (19), (20), (21), (22): Xaa is A or G or is absent

SEQ ID NO: 77856 - protein, 38 aa, Artificial Sequence; identical to SEQ ID NO: 5313
  GFR-binding peptide
  MOD_RES (1), (33), (34): Xaa is C or S

SEQ ID NO: 77857 - protein, 32 aa, Artificial Sequence; identical to SEQ ID NO: 5314
  GFR-binding peptide
  MOD_RES (2), (2): Xaa is C or S

SEQ ID NO: 77858 - protein, 39 aa, Artificial Sequence; identical to SEQ ID NO: 56260
  GFR-binding peptide
  MOD_RES (1), (3), (37), (38): Xaa is C or S
  MOD_RES (15), (16), (17), (18), (19): Xaa is A or G
  MOD_RES (20), (21), (22), (23): Xaa is A or G or is absent

SEQ ID NO: 77859 - protein, 31 aa, Artificial Sequence; identical to SEQ ID NO: 3392
  GFR-binding peptide
  MOD_RES (31), (31): Xaa is C or S

SEQ ID NO: 77860 - protein, 36 aa, Artificial Sequence; identical to SEQ ID NO: 3393
  GFR-binding peptide
  MOD_RES (33), (34): Xaa is C or S

SEQ ID NO: 77861 - protein, 36 aa, Artificial Sequence; identical to SEQ ID NO: 12744
  GFR-binding peptide
  MOD_RES (33), (34): Xaa is C or S
  MOD_RES (11), (12), (13), (14), (15): Xaa is A or G
  MOD_RES (16), (17), (18), (19): Xaa is A or G or is absent

SEQ ID NO: 77862 - protein, 36 aa, Artificial Sequence
  GFR-binding peptide
  MOD_RES (2), (4), (36): Xaa is C or S
RXGXAEVVMDQYNKLVVNNAADLYLISIASLRAPVX

SEQ ID NO: 77863 - protein, 37 aa, Artificial Sequence
  GFR-binding peptide
  MOD_RES (1), (3), (36), (37): Xaa is C or S
  MOD_RES (14), (15), (16), (17), (18): Xaa is A or G
  MOD_RES (19), (20), (21), (22): Xaa is A or G or is absent
XGXEEVIMQYNKLXXXXXXXXXLYLMSIASTKVPAXX

SEQ ID NO: 77864 - protein, 34 aa, Artificial Sequence; identical to SEQ ID NO: 3398
  GFR-binding peptide
  MOD_RES (1), (33), (34): Xaa is C or S

SEQ ID NO: 77865 - protein, 30 aa, Artificial Sequence; identical to SEQ ID NO: 12746
  GFR-binding peptide

SEQ ID NO: 77866 - protein, 36 aa, Artificial Sequence; identical to SEQ ID NO: 3400
  GFR-binding peptide
  MOD_RES (1), (36): Xaa is C or S
  MOD_RES (14), (15), (16), (17), (18): Xaa is A or G
  MOD_RES (19), (20), (21), (22): Xaa is A or G or is absent

SEQ ID NO: 77867 - protein, 35 aa, Artificial Sequence; identical to SEQ ID NO: 26447
  GFR-binding peptide
  MOD_RES (2), (2): Xaa is C or S
  MOD_RES (14), (15), (16), (17), (18): Xaa is A or G
  MOD_RES (19), (20), (21), (22): Xaa is A or G or is absent

SEQ ID NO: 77868 - protein, 41 aa, Artificial Sequence
  GFR-binding peptide
  MOD_RES (2), (4), (38), (39): Xaa is C or S
  MOD_RES (16), (17), (18), (19), (20): Xaa is A or G
  MOD_RES (21), (22), (23), (24): Xaa is A or G or is absent
RXAXSEVTMNQYNKLXXXXXXXXXLYLISIASMKEPVXXPE

SEQ ID NO: 77869 - protein, 35 aa, Artificial Sequence; identical to SEQ ID NO: 5320
  GFR-binding peptide
  MOD_RES (33), (33): Xaa is C or S
  MOD_RES (11), (12), (13), (14), (15): Xaa is A or G
  MOD_RES (16), (17), (18), (19): Xaa is A or G or is absent

SEQ ID NO: 77870 - protein, 39 aa, Artificial Sequence; identical to SEQ ID NO: 3403
  GFR-binding peptide
  MOD_RES (2), (34), (35): Xaa is C or S

SEQ ID NO: 77871 - protein, 35 aa, Artificial Sequence; identical to SEQ ID NO: 3404
  GFR-binding peptide
  MOD_RES (2), (34), (35): Xaa is C or S

SEQ ID NO: 77872 - protein, 39 aa, Artificial Sequence; identical to SEQ ID NO: 5323
  GFR-binding peptide
  MOD_RES (2), (4), (39): Xaa is C or S
  MOD_RES (17), (18), (19), (20), (21): Xaa is A or G
  MOD_RES (22), (23), (24), (25): Xaa is A or G or is absent

SEQ ID NO: 77873 - protein, 41 aa, Artificial Sequence; identical to SEQ ID NO: 5324
  GFR-binding peptide
  MOD_RES (2), (36), (37): Xaa is C or S
  MOD_RES (14), (15), (16), (17), (18): Xaa is A or G
  MOD_RES (19), (20), (21), (22): Xaa is A or G or is absent

SEQ ID NO: 77874 - protein, 35 aa, Artificial Sequence; identical to SEQ ID NO: 5328
  GFR-binding peptide
  MOD_RES (2), (35): Xaa is C or S
  MOD_RES (13), (14), (15), (16), (17): Xaa is A or G
  MOD_RES (18), (19), (20), (21): Xaa is A or G or is absent

SEQ ID NO: 77875 - protein, 33 aa, Artificial Sequence; identical to SEQ ID NO: 5330
  GFR-binding peptide
  MOD_RES (1), (33): Xaa is C or S

SEQ ID NO: 77876 - protein, 34 aa, Artificial Sequence; identical to SEQ ID NO: 24385
  GFR-binding peptide
  MOD_RES (1), (1): Xaa is C or S
  MOD_RES (13), (14), (15), (16), (17): Xaa is A or G
  MOD_RES (18), (19), (20), (21): Xaa is A or G or is absent

SEQ ID NO: 77877 - protein, 34 aa, Artificial Sequence; identical to SEQ ID NO: 56276
  GFR-binding peptide
  MOD_RES (31), (32): Xaa is C or S

SEQ ID NO: 77878 - protein, 34 aa, Artificial Sequence
  GFR-binding peptide
  MOD_RES (31), (32): Xaa is C or S
EVVMDQYNKLVVNNAADLYLISIASLRAPVXXSA

SEQ ID NO: 77879 - protein, 37 aa, Artificial Sequence
  GFR-binding peptide
  MOD_RES (2), (4): Xaa is C or S
  MOD_RES (16), (17), (18), (19), (20): Xaa is A or G
  MOD_RES (21), (22), (23), (24): Xaa is A or G or is absent
SXGXRDVVMGQYNKLXXXXXXXXXLYLMSIASMKTPT

SEQ ID NO: 77880 - protein, 40 aa, Artificial Sequence; identical to SEQ ID NO: 3411
  GFR-binding peptide
  MOD_RES (1), (34), (35): Xaa is C or S
  MOD_RES (12), (13), (14), (15), (16): Xaa is A or G
  MOD_RES (17), (18), (19), (20): Xaa is A or G or is absent

SEQ ID NO: 77881 - protein, 36 aa, Artificial Sequence; identical to SEQ ID NO: 5334
  GFR-binding peptide
  MOD_RES (34), (35): Xaa is C or S
  MOD_RES (12), (13), (14), (15), (16): Xaa is A or G
  MOD_RES (17), (18), (19), (20): Xaa is A or G or is absent

SEQ ID NO: 77882 - protein, 36 aa, Artificial Sequence; identical to SEQ ID NO: 3414
  GFR-binding peptide
  MOD_RES (2), (33), (34): Xaa is C or S

SEQ ID NO: 77883 - protein, 36 aa, Artificial Sequence; identical to SEQ ID NO: 3418
  GFR-binding peptide
  MOD_RES (33), (34): Xaa is C or S
  MOD_RES (11), (12), (13), (14), (15): Xaa is A or G
  MOD_RES (16), (17), (18), (19): Xaa is A or G or is absent

SEQ ID NO: 77884 - protein, 31 aa, Artificial Sequence; identical to SEQ ID NO: 5336
  GFR-binding peptide
  MOD_RES (31), (31): Xaa is C or S

SEQ ID NO: 77885 - protein, 38 aa, Artificial Sequence; identical to SEQ ID NO: 5338
  GFR-binding peptide
  MOD_RES (1), (3), (35), (36): Xaa is C or S

SEQ ID NO: 77886 - protein, 35 aa, Artificial Sequence; identical to SEQ ID NO: 5339
  GFR-binding peptide
  MOD_RES (2), (34), (35): Xaa is C or S

SEQ ID NO: 77887 - protein, 42 aa, Artificial Sequence; identical to SEQ ID NO: 5340
  GFR-binding peptide
  MOD_RES (1), (3), (37), (38): Xaa is C or S
  MOD_RES (15), (16), (17), (18), (19): Xaa is A or G
  MOD_RES (20), (21), (22), (23): Xaa is A or G or is absent

SEQ ID NO: 77888 - protein, 39 aa, Artificial Sequence; identical to SEQ ID NO: 5343
  GFR-binding peptide
  MOD_RES (2), (4), (38), (39): Xaa is C or S
  MOD_RES (16), (17), (18), (19), (20): Xaa is A or G
  MOD_RES (21), (22), (23), (24): Xaa is A or G or is absent

SEQ ID NO: 77889 - protein, 42 aa, Artificial Sequence; identical to SEQ ID NO: 12770
  GFR-binding peptide
  MOD_RES (2), (4), (38), (39): Xaa is C or S
  MOD_RES (16), (17), (18), (19), (20): Xaa is A or G
  MOD_RES (21), (22), (23), (24): Xaa is A or G or is absent

SEQ ID NO: 77890 - protein, 31 aa, Artificial Sequence; identical to SEQ ID NO: 12773
  GFR-binding peptide

SEQ ID NO: 77891 - protein, 40 aa, Artificial Sequence
  GFR-binding peptide
  MOD_RES (2), (4), (38), (39): Xaa is C or S
  MOD_RES (16), (17), (18), (19), (20): Xaa is A or G
  MOD_RES (21), (22), (23), (24): Xaa is A or G or is absent
RXGXAEVVMDQYNKLXXXXXXXXXLYLISIASLRAPVXXS

SEQ ID NO: 77892 - protein, 33 aa, Artificial Sequence; identical to SEQ ID NO: 5346
  GFR-binding peptide
  MOD_RES (32), (33): Xaa is C or S

SEQ ID NO: 77893 - protein, 32 aa, Artificial Sequence; identical to SEQ ID NO: 5347
  GFR-binding peptide
  MOD_RES (31), (32): Xaa is C or S

SEQ ID NO: 77894 - protein, 44 aa, Artificial Sequence; identical to SEQ ID NO: 5349
  GFR-binding peptide
  MOD_RES (2), (4), (38), (39): Xaa is C or S
  MOD_RES (16), (17), (18), (19), (20): Xaa is A or G
  MOD_RES (21), (22), (23), (24): Xaa is A or G or is absent

SEQ ID NO: 77895 - protein, 37 aa, Artificial Sequence; identical to SEQ ID NO: 56303
  GFR-binding peptide
  MOD_RES (1), (35), (36): Xaa is C or S
  MOD_RES (13), (14), (15), (16), (17): Xaa is A or G
  MOD_RES (18), (19), (20), (21): Xaa is A or G or is absent

SEQ ID NO: 77896 - protein, 36 aa, Artificial Sequence; identical to SEQ ID NO: 56304
  GFR-binding peptide
  MOD_RES (2), (4): Xaa is C or S
  MOD_RES (15), (16), (17), (18), (19): Xaa is A or G
  MOD_RES (20), (21), (22), (23): Xaa is A or G or is absent

SEQ ID NO: 77897 - protein, 34 aa, Artificial Sequence; identical to SEQ ID NO: 5350
  GFR-binding peptide
  MOD_RES (1), (3), (34): Xaa is C or S

SEQ ID NO: 77898 - protein, 43 aa, Artificial Sequence; identical to SEQ ID NO: 3427
  GFR-binding peptide
  MOD_RES (2), (4), (38), (39): Xaa is C or S
  MOD_RES (16), (17), (18), (19), (20): Xaa is A or G
  MOD_RES (21), (22), (23), (24): Xaa is A or G or is absent

SEQ ID NO: 77899 - protein, 39 aa, Artificial Sequence; identical to SEQ ID NO: 5352
  GFR-binding peptide
  MOD_RES (33), (33): Xaa is C or S
  MOD_RES (11), (12), (13), (14), (15): Xaa is A or G
  MOD_RES (16), (17), (18), (19): Xaa is A or G or is absent

SEQ ID NO: 77900 - protein, 45 aa, Artificial Sequence; identical to SEQ ID NO: 5353
  GFR-binding peptide
  MOD_RES (2), (4), (39), (40): Xaa is C or S
  MOD_RES (17), (18), (19), (20), (21): Xaa is A or G
  MOD_RES (22), (23), (24), (25): Xaa is A or G or is absent

SEQ ID NO: 77901 - protein, 37 aa, Artificial Sequence; identical to SEQ ID NO: 5354
  GFR-binding peptide
  MOD_RES (31), (32): Xaa is C or S

SEQ ID NO: 77902 - protein, 40 aa, Artificial Sequence; identical to SEQ ID NO: 5355
  GFR-binding peptide
  MOD_RES (1), (35), (36): Xaa is C or S
  MOD_RES (13), (14), (15), (16), (17): Xaa is A or G
  MOD_RES (18), (19), (20), (21): Xaa is A or G or is absent

SEQ ID NO: 77903 - protein, 41 aa, Artificial Sequence; identical to SEQ ID NO: 5357
  GFR-binding peptide
  MOD_RES (1), (3), (35), (36): Xaa is C or S

SEQ ID NO: 77904 - protein, 35 aa, Artificial Sequence; identical to SEQ ID NO: 3432
  GFR-binding peptide
  MOD_RES (1), (33), (34): Xaa is C or S

SEQ ID NO: 77905 - protein, 39 aa, Artificial Sequence; identical to SEQ ID NO: 12789
  GFR-binding peptide
  MOD_RES (34), (35): Xaa is C or S
  MOD_RES (12), (13), (14), (15), (16): Xaa is A or G
  MOD_RES (17), (18), (19), (20): Xaa is A or G or is absent

SEQ ID NO: 77906 - protein, 35 aa, Artificial Sequence
  GFR-binding peptide
  MOD_RES (2), (4): Xaa is C or S
RXAXSEVTMNQYNKLVVNKNEDLYLISIASMKEPV

SEQ ID NO: 77907 - protein, 35 aa, Artificial Sequence; identical to SEQ ID NO: 3434
  GFR-binding peptide
  MOD_RES (1), (33), (34): Xaa is C or S

SEQ ID NO: 77908 - protein, 38 aa, Artificial Sequence; identical to SEQ ID NO: 3435
  GFR-binding peptide
  MOD_RES (2), (34), (35): Xaa is C or S

SEQ ID NO: 77909 - protein, 38 aa, Artificial Sequence
  GFR-binding peptide
  MOD_RES (2), (4), (36), (37): Xaa is C or S
SXGXRDVVMGQYNKLIIQQKDNLYLMSIASMKTPTXXP

SEQ ID NO: 77910 - protein, 36 aa, Artificial Sequence; identical to SEQ ID NO: 56312
  GFR-binding peptide
  MOD_RES (31), (32): Xaa is C or S

SEQ ID NO: 77911 - protein, 34 aa, Artificial Sequence; identical to SEQ ID NO: 5360
  GFR-binding peptide
  MOD_RES (1), (3): Xaa is C or S

SEQ ID NO: 77912 - protein, 38 aa, Artificial Sequence
  GFR-binding peptide
  MOD_RES (1), (3), (36), (37): Xaa is C or S
  MOD_RES (14), (15), (16), (17), (18): Xaa is A or G
  MOD_RES (19), (20), (21), (22): Xaa is A or G or is absent
XGXEEVIMQYNKLXXXXXXXXXLYLMSIASTKVPAXXT

SEQ ID NO: 77913 - protein, 32 aa, Artificial Sequence; identical to SEQ ID NO: 3436
  GFR-binding peptide
  MOD_RES (1), (1): Xaa is C or S

SEQ ID NO: 77914 - protein, 40 aa, Artificial Sequence; identical to SEQ ID NO: 24427
  GFR-binding peptide
  MOD_RES (1), (3), (35), (36): Xaa is C or S

SEQ ID NO: 77915 - protein, 38 aa, Artificial Sequence; identical to SEQ ID NO: 3437
  GFR-binding peptide
  MOD_RES (1), (35), (36): Xaa is C or S
  MOD_RES (13), (14), (15), (16), (17): Xaa is A or G
  MOD_RES (18), (19), (20), (21): Xaa is A or G or is absent

SEQ ID NO: 77916 - protein, 32 aa, Artificial Sequence
  GFR-binding peptide
  MOD_RES (32), (32): Xaa is C or S
RDVVMGQYNKLIIQQKDNLYLMSIASMKTPTX

SEQ ID NO: 77917 - protein, 37 aa, Artificial Sequence; identical to SEQ ID NO: 3438
  GFR-binding peptide
  MOD_RES (33), (34): Xaa is C or S
  MOD_RES (11), (12), (13), (14), (15): Xaa is A or G
  MOD_RES (16), (17), (18), (19): Xaa is A or G or is absent

SEQ ID NO: 77918 - protein, 40 aa, Artificial Sequence; identical to SEQ ID NO: 3439
  GFR-binding peptide
  MOD_RES (2), (4), (35), (36): Xaa is C or S

SEQ ID NO: 77919 - protein, 44 aa, Artificial Sequence; identical to SEQ ID NO: 10856
  GFR-binding peptide
  MOD_RES (2), (4), (38), (39): Xaa is C or S
  MOD_RES (16), (17), (18), (19), (20): Xaa is A or G
  MOD_RES (21), (22), (23), (24): Xaa is A or G or is absent

SEQ ID NO: 77920 - protein, 40 aa, Artificial Sequence; identical to SEQ ID NO: 3440
  GFR-binding peptide
  MOD_RES (2), (36), (37): Xaa is C or S
  MOD_RES (14), (15), (16), (17), (18): Xaa is A or G
  MOD_RES (19), (20), (21), (22): Xaa is A or G or is absent

SEQ ID NO: 77921 - protein, 35 aa, Artificial Sequence; identical to SEQ ID NO: 3441
  GFR-binding peptide
  MOD_RES (34), (35): Xaa is C or S
  MOD_RES (12), (13), (14), (15), (16): Xaa is A or G
  MOD_RES (17), (18), (19), (20): Xaa is A or G or is absent

SEQ ID NO: 77922 - protein, 36 aa, Artificial Sequence
  GFR-binding peptide
  MOD_RES (1), (34), (35): Xaa is C or S
  MOD_RES (12), (13), (14), (15), (16): Xaa is A or G
  MOD_RES (17), (18), (19), (20): Xaa is A or G or is absent
XEEVIMQYNKLXXXXXXXXXLYLMSIASTKVPAXXT

SEQ ID NO: 77923 - protein, 30 aa, Artificial Sequence; identical to SEQ ID NO: 3442
  GFR-binding peptide

SEQ ID NO: 77924 - protein, 41 aa, Artificial Sequence; identical to SEQ ID NO: 5365
  GFR-binding peptide
  MOD_RES (1), (35), (36): Xaa is C or S
  MOD_RES (13), (14), (15), (16), (17): Xaa is A or G
  MOD_RES (18), (19), (20), (21): Xaa is A or G or is absent

SEQ ID NO: 77925 - protein, 39 aa, Artificial Sequence; identical to SEQ ID NO: 12801
  GFR-binding peptide
  MOD_RES (34), (35): Xaa is C or S
  MOD_RES (12), (13), (14), (15), (16): Xaa is A or G
  MOD_RES (17), (18), (19), (20): Xaa is A or G or is absent

SEQ ID NO: 77926 - protein, 33 aa, Artificial Sequence; identical to SEQ ID NO: 5368
  GFR-binding peptide
  MOD_RES (31), (32): Xaa is C or S

SEQ ID NO: 77927 - protein, 37 aa, Artificial Sequence; identical to SEQ ID NO: 26499
  GFR-binding peptide
  MOD_RES (2), (36), (37): Xaa is C or S
  MOD_RES (14), (15), (16), (17), (18): Xaa is A or G
  MOD_RES (19), (20), (21), (22): Xaa is A or G or is absent

SEQ ID NO: 77928 - protein, 37 aa, Artificial Sequence
  GFR-binding peptide
  MOD_RES (31), (32): Xaa is C or S
EVTMNQYNKLVVNKNEDLYLISIASMKEPVXXPEPIG

SEQ ID NO: 77929 - protein, 35 aa, Artificial Sequence; identical to SEQ ID NO: 5369
  GFR-binding peptide
  MOD_RES (33), (34): Xaa is C or S

SEQ ID NO: 77930 - protein, 33 aa, Artificial Sequence; identical to SEQ ID NO: 5370
  GFR-binding peptide
  MOD_RES (1), (33): Xaa is C or S

SEQ ID NO: 77931 - protein, 40 aa, Artificial Sequence; identical to SEQ ID NO: 5371
  GFR-binding peptide
  MOD_RES (34), (35): Xaa is C or S
  MOD_RES (12), (13), (14), (15), (16): Xaa is A or G
  MOD_RES (17), (18), (19), (20): Xaa is A or G or is absent

SEQ ID NO: 77932 - protein, 42 aa, Artificial Sequence; identical to SEQ ID NO: 3447
  GFR-binding peptide
  MOD_RES (1), (3), (38), (39): Xaa is C or S
  MOD_RES (16), (17), (18), (19), (20): Xaa is A or G
  MOD_RES (21), (22), (23), (24): Xaa is A or G or is absent

SEQ ID NO: 77933 - protein, 36 aa, Artificial Sequence
  GFR-binding peptide
  MOD_RES (33), (34): Xaa is C or S
  MOD_RES (11), (12), (13), (14), (15): Xaa is A or G
  MOD_RES (16), (17), (18), (19): Xaa is A or G or is absent
EVTMNQYNKLXXXXXXXXXLYLISIASMKEPVXXPE

SEQ ID NO: 77934 - protein, 40 aa, Artificial Sequence; identical to SEQ ID NO: 3449
  GFR-binding peptide
  MOD_RES (2), (4), (37), (38): Xaa is C or S

SEQ ID NO: 77935 - protein, 36 aa, Artificial Sequence; identical to SEQ ID NO: 5374
  GFR-binding peptide
  MOD_RES (1), (3), (35): Xaa is C or S

SEQ ID NO: 77936 - protein, 42 aa, Artificial Sequence
  GFR-binding peptide
  MOD_RES (2), (4), (36), (37): Xaa is C or S
RXAXSEVTMNQYNKLVVNKNEDLYLISIASMKEPVXXPEPIG

SEQ ID NO: 77937 - protein, 37 aa, Artificial Sequence; identical to SEQ ID NO: 3451
  GFR-binding peptide
  MOD_RES (34), (35): Xaa is C or S
  MOD_RES (12), (13), (14), (15), (16): Xaa is A or G
  MOD_RES (17), (18), (19), (20): Xaa is A or G or is absent

SEQ ID NO: 77938 - protein, 36 aa, Artificial Sequence; identical to SEQ ID NO: 5376
  GFR-binding peptide
  MOD_RES (1), (3), (36): Xaa is C or S
  MOD_RES (14), (15), (16), (17), (18): Xaa is A or G
  MOD_RES (19), (20), (21), (22): Xaa is A or G or is absent

SEQ ID NO: 77939 - protein, 36 aa, Artificial Sequence; identical to SEQ ID NO: 5378
  GFR-binding peptide
  MOD_RES (2), (4): Xaa is C or S
  MOD_RES (15), (16), (17), (18), (19): Xaa is A or G
  MOD_RES (20), (21), (22), (23): Xaa is A or G or is absent

SEQ ID NO: 77940 - protein, 37 aa, Artificial Sequence
  GFR-binding peptide
  MOD_RES (31), (32): Xaa is C or S
EVVMDQYNKLVVNNAADLYLISIASLRAPVXXSAPAA

SEQ ID NO: 77941 - protein, 35 aa, Artificial Sequence; identical to SEQ ID NO: 12811
  GFR-binding peptide
  MOD_RES (34), (35): Xaa is C or S
  MOD_RES (12), (13), (14), (15), (16): Xaa is A or G
  MOD_RES (17), (18), (19), (20): Xaa is A or G or is absent

SEQ ID NO: 77942 - protein, 35 aa, Artificial Sequence; identical to SEQ ID NO: 26511
  GFR-binding peptide
  MOD_RES (31), (32): Xaa is C or S

SEQ ID NO: 77943 - protein, 36 aa, Artificial Sequence; identical to SEQ ID NO: 3457
  GFR-binding peptide
  MOD_RES (33), (34): Xaa is C or S
  MOD_RES (11), (12), (13), (14), (15): Xaa is A or G
  MOD_RES (16), (17), (18), (19): Xaa is A or G or is absent

SEQ ID NO: 77944 - protein, 32 aa, Artificial Sequence; identical to SEQ ID NO: 24438
  GFR-binding peptide
  MOD_RES (1), (1): Xaa is C or S

SEQ ID NO: 77945 - protein, 37 aa, Artificial Sequence
  GFR-binding peptide
  MOD_RES (2), (4): Xaa is C or S
  MOD_RES (16), (17), (18), (19), (20): Xaa is A or G
  MOD_RES (21), (22), (23), (24): Xaa is A or G or is absent
RXGXESVAMGQYNKLXXXXXXXXXLYLISIASLKTPV

SEQ ID NO: 77946 - protein, 38 aa, Artificial Sequence; identical to SEQ ID NO: 3459
  GFR-binding peptide
  MOD_RES (1), (32), (33): Xaa is C or S

SEQ ID NO: 77947 - protein, 39 aa, Artificial Sequence; identical to SEQ ID NO: 5379
  GFR-binding peptide
  MOD_RES (1), (3), (36), (37): Xaa is C or S
  MOD_RES (14), (15), (16), (17), (18): Xaa is A or G
  MOD_RES (19), (20), (21), (22): Xaa is A or G or is absent

SEQ ID NO: 77948 - protein, 40 aa, Artificial Sequence; identical to SEQ ID NO: 24440
  GFR-binding peptide
  MOD_RES (2), (36), (37): Xaa is C or S
  MOD_RES (14), (15), (16), (17), (18): Xaa is A or G
  MOD_RES (19), (20), (21), (22): Xaa is A or G or is absent

SEQ ID NO: 77949 - protein, 37 aa, Artificial Sequence
  GFR-binding peptide
  MOD_RES (1), (3), (37): Xaa is C or S
  MOD_RES (15), (16), (17), (18), (19): Xaa is A or G
  MOD_RES (20), (21), (22), (23): Xaa is A or G or is absent
XGXESVAMGQYNKLXXXXXXXXXLYLISIASLKTPVX

SEQ ID NO: 77950 - protein, 39 aa, Artificial Sequence; identical to SEQ ID NO: 5381
  GFR-binding peptide
  MOD_RES (1), (3), (37): Xaa is C or S
  MOD_RES (15), (16), (17), (18), (19): Xaa is A or G
  MOD_RES (20), (21), (22), (23): Xaa is A or G or is absent

SEQ ID NO: 77951 - protein, 37 aa, Artificial Sequence
  GFR-binding peptide
  MOD_RES (34), (35): Xaa is C or S
  MOD_RES (12), (13), (14), (15), (16): Xaa is A or G
  MOD_RES (17), (18), (19), (20): Xaa is A or G or is absent
RDVVMGQYNKLXXXXXXXXXLYLMSIASMKTPTXXPG

SEQ ID NO: 77952 - protein, 41 aa, Artificial Sequence; identical to SEQ ID NO: 5382
  GFR-binding peptide
  MOD_RES (2), (4), (36): Xaa is C or S

SEQ ID NO: 77953 - protein, 37 aa, Artificial Sequence; identical to SEQ ID NO: 5383
  GFR-binding peptide
  MOD_RES (2), (34), (35): Xaa is C or S

SEQ ID NO: 77954 - protein, 39 aa, Artificial Sequence; identical to SEQ ID NO: 5384
  GFR-binding peptide
  MOD_RES (2), (34), (35): Xaa is C or S

SEQ ID NO: 77955 - protein, 33 aa, Artificial Sequence
  GFR-binding peptide
  MOD_RES (1), (33): Xaa is C or S
XAEVVMDQYNKLVVNNAADLYLISIASLRAPVX

SEQ ID NO: 77956 - protein, 34 aa, Artificial Sequence; identical to SEQ ID NO: 3465
  GFR-binding peptide
  MOD_RES (31), (32): Xaa is C or S

SEQ ID NO: 77957 - protein, 37 aa, Artificial Sequence; identical to SEQ ID NO: 5387
  GFR-binding peptide
  MOD_RES (2), (4): Xaa is C or S
  MOD_RES (16), (17), (18), (19), (20): Xaa is A or G
  MOD_RES (21), (22), (23), (24): Xaa is A or G or is absent

SEQ ID NO: 77958 - protein, 39 aa, Artificial Sequence; identical to SEQ ID NO: 3468
  GFR-binding peptide
  MOD_RES (2), (34), (35): Xaa is C or S

SEQ ID NO: 77959 - protein, 40 aa, Artificial Sequence; identical to SEQ ID NO: 5390
  GFR-binding peptide
  MOD_RES (2), (4), (35), (36): Xaa is C or S

SEQ ID NO: 77960 - protein, 36 aa, Artificial Sequence; identical to SEQ ID NO: 3469
  GFR-binding peptide
  MOD_RES (1), (34), (35): Xaa is C or S

SEQ ID NO: 77961 - protein, 43 aa, Artificial Sequence; identical to SEQ ID NO: 5393
  GFR-binding peptide
  MOD_RES (2), (4), (38), (39): Xaa is C or S
  MOD_RES (16), (17), (18), (19), (20): Xaa is A or G
  MOD_RES (21), (22), (23), (24): Xaa is A or G or is absent

SEQ ID NO: 77962 - protein, 40 aa, Artificial Sequence; identical to SEQ ID NO: 5394
  GFR-binding peptide
  MOD_RES (34), (35): Xaa is C or S
  MOD_RES (12), (13), (14), (15), (16): Xaa is A or G
  MOD_RES (17), (18), (19), (20): Xaa is A or G or is absent

SEQ ID NO: 77963 - protein, 37 aa, Artificial Sequence; identical to SEQ ID NO: 3470
  GFR-binding peptide
  MOD_RES (1), (3), (37): Xaa is C or S
  MOD_RES (15), (16), (17), (18), (19): Xaa is A or G
  MOD_RES (20), (21), (22), (23): Xaa is A or G or is absent

SEQ ID NO: 77964 - protein, 35 aa, Artificial Sequence; identical to SEQ ID NO: 5395
  GFR-binding peptide
  MOD_RES (31), (32): Xaa is C or S

SEQ ID NO: 77965 - protein, 42 aa, Artificial Sequence; identical to SEQ ID NO: 5396
  GFR-binding peptide
  MOD_RES (2), (36), (37): Xaa is C or S
  MOD_RES (14), (15), (16), (17), (18): Xaa is A or G
  MOD_RES (19), (20), (21), (22): Xaa is A or G or is absent

SEQ ID NO: 77966 - protein, 32 aa, Artificial Sequence
  GFR-binding peptide
  MOD_RES (31), (32): Xaa is C or S
EVVMDQYNKLVVNNAADLYLISIASLRAPVXX

SEQ ID NO: 77967 - protein, 42 aa, Artificial Sequence; identical to SEQ ID NO: 12830
  GFR-binding peptide
  MOD_RES (2), (4), (36), (37): Xaa is C or S

SEQ ID NO: 77968 - protein, 42 aa, Artificial Sequence; identical to SEQ ID NO: 10888
  GFR-binding peptide
  MOD_RES (1), (3), (37), (38): Xaa is C or S
  MOD_RES (15), (16), (17), (18), (19): Xaa is A or G
  MOD_RES (20), (21), (22), (23): Xaa is A or G or is absent

SEQ ID NO: 77969 - protein, 34 aa, Artificial Sequence; identical to SEQ ID NO: 24452
  GFR-binding peptide
  MOD_RES (32), (33): Xaa is C or S

SEQ ID NO: 77970 - protein, 35 aa, Artificial Sequence; identical to SEQ ID NO: 56362
  GFR-binding peptide
  MOD_RES (2), (4): Xaa is C or S

SEQ ID NO: 77971 - protein, 33 aa, Artificial Sequence; identical to SEQ ID NO: 26525
  GFR-binding peptide
  MOD_RES (2), (2): Xaa is C or S

SEQ ID NO: 77972 - protein, 36 aa, Artificial Sequence; identical to SEQ ID NO: 5401
  GFR-binding peptide
  MOD_RES (31), (32): Xaa is C or S

SEQ ID NO: 77973 - protein, 37 aa, Artificial Sequence; identical to SEQ ID NO: 3475
  GFR-binding peptide
  MOD_RES (34), (35): Xaa is C or S
  MOD_RES (12), (13), (14), (15), (16): Xaa is A or G
  MOD_RES (17), (18), (19), (20): Xaa is A or G or is absent

SEQ ID NO: 77974 - protein, 33 aa, Artificial Sequence; identical to SEQ ID NO: 24456
  GFR-binding peptide
  MOD_RES (12), (13), (14), (15), (16): Xaa is A or G
  MOD_RES (17), (18), (19), (20): Xaa is A or G or is absent

SEQ ID NO: 77975 - protein, 42 aa, Artificial Sequence; identical to SEQ ID NO: 3476
  GFR-binding peptide
  MOD_RES (1), (3), (37), (38): Xaa is C or S
  MOD_RES (15), (16), (17), (18), (19): Xaa is A or G
  MOD_RES (20), (21), (22), (23): Xaa is A or G or is absent

SEQ ID NO: 77976 - protein, 35 aa, Artificial Sequence; identical to SEQ ID NO: 56370
  GFR-binding peptide
  MOD_RES (32), (33): Xaa is C or S

SEQ ID NO: 77977 - protein, 34 aa, Artificial Sequence; identical to SEQ ID NO: 3477
  GFR-binding peptide
  MOD_RES (2), (4): Xaa is C or S

SEQ ID NO: 77978 - protein, 41 aa, Artificial Sequence
  GFR-binding peptide
  MOD_RES (2), (4), (37), (38): Xaa is C or S
  MOD_RES (15), (16), (17), (18), (19): Xaa is A or G
  MOD_RES (20), (21), (22), (23): Xaa is A or G or is absent
LXGXEEVIMQYNKLXXXXXXXXXLYLMSIASTKVPAXXTSP

SEQ ID NO: 77979 - protein, 42 aa, Artificial Sequence; identical to SEQ ID NO: 10896
  GFR-binding peptide
  MOD_RES (2), (36), (37): Xaa is C or S
  MOD_RES (14), (15), (16), (17), (18): Xaa is A or G
  MOD_RES (19), (20), (21), (22): Xaa is A or G or is absent

SEQ ID NO: 77980 - protein, 35 aa, Artificial Sequence; identical to SEQ ID NO: 3481
  GFR-binding peptide
  MOD_RES (31), (32): Xaa is C or S

SEQ ID NO: 77981 - protein, 35 aa, Artificial Sequence; identical to SEQ ID NO: 3482
  GFR-binding peptide
  MOD_RES (1), (3): Xaa is C or S

SEQ ID NO: 77982 - protein, 39 aa, Artificial Sequence; identical to SEQ ID NO: 12836
  GFR-binding peptide
  MOD_RES (2), (34), (35): Xaa is C or S

SEQ ID NO: 77983 - protein, 41 aa, Artificial Sequence; identical to SEQ ID NO: 56380
  GFR-binding peptide
  MOD_RES (2), (35), (36): Xaa is C or S
  MOD_RES (13), (14), (15), (16), (17): Xaa is A or G
  MOD_RES (18), (19), (20), (21): Xaa is A or G or is absent

SEQ ID NO: 77984 - protein, 35 aa, Artificial Sequence
  GFR-binding peptide
  MOD_RES (1), (3): Xaa is C or S
  MOD_RES (14), (15), (16), (17), (18): Xaa is A or G
  MOD_RES (19), (20), (21), (22): Xaa is A or G or is absent
XGXEEVIMQYNKLXXXXXXXXXLYLMSIASTKVPA

SEQ ID NO: 77985 - protein, 35 aa, Artificial Sequence; identical to SEQ ID NO: 3487
  GFR-binding peptide
  MOD_RES (34), (35): Xaa is C or S
  MOD_RES (12), (13), (14), (15), (16): Xaa is A or G
  MOD_RES (17), (18), (19), (20): Xaa is A or G or is absent

SEQ ID NO: 77986 - protein, 30 aa, Artificial Sequence; identical to SEQ ID NO: 56384
  GFR-binding peptide

SEQ ID NO: 77987 - protein, 39 aa, Artificial Sequence; identical to SEQ ID NO: 5411
  GFR-binding peptide
  MOD_RES (1), (3), (36), (37): Xaa is C or S
  MOD_RES (14), (15), (16), (17), (18): Xaa is A or G
  MOD_RES (19), (20), (21), (22): Xaa is A or G or is absent

SEQ ID NO: 77988 - protein, 38 aa, Artificial Sequence; identical to SEQ ID NO: 5412
  GFR-binding peptide
  MOD_RES (2), (35), (36): Xaa is C or S
  MOD_RES (13), (14), (15), (16), (17): Xaa is A or G
  MOD_RES (18), (19), (20), (21): Xaa is A or G or is absent

SEQ ID NO: 77989 - protein, 32 aa, Artificial Sequence; identical to SEQ ID NO: 10902
  GFR-binding peptide
  MOD_RES (1), (1): Xaa is C or S

SEQ ID NO: 77990 - protein, 35 aa, Artificial Sequence; identical to SEQ ID NO: 5413
  GFR-binding peptide
  MOD_RES (1), (35): Xaa is C or S
  MOD_RES (13), (14), (15), (16), (17): Xaa is A or G
  MOD_RES (18), (19), (20), (21): Xaa is A or G or is absent

SEQ ID NO: 77991 - protein, 39 aa, Artificial Sequence
  GFR-binding peptide
  MOD_RES (1), (3), (37), (38): Xaa is C or S
  MOD_RES (15), (16), (17), (18), (19): Xaa is A or G
  MOD_RES (20), (21), (22), (23): Xaa is A or G or is absent
XGXESVAMGQYNKLXXXXXXXXXLYLISIASLKTPVXXA

SEQ ID NO: 77992 - protein, 39 aa, Artificial Sequence; identical to SEQ ID NO: 3490
  GFR-binding peptide
  MOD_RES (1), (3), (35), (36): Xaa is C or S

SEQ ID NO: 77993 - protein, 36 aa, Artificial Sequence; identical to SEQ ID NO: 5414
  GFR-binding peptide
  MOD_RES (1), (33), (34): Xaa is C or S

SEQ ID NO: 77994 - protein, 41 aa, Artificial Sequence; identical to SEQ ID NO: 3493
  GFR-binding peptide
  MOD_RES (1), (3), (36), (37): Xaa is C or S
  MOD_RES (14), (15), (16), (17), (18): Xaa is A or G
  MOD_RES (19), (20), (21), (22): Xaa is A or G or is absent

SEQ ID NO: 77995 - protein, 37 aa, Artificial Sequence; identical to SEQ ID NO: 3494
  GFR-binding peptide
  MOD_RES (33), (34): Xaa is C or S
  MOD_RES (11), (12), (13), (14), (15): Xaa is A or G
  MOD_RES (16), (17), (18), (19): Xaa is A or G or is absent

SEQ ID NO: 77996 - protein, 40 aa, Artificial Sequence; identical to SEQ ID NO: 56390
  GFR-binding peptide
  MOD_RES (2), (35), (36): Xaa is C or S
  MOD_RES (13), (14), (15), (16), (17): Xaa is A or G
  MOD_RES (18), (19), (20), (21): Xaa is A or G or is absent

SEQ ID NO: 77997 - protein, 37 aa, Artificial Sequence
  GFR-binding peptide
  MOD_RES (33), (34): Xaa is C or S
  MOD_RES (11), (12), (13), (14), (15): Xaa is A or G
  MOD_RES (16), (17), (18), (19): Xaa is A or G or is absent
EEVIMQYNKLXXXXXXXXXLYLMSIASTKVPAXXTSP

SEQ ID NO: 77998 - protein, 42 aa, Artificial Sequence; identical to SEQ ID NO: 26544
  GFR-binding peptide
  MOD_RES (2), (36), (37): Xaa is C or S
  MOD_RES (14), (15), (16), (17), (18): Xaa is A or G
  MOD_RES (19), (20), (21), (22): Xaa is A or G or is absent

SEQ ID NO: 77999 - protein, 34 aa, Artificial Sequence; identical to SEQ ID NO: 3496
  GFR-binding peptide
  MOD_RES (33), (34): Xaa is C or S
  MOD_RES (11), (12), (13), (14), (15): Xaa is A or G
  MOD_RES (16), (17), (18), (19): Xaa is A or G or is absent

SEQ ID NO: 78000 - protein, 37 aa, Artificial Sequence
  GFR-binding peptide
  MOD_RES (2), (4), (36), (37): Xaa is C or S
RXAXSEVTMNQYNKLVVNKNEDLYLISIASMKEPVXX

SEQ ID NO: 78001 - protein, 37 aa, Artificial Sequence; identical to SEQ ID NO: 5417
  GFR-binding peptide
  MOD_RES (2), (4), (36), (37): Xaa is C or S

SEQ ID NO: 78002 - protein, 39 aa, Artificial Sequence; identical to SEQ ID NO: 3499
  GFR-binding peptide
  MOD_RES (2), (36), (37): Xaa is C or S
  MOD_RES (14), (15), (16), (17), (18): Xaa is A or G
  MOD_RES (19), (20), (21), (22): Xaa is A or G or is absent

SEQ ID NO: 78003 - protein, 35 aa, Artificial Sequence; identical to SEQ ID NO: 24481
  GFR-binding peptide
  MOD_RES (1), (33), (34): Xaa is C or S

SEQ ID NO: 78004 - protein, 36 aa, Artificial Sequence; identical to SEQ ID NO: 5421
  GFR-binding peptide
  MOD_RES (2), (36): Xaa is C or S
  MOD_RES (14), (15), (16), (17), (18): Xaa is A or G
  MOD_RES (19), (20), (21), (22): Xaa is A or G or is absent

SEQ ID NO: 78005 - protein, 31 aa, Artificial Sequence; identical to SEQ ID NO: 5422
  GFR-binding peptide
  MOD_RES (31), (31): Xaa is C or S

SEQ ID NO: 78006 - protein, 44 aa, Artificial Sequence; identical to SEQ ID NO: 5423
  GFR-binding peptide
  MOD_RES (2), (4), (39), (40): Xaa is C or S
  MOD_RES (17), (18), (19), (20), (21): Xaa is A or G
  MOD_RES (22), (23), (24), (25): Xaa is A or G or is absent

SEQ ID NO: 78007 - protein, 37 aa, Artificial Sequence; identical to SEQ ID NO: 56397
  GFR-binding peptide
  MOD_RES (1), (33), (34): Xaa is C or S

SEQ ID NO: 78008 - protein, 41 aa, Artificial Sequence; identical to SEQ ID NO: 5425
  GFR-binding peptide
  MOD_RES (1), (3), (35), (36): Xaa is C or S

SEQ ID NO: 78009 - protein, 41 aa, Artificial Sequence
  GFR-binding peptide
  MOD_RES (2), (36), (37): Xaa is C or S
  MOD_RES (14), (15), (16), (17), (18): Xaa is A or G
  MOD_RES (19), (20), (21), (22): Xaa is A or G or is absent
GXESVAMGQYNKLXXXXXXXXXLYLISIASLKTPVXXAKSA

SEQ ID NO: 78010 - protein, 41 aa, Artificial Sequence
  GFR-binding peptide
  MOD_RES (1), (3), (37), (38): Xaa is C or S
  MOD_RES (15), (16), (17), (18), (19): Xaa is A or G
  MOD_RES (20), (21), (22), (23): Xaa is A or G or is absent
XGXRDVVMGQYNKLXXXXXXXXXLYLMSIASMKTPTXXPGA

SEQ ID NO: 78011 - protein, 36 aa, Artificial Sequence; identical to SEQ ID NO: 5427
  GFR-binding peptide
  MOD_RES (33), (34): Xaa is C or S
  MOD_RES (11), (12), (13), (14), (15): Xaa is A or G
  MOD_RES (16), (17), (18), (19): Xaa is A or G or is absent

SEQ ID NO: 78012 - protein, 38 aa, Artificial Sequence
  GFR-binding peptide
  MOD_RES (32), (33): Xaa is C or S
AEVVMDQYNKLVVNNAADLYLISIASLRAPVXXSAPAA

SEQ ID NO: 78013 - protein, 43 aa, Artificial Sequence; identical to SEQ ID NO: 26554
  GFR-binding peptide
  MOD_RES (1), (3), (37), (38): Xaa is C or S
  MOD_RES (15), (16), (17), (18), (19): Xaa is A or G
  MOD_RES (20), (21), (22), (23): Xaa is A or G or is absent

SEQ ID NO: 78014 - protein, 35 aa, Artificial Sequence; identical to SEQ ID NO: 10917
  GFR-binding peptide
  MOD_RES (31), (32): Xaa is C or S

SEQ ID NO: 78015 - protein, 31 aa, Artificial Sequence
  GFR-binding peptide
  MOD_RES (31), (31): Xaa is C or S
EEVIMQYNKLLLVRGNDLYLMSIASTKVPAX

SEQ ID NO: 78016 - protein, 34 aa, Artificial Sequence; identical to SEQ ID NO: 56407
  GFR-binding peptide
  MOD_RES (33), (34): Xaa is C or S
  MOD_RES (11), (12), (13), (14), (15): Xaa is A or G
  MOD_RES (16), (17), (18), (19): Xaa is A or G or is absent

SEQ ID NO: 78017 - protein, 34 aa, Artificial Sequence
  GFR-binding peptide
  MOD_RES (1), (33), (34): Xaa is C or S
XRDVVMGQYNKLIIQQKDNLYLMSIASMKTPTXX

SEQ ID NO: 78018 - protein, 38 aa, Artificial Sequence; identical to SEQ ID NO: 5435
  GFR-binding peptide
  MOD_RES (1), (33), (34): Xaa is C or S

SEQ ID NO: 78019 - protein, 33 aa, Artificial Sequence
  GFR-binding peptide
  MOD_RES (12), (13), (14), (15), (16): Xaa is A or G
  MOD_RES (17), (18), (19), (20): Xaa is A or G or is absent
RDVVMGQYNKLXXXXXXXXXLYLMSIASMKTPT

SEQ ID NO: 78020 - protein, 40 aa, Artificial Sequence
  GFR-binding peptide
  MOD_RES (1), (3), (37), (38): Xaa is C or S
  MOD_RES (15), (16), (17), (18), (19): Xaa is A or G
  MOD_RES (20), (21), (22), (23): Xaa is A or G or is absent
XGXAEVVMDQYNKLXXXXXXXXXLYLISIASLRAPVXXSA

SEQ ID NO: 78021 - protein, 36 aa, Artificial Sequence
  GFR-binding peptide
  MOD_RES (1), (3): Xaa is C or S
  MOD_RES (15), (16), (17), (18), (19): Xaa is A or G
  MOD_RES (20), (21), (22), (23): Xaa is A or G or is absent
XAXSEVTMNQYNKLXXXXXXXXXLYLISIASMKEPV

SEQ ID NO: 78022 - protein, 35 aa, Artificial Sequence; identical to SEQ ID NO: 56412
  GFR-binding peptide
  MOD_RES (33), (34): Xaa is C or S
  MOD_RES (11), (12), (13), (14), (15): Xaa is A or G
  MOD_RES (16), (17), (18), (19): Xaa is A or G or is absent

SEQ ID NO: 78023 - protein, 34 aa, Artificial Sequence; identical to SEQ ID NO: 3512
  GFR-binding peptide
  MOD_RES (32), (32): Xaa is C or S

SEQ ID NO: 78024 - protein, 36 aa, Artificial Sequence; identical to SEQ ID NO: 24497
  GFR-binding peptide
  MOD_RES (1), (3): Xaa is C or S
  MOD_RES (15), (16), (17), (18), (19): Xaa is A or G
  MOD_RES (20), (21), (22), (23): Xaa is A or G or is absent

SEQ ID NO: 78025 - protein, 39 aa, Artificial Sequence; identical to SEQ ID NO: 24498
  GFR-binding peptide
  MOD_RES (1), (35), (36): Xaa is C or S
  MOD_RES (13), (14), (15), (16), (17): Xaa is A or G
  MOD_RES (18), (19), (20), (21): Xaa is A or G or is absent

SEQ ID NO: 78026 - protein, 36 aa, Artificial Sequence; identical to SEQ ID NO: 5442
  GFR-binding peptide
  MOD_RES (1), (35), (36): Xaa is C or S
  MOD_RES (13), (14), (15), (16), (17): Xaa is A or G
  MOD_RES (18), (19), (20), (21): Xaa is A or G or is absent

SEQ ID NO: 78027 - protein, 31 aa, Artificial Sequence
  GFR-binding peptide
ESVAMGQYNKLYTVVGKDLYLISIASLKTPV

SEQ ID NO: 78028 - protein, 34 aa, Artificial Sequence; identical to SEQ ID NO: 3514
  GFR-binding peptide
  MOD_RES (34), (34): Xaa is C or S
  MOD_RES (12), (13), (14), (15), (16): Xaa is A or G
  MOD_RES (17), (18), (19), (20): Xaa is A or G or is absent

SEQ ID NO: 78029 - protein, 37 aa, Artificial Sequence; identical to SEQ ID NO: 3515
  GFR-binding peptide
  MOD_RES (2), (4), (35), (36): Xaa is C or S

SEQ ID NO: 78030 - protein, 37 aa, Artificial Sequence; identical to SEQ ID NO: 3516
  GFR-binding peptide
  MOD_RES (1), (3), (36), (37): Xaa is C or S
  MOD_RES (14), (15), (16), (17), (18): Xaa is A or G
  MOD_RES (19), (20), (21), (22): Xaa is A or G or is absent

SEQ ID NO: 78031 - protein, 34 aa, Artificial Sequence; identical to SEQ ID NO: 3517
  GFR-binding peptide
  MOD_RES (2), (34): Xaa is C or S

SEQ ID NO: 78032 - protein, 35 aa, Artificial Sequence; identical to SEQ ID NO: 61080
  GFR-binding peptide
  MOD_RES (33), (34): Xaa is C or S
  MOD_RES (11), (12), (13), (14), (15): Xaa is A or G
  MOD_RES (16), (17), (18), (19): Xaa is A or G or is absent

SEQ ID NO: 78033 - protein, 32 aa, Artificial Sequence; identical to SEQ ID NO: 5443
  GFR-binding peptide
  MOD_RES (31), (32): Xaa is C or S

SEQ ID NO: 78034 - protein, 41 aa, Artificial Sequence
  GFR-binding peptide
  MOD_RES (1), (3), (37), (38): Xaa is C or S
  MOD_RES (15), (16), (17), (18), (19): Xaa is A or G
  MOD_RES (20), (21), (22), (23): Xaa is A or G or is absent
XGXESVAMGQYNKLXXXXXXXXXLYLISIASLKTPVXXAKS

SEQ ID NO: 78035 - protein, 38 aa, Artificial Sequence; identical to SEQ ID NO: 5444
  GFR-binding peptide
  MOD_RES (2), (4), (38): Xaa is C or S
  MOD_RES (16), (17), (18), (19), (20): Xaa is A or G
  MOD_RES (21), (22), (23), (24): Xaa is A or G or is absent

SEQ ID NO: 78036 - protein, 33 aa, Artificial Sequence; identical to SEQ ID NO: 5445
  GFR-binding peptide
  MOD_RES (31), (32): Xaa is C or S

SEQ ID NO: 78037 - protein, 32 aa, Artificial Sequence; identical to SEQ ID NO: 64536
  GFR-binding peptide
  MOD_RES (1), (1): Xaa is C or S

SEQ ID NO: 78038 - protein, 32 aa, Artificial Sequence; identical to SEQ ID NO: 3520
  GFR-binding peptide
  MOD_RES (1), (1): Xaa is C or S

SEQ ID NO: 78039 - protein, 37 aa, Artificial Sequence; identical to SEQ ID NO: 12866
  GFR-binding peptide
  MOD_RES (1), (35), (36): Xaa is C or S
  MOD_RES (13), (14), (15), (16), (17): Xaa is A or G
  MOD_RES (18), (19), (20), (21): Xaa is A or G or is absent

SEQ ID NO: 78040 - protein, 42 aa, Artificial Sequence; identical to SEQ ID NO: 3521
  GFR-binding peptide
  MOD_RES (2), (4), (36): Xaa is C or S

SEQ ID NO: 78041 - protein, 41 aa, Artificial Sequence; identical to SEQ ID NO: 3522
  GFR-binding peptide
  MOD_RES (2), (4), (37), (38): Xaa is C or S
  MOD_RES (15), (16), (17), (18), (19): Xaa is A or G
  MOD_RES (20), (21), (22), (23): Xaa is A or G or is absent

SEQ ID NO: 78042 - protein, 40 aa, Artificial Sequence; identical to SEQ ID NO: 3523
  GFR-binding peptide
  MOD_RES (2), (34), (35): Xaa is C or S

SEQ ID NO: 78043 - protein, 41 aa, Artificial Sequence
  GFR-binding peptide
  MOD_RES (2), (4), (36), (37): Xaa is C or S
SXGXRDVVMGQYNKLIIQQKDNLYLMSIASMKTPTXXPGAS

SEQ ID NO: 78044 - protein, 34 aa, Artificial Sequence
  GFR-binding peptide
  MOD_RES (1), (3), (34): Xaa is C or S
XGXEEVIMQYNKLLLVRGNDLYLMSIASTKVPAX

SEQ ID NO: 78045 - protein, 35 aa, Artificial Sequence; identical to SEQ ID NO: 5448
  GFR-binding peptide
  MOD_RES (1), (3): Xaa is C or S
  MOD_RES (14), (15), (16), (17), (18): Xaa is A or G
  MOD_RES (19), (20), (21), (22): Xaa is A or G or is absent

SEQ ID NO: 78046 - protein, 33 aa, Artificial Sequence; identical to SEQ ID NO: 12868
  GFR-binding peptide
  MOD_RES (12), (13), (14), (15), (16): Xaa is A or G
  MOD_RES (17), (18), (19), (20): Xaa is A or G or is absent

SEQ ID NO: 78047 - protein, 34 aa, Artificial Sequence; identical to SEQ ID NO: 3524
  GFR-binding peptide
  MOD_RES (1), (32), (33): Xaa is C or S

SEQ ID NO: 78048 - protein, 33 aa, Artificial Sequence; identical to SEQ ID NO: 5451
  GFR-binding peptide
  MOD_RES (12), (13), (14), (15), (16): Xaa is A or G
  MOD_RES (17), (18), (19), (20): Xaa is A or G or is absent

SEQ ID NO: 78049 - protein, 34 aa, Artificial Sequence; identical to SEQ ID NO: 5452
  GFR-binding peptide
  MOD_RES (2), (34): Xaa is C or S

SEQ ID NO: 78050 - protein, 38 aa, Artificial Sequence; identical to SEQ ID NO: 24513
  GFR-binding peptide
  MOD_RES (2), (4), (36), (37): Xaa is C or S

SEQ ID NO: 78051 - protein, 34 aa, Artificial Sequence; identical to SEQ ID NO: 5455
  GFR-binding peptide
  MOD_RES (31), (32): Xaa is C or S

SEQ ID NO: 78052 - protein, 36 aa, Artificial Sequence; identical to SEQ ID NO: 3527
  GFR-binding peptide
  MOD_RES (1), (3), (34), (35): Xaa is C or S

SEQ ID NO: 78053 - protein, 41 aa, Artificial Sequence; identical to SEQ ID NO: 5456
  GFR-binding peptide
  MOD_RES (1), (3), (37), (38): Xaa is C or S
  MOD_RES (15), (16), (17), (18), (19): Xaa is A or G
  MOD_RES (20), (21), (22), (23): Xaa is A or G or is absent

SEQ ID NO: 78054 - protein, 35 aa, Artificial Sequence; identical to SEQ ID NO: 24517
  GFR-binding peptide
  MOD_RES (1), (33), (34): Xaa is C or S

SEQ ID NO: 78055 - protein, 38 aa, Artificial Sequence; identical to SEQ ID NO: 3528
  GFR-binding peptide
  MOD_RES (2), (4), (35), (36): Xaa is C or S

SEQ ID NO: 78056 - protein, 31 aa, Artificial Sequence; identical to SEQ ID NO: 5457
  GFR-binding peptide
  MOD_RES (1), (1): Xaa is C or S

SEQ ID NO: 78057 - protein, 40 aa, Artificial Sequence; identical to SEQ ID NO: 5459
  GFR-binding peptide
  MOD_RES (2), (35), (36): Xaa is C or S
  MOD_RES (13), (14), (15), (16), (17): Xaa is A or G
  MOD_RES (18), (19), (20), (21): Xaa is A or G or is absent

SEQ ID NO: 78058 - protein, 38 aa, Artificial Sequence; identical to SEQ ID NO: 3529
  GFR-binding peptide
  MOD_RES (34), (35): Xaa is C or S
  MOD_RES (12), (13), (14), (15), (16): Xaa is A or G
  MOD_RES (17), (18), (19), (20): Xaa is A or G or is absent

SEQ ID NO: 78059 - protein, 41 aa, Artificial Sequence; identical to SEQ ID NO: 5460
  GFR-binding peptide
  MOD_RES (2), (4), (37), (38): Xaa is C or S

SEQ ID NO: 78060 - protein, 36 aa, Artificial Sequence; identical to SEQ ID NO: 3530
  GFR-binding peptide
  MOD_RES (32), (33): Xaa is C or S

SEQ ID NO: 78061 - protein, 32 aa, Artificial Sequence; identical to SEQ ID NO: 56432
  GFR-binding peptide
  MOD_RES (11), (12), (13), (14), (15): Xaa is A or G
  MOD_RES (16), (17), (18), (19): Xaa is A or G or is absent

SEQ ID NO: 78062 - protein, 33 aa, Artificial Sequence; identical to SEQ ID NO: 12879
  GFR-binding peptide
  MOD_RES (12), (13), (14), (15), (16): Xaa is A or G
  MOD_RES (17), (18), (19), (20): Xaa is A or G or is absent

SEQ ID NO: 78063 - protein, 36 aa, Artificial Sequence; identical to SEQ ID NO: 5463
  GFR-binding peptide
  MOD_RES (1), (3): Xaa is C or S
  MOD_RES (15), (16), (17), (18), (19): Xaa is A or G
  MOD_RES (20), (21), (22), (23): Xaa is A or G or is absent

SEQ ID NO: 78064 - protein, 38 aa, Artificial Sequence; identical to SEQ ID NO: 3532
  GFR-binding peptide
  MOD_RES (34), (35): Xaa is C or S
  MOD_RES (12), (13), (14), (15), (16): Xaa is A or G
  MOD_RES (17), (18), (19), (20): Xaa is A or G or is absent

SEQ ID NO: 78065 - protein, 39 aa, Artificial Sequence; identical to SEQ ID NO: 5464
  GFR-binding peptide
  MOD_RES (2), (4), (39): Xaa is C or S
  MOD_RES (17), (18), (19), (20), (21): Xaa is A or G
  MOD_RES (22), (23), (24), (25): Xaa is A or G or is absent

SEQ ID NO: 78066 - protein, 34 aa, Artificial Sequence; identical to SEQ ID NO: 24523
  GFR-binding peptide
  MOD_RES (31), (32): Xaa is C or S

SEQ ID NO: 78067 - protein, 38 aa, Artificial Sequence; identical to SEQ ID NO: 56437
  GFR-binding peptide
  MOD_RES (2), (4), (35), (36): Xaa is C or S

SEQ ID NO: 78068 - protein, 40 aa, Artificial Sequence
  GFR-binding peptide
  MOD_RES (2), (36), (37): Xaa is C or S
  MOD_RES (14), (15), (16), (17), (18): Xaa is A or G
  MOD_RES (19), (20), (21), (22): Xaa is A or G or is absent
AXSEVTMNQYNKLXXXXXXXXXLYLISIASMKEPVXXPEP

SEQ ID NO: 78069 - protein, 38 aa, Artificial Sequence
  GFR-binding peptide
  MOD_RES (33), (34): Xaa is C or S
  MOD_RES (11), (12), (13), (14), (15): Xaa is A or G
  MOD_RES (16), (17), (18), (19): Xaa is A or G or is absent
SVAMGQYNKLXXXXXXXXXLYLISIASLKTPVXXAKSA

SEQ ID NO: 78070 - protein, 36 aa, Artificial Sequence; identical to SEQ ID NO: 3537
  GFR-binding peptide
  MOD_RES (32), (33): Xaa is C or S

SEQ ID NO: 78071 - protein, 38 aa, Artificial Sequence; identical to SEQ ID NO: 24526
  GFR-binding peptide
  MOD_RES (2), (34), (35): Xaa is C or S

SEQ ID NO: 78072 - protein, 31 aa, Artificial Sequence; identical to SEQ ID NO: 56443
  GFR-binding peptide

SEQ ID NO: 78073 - protein, 40 aa, Artificial Sequence; identical to SEQ ID NO: 12885
  GFR-binding peptide
  MOD_RES (34), (35): Xaa is C or S
  MOD_RES (12), (13), (14), (15), (16): Xaa is A or G
  MOD_RES (17), (18), (19), (20): Xaa is A or G or is absent

SEQ ID NO: 78074 - protein, 39 aa, Artificial Sequence; identical to SEQ ID NO: 5471
  GFR-binding peptide
  MOD_RES (1), (36), (37): Xaa is C or S
  MOD_RES (14), (15), (16), (17), (18): Xaa is A or G
  MOD_RES (19), (20), (21), (22): Xaa is A or G or is absent

SEQ ID NO: 78075 - protein, 38 aa, Artificial Sequence; identical to SEQ ID NO: 24531
  GFR-binding peptide
  MOD_RES (1), (3), (37), (38): Xaa is C or S
  MOD_RES (15), (16), (17), (18), (19): Xaa is A or G
  MOD_RES (20), (21), (22), (23): Xaa is A or G or is absent

SEQ ID NO: 78076 - protein, 34 aa, Artificial Sequence; identical to SEQ ID NO: 26585
  GFR-binding peptide
  MOD_RES (33), (34): Xaa is C or S
  MOD_RES (11), (12), (13), (14), (15): Xaa is A or G
  MOD_RES (16), (17), (18), (19): Xaa is A or G or is absent

SEQ ID NO: 78077 - protein, 43 aa, Artificial Sequence; identical to SEQ ID NO: 10947
  GFR-binding peptide
  MOD_RES (1), (3), (37), (38): Xaa is C or S
  MOD_RES (15), (16), (17), (18), (19): Xaa is A or G
  MOD_RES (20), (21), (22), (23): Xaa is A or G or is absent

SEQ ID NO: 78078 - protein, 37 aa, Artificial Sequence; identical to SEQ ID NO: 3539
  GFR-binding peptide
  MOD_RES (2), (35), (36): Xaa is C or S

SEQ ID NO: 78079 - protein, 37 aa, Artificial Sequence; identical to SEQ ID NO: 5474
  GFR-binding peptide
  MOD_RES (2), (33), (34): Xaa is C or S

SEQ ID NO: 78080 - protein, 35 aa, Artificial Sequence
  GFR-binding peptide
  MOD_RES (34), (35): Xaa is C or S
  MOD_RES (12), (13), (14), (15), (16): Xaa is A or G
  MOD_RES (17), (18), (19), (20): Xaa is A or G or is absent
AEVVMDQYNKLXXXXXXXXXLYLISIASLRAPVXX

SEQ ID NO: 78081 - protein, 38 aa, Artificial Sequence
  GFR-binding peptide
  MOD_RES (1), (33), (34): Xaa is C or S
XRDVVMGQYNKLIIQQKDNLYLMSIASMKTPTXXPGAS

SEQ ID NO: 78082 - protein, 36 aa, Artificial Sequence
  GFR-binding peptide
  MOD_RES (34), (35): Xaa is C or S
  MOD_RES (12), (13), (14), (15), (16): Xaa is A or G
  MOD_RES (17), (18), (19), (20): Xaa is A or G or is absent
SEVTMNQYNKLXXXXXXXXXLYLISIASMKEPVXXP

SEQ ID NO: 78083 - protein, 44 aa, Artificial Sequence; identical to SEQ ID NO: 5477
  GFR-binding peptide
  MOD_RES (2), (4), (38), (39): Xaa is C or S
  MOD_RES (16), (17), (18), (19), (20): Xaa is A or G
  MOD_RES (21), (22), (23), (24): Xaa is A or G or is absent

SEQ ID NO: 78084 - protein, 38 aa, Artificial Sequence; identical to SEQ ID NO: 5479
  GFR-binding peptide
  MOD_RES (1), (33), (34): Xaa is C or S

SEQ ID NO: 78085 - protein, 37 aa, Artificial Sequence; identical to SEQ ID NO: 5480
  GFR-binding peptide
  MOD_RES (1), (34), (35): Xaa is C or S
  MOD_RES (12), (13), (14), (15), (16): Xaa is A or G
  MOD_RES (17), (18), (19), (20): Xaa is A or G or is absent

SEQ ID NO: 78086 - protein, 38 aa, Artificial Sequence; identical to SEQ ID NO: 3543
  GFR-binding peptide
  MOD_RES (1), (3), (35), (36): Xaa is C or S

SEQ ID NO: 78087 - protein, 38 aa, Artificial Sequence; identical to SEQ ID NO: 5481
  GFR-binding peptide
  MOD_RES (2), (4), (37), (38): Xaa is C or S

SEQ ID NO: 78088 - protein, 41 aa, Artificial Sequence; identical to SEQ ID NO: 10950
  GFR-binding peptide
  MOD_RES (2), (36), (37): Xaa is C or S
  MOD_RES (14), (15), (16), (17), (18): Xaa is A or G
  MOD_RES (19), (20), (21), (22): Xaa is A or G or is absent

SEQ ID NO: 78089 - protein, 39 aa, Artificial Sequence; identical to SEQ ID NO: 64571
  GFR-binding peptide
  MOD_RES (1), (3), (37), (38): Xaa is C or S
  MOD_RES (15), (16), (17), (18), (19): Xaa is A or G
  MOD_RES (20), (21), (22), (23): Xaa is A or G or is absent

SEQ ID NO: 78090 - protein, 34 aa, Artificial Sequence; identical to SEQ ID NO: 3547
  GFR-binding peptide
  MOD_RES (2), (33), (34): Xaa is C or S

SEQ ID NO: 78091 - protein, 39 aa, Artificial Sequence; identical to SEQ ID NO: 5484
  GFR-binding peptide
  MOD_RES (2), (35), (36): Xaa is C or S
  MOD_RES (13), (14), (15), (16), (17): Xaa is A or G
  MOD_RES (18), (19), (20), (21): Xaa is A or G or is absent

SEQ ID NO: 78092 - protein, 39 aa, Artificial Sequence; identical to SEQ ID NO: 5485
  GFR-binding peptide
  MOD_RES (2), (37), (38): Xaa is C or S
  MOD_RES (15), (16), (17), (18), (19): Xaa is A or G
  MOD_RES (20), (21), (22), (23): Xaa is A or G or is absent

SEQ ID NO: 78093 - protein, 38 aa, Artificial Sequence; identical to SEQ ID NO: 56461
  GFR-binding peptide
  MOD_RES (2), (4), (37), (38): Xaa is C or S
  MOD_RES (15), (16), (17), (18), (19): Xaa is A or G
  MOD_RES (20), (21), (22), (23): Xaa is A or G or is absent

SEQ ID NO: 78094 - protein, 39 aa, Artificial Sequence; identical to SEQ ID NO: 3548
  GFR-binding peptide
  MOD_RES (1), (35), (36): Xaa is C or S
  MOD_RES (13), (14), (15), (16), (17): Xaa is A or G
  MOD_RES (18), (19), (20), (21): Xaa is A or G or is absent

SEQ ID NO: 78095 - protein, 38 aa, Artificial Sequence; identical to SEQ ID NO: 26596
  GFR-binding peptide
  MOD_RES (1), (33), (34): Xaa is C or S

SEQ ID NO: 78096 - protein, 36 aa, Artificial Sequence
  GFR-binding peptide
  MOD_RES (33), (34): Xaa is C or S
  MOD_RES (11), (12), (13), (14), (15): Xaa is A or G
  MOD_RES (16), (17), (18), (19): Xaa is A or G or is absent
EEVIMQYNKLXXXXXXXXXLYLMSIASTKVPAXXTS

SEQ ID NO: 78097 - protein, 34 aa, Artificial Sequence; identical to SEQ ID NO: 3549
  GFR-binding peptide
  MOD_RES (2), (2): Xaa is C or S
  MOD_RES (13), (14), (15), (16), (17): Xaa is A or G
  MOD_RES (18), (19), (20), (21): Xaa is A or G or is absent

SEQ ID NO: 78098 - protein, 32 aa, Artificial Sequence; identical to SEQ ID NO: 5492
  GFR-binding peptide
  MOD_RES (31), (32): Xaa is C or S

SEQ ID NO: 78099 - protein, 40 aa, Artificial Sequence; identical to SEQ ID NO: 5494
  GFR-binding peptide
  MOD_RES (2), (4), (38): Xaa is C or S
  MOD_RES (16), (17), (18), (19), (20): Xaa is A or G
  MOD_RES (21), (22), (23), (24): Xaa is A or G or is absent

SEQ ID NO: 78100 - protein, 42 aa, Artificial Sequence; identical to SEQ ID NO: 5495
  GFR-binding peptide
  MOD_RES (2), (4), (38), (39): Xaa is C or S
  MOD_RES (16), (17), (18), (19), (20): Xaa is A or G
  MOD_RES (21), (22), (23), (24): Xaa is A or G or is absent

SEQ ID NO: 78101 - protein, 35 aa, Artificial Sequence; identical to SEQ ID NO: 5498
  GFR-binding peptide
  MOD_RES (2), (2): Xaa is C or S
  MOD_RES (14), (15), (16), (17), (18): Xaa is A or G
  MOD_RES (19), (20), (21), (22): Xaa is A or G or is absent

SEQ ID NO: 78102 - protein, 40 aa, Artificial Sequence; identical to SEQ ID NO: 3550
  GFR-binding peptide
  MOD_RES (2), (4), (38), (39): Xaa is C or S
  MOD_RES (16), (17), (18), (19), (20): Xaa is A or G
  MOD_RES (21), (22), (23), (24): Xaa is A or G or is absent

SEQ ID NO: 78103 - protein, 34 aa, Artificial Sequence; identical to SEQ ID NO: 26599
  GFR-binding peptide
  MOD_RES (1), (3): Xaa is C or S

SEQ ID NO: 78104 - protein, 34 aa, Artificial Sequence; identical to SEQ ID NO: 5499
  GFR-binding peptide
  MOD_RES (2), (2): Xaa is C or S
  MOD_RES (13), (14), (15), (16), (17): Xaa is A or G
  MOD_RES (18), (19), (20), (21): Xaa is A or G or is absent

SEQ ID NO: 78105 - protein, 39 aa, Artificial Sequence
  GFR-binding peptide
  MOD_RES (33), (34): Xaa is C or S
  MOD_RES (11), (12), (13), (14), (15): Xaa is A or G
  MOD_RES (16), (17), (18), (19): Xaa is A or G or is absent
RVVMNQYNKLXXXXXXXXXLYLVSIASLKTPAXXPKPVH

SEQ ID NO: 78106 - protein, 34 aa, Artificial Sequence; identical to SEQ ID NO: 3551
  GFR-binding peptide
  MOD_RES (32), (33): Xaa is C or S

SEQ ID NO: 78107 - protein, 38 aa, Artificial Sequence
  GFR-binding peptide
  MOD_RES (1), (3), (35), (36): Xaa is C or S
XGXAEVVMDQYNKLVVNNAADLYLISIASLRAPVXXSA

SEQ ID NO: 78108 - protein, 39 aa, Artificial Sequence; identical to SEQ ID NO: 24554
  GFR-binding peptide
  MOD_RES (2), (36), (37): Xaa is C or S
  MOD_RES (14), (15), (16), (17), (18): Xaa is A or G
  MOD_RES (19), (20), (21), (22): Xaa is A or G or is absent

SEQ ID NO: 78109 - protein, 39 aa, Artificial Sequence; identical to SEQ ID NO: 5501
  GFR-binding peptide
  MOD_RES (1), (35), (36): Xaa is C or S
  MOD_RES (13), (14), (15), (16), (17): Xaa is A or G
  MOD_RES (18), (19), (20), (21): Xaa is A or G or is absent

SEQ ID NO: 78110 - protein, 37 aa, Artificial Sequence; identical to SEQ ID NO: 3552
  GFR-binding peptide
  MOD_RES (2), (4), (37): Xaa is C or S

SEQ ID NO: 78111 - protein, 40 aa, Artificial Sequence; identical to SEQ ID NO: 5502
  GFR-binding peptide
  MOD_RES (1), (3), (38), (39): Xaa is C or S
  MOD_RES (16), (17), (18), (19), (20): Xaa is A or G
  MOD_RES (21), (22), (23), (24): Xaa is A or G or is absent

SEQ ID NO: 78112 - protein, 35 aa, Artificial Sequence; identical to SEQ ID NO: 5503
  GFR-binding peptide
  MOD_RES (2), (2): Xaa is C or S
  MOD_RES (14), (15), (16), (17), (18): Xaa is A or G
  MOD_RES (19), (20), (21), (22): Xaa is A or G or is absent

SEQ ID NO: 78113 - protein, 36 aa, Artificial Sequence
  GFR-binding peptide
  MOD_RES (1), (35), (36): Xaa is C or S
  MOD_RES (13), (14), (15), (16), (17): Xaa is A or G
  MOD_RES (18), (19), (20), (21): Xaa is A or G or is absent
XRDVVMGQYNKLXXXXXXXXXLYLMSIASMKTPTXX

SEQ ID NO: 78114 - protein, 41 aa, Artificial Sequence; identical to SEQ ID NO: 3555
  GFR-binding peptide
  MOD_RES (1), (3), (36), (37): Xaa is C or S

SEQ ID NO: 78115 - protein, 39 aa, Artificial Sequence; identical to SEQ ID NO: 3556
  GFR-binding peptide
  MOD_RES (2), (33), (34): Xaa is C or S

SEQ ID NO: 78116 - protein, 40 aa, Artificial Sequence; identical to SEQ ID NO: 5507
  GFR-binding peptide
  MOD_RES (1), (3), (36), (37): Xaa is C or S
  MOD_RES (14), (15), (16), (17), (18): Xaa is A or G
  MOD_RES (19), (20), (21), (22): Xaa is A or G or is absent

SEQ ID NO: 78117 - protein, 35 aa, Artificial Sequence; identical to SEQ ID NO: 24568
  GFR-binding peptide
  MOD_RES (34), (35): Xaa is C or S
  MOD_RES (12), (13), (14), (15), (16): Xaa is A or G
  MOD_RES (17), (18), (19), (20): Xaa is A or G or is absent

SEQ ID NO: 78118 - protein, 39 aa, Artificial Sequence; identical to SEQ ID NO: 3560
  GFR-binding peptide
  MOD_RES (1), (3), (37), (38): Xaa is C or S
  MOD_RES (15), (16), (17), (18), (19): Xaa is A or G
  MOD_RES (20), (21), (22), (23): Xaa is A or G or is absent

SEQ ID NO: 78119 - protein, 36 aa, Artificial Sequence; identical to SEQ ID NO: 5508
  GFR-binding peptide
  MOD_RES (2), (36): Xaa is C or S
  MOD_RES (14), (15), (16), (17), (18): Xaa is A or G
  MOD_RES (19), (20), (21), (22): Xaa is A or G or is absent

SEQ ID NO: 78120 - protein, 35 aa, Artificial Sequence; identical to SEQ ID NO: 3562
  GFR-binding peptide
  MOD_RES (2), (4): Xaa is C or S

SEQ ID NO: 78121 - protein, 36 aa, Artificial Sequence; identical to SEQ ID NO: 26616
  GFR-binding peptide
  MOD_RES (1), (33), (34): Xaa is C or S

SEQ ID NO: 78122 - protein, 36 aa, Artificial Sequence; identical to SEQ ID NO: 3563
  GFR-binding peptide
  MOD_RES (31), (32): Xaa is C or S

SEQ ID NO: 78123 - protein, 40 aa, Artificial Sequence; identical to SEQ ID NO: 12922
  GFR-binding peptide
  MOD_RES (34), (35): Xaa is C or S
  MOD_RES (12), (13), (14), (15), (16): Xaa is A or G
  MOD_RES (17), (18), (19), (20): Xaa is A or G or is absent

SEQ ID NO: 78124 - protein, 33 aa, Artificial Sequence; identical to SEQ ID NO: 10982
  GFR-binding peptide
  MOD_RES (32), (33): Xaa is C or S

SEQ ID NO: 78125 - protein, 41 aa, Artificial Sequence; identical to SEQ ID NO: 5511
  GFR-binding peptide
  MOD_RES (1), (35), (36): Xaa is C or S
  MOD_RES (13), (14), (15), (16), (17): Xaa is A or G
  MOD_RES (18), (19), (20), (21): Xaa is A or G or is absent

SEQ ID NO: 78126 - protein, 32 aa, Artificial Sequence
  GFR-binding peptide
  MOD_RES (2), (2): Xaa is C or S
GXEEVIMQYNKLLLVRGNDLYLMSIASTKVPA

SEQ ID NO: 78127 - protein, 38 aa, Artificial Sequence; identical to SEQ ID NO: 56491
  GFR-binding peptide
  MOD_RES (33), (34): Xaa is C or S
  MOD_RES (11), (12), (13), (14), (15): Xaa is A or G
  MOD_RES (16), (17), (18), (19): Xaa is A or G or is absent

SEQ ID NO: 78128 - protein, 37 aa, Artificial Sequence; identical to SEQ ID NO: 3567
  GFR-binding peptide
  MOD_RES (33), (34): Xaa is C or S
  MOD_RES (11), (12), (13), (14), (15): Xaa is A or G
  MOD_RES (16), (17), (18), (19): Xaa is A or G or is absent

SEQ ID NO: 78129 - protein, 32 aa, Artificial Sequence; identical to SEQ ID NO: 56493
  GFR-binding peptide
  MOD_RES (31), (32): Xaa is C or S

SEQ ID NO: 78130 - protein, 39 aa, Artificial Sequence; identical to SEQ ID NO: 56496
  GFR-binding peptide
  MOD_RES (1), (3), (35), (36): Xaa is C or S

SEQ ID NO: 78131 - protein, 30 aa, Artificial Sequence; identical to SEQ ID NO: 3571
  GFR-binding peptide

SEQ ID NO: 78132 - protein, 39 aa, Artificial Sequence; identical to SEQ ID NO: 5522
  GFR-binding peptide
  MOD_RES (1), (3), (36), (37): Xaa is C or S

SEQ ID NO: 78133 - protein, 38 aa, Artificial Sequence
  GFR-binding peptide
  MOD_RES (1), (33), (34): Xaa is C or S
XSEVTMNQYNKLVVNKNEDLYLISIASMKEPVXXPEPI

SEQ ID NO: 78134 - protein, 38 aa, Artificial Sequence
  GFR-binding peptide
  MOD_RES (2), (4), (36), (37): Xaa is C or S
RXGXAEVVMDQYNKLVVNNAADLYLISIASLRAPVXXS

SEQ ID NO: 78135 - protein, 38 aa, Artificial Sequence; identical to SEQ ID NO: 3573
  GFR-binding peptide
  MOD_RES (2), (4), (35), (36): Xaa is C or S

SEQ ID NO: 78136 - protein, 40 aa, Artificial Sequence; identical to SEQ ID NO: 24582
  GFR-binding peptide
  MOD_RES (2), (34), (35): Xaa is C or S

SEQ ID NO: 78137 - protein, 36 aa, Artificial Sequence; identical to SEQ ID NO: 3575
  GFR-binding peptide
  MOD_RES (2), (35), (36): Xaa is C or S
  MOD_RES (13), (14), (15), (16), (17): Xaa is A or G
  MOD_RES (18), (19), (20), (21): Xaa is A or G or is absent

SEQ ID NO: 78138 - protein, 43 aa, Artificial Sequence
  GFR-binding peptide
  MOD_RES (1), (3), (37), (38): Xaa is C or S
  MOD_RES (15), (16), (17), (18), (19): Xaa is A or G
  MOD_RES (20), (21), (22), (23): Xaa is A or G or is absent
XGXRDVVMGQYNKLXXXXXXXXXLYLMSIASMKTPTXXPGASG

SEQ ID NO: 78139 - protein, 40 aa, Artificial Sequence; identical to SEQ ID NO: 3576
  GFR-binding peptide
  MOD_RES (2), (36), (37): Xaa is C or S
  MOD_RES (14), (15), (16), (17), (18): Xaa is A or G
  MOD_RES (19), (20), (21), (22): Xaa is A or G or is absent

SEQ ID NO: 78140 - protein, 36 aa, Artificial Sequence
  GFR-binding peptide
  MOD_RES (2), (4), (35), (36): Xaa is C or S
LXGXEEVIMQYNKLLLVRGNDLYLMSIASTKVPAXX

SEQ ID NO: 78141 - protein, 42 aa, Artificial Sequence
  GFR-binding peptide
  MOD_RES (2), (4), (38), (39): Xaa is C or S
  MOD_RES (16), (17), (18), (19), (20): Xaa is A or G
  MOD_RES (21), (22), (23), (24): Xaa is A or G or is absent
RXGXAEVVMDQYNKLXXXXXXXXXLYLISIASLRAPVXXSAP

SEQ ID NO: 78142 - protein, 38 aa, Artificial Sequence; identical to SEQ ID NO: 12943
  GFR-binding peptide
  MOD_RES (2), (34), (35): Xaa is C or S

SEQ ID NO: 78143 - protein, 37 aa, Artificial Sequence; identical to SEQ ID NO: 3582
  GFR-binding peptide
  MOD_RES (34), (35): Xaa is C or S
  MOD_RES (12), (13), (14), (15), (16): Xaa is A or G
  MOD_RES (17), (18), (19), (20): Xaa is A or G or is absent

SEQ ID NO: 78144 - protein, 40 aa, Artificial Sequence
  GFR-binding peptide
  MOD_RES (34), (35): Xaa is C or S
  MOD_RES (12), (13), (14), (15), (16): Xaa is A or G
  MOD_RES (17), (18), (19), (20): Xaa is A or G or is absent
RDVVMGQYNKLXXXXXXXXXLYLMSIASMKTPTXXPGASG

SEQ ID NO: 78145 - protein, 36 aa, Artificial Sequence; identical to SEQ ID NO: 3589
  GFR-binding peptide
  MOD_RES (1), (3), (36): Xaa is C or S
  MOD_RES (14), (15), (16), (17), (18): Xaa is A or G
  MOD_RES (19), (20), (21), (22): Xaa is A or G or is absent

SEQ ID NO: 78146 - protein, 38 aa, Artificial Sequence; identical to SEQ ID NO: 5530
  GFR-binding peptide
  MOD_RES (2), (36), (37): Xaa is C or S
  MOD_RES (14), (15), (16), (17), (18): Xaa is A or G
  MOD_RES (19), (20), (21), (22): Xaa is A or G or is absent

SEQ ID NO: 78147 - protein, 39 aa, Artificial Sequence; identical to SEQ ID NO: 26642
  GFR-binding peptide
  MOD_RES (33), (34): Xaa is C or S
  MOD_RES (11), (12), (13), (14), (15): Xaa is A or G
  MOD_RES (16), (17), (18), (19): Xaa is A or G or is absent

SEQ ID NO: 78148 - protein, 39 aa, Artificial Sequence; identical to SEQ ID NO: 3590
  GFR-binding peptide
  MOD_RES (2), (34), (35): Xaa is C or S

SEQ ID NO: 78149 - protein, 41 aa, Artificial Sequence; identical to SEQ ID NO: 3593
  GFR-binding peptide
  MOD_RES (1), (3), (36), (37): Xaa is C or S

SEQ ID NO: 78150 - protein, 39 aa, Artificial Sequence; identical to SEQ ID NO: 5534
  GFR-binding peptide
  MOD_RES (2), (36), (37): Xaa is C or S
  MOD_RES (14), (15), (16), (17), (18): Xaa is A or G
  MOD_RES (19), (20), (21), (22): Xaa is A or G or is absent

SEQ ID NO: 78151 - protein, 39 aa, Artificial Sequence; identical to SEQ ID NO: 5535
  GFR-binding peptide
  MOD_RES (34), (35): Xaa is C or S
  MOD_RES (12), (13), (14), (15), (16): Xaa is A or G
  MOD_RES (17), (18), (19), (20): Xaa is A or G or is absent

SEQ ID NO: 78152 - protein, 36 aa, Artificial Sequence; identical to SEQ ID NO: 24607
  GFR-binding peptide
  MOD_RES (32), (33): Xaa is C or S

SEQ ID NO: 78153 - protein, 38 aa, Artificial Sequence; identical to SEQ ID NO: 3596
  GFR-binding peptide
  MOD_RES (2), (4), (36): Xaa is C or S

SEQ ID NO: 78154 - protein, 38 aa, Artificial Sequence; identical to SEQ ID NO: 5536
  GFR-binding peptide
  MOD_RES (2), (36), (37): Xaa is C or S
  MOD_RES (14), (15), (16), (17), (18): Xaa is A or G
  MOD_RES (19), (20), (21), (22): Xaa is A or G or is absent

SEQ ID NO: 78155 - protein, 34 aa, Artificial Sequence; identical to SEQ ID NO: 12952
  GFR-binding peptide
  MOD_RES (31), (32): Xaa is C or S

SEQ ID NO: 78156 - protein, 32 aa, Artificial Sequence; identical to SEQ ID NO: 3599
  GFR-binding peptide
  MOD_RES (31), (32): Xaa is C or S

SEQ ID NO: 78157 - protein, 35 aa, Artificial Sequence; identical to SEQ ID NO: 5540
  GFR-binding peptide
  MOD_RES (2), (2): Xaa is C or S
  MOD_RES (14), (15), (16), (17), (18): Xaa is A or G
  MOD_RES (19), (20), (21), (22): Xaa is A or G or is absent

SEQ ID NO: 78158 - protein, 42 aa, Artificial Sequence; identical to SEQ ID NO: 3601
  GFR-binding peptide
  MOD_RES (1), (3), (36), (37): Xaa is C or S
  MOD_RES (14), (15), (16), (17), (18): Xaa is A or G
  MOD_RES (19), (20), (21), (22): Xaa is A or G or is absent

SEQ ID NO: 78159 - protein, 40 aa, Artificial Sequence; identical to SEQ ID NO: 5541
  GFR-binding peptide
  MOD_RES (1), (35), (36): Xaa is C or S
  MOD_RES (13), (14), (15), (16), (17): Xaa is A or G
  MOD_RES (18), (19), (20), (21): Xaa is A or G or is absent

SEQ ID NO: 78160 - protein, 35 aa, Artificial Sequence
  GFR-binding peptide
  MOD_RES (1), (33), (34): Xaa is C or S
XSEVTMNQYNKLVVNKNEDLYLISIASMKEPVXXP

SEQ ID NO: 78161 - protein, 34 aa, Artificial Sequence; identical to SEQ ID NO: 24613
  GFR-binding peptide
  MOD_RES (1), (1): Xaa is C or S
  MOD_RES (13), (14), (15), (16), (17): Xaa is A or G
  MOD_RES (18), (19), (20), (21): Xaa is A or G or is absent

SEQ ID NO: 78162 - protein, 36 aa, Artificial Sequence; identical to SEQ ID NO: 56524
  GFR-binding peptide
  MOD_RES (1), (34), (35): Xaa is C or S
  MOD_RES (12), (13), (14), (15), (16): Xaa is A or G
  MOD_RES (17), (18), (19), (20): Xaa is A or G or is absent

SEQ ID NO: 78163 - protein, 40 aa, Artificial Sequence; identical to SEQ ID NO: 5544
  GFR-binding peptide
  MOD_RES (1), (3), (37), (38): Xaa is C or S
  MOD_RES (15), (16), (17), (18), (19): Xaa is A or G
  MOD_RES (20), (21), (22), (23): Xaa is A or G or is absent

SEQ ID NO: 78164 - protein, 34 aa, Artificial Sequence; identical to SEQ ID NO: 24615
  GFR-binding peptide
  MOD_RES (34), (34): Xaa is C or S
  MOD_RES (12), (13), (14), (15), (16): Xaa is A or G
  MOD_RES (17), (18), (19), (20): Xaa is A or G or is absent

SEQ ID NO: 78165 - protein, 38 aa, Artificial Sequence; identical to SEQ ID NO: 3607
  GFR-binding peptide
  MOD_RES (1), (34), (35): Xaa is C or S

SEQ ID NO: 78166 - protein, 31 aa, Artificial Sequence; identical to SEQ ID NO: 5546
  GFR-binding peptide

SEQ ID NO: 78167 - protein, 36 aa, Artificial Sequence; identical to SEQ ID NO: 5547
  GFR-binding peptide
  MOD_RES (1), (3), (36): Xaa is C or S
  MOD_RES (14), (15), (16), (17), (18): Xaa is A or G
  MOD_RES (19), (20), (21), (22): Xaa is A or G or is absent

SEQ ID NO: 78168 - protein, 39 aa, Artificial Sequence; identical to SEQ ID NO: 3609
  GFR-binding peptide
  MOD_RES (1), (3), (34), (35): Xaa is C or S

SEQ ID NO: 78169 - protein, 34 aa, Artificial Sequence; identical to SEQ ID NO: 5551
  GFR-binding peptide
  MOD_RES (2), (4): Xaa is C or S

SEQ ID NO: 78170 - protein, 36 aa, Artificial Sequence; identical to SEQ ID NO: 26665
  GFR-binding peptide
  MOD_RES (32), (33): Xaa is C or S

SEQ ID NO: 78171 - protein, 37 aa, Artificial Sequence; identical to SEQ ID NO: 26666
  GFR-binding peptide
  MOD_RES (2), (4): Xaa is C or S
  MOD_RES (16), (17), (18), (19), (20): Xaa is A or G
  MOD_RES (21), (22), (23), (24): Xaa is A or G or is absent

SEQ ID NO: 78172 - protein, 38 aa, Artificial Sequence; identical to SEQ ID NO: 11027
  GFR-binding peptide
  MOD_RES (2), (34), (35): Xaa is C or S

SEQ ID NO: 78173 - protein, 33 aa, Artificial Sequence
  GFR-binding peptide
  MOD_RES (33), (33): Xaa is C or S
  MOD_RES (11), (12), (13), (14), (15): Xaa is A or G
  MOD_RES (16), (17), (18), (19): Xaa is A or G or is absent
EEVIMQYNKLXXXXXXXXXLYLMSIASTKVPAX

SEQ ID NO: 78174 - protein, 34 aa, Artificial Sequence; identical to SEQ ID NO: 3615
  GFR-binding peptide
  MOD_RES (31), (32): Xaa is C or S

SEQ ID NO: 78175 - protein, 32 aa, Artificial Sequence; identical to SEQ ID NO: 26668
  GFR-binding peptide
  MOD_RES (32), (32): Xaa is C or S

SEQ ID NO: 78176 - protein, 34 aa, Artificial Sequence
  GFR-binding peptide
  MOD_RES (32), (33): Xaa is C or S
SEVTMNQYNKLVVNKNEDLYLISIASMKEPVXXP

SEQ ID NO: 78177 - protein, 36 aa, Artificial Sequence; identical to SEQ ID NO: 61180
  GFR-binding peptide
  MOD_RES (34), (35): Xaa is C or S
  MOD_RES (12), (13), (14), (15), (16): Xaa is A or G
  MOD_RES (17), (18), (19), (20): Xaa is A or G or is absent

SEQ ID NO: 78178 - protein, 38 aa, Artificial Sequence; identical to SEQ ID NO: 24625
  GFR-binding peptide
  MOD_RES (1), (3), (37), (38): Xaa is C or S
  MOD_RES (15), (16), (17), (18), (19): Xaa is A or G
  MOD_RES (20), (21), (22), (23): Xaa is A or G or is absent

SEQ ID NO: 78179 - protein, 35 aa, Artificial Sequence
  GFR-binding peptide
  MOD_RES (1), (34), (35): Xaa is C or S
  MOD_RES (12), (13), (14), (15), (16): Xaa is A or G
  MOD_RES (17), (18), (19), (20): Xaa is A or G or is absent
XEEVIMQYNKLXXXXXXXXXLYLMSIASTKVPAXX

SEQ ID NO: 78180 - protein, 34 aa, Artificial Sequence
  GFR-binding peptide
  MOD_RES (32), (33): Xaa is C or S
RDVVMGQYNKLIIQQKDNLYLMSIASMKTPTXXP

SEQ ID NO: 78181 - protein, 38 aa, Artificial Sequence; identical to SEQ ID NO: 3618
  GFR-binding peptide
  MOD_RES (33), (34): Xaa is C or S
  MOD_RES (11), (12), (13), (14), (15): Xaa is A or G
  MOD_RES (16), (17), (18), (19): Xaa is A or G or is absent

SEQ ID NO: 78182 - protein, 32 aa, Artificial Sequence
  GFR-binding peptide
  MOD_RES (11), (12), (13), (14), (15): Xaa is A or G
  MOD_RES (16), (17), (18), (19): Xaa is A or G or is absent
EVVMDQYNKLXXXXXXXXXLYLISIASLRAPV

SEQ ID NO: 78183 - protein, 37 aa, Artificial Sequence
  GFR-binding peptide
  MOD_RES (1), (33), (34): Xaa is C or S
XAEVVMDQYNKLVVNNAADLYLISIASLRAPVXXSAP

SEQ ID NO: 78184 - protein, 37 aa, Artificial Sequence; identical to SEQ ID NO: 11036
  GFR-binding peptide
  MOD_RES (1), (35), (36): Xaa is C or S
  MOD_RES (13), (14), (15), (16), (17): Xaa is A or G
  MOD_RES (18), (19), (20), (21): Xaa is A or G or is absent

SEQ ID NO: 78185 - protein, 42 aa, Artificial Sequence; identical to SEQ ID NO: 5559
  GFR-binding peptide
  MOD_RES (2), (4), (39), (40): Xaa is C or S
  MOD_RES (17), (18), (19), (20), (21): Xaa is A or G
  MOD_RES (22), (23), (24), (25): Xaa is A or G or is absent

SEQ ID NO: 78186 - protein, 40 aa, Artificial Sequence; identical to SEQ ID NO: 3621
  GFR-binding peptide
  MOD_RES (2), (4), (37), (38): Xaa is C or S
  MOD_RES (15), (16), (17), (18), (19): Xaa is A or G
  MOD_RES (20), (21), (22), (23): Xaa is A or G or is absent

SEQ ID NO: 78187 - protein, 36 aa, Artificial Sequence; identical to SEQ ID NO: 5562
  GFR-binding peptide
  MOD_RES (31), (32): Xaa is C or S

SEQ ID NO: 78188 - protein, 36 aa, Artificial Sequence; identical to SEQ ID NO: 24629
  GFR-binding peptide
  MOD_RES (31), (32): Xaa is C or S

SEQ ID NO: 78189 - protein, 36 aa, Artificial Sequence; identical to SEQ ID NO: 5563
  GFR-binding peptide
  MOD_RES (2), (36): Xaa is C or S
  MOD_RES (14), (15), (16), (17), (18): Xaa is A or G
  MOD_RES (19), (20), (21), (22): Xaa is A or G or is absent

SEQ ID NO: 78190 - protein, 37 aa, Artificial Sequence; identical to SEQ ID NO: 56551
  GFR-binding peptide
  MOD_RES (2), (4), (35), (36): Xaa is C or S

SEQ ID NO: 78191 - protein, 35 aa, Artificial Sequence; identical to SEQ ID NO: 3622
  GFR-binding peptide
  MOD_RES (2), (35): Xaa is C or S

SEQ ID NO: 78192 - protein, 38 aa, Artificial Sequence; identical to SEQ ID NO: 5565
  GFR-binding peptide
  MOD_RES (2), (37), (38): Xaa is C or S
  MOD_RES (15), (16), (17), (18), (19): Xaa is A or G
  MOD_RES (20), (21), (22), (23): Xaa is A or G or is absent

SEQ ID NO: 78193 - protein, 33 aa, Artificial Sequence; identical to SEQ ID NO: 3626
  GFR-binding peptide
  MOD_RES (1), (33): Xaa is C or S

SEQ ID NO: 78194 - protein, 34 aa, Artificial Sequence
  GFR-binding peptide
  MOD_RES (1), (1): Xaa is C or S
  MOD_RES (13), (14), (15), (16), (17): Xaa is A or G
  MOD_RES (18), (19), (20), (21): Xaa is A or G or is absent
XAEVVMDQYNKLXXXXXXXXXLYLISIASLRAPV

SEQ ID NO: 78195 - protein, 43 aa, Artificial Sequence; identical to SEQ ID NO: 3628
  GFR-binding peptide
  MOD_RES (1), (3), (37), (38): Xaa is C or S
  MOD_RES (15), (16), (17), (18), (19): Xaa is A or G
  MOD_RES (20), (21), (22), (23): Xaa is A or G or is absent

SEQ ID NO: 78196 - protein, 36 aa, Artificial Sequence; identical to SEQ ID NO: 5568
  GFR-binding peptide
  MOD_RES (34), (35): Xaa is C or S
  MOD_RES (12), (13), (14), (15), (16): Xaa is A or G
  MOD_RES (17), (18), (19), (20): Xaa is A or G or is absent

SEQ ID NO: 78197 - protein, 39 aa, Artificial Sequence
  GFR-binding peptide
  MOD_RES (1), (33), (34): Xaa is C or S
XSEVTMNQYNKLVVNKNEDLYLISIASMKEPVXXPEPIG

SEQ ID NO: 78198 - protein, 34 aa, Artificial Sequence
  GFR-binding peptide
  MOD_RES (31), (32): Xaa is C or S
EEVIMQYNKLLLVRGNDLYLMSIASTKVPAXXTS

SEQ ID NO: 78199 - protein, 38 aa, Artificial Sequence; identical to SEQ ID NO: 3630
  GFR-binding peptide
  MOD_RES (33), (34): Xaa is C or S
  MOD_RES (11), (12), (13), (14), (15): Xaa is A or G
  MOD_RES (16), (17), (18), (19): Xaa is A or G or is absent

SEQ ID NO: 78200 - protein, 39 aa, Artificial Sequence
  GFR-binding peptide
  MOD_RES (1), (3), (35), (36): Xaa is C or S
XGXRDVVMGQYNKLIIQQKDNLYLMSIASMKTPTXXPGA

SEQ ID NO: 78201 - protein, 34 aa, Artificial Sequence; identical to SEQ ID NO: 3631
  GFR-binding peptide
  MOD_RES (1), (33), (34): Xaa is C or S

SEQ ID NO: 78202 - protein, 38 aa, Artificial Sequence; identical to SEQ ID NO: 5570
  GFR-binding peptide
  MOD_RES (33), (33): Xaa is C or S
  MOD_RES (11), (12), (13), (14), (15): Xaa is A or G
  MOD_RES (16), (17), (18), (19): Xaa is A or G or is absent

SEQ ID NO: 78203 - protein, 39 aa, Artificial Sequence; identical to SEQ ID NO: 3632
  GFR-binding peptide
  MOD_RES (33), (34): Xaa is C or S

SEQ ID NO: 78204 - protein, 33 aa, Artificial Sequence; identical to SEQ ID NO: 5571
  GFR-binding peptide
  MOD_RES (12), (13), (14), (15), (16): Xaa is A or G
  MOD_RES (17), (18), (19), (20): Xaa is A or G or is absent

SEQ ID NO: 78205 - protein, 35 aa, Artificial Sequence; identical to SEQ ID NO: 5572
  GFR-binding peptide
  MOD_RES (2), (33), (34): Xaa is C or S

SEQ ID NO: 78206 - protein, 36 aa, Artificial Sequence; identical to SEQ ID NO: 5573
  GFR-binding peptide
  MOD_RES (34), (35): Xaa is C or S
  MOD_RES (12), (13), (14), (15), (16): Xaa is A or G
  MOD_RES (17), (18), (19), (20): Xaa is A or G or is absent

SEQ ID NO: 78207 - protein, 42 aa, Artificial Sequence; identical to SEQ ID NO: 5575
  GFR-binding peptide
  MOD_RES (1), (3), (37), (38): Xaa is C or S
  MOD_RES (15), (16), (17), (18), (19): Xaa is A or G
  MOD_RES (20), (21), (22), (23): Xaa is A or G or is absent

SEQ ID NO: 78208 - protein, 37 aa, Artificial Sequence
  GFR-binding peptide
  MOD_RES (31), (32): Xaa is C or S
EEVIMQYNKLLLVRGNDLYLMSIASTKVPAXXTSPVR

SEQ ID NO: 78209 - protein, 38 aa, Artificial Sequence; identical to SEQ ID NO: 5578
  GFR-binding peptide
  MOD_RES (1), (3), (37), (38): Xaa is C or S
  MOD_RES (15), (16), (17), (18), (19): Xaa is A or G
  MOD_RES (20), (21), (22), (23): Xaa is A or G or is absent

SEQ ID NO: 78210 - protein, 35 aa, Artificial Sequence; identical to SEQ ID NO: 3637
  GFR-binding peptide
  MOD_RES (2), (35): Xaa is C or S
  MOD_RES (13), (14), (15), (16), (17): Xaa is A or G
  MOD_RES (18), (19), (20), (21): Xaa is A or G or is absent

SEQ ID NO: 78211 - protein, 36 aa, Artificial Sequence; identical to SEQ ID NO: 3639
  GFR-binding peptide
  MOD_RES (2), (4), (35), (36): Xaa is C or S

SEQ ID NO: 78212 - protein, 40 aa, Artificial Sequence; identical to SEQ ID NO: 56579
  GFR-binding peptide
  MOD_RES (2), (36), (37): Xaa is C or S
  MOD_RES (14), (15), (16), (17), (18): Xaa is A or G
  MOD_RES (19), (20), (21), (22): Xaa is A or G or is absent

SEQ ID NO: 78213 - protein, 36 aa, Artificial Sequence; identical to SEQ ID NO: 3640
  GFR-binding peptide
  MOD_RES (1), (35), (36): Xaa is C or S
  MOD_RES (13), (14), (15), (16), (17): Xaa is A or G
  MOD_RES (18), (19), (20), (21): Xaa is A or G or is absent

SEQ ID NO: 78214 - protein, 31 aa, Artificial Sequence; identical to SEQ ID NO: 5582
  GFR-binding peptide

SEQ ID NO: 78215 - protein, 32 aa, Artificial Sequence; identical to SEQ ID NO: 5583
  GFR-binding peptide
  MOD_RES (31), (32): Xaa is C or S

SEQ ID NO: 78216 - protein, 35 aa, Artificial Sequence; identical to SEQ ID NO: 5584
  GFR-binding peptide
  MOD_RES (33), (34): Xaa is C or S
  MOD_RES (11), (12), (13), (14), (15): Xaa is A or G
  MOD_RES (16), (17), (18), (19): Xaa is A or G or is absent

SEQ ID NO: 78217 - protein, 37 aa, Artificial Sequence; identical to SEQ ID NO: 5586
  GFR-binding peptide
  MOD_RES (2), (35), (36): Xaa is C or S
  MOD_RES (13), (14), (15), (16), (17): Xaa is A or G
  MOD_RES (18), (19), (20), (21): Xaa is A or G or is absent

SEQ ID NO: 78218 - protein, 39 aa, Artificial Sequence
  GFR-binding peptide
  MOD_RES (1), (35), (36): Xaa is C or S
  MOD_RES (13), (14), (15), (16), (17): Xaa is A or G
  MOD_RES (18), (19), (20), (21): Xaa is A or G or is absent
XESVAMGQYNKLXXXXXXXXXLYLISIASLKTPVXXAKS

SEQ ID NO: 78219 - protein, 37 aa, Artificial Sequence; identical to SEQ ID NO: 5587
  GFR-binding peptide
  MOD_RES (33), (34): Xaa is C or S

SEQ ID NO: 78220 - protein, 39 aa, Artificial Sequence
  GFR-binding peptide
  MOD_RES (2), (34), (35): Xaa is C or S
AXSEVTMNQYNKLVVNKNEDLYLISIASMKEPVXXPEPI

SEQ ID NO: 78221 - protein, 32 aa, Artificial Sequence; identical to SEQ ID NO: 3643
  GFR-binding peptide
  MOD_RES (1), (1): Xaa is C or S

SEQ ID NO: 78222 - protein, 33 aa, Artificial Sequence; identical to SEQ ID NO: 5588
  GFR-binding peptide
  MOD_RES (12), (13), (14), (15), (16): Xaa is A or G
  MOD_RES (17), (18), (19), (20): Xaa is A or G or is absent

SEQ ID NO: 78223 - protein, 37 aa, Artificial Sequence; identical to SEQ ID NO: 5589
  GFR-binding peptide
  MOD_RES (1), (3), (36), (37): Xaa is C or S
  MOD_RES (14), (15), (16), (17), (18): Xaa is A or G
  MOD_RES (19), (20), (21), (22): Xaa is A or G or is absent

SEQ ID NO: 78224 - protein, 34 aa, Artificial Sequence; identical to SEQ ID NO: 56582
  GFR-binding peptide
  MOD_RES (2), (34): Xaa is C or S

SEQ ID NO: 78225 - protein, 38 aa, Artificial Sequence; identical to SEQ ID NO: 3644
  GFR-binding peptide
  MOD_RES (1), (33), (34): Xaa is C or S

SEQ ID NO: 78226 - protein, 37 aa, Artificial Sequence; identical to SEQ ID NO: 3645
  GFR-binding peptide
  MOD_RES (31), (32): Xaa is C or S

SEQ ID NO: 78227 - protein, 39 aa, Artificial Sequence; identical to SEQ ID NO: 5593
  GFR-binding peptide
  MOD_RES (1), (3), (37), (38): Xaa is C or S
  MOD_RES (15), (16), (17), (18), (19): Xaa is A or G
  MOD_RES (20), (21), (22), (23): Xaa is A or G or is absent

SEQ ID NO: 78228 - protein, 38 aa, Artificial Sequence; identical to SEQ ID NO: 3648
  GFR-binding peptide
  MOD_RES (2), (36), (37): Xaa is C or S
  MOD_RES (14), (15), (16), (17), (18): Xaa is A or G
  MOD_RES (19), (20), (21), (22): Xaa is A or G or is absent

SEQ ID NO: 78229 - protein, 37 aa, Artificial Sequence; identical to SEQ ID NO: 56588
  GFR-binding peptide
  MOD_RES (2), (33), (34): Xaa is C or S

SEQ ID NO: 78230 - protein, 37 aa, Artificial Sequence; identical to SEQ ID NO: 3649
  GFR-binding peptide
  MOD_RES (1), (34), (35): Xaa is C or S
  MOD_RES (12), (13), (14), (15), (16): Xaa is A or G
  MOD_RES (17), (18), (19), (20): Xaa is A or G or is absent

SEQ ID NO: 78231 - protein, 39 aa, Artificial Sequence
  GFR-binding peptide
  MOD_RES (2), (4), (36), (37): Xaa is C or S
SXGXRDVVMGQYNKLIIQQKDNLYLMSIASMKTPTXXPG

SEQ ID NO: 78232 - protein, 34 aa, Artificial Sequence; identical to SEQ ID NO: 5595
  GFR-binding peptide
  MOD_RES (1), (33), (34): Xaa is C or S

SEQ ID NO: 78233 - protein, 44 aa, Artificial Sequence
  GFR-binding peptide
  MOD_RES (2), (4), (38), (39): Xaa is C or S
  MOD_RES (16), (17), (18), (19), (20): Xaa is A or G
  MOD_RES (21), (22), (23), (24): Xaa is A or G or is absent
RXGXAEVVMDQYNKLXXXXXXXXXLYLISIASLRAPVXXSAPAA

SEQ ID NO: 78234 - protein, 37 aa, Artificial Sequence; identical to SEQ ID NO: 5596
  GFR-binding peptide
  MOD_RES (1), (34), (35): Xaa is C or S
  MOD_RES (12), (13), (14), (15), (16): Xaa is A or G
  MOD_RES (17), (18), (19), (20): Xaa is A or G or is absent

SEQ ID NO: 78235 - protein, 31 aa, Artificial Sequence; identical to SEQ ID NO: 3652
  GFR-binding peptide

SEQ ID NO: 78236 - protein, 34 aa, Artificial Sequence; identical to SEQ ID NO: 13009
  GFR-binding peptide
  MOD_RES (2), (34): Xaa is C or S

SEQ ID NO: 78237 - protein, 41 aa, Artificial Sequence; identical to SEQ ID NO: 5597
  GFR-binding peptide
  MOD_RES (1), (3), (38), (39): Xaa is C or S
  MOD_RES (16), (17), (18), (19), (20): Xaa is A or G
  MOD_RES (21), (22), (23), (24): Xaa is A or G or is absent

SEQ ID NO: 78238 - protein, 37 aa, Artificial Sequence; identical to SEQ ID NO: 3653
  GFR-binding peptide
  MOD_RES (2), (34), (35): Xaa is C or S

SEQ ID NO: 78239 - protein, 34 aa, Artificial Sequence
  GFR-binding peptide
  MOD_RES (34), (34): Xaa is C or S
  MOD_RES (12), (13), (14), (15), (16): Xaa is A or G
  MOD_RES (17), (18), (19), (20): Xaa is A or G or is absent
ESVAMGQYNKLXXXXXXXXXLYLISIASLKTPVX

SEQ ID NO: 78240 - protein, 37 aa, Artificial Sequence; identical to SEQ ID NO: 62954
  GFR-binding peptide
  MOD_RES (33), (34): Xaa is C or S
  MOD_RES (11), (12), (13), (14), (15): Xaa is A or G
  MOD_RES (16), (17), (18), (19): Xaa is A or G or is absent

SEQ ID NO: 78241 - protein, 36 aa, Artificial Sequence
  GFR-binding peptide
  MOD_RES (1), (3): Xaa is C or S
  MOD_RES (15), (16), (17), (18), (19): Xaa is A or G
  MOD_RES (20), (21), (22), (23): Xaa is A or G or is absent
XGXAEVVMDQYNKLXXXXXXXXXLYLISIASLRAPV

SEQ ID NO: 78242 - protein, 38 aa, Artificial Sequence
  GFR-binding peptide
  MOD_RES (2), (36), (37): Xaa is C or S
  MOD_RES (14), (15), (16), (17), (18): Xaa is A or G
  MOD_RES (19), (20), (21), (22): Xaa is A or G or is absent
AXSEVTMNQYNKLXXXXXXXXXLYLISIASMKEPVXXP

SEQ ID NO: 78243 - protein, 38 aa, Artificial Sequence
  GFR-binding peptide
  MOD_RES (2), (4), (38): Xaa is C or S
  MOD_RES (16), (17), (18), (19), (20): Xaa is A or G
  MOD_RES (21), (22), (23), (24): Xaa is A or G or is absent
RXGXESVAMGQYNKLXXXXXXXXXLYLISIASLKTPVX

SEQ ID NO: 78244 - protein, 34 aa, Artificial Sequence; identical to SEQ ID NO: 56598
  GFR-binding peptide
  MOD_RES (2), (33), (34): Xaa is C or S

SEQ ID NO: 78245 - protein, 39 aa, Artificial Sequence; identical to SEQ ID NO: 5604
  GFR-binding peptide
  MOD_RES (33), (34): Xaa is C or S
  MOD_RES (11), (12), (13), (14), (15): Xaa is A or G
  MOD_RES (16), (17), (18), (19): Xaa is A or G or is absent

SEQ ID NO: 78246 - protein, 36 aa, Artificial Sequence; identical to SEQ ID NO: 3658
  GFR-binding peptide
  MOD_RES (32), (33): Xaa is C or S

SEQ ID NO: 78247 - protein, 33 aa, Artificial Sequence; identical to SEQ ID NO: 56602
  GFR-binding peptide
  MOD_RES (32), (33): Xaa is C or S

SEQ ID NO: 78248 - protein, 36 aa, Artificial Sequence; identical to SEQ ID NO: 5605
  GFR-binding peptide
  MOD_RES (1), (3), (36): Xaa is C or S
  MOD_RES (14), (15), (16), (17), (18): Xaa is A or G
  MOD_RES (19), (20), (21), (22): Xaa is A or G or is absent

SEQ ID NO: 78249 - protein, 39 aa, Artificial Sequence; identical to SEQ ID NO: 13023
  GFR-binding peptide
  MOD_RES (1), (3), (37), (38): Xaa is C or S
  MOD_RES (15), (16), (17), (18), (19): Xaa is A or G
  MOD_RES (20), (21), (22), (23): Xaa is A or G or is absent

SEQ ID NO: 78250 - protein, 38 aa, Artificial Sequence; identical to SEQ ID NO: 5607
  GFR-binding peptide
  MOD_RES (2), (33), (34): Xaa is C or S

SEQ ID NO: 78251 - protein, 36 aa, Artificial Sequence; identical to SEQ ID NO: 56604
  GFR-binding peptide
  MOD_RES (32), (33): Xaa is C or S

SEQ ID NO: 78252 - protein, 35 aa, Artificial Sequence; identical to SEQ ID NO: 59452
  GFR-binding peptide
  MOD_RES (31), (32): Xaa is C or S

SEQ ID NO: 78253 - protein, 41 aa, Artificial Sequence; identical to SEQ ID NO: 26720
  GFR-binding peptide
  MOD_RES (1), (35), (36): Xaa is C or S
  MOD_RES (13), (14), (15), (16), (17): Xaa is A or G
  MOD_RES (18), (19), (20), (21): Xaa is A or G or is absent

SEQ ID NO: 78254 - protein, 36 aa, Artificial Sequence; identical to SEQ ID NO: 3661
  GFR-binding peptide
  MOD_RES (1), (3), (35), (36): Xaa is C or S

SEQ ID NO: 78255 - protein, 34 aa, Artificial Sequence; identical to SEQ ID NO: 3662
  GFR-binding peptide
  MOD_RES (33), (34): Xaa is C or S
  MOD_RES (11), (12), (13), (14), (15): Xaa is A or G
  MOD_RES (16), (17), (18), (19): Xaa is A or G or is absent

SEQ ID NO: 78256 - protein, 37 aa, Artificial Sequence; identical to SEQ ID NO: 3663
  GFR-binding peptide
  MOD_RES (2), (4), (37): Xaa is C or S
  MOD_RES (15), (16), (17), (18), (19): Xaa is A or G
  MOD_RES (20), (21), (22), (23): Xaa is A or G or is absent

SEQ ID NO: 78257 - protein, 36 aa, Artificial Sequence; identical to SEQ ID NO: 5609
  GFR-binding peptide
  MOD_RES (2), (4), (36): Xaa is C or S

SEQ ID NO: 78258 - protein, 40 aa, Artificial Sequence; identical to SEQ ID NO: 24684
  GFR-binding peptide
  MOD_RES (2), (34), (35): Xaa is C or S

SEQ ID NO: 78259 - protein, 39 aa, Artificial Sequence; identical to SEQ ID NO: 56614
  GFR-binding peptide
  MOD_RES (34), (35): Xaa is C or S
  MOD_RES (12), (13), (14), (15), (16): Xaa is A or G
  MOD_RES (17), (18), (19), (20): Xaa is A or G or is absent

SEQ ID NO: 78260 - protein, 38 aa, Artificial Sequence
  GFR-binding peptide
  MOD_RES (32), (33): Xaa is C or S
ESVAMGQYNKLYTVVGKDLYLISIASLKTPVXXAKSAK

SEQ ID NO: 78261 - protein, 37 aa, Artificial Sequence; identical to SEQ ID NO: 5610
  GFR-binding peptide
  MOD_RES (2), (33), (34): Xaa is C or S

SEQ ID NO: 78262 - protein, 34 aa, Artificial Sequence; identical to SEQ ID NO: 5613
  GFR-binding peptide
  MOD_RES (31), (32): Xaa is C or S

SEQ ID NO: 78263 - protein, 37 aa, Artificial Sequence; identical to SEQ ID NO: 5614
  GFR-binding peptide
  MOD_RES (31), (32): Xaa is C or S

SEQ ID NO: 78264 - protein, 41 aa, Artificial Sequence; identical to SEQ ID NO: 3668
  GFR-binding peptide
  MOD_RES (1), (3), (35), (36): Xaa is C or S

SEQ ID NO: 78265 - protein, 34 aa, Artificial Sequence; identical to SEQ ID NO: 5615
  GFR-binding peptide
  MOD_RES (1), (1): Xaa is C or S
  MOD_RES (13), (14), (15), (16), (17): Xaa is A or G
  MOD_RES (18), (19), (20), (21): Xaa is A or G or is absent

SEQ ID NO: 78266 - protein, 41 aa, Artificial Sequence; identical to SEQ ID NO: 5616
  GFR-binding peptide
  MOD_RES (1), (35), (36): Xaa is C or S
  MOD_RES (13), (14), (15), (16), (17): Xaa is A or G
  MOD_RES (18), (19), (20), (21): Xaa is A or G or is absent

SEQ ID NO: 78267 - protein, 40 aa, Artificial Sequence; identical to SEQ ID NO: 5617
  GFR-binding peptide
  MOD_RES (2), (4), (36), (37): Xaa is C or S

SEQ ID NO: 78268 - protein, 37 aa, Artificial Sequence; identical to SEQ ID NO: 5618
  GFR-binding peptide
  MOD_RES (33), (34): Xaa is C or S
  MOD_RES (11), (12), (13), (14), (15): Xaa is A or G
  MOD_RES (16), (17), (18), (19): Xaa is A or G or is absent

SEQ ID NO: 78269 - protein, 35 aa, Artificial Sequence; identical to SEQ ID NO: 3671
  GFR-binding peptide
  MOD_RES (2), (34), (35): Xaa is C or S

SEQ ID NO: 78270 - protein, 39 aa, Artificial Sequence; identical to SEQ ID NO: 3674
  GFR-binding peptide
  MOD_RES (1), (35), (36): Xaa is C or S
  MOD_RES (13), (14), (15), (16), (17): Xaa is A or G
  MOD_RES (18), (19), (20), (21): Xaa is A or G or is absent

SEQ ID NO: 78271 - protein, 40 aa, Artificial Sequence; identical to SEQ ID NO: 3675
  GFR-binding peptide
  MOD_RES (1), (35), (36): Xaa is C or S
  MOD_RES (13), (14), (15), (16), (17): Xaa is A or G
  MOD_RES (18), (19), (20), (21): Xaa is A or G or is absent

SEQ ID NO: 78272 - protein, 32 aa, Artificial Sequence; identical to SEQ ID NO: 26737
  GFR-binding peptide
  MOD_RES (11), (12), (13), (14), (15): Xaa is A or G
  MOD_RES (16), (17), (18), (19): Xaa is A or G or is absent

SEQ ID NO: 78273 - protein, 41 aa, Artificial Sequence
  GFR-binding peptide
  MOD_RES (1), (35), (36): Xaa is C or S
  MOD_RES (13), (14), (15), (16), (17): Xaa is A or G
  MOD_RES (18), (19), (20), (21): Xaa is A or G or is absent
XSRVVMNQYNKLXXXXXXXXXLYLVSIASLKTPAXXPKPVH

SEQ ID NO: 78274 - protein, 35 aa, Artificial Sequence; identical to SEQ ID NO: 13037
  GFR-binding peptide
  MOD_RES (1), (33), (34): Xaa is C or S

SEQ ID NO: 78275 - protein, 34 aa, Artificial Sequence; identical to SEQ ID NO: 3682
  GFR-binding peptide
  MOD_RES (1), (32), (33): Xaa is C or S

SEQ ID NO: 78276 - protein, 34 aa, Artificial Sequence
  GFR-binding peptide
  MOD_RES (33), (34): Xaa is C or S
  MOD_RES (11), (12), (13), (14), (15): Xaa is A or G
  MOD_RES (16), (17), (18), (19): Xaa is A or G or is absent
EVTMNQYNKLXXXXXXXXXLYLISIASMKEPVXX

SEQ ID NO: 78277 - protein, 33 aa, Artificial Sequence; identical to SEQ ID NO: 56621
  GFR-binding peptide
  MOD_RES (1), (33): Xaa is C or S

SEQ ID NO: 78278 - protein, 36 aa, Artificial Sequence; identical to SEQ ID NO: 24701
  GFR-binding peptide
  MOD_RES (33), (34): Xaa is C or S
  MOD_RES (11), (12), (13), (14), (15): Xaa is A or G
  MOD_RES (16), (17), (18), (19): Xaa is A or G or is absent

SEQ ID NO: 78279 - protein, 39 aa, Artificial Sequence
  GFR-binding peptide
  MOD_RES (33), (34): Xaa is C or S
  MOD_RES (11), (12), (13), (14), (15): Xaa is A or G
  MOD_RES (16), (17), (18), (19): Xaa is A or G or is absent
DVVMGQYNKLXXXXXXXXXLYLMSIASMKTPTXXPGASG

SEQ ID NO: 78280 - protein, 35 aa, Artificial Sequence; identical to SEQ ID NO: 3685
  GFR-binding peptide
  MOD_RES (33), (34): Xaa is C or S
  MOD_RES (11), (12), (13), (14), (15): Xaa is A or G
  MOD_RES (16), (17), (18), (19): Xaa is A or G or is absent

SEQ ID NO: 78281 - protein, 35 aa, Artificial Sequence
  GFR-binding peptide
  MOD_RES (1), (35): Xaa is C or S
  MOD_RES (13), (14), (15), (16), (17): Xaa is A or G
  MOD_RES (18), (19), (20), (21): Xaa is A or G or is absent
XRDVVMGQYNKLXXXXXXXXXLYLMSIASMKTPTX

SEQ ID NO: 78282 - protein, 36 aa, Artificial Sequence; identical to SEQ ID NO: 5626
  GFR-binding peptide
  MOD_RES (34), (35): Xaa is C or S
  MOD_RES (12), (13), (14), (15), (16): Xaa is A or G
  MOD_RES (17), (18), (19), (20): Xaa is A or G or is absent

SEQ ID NO: 78283 - protein, 33 aa, Artificial Sequence; identical to SEQ ID NO: 26745
  GFR-binding peptide
  MOD_RES (33), (33): Xaa is C or S
  MOD_RES (11), (12), (13), (14), (15): Xaa is A or G
  MOD_RES (16), (17), (18), (19): Xaa is A or G or is absent

SEQ ID NO: 78284 - protein, 41 aa, Artificial Sequence; identical to SEQ ID NO: 5629
  GFR-binding peptide
  MOD_RES (2), (4), (35), (36): Xaa is C or S

SEQ ID NO: 78285 - protein, 38 aa, Artificial Sequence; identical to SEQ ID NO: 3687
  GFR-binding peptide
  MOD_RES (1), (3), (37), (38): Xaa is C or S
  MOD_RES (15), (16), (17), (18), (19): Xaa is A or G
  MOD_RES (20), (21), (22), (23): Xaa is A or G or is absent

SEQ ID NO: 78286 - protein, 37 aa, Artificial Sequence
  GFR-binding peptide
  MOD_RES (1), (35), (36): Xaa is C or S
  MOD_RES (13), (14), (15), (16), (17): Xaa is A or G
  MOD_RES (18), (19), (20), (21): Xaa is A or G or is absent
XRDVVMGQYNKLXXXXXXXXXLYLMSIASMKTPTXXP

SEQ ID NO: 78287 - protein, 39 aa, Artificial Sequence; identical to SEQ ID NO: 56629
  GFR-binding peptide
  MOD_RES (2), (4), (36), (37): Xaa is C or S

SEQ ID NO: 78288 - protein, 39 aa, Artificial Sequence; identical to SEQ ID NO: 5632
  GFR-binding peptide
  MOD_RES (2), (4), (35), (36): Xaa is C or S

SEQ ID NO: 78289 - protein, 36 aa, Artificial Sequence; identical to SEQ ID NO: 5635
  GFR-binding peptide
  MOD_RES (1), (3), (35), (36): Xaa is C or S

SEQ ID NO: 78290 - protein, 38 aa, Artificial Sequence; identical to SEQ ID NO: 3688
  GFR-binding peptide
  MOD_RES (2), (35), (36): Xaa is C or S
  MOD_RES (13), (14), (15), (16), (17): Xaa is A or G
  MOD_RES (18), (19), (20), (21): Xaa is A or G or is absent

SEQ ID NO: 78291 - protein, 41 aa, Artificial Sequence; identical to SEQ ID NO: 3689
  GFR-binding peptide
  MOD_RES (2), (4), (35), (36): Xaa is C or S

SEQ ID NO: 78292 - protein, 40 aa, Artificial Sequence; identical to SEQ ID NO: 3691
  GFR-binding peptide
  MOD_RES (1), (3), (34), (35): Xaa is C or S

SEQ ID NO: 78293 - protein, 34 aa, Artificial Sequence; identical to SEQ ID NO: 3692
  GFR-binding peptide
  MOD_RES (2), (34): Xaa is C or S

SEQ ID NO: 78294 - protein, 41 aa, Artificial Sequence
  GFR-binding peptide
  MOD_RES (1), (35), (36): Xaa is C or S
  MOD_RES (13), (14), (15), (16), (17): Xaa is A or G
  MOD_RES (18), (19), (20), (21): Xaa is A or G or is absent
XSEVTMNQYNKLXXXXXXXXXLYLISIASMKEPVXXPEPIG

SEQ ID NO: 78295 - protein, 41 aa, Artificial Sequence; identical to SEQ ID NO: 3695
  GFR-binding peptide
  MOD_RES (2), (35), (36): Xaa is C or S
  MOD_RES (13), (14), (15), (16), (17): Xaa is A or G
  MOD_RES (18), (19), (20), (21): Xaa is A or G or is absent

SEQ ID NO: 78296 - protein, 34 aa, Artificial Sequence; identical to SEQ ID NO: 3696
  GFR-binding peptide
  MOD_RES (1), (33), (34): Xaa is C or S

SEQ ID NO: 78297 - protein, 37 aa, Artificial Sequence; identical to SEQ ID NO: 3697
  GFR-binding peptide
  MOD_RES (31), (32): Xaa is C or S

SEQ ID NO: 78298 - protein, 42 aa, Artificial Sequence; identical to SEQ ID NO: 59480
  GFR-binding peptide
  MOD_RES (2), (4), (38), (39): Xaa is C or S
  MOD_RES (16), (17), (18), (19), (20): Xaa is A or G
  MOD_RES (21), (22), (23), (24): Xaa is A or G or is absent

SEQ ID NO: 78299 - protein, 36 aa, Artificial Sequence; identical to SEQ ID NO: 3698
  GFR-binding peptide
  MOD_RES (1), (36): Xaa is C or S
  MOD_RES (14), (15), (16), (17), (18): Xaa is A or G
  MOD_RES (19), (20), (21), (22): Xaa is A or G or is absent

SEQ ID NO: 78300 - protein, 41 aa, Artificial Sequence; identical to SEQ ID NO: 3699
  GFR-binding peptide
  MOD_RES (2), (4), (37), (38): Xaa is C or S

SEQ ID NO: 78301 - protein, 37 aa, Artificial Sequence; identical to SEQ ID NO: 56638
  GFR-binding peptide
  MOD_RES (31), (32): Xaa is C or S

SEQ ID NO: 78302 - protein, 42 aa, Artificial Sequence; identical to SEQ ID NO: 3700
  GFR-binding peptide
  MOD_RES (2), (36), (37): Xaa is C or S
  MOD_RES (14), (15), (16), (17), (18): Xaa is A or G
  MOD_RES (19), (20), (21), (22): Xaa is A or G or is absent

SEQ ID NO: 78303 - protein, 36 aa, Artificial Sequence; identical to SEQ ID NO: 3702
  GFR-binding peptide
  MOD_RES (2), (4), (35), (36): Xaa is C or S

SEQ ID NO: 78304 - protein, 36 aa, Artificial Sequence; identical to SEQ ID NO: 3704
  GFR-binding peptide
  MOD_RES (31), (32): Xaa is C or S

SEQ ID NO: 78305 - protein, 33 aa, Artificial Sequence; identical to SEQ ID NO: 5637
  GFR-binding peptide
  MOD_RES (2), (2): Xaa is C or S

SEQ ID NO: 78306 - protein, 37 aa, Artificial Sequence; identical to SEQ ID NO: 5638
  GFR-binding peptide
  MOD_RES (33), (34): Xaa is C or S
  MOD_RES (11), (12), (13), (14), (15): Xaa is A or G
  MOD_RES (16), (17), (18), (19): Xaa is A or G or is absent

SEQ ID NO: 78307 - protein, 40 aa, Artificial Sequence; identical to SEQ ID NO: 11129
  GFR-binding peptide
  MOD_RES (2), (4), (38), (39): Xaa is C or S
  MOD_RES (16), (17), (18), (19), (20): Xaa is A or G
  MOD_RES (21), (22), (23), (24): Xaa is A or G or is absent

SEQ ID NO: 78308 - protein, 40 aa, Artificial Sequence; identical to SEQ ID NO: 3705
  GFR-binding peptide
  MOD_RES (2), (34), (35): Xaa is C or S

SEQ ID NO: 78309 - protein, 33 aa, Artificial Sequence; identical to SEQ ID NO: 3706
  GFR-binding peptide
  MOD_RES (32), (33): Xaa is C or S

SEQ ID NO: 78310 - protein, 38 aa, Artificial Sequence
  GFR-binding peptide
  MOD_RES (2), (4), (35), (36): Xaa is C or S
LXGXEEVIMQYNKLLLVRGNDLYLMSIASTKVPAXXTS

SEQ ID NO: 78311 - protein, 40 aa, Artificial Sequence; identical to SEQ ID NO: 5639
  GFR-binding peptide
  MOD_RES (1), (36), (37): Xaa is C or S
  MOD_RES (14), (15), (16), (17), (18): Xaa is A or G
  MOD_RES (19), (20), (21), (22): Xaa is A or G or is absent

SEQ ID NO: 78312 - protein, 36 aa, Artificial Sequence; identical to SEQ ID NO: 3707
  GFR-binding peptide
  MOD_RES (33), (34): Xaa is C or S
  MOD_RES (11), (12), (13), (14), (15): Xaa is A or G
  MOD_RES (16), (17), (18), (19): Xaa is A or G or is absent

SEQ ID NO: 78313 - protein, 40 aa, Artificial Sequence; identical to SEQ ID NO: 5640
  GFR-binding peptide
  MOD_RES (1), (3), (35), (36): Xaa is C or S

SEQ ID NO: 78314 - protein, 33 aa, Artificial Sequence
  GFR-binding peptide
  MOD_RES (2), (2): Xaa is C or S
GXAEVVMDQYNKLVVNNAADLYLISIASLRAPV

SEQ ID NO: 78315 - protein, 41 aa, Artificial Sequence; identical to SEQ ID NO: 24728
  GFR-binding peptide
  MOD_RES (1), (3), (37), (38): Xaa is C or S
  MOD_RES (15), (16), (17), (18), (19): Xaa is A or G
  MOD_RES (20), (21), (22), (23): Xaa is A or G or is absent

SEQ ID NO: 78316 - protein, 34 aa, Artificial Sequence; identical to SEQ ID NO: 13069
  GFR-binding peptide
  MOD_RES (1), (1): Xaa is C or S
  MOD_RES (13), (14), (15), (16), (17): Xaa is A or G
  MOD_RES (18), (19), (20), (21): Xaa is A or G or is absent

SEQ ID NO: 78317 - protein, 37 aa, Artificial Sequence; identical to SEQ ID NO: 11136
  GFR-binding peptide
  MOD_RES (2), (36), (37): Xaa is C or S
  MOD_RES (14), (15), (16), (17), (18): Xaa is A or G
  MOD_RES (19), (20), (21), (22): Xaa is A or G or is absent

SEQ ID NO: 78318 - protein, 37 aa, Artificial Sequence; identical to SEQ ID NO: 3710
  GFR-binding peptide
  MOD_RES (2), (4), (36), (37): Xaa is C or S

SEQ ID NO: 78319 - protein, 40 aa, Artificial Sequence; identical to SEQ ID NO: 56657
  GFR-binding peptide
  MOD_RES (2), (4), (38), (39): Xaa is C or S
  MOD_RES (16), (17), (18), (19), (20): Xaa is A or G
  MOD_RES (21), (22), (23), (24): Xaa is A or G or is absent

SEQ ID NO: 78320 - protein, 38 aa, Artificial Sequence; identical to SEQ ID NO: 3711
  GFR-binding peptide
  MOD_RES (1), (3), (36), (37): Xaa is C or S
  MOD_RES (14), (15), (16), (17), (18): Xaa is A or G
  MOD_RES (19), (20), (21), (22): Xaa is A or G or is absent

SEQ ID NO: 78321 - protein, 42 aa, Artificial Sequence; identical to SEQ ID NO: 5644
  GFR-binding peptide
  MOD_RES (2), (4), (38), (39): Xaa is C or S
  MOD_RES (16), (17), (18), (19), (20): Xaa is A or G
  MOD_RES (21), (22), (23), (24): Xaa is A or G or is absent

SEQ ID NO: 78322 - protein, 39 aa, Artificial Sequence; identical to SEQ ID NO: 5645
  GFR-binding peptide
  MOD_RES (33), (34): Xaa is C or S
  MOD_RES (11), (12), (13), (14), (15): Xaa is A or G
  MOD_RES (16), (17), (18), (19): Xaa is A or G or is absent

SEQ ID NO: 78323 - protein, 44 aa, Artificial Sequence; identical to SEQ ID NO: 5647
  GFR-binding peptide
  MOD_RES (2), (4), (38), (39): Xaa is C or S
  MOD_RES (16), (17), (18), (19), (20): Xaa is A or G
  MOD_RES (21), (22), (23), (24): Xaa is A or G or is absent

SEQ ID NO: 78324 - protein, 36 aa, Artificial Sequence; identical to SEQ ID NO: 5649
  GFR-binding peptide
  MOD_RES (2), (2): Xaa is C or S
  MOD_RES (15), (16), (17), (18), (19): Xaa is A or G
  MOD_RES (20), (21), (22), (23): Xaa is A or G or is absent

SEQ ID NO: 78325 - protein, 36 aa, Artificial Sequence; identical to SEQ ID NO: 3716
  GFR-binding peptide
  MOD_RES (31), (32): Xaa is C or S

SEQ ID NO: 78326 - protein, 31 aa, Artificial Sequence; identical to SEQ ID NO: 26778
  GFR-binding peptide
  MOD_RES (31), (31): Xaa is C or S

SEQ ID NO: 78327 - protein, 39 aa, Artificial Sequence; identical to SEQ ID NO: 5651
  GFR-binding peptide
  MOD_RES (1), (3), (38), (39): Xaa is C or S
  MOD_RES (16), (17), (18), (19), (20): Xaa is A or G
  MOD_RES (21), (22), (23), (24): Xaa is A or G or is absent

SEQ ID NO: 78328 - protein, 40 aa, Artificial Sequence; identical to SEQ ID NO: 26780
  GFR-binding peptide
  MOD_RES (1), (35), (36): Xaa is C or S
  MOD_RES (13), (14), (15), (16), (17): Xaa is A or G
  MOD_RES (18), (19), (20), (21): Xaa is A or G or is absent

SEQ ID NO: 78329 - protein, 42 aa, Artificial Sequence; identical to SEQ ID NO: 5655
  GFR-binding peptide
  MOD_RES (1), (3), (36), (37): Xaa is C or S
  MOD_RES (14), (15), (16), (17), (18): Xaa is A or G
  MOD_RES (19), (20), (21), (22): Xaa is A or G or is absent

SEQ ID NO: 78330 - protein, 34 aa, Artificial Sequence; identical to SEQ ID NO: 63001
  GFR-binding peptide
  MOD_RES (2), (34): Xaa is C or S

SEQ ID NO: 78331 - protein, 37 aa, Artificial Sequence
  GFR-binding peptide
  MOD_RES (1), (35), (36): Xaa is C or S
  MOD_RES (13), (14), (15), (16), (17): Xaa is A or G
  MOD_RES (18), (19), (20), (21): Xaa is A or G or is absent
XAEVVMDQYNKLXXXXXXXXXLYLISIASLRAPVXXS

SEQ ID NO: 78332 - protein, 40 aa, Artificial Sequence; identical to SEQ ID NO: 26784
  GFR-binding peptide
  MOD_RES (1), (3), (35), (36): Xaa is C or S

SEQ ID NO: 78333 - protein, 40 aa, Artificial Sequence
  GFR-binding peptide
  MOD_RES (34), (35): Xaa is C or S
  MOD_RES (12), (13), (14), (15), (16): Xaa is A or G
  MOD_RES (17), (18), (19), (20): Xaa is A or G or is absent
ESVAMGQYNKLXXXXXXXXXLYLISIASLKTPVXXAKSAK

SEQ ID NO: 78334 - protein, 33 aa, Artificial Sequence
  GFR-binding peptide
  MOD_RES (31), (32): Xaa is C or S
SVAMGQYNKLYTVVGKDLYLISIASLKTPVXXA

SEQ ID NO: 78335 - protein, 43 aa, Artificial Sequence; identical to SEQ ID NO: 5656
  GFR-binding peptide
  MOD_RES (2), (4), (37), (38): Xaa is C or S
  MOD_RES (15), (16), (17), (18), (19): Xaa is A or G
  MOD_RES (20), (21), (22), (23): Xaa is A or G or is absent

SEQ ID NO: 78336 - protein, 33 aa, Artificial Sequence; identical to SEQ ID NO: 5657
  GFR-binding peptide
  MOD_RES (1), (3): Xaa is C or S

SEQ ID NO: 78337 - protein, 38 aa, Artificial Sequence
  GFR-binding peptide
  MOD_RES (2), (36), (37): Xaa is C or S
  MOD_RES (14), (15), (16), (17), (18): Xaa is A or G
  MOD_RES (19), (20), (21), (22): Xaa is A or G or is absent
GXAEVVMDQYNKLXXXXXXXXXLYLISIASLRAPVXXS

SEQ ID NO: 78338 - protein, 38 aa, Artificial Sequence; identical to SEQ ID NO: 3723
  GFR-binding peptide
  MOD_RES (2), (35), (36): Xaa is C or S
  MOD_RES (13), (14), (15), (16), (17): Xaa is A or G
  MOD_RES (18), (19), (20), (21): Xaa is A or G or is absent

SEQ ID NO: 78339 - protein, 40 aa, Artificial Sequence; identical to SEQ ID NO: 5658
  GFR-binding peptide
  MOD_RES (1), (35): Xaa is C or S
  MOD_RES (13), (14), (15), (16), (17): Xaa is A or G
  MOD_RES (18), (19), (20), (21): Xaa is A or G or is absent

SEQ ID NO: 78340 - protein, 39 aa, Artificial Sequence; identical to SEQ ID NO: 26789
  GFR-binding peptide
  MOD_RES (2), (4), (36), (37): Xaa is C or S

SEQ ID NO: 78341 - protein, 37 aa, Artificial Sequence
  GFR-binding peptide
  MOD_RES (2), (4), (36), (37): Xaa is C or S
RXGXAEVVMDQYNKLVVNNAADLYLISIASLRAPVXX

SEQ ID NO: 78342 - protein, 44 aa, Artificial Sequence
  GFR-binding peptide
  MOD_RES (2), (4), (38), (39): Xaa is C or S
  MOD_RES (16), (17), (18), (19), (20): Xaa is A or G
  MOD_RES (21), (22), (23), (24): Xaa is A or G or is absent
RXGXESVAMGQYNKLXXXXXXXXXLYLISIASLKTPVXXAKSAK

SEQ ID NO: 78343 - protein, 35 aa, Artificial Sequence; identical to SEQ ID NO: 61283
  GFR-binding peptide
  MOD_RES (32), (33): Xaa is C or S

SEQ ID NO: 78344 - protein, 41 aa, Artificial Sequence
  GFR-binding peptide
  MOD_RES (2), (4), (38), (39): Xaa is C or S
  MOD_RES (16), (17), (18), (19), (20): Xaa is A or G
  MOD_RES (21), (22), (23), (24): Xaa is A or G or is absent
RXGXAEVVMDQYNKLXXXXXXXXXLYLISIASLRAPVXXSA

SEQ ID NO: 78345 - protein, 41 aa, Artificial Sequence
  GFR-binding peptide
  MOD_RES (1), (3), (35), (36): Xaa is C or S
XGXSRVVMNQYNKLIVNSSDDLYLVSIASLKTPAXXPKPVH

SEQ ID NO: 78346 - protein, 40 aa, Artificial Sequence; identical to SEQ ID NO: 5659
  GFR-binding peptide
  MOD_RES (2), (4), (36), (37): Xaa is C or S

SEQ ID NO: 78347 - protein, 40 aa, Artificial Sequence
  GFR-binding peptide
  MOD_RES (2), (35), (36): Xaa is C or S
  MOD_RES (13), (14), (15), (16), (17): Xaa is A or G
  MOD_RES (18), (19), (20), (21): Xaa is A or G or is absent
GXEEVIMQYNKLXXXXXXXXXLYLMSIASTKVPAXXTSPV

SEQ ID NO: 78348 - protein, 35 aa, Artificial Sequence
  GFR-binding peptide
  MOD_RES (2), (34), (35): Xaa is C or S
AXSEVTMNQYNKLVVNKNEDLYLISIASMKEPVXX

SEQ ID NO: 78349 - protein, 39 aa, Artificial Sequence; identical to SEQ ID NO: 5663
  GFR-binding peptide
  MOD_RES (1), (3), (35): Xaa is C or S

SEQ ID NO: 78350 - protein, 38 aa, Artificial Sequence; identical to SEQ ID NO: 26796
  GFR-binding peptide
  MOD_RES (1), (3), (35), (36): Xaa is C or S

SEQ ID NO: 78351 - protein, 36 aa, Artificial Sequence; identical to SEQ ID NO: 3728
  GFR-binding peptide
  MOD_RES (1), (3), (35), (36): Xaa is C or S

SEQ ID NO: 78352 - protein, 41 aa, Artificial Sequence
  GFR-binding peptide
  MOD_RES (1), (3), (35), (36): Xaa is C or S
XGXRDVVMGQYNKLIIQQKDNLYLMSIASMKTPTXXPGASG

SEQ ID NO: 78353 - protein, 33 aa, Artificial Sequence
  GFR-binding peptide
  MOD_RES (2), (2): Xaa is C or S
GXESVAMGQYNKLYTVVGKDLYLISIASLKTPV

SEQ ID NO: 78354 - protein, 33 aa, Artificial Sequence; identical to SEQ ID NO: 5667
  GFR-binding peptide
  MOD_RES (2), (2): Xaa is C or S

SEQ ID NO: 78355 - protein, 38 aa, Artificial Sequence; identical to SEQ ID NO: 3731
  GFR-binding peptide
  MOD_RES (1), (35), (36): Xaa is C or S
  MOD_RES (13), (14), (15), (16), (17): Xaa is A or G
  MOD_RES (18), (19), (20), (21): Xaa is A or G or is absent

SEQ ID NO: 78356 - protein, 39 aa, Artificial Sequence; identical to SEQ ID NO: 3732
  GFR-binding peptide
  MOD_RES (33), (34): Xaa is C or S
  MOD_RES (11), (12), (13), (14), (15): Xaa is A or G
  MOD_RES (16), (17), (18), (19): Xaa is A or G or is absent

SEQ ID NO: 78357 - protein, 36 aa, Artificial Sequence; identical to SEQ ID NO: 5670
  GFR-binding peptide
  MOD_RES (33), (34): Xaa is C or S
  MOD_RES (11), (12), (13), (14), (15): Xaa is A or G
  MOD_RES (16), (17), (18), (19): Xaa is A or G or is absent

SEQ ID NO: 78358 - protein, 36 aa, Artificial Sequence; identical to SEQ ID NO: 13109
  GFR-binding peptide
  MOD_RES (1), (3), (35), (36): Xaa is C or S

SEQ ID NO: 78359 - protein, 40 aa, Artificial Sequence; identical to SEQ ID NO: 3735
  GFR-binding peptide
  MOD_RES (2), (36), (37): Xaa is C or S
  MOD_RES (14), (15), (16), (17), (18): Xaa is A or G
  MOD_RES (19), (20), (21), (22): Xaa is A or G or is absent

SEQ ID NO: 78360 - protein, 41 aa, Artificial Sequence
  GFR-binding peptide
  MOD_RES (2), (35), (36): Xaa is C or S
  MOD_RES (13), (14), (15), (16), (17): Xaa is A or G
  MOD_RES (18), (19), (20), (21): Xaa is A or G or is absent
GXEEVIMQYNKLXXXXXXXXXLYLMSIASTKVPAXXTSPVR

SEQ ID NO: 78361 - protein, 37 aa, Artificial Sequence; identical to SEQ ID NO: 5671
  GFR-binding peptide
  MOD_RES (1), (34), (35): Xaa is C or S
  MOD_RES (12), (13), (14), (15), (16): Xaa is A or G
  MOD_RES (17), (18), (19), (20): Xaa is A or G or is absent

SEQ ID NO: 78362 - protein, 33 aa, Artificial Sequence; identical to SEQ ID NO: 3737
  GFR-binding peptide
  MOD_RES (1), (1): Xaa is C or S

SEQ ID NO: 78363 - protein, 39 aa, Artificial Sequence; identical to SEQ ID NO: 3738
  GFR-binding peptide
  MOD_RES (34), (35): Xaa is C or S
  MOD_RES (12), (13), (14), (15), (16): Xaa is A or G
  MOD_RES (17), (18), (19), (20): Xaa is A or G or is absent

SEQ ID NO: 78364 - protein, 40 aa, Artificial Sequence; identical to SEQ ID NO: 3741
  GFR-binding peptide
  MOD_RES (1), (34), (35): Xaa is C or S

SEQ ID NO: 78365 - protein, 37 aa, Artificial Sequence; identical to SEQ ID NO: 3742
  GFR-binding peptide
  MOD_RES (34), (35): Xaa is C or S
  MOD_RES (12), (13), (14), (15), (16): Xaa is A or G
  MOD_RES (17), (18), (19), (20): Xaa is A or G or is absent

SEQ ID NO: 78366 - protein, 33 aa, Artificial Sequence; identical to SEQ ID NO: 5677
  GFR-binding peptide
  MOD_RES (2), (33): Xaa is C or S

SEQ ID NO: 78367 - protein, 37 aa, Artificial Sequence; identical to SEQ ID NO: 24770
  GFR-binding peptide
  MOD_RES (31), (32): Xaa is C or S

SEQ ID NO: 78368 - protein, 40 aa, Artificial Sequence; identical to SEQ ID NO: 5678
  GFR-binding peptide
  MOD_RES (1), (35), (36): Xaa is C or S
  MOD_RES (13), (14), (15), (16), (17): Xaa is A or G
  MOD_RES (18), (19), (20), (21): Xaa is A or G or is absent

SEQ ID NO: 78369 - protein, 40 aa, Artificial Sequence; identical to SEQ ID NO: 56696
  GFR-binding peptide
  MOD_RES (34), (35): Xaa is C or S
  MOD_RES (12), (13), (14), (15), (16): Xaa is A or G
  MOD_RES (17), (18), (19), (20): Xaa is A or G or is absent

SEQ ID NO: 78370 - protein, 35 aa, Artificial Sequence; identical to SEQ ID NO: 5679
  GFR-binding peptide
  MOD_RES (1), (3), (35): Xaa is C or S

SEQ ID NO: 78371 - protein, 39 aa, Artificial Sequence; identical to SEQ ID NO: 5680
  GFR-binding peptide
  MOD_RES (34), (35): Xaa is C or S
  MOD_RES (12), (13), (14), (15), (16): Xaa is A or G
  MOD_RES (17), (18), (19), (20): Xaa is A or G or is absent

SEQ ID NO: 78372 - protein, 31 aa, Artificial Sequence; identical to SEQ ID NO: 24774
  GFR-binding peptide

SEQ ID NO: 78373 - protein, 37 aa, Artificial Sequence; identical to SEQ ID NO: 5682
  GFR-binding peptide
  MOD_RES (1), (3), (36), (37): Xaa is C or S
  MOD_RES (14), (15), (16), (17), (18): Xaa is A or G
  MOD_RES (19), (20), (21), (22): Xaa is A or G or is absent

SEQ ID NO: 78374 - protein, 36 aa, Artificial Sequence; identical to SEQ ID NO: 3747
  GFR-binding peptide
  MOD_RES (1), (3): Xaa is C or S
  MOD_RES (15), (16), (17), (18), (19): Xaa is A or G
  MOD_RES (20), (21), (22), (23): Xaa is A or G or is absent

SEQ ID NO: 78375 - protein, 37 aa, Artificial Sequence; identical to SEQ ID NO: 5683
  GFR-binding peptide
  MOD_RES (2), (34), (35): Xaa is C or S

SEQ ID NO: 78376 - protein, 38 aa, Artificial Sequence; identical to SEQ ID NO: 3748
  GFR-binding peptide
  MOD_RES (35), (36): Xaa is C or S
  MOD_RES (13), (14), (15), (16), (17): Xaa is A or G
  MOD_RES (18), (19), (20), (21): Xaa is A or G or is absent

SEQ ID NO: 78377 - protein, 35 aa, Artificial Sequence; identical to SEQ ID NO: 56706
  GFR-binding peptide
  MOD_RES (33), (34): Xaa is C or S
  MOD_RES (11), (12), (13), (14), (15): Xaa is A or G
  MOD_RES (16), (17), (18), (19): Xaa is A or G or is absent

SEQ ID NO: 78378 - protein, 36 aa, Artificial Sequence; identical to SEQ ID NO: 5685
  GFR-binding peptide
  MOD_RES (1), (3): Xaa is C or S
  MOD_RES (15), (16), (17), (18), (19): Xaa is A or G
  MOD_RES (20), (21), (22), (23): Xaa is A or G or is absent

SEQ ID NO: 78379 - protein, 31 aa, Artificial Sequence
  GFR-binding peptide
  MOD_RES (31), (31): Xaa is C or S
EVVMDQYNKLVVNNAADLYLISIASLRAPVX

SEQ ID NO: 78380 - protein, 37 aa, Artificial Sequence; identical to SEQ ID NO: 3749
  GFR-binding peptide
  MOD_RES (2), (4), (37): Xaa is C or S
  MOD_RES (15), (16), (17), (18), (19): Xaa is A or G
  MOD_RES (20), (21), (22), (23): Xaa is A or G or is absent

SEQ ID NO: 78381 - protein, 33 aa, Artificial Sequence; identical to SEQ ID NO: 5687
  GFR-binding peptide
  MOD_RES (12), (13), (14), (15), (16): Xaa is A or G
  MOD_RES (17), (18), (19), (20): Xaa is A or G or is absent

SEQ ID NO: 78382 - protein, 35 aa, Artificial Sequence; identical to SEQ ID NO: 5688
  GFR-binding peptide
  MOD_RES (1), (32), (33): Xaa is C or S

SEQ ID NO: 78383 - protein, 35 aa, Artificial Sequence; identical to SEQ ID NO: 24780
  GFR-binding peptide
  MOD_RES (33), (34): Xaa is C or S
  MOD_RES (11), (12), (13), (14), (15): Xaa is A or G
  MOD_RES (16), (17), (18), (19): Xaa is A or G or is absent

SEQ ID NO: 78384 - protein, 39 aa, Artificial Sequence; identical to SEQ ID NO: 3750
  GFR-binding peptide
  MOD_RES (1), (3), (34), (35): Xaa is C or S

SEQ ID NO: 78385 - protein, 30 aa, Artificial Sequence
  GFR-binding peptide
EVVMDQYNKLVVNNAADLYLISIASLRAPV

SEQ ID NO: 78386 - protein, 43 aa, Artificial Sequence; identical to SEQ ID NO: 5690
  GFR-binding peptide
  MOD_RES (1), (3), (37), (38): Xaa is C or S
  MOD_RES (15), (16), (17), (18), (19): Xaa is A or G
  MOD_RES (20), (21), (22), (23): Xaa is A or G or is absent

SEQ ID NO: 78387 - protein, 35 aa, Artificial Sequence; identical to SEQ ID NO: 5691
  GFR-binding peptide
  MOD_RES (2), (33), (34): Xaa is C or S

SEQ ID NO: 78388 - protein, 37 aa, Artificial Sequence; identical to SEQ ID NO: 3752
  GFR-binding peptide
  MOD_RES (1), (35), (36): Xaa is C or S
  MOD_RES (13), (14), (15), (16), (17): Xaa is A or G
  MOD_RES (18), (19), (20), (21): Xaa is A or G or is absent

SEQ ID NO: 78389 - protein, 30 aa, Artificial Sequence; identical to SEQ ID NO: 56713
  GFR-binding peptide

SEQ ID NO: 78390 - protein, 36 aa, Artificial Sequence; identical to SEQ ID NO: 5692
  GFR-binding peptide
  MOD_RES (1), (33), (34): Xaa is C or S

SEQ ID NO: 78391 - protein, 37 aa, Artificial Sequence; identical to SEQ ID NO: 13132
  GFR-binding peptide
  MOD_RES (31), (32): Xaa is C or S

SEQ ID NO: 78392 - protein, 39 aa, Artificial Sequence; identical to SEQ ID NO: 61313
  GFR-binding peptide
  MOD_RES (33), (34): Xaa is C or S
  MOD_RES (11), (12), (13), (14), (15): Xaa is A or G
  MOD_RES (16), (17), (18), (19): Xaa is A or G or is absent

SEQ ID NO: 78393 - protein, 36 aa, Artificial Sequence; identical to SEQ ID NO: 5693
  GFR-binding peptide
  MOD_RES (34), (35): Xaa is C or S
  MOD_RES (12), (13), (14), (15), (16): Xaa is A or G
  MOD_RES (17), (18), (19), (20): Xaa is A or G or is absent

SEQ ID NO: 78394 - protein, 38 aa, Artificial Sequence; identical to SEQ ID NO: 3755
  GFR-binding peptide
  MOD_RES (2), (36), (37): Xaa is C or S
  MOD_RES (14), (15), (16), (17), (18): Xaa is A or G
  MOD_RES (19), (20), (21), (22): Xaa is A or G or is absent

SEQ ID NO: 78395 - protein, 37 aa, Artificial Sequence; identical to SEQ ID NO: 3756
  GFR-binding peptide
  MOD_RES (34), (35): Xaa is C or S
  MOD_RES (12), (13), (14), (15), (16): Xaa is A or G
  MOD_RES (17), (18), (19), (20): Xaa is A or G or is absent

SEQ ID NO: 78396 - protein, 34 aa, Artificial Sequence; identical to SEQ ID NO: 56717
  GFR-binding peptide
  MOD_RES (1), (3): Xaa is C or S

SEQ ID NO: 78397 - protein, 40 aa, Artificial Sequence; identical to SEQ ID NO: 3757
  GFR-binding peptide
  MOD_RES (1), (3), (37), (38): Xaa is C or S
  MOD_RES (15), (16), (17), (18), (19): Xaa is A or G
  MOD_RES (20), (21), (22), (23): Xaa is A or G or is absent

SEQ ID NO: 78398 - protein, 37 aa, Artificial Sequence; identical to SEQ ID NO: 24788
  GFR-binding peptide
  MOD_RES (32), (33): Xaa is C or S

SEQ ID NO: 78399 - protein, 30 aa, Artificial Sequence; identical to SEQ ID NO: 5696
  GFR-binding peptide

SEQ ID NO: 78400 - protein, 38 aa, Artificial Sequence; identical to SEQ ID NO: 3758
  GFR-binding peptide
  MOD_RES (2), (4), (38): Xaa is C or S
  MOD_RES (16), (17), (18), (19), (20): Xaa is A or G
  MOD_RES (21), (22), (23), (24): Xaa is A or G or is absent

SEQ ID NO: 78401 - protein, 36 aa, Artificial Sequence; identical to SEQ ID NO: 3760
  GFR-binding peptide
  MOD_RES (2), (35), (36): Xaa is C or S
  MOD_RES (13), (14), (15), (16), (17): Xaa is A or G
  MOD_RES (18), (19), (20), (21): Xaa is A or G or is absent

SEQ ID NO: 78402 - protein, 37 aa, Artificial Sequence; identical to SEQ ID NO: 3761
  GFR-binding peptide
  MOD_RES (31), (32): Xaa is C or S

SEQ ID NO: 78403 - protein, 35 aa, Artificial Sequence; identical to SEQ ID NO: 3763
  GFR-binding peptide
  MOD_RES (2), (4): Xaa is C or S

SEQ ID NO: 78404 - protein, 40 aa, Artificial Sequence; identical to SEQ ID NO: 56726
  GFR-binding peptide
  MOD_RES (1), (35), (36): Xaa is C or S
  MOD_RES (13), (14), (15), (16), (17): Xaa is A or G
  MOD_RES (18), (19), (20), (21): Xaa is A or G or is absent

SEQ ID NO: 78405 - protein, 41 aa, Artificial Sequence; identical to SEQ ID NO: 3765
  GFR-binding peptide
  MOD_RES (2), (36), (37): Xaa is C or S
  MOD_RES (14), (15), (16), (17), (18): Xaa is A or G
  MOD_RES (19), (20), (21), (22): Xaa is A or G or is absent

SEQ ID NO: 78406 - protein, 39 aa, Artificial Sequence
  GFR-binding peptide
  MOD_RES (2), (4), (37), (38): Xaa is C or S
  MOD_RES (15), (16), (17), (18), (19): Xaa is A or G
  MOD_RES (20), (21), (22), (23): Xaa is A or G or is absent
LXGXEEVIMQYNKLXXXXXXXXXLYLMSIASTKVPAXXT

SEQ ID NO: 78407 - protein, 31 aa, Artificial Sequence; identical to SEQ ID NO: 5701
  GFR-binding peptide

SEQ ID NO: 78408 - protein, 39 aa, Artificial Sequence; identical to SEQ ID NO: 56732
  GFR-binding peptide
  MOD_RES (2), (4), (37), (38): Xaa is C or S
  MOD_RES (15), (16), (17), (18), (19): Xaa is A or G
  MOD_RES (20), (21), (22), (23): Xaa is A or G or is absent

SEQ ID NO: 78409 - protein, 37 aa, Artificial Sequence; identical to SEQ ID NO: 3768
  GFR-binding peptide
  MOD_RES (33), (34): Xaa is C or S
  MOD_RES (11), (12), (13), (14), (15): Xaa is A or G
  MOD_RES (16), (17), (18), (19): Xaa is A or G or is absent

SEQ ID NO: 78410 - protein, 41 aa, Artificial Sequence; identical to SEQ ID NO: 26827
  GFR-binding peptide
  MOD_RES (1), (35), (36): Xaa is C or S
  MOD_RES (13), (14), (15), (16), (17): Xaa is A or G
  MOD_RES (18), (19), (20), (21): Xaa is A or G or is absent

SEQ ID NO: 78411 - protein, 38 aa, Artificial Sequence; identical to SEQ ID NO: 3770
  GFR-binding peptide
  MOD_RES (2), (34), (35): Xaa is C or S

SEQ ID NO: 78412 - protein, 34 aa, Artificial Sequence; identical to SEQ ID NO: 3771
  GFR-binding peptide
  MOD_RES (33), (34): Xaa is C or S
  MOD_RES (11), (12), (13), (14), (15): Xaa is A or G
  MOD_RES (16), (17), (18), (19): Xaa is A or G or is absent

SEQ ID NO: 78413 - protein, 39 aa, Artificial Sequence; identical to SEQ ID NO: 5703
  GFR-binding peptide
  MOD_RES (2), (4), (38), (39): Xaa is C or S
  MOD_RES (16), (17), (18), (19), (20): Xaa is A or G
  MOD_RES (21), (22), (23), (24): Xaa is A or G or is absent

SEQ ID NO: 78414 - protein, 35 aa, Artificial Sequence; identical to SEQ ID NO: 26829
  GFR-binding peptide
  MOD_RES (2), (4): Xaa is C or S

SEQ ID NO: 78415 - protein, 37 aa, Artificial Sequence; identical to SEQ ID NO: 5705
  GFR-binding peptide
  MOD_RES (2), (4): Xaa is C or S
  MOD_RES (16), (17), (18), (19), (20): Xaa is A or G
  MOD_RES (21), (22), (23), (24): Xaa is A or G or is absent

SEQ ID NO: 78416 - protein, 36 aa, Artificial Sequence; identical to SEQ ID NO: 3777
  GFR-binding peptide
  MOD_RES (1), (35), (36): Xaa is C or S
  MOD_RES (13), (14), (15), (16), (17): Xaa is A or G
  MOD_RES (18), (19), (20), (21): Xaa is A or G or is absent

SEQ ID NO: 78417 - protein, 39 aa, Artificial Sequence
  GFR-binding peptide
  MOD_RES (2), (4), (36), (37): Xaa is C or S
RXGXAEVVMDQYNKLVVNNAADLYLISIASLRAPVXXSA

SEQ ID NO: 78418 - protein, 31 aa, Artificial Sequence; identical to SEQ ID NO: 3779
  GFR-binding peptide
  MOD_RES (1), (1): Xaa is C or S

SEQ ID NO: 78419 - protein, 38 aa, Artificial Sequence
  GFR-binding peptide
  MOD_RES (2), (36), (37): Xaa is C or S
  MOD_RES (14), (15), (16), (17), (18): Xaa is A or G
  MOD_RES (19), (20), (21), (22): Xaa is A or G or is absent
GXESVAMGQYNKLXXXXXXXXXLYLISIASLKTPVXXA

SEQ ID NO: 78420 - protein, 35 aa, Artificial Sequence; identical to SEQ ID NO: 5708
  GFR-binding peptide
  MOD_RES (2), (4): Xaa is C or S

SEQ ID NO: 78421 - protein, 35 aa, Artificial Sequence
  GFR-binding peptide
  MOD_RES (34), (35): Xaa is C or S
  MOD_RES (12), (13), (14), (15), (16): Xaa is A or G
  MOD_RES (17), (18), (19), (20): Xaa is A or G or is absent
RDVVMGQYNKLXXXXXXXXXLYLMSIASMKTPTXX

SEQ ID NO: 78422 - protein, 39 aa, Artificial Sequence; identical to SEQ ID NO: 3781
  GFR-binding peptide
  MOD_RES (1), (3), (36), (37): Xaa is C or S
  MOD_RES (14), (15), (16), (17), (18): Xaa is A or G
  MOD_RES (19), (20), (21), (22): Xaa is A or G or is absent

SEQ ID NO: 78423 - protein, 35 aa, Artificial Sequence; identical to SEQ ID NO: 5709
  GFR-binding peptide
  MOD_RES (1), (35): Xaa is C or S
  MOD_RES (13), (14), (15), (16), (17): Xaa is A or G
  MOD_RES (18), (19), (20), (21): Xaa is A or G or is absent

SEQ ID NO: 78424 - protein, 34 aa, Artificial Sequence; identical to SEQ ID NO: 3783
  GFR-binding peptide
  MOD_RES (1), (34): Xaa is C or S

SEQ ID NO: 78425 - protein, 39 aa, Artificial Sequence; identical to SEQ ID NO: 5712
  GFR-binding peptide
  MOD_RES (2), (34), (35): Xaa is C or S

SEQ ID NO: 78426 - protein, 38 aa, Artificial Sequence
  GFR-binding peptide
  MOD_RES (34), (35): Xaa is C or S
  MOD_RES (12), (13), (14), (15), (16): Xaa is A or G
  MOD_RES (17), (18), (19), (20): Xaa is A or G or is absent
ESVAMGQYNKLXXXXXXXXXLYLISIASLKTPVXXAKS

SEQ ID NO: 78427 - protein, 40 aa, Artificial Sequence
  GFR-binding peptide
  MOD_RES (1), (35), (36): Xaa is C or S
  MOD_RES (13), (14), (15), (16), (17): Xaa is A or G
  MOD_RES (18), (19), (20), (21): Xaa is A or G or is absent
XSEVTMNQYNKLXXXXXXXXXLYLISIASMKEPVXXPEPI

SEQ ID NO: 78428 - protein, 36 aa, Artificial Sequence; identical to SEQ ID NO: 5714
  GFR-binding peptide
  MOD_RES (33), (34): Xaa is C or S
  MOD_RES (11), (12), (13), (14), (15): Xaa is A or G
  MOD_RES (16), (17), (18), (19): Xaa is A or G or is absent

SEQ ID NO: 78429 - protein, 36 aa, Artificial Sequence; identical to SEQ ID NO: 3786
  GFR-binding peptide
  MOD_RES (1), (3): Xaa is C or S
  MOD_RES (15), (16), (17), (18), (19): Xaa is A or G
  MOD_RES (20), (21), (22), (23): Xaa is A or G or is absent

SEQ ID NO: 78430 - protein, 38 aa, Artificial Sequence; identical to SEQ ID NO: 64788
  GFR-binding peptide
  MOD_RES (2), (4), (36), (37): Xaa is C or S

SEQ ID NO: 78431 - protein, 38 aa, Artificial Sequence; identical to SEQ ID NO: 56755
  GFR-binding peptide
  MOD_RES (1), (3), (36), (37): Xaa is C or S
  MOD_RES (14), (15), (16), (17), (18): Xaa is A or G
  MOD_RES (19), (20), (21), (22): Xaa is A or G or is absent

SEQ ID NO: 78432 - protein, 39 aa, Artificial Sequence
  GFR-binding peptide
  MOD_RES (1), (35), (36): Xaa is C or S
  MOD_RES (13), (14), (15), (16), (17): Xaa is A or G
  MOD_RES (18), (19), (20), (21): Xaa is A or G or is absent
XAEVVMDQYNKLXXXXXXXXXLYLISIASLRAPVXXSAP

SEQ ID NO: 78433 - protein, 40 aa, Artificial Sequence; identical to SEQ ID NO: 11215
  GFR-binding peptide
  MOD_RES (1), (35), (36): Xaa is C or S
  MOD_RES (13), (14), (15), (16), (17): Xaa is A or G
  MOD_RES (18), (19), (20), (21): Xaa is A or G or is absent

SEQ ID NO: 78434 - protein, 35 aa, Artificial Sequence; identical to SEQ ID NO: 3788
  GFR-binding peptide
  MOD_RES (2), (2): Xaa is C or S
  MOD_RES (14), (15), (16), (17), (18): Xaa is A or G
  MOD_RES (19), (20), (21), (22): Xaa is A or G or is absent

SEQ ID NO: 78435 - protein, 41 aa, Artificial Sequence; identical to SEQ ID NO: 3789
  GFR-binding peptide
  MOD_RES (2), (4), (36), (37): Xaa is C or S

SEQ ID NO: 78436 - protein, 35 aa, Artificial Sequence; identical to SEQ ID NO: 61332
  GFR-binding peptide
  MOD_RES (1), (33), (34): Xaa is C or S

SEQ ID NO: 78437 - protein, 35 aa, Artificial Sequence; identical to SEQ ID NO: 5719
  GFR-binding peptide
  MOD_RES (31), (32): Xaa is C or S

SEQ ID NO: 78438 - protein, 33 aa, Artificial Sequence; identical to SEQ ID NO: 59558
  GFR-binding peptide
  MOD_RES (33), (33): Xaa is C or S
  MOD_RES (11), (12), (13), (14), (15): Xaa is A or G
  MOD_RES (16), (17), (18), (19): Xaa is A or G or is absent

SEQ ID NO: 78439 - protein, 43 aa, Artificial Sequence; identical to SEQ ID NO: 61334
  GFR-binding peptide
  MOD_RES (2), (4), (38), (39): Xaa is C or S
  MOD_RES (16), (17), (18), (19), (20): Xaa is A or G
  MOD_RES (21), (22), (23), (24): Xaa is A or G or is absent

SEQ ID NO: 78440 - protein, 38 aa, Artificial Sequence; identical to SEQ ID NO: 5721
  GFR-binding peptide
  MOD_RES (1), (35), (36): Xaa is C or S
  MOD_RES (13), (14), (15), (16), (17): Xaa is A or G
  MOD_RES (18), (19), (20), (21): Xaa is A or G or is absent

SEQ ID NO: 78441 - protein, 33 aa, Artificial Sequence; identical to SEQ ID NO: 3792
  GFR-binding peptide
  MOD_RES (1), (33): Xaa is C or S

SEQ ID NO: 78442 - protein, 38 aa, Artificial Sequence; identical to SEQ ID NO: 3793
  GFR-binding peptide
  MOD_RES (33), (34): Xaa is C or S
  MOD_RES (11), (12), (13), (14), (15): Xaa is A or G
  MOD_RES (16), (17), (18), (19): Xaa is A or G or is absent

SEQ ID NO: 78443 - protein, 31 aa, Artificial Sequence; identical to SEQ ID NO: 3794
  GFR-binding peptide

SEQ ID NO: 78444 - protein, 38 aa, Artificial Sequence; identical to SEQ ID NO: 5724
  GFR-binding peptide
  MOD_RES (2), (33), (34): Xaa is C or S

SEQ ID NO: 78445 - protein, 40 aa, Artificial Sequence; identical to SEQ ID NO: 3795
  GFR-binding peptide
  MOD_RES (2), (36), (37): Xaa is C or S
  MOD_RES (14), (15), (16), (17), (18): Xaa is A or G
  MOD_RES (19), (20), (21), (22): Xaa is A or G or is absent

SEQ ID NO: 78446 - protein, 37 aa, Artificial Sequence; identical to SEQ ID NO: 26850
  GFR-binding peptide
  MOD_RES (1), (35), (36): Xaa is C or S
  MOD_RES (13), (14), (15), (16), (17): Xaa is A or G
  MOD_RES (18), (19), (20), (21): Xaa is A or G or is absent

SEQ ID NO: 78447 - protein, 37 aa, Artificial Sequence; identical to SEQ ID NO: 11220
  GFR-binding peptide
  MOD_RES (33), (34): Xaa is C or S
  MOD_RES (11), (12), (13), (14), (15): Xaa is A or G
  MOD_RES (16), (17), (18), (19): Xaa is A or G or is absent

SEQ ID NO: 78448 - protein, 36 aa, Artificial Sequence
  GFR-binding peptide
  MOD_RES (33), (34): Xaa is C or S
  MOD_RES (11), (12), (13), (14), (15): Xaa is A or G
  MOD_RES (16), (17), (18), (19): Xaa is A or G or is absent
EVVMDQYNKLXXXXXXXXXLYLISIASLRAPVXXSA

SEQ ID NO: 78449 - protein, 40 aa, Artificial Sequence; identical to SEQ ID NO: 5726
  GFR-binding peptide
  MOD_RES (2), (4), (38), (39): Xaa is C or S
  MOD_RES (16), (17), (18), (19), (20): Xaa is A or G
  MOD_RES (21), (22), (23), (24): Xaa is A or G or is absent

SEQ ID NO: 78450 - protein, 36 aa, Artificial Sequence; identical to SEQ ID NO: 3797
  GFR-binding peptide
  MOD_RES (2), (4), (36): Xaa is C or S

SEQ ID NO: 78451 - protein, 31 aa, Artificial Sequence
  GFR-binding peptide
SEVTMNQYNKLVVNKNEDLYLISIASMKEPV

SEQ ID NO: 78452 - protein, 36 aa, Artificial Sequence
  GFR-binding peptide
  MOD_RES (31), (32): Xaa is C or S
DVVMGQYNKLIIQQKDNLYLMSIASMKTPTXXPGAS

SEQ ID NO: 78453 - protein, 40 aa, Artificial Sequence; identical to SEQ ID NO: 26856
  GFR-binding peptide
  MOD_RES (1), (3), (37), (38): Xaa is C or S
  MOD_RES (15), (16), (17), (18), (19): Xaa is A or G
  MOD_RES (20), (21), (22), (23): Xaa is A or G or is absent

SEQ ID NO: 78454 - protein, 39 aa, Artificial Sequence
  GFR-binding peptide
  MOD_RES (1), (34), (35): Xaa is C or S
  MOD_RES (12), (13), (14), (15), (16): Xaa is A or G
  MOD_RES (17), (18), (19), (20): Xaa is A or G or is absent
XEEVIMQYNKLXXXXXXXXXLYLMSIASTKVPAXXTSPV

SEQ ID NO: 78455 - protein, 35 aa, Artificial Sequence
  GFR-binding peptide
  MOD_RES (1), (35): Xaa is C or S
  MOD_RES (13), (14), (15), (16), (17): Xaa is A or G
  MOD_RES (18), (19), (20), (21): Xaa is A or G or is absent
XESVAMGQYNKLXXXXXXXXXLYLISIASLKTPVX

SEQ ID NO: 78456 - protein, 38 aa, Artificial Sequence; identical to SEQ ID NO: 63069
  GFR-binding peptide
  MOD_RES (1), (35), (36): Xaa is C or S
  MOD_RES (13), (14), (15), (16), (17): Xaa is A or G
  MOD_RES (18), (19), (20), (21): Xaa is A or G or is absent

SEQ ID NO: 78457 - protein, 39 aa, Artificial Sequence; identical to SEQ ID NO: 3801
  GFR-binding peptide
  MOD_RES (33), (34): Xaa is C or S
  MOD_RES (11), (12), (13), (14), (15): Xaa is A or G
  MOD_RES (16), (17), (18), (19): Xaa is A or G or is absent

SEQ ID NO: 78458 - protein, 41 aa, Artificial Sequence
  GFR-binding peptide
  MOD_RES (1), (35), (36): Xaa is C or S
  MOD_RES (13), (14), (15), (16), (17): Xaa is A or G
  MOD_RES (18), (19), (20), (21): Xaa is A or G or is absent
XESVAMGQYNKLXXXXXXXXXLYLISIASLKTPVXXAKSAK

SEQ ID NO: 78459 - protein, 43 aa, Artificial Sequence
  GFR-binding peptide
  MOD_RES (2), (4), (38), (39): Xaa is C or S
  MOD_RES (16), (17), (18), (19), (20): Xaa is A or G
  MOD_RES (21), (22), (23), (24): Xaa is A or G or is absent
SXGXRDVVMGQYNKLXXXXXXXXXLYLMSIASMKTPTXXPGAS

SEQ ID NO: 78460 - protein, 35 aa, Artificial Sequence; identical to SEQ ID NO: 56776
  GFR-binding peptide
  MOD_RES (1), (3): Xaa is C or S
  MOD_RES (14), (15), (16), (17), (18): Xaa is A or G
  MOD_RES (19), (20), (21), (22): Xaa is A or G or is absent

SEQ ID NO: 78461 - protein, 38 aa, Artificial Sequence; identical to SEQ ID NO: 64809
  GFR-binding peptide
  MOD_RES (32), (33): Xaa is C or S

SEQ ID NO: 78462 - protein, 34 aa, Artificial Sequence; identical to SEQ ID NO: 3803
  GFR-binding peptide
  MOD_RES (1), (33), (34): Xaa is C or S

SEQ ID NO: 78463 - protein, 39 aa, Artificial Sequence; identical to SEQ ID NO: 3805
  GFR-binding peptide
  MOD_RES (2), (4), (37), (38): Xaa is C or S
  MOD_RES (15), (16), (17), (18), (19): Xaa is A or G
  MOD_RES (20), (21), (22), (23): Xaa is A or G or is absent

SEQ ID NO: 78464 - protein, 41 aa, Artificial Sequence; identical to SEQ ID NO: 5731
  GFR-binding peptide
  MOD_RES (1), (3), (35), (36): Xaa is C or S

SEQ ID NO: 78465 - protein, 35 aa, Artificial Sequence; identical to SEQ ID NO: 3809
  GFR-binding peptide
  MOD_RES (1), (34), (35): Xaa is C or S
  MOD_RES (12), (13), (14), (15), (16): Xaa is A or G
  MOD_RES (17), (18), (19), (20): Xaa is A or G or is absent

SEQ ID NO: 78466 - protein, 39 aa, Artificial Sequence; identical to SEQ ID NO: 5733
  GFR-binding peptide
  MOD_RES (2), (4), (35), (36): Xaa is C or S

SEQ ID NO: 78467 - protein, 38 aa, Artificial Sequence; identical to SEQ ID NO: 5734
  GFR-binding peptide
  MOD_RES (2), (4), (36), (37): Xaa is C or S

SEQ ID NO: 78468 - protein, 39 aa, Artificial Sequence
  GFR-binding peptide
  MOD_RES (1), (33), (34): Xaa is C or S
XAEVVMDQYNKLVVNNAADLYLISIASLRAPVXXSAPAA

SEQ ID NO: 78469 - protein, 40 aa, Artificial Sequence; identical to SEQ ID NO: 63077
  GFR-binding peptide
  MOD_RES (1), (35), (36): Xaa is C or S
  MOD_RES (13), (14), (15), (16), (17): Xaa is A or G
  MOD_RES (18), (19), (20), (21): Xaa is A or G or is absent

SEQ ID NO: 78470 - protein, 37 aa, Artificial Sequence; identical to SEQ ID NO: 56781
  GFR-binding peptide
  MOD_RES (33), (34): Xaa is C or S
  MOD_RES (11), (12), (13), (14), (15): Xaa is A or G
  MOD_RES (16), (17), (18), (19): Xaa is A or G or is absent

SEQ ID NO: 78471 - protein, 37 aa, Artificial Sequence
  GFR-binding peptide
  MOD_RES (2), (35), (36): Xaa is C or S
  MOD_RES (13), (14), (15), (16), (17): Xaa is A or G
  MOD_RES (18), (19), (20), (21): Xaa is A or G or is absent
GXEEVIMQYNKLXXXXXXXXXLYLMSIASTKVPAXXT

SEQ ID NO: 78472 - protein, 34 aa, Artificial Sequence; identical to SEQ ID NO: 11234
  GFR-binding peptide
  MOD_RES (1), (3): Xaa is C or S

SEQ ID NO: 78473 - protein, 37 aa, Artificial Sequence; identical to SEQ ID NO: 5738
  GFR-binding peptide
  MOD_RES (32), (33): Xaa is C or S

SEQ ID NO: 78474 - protein, 39 aa, Artificial Sequence
  GFR-binding peptide
  MOD_RES (2), (36), (37): Xaa is C or S
  MOD_RES (14), (15), (16), (17), (18): Xaa is A or G
  MOD_RES (19), (20), (21), (22): Xaa is A or G or is absent
GXAEVVMDQYNKLXXXXXXXXXLYLISIASLRAPVXXSA

SEQ ID NO: 78475 - protein, 37 aa, Artificial Sequence; identical to SEQ ID NO: 5739
  GFR-binding peptide
  MOD_RES (2), (4), (37): Xaa is C or S
  MOD_RES (15), (16), (17), (18), (19): Xaa is A or G
  MOD_RES (20), (21), (22), (23): Xaa is A or G or is absent

SEQ ID NO: 78476 - protein, 38 aa, Artificial Sequence; identical to SEQ ID NO: 3816
  GFR-binding peptide
  MOD_RES (2), (4), (36), (37): Xaa is C or S

SEQ ID NO: 78477 - protein, 35 aa, Artificial Sequence; identical to SEQ ID NO: 5742
  GFR-binding peptide
  MOD_RES (2), (4): Xaa is C or S

SEQ ID NO: 78478 - protein, 37 aa, Artificial Sequence; identical to SEQ ID NO: 5743
  GFR-binding peptide
  MOD_RES (1), (34), (35): Xaa is C or S
  MOD_RES (12), (13), (14), (15), (16): Xaa is A or G
  MOD_RES (17), (18), (19), (20): Xaa is A or G or is absent

SEQ ID NO: 78479 - protein, 42 aa, Artificial Sequence; identical to SEQ ID NO: 5745
  GFR-binding peptide
  MOD_RES (2), (4), (37), (38): Xaa is C or S
  MOD_RES (15), (16), (17), (18), (19): Xaa is A or G
  MOD_RES (20), (21), (22), (23): Xaa is A or G or is absent

SEQ ID NO: 78480 - protein, 32 aa, Artificial Sequence; identical to SEQ ID NO: 5746
  GFR-binding peptide
  MOD_RES (11), (12), (13), (14), (15): Xaa is A or G
  MOD_RES (16), (17), (18), (19): Xaa is A or G or is absent

SEQ ID NO: 78481 - protein, 38 aa, Artificial Sequence; identical to SEQ ID NO: 3817
  GFR-binding peptide
  MOD_RES (1), (3), (36), (37): Xaa is C or S
  MOD_RES (14), (15), (16), (17), (18): Xaa is A or G
  MOD_RES (19), (20), (21), (22): Xaa is A or G or is absent

SEQ ID NO: 78482 - protein, 39 aa, Artificial Sequence; identical to SEQ ID NO: 3818
  GFR-binding peptide
  MOD_RES (1), (33), (34): Xaa is C or S

SEQ ID NO: 78483 - protein, 35 aa, Artificial Sequence; identical to SEQ ID NO: 3820
  GFR-binding peptide
  MOD_RES (2), (33), (34): Xaa is C or S

SEQ ID NO: 78484 - protein, 32 aa, Artificial Sequence
  GFR-binding peptide
  MOD_RES (1), (1): Xaa is C or S
XESVAMGQYNKLYTVVGKDLYLISIASLKTPV

SEQ ID NO: 78485 - protein, 31 aa, Artificial Sequence; identical to SEQ ID NO: 3821
  GFR-binding peptide

SEQ ID NO: 78486 - protein, 32 aa, Artificial Sequence; identical to SEQ ID NO: 13185
  GFR-binding peptide
  MOD_RES (31), (32): Xaa is C or S

SEQ ID NO: 78487 - protein, 39 aa, Artificial Sequence; identical to SEQ ID NO: 5750
  GFR-binding peptide
  MOD_RES (1), (35), (36): Xaa is C or S
  MOD_RES (13), (14), (15), (16), (17): Xaa is A or G
  MOD_RES (18), (19), (20), (21): Xaa is A or G or is absent

SEQ ID NO: 78488 - protein, 42 aa, Artificial Sequence; identical to SEQ ID NO: 56793
  GFR-binding peptide
  MOD_RES (2), (4), (36), (37): Xaa is C or S

SEQ ID NO: 78489 - protein, 35 aa, Artificial Sequence; identical to SEQ ID NO: 3825
  GFR-binding peptide
  MOD_RES (31), (32): Xaa is C or S

SEQ ID NO: 78490 - protein, 38 aa, Artificial Sequence; identical to SEQ ID NO: 5753
  GFR-binding peptide
  MOD_RES (2), (4), (37), (38): Xaa is C or S
  MOD_RES (15), (16), (17), (18), (19): Xaa is A or G
  MOD_RES (20), (21), (22), (23): Xaa is A or G or is absent

SEQ ID NO: 78491 - protein, 36 aa, Artificial Sequence; identical to SEQ ID NO: 56796
  GFR-binding peptide
  MOD_RES (1), (3), (36): Xaa is C or S
  MOD_RES (14), (15), (16), (17), (18): Xaa is A or G
  MOD_RES (19), (20), (21), (22): Xaa is A or G or is absent

SEQ ID NO: 78492 - protein, 36 aa, Artificial Sequence; identical to SEQ ID NO: 56797
  GFR-binding peptide
  MOD_RES (2), (33), (34): Xaa is C or S

SEQ ID NO: 78493 - protein, 42 aa, Artificial Sequence
  GFR-binding peptide
  MOD_RES (2), (4), (38), (39): Xaa is C or S
  MOD_RES (16), (17), (18), (19), (20): Xaa is A or G
  MOD_RES (21), (22), (23), (24): Xaa is A or G or is absent
SXGXRDVVMGQYNKLXXXXXXXXXLYLMSIASMKTPTXXPGA

SEQ ID NO: 78494 - protein, 37 aa, Artificial Sequence; identical to SEQ ID NO: 5758
  GFR-binding peptide
  MOD_RES (1), (3): Xaa is C or S
  MOD_RES (16), (17), (18), (19), (20): Xaa is A or G
  MOD_RES (21), (22), (23), (24): Xaa is A or G or is absent

SEQ ID NO: 78495 - protein, 38 aa, Artificial Sequence; identical to SEQ ID NO: 5759
  GFR-binding peptide
  MOD_RES (1), (35), (36): Xaa is C or S
  MOD_RES (13), (14), (15), (16), (17): Xaa is A or G
  MOD_RES (18), (19), (20), (21): Xaa is A or G or is absent

SEQ ID NO: 78496 - protein, 38 aa, Artificial Sequence; identical to SEQ ID NO: 5762
  GFR-binding peptide
  MOD_RES (33), (34): Xaa is C or S
  MOD_RES (11), (12), (13), (14), (15): Xaa is A or G
  MOD_RES (16), (17), (18), (19): Xaa is A or G or is absent

SEQ ID NO: 78497 - protein, 34 aa, Artificial Sequence; identical to SEQ ID NO: 5763
  GFR-binding peptide
  MOD_RES (33), (34): Xaa is C or S
  MOD_RES (11), (12), (13), (14), (15): Xaa is A or G
  MOD_RES (16), (17), (18), (19): Xaa is A or G or is absent

SEQ ID NO: 78498 - protein, 32 aa, Artificial Sequence; identical to SEQ ID NO: 3829
  GFR-binding peptide
  MOD_RES (1), (1): Xaa is C or S

SEQ ID NO: 78499 - protein, 34 aa, Artificial Sequence
  GFR-binding peptide
  MOD_RES (2), (2): Xaa is C or S
  MOD_RES (13), (14), (15), (16), (17): Xaa is A or G
  MOD_RES (18), (19), (20), (21): Xaa is A or G or is absent
GXEEVIMQYNKLXXXXXXXXXLYLMSIASTKVPA

SEQ ID NO: 78500 - protein, 34 aa, Artificial Sequence
  GFR-binding peptide
  MOD_RES (31), (32): Xaa is C or S
DVVMGQYNKLIIQQKDNLYLMSIASMKTPTXXPG

SEQ ID NO: 78501 - protein, 39 aa, Artificial Sequence; identical to SEQ ID NO: 5765
  GFR-binding peptide
  MOD_RES (1), (35), (36): Xaa is C or S
  MOD_RES (13), (14), (15), (16), (17): Xaa is A or G
  MOD_RES (18), (19), (20), (21): Xaa is A or G or is absent

SEQ ID NO: 78502 - protein, 40 aa, Artificial Sequence; identical to SEQ ID NO: 56808
  GFR-binding peptide
  MOD_RES (2), (34), (35): Xaa is C or S

SEQ ID NO: 78503 - protein, 38 aa, Artificial Sequence; identical to SEQ ID NO: 5766
  GFR-binding peptide
  MOD_RES (1), (34), (35): Xaa is C or S
  MOD_RES (12), (13), (14), (15), (16): Xaa is A or G
  MOD_RES (17), (18), (19), (20): Xaa is A or G or is absent

SEQ ID NO: 78504 - protein, 43 aa, Artificial Sequence; identical to SEQ ID NO: 3832
  GFR-binding peptide
  MOD_RES (1), (3), (37), (38): Xaa is C or S
  MOD_RES (15), (16), (17), (18), (19): Xaa is A or G
  MOD_RES (20), (21), (22), (23): Xaa is A or G or is absent

SEQ ID NO: 78505 - protein, 39 aa, Artificial Sequence; identical to SEQ ID NO: 26901
  GFR-binding peptide
  MOD_RES (2), (34), (35): Xaa is C or S

SEQ ID NO: 78506 - protein, 38 aa, Artificial Sequence
  GFR-binding peptide
  MOD_RES (33), (34): Xaa is C or S
  MOD_RES (11), (12), (13), (14), (15): Xaa is A or G
  MOD_RES (16), (17), (18), (19): Xaa is A or G or is absent
DVVMGQYNKLXXXXXXXXXLYLMSIASMKTPTXXPGAS

SEQ ID NO: 78507 - protein, 39 aa, Artificial Sequence
  GFR-binding peptide
  MOD_RES (33), (34): Xaa is C or S
  MOD_RES (11), (12), (13), (14), (15): Xaa is A or G
  MOD_RES (16), (17), (18), (19): Xaa is A or G or is absent
EEVIMQYNKLXXXXXXXXXLYLMSIASTKVPAXXTSPVR

SEQ ID NO: 78508 - protein, 40 aa, Artificial Sequence
  GFR-binding peptide
  MOD_RES (2), (34), (35): Xaa is C or S
GXSRVVMNQYNKLIVNSSDDLYLVSIASLKTPAXXPKPVH

SEQ ID NO: 78509 - protein, 38 aa, Artificial Sequence; identical to SEQ ID NO: 13203
  GFR-binding peptide
  MOD_RES (1), (35), (36): Xaa is C or S
  MOD_RES (13), (14), (15), (16), (17): Xaa is A or G
  MOD_RES (18), (19), (20), (21): Xaa is A or G or is absent

SEQ ID NO: 78510 - protein, 35 aa, Artificial Sequence
  GFR-binding peptide
  MOD_RES (2), (34), (35): Xaa is C or S
GXRDVVMGQYNKLIIQQKDNLYLMSIASMKTPTXX

SEQ ID NO: 78511 - protein, 37 aa, Artificial Sequence
  GFR-binding peptide
  MOD_RES (1), (33), (34): Xaa is C or S
XRDVVMGQYNKLIIQQKDNLYLMSIASMKTPTXXPGA

SEQ ID NO: 78512 - protein, 39 aa, Artificial Sequence
  GFR-binding peptide
  MOD_RES (2), (4), (36), (37): Xaa is C or S
RXGXESVAMGQYNKLYTVVGKDLYLISIASLKTPVXXAK

SEQ ID NO: 78513 - protein, 36 aa, Artificial Sequence
  GFR-binding peptide
  MOD_RES (31), (32): Xaa is C or S
EVVMDQYNKLVVNNAADLYLISIASLRAPVXXSAPA

SEQ ID NO: 78514 - protein, 34 aa, Artificial Sequence; identical to SEQ ID NO: 5769
  GFR-binding peptide
  MOD_RES (1), (33), (34): Xaa is C or S

SEQ ID NO: 78515 - protein, 40 aa, Artificial Sequence; identical to SEQ ID NO: 3838
  GFR-binding peptide
  MOD_RES (1), (3), (35), (36): Xaa is C or S

SEQ ID NO: 78516 - protein, 35 aa, Artificial Sequence; identical to SEQ ID NO: 5770
  GFR-binding peptide
  MOD_RES (1), (1): Xaa is C or S
  MOD_RES (14), (15), (16), (17), (18): Xaa is A or G
  MOD_RES (19), (20), (21), (22): Xaa is A or G or is absent

SEQ ID NO: 78517 - protein, 41 aa, Artificial Sequence; identical to SEQ ID NO: 13208
  GFR-binding peptide
  MOD_RES (2), (4), (36), (37): Xaa is C or S

SEQ ID NO: 78518 - protein, 37 aa, Artificial Sequence; identical to SEQ ID NO: 5771
  GFR-binding peptide
  MOD_RES (2), (33), (34): Xaa is C or S

SEQ ID NO: 78519 - protein, 39 aa, Artificial Sequence; identical to SEQ ID NO: 3840
  GFR-binding peptide
  MOD_RES (2), (34): Xaa is C or S

SEQ ID NO: 78520 - protein, 35 aa, Artificial Sequence; identical to SEQ ID NO: 56817
  GFR-binding peptide
  MOD_RES (34), (35): Xaa is C or S
  MOD_RES (12), (13), (14), (15), (16): Xaa is A or G
  MOD_RES (17), (18), (19), (20): Xaa is A or G or is absent

SEQ ID NO: 78521 - protein, 38 aa, Artificial Sequence; identical to SEQ ID NO: 5773
  GFR-binding peptide
  MOD_RES (1), (35), (36): Xaa is C or S
  MOD_RES (13), (14), (15), (16), (17): Xaa is A or G
  MOD_RES (18), (19), (20), (21): Xaa is A or G or is absent

SEQ ID NO: 78522 - protein, 36 aa, Artificial Sequence; identical to SEQ ID NO: 5774
  GFR-binding peptide
  MOD_RES (2), (35), (36): Xaa is C or S

SEQ ID NO: 78523 - protein, 43 aa, Artificial Sequence; identical to SEQ ID NO: 5778
  GFR-binding peptide
  MOD_RES (2), (37), (38): Xaa is C or S
  MOD_RES (15), (16), (17), (18), (19): Xaa is A or G
  MOD_RES (20), (21), (22), (23): Xaa is A or G or is absent

SEQ ID NO: 78524 - protein, 33 aa, Artificial Sequence
  GFR-binding peptide
  MOD_RES (1), (33): Xaa is C or S
XSEVTMNQYNKLVVNKNEDLYLISIASMKEPVX

SEQ ID NO: 78525 - protein, 40 aa, Artificial Sequence; identical to SEQ ID NO: 13213
  GFR-binding peptide
  MOD_RES (2), (34), (35): Xaa is C or S

SEQ ID NO: 78526 - protein, 38 aa, Artificial Sequence; identical to SEQ ID NO: 24894
  GFR-binding peptide
  MOD_RES (33), (34): Xaa is C or S
  MOD_RES (11), (12), (13), (14), (15): Xaa is A or G
  MOD_RES (16), (17), (18), (19): Xaa is A or G or is absent

SEQ ID NO: 78527 - protein, 40 aa, Artificial Sequence; identical to SEQ ID NO: 3845
  GFR-binding peptide
  MOD_RES (2), (34), (35): Xaa is C or S

SEQ ID NO: 78528 - protein, 37 aa, Artificial Sequence
  GFR-binding peptide
  MOD_RES (32), (33): Xaa is C or S
AEVVMDQYNKLVVNNAADLYLISIASLRAPVXXSAPA

SEQ ID NO: 78529 - protein, 40 aa, Artificial Sequence
  GFR-binding peptide
  MOD_RES (2), (4), (37), (38): Xaa is C or S
  MOD_RES (15), (16), (17), (18), (19): Xaa is A or G
  MOD_RES (20), (21), (22), (23): Xaa is A or G or is absent
LXGXEEVIMQYNKLXXXXXXXXXLYLMSIASTKVPAXXTS

SEQ ID NO: 78530 - protein, 38 aa, Artificial Sequence; identical to SEQ ID NO: 24899
  GFR-binding peptide
  MOD_RES (1), (35), (36): Xaa is C or S
  MOD_RES (13), (14), (15), (16), (17): Xaa is A or G
  MOD_RES (18), (19), (20), (21): Xaa is A or G or is absent

SEQ ID NO: 78531 - protein, 34 aa, Artificial Sequence; identical to SEQ ID NO: 3846
  GFR-binding peptide
  MOD_RES (2), (33), (34): Xaa is C or S

SEQ ID NO: 78532 - protein, 32 aa, Artificial Sequence; identical to SEQ ID NO: 5783
  GFR-binding peptide
  MOD_RES (1), (32): Xaa is C or S

SEQ ID NO: 78533 - protein, 36 aa, Artificial Sequence; identical to SEQ ID NO: 56828
  GFR-binding peptide
  MOD_RES (1), (3), (35), (36): Xaa is C or S

SEQ ID NO: 78534 - protein, 38 aa, Artificial Sequence; identical to SEQ ID NO: 5784
  GFR-binding peptide
  MOD_RES (32), (33): Xaa is C or S

SEQ ID NO: 78535 - protein, 36 aa, Artificial Sequence; identical to SEQ ID NO: 3849
  GFR-binding peptide
  MOD_RES (33), (34): Xaa is C or S
  MOD_RES (11), (12), (13), (14), (15): Xaa is A or G
  MOD_RES (16), (17), (18), (19): Xaa is A or G or is absent

SEQ ID NO: 78536 - protein, 40 aa, Artificial Sequence; identical to SEQ ID NO: 5787
  GFR-binding peptide
  MOD_RES (1), (3), (35): Xaa is C or S

SEQ ID NO: 78537 - protein, 38 aa, Artificial Sequence
  GFR-binding peptide
  MOD_RES (2), (34), (35): Xaa is C or S
GXAEVVMDQYNKLVVNNAADLYLISIASLRAPVXXSAP

SEQ ID NO: 78538 - protein, 36 aa, Artificial Sequence; identical to SEQ ID NO: 5788
  GFR-binding peptide
  MOD_RES (34), (35): Xaa is C or S
  MOD_RES (12), (13), (14), (15), (16): Xaa is A or G
  MOD_RES (17), (18), (19), (20): Xaa is A or G or is absent

SEQ ID NO: 78539 - protein, 38 aa, Artificial Sequence; identical to SEQ ID NO: 11278
  GFR-binding peptide
  MOD_RES (2), (36), (37): Xaa is C or S
  MOD_RES (14), (15), (16), (17), (18): Xaa is A or G
  MOD_RES (19), (20), (21), (22): Xaa is A or G or is absent

SEQ ID NO: 78540 - protein, 38 aa, Artificial Sequence
  GFR-binding peptide
  MOD_RES (2), (34), (35): Xaa is C or S
GXRDVVMGQYNKLIIQQKDNLYLMSIASMKTPTXXPGA

SEQ ID NO: 78541 - protein, 35 aa, Artificial Sequence; identical to SEQ ID NO: 63131
  GFR-binding peptide
  MOD_RES (1), (3), (35): Xaa is C or S

SEQ ID NO: 78542 - protein, 37 aa, Artificial Sequence; identical to SEQ ID NO: 59631
  GFR-binding peptide
  MOD_RES (1), (35), (36): Xaa is C or S
  MOD_RES (13), (14), (15), (16), (17): Xaa is A or G
  MOD_RES (18), (19), (20), (21): Xaa is A or G or is absent

SEQ ID NO: 78543 - protein, 37 aa, Artificial Sequence
  GFR-binding peptide
  MOD_RES (2), (34), (35): Xaa is C or S
GXRDVVMGQYNKLIIQQKDNLYLMSIASMKTPTXXPG

SEQ ID NO: 78544 - protein, 33 aa, Artificial Sequence
  GFR-binding peptide
  MOD_RES (33), (33): Xaa is C or S
  MOD_RES (11), (12), (13), (14), (15): Xaa is A or G
  MOD_RES (16), (17), (18), (19): Xaa is A or G or is absent
EVVMDQYNKLXXXXXXXXXLYLISIASLRAPVX

SEQ ID NO: 78545 - protein, 37 aa, Artificial Sequence; identical to SEQ ID NO: 3854
  GFR-binding peptide
  MOD_RES (1), (35), (36): Xaa is C or S
  MOD_RES (13), (14), (15), (16), (17): Xaa is A or G
  MOD_RES (18), (19), (20), (21): Xaa is A or G or is absent

SEQ ID NO: 78546 - protein, 36 aa, Artificial Sequence; identical to SEQ ID NO: 3855
  GFR-binding peptide
  MOD_RES (1), (3), (34), (35): Xaa is C or S

SEQ ID NO: 78547 - protein, 42 aa, Artificial Sequence; identical to SEQ ID NO: 5798
  GFR-binding peptide
  MOD_RES (2), (4), (36), (37): Xaa is C or S

SEQ ID NO: 78548 - protein, 32 aa, Artificial Sequence; identical to SEQ ID NO: 5799
  GFR-binding peptide
  MOD_RES (1), (32): Xaa is C or S

SEQ ID NO: 78549 - protein, 38 aa, Artificial Sequence; identical to SEQ ID NO: 5801
  GFR-binding peptide
  MOD_RES (2), (4), (38): Xaa is C or S
  MOD_RES (16), (17), (18), (19), (20): Xaa is A or G
  MOD_RES (21), (22), (23), (24): Xaa is A or G or is absent

SEQ ID NO: 78550 - protein, 39 aa, Artificial Sequence; identical to SEQ ID NO: 56844
  GFR-binding peptide
  MOD_RES (2), (33), (34): Xaa is C or S

SEQ ID NO: 78551 - protein, 38 aa, Artificial Sequence; identical to SEQ ID NO: 3859
  GFR-binding peptide
  MOD_RES (34), (35): Xaa is C or S
  MOD_RES (12), (13), (14), (15), (16): Xaa is A or G
  MOD_RES (17), (18), (19), (20): Xaa is A or G or is absent

SEQ ID NO: 78552 - protein, 41 aa, Artificial Sequence; identical to SEQ ID NO: 3860
  GFR-binding peptide
  MOD_RES (2), (4), (38), (39): Xaa is C or S
  MOD_RES (16), (17), (18), (19), (20): Xaa is A or G
  MOD_RES (21), (22), (23), (24): Xaa is A or G or is absent

SEQ ID NO: 78553 - protein, 40 aa, Artificial Sequence; identical to SEQ ID NO: 3861
  GFR-binding peptide
  MOD_RES (34), (35): Xaa is C or S
  MOD_RES (12), (13), (14), (15), (16): Xaa is A or G
  MOD_RES (17), (18), (19), (20): Xaa is A or G or is absent

SEQ ID NO: 78554 - protein, 39 aa, Artificial Sequence; identical to SEQ ID NO: 5802
  GFR-binding peptide
  MOD_RES (1), (3), (36), (37): Xaa is C or S

SEQ ID NO: 78555 - protein, 38 aa, Artificial Sequence; identical to SEQ ID NO: 5803
  GFR-binding peptide
  MOD_RES (2), (4), (37), (38): Xaa is C or S
  MOD_RES (15), (16), (17), (18), (19): Xaa is A or G
  MOD_RES (20), (21), (22), (23): Xaa is A or G or is absent

SEQ ID NO: 78556 - protein, 36 aa, Artificial Sequence; identical to SEQ ID NO: 5804
  GFR-binding peptide
  MOD_RES (1), (35), (36): Xaa is C or S
  MOD_RES (13), (14), (15), (16), (17): Xaa is A or G
  MOD_RES (18), (19), (20), (21): Xaa is A or G or is absent

SEQ ID NO: 78557 - protein, 42 aa, Artificial Sequence; identical to SEQ ID NO: 3864
  GFR-binding peptide
  MOD_RES (2), (36), (37): Xaa is C or S
  MOD_RES (14), (15), (16), (17), (18): Xaa is A or G
  MOD_RES (19), (20), (21), (22): Xaa is A or G or is absent

SEQ ID NO: 78558 - protein, 41 aa, Artificial Sequence; identical to SEQ ID NO: 13238
  GFR-binding peptide
  MOD_RES (1), (3), (35), (36): Xaa is C or S

SEQ ID NO: 78559 - protein, 39 aa, Artificial Sequence; identical to SEQ ID NO: 11295
  GFR-binding peptide
  MOD_RES (1), (3), (35), (36): Xaa is C or S

SEQ ID NO: 78560 - protein, 37 aa, Artificial Sequence
  GFR-binding peptide
  MOD_RES (1), (3), (35), (36): Xaa is C or S
XGXRDVVMGQYNKLIIQQKDNLYLMSIASMKTPTXXP

SEQ ID NO: 78561 - protein, 39 aa, Artificial Sequence; identical to SEQ ID NO: 56854
  GFR-binding peptide
  MOD_RES (33), (34): Xaa is C or S
  MOD_RES (11), (12), (13), (14), (15): Xaa is A or G
  MOD_RES (16), (17), (18), (19): Xaa is A or G or is absent

SEQ ID NO: 78562 - protein, 38 aa, Artificial Sequence; identical to SEQ ID NO: 3868
  GFR-binding peptide
  MOD_RES (1), (3), (35), (36): Xaa is C or S

SEQ ID NO: 78563 - protein, 38 aa, Artificial Sequence
  GFR-binding peptide
  MOD_RES (33), (34): Xaa is C or S
  MOD_RES (11), (12), (13), (14), (15): Xaa is A or G
  MOD_RES (16), (17), (18), (19): Xaa is A or G or is absent
EVTMNQYNKLXXXXXXXXXLYLISIASMKEPVXXPEPI

SEQ ID NO: 78564 - protein, 31 aa, Artificial Sequence; identical to SEQ ID NO: 5810
  GFR-binding peptide
  MOD_RES (1), (1): Xaa is C or S

SEQ ID NO: 78565 - protein, 36 aa, Artificial Sequence; identical to SEQ ID NO: 5811
  GFR-binding peptide
  MOD_RES (2), (34), (35): Xaa is C or S

SEQ ID NO: 78566 - protein, 37 aa, Artificial Sequence
  GFR-binding peptide
  MOD_RES (1), (33), (34): Xaa is C or S
XSEVTMNQYNKLVVNKNEDLYLISIASMKEPVXXPEP

SEQ ID NO: 78567 - protein, 31 aa, Artificial Sequence; identical to SEQ ID NO: 63155
  GFR-binding peptide

SEQ ID NO: 78568 - protein, 34 aa, Artificial Sequence; identical to SEQ ID NO: 5813
  GFR-binding peptide
  MOD_RES (2), (4): Xaa is C or S

SEQ ID NO: 78569 - protein, 30 aa, Artificial Sequence; identical to SEQ ID NO: 5814
  GFR-binding peptide

SEQ ID NO: 78570 - protein, 41 aa, Artificial Sequence
  GFR-binding peptide
  MOD_RES (1), (3), (35), (36): Xaa is C or S
XAXSEVTMNQYNKLVVNKNEDLYLISIASMKEPVXXPEPIG

SEQ ID NO: 78571 - protein, 41 aa, Artificial Sequence; identical to SEQ ID NO: 3872
  GFR-binding peptide
  MOD_RES (2), (36), (37): Xaa is C or S
  MOD_RES (14), (15), (16), (17), (18): Xaa is A or G
  MOD_RES (19), (20), (21), (22): Xaa is A or G or is absent

SEQ ID NO: 78572 - protein, 39 aa, Artificial Sequence
  GFR-binding peptide
  MOD_RES (34), (35): Xaa is C or S
  MOD_RES (12), (13), (14), (15), (16): Xaa is A or G
  MOD_RES (17), (18), (19), (20): Xaa is A or G or is absent
ESVAMGQYNKLXXXXXXXXXLYLISIASLKTPVXXAKSA

SEQ ID NO: 78573 - protein, 33 aa, Artificial Sequence
  GFR-binding peptide
  MOD_RES (31), (32): Xaa is C or S
EVVMDQYNKLVVNNAADLYLISIASLRAPVXXS

SEQ ID NO: 78574 - protein, 36 aa, Artificial Sequence
  GFR-binding peptide
  MOD_RES (1), (33), (34): Xaa is C or S
XESVAMGQYNKLYTVVGKDLYLISIASLKTPVXXAK

SEQ ID NO: 78575 - protein, 38 aa, Artificial Sequence; identical to SEQ ID NO: 5816
  GFR-binding peptide
  MOD_RES (2), (33), (34): Xaa is C or S

SEQ ID NO: 78576 - protein, 35 aa, Artificial Sequence; identical to SEQ ID NO: 13249
  GFR-binding peptide
  MOD_RES (2), (4): Xaa is C or S

SEQ ID NO: 78577 - protein, 36 aa, Artificial Sequence; identical to SEQ ID NO: 3875
  GFR-binding peptide
  MOD_RES (2), (4), (36): Xaa is C or S

SEQ ID NO: 78578 - protein, 38 aa, Artificial Sequence; identical to SEQ ID NO: 5818
  GFR-binding peptide
  MOD_RES (1), (3), (34), (35): Xaa is C or S

SEQ ID NO: 78579 - protein, 42 aa, Artificial Sequence; identical to SEQ ID NO: 3876
  GFR-binding peptide
  MOD_RES (2), (4), (37), (38): Xaa is C or S
  MOD_RES (15), (16), (17), (18), (19): Xaa is A or G
  MOD_RES (20), (21), (22), (23): Xaa is A or G or is absent

SEQ ID NO: 78580 - protein, 33 aa, Artificial Sequence; identical to SEQ ID NO: 3877
  GFR-binding peptide
  MOD_RES (32), (33): Xaa is C or S

SEQ ID NO: 78581 - protein, 38 aa, Artificial Sequence; identical to SEQ ID NO: 11304
  GFR-binding peptide
  MOD_RES (2), (4), (38): Xaa is C or S
  MOD_RES (16), (17), (18), (19), (20): Xaa is A or G
  MOD_RES (21), (22), (23), (24): Xaa is A or G or is absent

SEQ ID NO: 78582 - protein, 41 aa, Artificial Sequence; identical to SEQ ID NO: 5821
  GFR-binding peptide
  MOD_RES (1), (36), (37): Xaa is C or S
  MOD_RES (14), (15), (16), (17), (18): Xaa is A or G
  MOD_RES (19), (20), (21), (22): Xaa is A or G or is absent

SEQ ID NO: 78583 - protein, 42 aa, Artificial Sequence; identical to SEQ ID NO: 64886
  GFR-binding peptide
  MOD_RES (2), (4), (36), (37): Xaa is C or S

SEQ ID NO: 78584 - protein, 37 aa, Artificial Sequence; identical to SEQ ID NO: 3879
  GFR-binding peptide
  MOD_RES (1), (34), (35): Xaa is C or S

SEQ ID NO: 78585 - protein, 35 aa, Artificial Sequence; identical to SEQ ID NO: 5822
  GFR-binding peptide
  MOD_RES (1), (32), (33): Xaa is C or S

SEQ ID NO: 78586 - protein, 39 aa, Artificial Sequence; identical to SEQ ID NO: 5823
  GFR-binding peptide
  MOD_RES (34), (35): Xaa is C or S
  MOD_RES (12), (13), (14), (15), (16): Xaa is A or G
  MOD_RES (17), (18), (19), (20): Xaa is A or G or is absent

SEQ ID NO: 78587 - protein, 35 aa, Artificial Sequence; identical to SEQ ID NO: 11305
  GFR-binding peptide
  MOD_RES (32), (33): Xaa is C or S

SEQ ID NO: 78588 - protein, 36 aa, Artificial Sequence; identical to SEQ ID NO: 63162
  GFR-binding peptide
  MOD_RES (2), (34), (35): Xaa is C or S

SEQ ID NO: 78589 - protein, 32 aa, Artificial Sequence
  GFR-binding peptide
  MOD_RES (31), (32): Xaa is C or S
SVAMGQYNKLYTVVGKDLYLISIASLKTPVXX

SEQ ID NO: 78590 - protein, 36 aa, Artificial Sequence; identical to SEQ ID NO: 3882
  GFR-binding peptide
  MOD_RES (31), (32): Xaa is C or S

SEQ ID NO: 78591 - protein, 36 aa, Artificial Sequence
  GFR-binding peptide
  MOD_RES (1), (35), (36): Xaa is C or S
  MOD_RES (13), (14), (15), (16), (17): Xaa is A or G
  MOD_RES (18), (19), (20), (21): Xaa is A or G or is absent
XESVAMGQYNKLXXXXXXXXXLYLISIASLKTPVXX

SEQ ID NO: 78592 - protein, 34 aa, Artificial Sequence; identical to SEQ ID NO: 5826
  GFR-binding peptide
  MOD_RES (32), (33): Xaa is C or S

SEQ ID NO: 78593 - protein, 33 aa, Artificial Sequence; identical to SEQ ID NO: 56875
  GFR-binding peptide
  MOD_RES (31), (32): Xaa is C or S

SEQ ID NO: 78594 - protein, 34 aa, Artificial Sequence; identical to SEQ ID NO: 13260
  GFR-binding peptide
  MOD_RES (34), (34): Xaa is C or S
  MOD_RES (12), (13), (14), (15), (16): Xaa is A or G
  MOD_RES (17), (18), (19), (20): Xaa is A or G or is absent

SEQ ID NO: 78595 - protein, 39 aa, Artificial Sequence; identical to SEQ ID NO: 3883
  GFR-binding peptide
  MOD_RES (1), (3), (35), (36): Xaa is C or S

SEQ ID NO: 78596 - protein, 44 aa, Artificial Sequence
  GFR-binding peptide
  MOD_RES (2), (4), (38), (39): Xaa is C or S
  MOD_RES (16), (17), (18), (19), (20): Xaa is A or G
  MOD_RES (21), (22), (23), (24): Xaa is A or G or is absent
RXAXSEVTMNQYNKLXXXXXXXXXLYLISIASMKEPVXXPEPIG

SEQ ID NO: 78597 - protein, 43 aa, Artificial Sequence; identical to SEQ ID NO: 56884
  GFR-binding peptide
  MOD_RES (2), (4), (38), (39): Xaa is C or S
  MOD_RES (16), (17), (18), (19), (20): Xaa is A or G
  MOD_RES (21), (22), (23), (24): Xaa is A or G or is absent

SEQ ID NO: 78598 - protein, 36 aa, Artificial Sequence; identical to SEQ ID NO: 5831
  GFR-binding peptide
  MOD_RES (2), (2): Xaa is C or S
  MOD_RES (15), (16), (17), (18), (19): Xaa is A or G
  MOD_RES (20), (21), (22), (23): Xaa is A or G or is absent

SEQ ID NO: 78599 - protein, 33 aa, Artificial Sequence; identical to SEQ ID NO: 5834
  GFR-binding peptide
  MOD_RES (2), (2): Xaa is C or S

SEQ ID NO: 78600 - protein, 42 aa, Artificial Sequence
  GFR-binding peptide
  MOD_RES (1), (3), (36), (37): Xaa is C or S
  MOD_RES (14), (15), (16), (17), (18): Xaa is A or G
  MOD_RES (19), (20), (21), (22): Xaa is A or G or is absent
XGXEEVIMQYNKLXXXXXXXXXLYLMSIASTKVPAXXTSPVR

SEQ ID NO: 78601 - protein, 33 aa, Artificial Sequence; identical to SEQ ID NO: 3886
  GFR-binding peptide
  MOD_RES (2), (2): Xaa is C or S

SEQ ID NO: 78602 - protein, 31 aa, Artificial Sequence
  GFR-binding peptide
AEVVMDQYNKLVVNNAADLYLISIASLRAPV

SEQ ID NO: 78603 - protein, 40 aa, Artificial Sequence; identical to SEQ ID NO: 3887
  GFR-binding peptide
  MOD_RES (35), (36): Xaa is C or S
  MOD_RES (13), (14), (15), (16), (17): Xaa is A or G
  MOD_RES (18), (19), (20), (21): Xaa is A or G or is absent

SEQ ID NO: 78604 - protein, 38 aa, Artificial Sequence; identical to SEQ ID NO: 3888
  GFR-binding peptide
  MOD_RES (1), (3), (34), (35): Xaa is C or S

SEQ ID NO: 78605 - protein, 41 aa, Artificial Sequence; identical to SEQ ID NO: 26962
  GFR-binding peptide
  MOD_RES (1), (3), (35), (36): Xaa is C or S

SEQ ID NO: 78606 - protein, 37 aa, Artificial Sequence; identical to SEQ ID NO: 5836
  GFR-binding peptide
  MOD_RES (2), (35), (36): Xaa is C or S
  MOD_RES (13), (14), (15), (16), (17): Xaa is A or G
  MOD_RES (18), (19), (20), (21): Xaa is A or G or is absent

SEQ ID NO: 78607 - protein, 34 aa, Artificial Sequence; identical to SEQ ID NO: 13270
  GFR-binding peptide
  MOD_RES (34), (34): Xaa is C or S
  MOD_RES (12), (13), (14), (15), (16): Xaa is A or G
  MOD_RES (17), (18), (19), (20): Xaa is A or G or is absent

SEQ ID NO: 78608 - protein, 38 aa, Artificial Sequence; identical to SEQ ID NO: 56895
  GFR-binding peptide
  MOD_RES (1), (3), (34), (35): Xaa is C or S

SEQ ID NO: 78609 - protein, 34 aa, Artificial Sequence; identical to SEQ ID NO: 5839
  GFR-binding peptide
  MOD_RES (31), (32): Xaa is C or S

SEQ ID NO: 78610 - protein, 35 aa, Artificial Sequence
  GFR-binding peptide
  MOD_RES (31), (32): Xaa is C or S
EVVMDQYNKLVVNNAADLYLISIASLRAPVXXSAP

SEQ ID NO: 78611 - protein, 40 aa, Artificial Sequence; identical to SEQ ID NO: 3895
  GFR-binding peptide
  MOD_RES (1), (3), (35), (36): Xaa is C or S

SEQ ID NO: 78612 - protein, 41 aa, Artificial Sequence; identical to SEQ ID NO: 5840
  GFR-binding peptide
  MOD_RES (1), (3), (36), (37): Xaa is C or S
  MOD_RES (14), (15), (16), (17), (18): Xaa is A or G
  MOD_RES (19), (20), (21), (22): Xaa is A or G or is absent

SEQ ID NO: 78613 - protein, 36 aa, Artificial Sequence; identical to SEQ ID NO: 5841
  GFR-binding peptide
  MOD_RES (2), (33), (34): Xaa is C or S

SEQ ID NO: 78614 - protein, 34 aa, Artificial Sequence; identical to SEQ ID NO: 3896
  GFR-binding peptide
  MOD_RES (1), (3): Xaa is C or S

SEQ ID NO: 78615 - protein, 39 aa, Artificial Sequence; identical to SEQ ID NO: 13275
  GFR-binding peptide
  MOD_RES (1), (33), (34): Xaa is C or S

SEQ ID NO: 78616 - protein, 42 aa, Artificial Sequence; identical to SEQ ID NO: 3898
  GFR-binding peptide
  MOD_RES (2), (4), (36), (37): Xaa is C or S

SEQ ID NO: 78617 - protein, 39 aa, Artificial Sequence; identical to SEQ ID NO: 5847
  GFR-binding peptide
  MOD_RES (33), (34): Xaa is C or S
  MOD_RES (11), (12), (13), (14), (15): Xaa is A or G
  MOD_RES (16), (17), (18), (19): Xaa is A or G or is absent

SEQ ID NO: 78618 - protein, 35 aa, Artificial Sequence; identical to SEQ ID NO: 5848
  GFR-binding peptide
  MOD_RES (2), (33), (34): Xaa is C or S

SEQ ID NO: 78619 - protein, 39 aa, Artificial Sequence; identical to SEQ ID NO: 5849
  GFR-binding peptide
  MOD_RES (2), (34), (35): Xaa is C or S

SEQ ID NO: 78620 - protein, 36 aa, Artificial Sequence; identical to SEQ ID NO: 3899
  GFR-binding peptide
  MOD_RES (2), (34), (35): Xaa is C or S

SEQ ID NO: 78621 - protein, 35 aa, Artificial Sequence; identical to SEQ ID NO: 64915
  GFR-binding peptide
  MOD_RES (2), (4): Xaa is C or S

SEQ ID NO: 78622 - protein, 37 aa, Artificial Sequence; identical to SEQ ID NO: 3901
  GFR-binding peptide
  MOD_RES (2), (4), (35), (36): Xaa is C or S

SEQ ID NO: 78623 - protein, 37 aa, Artificial Sequence; identical to SEQ ID NO: 56907
  GFR-binding peptide
  MOD_RES (1), (32), (33): Xaa is C or S

SEQ ID NO: 78624 - protein, 32 aa, Artificial Sequence; identical to SEQ ID NO: 24983
  GFR-binding peptide
  MOD_RES (1), (1): Xaa is C or S

SEQ ID NO: 78625 - protein, 37 aa, Artificial Sequence; identical to SEQ ID NO: 5853
  GFR-binding peptide
  MOD_RES (32), (33): Xaa is C or S

SEQ ID NO: 78626 - protein, 39 aa, Artificial Sequence
  GFR-binding peptide
  MOD_RES (2), (4), (38), (39): Xaa is C or S
  MOD_RES (16), (17), (18), (19), (20): Xaa is A or G
  MOD_RES (21), (22), (23), (24): Xaa is A or G or is absent
RXGXESVAMGQYNKLXXXXXXXXXLYLISIASLKTPVXX

SEQ ID NO: 78627 - protein, 37 aa, Artificial Sequence; identical to SEQ ID NO: 26986
  GFR-binding peptide
  MOD_RES (32), (33): Xaa is C or S

SEQ ID NO: 78628 - protein, 41 aa, Artificial Sequence; identical to SEQ ID NO: 5860
  GFR-binding peptide
  MOD_RES (2), (4), (38), (39): Xaa is C or S
  MOD_RES (16), (17), (18), (19), (20): Xaa is A or G
  MOD_RES (21), (22), (23), (24): Xaa is A or G or is absent

SEQ ID NO: 78629 - protein, 37 aa, Artificial Sequence; identical to SEQ ID NO: 5861
  GFR-binding peptide
  MOD_RES (31), (32): Xaa is C or S

SEQ ID NO: 78630 - protein, 36 aa, Artificial Sequence; identical to SEQ ID NO: 5863
  GFR-binding peptide
  MOD_RES (32), (32): Xaa is C or S

SEQ ID NO: 78631 - protein, 35 aa, Artificial Sequence
  GFR-binding peptide
  MOD_RES (31), (32): Xaa is C or S
DVVMGQYNKLIIQQKDNLYLMSIASMKTPTXXPGA

SEQ ID NO: 78632 - protein, 36 aa, Artificial Sequence
  GFR-binding peptide
  MOD_RES (2), (4), (36): Xaa is C or S
SXGXRDVVMGQYNKLIIQQKDNLYLMSIASMKTPTX

SEQ ID NO: 78633 - protein, 34 aa, Artificial Sequence; identical to SEQ ID NO: 5865
  GFR-binding peptide
  MOD_RES (32), (33): Xaa is C or S

SEQ ID NO: 78634 - protein, 31 aa, Artificial Sequence
  GFR-binding peptide
  MOD_RES (31), (31): Xaa is C or S
EVTMNQYNKLVVNKNEDLYLISIASMKEPVX

SEQ ID NO: 78635 - protein, 37 aa, Artificial Sequence; identical to SEQ ID NO: 3907
  GFR-binding peptide
  MOD_RES (1), (3), (37): Xaa is C or S
  MOD_RES (15), (16), (17), (18), (19): Xaa is A or G
  MOD_RES (20), (21), (22), (23): Xaa is A or G or is absent

SEQ ID NO: 78636 - protein, 31 aa, Artificial Sequence; identical to SEQ ID NO: 5867
  GFR-binding peptide

SEQ ID NO: 78637 - protein, 37 aa, Artificial Sequence; identical to SEQ ID NO: 26993
  GFR-binding peptide
  MOD_RES (33), (34): Xaa is C or S
  MOD_RES (11), (12), (13), (14), (15): Xaa is A or G
  MOD_RES (16), (17), (18), (19): Xaa is A or G or is absent

SEQ ID NO: 78638 - protein, 40 aa, Artificial Sequence; identical to SEQ ID NO: 5868
  GFR-binding peptide
  MOD_RES (2), (4), (38), (39): Xaa is C or S
  MOD_RES (16), (17), (18), (19), (20): Xaa is A or G
  MOD_RES (21), (22), (23), (24): Xaa is A or G or is absent

SEQ ID NO: 78639 - protein, 35 aa, Artificial Sequence; identical to SEQ ID NO: 3910
  GFR-binding peptide
  MOD_RES (31), (32): Xaa is C or S

SEQ ID NO: 78640 - protein, 41 aa, Artificial Sequence; identical to SEQ ID NO: 3911
  GFR-binding peptide
  MOD_RES (2), (35), (36): Xaa is C or S
  MOD_RES (13), (14), (15), (16), (17): Xaa is A or G
  MOD_RES (18), (19), (20), (21): Xaa is A or G or is absent

SEQ ID NO: 78641 - protein, 40 aa, Artificial Sequence; identical to SEQ ID NO: 5869
  GFR-binding peptide
  MOD_RES (1), (3), (37), (38): Xaa is C or S
  MOD_RES (15), (16), (17), (18), (19): Xaa is A or G
  MOD_RES (20), (21), (22), (23): Xaa is A or G or is absent

SEQ ID NO: 78642 - protein, 33 aa, Artificial Sequence; identical to SEQ ID NO: 56924
  GFR-binding peptide
  MOD_RES (2), (2): Xaa is C or S

SEQ ID NO: 78643 - protein, 41 aa, Artificial Sequence; identical to SEQ ID NO: 11333
  GFR-binding peptide
  MOD_RES (2), (4), (38), (39): Xaa is C or S
  MOD_RES (16), (17), (18), (19), (20): Xaa is A or G
  MOD_RES (21), (22), (23), (24): Xaa is A or G or is absent

SEQ ID NO: 78644 - protein, 40 aa, Artificial Sequence; identical to SEQ ID NO: 3914
  GFR-binding peptide
  MOD_RES (2), (35), (36): Xaa is C or S

SEQ ID NO: 78645 - protein, 37 aa, Artificial Sequence; identical to SEQ ID NO: 5871
  GFR-binding peptide
  MOD_RES (1), (33), (34): Xaa is C or S

SEQ ID NO: 78646 - protein, 42 aa, Artificial Sequence
  GFR-binding peptide
  MOD_RES (2), (36), (37): Xaa is C or S
  MOD_RES (14), (15), (16), (17), (18): Xaa is A or G
  MOD_RES (19), (20), (21), (22): Xaa is A or G or is absent
GXRDVVMGQYNKLXXXXXXXXXLYLMSIASMKTPTXXPGASG

SEQ ID NO: 78647 - protein, 32 aa, Artificial Sequence; identical to SEQ ID NO: 5873
  GFR-binding peptide
  MOD_RES (31), (32): Xaa is C or S

SEQ ID NO: 78648 - protein, 34 aa, Artificial Sequence; identical to SEQ ID NO: 5874
  GFR-binding peptide
  MOD_RES (33), (34): Xaa is C or S
  MOD_RES (11), (12), (13), (14), (15): Xaa is A or G
  MOD_RES (16), (17), (18), (19): Xaa is A or G or is absent

SEQ ID NO: 78649 - protein, 34 aa, Artificial Sequence
  GFR-binding peptide
  MOD_RES (34), (34): Xaa is C or S
  MOD_RES (12), (13), (14), (15), (16): Xaa is A or G
  MOD_RES (17), (18), (19), (20): Xaa is A or G or is absent
SEVTMNQYNKLXXXXXXXXXLYLISIASMKEPVX

SEQ ID NO: 78650 - protein, 39 aa, Artificial Sequence; identical to SEQ ID NO: 3918
  GFR-binding peptide
  MOD_RES (33), (34): Xaa is C or S
  MOD_RES (11), (12), (13), (14), (15): Xaa is A or G
  MOD_RES (16), (17), (18), (19): Xaa is A or G or is absent

SEQ ID NO: 78651 - protein, 34 aa, Artificial Sequence
  GFR-binding peptide
  MOD_RES (31), (32): Xaa is C or S
SVAMGQYNKLYTVVGKDLYLISIASLKTPVXXAK

SEQ ID NO: 78652 - protein, 37 aa, Artificial Sequence; identical to SEQ ID NO: 3923
  GFR-binding peptide
  MOD_RES (2), (4), (36): Xaa is C or S

SEQ ID NO: 78653 - protein, 34 aa, Artificial Sequence; identical to SEQ ID NO: 5878
  GFR-binding peptide
  MOD_RES (1), (1): Xaa is C or S
  MOD_RES (13), (14), (15), (16), (17): Xaa is A or G
  MOD_RES (18), (19), (20), (21): Xaa is A or G or is absent

SEQ ID NO: 78654 - protein, 36 aa, Artificial Sequence; identical to SEQ ID NO: 5880
  GFR-binding peptide
  MOD_RES (33), (34): Xaa is C or S
  MOD_RES (11), (12), (13), (14), (15): Xaa is A or G
  MOD_RES (16), (17), (18), (19): Xaa is A or G or is absent

SEQ ID NO: 78655 - protein, 41 aa, Artificial Sequence
  GFR-binding peptide
  MOD_RES (2), (4), (36), (37): Xaa is C or S
RXAXSEVTMNQYNKLVVNKNEDLYLISIASMKEPVXXPEPI

SEQ ID NO: 78656 - protein, 43 aa, Artificial Sequence; identical to SEQ ID NO: 5882
  GFR-binding peptide
  MOD_RES (2), (4), (37), (38): Xaa is C or S
  MOD_RES (15), (16), (17), (18), (19): Xaa is A or G
  MOD_RES (20), (21), (22), (23): Xaa is A or G or is absent

SEQ ID NO: 78657 - protein, 33 aa, Artificial Sequence
  GFR-binding peptide
  MOD_RES (1), (33): Xaa is C or S
XRDVVMGQYNKLIIQQKDNLYLMSIASMKTPTX

SEQ ID NO: 78658 - protein, 41 aa, Artificial Sequence; identical to SEQ ID NO: 5883
  GFR-binding peptide
  MOD_RES (2), (4), (35), (36): Xaa is C or S

SEQ ID NO: 78659 - protein, 35 aa, Artificial Sequence
  GFR-binding peptide
  MOD_RES (1), (3), (35): Xaa is C or S
XGXAEVVMDQYNKLVVNNAADLYLISIASLRAPVX

SEQ ID NO: 78660 - protein, 35 aa, Artificial Sequence; identical to SEQ ID NO: 5884
  GFR-binding peptide
  MOD_RES (31), (32): Xaa is C or S

SEQ ID NO: 78661 - protein, 38 aa, Artificial Sequence; identical to SEQ ID NO: 3927
  GFR-binding peptide
  MOD_RES (33), (34): Xaa is C or S
  MOD_RES (11), (12), (13), (14), (15): Xaa is A or G
  MOD_RES (16), (17), (18), (19): Xaa is A or G or is absent

SEQ ID NO: 78662 - protein, 35 aa, Artificial Sequence; identical to SEQ ID NO: 5885
  GFR-binding peptide
  MOD_RES (2), (34), (35): Xaa is C or S

SEQ ID NO: 78663 - protein, 32 aa, Artificial Sequence; identical to SEQ ID NO: 56937
  GFR-binding peptide
  MOD_RES (2), (2): Xaa is C or S

SEQ ID NO: 78664 - protein, 36 aa, Artificial Sequence; identical to SEQ ID NO: 5886
  GFR-binding peptide
  MOD_RES (2), (4), (36): Xaa is C or S

SEQ ID NO: 78665 - protein, 35 aa, Artificial Sequence; identical to SEQ ID NO: 3930
  GFR-binding peptide
  MOD_RES (1), (33), (34): Xaa is C or S

SEQ ID NO: 78666 - protein, 35 aa, Artificial Sequence; identical to SEQ ID NO: 3931
  GFR-binding peptide
  MOD_RES (33), (34): Xaa is C or S
  MOD_RES (11), (12), (13), (14), (15): Xaa is A or G
  MOD_RES (16), (17), (18), (19): Xaa is A or G or is absent

SEQ ID NO: 78667 - protein, 36 aa, Artificial Sequence; identical to SEQ ID NO: 25010
  GFR-binding peptide
  MOD_RES (2), (4), (36): Xaa is C or S

SEQ ID NO: 78668 - protein, 40 aa, Artificial Sequence
  GFR-binding peptide
  MOD_RES (2), (36), (37): Xaa is C or S
  MOD_RES (14), (15), (16), (17), (18): Xaa is A or G
  MOD_RES (19), (20), (21), (22): Xaa is A or G or is absent
GXAEVVMDQYNKLXXXXXXXXXLYLISIASLRAPVXXSAP

SEQ ID NO: 78669 - protein, 39 aa, Artificial Sequence; identical to SEQ ID NO: 5888
  GFR-binding peptide
  MOD_RES (1), (34), (35): Xaa is C or S
  MOD_RES (12), (13), (14), (15), (16): Xaa is A or G
  MOD_RES (17), (18), (19), (20): Xaa is A or G or is absent

SEQ ID NO: 78670 - protein, 35 aa, Artificial Sequence; identical to SEQ ID NO: 3933
  GFR-binding peptide
  MOD_RES (1), (3), (34), (35): Xaa is C or S

SEQ ID NO: 78671 - protein, 35 aa, Artificial Sequence; identical to SEQ ID NO: 11350
  GFR-binding peptide
  MOD_RES (32), (33): Xaa is C or S

SEQ ID NO: 78672 - protein, 41 aa, Artificial Sequence; identical to SEQ ID NO: 13317
  GFR-binding peptide
  MOD_RES (1), (3), (37), (38): Xaa is C or S
  MOD_RES (15), (16), (17), (18), (19): Xaa is A or G
  MOD_RES (20), (21), (22), (23): Xaa is A or G or is absent

SEQ ID NO: 78673 - protein, 38 aa, Artificial Sequence; identical to SEQ ID NO: 5890
  GFR-binding peptide
  MOD_RES (1), (3), (35), (36): Xaa is C or S

SEQ ID NO: 78674 - protein, 35 aa, Artificial Sequence; identical to SEQ ID NO: 5891
  GFR-binding peptide
  MOD_RES (1), (35): Xaa is C or S
  MOD_RES (13), (14), (15), (16), (17): Xaa is A or G
  MOD_RES (18), (19), (20), (21): Xaa is A or G or is absent

SEQ ID NO: 78675 - protein, 40 aa, Artificial Sequence; identical to SEQ ID NO: 56949
  GFR-binding peptide
  MOD_RES (1), (34), (35): Xaa is C or S
  MOD_RES (12), (13), (14), (15), (16): Xaa is A or G
  MOD_RES (17), (18), (19), (20): Xaa is A or G or is absent

SEQ ID NO: 78676 - protein, 33 aa, Artificial Sequence; identical to SEQ ID NO: 5894
  GFR-binding peptide
  MOD_RES (1), (1): Xaa is C or S
  MOD_RES (12), (13), (14), (15), (16): Xaa is A or G
  MOD_RES (17), (18), (19), (20): Xaa is A or G or is absent

SEQ ID NO: 78677 - protein, 38 aa, Artificial Sequence; identical to SEQ ID NO: 13321
  GFR-binding peptide
  MOD_RES (2), (36), (37): Xaa is C or S
  MOD_RES (14), (15), (16), (17), (18): Xaa is A or G
  MOD_RES (19), (20), (21), (22): Xaa is A or G or is absent

SEQ ID NO: 78678 - protein, 39 aa, Artificial Sequence; identical to SEQ ID NO: 25023
  GFR-binding peptide
  MOD_RES (34), (35): Xaa is C or S
  MOD_RES (12), (13), (14), (15), (16): Xaa is A or G
  MOD_RES (17), (18), (19), (20): Xaa is A or G or is absent

SEQ ID NO: 78679 - protein, 38 aa, Artificial Sequence; identical to SEQ ID NO: 3941
  GFR-binding peptide
  MOD_RES (1), (33): Xaa is C or S

SEQ ID NO: 78680 - protein, 36 aa, Artificial Sequence; identical to SEQ ID NO: 5899
  GFR-binding peptide
  MOD_RES (1), (3): Xaa is C or S
  MOD_RES (15), (16), (17), (18), (19): Xaa is A or G
  MOD_RES (20), (21), (22), (23): Xaa is A or G or is absent

SEQ ID NO: 78681 - protein, 38 aa, Artificial Sequence; identical to SEQ ID NO: 3942
  GFR-binding peptide
  MOD_RES (2), (4), (37), (38): Xaa is C or S
  MOD_RES (15), (16), (17), (18), (19): Xaa is A or G
  MOD_RES (20), (21), (22), (23): Xaa is A or G or is absent

SEQ ID NO: 78682 - protein, 35 aa, Artificial Sequence; identical to SEQ ID NO: 3943
  GFR-binding peptide
  MOD_RES (1), (3), (34), (35): Xaa is C or S

SEQ ID NO: 78683 - protein, 42 aa, Artificial Sequence; identical to SEQ ID NO: 5901
  GFR-binding peptide
  MOD_RES (2), (4), (38), (39): Xaa is C or S
  MOD_RES (16), (17), (18), (19), (20): Xaa is A or G
  MOD_RES (21), (22), (23), (24): Xaa is A or G or is absent

SEQ ID NO: 78684 - protein, 33 aa, Artificial Sequence
  GFR-binding peptide
  MOD_RES (33), (33): Xaa is C or S
  MOD_RES (11), (12), (13), (14), (15): Xaa is A or G
  MOD_RES (16), (17), (18), (19): Xaa is A or G or is absent
SVAMGQYNKLXXXXXXXXXLYLISIASLKTPVX

SEQ ID NO: 78685 - protein, 34 aa, Artificial Sequence
  GFR-binding peptide
  MOD_RES (1), (33), (34): Xaa is C or S
XAEVVMDQYNKLVVNNAADLYLISIASLRAPVXX

SEQ ID NO: 78686 - protein, 32 aa, Artificial Sequence; identical to SEQ ID NO: 5902
  GFR-binding peptide
  MOD_RES (2), (2): Xaa is C or S

SEQ ID NO: 78687 - protein, 39 aa, Artificial Sequence; identical to SEQ ID NO: 5904
  GFR-binding peptide
  MOD_RES (2), (4), (37), (38): Xaa is C or S
  MOD_RES (15), (16), (17), (18), (19): Xaa is A or G
  MOD_RES (20), (21), (22), (23): Xaa is A or G or is absent

SEQ ID NO: 78688 - protein, 38 aa, Artificial Sequence; identical to SEQ ID NO: 5905
  GFR-binding peptide
  MOD_RES (1), (35), (36): Xaa is C or S
  MOD_RES (13), (14), (15), (16), (17): Xaa is A or G
  MOD_RES (18), (19), (20), (21): Xaa is A or G or is absent

SEQ ID NO: 78689 - protein, 39 aa, Artificial Sequence; identical to SEQ ID NO: 5907
  GFR-binding peptide
  MOD_RES (2), (4), (36), (37): Xaa is C or S

SEQ ID NO: 78690 - protein, 37 aa, Artificial Sequence; identical to SEQ ID NO: 27026
  GFR-binding peptide
  MOD_RES (2), (4), (36), (37): Xaa is C or S

SEQ ID NO: 78691 - protein, 41 aa, Artificial Sequence; identical to SEQ ID NO: 3947
  GFR-binding peptide
  MOD_RES (1), (3), (35): Xaa is C or S

SEQ ID NO: 78692 - protein, 39 aa, Artificial Sequence; identical to SEQ ID NO: 3948
  GFR-binding peptide
  MOD_RES (1), (3), (37), (38): Xaa is C or S
  MOD_RES (15), (16), (17), (18), (19): Xaa is A or G
  MOD_RES (20), (21), (22), (23): Xaa is A or G or is absent

SEQ ID NO: 78693 - protein, 39 aa, Artificial Sequence; identical to SEQ ID NO: 3949
  GFR-binding peptide
  MOD_RES (2), (36), (37): Xaa is C or S
  MOD_RES (14), (15), (16), (17), (18): Xaa is A or G
  MOD_RES (19), (20), (21), (22): Xaa is A or G or is absent

SEQ ID NO: 78694 - protein, 34 aa, Artificial Sequence; identical to SEQ ID NO: 3950
  GFR-binding peptide
  MOD_RES (1), (3): Xaa is C or S

SEQ ID NO: 78695 - protein, 38 aa, Artificial Sequence; identical to SEQ ID NO: 5909
  GFR-binding peptide
  MOD_RES (2), (36): Xaa is C or S
  MOD_RES (14), (15), (16), (17), (18): Xaa is A or G
  MOD_RES (19), (20), (21), (22): Xaa is A or G or is absent

SEQ ID NO: 78696 - protein, 40 aa, Artificial Sequence
  GFR-binding peptide
  MOD_RES (1), (35), (36): Xaa is C or S
  MOD_RES (13), (14), (15), (16), (17): Xaa is A or G
  MOD_RES (18), (19), (20), (21): Xaa is A or G or is absent
XAEVVMDQYNKLXXXXXXXXXLYLISIASLRAPVXXSAPA

SEQ ID NO: 78697 - protein, 40 aa, Artificial Sequence; identical to SEQ ID NO: 5912
  GFR-binding peptide
  MOD_RES (2), (4), (38), (39): Xaa is C or S
  MOD_RES (16), (17), (18), (19), (20): Xaa is A or G
  MOD_RES (21), (22), (23), (24): Xaa is A or G or is absent

SEQ ID NO: 78698 - protein, 40 aa, Artificial Sequence; identical to SEQ ID NO: 3952
  GFR-binding peptide
  MOD_RES (34), (35): Xaa is C or S
  MOD_RES (12), (13), (14), (15), (16): Xaa is A or G
  MOD_RES (17), (18), (19), (20): Xaa is A or G or is absent

SEQ ID NO: 78699 - protein, 37 aa, Artificial Sequence
  GFR-binding peptide
  MOD_RES (2), (36), (37): Xaa is C or S
  MOD_RES (14), (15), (16), (17), (18): Xaa is A or G
  MOD_RES (19), (20), (21), (22): Xaa is A or G or is absent
AXSEVTMNQYNKLXXXXXXXXXLYLISIASMKEPVXX

SEQ ID NO: 78700 - protein, 38 aa, Artificial Sequence; identical to SEQ ID NO: 11371
  GFR-binding peptide
  MOD_RES (1), (3), (35), (36): Xaa is C or S

SEQ ID NO: 78701 - protein, 39 aa, Artificial Sequence; identical to SEQ ID NO: 3955
  GFR-binding peptide
  MOD_RES (2), (4), (36), (37): Xaa is C or S

SEQ ID NO: 78702 - protein, 43 aa, Artificial Sequence; identical to SEQ ID NO: 3956
  GFR-binding peptide
  MOD_RES (2), (4), (37), (38): Xaa is C or S
  MOD_RES (15), (16), (17), (18), (19): Xaa is A or G
  MOD_RES (20), (21), (22), (23): Xaa is A or G or is absent

SEQ ID NO: 78703 - protein, 42 aa, Artificial Sequence
  GFR-binding peptide
  MOD_RES (2), (4), (38), (39): Xaa is C or S
  MOD_RES (16), (17), (18), (19), (20): Xaa is A or G
  MOD_RES (21), (22), (23), (24): Xaa is A or G or is absent
RXAXSEVTMNQYNKLXXXXXXXXXLYLISIASMKEPVXXPEP

SEQ ID NO: 78704 - protein, 38 aa, Artificial Sequence; identical to SEQ ID NO: 5916
  GFR-binding peptide
  MOD_RES (32), (33): Xaa is C or S

SEQ ID NO: 78705 - protein, 32 aa, Artificial Sequence
  GFR-binding peptide
  MOD_RES (31), (32): Xaa is C or S
EVTMNQYNKLVVNKNEDLYLISIASMKEPVXX

SEQ ID NO: 78706 - protein, 37 aa, Artificial Sequence; identical to SEQ ID NO: 11377
  GFR-binding peptide
  MOD_RES (2), (4): Xaa is C or S
  MOD_RES (16), (17), (18), (19), (20): Xaa is A or G
  MOD_RES (21), (22), (23), (24): Xaa is A or G or is absent

SEQ ID NO: 78707 - protein, 39 aa, Artificial Sequence; identical to SEQ ID NO: 61487
  GFR-binding peptide
  MOD_RES (2), (34), (35): Xaa is C or S

SEQ ID NO: 78708 - protein, 38 aa, Artificial Sequence; identical to SEQ ID NO: 3960
  GFR-binding peptide
  MOD_RES (33), (34): Xaa is C or S
  MOD_RES (11), (12), (13), (14), (15): Xaa is A or G
  MOD_RES (16), (17), (18), (19): Xaa is A or G or is absent

SEQ ID NO: 78709 - protein, 40 aa, Artificial Sequence; identical to SEQ ID NO: 5918
  GFR-binding peptide
  MOD_RES (2), (4), (35), (36): Xaa is C or S

SEQ ID NO: 78710 - protein, 37 aa, Artificial Sequence
  GFR-binding peptide
  MOD_RES (31), (32): Xaa is C or S
SVAMGQYNKLYTVVGKDLYLISIASLKTPVXXAKSAK

SEQ ID NO: 78711 - protein, 34 aa, Artificial Sequence; identical to SEQ ID NO: 63235
  GFR-binding peptide
  MOD_RES (32), (33): Xaa is C or S

SEQ ID NO: 78712 - protein, 37 aa, Artificial Sequence; identical to SEQ ID NO: 5919
  GFR-binding peptide
  MOD_RES (2), (34): Xaa is C or S

SEQ ID NO: 78713 - protein, 37 aa, Artificial Sequence; identical to SEQ ID NO: 3967
  GFR-binding peptide
  MOD_RES (2), (4), (36), (37): Xaa is C or S

SEQ ID NO: 78714 - protein, 38 aa, Artificial Sequence; identical to SEQ ID NO: 25048
  GFR-binding peptide
  MOD_RES (34), (35): Xaa is C or S
  MOD_RES (12), (13), (14), (15), (16): Xaa is A or G
  MOD_RES (17), (18), (19), (20): Xaa is A or G or is absent

SEQ ID NO: 78715 - protein, 33 aa, Artificial Sequence
  GFR-binding peptide
  MOD_RES (1), (32), (33): Xaa is C or S
XEEVIMQYNKLLLVRGNDLYLMSIASTKVPAXX

SEQ ID NO: 78716 - protein, 34 aa, Artificial Sequence; identical to SEQ ID NO: 3968
  GFR-binding peptide
  MOD_RES (1), (34): Xaa is C or S
  MOD_RES (12), (13), (14), (15), (16): Xaa is A or G
  MOD_RES (17), (18), (19), (20): Xaa is A or G or is absent

SEQ ID NO: 78717 - protein, 33 aa, Artificial Sequence
  GFR-binding peptide
  MOD_RES (31), (32): Xaa is C or S
EVTMNQYNKLVVNKNEDLYLISIASMKEPVXXP

SEQ ID NO: 78718 - protein, 33 aa, Artificial Sequence
  GFR-binding peptide
  MOD_RES (32), (33): Xaa is C or S
AEVVMDQYNKLVVNNAADLYLISIASLRAPVXX

SEQ ID NO: 78719 - protein, 41 aa, Artificial Sequence
  GFR-binding peptide
  MOD_RES (2), (4), (38), (39): Xaa is C or S
  MOD_RES (16), (17), (18), (19), (20): Xaa is A or G
  MOD_RES (21), (22), (23), (24): Xaa is A or G or is absent
SXGXRDVVMGQYNKLXXXXXXXXXLYLMSIASMKTPTXXPG

SEQ ID NO: 78720 - protein, 41 aa, Artificial Sequence; identical to SEQ ID NO: 11391
  GFR-binding peptide
  MOD_RES (1), (35), (36): Xaa is C or S
  MOD_RES (13), (14), (15), (16), (17): Xaa is A or G
  MOD_RES (18), (19), (20), (21): Xaa is A or G or is absent

SEQ ID NO: 78721 - protein, 35 aa, Artificial Sequence; identical to SEQ ID NO: 27041
  GFR-binding peptide
  MOD_RES (2), (34), (35): Xaa is C or S

SEQ ID NO: 78722 - protein, 39 aa, Artificial Sequence; identical to SEQ ID NO: 5926
  GFR-binding peptide
  MOD_RES (2), (33), (34): Xaa is C or S

SEQ ID NO: 78723 - protein, 37 aa, Artificial Sequence; identical to SEQ ID NO: 5928
  GFR-binding peptide
  MOD_RES (1), (3), (36), (37): Xaa is C or S

SEQ ID NO: 78724 - protein, 39 aa, Artificial Sequence; identical to SEQ ID NO: 3972
  GFR-binding peptide
  MOD_RES (33), (34): Xaa is C or S
  MOD_RES (11), (12), (13), (14), (15): Xaa is A or G
  MOD_RES (16), (17), (18), (19): Xaa is A or G or is absent

SEQ ID NO: 78725 - protein, 34 aa, Artificial Sequence; identical to SEQ ID NO: 11395
  GFR-binding peptide
  MOD_RES (1), (33), (34): Xaa is C or S

SEQ ID NO: 78726 - protein, 32 aa, Artificial Sequence
  GFR-binding peptide
  MOD_RES (1), (1): Xaa is C or S
XSEVTMNQYNKLVVNKNEDLYLISIASMKEPV

SEQ ID NO: 78727 - protein, 41 aa, Artificial Sequence; identical to SEQ ID NO: 5929
  GFR-binding peptide
  MOD_RES (2), (4), (37), (38): Xaa is C or S
  MOD_RES (15), (16), (17), (18), (19): Xaa is A or G
  MOD_RES (20), (21), (22), (23): Xaa is A or G or is absent

SEQ ID NO: 78728 - protein, 36 aa, Artificial Sequence; identical to SEQ ID NO: 61499
  GFR-binding peptide
  MOD_RES (2), (36): Xaa is C or S
  MOD_RES (14), (15), (16), (17), (18): Xaa is A or G
  MOD_RES (19), (20), (21), (22): Xaa is A or G or is absent

SEQ ID NO: 78729 - protein, 36 aa, Artificial Sequence; identical to SEQ ID NO: 13356
  GFR-binding peptide
  MOD_RES (1), (33), (34): Xaa is C or S

SEQ ID NO: 78730 - protein, 41 aa, Artificial Sequence; identical to SEQ ID NO: 5932
  GFR-binding peptide
  MOD_RES (2), (4), (36), (37): Xaa is C or S

SEQ ID NO: 78731 - protein, 34 aa, Artificial Sequence; identical to SEQ ID NO: 3976
  GFR-binding peptide
  MOD_RES (31), (32): Xaa is C or S

SEQ ID NO: 78732 - protein, 40 aa, Artificial Sequence; identical to SEQ ID NO: 5934
  GFR-binding peptide
  MOD_RES (1), (34), (35): Xaa is C or S

SEQ ID NO: 78733 - protein, 37 aa, Artificial Sequence; identical to SEQ ID NO: 5936
  GFR-binding peptide
  MOD_RES (1), (36), (37): Xaa is C or S
  MOD_RES (14), (15), (16), (17), (18): Xaa is A or G
  MOD_RES (19), (20), (21), (22): Xaa is A or G or is absent

SEQ ID NO: 78734 - protein, 32 aa, Artificial Sequence; identical to SEQ ID NO: 5937
  GFR-binding peptide
  MOD_RES (32), (32): Xaa is C or S

SEQ ID NO: 78735 - protein, 36 aa, Artificial Sequence; identical to SEQ ID NO: 3978
  GFR-binding peptide
  MOD_RES (1), (3), (34), (35): Xaa is C or S

SEQ ID NO: 78736 - protein, 34 aa, Artificial Sequence; identical to SEQ ID NO: 3979
  GFR-binding peptide
  MOD_RES (1), (3): Xaa is C or S

SEQ ID NO: 78737 - protein, 39 aa, Artificial Sequence; identical to SEQ ID NO: 56992
  GFR-binding peptide
  MOD_RES (2), (34), (35): Xaa is C or S

SEQ ID NO: 78738 - protein, 41 aa, Artificial Sequence; identical to SEQ ID NO: 3981
  GFR-binding peptide
  MOD_RES (1), (3), (37), (38): Xaa is C or S
  MOD_RES (15), (16), (17), (18), (19): Xaa is A or G
  MOD_RES (20), (21), (22), (23): Xaa is A or G or is absent

SEQ ID NO: 78739 - protein, 33 aa, Artificial Sequence; identical to SEQ ID NO: 56995
  GFR-binding peptide
  MOD_RES (1), (1): Xaa is C or S
  MOD_RES (12), (13), (14), (15), (16): Xaa is A or G
  MOD_RES (17), (18), (19), (20): Xaa is A or G or is absent

SEQ ID NO: 78740 - protein, 39 aa, Artificial Sequence; identical to SEQ ID NO: 3982
  GFR-binding peptide
  MOD_RES (2), (35), (36): Xaa is C or S
  MOD_RES (13), (14), (15), (16), (17): Xaa is A or G
  MOD_RES (18), (19), (20), (21): Xaa is A or G or is absent

SEQ ID NO: 78741 - protein, 38 aa, Artificial Sequence; identical to SEQ ID NO: 3983
  GFR-binding peptide
  MOD_RES (1), (35): Xaa is C or S
  MOD_RES (13), (14), (15), (16), (17): Xaa is A or G
  MOD_RES (18), (19), (20), (21): Xaa is A or G or is absent

SEQ ID NO: 78742 - protein, 40 aa, Artificial Sequence
  GFR-binding peptide
  MOD_RES (34), (35): Xaa is C or S
  MOD_RES (12), (13), (14), (15), (16): Xaa is A or G
  MOD_RES (17), (18), (19), (20): Xaa is A or G or is absent
SEVTMNQYNKLXXXXXXXXXLYLISIASMKEPVXXPEPIG

SEQ ID NO: 78743 - protein, 34 aa, Artificial Sequence; identical to SEQ ID NO: 5940
  GFR-binding peptide
  MOD_RES (1), (3), (34): Xaa is C or S

SEQ ID NO: 78744 - protein, 33 aa, Artificial Sequence; identical to SEQ ID NO: 5941
  GFR-binding peptide
  MOD_RES (12), (13), (14), (15), (16): Xaa is A or G
  MOD_RES (17), (18), (19), (20): Xaa is A or G or is absent

SEQ ID NO: 78745 - protein, 37 aa, Artificial Sequence; identical to SEQ ID NO: 13367
  GFR-binding peptide
  MOD_RES (32), (33): Xaa is C or S

SEQ ID NO: 78746 - protein, 40 aa, Artificial Sequence; identical to SEQ ID NO: 5943
  GFR-binding peptide
  MOD_RES (2), (35), (36): Xaa is C or S
  MOD_RES (13), (14), (15), (16), (17): Xaa is A or G
  MOD_RES (18), (19), (20), (21): Xaa is A or G or is absent

SEQ ID NO: 78747 - protein, 40 aa, Artificial Sequence
  GFR-binding peptide
  MOD_RES (1), (3), (34), (35): Xaa is C or S
XGXEEVIMQYNKLLLVRGNDLYLMSIASTKVPAXXTSPVR

SEQ ID NO: 78748 - protein, 36 aa, Artificial Sequence; identical to SEQ ID NO: 3985
  GFR-binding peptide
  MOD_RES (1), (34), (35): Xaa is C or S
  MOD_RES (12), (13), (14), (15), (16): Xaa is A or G
  MOD_RES (17), (18), (19), (20): Xaa is A or G or is absent

SEQ ID NO: 78749 - protein, 35 aa, Artificial Sequence; identical to SEQ ID NO: 3986
  GFR-binding peptide
  MOD_RES (31), (32): Xaa is C or S

SEQ ID NO: 78750 - protein, 43 aa, Artificial Sequence; identical to SEQ ID NO: 13372
  GFR-binding peptide
  MOD_RES (2), (4), (38), (39): Xaa is C or S
  MOD_RES (16), (17), (18), (19), (20): Xaa is A or G
  MOD_RES (21), (22), (23), (24): Xaa is A or G or is absent

SEQ ID NO: 78751 - protein, 41 aa, Artificial Sequence; identical to SEQ ID NO: 5949
  GFR-binding peptide
  MOD_RES (1), (3), (38), (39): Xaa is C or S
  MOD_RES (16), (17), (18), (19), (20): Xaa is A or G
  MOD_RES (21), (22), (23), (24): Xaa is A or G or is absent

SEQ ID NO: 78752 - protein, 33 aa, Artificial Sequence; identical to SEQ ID NO: 3989
  GFR-binding peptide
  MOD_RES (31), (32): Xaa is C or S

SEQ ID NO: 78753 - protein, 37 aa, Artificial Sequence; identical to SEQ ID NO: 57004
  GFR-binding peptide
  MOD_RES (2), (4): Xaa is C or S
  MOD_RES (16), (17), (18), (19), (20): Xaa is A or G
  MOD_RES (21), (22), (23), (24): Xaa is A or G or is absent

SEQ ID NO: 78754 - protein, 39 aa, Artificial Sequence; identical to SEQ ID NO: 3990
  GFR-binding peptide
  MOD_RES (1), (35): Xaa is C or S
  MOD_RES (13), (14), (15), (16), (17): Xaa is A or G
  MOD_RES (18), (19), (20), (21): Xaa is A or G or is absent

SEQ ID NO: 78755 - protein, 35 aa, Artificial Sequence; identical to SEQ ID NO: 57005
  GFR-binding peptide
  MOD_RES (1), (33), (34): Xaa is C or S

SEQ ID NO: 78756 - protein, 42 aa, Artificial Sequence; identical to SEQ ID NO: 25076
  GFR-binding peptide
  MOD_RES (2), (4), (36), (37): Xaa is C or S

SEQ ID NO: 78757 - protein, 37 aa, Artificial Sequence; identical to SEQ ID NO: 59757
  GFR-binding peptide
  MOD_RES (1), (3), (37): Xaa is C or S
  MOD_RES (15), (16), (17), (18), (19): Xaa is A or G
  MOD_RES (20), (21), (22), (23): Xaa is A or G or is absent

SEQ ID NO: 78758 - protein, 36 aa, Artificial Sequence; identical to SEQ ID NO: 5956
  GFR-binding peptide
  MOD_RES (2), (4): Xaa is C or S
  MOD_RES (15), (16), (17), (18), (19): Xaa is A or G
  MOD_RES (20), (21), (22), (23): Xaa is A or G or is absent

SEQ ID NO: 78759 - protein, 31 aa, Artificial Sequence; identical to SEQ ID NO: 13378
  GFR-binding peptide
  MOD_RES (31), (31): Xaa is C or S

SEQ ID NO: 78760 - protein, 37 aa, Artificial Sequence; identical to SEQ ID NO: 3997
  GFR-binding peptide
  MOD_RES (1), (3), (35), (36): Xaa is C or S

SEQ ID NO: 78761 - protein, 38 aa, Artificial Sequence
  GFR-binding peptide
  MOD_RES (33), (34): Xaa is C or S
  MOD_RES (11), (12), (13), (14), (15): Xaa is A or G
  MOD_RES (16), (17), (18), (19): Xaa is A or G or is absent
EVVMDQYNKLXXXXXXXXXLYLISIASLRAPVXXSAPA

SEQ ID NO: 78762 - protein, 33 aa, Artificial Sequence; identical to SEQ ID NO: 5957
  GFR-binding peptide
  MOD_RES (33), (33): Xaa is C or S
  MOD_RES (11), (12), (13), (14), (15): Xaa is A or G
  MOD_RES (16), (17), (18), (19): Xaa is A or G or is absent

SEQ ID NO: 78763 - protein, 38 aa, Artificial Sequence; identical to SEQ ID NO: 13382
  GFR-binding peptide
  MOD_RES (1), (33), (34): Xaa is C or S

SEQ ID NO: 78764 - protein, 36 aa, Artificial Sequence; identical to SEQ ID NO: 4000
  GFR-binding peptide
  MOD_RES (31), (32): Xaa is C or S

SEQ ID NO: 78765 - protein, 39 aa, Artificial Sequence; identical to SEQ ID NO: 4003
  GFR-binding peptide
  MOD_RES (1), (3), (35), (36): Xaa is C or S

SEQ ID NO: 78766 - protein, 40 aa, Artificial Sequence; identical to SEQ ID NO: 4004
  GFR-binding peptide
  MOD_RES (1), (3), (37), (38): Xaa is C or S
  MOD_RES (15), (16), (17), (18), (19): Xaa is A or G
  MOD_RES (20), (21), (22), (23): Xaa is A or G or is absent

SEQ ID NO: 78767 - protein, 41 aa, Artificial Sequence; identical to SEQ ID NO: 5962
  GFR-binding peptide
  MOD_RES (2), (4), (38), (39): Xaa is C or S
  MOD_RES (16), (17), (18), (19), (20): Xaa is A or G
  MOD_RES (21), (22), (23), (24): Xaa is A or G or is absent

SEQ ID NO: 78768 - protein, 38 aa, Artificial Sequence; identical to SEQ ID NO: 27078
  GFR-binding peptide
  MOD_RES (1), (35), (36): Xaa is C or S
  MOD_RES (13), (14), (15), (16), (17): Xaa is A or G
  MOD_RES (18), (19), (20), (21): Xaa is A or G or is absent

SEQ ID NO: 78769 - protein, 35 aa, Artificial Sequence; identical to SEQ ID NO: 65014
  GFR-binding peptide
  MOD_RES (34), (35): Xaa is C or S
  MOD_RES (12), (13), (14), (15), (16): Xaa is A or G
  MOD_RES (17), (18), (19), (20): Xaa is A or G or is absent

SEQ ID NO: 78770 - protein, 38 aa, Artificial Sequence; identical to SEQ ID NO: 5964
  GFR-binding peptide
  MOD_RES (2), (34), (35): Xaa is C or S

SEQ ID NO: 78771 - protein, 34 aa, Artificial Sequence; identical to SEQ ID NO: 5966
  GFR-binding peptide
  MOD_RES (31), (32): Xaa is C or S

SEQ ID NO: 78772 - protein, 41 aa, Artificial Sequence; identical to SEQ ID NO: 5967
  GFR-binding peptide
  MOD_RES (1), (35), (36): Xaa is C or S
  MOD_RES (13), (14), (15), (16), (17): Xaa is A or G
  MOD_RES (18), (19), (20), (21): Xaa is A or G or is absent

SEQ ID NO: 78773 - protein, 37 aa, Artificial Sequence; identical to SEQ ID NO: 5968
  GFR-binding peptide
  MOD_RES (33), (34): Xaa is C or S
  MOD_RES (11), (12), (13), (14), (15): Xaa is A or G
  MOD_RES (16), (17), (18), (19): Xaa is A or G or is absent

SEQ ID NO: 78774 - protein, 35 aa, Artificial Sequence
  GFR-binding peptide
  MOD_RES (34), (35): Xaa is C or S
  MOD_RES (12), (13), (14), (15), (16): Xaa is A or G
  MOD_RES (17), (18), (19), (20): Xaa is A or G or is absent
SEVTMNQYNKLXXXXXXXXXLYLISIASMKEPVXX

SEQ ID NO: 78775 - protein, 34 aa, Artificial Sequence; identical to SEQ ID NO: 5969
  GFR-binding peptide
  MOD_RES (2), (34): Xaa is C or S

SEQ ID NO: 78776 - protein, 39 aa, Artificial Sequence; identical to SEQ ID NO: 25087
  GFR-binding peptide
  MOD_RES (2), (34), (35): Xaa is C or S

SEQ ID NO: 78777 - protein, 33 aa, Artificial Sequence
  GFR-binding peptide
  MOD_RES (2), (2): Xaa is C or S
GXRDVVMGQYNKLIIQQKDNLYLMSIASMKTPT

SEQ ID NO: 78778 - protein, 36 aa, Artificial Sequence; identical to SEQ ID NO: 4007
  GFR-binding peptide
  MOD_RES (1), (32), (33): Xaa is C or S

SEQ ID NO: 78779 - protein, 36 aa, Artificial Sequence; identical to SEQ ID NO: 57025
  GFR-binding peptide
  MOD_RES (2), (36): Xaa is C or S
  MOD_RES (14), (15), (16), (17), (18): Xaa is A or G
  MOD_RES (19), (20), (21), (22): Xaa is A or G or is absent

SEQ ID NO: 78780 - protein, 39 aa, Artificial Sequence; identical to SEQ ID NO: 5973
  GFR-binding peptide
  MOD_RES (1), (34), (35): Xaa is C or S

SEQ ID NO: 78781 - protein, 35 aa, Artificial Sequence; identical to SEQ ID NO: 5974
  GFR-binding peptide
  MOD_RES (2), (34), (35): Xaa is C or S

SEQ ID NO: 78782 - protein, 36 aa, Artificial Sequence; identical to SEQ ID NO: 5979
  GFR-binding peptide
  MOD_RES (1), (3), (36): Xaa is C or S
  MOD_RES (14), (15), (16), (17), (18): Xaa is A or G
  MOD_RES (19), (20), (21), (22): Xaa is A or G or is absent

SEQ ID NO: 78783 - protein, 40 aa, Artificial Sequence; identical to SEQ ID NO: 5981
  GFR-binding peptide
  MOD_RES (1), (35), (36): Xaa is C or S
  MOD_RES (13), (14), (15), (16), (17): Xaa is A or G
  MOD_RES (18), (19), (20), (21): Xaa is A or G or is absent

SEQ ID NO: 78784 - protein, 38 aa, Artificial Sequence; identical to SEQ ID NO: 63277
  GFR-binding peptide
  MOD_RES (1), (3), (35), (36): Xaa is C or S

SEQ ID NO: 78785 - protein, 32 aa, Artificial Sequence; identical to SEQ ID NO: 5983
  GFR-binding peptide
  MOD_RES (11), (12), (13), (14), (15): Xaa is A or G
  MOD_RES (16), (17), (18), (19): Xaa is A or G or is absent

SEQ ID NO: 78786 - protein, 43 aa, Artificial Sequence
  GFR-binding peptide
  MOD_RES (2), (4), (38), (39): Xaa is C or S
  MOD_RES (16), (17), (18), (19), (20): Xaa is A or G
  MOD_RES (21), (22), (23), (24): Xaa is A or G or is absent
RXGXESVAMGQYNKLXXXXXXXXXLYLISIASLKTPVXXAKSA

SEQ ID NO: 78787 - protein, 41 aa, Artificial Sequence; identical to SEQ ID NO: 4010
  GFR-binding peptide
  MOD_RES (2), (4), (39), (40): Xaa is C or S
  MOD_RES (17), (18), (19), (20), (21): Xaa is A or G
  MOD_RES (22), (23), (24), (25): Xaa is A or G or is absent

SEQ ID NO: 78788 - protein, 36 aa, Artificial Sequence; identical to SEQ ID NO: 5984
  GFR-binding peptide
  MOD_RES (31), (31): Xaa is C or S

SEQ ID NO: 78789 - protein, 42 aa, Artificial Sequence; identical to SEQ ID NO: 5986
  GFR-binding peptide
  MOD_RES (1), (3), (36), (37): Xaa is C or S
  MOD_RES (14), (15), (16), (17), (18): Xaa is A or G
  MOD_RES (19), (20), (21), (22): Xaa is A or G or is absent

SEQ ID NO: 78790 - protein, 37 aa, Artificial Sequence; identical to SEQ ID NO: 27099
  GFR-binding peptide
  MOD_RES (1), (3), (35), (36): Xaa is C or S

SEQ ID NO: 78791 - protein, 36 aa, Artificial Sequence; identical to SEQ ID NO: 4011
  GFR-binding peptide
  MOD_RES (2), (34), (35): Xaa is C or S

SEQ ID NO: 78792 - protein, 34 aa, Artificial Sequence; identical to SEQ ID NO: 4013
  GFR-binding peptide
  MOD_RES (2), (2): Xaa is C or S
  MOD_RES (13), (14), (15), (16), (17): Xaa is A or G
  MOD_RES (18), (19), (20), (21): Xaa is A or G or is absent

SEQ ID NO: 78793 - protein, 37 aa, Artificial Sequence
  GFR-binding peptide
  MOD_RES (2), (4), (37): Xaa is C or S
  MOD_RES (15), (16), (17), (18), (19): Xaa is A or G
  MOD_RES (20), (21), (22), (23): Xaa is A or G or is absent
LXGXEEVIMQYNKLXXXXXXXXXLYLMSIASTKVPAX

SEQ ID NO: 78794 - protein, 38 aa, Artificial Sequence; identical to SEQ ID NO: 4014
  GFR-binding peptide
  MOD_RES (1), (3), (35), (36): Xaa is C or S

SEQ ID NO: 78795 - protein, 41 aa, Artificial Sequence; identical to SEQ ID NO: 25094
  GFR-binding peptide
  MOD_RES (2), (4), (38), (39): Xaa is C or S
  MOD_RES (16), (17), (18), (19), (20): Xaa is A or G
  MOD_RES (21), (22), (23), (24): Xaa is A or G or is absent

SEQ ID NO: 78796 - protein, 40 aa, Artificial Sequence; identical to SEQ ID NO: 5989
  GFR-binding peptide
  MOD_RES (1), (34), (35): Xaa is C or S
  MOD_RES (12), (13), (14), (15), (16): Xaa is A or G
  MOD_RES (17), (18), (19), (20): Xaa is A or G or is absent

SEQ ID NO: 78797 - protein, 37 aa, Artificial Sequence; identical to SEQ ID NO: 4016
  GFR-binding peptide
  MOD_RES (1), (32), (33): Xaa is C or S

SEQ ID NO: 78798 - protein, 39 aa, Artificial Sequence
  GFR-binding peptide
  MOD_RES (1), (35), (36): Xaa is C or S
  MOD_RES (13), (14), (15), (16), (17): Xaa is A or G
  MOD_RES (18), (19), (20), (21): Xaa is A or G or is absent
XSEVTMNQYNKLXXXXXXXXXLYLISIASMKEPVXXPEP

SEQ ID NO: 78799 - protein, 40 aa, Artificial Sequence; identical to SEQ ID NO: 63285
  GFR-binding peptide
  MOD_RES (34), (35): Xaa is C or S
  MOD_RES (12), (13), (14), (15), (16): Xaa is A or G
  MOD_RES (17), (18), (19), (20): Xaa is A or G or is absent

SEQ ID NO: 78800 - protein, 39 aa, Artificial Sequence; identical to SEQ ID NO: 11445
  GFR-binding peptide
  MOD_RES (2), (4), (36), (37): Xaa is C or S

SEQ ID NO: 78801 - protein, 35 aa, Artificial Sequence; identical to SEQ ID NO: 5992
  GFR-binding peptide
  MOD_RES (31), (32): Xaa is C or S

SEQ ID NO: 78802 - protein, 33 aa, Artificial Sequence; identical to SEQ ID NO: 27106
  GFR-binding peptide
  MOD_RES (2), (2): Xaa is C or S

SEQ ID NO: 78803 - protein, 34 aa, Artificial Sequence; identical to SEQ ID NO: 4020
  GFR-binding peptide
  MOD_RES (33), (33): Xaa is C or S
  MOD_RES (11), (12), (13), (14), (15): Xaa is A or G
  MOD_RES (16), (17), (18), (19): Xaa is A or G or is absent

SEQ ID NO: 78804 - protein, 34 aa, Artificial Sequence; identical to SEQ ID NO: 11448
  GFR-binding peptide
  MOD_RES (33), (34): Xaa is C or S
  MOD_RES (11), (12), (13), (14), (15): Xaa is A or G
  MOD_RES (16), (17), (18), (19): Xaa is A or G or is absent

SEQ ID NO: 78805 - protein, 37 aa, Artificial Sequence; identical to SEQ ID NO: 4024
  GFR-binding peptide
  MOD_RES (1), (3), (35), (36): Xaa is C or S

SEQ ID NO: 78806 - protein, 42 aa, Artificial Sequence
  GFR-binding peptide
  MOD_RES (2), (4), (36), (37): Xaa is C or S
HXGXSRVVMNQYNKLIVNSSDDLYLVSIASLKTPAXXPKPVH

SEQ ID NO: 78807 - protein, 37 aa, Artificial Sequence; identical to SEQ ID NO: 4025
  GFR-binding peptide
  MOD_RES (2), (36), (37): Xaa is C or S
  MOD_RES (14), (15), (16), (17), (18): Xaa is A or G
  MOD_RES (19), (20), (21), (22): Xaa is A or G or is absent

SEQ ID NO: 78808 - protein, 36 aa, Artificial Sequence; identical to SEQ ID NO: 63291
  GFR-binding peptide
  MOD_RES (2), (4), (36): Xaa is C or S

SEQ ID NO: 78809 - protein, 42 aa, Artificial Sequence; identical to SEQ ID NO: 4026
  GFR-binding peptide
  MOD_RES (2), (4), (36), (37): Xaa is C or S

SEQ ID NO: 78810 - protein, 36 aa, Artificial Sequence
  GFR-binding peptide
  MOD_RES (2), (34), (35): Xaa is C or S
GXESVAMGQYNKLYTVVGKDLYLISIASLKTPVXXA

SEQ ID NO: 78811 - protein, 33 aa, Artificial Sequence
  GFR-binding peptide
  MOD_RES (12), (13), (14), (15), (16): Xaa is A or G
  MOD_RES (17), (18), (19), (20): Xaa is A or G or is absent
AEVVMDQYNKLXXXXXXXXXLYLISIASLRAPV

SEQ ID NO: 78812 - protein, 34 aa, Artificial Sequence; identical to SEQ ID NO: 65043
  GFR-binding peptide
  MOD_RES (34), (34): Xaa is C or S
  MOD_RES (12), (13), (14), (15), (16): Xaa is A or G
  MOD_RES (17), (18), (19), (20): Xaa is A or G or is absent

SEQ ID NO: 78813 - protein, 32 aa, Artificial Sequence; identical to SEQ ID NO: 4031
  GFR-binding peptide
  MOD_RES (1), (1): Xaa is C or S

SEQ ID NO: 78814 - protein, 43 aa, Artificial Sequence; identical to SEQ ID NO: 6003
  GFR-binding peptide
  MOD_RES (2), (4), (37), (38): Xaa is C or S

SEQ ID NO: 78815 - protein, 41 aa, Artificial Sequence; identical to SEQ ID NO: 4033
  GFR-binding peptide
  MOD_RES (1), (3), (37), (38): Xaa is C or S
  MOD_RES (15), (16), (17), (18), (19): Xaa is A or G
  MOD_RES (20), (21), (22), (23): Xaa is A or G or is absent

SEQ ID NO: 78816 - protein, 38 aa, Artificial Sequence; identical to SEQ ID NO: 11464
  GFR-binding peptide
  MOD_RES (2), (4), (36), (37): Xaa is C or S

SEQ ID NO: 78817 - protein, 37 aa, Artificial Sequence; identical to SEQ ID NO: 13413
  GFR-binding peptide
  MOD_RES (2), (36), (37): Xaa is C or S
  MOD_RES (14), (15), (16), (17), (18): Xaa is A or G
  MOD_RES (19), (20), (21), (22): Xaa is A or G or is absent

SEQ ID NO: 78818 - protein, 38 aa, Artificial Sequence
  GFR-binding peptide
  MOD_RES (34), (35): Xaa is C or S
  MOD_RES (12), (13), (14), (15), (16): Xaa is A or G
  MOD_RES (17), (18), (19), (20): Xaa is A or G or is absent
RDVVMGQYNKLXXXXXXXXXLYLMSIASMKTPTXXPGA

SEQ ID NO: 78819 - protein, 42 aa, Artificial Sequence; identical to SEQ ID NO: 6005
  GFR-binding peptide
  MOD_RES (2), (36), (37): Xaa is C or S
  MOD_RES (14), (15), (16), (17), (18): Xaa is A or G
  MOD_RES (19), (20), (21), (22): Xaa is A or G or is absent

SEQ ID NO: 78820 - protein, 36 aa, Artificial Sequence; identical to SEQ ID NO: 11469
  GFR-binding peptide
  MOD_RES (34), (35): Xaa is C or S
  MOD_RES (12), (13), (14), (15), (16): Xaa is A or G
  MOD_RES (17), (18), (19), (20): Xaa is A or G or is absent

SEQ ID NO: 78821 - protein, 35 aa, Artificial Sequence; identical to SEQ ID NO: 13417
  GFR-binding peptide
  MOD_RES (34), (35): Xaa is C or S
  MOD_RES (12), (13), (14), (15), (16): Xaa is A or G
  MOD_RES (17), (18), (19), (20): Xaa is A or G or is absent

SEQ ID NO: 78822 - protein, 39 aa, Artificial Sequence; identical to SEQ ID NO: 4039
  GFR-binding peptide
  MOD_RES (1), (34), (35): Xaa is C or S

SEQ ID NO: 78823 - protein, 44 aa, Artificial Sequence; identical to SEQ ID NO: 11470
  GFR-binding peptide
  MOD_RES (2), (4), (38), (39): Xaa is C or S
  MOD_RES (16), (17), (18), (19), (20): Xaa is A or G
  MOD_RES (21), (22), (23), (24): Xaa is A or G or is absent

SEQ ID NO: 78824 - protein, 35 aa, Artificial Sequence; identical to SEQ ID NO: 6013
  GFR-binding peptide
  MOD_RES (34), (35): Xaa is C or S
  MOD_RES (12), (13), (14), (15), (16): Xaa is A or G
  MOD_RES (17), (18), (19), (20): Xaa is A or G or is absent

SEQ ID NO: 78825 - protein, 40 aa, Artificial Sequence; identical to SEQ ID NO: 6014
  GFR-binding peptide
  MOD_RES (1), (3), (36), (37): Xaa is C or S
  MOD_RES (14), (15), (16), (17), (18): Xaa is A or G
  MOD_RES (19), (20), (21), (22): Xaa is A or G or is absent

SEQ ID NO: 78826 - protein, 40 aa, Artificial Sequence
  GFR-binding peptide
  MOD_RES (2), (34), (35): Xaa is C or S
GXAEVVMDQYNKLVVNNAADLYLISIASLRAPVXXSAPAA

SEQ ID NO: 78827 - protein, 39 aa, Artificial Sequence; identical to SEQ ID NO: 63307
  GFR-binding peptide
  MOD_RES (1), (3), (35), (36): Xaa is C or S

SEQ ID NO: 78828 - protein, 36 aa, Artificial Sequence; identical to SEQ ID NO: 25118
  GFR-binding peptide
  MOD_RES (2), (36): Xaa is C or S
  MOD_RES (14), (15), (16), (17), (18): Xaa is A or G
  MOD_RES (19), (20), (21), (22): Xaa is A or G or is absent

SEQ ID NO: 78829 - protein, 37 aa, Artificial Sequence; identical to SEQ ID NO: 6016
  GFR-binding peptide
  MOD_RES (1), (35), (36): Xaa is C or S
  MOD_RES (13), (14), (15), (16), (17): Xaa is A or G
  MOD_RES (18), (19), (20), (21): Xaa is A or G or is absent

SEQ ID NO: 78830 - protein, 42 aa, Artificial Sequence; identical to SEQ ID NO: 4042
  GFR-binding peptide
  MOD_RES (2), (4), (38), (39): Xaa is C or S
  MOD_RES (16), (17), (18), (19), (20): Xaa is A or G
  MOD_RES (21), (22), (23), (24): Xaa is A or G or is absent

SEQ ID NO: 78831 - protein, 39 aa, Artificial Sequence; identical to SEQ ID NO: 25121
  GFR-binding peptide
  MOD_RES (1), (3), (35), (36): Xaa is C or S

SEQ ID NO: 78832 - protein, 39 aa, Artificial Sequence; identical to SEQ ID NO: 13426
  GFR-binding peptide
  MOD_RES (1), (35), (36): Xaa is C or S
  MOD_RES (13), (14), (15), (16), (17): Xaa is A or G
  MOD_RES (18), (19), (20), (21): Xaa is A or G or is absent

SEQ ID NO: 78833 - protein, 37 aa, Artificial Sequence
  GFR-binding peptide
  MOD_RES (1), (3), (34), (35): Xaa is C or S
XGXEEVIMQYNKLLLVRGNDLYLMSIASTKVPAXXTS

SEQ ID NO: 78834 - protein, 37 aa, Artificial Sequence; identical to SEQ ID NO: 13428
  GFR-binding peptide
  MOD_RES (31), (32): Xaa is C or S

SEQ ID NO: 78835 - protein, 40 aa, Artificial Sequence; identical to SEQ ID NO: 4047
  GFR-binding peptide
  MOD_RES (2), (4), (38), (39): Xaa is C or S
  MOD_RES (16), (17), (18), (19), (20): Xaa is A or G
  MOD_RES (21), (22), (23), (24): Xaa is A or G or is absent

SEQ ID NO: 78836 - protein, 31 aa, Artificial Sequence
  GFR-binding peptide
  MOD_RES (31), (31): Xaa is C or S
SVAMGQYNKLYTVVGKDLYLISIASLKTPVX

SEQ ID NO: 78837 - protein, 42 aa, Artificial Sequence; identical to SEQ ID NO: 13430
  GFR-binding peptide
  MOD_RES (2), (4), (38), (39): Xaa is C or S
  MOD_RES (16), (17), (18), (19), (20): Xaa is A or G
  MOD_RES (21), (22), (23), (24): Xaa is A or G or is absent

SEQ ID NO: 78838 - protein, 40 aa, Artificial Sequence; identical to SEQ ID NO: 4049
  GFR-binding peptide
  MOD_RES (1), (35), (36): Xaa is C or S
  MOD_RES (13), (14), (15), (16), (17): Xaa is A or G
  MOD_RES (18), (19), (20), (21): Xaa is A or G or is absent

SEQ ID NO: 78839 - protein, 40 aa, Artificial Sequence; identical to SEQ ID NO: 4050
  GFR-binding peptide
  MOD_RES (2), (35), (36): Xaa is C or S
  MOD_RES (13), (14), (15), (16), (17): Xaa is A or G
  MOD_RES (18), (19), (20), (21): Xaa is A or G or is absent

SEQ ID NO: 78840 - protein, 35 aa, Artificial Sequence
  GFR-binding peptide
  MOD_RES (1), (32), (33): Xaa is C or S
XEEVIMQYNKLLLVRGNDLYLMSIASTKVPAXXTS

SEQ ID NO: 78841 - protein, 41 aa, Artificial Sequence; identical to SEQ ID NO: 65080
  GFR-binding peptide
  MOD_RES (2), (36), (37): Xaa is C or S
  MOD_RES (14), (15), (16), (17), (18): Xaa is A or G
  MOD_RES (19), (20), (21), (22): Xaa is A or G or is absent

SEQ ID NO: 78842 - protein, 39 aa, Artificial Sequence; identical to SEQ ID NO: 4054
  GFR-binding peptide
  MOD_RES (33), (34): Xaa is C or S
  MOD_RES (11), (12), (13), (14), (15): Xaa is A or G
  MOD_RES (16), (17), (18), (19): Xaa is A or G or is absent

SEQ ID NO: 78843 - protein, 42 aa, Artificial Sequence; identical to SEQ ID NO: 4055
  GFR-binding peptide
  MOD_RES (1), (36), (37): Xaa is C or S
  MOD_RES (14), (15), (16), (17), (18): Xaa is A or G
  MOD_RES (19), (20), (21), (22): Xaa is A or G or is absent

SEQ ID NO: 78844 - protein, 40 aa, Artificial Sequence
  GFR-binding peptide
  MOD_RES (1), (3), (36), (37): Xaa is C or S
  MOD_RES (14), (15), (16), (17), (18): Xaa is A or G
  MOD_RES (19), (20), (21), (22): Xaa is A or G or is absent
XGXEEVIMQYNKLXXXXXXXXXLYLMSIASTKVPAXXTSP

SEQ ID NO: 78845 - protein, 35 aa, Artificial Sequence; identical to SEQ ID NO: 4057
  GFR-binding peptide
  MOD_RES (1), (3): Xaa is C or S
  MOD_RES (14), (15), (16), (17), (18): Xaa is A or G
  MOD_RES (19), (20), (21), (22): Xaa is A or G or is absent

SEQ ID NO: 78846 - protein, 38 aa, Artificial Sequence; identical to SEQ ID NO: 4058
  GFR-binding peptide
  MOD_RES (2), (4), (36), (37): Xaa is C or S

SEQ ID NO: 78847 - protein, 32 aa, Artificial Sequence; identical to SEQ ID NO: 6028
  GFR-binding peptide
  MOD_RES (1), (32): Xaa is C or S

SEQ ID NO: 78848 - protein, 36 aa, Artificial Sequence; identical to SEQ ID NO: 4059
  GFR-binding peptide
  MOD_RES (2), (4): Xaa is C or S
  MOD_RES (15), (16), (17), (18), (19): Xaa is A or G
  MOD_RES (20), (21), (22), (23): Xaa is A or G or is absent

SEQ ID NO: 78849 - protein, 35 aa, Artificial Sequence; identical to SEQ ID NO: 4060
  GFR-binding peptide
  MOD_RES (2), (34): Xaa is C or S

SEQ ID NO: 78850 - protein, 36 aa, Artificial Sequence
  GFR-binding peptide
  MOD_RES (2), (36): Xaa is C or S
  MOD_RES (14), (15), (16), (17), (18): Xaa is A or G
  MOD_RES (19), (20), (21), (22): Xaa is A or G or is absent
GXAEVVMDQYNKLXXXXXXXXXLYLISIASLRAPVX

SEQ ID NO: 78851 - protein, 33 aa, Artificial Sequence; identical to SEQ ID NO: 11493
  GFR-binding peptide
  MOD_RES (1), (33): Xaa is C or S

SEQ ID NO: 78852 - protein, 34 aa, Artificial Sequence; identical to SEQ ID NO: 6031
  GFR-binding peptide
  MOD_RES (34), (34): Xaa is C or S
  MOD_RES (12), (13), (14), (15), (16): Xaa is A or G
  MOD_RES (17), (18), (19), (20): Xaa is A or G or is absent

SEQ ID NO: 78853 - protein, 40 aa, Artificial Sequence; identical to SEQ ID NO: 6033
  GFR-binding peptide
  MOD_RES (2), (36), (37): Xaa is C or S
  MOD_RES (14), (15), (16), (17), (18): Xaa is A or G
  MOD_RES (19), (20), (21), (22): Xaa is A or G or is absent

SEQ ID NO: 78854 - protein, 36 aa, Artificial Sequence; identical to SEQ ID NO: 6034
  GFR-binding peptide
  MOD_RES (32), (33): Xaa is C or S

SEQ ID NO: 78855 - protein, 34 aa, Artificial Sequence; identical to SEQ ID NO: 6035
  GFR-binding peptide
  MOD_RES (32), (33): Xaa is C or S

SEQ ID NO: 78856 - protein, 32 aa, Artificial Sequence; identical to SEQ ID NO: 4064
  GFR-binding peptide
  MOD_RES (2), (2): Xaa is C or S

SEQ ID NO: 78857 - protein, 34 aa, Artificial Sequence; identical to SEQ ID NO: 6037
  GFR-binding peptide
  MOD_RES (34), (34): Xaa is C or S
  MOD_RES (12), (13), (14), (15), (16): Xaa is A or G
  MOD_RES (17), (18), (19), (20): Xaa is A or G or is absent

SEQ ID NO: 78858 - protein, 33 aa, Artificial Sequence; identical to SEQ ID NO: 4065
  GFR-binding peptide
  MOD_RES (33), (33): Xaa is C or S
  MOD_RES (11), (12), (13), (14), (15): Xaa is A or G
  MOD_RES (16), (17), (18), (19): Xaa is A or G or is absent

SEQ ID NO: 78859 - protein, 39 aa, Artificial Sequence; identical to SEQ ID NO: 6040
  GFR-binding peptide
  MOD_RES (1), (3), (37), (38): Xaa is C or S
  MOD_RES (15), (16), (17), (18), (19): Xaa is A or G
  MOD_RES (20), (21), (22), (23): Xaa is A or G or is absent

SEQ ID NO: 78860 - protein, 38 aa, Artificial Sequence
  GFR-binding peptide
  MOD_RES (2), (34), (35): Xaa is C or S
GXESVAMGQYNKLYTVVGKDLYLISIASLKTPVXXAKS

SEQ ID NO: 78861 - protein, 35 aa, Artificial Sequence; identical to SEQ ID NO: 4067
  GFR-binding peptide
  MOD_RES (32), (33): Xaa is C or S

SEQ ID NO: 78862 - protein, 40 aa, Artificial Sequence; identical to SEQ ID NO: 4070
  GFR-binding peptide
  MOD_RES (2), (4), (38), (39): Xaa is C or S
  MOD_RES (16), (17), (18), (19), (20): Xaa is A or G
  MOD_RES (21), (22), (23), (24): Xaa is A or G or is absent

SEQ ID NO: 78863 - protein, 41 aa, Artificial Sequence; identical to SEQ ID NO: 6043
  GFR-binding peptide
  MOD_RES (2), (4), (36), (37): Xaa is C or S

SEQ ID NO: 78864 - protein, 32 aa, Artificial Sequence; identical to SEQ ID NO: 6044
  GFR-binding peptide
  MOD_RES (2), (2): Xaa is C or S

SEQ ID NO: 78865 - protein, 42 aa, Artificial Sequence; identical to SEQ ID NO: 6046
  GFR-binding peptide
  MOD_RES (1), (3), (36), (37): Xaa is C or S
  MOD_RES (14), (15), (16), (17), (18): Xaa is A or G
  MOD_RES (19), (20), (21), (22): Xaa is A or G or is absent

SEQ ID NO: 78866 - protein, 35 aa, Artificial Sequence; identical to SEQ ID NO: 57094
  GFR-binding peptide
  MOD_RES (1), (32), (33): Xaa is C or S

SEQ ID NO: 78867 - protein, 37 aa, Artificial Sequence; identical to SEQ ID NO: 13448
  GFR-binding peptide
  MOD_RES (1), (33), (34): Xaa is C or S

SEQ ID NO: 78868 - protein, 39 aa, Artificial Sequence; identical to SEQ ID NO: 4073
  GFR-binding peptide
  MOD_RES (1), (35), (36): Xaa is C or S
  MOD_RES (13), (14), (15), (16), (17): Xaa is A or G
  MOD_RES (18), (19), (20), (21): Xaa is A or G or is absent

SEQ ID NO: 78869 - protein, 38 aa, Artificial Sequence; identical to SEQ ID NO: 4074
  GFR-binding peptide
  MOD_RES (2), (4): Xaa is C or S
  MOD_RES (17), (18), (19), (20), (21): Xaa is A or G
  MOD_RES (22), (23), (24), (25): Xaa is A or G or is absent

SEQ ID NO: 78870 - protein, 41 aa, Artificial Sequence; identical to SEQ ID NO: 6048
  GFR-binding peptide
  MOD_RES (1), (3), (37), (38): Xaa is C or S
  MOD_RES (15), (16), (17), (18), (19): Xaa is A or G
  MOD_RES (20), (21), (22), (23): Xaa is A or G or is absent

SEQ ID NO: 78871 - protein, 39 aa, Artificial Sequence; identical to SEQ ID NO: 4075
  GFR-binding peptide
  MOD_RES (1), (33), (34): Xaa is C or S

SEQ ID NO: 78872 - protein, 35 aa, Artificial Sequence
  GFR-binding peptide
  MOD_RES (2), (33), (34): Xaa is C or S
GXEEVIMQYNKLLLVRGNDLYLMSIASTKVPAXXT

SEQ ID NO: 78873 - protein, 41 aa, Artificial Sequence; identical to SEQ ID NO: 6049
  GFR-binding peptide
  MOD_RES (1), (35), (36): Xaa is C or S
  MOD_RES (13), (14), (15), (16), (17): Xaa is A or G
  MOD_RES (18), (19), (20), (21): Xaa is A or G or is absent

SEQ ID NO: 78874 - protein, 37 aa, Artificial Sequence; identical to SEQ ID NO: 6050
  GFR-binding peptide
  MOD_RES (2), (4), (36), (37): Xaa is C or S

SEQ ID NO: 78875 - protein, 32 aa, Artificial Sequence; identical to SEQ ID NO: 11506
  GFR-binding peptide
  MOD_RES (1), (1): Xaa is C or S

SEQ ID NO: 78876 - protein, 35 aa, Artificial Sequence
  GFR-binding peptide
  MOD_RES (2), (4), (35): Xaa is C or S
LXGXEEVIMQYNKLLLVRGNDLYLMSIASTKVPAX

SEQ ID NO: 78877 - protein, 44 aa, Artificial Sequence; identical to SEQ ID NO: 6053
  GFR-binding peptide
  MOD_RES (1), (3), (38), (39): Xaa is C or S
  MOD_RES (16), (17), (18), (19), (20): Xaa is A or G
  MOD_RES (21), (22), (23), (24): Xaa is A or G or is absent

SEQ ID NO: 78878 - protein, 33 aa, Artificial Sequence; identical to SEQ ID NO: 27171
  GFR-binding peptide
  MOD_RES (32), (33): Xaa is C or S

SEQ ID NO: 78879 - protein, 38 aa, Artificial Sequence; identical to SEQ ID NO: 25154
  GFR-binding peptide
  MOD_RES (2), (36), (37): Xaa is C or S
  MOD_RES (14), (15), (16), (17), (18): Xaa is A or G
  MOD_RES (19), (20), (21), (22): Xaa is A or G or is absent

SEQ ID NO: 78880 - protein, 36 aa, Artificial Sequence; identical to SEQ ID NO: 6055
  GFR-binding peptide
  MOD_RES (1), (33), (34): Xaa is C or S

SEQ ID NO: 78881 - protein, 37 aa, Artificial Sequence; identical to SEQ ID NO: 61607
  GFR-binding peptide
  MOD_RES (1), (3), (35), (36): Xaa is C or S

SEQ ID NO: 78882 - protein, 41 aa, Artificial Sequence; identical to SEQ ID NO: 25157
  GFR-binding peptide
  MOD_RES (2), (36), (37): Xaa is C or S
  MOD_RES (14), (15), (16), (17), (18): Xaa is A or G
  MOD_RES (19), (20), (21), (22): Xaa is A or G or is absent

SEQ ID NO: 78883 - protein, 41 aa, Artificial Sequence; identical to SEQ ID NO: 4080
  GFR-binding peptide
  MOD_RES (35), (36): Xaa is C or S
  MOD_RES (13), (14), (15), (16), (17): Xaa is A or G
  MOD_RES (18), (19), (20), (21): Xaa is A or G or is absent

SEQ ID NO: 78884 - protein, 39 aa, Artificial Sequence
  GFR-binding peptide
  MOD_RES (1), (3), (34), (35): Xaa is C or S
XGXEEVIMQYNKLLLVRGNDLYLMSIASTKVPAXXTSPV

SEQ ID NO: 78885 - protein, 35 aa, Artificial Sequence; identical to SEQ ID NO: 4082
  GFR-binding peptide
  MOD_RES (33), (34): Xaa is C or S
  MOD_RES (11), (12), (13), (14), (15): Xaa is A or G
  MOD_RES (16), (17), (18), (19): Xaa is A or G or is absent

SEQ ID NO: 78886 - protein, 39 aa, Artificial Sequence; identical to SEQ ID NO: 6059
  GFR-binding peptide
  MOD_RES (1), (3), (35), (36): Xaa is C or S

SEQ ID NO: 78887 - protein, 38 aa, Artificial Sequence; identical to SEQ ID NO: 4087
  GFR-binding peptide
  MOD_RES (34), (35): Xaa is C or S
  MOD_RES (12), (13), (14), (15), (16): Xaa is A or G
  MOD_RES (17), (18), (19), (20): Xaa is A or G or is absent

SEQ ID NO: 78888 - protein, 30 aa, Artificial Sequence; identical to SEQ ID NO: 4088
  GFR-binding peptide

SEQ ID NO: 78889 - protein, 38 aa, Artificial Sequence; identical to SEQ ID NO: 4089
  GFR-binding peptide
  MOD_RES (1), (3), (37), (38): Xaa is C or S
  MOD_RES (15), (16), (17), (18), (19): Xaa is A or G
  MOD_RES (20), (21), (22), (23): Xaa is A or G or is absent

SEQ ID NO: 78890 - protein, 36 aa, Artificial Sequence; identical to SEQ ID NO: 4090
  GFR-binding peptide
  MOD_RES (33), (34): Xaa is C or S
  MOD_RES (11), (12), (13), (14), (15): Xaa is A or G
  MOD_RES (16), (17), (18), (19): Xaa is A or G or is absent

SEQ ID NO: 78891 - protein, 43 aa, Artificial Sequence; identical to SEQ ID NO: 6061
  GFR-binding peptide
  MOD_RES (1), (3), (37), (38): Xaa is C or S
  MOD_RES (15), (16), (17), (18), (19): Xaa is A or G
  MOD_RES (20), (21), (22), (23): Xaa is A or G or is absent

SEQ ID NO: 78892 - protein, 43 aa, Artificial Sequence; identical to SEQ ID NO: 6063
  GFR-binding peptide
  MOD_RES (2), (4), (38), (39): Xaa is C or S
  MOD_RES (16), (17), (18), (19), (20): Xaa is A or G
  MOD_RES (21), (22), (23), (24): Xaa is A or G or is absent

SEQ ID NO: 78893 - protein, 38 aa, Artificial Sequence; identical to SEQ ID NO: 4094
  GFR-binding peptide
  MOD_RES (2), (34), (35): Xaa is C or S

SEQ ID NO: 78894 - protein, 35 aa, Artificial Sequence; identical to SEQ ID NO: 6064
  GFR-binding peptide
  MOD_RES (31), (32): Xaa is C or S

SEQ ID NO: 78895 - protein, 40 aa, Artificial Sequence; identical to SEQ ID NO: 4098
  GFR-binding peptide
  MOD_RES (1), (3), (34), (35): Xaa is C or S

SEQ ID NO: 78896 - protein, 38 aa, Artificial Sequence; identical to SEQ ID NO: 4099
  GFR-binding peptide
  MOD_RES (1), (33), (34): Xaa is C or S

SEQ ID NO: 78897 - protein, 34 aa, Artificial Sequence; identical to SEQ ID NO: 4100
  GFR-binding peptide
  MOD_RES (1), (34): Xaa is C or S
  MOD_RES (12), (13), (14), (15), (16): Xaa is A or G
  MOD_RES (17), (18), (19), (20): Xaa is A or G or is absent

SEQ ID NO: 78898 - protein, 38 aa, Artificial Sequence; identical to SEQ ID NO: 4101
  GFR-binding peptide
  MOD_RES (1), (32), (33): Xaa is C or S

SEQ ID NO: 78899 - protein, 37 aa, Artificial Sequence; identical to SEQ ID NO: 4102
  GFR-binding peptide
  MOD_RES (2), (37): Xaa is C or S
  MOD_RES (15), (16), (17), (18), (19): Xaa is A or G
  MOD_RES (20), (21), (22), (23): Xaa is A or G or is absent

SEQ ID NO: 78900 - protein, 36 aa, Artificial Sequence; identical to SEQ ID NO: 4103
  GFR-binding peptide
  MOD_RES (1), (35), (36): Xaa is C or S
  MOD_RES (13), (14), (15), (16), (17): Xaa is A or G
  MOD_RES (18), (19), (20), (21): Xaa is A or G or is absent

SEQ ID NO: 78901 - protein, 39 aa, Artificial Sequence; identical to SEQ ID NO: 4104
  GFR-binding peptide
  MOD_RES (1), (3), (34), (35): Xaa is C or S

SEQ ID NO: 78902 - protein, 38 aa, Artificial Sequence; identical to SEQ ID NO: 4105
  GFR-binding peptide
  MOD_RES (2), (35), (36): Xaa is C or S

SEQ ID NO: 78903 - protein, 39 aa, Artificial Sequence; identical to SEQ ID NO: 6071
  GFR-binding peptide
  MOD_RES (2), (4), (37), (38): Xaa is C or S
  MOD_RES (15), (16), (17), (18), (19): Xaa is A or G
  MOD_RES (20), (21), (22), (23): Xaa is A or G or is absent

SEQ ID NO: 78904 - protein, 35 aa, Artificial Sequence; identical to SEQ ID NO: 6074
  GFR-binding peptide
  MOD_RES (33), (34): Xaa is C or S
  MOD_RES (11), (12), (13), (14), (15): Xaa is A or G
  MOD_RES (16), (17), (18), (19): Xaa is A or G or is absent

SEQ ID NO: 78905 - protein, 36 aa, Artificial Sequence; identical to SEQ ID NO: 6075
  GFR-binding peptide
  MOD_RES (34), (34): Xaa is C or S
  MOD_RES (12), (13), (14), (15), (16): Xaa is A or G
  MOD_RES (17), (18), (19), (20): Xaa is A or G or is absent

SEQ ID NO: 78906 - protein, 34 aa, Artificial Sequence; identical to SEQ ID NO: 4107
  GFR-binding peptide
  MOD_RES (31), (32): Xaa is C or S

SEQ ID NO: 78907 - protein, 35 aa, Artificial Sequence
  GFR-binding peptide
  MOD_RES (31), (32): Xaa is C or S
SVAMGQYNKLYTVVGKDLYLISIASLKTPVXXAKS

SEQ ID NO: 78908 - protein, 42 aa, Artificial Sequence; identical to SEQ ID NO: 4109
  GFR-binding peptide
  MOD_RES (1), (3), (37), (38): Xaa is C or S
  MOD_RES (15), (16), (17), (18), (19): Xaa is A or G
  MOD_RES (20), (21), (22), (23): Xaa is A or G or is absent

SEQ ID NO: 78909 - protein, 41 aa, Artificial Sequence; identical to SEQ ID NO: 4111
  GFR-binding peptide
  MOD_RES (2), (36), (37): Xaa is C or S
  MOD_RES (14), (15), (16), (17), (18): Xaa is A or G
  MOD_RES (19), (20), (21), (22): Xaa is A or G or is absent

SEQ ID NO: 78910 - protein, 35 aa, Artificial Sequence; identical to SEQ ID NO: 4113
  GFR-binding peptide
  MOD_RES (33), (34): Xaa is C or S
  MOD_RES (11), (12), (13), (14), (15): Xaa is A or G
  MOD_RES (16), (17), (18), (19): Xaa is A or G or is absent

SEQ ID NO: 78911 - protein, 34 aa, Artificial Sequence
  GFR-binding peptide
  MOD_RES (1), (1): Xaa is C or S
  MOD_RES (13), (14), (15), (16), (17): Xaa is A or G
  MOD_RES (18), (19), (20), (21): Xaa is A or G or is absent
XESVAMGQYNKLXXXXXXXXXLYLISIASLKTPV

SEQ ID NO: 78912 - protein, 36 aa, Artificial Sequence; identical to SEQ ID NO: 6078
  GFR-binding peptide
  MOD_RES (31), (32): Xaa is C or S

SEQ ID NO: 78913 - protein, 38 aa, Artificial Sequence; identical to SEQ ID NO: 6079
  GFR-binding peptide
  MOD_RES (2), (34), (35): Xaa is C or S

SEQ ID NO: 78914 - protein, 38 aa, Artificial Sequence; identical to SEQ ID NO: 13487
  GFR-binding peptide
  MOD_RES (1), (3), (37), (38): Xaa is C or S
  MOD_RES (15), (16), (17), (18), (19): Xaa is A or G
  MOD_RES (20), (21), (22), (23): Xaa is A or G or is absent

SEQ ID NO: 78915 - protein, 34 aa, Artificial Sequence; identical to SEQ ID NO: 6080
  GFR-binding peptide
  MOD_RES (2), (33), (34): Xaa is C or S

SEQ ID NO: 78916 - protein, 36 aa, Artificial Sequence; identical to SEQ ID NO: 4119
  GFR-binding peptide
  MOD_RES (2), (4), (35), (36): Xaa is C or S

SEQ ID NO: 78917 - protein, 36 aa, Artificial Sequence; identical to SEQ ID NO: 4120
  GFR-binding peptide
  MOD_RES (1), (33), (34): Xaa is C or S

SEQ ID NO: 78918 - protein, 36 aa, Artificial Sequence
  GFR-binding peptide
  MOD_RES (1), (3): Xaa is C or S
  MOD_RES (15), (16), (17), (18), (19): Xaa is A or G
  MOD_RES (20), (21), (22), (23): Xaa is A or G or is absent
XGXRDVVMGQYNKLXXXXXXXXXLYLMSIASMKTPT

SEQ ID NO: 78919 - protein, 40 aa, Artificial Sequence; identical to SEQ ID NO: 6082
  GFR-binding peptide
  MOD_RES (2), (4), (36): Xaa is C or S

SEQ ID NO: 78920 - protein, 36 aa, Artificial Sequence; identical to SEQ ID NO: 4122
  GFR-binding peptide
  MOD_RES (31), (32): Xaa is C or S

SEQ ID NO: 78921 - protein, 41 aa, Artificial Sequence
  GFR-binding peptide
  MOD_RES (1), (3), (35), (36): Xaa is C or S
XGXESVAMGQYNKLYTVVGKDLYLISIASLKTPVXXAKSAK

SEQ ID NO: 78922 - protein, 40 aa, Artificial Sequence
  GFR-binding peptide
  MOD_RES (2), (36), (37): Xaa is C or S
  MOD_RES (14), (15), (16), (17), (18): Xaa is A or G
  MOD_RES (19), (20), (21), (22): Xaa is A or G or is absent
GXRDVVMGQYNKLXXXXXXXXXLYLMSIASMKTPTXXPGA

SEQ ID NO: 78923 - protein, 40 aa, Artificial Sequence; identical to SEQ ID NO: 4123
  GFR-binding peptide
  MOD_RES (2), (4), (39), (40): Xaa is C or S
  MOD_RES (17), (18), (19), (20), (21): Xaa is A or G
  MOD_RES (22), (23), (24), (25): Xaa is A or G or is absent

SEQ ID NO: 78924 - protein, 36 aa, Artificial Sequence
  GFR-binding peptide
  MOD_RES (31), (32): Xaa is C or S
EVTMNQYNKLVVNKNEDLYLISIASMKEPVXXPEPI

SEQ ID NO: 78925 - protein, 35 aa, Artificial Sequence; identical to SEQ ID NO: 4126
  GFR-binding peptide
  MOD_RES (31), (32): Xaa is C or S

SEQ ID NO: 78926 - protein, 37 aa, Artificial Sequence; identical to SEQ ID NO: 6084
  GFR-binding peptide
  MOD_RES (31), (32): Xaa is C or S

SEQ ID NO: 78927 - protein, 41 aa, Artificial Sequence; identical to SEQ ID NO: 6085
  GFR-binding peptide
  MOD_RES (2), (35), (36): Xaa is C or S
  MOD_RES (13), (14), (15), (16), (17): Xaa is A or G
  MOD_RES (18), (19), (20), (21): Xaa is A or G or is absent

SEQ ID NO: 78928 - protein, 37 aa, Artificial Sequence; identical to SEQ ID NO: 4129
  GFR-binding peptide
  MOD_RES (1), (32), (33): Xaa is C or S

SEQ ID NO: 78929 - protein, 39 aa, Artificial Sequence; identical to SEQ ID NO: 4131
  GFR-binding peptide
  MOD_RES (2), (4), (37), (38): Xaa is C or S

SEQ ID NO: 78930 - protein, 39 aa, Artificial Sequence
  GFR-binding peptide
  MOD_RES (1), (33), (34): Xaa is C or S
XESVAMGQYNKLYTVVGKDLYLISIASLKTPVXXAKSAK

SEQ ID NO: 78931 - protein, 33 aa, Artificial Sequence
  GFR-binding peptide
  MOD_RES (1), (33): Xaa is C or S
XESVAMGQYNKLYTVVGKDLYLISIASLKTPVX

SEQ ID NO: 78932 - protein, 37 aa, Artificial Sequence; identical to SEQ ID NO: 4134
  GFR-binding peptide
  MOD_RES (1), (33), (34): Xaa is C or S

SEQ ID NO: 78933 - protein, 37 aa, Artificial Sequence; identical to SEQ ID NO: 6086
  GFR-binding peptide
  MOD_RES (33), (34): Xaa is C or S
  MOD_RES (11), (12), (13), (14), (15): Xaa is A or G
  MOD_RES (16), (17), (18), (19): Xaa is A or G or is absent

SEQ ID NO: 78934 - protein, 41 aa, Artificial Sequence; identical to SEQ ID NO: 4135
  GFR-binding peptide
  MOD_RES (2), (4), (37), (38): Xaa is C or S
  MOD_RES (15), (16), (17), (18), (19): Xaa is A or G
  MOD_RES (20), (21), (22), (23): Xaa is A or G or is absent

SEQ ID NO: 78935 - protein, 37 aa, Artificial Sequence; identical to SEQ ID NO: 59849
  GFR-binding peptide
  MOD_RES (31), (32): Xaa is C or S

SEQ ID NO: 78936 - protein, 36 aa, Artificial Sequence
  GFR-binding peptide
  MOD_RES (1), (3), (35), (36): Xaa is C or S
XGXESVAMGQYNKLYTVVGKDLYLISIASLKTPVXX

SEQ ID NO: 78937 - protein, 37 aa, Artificial Sequence
  GFR-binding peptide
  MOD_RES (2), (36), (37): Xaa is C or S
  MOD_RES (14), (15), (16), (17), (18): Xaa is A or G
  MOD_RES (19), (20), (21), (22): Xaa is A or G or is absent
GXESVAMGQYNKLXXXXXXXXXLYLISIASLKTPVXX

SEQ ID NO: 78938 - protein, 37 aa, Artificial Sequence; identical to SEQ ID NO: 4136
  GFR-binding peptide
  MOD_RES (2), (36), (37): Xaa is C or S
  MOD_RES (14), (15), (16), (17), (18): Xaa is A or G
  MOD_RES (19), (20), (21), (22): Xaa is A or G or is absent

SEQ ID NO: 78939 - protein, 35 aa, Artificial Sequence; identical to SEQ ID NO: 6087
  GFR-binding peptide
  MOD_RES (1), (34), (35): Xaa is C or S
  MOD_RES (12), (13), (14), (15), (16): Xaa is A or G
  MOD_RES (17), (18), (19), (20): Xaa is A or G or is absent

SEQ ID NO: 78940 - protein, 35 aa, Artificial Sequence
  GFR-binding peptide
  MOD_RES (33), (34): Xaa is C or S
  MOD_RES (11), (12), (13), (14), (15): Xaa is A or G
  MOD_RES (16), (17), (18), (19): Xaa is A or G or is absent
EVTMNQYNKLXXXXXXXXXLYLISIASMKEPVXXP

SEQ ID NO: 78941 - protein, 42 aa, Artificial Sequence; identical to SEQ ID NO: 6088
  GFR-binding peptide
  MOD_RES (1), (3), (36), (37): Xaa is C or S

SEQ ID NO: 78942 - protein, 40 aa, Artificial Sequence; identical to SEQ ID NO: 4140
  GFR-binding peptide
  MOD_RES (2), (37), (38): Xaa is C or S
  MOD_RES (15), (16), (17), (18), (19): Xaa is A or G
  MOD_RES (20), (21), (22), (23): Xaa is A or G or is absent

SEQ ID NO: 78943 - protein, 35 aa, Artificial Sequence; identical to SEQ ID NO: 25198
  GFR-binding peptide
  MOD_RES (2), (2): Xaa is C or S
  MOD_RES (14), (15), (16), (17), (18): Xaa is A or G
  MOD_RES (19), (20), (21), (22): Xaa is A or G or is absent

SEQ ID NO: 78944 - protein, 40 aa, Artificial Sequence; identical to SEQ ID NO: 4144
  GFR-binding peptide
  MOD_RES (1), (34), (35): Xaa is C or S
  MOD_RES (12), (13), (14), (15), (16): Xaa is A or G
  MOD_RES (17), (18), (19), (20): Xaa is A or G or is absent

SEQ ID NO: 78945 - protein, 34 aa, Artificial Sequence; identical to SEQ ID NO: 4147
  GFR-binding peptide
  MOD_RES (1), (1): Xaa is C or S
  MOD_RES (13), (14), (15), (16), (17): Xaa is A or G
  MOD_RES (18), (19), (20), (21): Xaa is A or G or is absent

SEQ ID NO: 78946 - protein, 30 aa, Artificial Sequence; identical to SEQ ID NO: 6091
  GFR-binding peptide

SEQ ID NO: 78947 - protein, 32 aa, Artificial Sequence; identical to SEQ ID NO: 59863
  GFR-binding peptide
  MOD_RES (11), (12), (13), (14), (15): Xaa is A or G
  MOD_RES (16), (17), (18), (19): Xaa is A or G or is absent

SEQ ID NO: 78948 - protein, 31 aa, Artificial Sequence; identical to SEQ ID NO: 6093
  GFR-binding peptide
  MOD_RES (31), (31): Xaa is C or S

SEQ ID NO: 78949 - protein, 37 aa, Artificial Sequence; identical to SEQ ID NO: 13509
  GFR-binding peptide
  MOD_RES (32), (33): Xaa is C or S

SEQ ID NO: 78950 - protein, 42 aa, Artificial Sequence; identical to SEQ ID NO: 6094
  GFR-binding peptide
  MOD_RES (2), (4), (37), (38): Xaa is C or S

SEQ ID NO: 78951 - protein, 37 aa, Artificial Sequence; identical to SEQ ID NO: 4149
  GFR-binding peptide
  MOD_RES (2), (4), (36), (37): Xaa is C or S

SEQ ID NO: 78952 - protein, 44 aa, Artificial Sequence; identical to SEQ ID NO: 6096
  GFR-binding peptide
  MOD_RES (2), (4), (38), (39): Xaa is C or S
  MOD_RES (16), (17), (18), (19), (20): Xaa is A or G
  MOD_RES (21), (22), (23), (24): Xaa is A or G or is absent

SEQ ID NO: 78953 - protein, 38 aa, Artificial Sequence; identical to SEQ ID NO: 59864
  GFR-binding peptide
  MOD_RES (2), (36), (37): Xaa is C or S
  MOD_RES (14), (15), (16), (17), (18): Xaa is A or G
  MOD_RES (19), (20), (21), (22): Xaa is A or G or is absent

SEQ ID NO: 78954 - protein, 37 aa, Artificial Sequence; identical to SEQ ID NO: 6099
  GFR-binding peptide
  MOD_RES (33), (34): Xaa is C or S
  MOD_RES (11), (12), (13), (14), (15): Xaa is A or G
  MOD_RES (16), (17), (18), (19): Xaa is A or G or is absent

SEQ ID NO: 78955 - protein, 38 aa, Artificial Sequence; identical to SEQ ID NO: 27230
  GFR-binding peptide
  MOD_RES (2), (4), (36), (37): Xaa is C or S

SEQ ID NO: 78956 - protein, 35 aa, Artificial Sequence
  GFR-binding peptide
  MOD_RES (2), (35): Xaa is C or S
  MOD_RES (13), (14), (15), (16), (17): Xaa is A or G
  MOD_RES (18), (19), (20), (21): Xaa is A or G or is absent
GXEEVIMQYNKLXXXXXXXXXLYLMSIASTKVPAX

SEQ ID NO: 78957 - protein, 40 aa, Artificial Sequence; identical to SEQ ID NO: 4150
  GFR-binding peptide
  MOD_RES (1), (34), (35): Xaa is C or S
  MOD_RES (12), (13), (14), (15), (16): Xaa is A or G
  MOD_RES (17), (18), (19), (20): Xaa is A or G or is absent

SEQ ID NO: 78958 - protein, 35 aa, Artificial Sequence; identical to SEQ ID NO: 4151
  GFR-binding peptide
  MOD_RES (1), (3), (35): Xaa is C or S

SEQ ID NO: 78959 - protein, 38 aa, Artificial Sequence; identical to SEQ ID NO: 6102
  GFR-binding peptide
  MOD_RES (1), (36), (37): Xaa is C or S
  MOD_RES (14), (15), (16), (17), (18): Xaa is A or G
  MOD_RES (19), (20), (21), (22): Xaa is A or G or is absent

SEQ ID NO: 78960 - protein, 40 aa, Artificial Sequence
  GFR-binding peptide
  MOD_RES (2), (4), (36), (37): Xaa is C or S
RXGXESVAMGQYNKLYTVVGKDLYLISIASLKTPVXXAKS

SEQ ID NO: 78961 - protein, 38 aa, Artificial Sequence
  GFR-binding peptide
  MOD_RES (32), (33): Xaa is C or S
SEVTMNQYNKLVVNKNEDLYLISIASMKEPVXXPEPIG

SEQ ID NO: 78962 - protein, 33 aa, Artificial Sequence; identical to SEQ ID NO: 6105
  GFR-binding peptide
  MOD_RES (1), (3): Xaa is C or S

SEQ ID NO: 78963 - protein, 39 aa, Artificial Sequence; identical to SEQ ID NO: 6107
  GFR-binding peptide
  MOD_RES (33), (34): Xaa is C or S
  MOD_RES (11), (12), (13), (14), (15): Xaa is A or G
  MOD_RES (16), (17), (18), (19): Xaa is A or G or is absent

SEQ ID NO: 78964 - protein, 38 aa, Artificial Sequence; identical to SEQ ID NO: 4155
  GFR-binding peptide
  MOD_RES (2), (4), (36), (37): Xaa is C or S

SEQ ID NO: 78965 - protein, 35 aa, Artificial Sequence; identical to SEQ ID NO: 6108
  GFR-binding peptide
  MOD_RES (1), (3), (35): Xaa is C or S

SEQ ID NO: 78966 - protein, 40 aa, Artificial Sequence; identical to SEQ ID NO: 6109
  GFR-binding peptide
  MOD_RES (2), (35), (36): Xaa is C or S
  MOD_RES (13), (14), (15), (16), (17): Xaa is A or G
  MOD_RES (18), (19), (20), (21): Xaa is A or G or is absent

SEQ ID NO: 78967 - protein, 36 aa, Artificial Sequence; identical to SEQ ID NO: 4156
  GFR-binding peptide
  MOD_RES (31), (32): Xaa is C or S

SEQ ID NO: 78968 - protein, 37 aa, Artificial Sequence; identical to SEQ ID NO: 13523
  GFR-binding peptide
  MOD_RES (1), (3), (37): Xaa is C or S
  MOD_RES (15), (16), (17), (18), (19): Xaa is A or G
  MOD_RES (20), (21), (22), (23): Xaa is A or G or is absent

SEQ ID NO: 78969 - protein, 33 aa, Artificial Sequence; identical to SEQ ID NO: 4158
  GFR-binding peptide
  MOD_RES (31), (32): Xaa is C or S

SEQ ID NO: 78970 - protein, 39 aa, Artificial Sequence; identical to SEQ ID NO: 4159
  GFR-binding peptide
  MOD_RES (2), (4), (36): Xaa is C or S

SEQ ID NO: 78971 - protein, 38 aa, Artificial Sequence; identical to SEQ ID NO: 4160
  GFR-binding peptide
  MOD_RES (2), (36), (37): Xaa is C or S
  MOD_RES (14), (15), (16), (17), (18): Xaa is A or G
  MOD_RES (19), (20), (21), (22): Xaa is A or G or is absent

SEQ ID NO: 78972 - protein, 34 aa, Artificial Sequence; identical to SEQ ID NO: 11577
  GFR-binding peptide
  MOD_RES (32), (33): Xaa is C or S

SEQ ID NO: 78973 - protein, 35 aa, Artificial Sequence; identical to SEQ ID NO: 6113
  GFR-binding peptide
  MOD_RES (31), (32): Xaa is C or S

SEQ ID NO: 78974 - protein, 37 aa, Artificial Sequence; identical to SEQ ID NO: 6116
  GFR-binding peptide
  MOD_RES (35), (36): Xaa is C or S
  MOD_RES (13), (14), (15), (16), (17): Xaa is A or G
  MOD_RES (18), (19), (20), (21): Xaa is A or G or is absent

SEQ ID NO: 78975 - protein, 39 aa, Artificial Sequence; identical to SEQ ID NO: 4168
  GFR-binding peptide
  MOD_RES (2), (4), (38), (39): Xaa is C or S
  MOD_RES (16), (17), (18), (19), (20): Xaa is A or G
  MOD_RES (21), (22), (23), (24): Xaa is A or G or is absent

SEQ ID NO: 78976 - protein, 34 aa, Artificial Sequence; identical to SEQ ID NO: 6120
  GFR-binding peptide
  MOD_RES (32), (33): Xaa is C or S

SEQ ID NO: 78977 - protein, 35 aa, Artificial Sequence; identical to SEQ ID NO: 4169
  GFR-binding peptide
  MOD_RES (2), (2): Xaa is C or S
  MOD_RES (14), (15), (16), (17), (18): Xaa is A or G
  MOD_RES (19), (20), (21), (22): Xaa is A or G or is absent

SEQ ID NO: 78978 - protein, 34 aa, Artificial Sequence; identical to SEQ ID NO: 4170
  GFR-binding peptide
  MOD_RES (33), (34): Xaa is C or S

SEQ ID NO: 78979 - protein, 33 aa, Artificial Sequence; identical to SEQ ID NO: 27252
  GFR-binding peptide
  MOD_RES (31), (32): Xaa is C or S

SEQ ID NO: 78980 - protein, 35 aa, Artificial Sequence; identical to SEQ ID NO: 6122
  GFR-binding peptide
  MOD_RES (2), (35): Xaa is C or S
  MOD_RES (13), (14), (15), (16), (17): Xaa is A or G
  MOD_RES (18), (19), (20), (21): Xaa is A or G or is absent

SEQ ID NO: 78981 - protein, 37 aa, Artificial Sequence; identical to SEQ ID NO: 6123
  GFR-binding peptide
  MOD_RES (1), (33), (34): Xaa is C or S

SEQ ID NO: 78982 - protein, 35 aa, Artificial Sequence; identical to SEQ ID NO: 4171
  GFR-binding peptide
  MOD_RES (32), (33): Xaa is C or S

SEQ ID NO: 78983 - protein, 37 aa, Artificial Sequence; identical to SEQ ID NO: 4172
  GFR-binding peptide
  MOD_RES (31), (32): Xaa is C or S

SEQ ID NO: 78984 - protein, 34 aa, Artificial Sequence; identical to SEQ ID NO: 6127
  GFR-binding peptide
  MOD_RES (33), (34): Xaa is C or S
  MOD_RES (11), (12), (13), (14), (15): Xaa is A or G
  MOD_RES (16), (17), (18), (19): Xaa is A or G or is absent

SEQ ID NO: 78985 - protein, 38 aa, Artificial Sequence; identical to SEQ ID NO: 4174
  GFR-binding peptide
  MOD_RES (2), (4), (38): Xaa is C or S
  MOD_RES (16), (17), (18), (19), (20): Xaa is A or G
  MOD_RES (21), (22), (23), (24): Xaa is A or G or is absent

SEQ ID NO: 78986 - protein, 35 aa, Artificial Sequence; identical to SEQ ID NO: 4176
  GFR-binding peptide
  MOD_RES (1), (35): Xaa is C or S
  MOD_RES (13), (14), (15), (16), (17): Xaa is A or G
  MOD_RES (18), (19), (20), (21): Xaa is A or G or is absent

SEQ ID NO: 78987 - protein, 38 aa, Artificial Sequence; identical to SEQ ID NO: 4178
  GFR-binding peptide
  MOD_RES (1), (3), (37): Xaa is C or S
  MOD_RES (15), (16), (17), (18), (19): Xaa is A or G
  MOD_RES (20), (21), (22), (23): Xaa is A or G or is absent

SEQ ID NO: 78988 - protein, 38 aa, Artificial Sequence; identical to SEQ ID NO: 4182
  GFR-binding peptide
  MOD_RES (2), (4), (35), (36): Xaa is C or S

SEQ ID NO: 78989 - protein, 30 aa, Artificial Sequence; identical to SEQ ID NO: 6132
  GFR-binding peptide

SEQ ID NO: 78990 - protein, 40 aa, Artificial Sequence; identical to SEQ ID NO: 6134
  GFR-binding peptide
  MOD_RES (2), (34), (35): Xaa is C or S

SEQ ID NO: 78991 - protein, 35 aa, Artificial Sequence; identical to SEQ ID NO: 4183
  GFR-binding peptide
  MOD_RES (1), (33), (34): Xaa is C or S

SEQ ID NO: 78992 - protein, 37 aa, Artificial Sequence; identical to SEQ ID NO: 6136
  GFR-binding peptide
  MOD_RES (1), (3), (34), (35): Xaa is C or S

SEQ ID NO: 78993 - protein, 34 aa, Artificial Sequence
  GFR-binding peptide
  MOD_RES (1), (3): Xaa is C or S
XAXSEVTMNQYNKLVVNKNEDLYLISIASMKEPV

SEQ ID NO: 78994 - protein, 40 aa, Artificial Sequence; identical to SEQ ID NO: 6138
  GFR-binding peptide
  MOD_RES (1), (35), (36): Xaa is C or S
  MOD_RES (13), (14), (15), (16), (17): Xaa is A or G
  MOD_RES (18), (19), (20), (21): Xaa is A or G or is absent

SEQ ID NO: 78995 - protein, 37 aa, Artificial Sequence; identical to SEQ ID NO: 6141
  GFR-binding peptide
  MOD_RES (1), (33), (34): Xaa is C or S

SEQ ID NO: 78996 - protein, 38 aa, Artificial Sequence; identical to SEQ ID NO: 4186
  GFR-binding peptide
  MOD_RES (1), (32), (33): Xaa is C or S

SEQ ID NO: 78997 - protein, 37 aa, Artificial Sequence
  GFR-binding peptide
  MOD_RES (1), (3), (35), (36): Xaa is C or S
XGXESVAMGQYNKLYTVVGKDLYLISIASLKTPVXXA

SEQ ID NO: 78998 - protein, 33 aa, Artificial Sequence; identical to SEQ ID NO: 11602
  GFR-binding peptide
  MOD_RES (2), (2): Xaa is C or S

SEQ ID NO: 78999 - protein, 34 aa, Artificial Sequence; identical to SEQ ID NO: 4189
  GFR-binding peptide
  MOD_RES (32), (33): Xaa is C or S

SEQ ID NO: 79000 - protein, 34 aa, Artificial Sequence; identical to SEQ ID NO: 61680
  GFR-binding peptide
  MOD_RES (1), (1): Xaa is C or S
  MOD_RES (13), (14), (15), (16), (17): Xaa is A or G
  MOD_RES (18), (19), (20), (21): Xaa is A or G or is absent

SEQ ID NO: 79001 - protein, 40 aa, Artificial Sequence; identical to SEQ ID NO: 6144
  GFR-binding peptide
  MOD_RES (1), (3), (36), (37): Xaa is C or S
  MOD_RES (14), (15), (16), (17), (18): Xaa is A or G
  MOD_RES (19), (20), (21), (22): Xaa is A or G or is absent

SEQ ID NO: 79002 - protein, 37 aa, Artificial Sequence; identical to SEQ ID NO: 6148
  GFR-binding peptide
  MOD_RES (2), (4): Xaa is C or S
  MOD_RES (16), (17), (18), (19), (20): Xaa is A or G
  MOD_RES (21), (22), (23), (24): Xaa is A or G or is absent

SEQ ID NO: 79003 - protein, 40 aa, Artificial Sequence; identical to SEQ ID NO: 6151
  GFR-binding peptide
  MOD_RES (2), (36), (37): Xaa is C or S
  MOD_RES (14), (15), (16), (17), (18): Xaa is A or G
  MOD_RES (19), (20), (21), (22): Xaa is A or G or is absent

SEQ ID NO: 79004 - protein, 35 aa, Artificial Sequence
  GFR-binding peptide
  MOD_RES (2), (34), (35): Xaa is C or S
GXESVAMGQYNKLYTVVGKDLYLISIASLKTPVXX

SEQ ID NO: 79005 - protein, 37 aa, Artificial Sequence; identical to SEQ ID NO: 4197
  GFR-binding peptide
  MOD_RES (1), (3), (35), (36): Xaa is C or S

SEQ ID NO: 79006 - protein, 33 aa, Artificial Sequence; identical to SEQ ID NO: 59901
  GFR-binding peptide
  MOD_RES (31), (32): Xaa is C or S

SEQ ID NO: 79007 - protein, 36 aa, Artificial Sequence; identical to SEQ ID NO: 4198
  GFR-binding peptide
  MOD_RES (35), (36): Xaa is C or S
  MOD_RES (13), (14), (15), (16), (17): Xaa is A or G
  MOD_RES (18), (19), (20), (21): Xaa is A or G or is absent

SEQ ID NO: 79008 - protein, 40 aa, Artificial Sequence; identical to SEQ ID NO: 6155
  GFR-binding peptide
  MOD_RES (2), (34), (35): Xaa is C or S

SEQ ID NO: 79009 - protein, 36 aa, Artificial Sequence; identical to SEQ ID NO: 6156
  GFR-binding peptide
  MOD_RES (1), (3), (36): Xaa is C or S

SEQ ID NO: 79010 - protein, 40 aa, Artificial Sequence; identical to SEQ ID NO: 27290
  GFR-binding peptide
  MOD_RES (2), (4), (36), (37): Xaa is C or S

SEQ ID NO: 79011 - protein, 35 aa, Artificial Sequence; identical to SEQ ID NO: 6157
  GFR-binding peptide
  MOD_RES (2), (34), (35): Xaa is C or S

SEQ ID NO: 79012 - protein, 39 aa, Artificial Sequence; identical to SEQ ID NO: 6158
  GFR-binding peptide
  MOD_RES (2), (4), (36), (37): Xaa is C or S

SEQ ID NO: 79013 - protein, 38 aa, Artificial Sequence; identical to SEQ ID NO: 6159
  GFR-binding peptide
  MOD_RES (2), (4), (38): Xaa is C or S
  MOD_RES (16), (17), (18), (19), (20): Xaa is A or G
  MOD_RES (21), (22), (23), (24): Xaa is A or G or is absent

SEQ ID NO: 79014 - protein, 35 aa, Artificial Sequence
  GFR-binding peptide
  MOD_RES (1), (3), (35): Xaa is C or S
XGXRDVVMGQYNKLIIQQKDNLYLMSIASMKTPTX

SEQ ID NO: 79015 - protein, 41 aa, Artificial Sequence; identical to SEQ ID NO: 4201
  GFR-binding peptide
  MOD_RES (2), (4), (35), (36): Xaa is C or S

SEQ ID NO: 79016 - protein, 38 aa, Artificial Sequence
  GFR-binding peptide
  MOD_RES (2), (4), (38): Xaa is C or S
  MOD_RES (16), (17), (18), (19), (20): Xaa is A or G
  MOD_RES (21), (22), (23), (24): Xaa is A or G or is absent
SXGXRDVVMGQYNKLXXXXXXXXXLYLMSIASMKTPTX

SEQ ID NO: 79017 - protein, 32 aa, Artificial Sequence; identical to SEQ ID NO: 4202
  GFR-binding peptide
  MOD_RES (11), (12), (13), (14), (15): Xaa is A or G
  MOD_RES (16), (17), (18), (19): Xaa is A or G or is absent

SEQ ID NO: 79018 - protein, 33 aa, Artificial Sequence; identical to SEQ ID NO: 57210
  GFR-binding peptide
  MOD_RES (1), (32), (33): Xaa is C or S

SEQ ID NO: 79019 - protein, 39 aa, Artificial Sequence; identical to SEQ ID NO: 27298
  GFR-binding peptide
  MOD_RES (2), (4), (38), (39): Xaa is C or S
  MOD_RES (16), (17), (18), (19), (20): Xaa is A or G
  MOD_RES (21), (22), (23), (24): Xaa is A or G or is absent

SEQ ID NO: 79020 - protein, 37 aa, Artificial Sequence; identical to SEQ ID NO: 4205
  GFR-binding peptide
  MOD_RES (1), (3), (37): Xaa is C or S
  MOD_RES (15), (16), (17), (18), (19): Xaa is A or G
  MOD_RES (20), (21), (22), (23): Xaa is A or G or is absent

SEQ ID NO: 79021 - protein, 38 aa, Artificial Sequence; identical to SEQ ID NO: 4207
  GFR-binding peptide
  MOD_RES (2), (36), (37): Xaa is C or S
  MOD_RES (14), (15), (16), (17), (18): Xaa is A or G
  MOD_RES (19), (20), (21), (22): Xaa is A or G or is absent

SEQ ID NO: 79022 - protein, 32 aa, Artificial Sequence; identical to SEQ ID NO: 6161
  GFR-binding peptide
  MOD_RES (32), (32): Xaa is C or S

SEQ ID NO: 79023 - protein, 34 aa, Artificial Sequence; identical to SEQ ID NO: 27299
  GFR-binding peptide
  MOD_RES (1), (3): Xaa is C or S

SEQ ID NO: 79024 - protein, 41 aa, Artificial Sequence; identical to SEQ ID NO: 13560
  GFR-binding peptide
  MOD_RES (2), (36), (37): Xaa is C or S
  MOD_RES (14), (15), (16), (17), (18): Xaa is A or G
  MOD_RES (19), (20), (21), (22): Xaa is A or G or is absent

SEQ ID NO: 79025 - protein, 39 aa, Artificial Sequence; identical to SEQ ID NO: 11618
  GFR-binding peptide
  MOD_RES (1), (3), (37), (38): Xaa is C or S
  MOD_RES (15), (16), (17), (18), (19): Xaa is A or G
  MOD_RES (20), (21), (22), (23): Xaa is A or G or is absent

SEQ ID NO: 79026 - protein, 38 aa, Artificial Sequence
  GFR-binding peptide
  MOD_RES (32), (33): Xaa is C or S
RDVVMGQYNKLIIQQKDNLYLMSIASMKTPTXXPGASG

SEQ ID NO: 79027 - protein, 41 aa, Artificial Sequence; identical to SEQ ID NO: 63443
  GFR-binding peptide
  MOD_RES (1), (3), (37), (38): Xaa is C or S
  MOD_RES (15), (16), (17), (18), (19): Xaa is A or G
  MOD_RES (20), (21), (22), (23): Xaa is A or G or is absent

SEQ ID NO: 79028 - protein, 32 aa, Artificial Sequence; identical to SEQ ID NO: 61704
  GFR-binding peptide
  MOD_RES (31), (32): Xaa is C or S

SEQ ID NO: 79029 - protein, 35 aa, Artificial Sequence; identical to SEQ ID NO: 11621
  GFR-binding peptide
  MOD_RES (1), (3), (35): Xaa is C or S

SEQ ID NO: 79030 - protein, 33 aa, Artificial Sequence; identical to SEQ ID NO: 4211
  GFR-binding peptide
  MOD_RES (33), (33): Xaa is C or S
  MOD_RES (11), (12), (13), (14), (15): Xaa is A or G
  MOD_RES (16), (17), (18), (19): Xaa is A or G or is absent

SEQ ID NO: 79031 - protein, 35 aa, Artificial Sequence
  GFR-binding peptide
  MOD_RES (2), (34), (35): Xaa is C or S
GXAEVVMDQYNKLVVNNAADLYLISIASLRAPVXX

SEQ ID NO: 79032 - protein, 35 aa, Artificial Sequence; identical to SEQ ID NO: 4214
  GFR-binding peptide
  MOD_RES (2), (2): Xaa is C or S
  MOD_RES (14), (15), (16), (17), (18): Xaa is A or G
  MOD_RES (19), (20), (21), (22): Xaa is A or G or is absent

SEQ ID NO: 79033 - protein, 37 aa, Artificial Sequence; identical to SEQ ID NO: 4215
  GFR-binding peptide
  MOD_RES (1), (35), (36): Xaa is C or S
  MOD_RES (13), (14), (15), (16), (17): Xaa is A or G
  MOD_RES (18), (19), (20), (21): Xaa is A or G or is absent

SEQ ID NO: 79034 - protein, 37 aa, Artificial Sequence; identical to SEQ ID NO: 6168
  GFR-binding peptide
  MOD_RES (1), (3), (34), (35): Xaa is C or S

SEQ ID NO: 79035 - protein, 38 aa, Artificial Sequence; identical to SEQ ID NO: 6170
  GFR-binding peptide
  MOD_RES (1), (3), (38): Xaa is C or S
  MOD_RES (16), (17), (18), (19), (20): Xaa is A or G
  MOD_RES (21), (22), (23), (24): Xaa is A or G or is absent

SEQ ID NO: 79036 - protein, 36 aa, Artificial Sequence; identical to SEQ ID NO: 4218
  GFR-binding peptide
  MOD_RES (1), (3), (35), (36): Xaa is C or S

SEQ ID NO: 79037 - protein, 35 aa, Artificial Sequence
  GFR-binding peptide
  MOD_RES (2), (4): Xaa is C or S
RXGXESVAMGQYNKLYTVVGKDLYLISIASLKTPV

SEQ ID NO: 79038 - protein, 39 aa, Artificial Sequence; identical to SEQ ID NO: 6173
  GFR-binding peptide
  MOD_RES (2), (36), (37): Xaa is C or S
  MOD_RES (14), (15), (16), (17), (18): Xaa is A or G
  MOD_RES (19), (20), (21), (22): Xaa is A or G or is absent

SEQ ID NO: 79039 - protein, 32 aa, Artificial Sequence; identical to SEQ ID NO: 4220
  GFR-binding peptide
  MOD_RES (1), (32): Xaa is C or S

SEQ ID NO: 79040 - protein, 35 aa, Artificial Sequence; identical to SEQ ID NO: 61708
  GFR-binding peptide
  MOD_RES (1), (35): Xaa is C or S
  MOD_RES (13), (14), (15), (16), (17): Xaa is A or G
  MOD_RES (18), (19), (20), (21): Xaa is A or G or is absent

SEQ ID NO: 79041 - protein, 35 aa, Artificial Sequence; identical to SEQ ID NO: 6174
  GFR-binding peptide
  MOD_RES (2), (4), (35): Xaa is C or S

SEQ ID NO: 79042 - protein, 31 aa, Artificial Sequence; identical to SEQ ID NO: 4221
  GFR-binding peptide
  MOD_RES (1), (1): Xaa is C or S

SEQ ID NO: 79043 - protein, 37 aa, Artificial Sequence; identical to SEQ ID NO: 4223
  GFR-binding peptide
  MOD_RES (2), (36), (37): Xaa is C or S
  MOD_RES (14), (15), (16), (17), (18): Xaa is A or G
  MOD_RES (19), (20), (21), (22): Xaa is A or G or is absent

SEQ ID NO: 79044 - protein, 33 aa, Artificial Sequence; identical to SEQ ID NO: 6179
  GFR-binding peptide
  MOD_RES (31), (32): Xaa is C or S

SEQ ID NO: 79045 - protein, 40 aa, Artificial Sequence; identical to SEQ ID NO: 4226
  GFR-binding peptide
  MOD_RES (1), (3), (34), (35): Xaa is C or S

SEQ ID NO: 79046 - protein, 71 aa, Artificial Sequence
  GFR-binding peptide
  MOD_RES (2), (33), (39), (40): Xaa is C or S
KXSKVVMQYNKLVKPTRGVLYLISIASLDQPVXKIPKAXXVPTELNAISMLYFDENEKVVLKKYRDMVVEG

SEQ ID NO: 79047 - protein, 38 aa, Artificial Sequence; identical to SEQ ID NO: 7973
  GFR-binding peptide
  MOD_RES (4), (5), (38): Xaa is C or S
  MOD_RES (19), (20), (21), (22), (23): Xaa is A or G
  MOD_RES (24), (25), (26), (27): Xaa is A or G or is absent

SEQ ID NO: 79048 - protein, 43 aa, Artificial Sequence; identical to SEQ ID NO: 6182
  GFR-binding peptide
  MOD_RES (5), (6), (40), (42): Xaa is C or S
  MOD_RES (20), (21), (22), (23), (24): Xaa is A or G
  MOD_RES (25), (26), (27), (28): Xaa is A or G or is absent

SEQ ID NO: 79049 - protein, 35 aa, Artificial Sequence; identical to SEQ ID NO: 6183
  GFR-binding peptide
  MOD_RES (32), (34): Xaa is C or S

SEQ ID NO: 79050 - protein, 34 aa, Artificial Sequence; identical to SEQ ID NO: 6184
  GFR-binding peptide
  MOD_RES (14), (15), (16), (17), (18): Xaa is A or G
  MOD_RES (19), (20), (21), (22): Xaa is A or G or is absent

SEQ ID NO: 79051 - protein, 42 aa, Artificial Sequence; identical to SEQ ID NO: 6186
  GFR-binding peptide
  MOD_RES (4), (5), (40), (42): Xaa is C or S
  MOD_RES (19), (20), (21), (22), (23): Xaa is A or G
  MOD_RES (24), (25), (26), (27): Xaa is A or G or is absent

SEQ ID NO: 79052 - protein, 40 aa, Artificial Sequence; identical to SEQ ID NO: 6187
  GFR-binding peptide
  MOD_RES (4), (5), (38), (40): Xaa is C or S
  MOD_RES (19), (20), (21), (22), (23): Xaa is A or G
  MOD_RES (24), (25), (26), (27): Xaa is A or G or is absent

SEQ ID NO: 79053 - protein, 31 aa, Artificial Sequence; identical to SEQ ID NO: 68624
  GFR-binding peptide
  MOD_RES (1), (1): Xaa is C or S

SEQ ID NO: 79054 - protein, 37 aa, Artificial Sequence
  GFR-binding peptide
  MOD_RES (6), (7): Xaa is C or S
GSAGPXXTPTKMSAISMLYLNDKQQIILKNYQGMVVD

SEQ ID NO: 79055 - protein, 33 aa, Artificial Sequence; identical to SEQ ID NO: 6189
  GFR-binding peptide
  MOD_RES (32), (32): Xaa is C or S

SEQ ID NO: 79056 - protein, 38 aa, Artificial Sequence; identical to SEQ ID NO: 6191
  GFR-binding peptide
  MOD_RES (1), (2), (36), (38): Xaa is C or S
  MOD_RES (16), (17), (18), (19), (20): Xaa is A or G
  MOD_RES (21), (22), (23), (24): Xaa is A or G or is absent

SEQ ID NO: 79057 - protein, 44 aa, Artificial Sequence; identical to SEQ ID NO: 57242
  GFR-binding peptide
  MOD_RES (6), (7), (41), (43): Xaa is C or S
  MOD_RES (21), (22), (23), (24), (25): Xaa is A or G
  MOD_RES (26), (27), (28), (29): Xaa is A or G or is absent

SEQ ID NO: 79058 - protein, 38 aa, Artificial Sequence; identical to SEQ ID NO: 57243
  GFR-binding peptide
  MOD_RES (1), (2), (36), (38): Xaa is C or S
  MOD_RES (16), (17), (18), (19), (20): Xaa is A or G
  MOD_RES (21), (22), (23), (24): Xaa is A or G or is absent

SEQ ID NO: 79059 - protein, 38 aa, Artificial Sequence; identical to SEQ ID NO: 29257
  GFR-binding peptide
  MOD_RES (1), (35), (37): Xaa is C or S
  MOD_RES (15), (16), (17), (18), (19): Xaa is A or G
  MOD_RES (20), (21), (22), (23): Xaa is A or G or is absent

SEQ ID NO: 79060 - protein, 39 aa, Artificial Sequence
  GFR-binding peptide
  MOD_RES (2), (3), (37), (39): Xaa is C or S
  MOD_RES (17), (18), (19), (20), (21): Xaa is A or G
  MOD_RES (22), (23), (24), (25): Xaa is A or G or is absent
PXXTPTKMSAISMLYLXXXXXXXXXLKNYQGMVVDRXGX

SEQ ID NO: 79061 - protein, 37 aa, Artificial Sequence; identical to SEQ ID NO: 7974
  GFR-binding peptide
  MOD_RES (2), (3), (34), (36): Xaa is C or S

SEQ ID NO: 79062 - protein, 36 aa, Artificial Sequence; identical to SEQ ID NO: 15267
  GFR-binding peptide
  MOD_RES (34), (36): Xaa is C or S
  MOD_RES (14), (15), (16), (17), (18): Xaa is A or G
  MOD_RES (19), (20), (21), (22): Xaa is A or G or is absent

SEQ ID NO: 79063 - protein, 39 aa, Artificial Sequence; identical to SEQ ID NO: 65217
  GFR-binding peptide
  MOD_RES (6), (7), (39): Xaa is C or S

SEQ ID NO: 79064 - protein, 38 aa, Artificial Sequence; identical to SEQ ID NO: 6195
  GFR-binding peptide
  MOD_RES (4), (5), (36), (38): Xaa is C or S

SEQ ID NO: 79065 - protein, 42 aa, Artificial Sequence; identical to SEQ ID NO: 7977
  GFR-binding peptide
  MOD_RES (5), (6), (39), (41): Xaa is C or S
  MOD_RES (20), (21), (22), (23), (24): Xaa is A or G
  MOD_RES (25), (26), (27), (28): Xaa is A or G or is absent

SEQ ID NO: 79066 - protein, 38 aa, Artificial Sequence; identical to SEQ ID NO: 7979
  GFR-binding peptide
  MOD_RES (5), (6), (38): Xaa is C or S

SEQ ID NO: 79067 - protein, 37 aa, Artificial Sequence
  GFR-binding peptide
  MOD_RES (4), (5): Xaa is C or S
  MOD_RES (19), (20), (21), (22), (23): Xaa is A or G
  MOD_RES (24), (25), (26), (27): Xaa is A or G or is absent
SKAXXVPTKLSAISILYLXXXXXXXXXLKNYQGMAVS

SEQ ID NO: 79068 - protein, 43 aa, Artificial Sequence; identical to SEQ ID NO: 7981
  GFR-binding peptide
  MOD_RES (7), (41), (43): Xaa is C or S
  MOD_RES (21), (22), (23), (24), (25): Xaa is A or G
  MOD_RES (26), (27), (28), (29): Xaa is A or G or is absent

SEQ ID NO: 79069 - protein, 36 aa, Artificial Sequence
  GFR-binding peptide
  MOD_RES (1), (2), (36): Xaa is C or S
  MOD_RES (16), (17), (18), (19), (20): Xaa is A or G
  MOD_RES (21), (22), (23), (24): Xaa is A or G or is absent
XXVPEKMSAISILYLXXXXXXXXXLKNYQNMTVESX

SEQ ID NO: 79070 - protein, 36 aa, Artificial Sequence; identical to SEQ ID NO: 57248
  GFR-binding peptide
  MOD_RES (3), (4): Xaa is C or S
  MOD_RES (18), (19), (20), (21), (22): Xaa is A or G
  MOD_RES (23), (24), (25), (26): Xaa is A or G or is absent

SEQ ID NO: 79071 - protein, 41 aa, Artificial Sequence; identical to SEQ ID NO: 57249
  GFR-binding peptide
  MOD_RES (5), (6), (40): Xaa is C or S
  MOD_RES (20), (21), (22), (23), (24): Xaa is A or G
  MOD_RES (25), (26), (27), (28): Xaa is A or G or is absent

SEQ ID NO: 79072 - protein, 35 aa, Artificial Sequence; identical to SEQ ID NO: 6199
  GFR-binding peptide
  MOD_RES (4), (5): Xaa is C or S

SEQ ID NO: 79073 - protein, 44 aa, Artificial Sequence; identical to SEQ ID NO: 7986
  GFR-binding peptide
  MOD_RES (6), (7), (41), (43): Xaa is C or S
  MOD_RES (21), (22), (23), (24), (25): Xaa is A or G
  MOD_RES (26), (27), (28), (29): Xaa is A or G or is absent

SEQ ID NO: 79074 - protein, 39 aa, Artificial Sequence; identical to SEQ ID NO: 6204
  GFR-binding peptide
  MOD_RES (1), (2), (37), (39): Xaa is C or S
  MOD_RES (16), (17), (18), (19), (20): Xaa is A or G
  MOD_RES (21), (22), (23), (24): Xaa is A or G or is absent

SEQ ID NO: 79075 - protein, 32 aa, Artificial Sequence; identical to SEQ ID NO: 6206
  GFR-binding peptide
  MOD_RES (14), (15), (16), (17), (18): Xaa is A or G
  MOD_RES (19), (20), (21), (22): Xaa is A or G or is absent

SEQ ID NO: 79076 - protein, 31 aa, Artificial Sequence; identical to SEQ ID NO: 57259
  GFR-binding peptide
  MOD_RES (31), (31): Xaa is C or S

SEQ ID NO: 79077 - protein, 39 aa, Artificial Sequence; identical to SEQ ID NO: 6208
  GFR-binding peptide
  MOD_RES (4), (5), (37), (39): Xaa is C or S

SEQ ID NO: 79078 - protein, 35 aa, Artificial Sequence; identical to SEQ ID NO: 6209
  GFR-binding peptide
  MOD_RES (3), (4), (35): Xaa is C or S

SEQ ID NO: 79079 - protein, 33 aa, Artificial Sequence
  GFR-binding peptide
  MOD_RES (33), (33): Xaa is C or S
  MOD_RES (14), (15), (16), (17), (18): Xaa is A or G
  MOD_RES (19), (20), (21), (22): Xaa is A or G or is absent
APVKTSAISMLYLXXXXXXXXXLKNYQMIVEEX

SEQ ID NO: 79080 - protein, 35 aa, Artificial Sequence; identical to SEQ ID NO: 27350
  GFR-binding peptide
  MOD_RES (2), (3): Xaa is C or S
  MOD_RES (17), (18), (19), (20), (21): Xaa is A or G
  MOD_RES (22), (23), (24), (25): Xaa is A or G or is absent

SEQ ID NO: 79081 - protein, 35 aa, Artificial Sequence; identical to SEQ ID NO: 29269
  GFR-binding peptide
  MOD_RES (1), (33), (35): Xaa is C or S

SEQ ID NO: 79082 - protein, 35 aa, Artificial Sequence; identical to SEQ ID NO: 7994
  GFR-binding peptide
  MOD_RES (1), (32), (34): Xaa is C or S

SEQ ID NO: 79083 - protein, 40 aa, Artificial Sequence; identical to SEQ ID NO: 6211
  GFR-binding peptide
  MOD_RES (4), (5), (38), (40): Xaa is C or S
  MOD_RES (19), (20), (21), (22), (23): Xaa is A or G
  MOD_RES (24), (25), (26), (27): Xaa is A or G or is absent

SEQ ID NO: 79084 - protein, 38 aa, Artificial Sequence
  GFR-binding peptide
  MOD_RES (2), (3), (35), (37): Xaa is C or S
PXXVPEKMSAISILYLDENKNVVLKNYQNMTVESXAXR

SEQ ID NO: 79085 - protein, 34 aa, Artificial Sequence; identical to SEQ ID NO: 29271
  GFR-binding peptide
  MOD_RES (1), (2), (34): Xaa is C or S

SEQ ID NO: 79086 - protein, 34 aa, Artificial Sequence; identical to SEQ ID NO: 6213
  GFR-binding peptide
  MOD_RES (33), (33): Xaa is C or S
  MOD_RES (14), (15), (16), (17), (18): Xaa is A or G
  MOD_RES (19), (20), (21), (22): Xaa is A or G or is absent

SEQ ID NO: 79087 - protein, 35 aa, Artificial Sequence; identical to SEQ ID NO: 7996
  GFR-binding peptide
  MOD_RES (1), (34): Xaa is C or S

SEQ ID NO: 79088 - protein, 39 aa, Artificial Sequence
  GFR-binding peptide
  MOD_RES (6), (7): Xaa is C or S
  MOD_RES (21), (22), (23), (24), (25): Xaa is A or G
  MOD_RES (26), (27), (28), (29): Xaa is A or G or is absent
KASKAXXVPTKLSAISILYLXXXXXXXXXLKNYQGMAVS

SEQ ID NO: 79089 - protein, 36 aa, Artificial Sequence; identical to SEQ ID NO: 13601
  GFR-binding peptide
  MOD_RES (1), (35): Xaa is C or S
  MOD_RES (15), (16), (17), (18), (19): Xaa is A or G
  MOD_RES (20), (21), (22), (23): Xaa is A or G or is absent

SEQ ID NO: 79090 - protein, 40 aa, Artificial Sequence
  GFR-binding peptide
  MOD_RES (2), (3), (37), (39): Xaa is C or S
  MOD_RES (17), (18), (19), (20), (21): Xaa is A or G
  MOD_RES (22), (23), (24), (25): Xaa is A or G or is absent
AXXVPTKLSAISILYLXXXXXXXXXLKNYQGMAVSEXGXR

SEQ ID NO: 79091 - protein, 39 aa, Artificial Sequence; identical to SEQ ID NO: 29273
  GFR-binding peptide
  MOD_RES (2), (3), (37), (39): Xaa is C or S
  MOD_RES (17), (18), (19), (20), (21): Xaa is A or G
  MOD_RES (22), (23), (24), (25): Xaa is A or G or is absent

SEQ ID NO: 79092 - protein, 37 aa, Artificial Sequence; identical to SEQ ID NO: 6218
  GFR-binding peptide
  MOD_RES (6), (7): Xaa is C or S

SEQ ID NO: 79093 - protein, 41 aa, Artificial Sequence; identical to SEQ ID NO: 7999
  GFR-binding peptide
  MOD_RES (5), (6), (38), (40): Xaa is C or S

SEQ ID NO: 79094 - protein, 44 aa, Artificial Sequence; identical to SEQ ID NO: 6219
  GFR-binding peptide
  MOD_RES (6), (7), (41), (43): Xaa is C or S
  MOD_RES (21), (22), (23), (24), (25): Xaa is A or G
  MOD_RES (26), (27), (28), (29): Xaa is A or G or is absent

SEQ ID NO: 79095 - protein, 40 aa, Artificial Sequence
  GFR-binding peptide
  MOD_RES (5), (6), (40): Xaa is C or S
  MOD_RES (20), (21), (22), (23), (24): Xaa is A or G
  MOD_RES (25), (26), (27), (28): Xaa is A or G or is absent
ASKAXXVPTKLSAISILYLXXXXXXXXXLKNYQGMAVSEX

SEQ ID NO: 79096 - protein, 32 aa, Artificial Sequence; identical to SEQ ID NO: 29279
  GFR-binding peptide
  MOD_RES (14), (15), (16), (17), (18): Xaa is A or G
  MOD_RES (19), (20), (21), (22): Xaa is A or G or is absent

SEQ ID NO: 79097 - protein, 37 aa, Artificial Sequence; identical to SEQ ID NO: 65247
  GFR-binding peptide
  MOD_RES (5), (6): Xaa is C or S

SEQ ID NO: 79098 - protein, 31 aa, Artificial Sequence; identical to SEQ ID NO: 27359
  GFR-binding peptide
  MOD_RES (1), (1): Xaa is C or S

SEQ ID NO: 79099 - protein, 38 aa, Artificial Sequence; identical to SEQ ID NO: 6224
  GFR-binding peptide
  MOD_RES (7), (7): Xaa is C or S

SEQ ID NO: 79100 - protein, 37 aa, Artificial Sequence
  GFR-binding peptide
  MOD_RES (1), (35), (37): Xaa is C or S
  MOD_RES (15), (16), (17), (18), (19): Xaa is A or G
  MOD_RES (20), (21), (22), (23): Xaa is A or G or is absent
XTPTKMSAISMLYLXXXXXXXXXLKNYQGMVVDRXGX

SEQ ID NO: 79101 - protein, 33 aa, Artificial Sequence; identical to SEQ ID NO: 15294
  GFR-binding peptide
  MOD_RES (1), (33): Xaa is C or S

SEQ ID NO: 79102 - protein, 40 aa, Artificial Sequence; identical to SEQ ID NO: 27360
  GFR-binding peptide
  MOD_RES (5), (6), (40): Xaa is C or S
  MOD_RES (20), (21), (22), (23), (24): Xaa is A or G
  MOD_RES (25), (26), (27), (28): Xaa is A or G or is absent

SEQ ID NO: 79103 - protein, 41 aa, Artificial Sequence
  GFR-binding peptide
  MOD_RES (4), (5), (39), (41): Xaa is C or S
  MOD_RES (19), (20), (21), (22), (23): Xaa is A or G
  MOD_RES (24), (25), (26), (27): Xaa is A or G or is absent
PASXXVPARLSAISILYLXXXXXXXXXLKNYQDMVVEAXGX

SEQ ID NO: 79104 - protein, 40 aa, Artificial Sequence; identical to SEQ ID NO: 6226
  GFR-binding peptide
  MOD_RES (5), (6), (39): Xaa is C or S

SEQ ID NO: 79105 - protein, 41 aa, Artificial Sequence; identical to SEQ ID NO: 57280
  GFR-binding peptide
  MOD_RES (6), (7), (39), (41): Xaa is C or S

SEQ ID NO: 79106 - protein, 37 aa, Artificial Sequence; identical to SEQ ID NO: 6230
  GFR-binding peptide
  MOD_RES (34), (36): Xaa is C or S
  MOD_RES (14), (15), (16), (17), (18): Xaa is A or G
  MOD_RES (19), (20), (21), (22): Xaa is A or G or is absent

SEQ ID NO: 79107 - protein, 36 aa, Artificial Sequence
  GFR-binding peptide
  MOD_RES (2), (3), (35): Xaa is C or S
PXXVPEKMSAISILYLDENKNVVLKNYQNMTVESXA

SEQ ID NO: 79108 - protein, 37 aa, Artificial Sequence; identical to SEQ ID NO: 8005
  GFR-binding peptide
  MOD_RES (4), (4): Xaa is C or S
  MOD_RES (18), (19), (20), (21), (22): Xaa is A or G
  MOD_RES (23), (24), (25), (26): Xaa is A or G or is absent

SEQ ID NO: 79109 - protein, 36 aa, Artificial Sequence; identical to SEQ ID NO: 8007
  GFR-binding peptide
  MOD_RES (3), (4), (35): Xaa is C or S

SEQ ID NO: 79110 - protein, 36 aa, Artificial Sequence; identical to SEQ ID NO: 8008
  GFR-binding peptide
  MOD_RES (1), (2), (35): Xaa is C or S

SEQ ID NO: 79111 - protein, 41 aa, Artificial Sequence; identical to SEQ ID NO: 13612
  GFR-binding peptide
  MOD_RES (6), (7), (39), (41): Xaa is C or S

SEQ ID NO: 79112 - protein, 36 aa, Artificial Sequence; identical to SEQ ID NO: 15303
  GFR-binding peptide
  MOD_RES (1), (2), (34), (36): Xaa is C or S

SEQ ID NO: 79113 - protein, 34 aa, Artificial Sequence; identical to SEQ ID NO: 57288
  GFR-binding peptide
  MOD_RES (2), (3), (34): Xaa is C or S

SEQ ID NO: 79114 - protein, 40 aa, Artificial Sequence; identical to SEQ ID NO: 29289
  GFR-binding peptide
  MOD_RES (2), (3), (37), (39): Xaa is C or S
  MOD_RES (17), (18), (19), (20), (21): Xaa is A or G
  MOD_RES (22), (23), (24), (25): Xaa is A or G or is absent

SEQ ID NO: 79115 - protein, 35 aa, Artificial Sequence; identical to SEQ ID NO: 15305
  GFR-binding peptide
  MOD_RES (2), (3): Xaa is C or S
  MOD_RES (17), (18), (19), (20), (21): Xaa is A or G
  MOD_RES (22), (23), (24), (25): Xaa is A or G or is absent

SEQ ID NO: 79116 - protein, 35 aa, Artificial Sequence; identical to SEQ ID NO: 6238
  GFR-binding peptide
  MOD_RES (1), (32), (34): Xaa is C or S

SEQ ID NO: 79117 - protein, 35 aa, Artificial Sequence; identical to SEQ ID NO: 57292
  GFR-binding peptide
  MOD_RES (1), (2), (34): Xaa is C or S

SEQ ID NO: 79118 - protein, 40 aa, Artificial Sequence; identical to SEQ ID NO: 6239
  GFR-binding peptide
  MOD_RES (4), (5), (38), (40): Xaa is C or S

SEQ ID NO: 79119 - protein, 37 aa, Artificial Sequence; identical to SEQ ID NO: 27379
  GFR-binding peptide
  MOD_RES (4), (5), (37): Xaa is C or S

SEQ ID NO: 79120 - protein, 42 aa, Artificial Sequence; identical to SEQ ID NO: 8013
  GFR-binding peptide
  MOD_RES (5), (6), (40), (42): Xaa is C or S
  MOD_RES (20), (21), (22), (23), (24): Xaa is A or G
  MOD_RES (25), (26), (27), (28): Xaa is A or G or is absent

SEQ ID NO: 79121 - protein, 34 aa, Artificial Sequence; identical to SEQ ID NO: 8014
  GFR-binding peptide
  MOD_RES (2), (3), (34): Xaa is C or S

SEQ ID NO: 79122 - protein, 33 aa, Artificial Sequence
  GFR-binding peptide
  MOD_RES (1), (2): Xaa is C or S
XXTPTKMSAISMLYLNDKQQIILKNYQGMVVDR

SEQ ID NO: 79123 - protein, 39 aa, Artificial Sequence; identical to SEQ ID NO: 6241
  GFR-binding peptide
  MOD_RES (4), (5), (38): Xaa is C or S
  MOD_RES (19), (20), (21), (22), (23): Xaa is A or G
  MOD_RES (24), (25), (26), (27): Xaa is A or G or is absent

SEQ ID NO: 79124 - protein, 37 aa, Artificial Sequence; identical to SEQ ID NO: 6242
  GFR-binding peptide
  MOD_RES (2), (3), (35), (37): Xaa is C or S

SEQ ID NO: 79125 - protein, 42 aa, Artificial Sequence; identical to SEQ ID NO: 8016
  GFR-binding peptide
  MOD_RES (5), (6), (39), (41): Xaa is C or S

SEQ ID NO: 79126 - protein, 39 aa, Artificial Sequence; identical to SEQ ID NO: 6243
  GFR-binding peptide
  MOD_RES (3), (4), (38): Xaa is C or S
  MOD_RES (18), (19), (20), (21), (22): Xaa is A or G
  MOD_RES (23), (24), (25), (26): Xaa is A or G or is absent

SEQ ID NO: 79127 - protein, 39 aa, Artificial Sequence; identical to SEQ ID NO: 8017
  GFR-binding peptide
  MOD_RES (3), (4), (38): Xaa is C or S
  MOD_RES (18), (19), (20), (21), (22): Xaa is A or G
  MOD_RES (23), (24), (25), (26): Xaa is A or G or is absent

SEQ ID NO: 79128 - protein, 34 aa, Artificial Sequence; identical to SEQ ID NO: 8019
  GFR-binding peptide
  MOD_RES (34), (34): Xaa is C or S
  MOD_RES (14), (15), (16), (17), (18): Xaa is A or G
  MOD_RES (19), (20), (21), (22): Xaa is A or G or is absent

SEQ ID NO: 79129 - protein, 39 aa, Artificial Sequence; identical to SEQ ID NO: 8020
  GFR-binding peptide
  MOD_RES (7), (39): Xaa is C or S

SEQ ID NO: 79130 - protein, 31 aa, Artificial Sequence; identical to SEQ ID NO: 15316
  GFR-binding peptide
  MOD_RES (1), (1): Xaa is C or S

SEQ ID NO: 79131 - protein, 40 aa, Artificial Sequence; identical to SEQ ID NO: 8022
  GFR-binding peptide
  MOD_RES (7), (7): Xaa is C or S
  MOD_RES (21), (22), (23), (24), (25): Xaa is A or G
  MOD_RES (26), (27), (28), (29): Xaa is A or G or is absent

SEQ ID NO: 79132 - protein, 37 aa, Artificial Sequence; identical to SEQ ID NO: 6245
  GFR-binding peptide
  MOD_RES (4), (5), (37): Xaa is C or S

SEQ ID NO: 79133 - protein, 32 aa, Artificial Sequence; identical to SEQ ID NO: 57305
  GFR-binding peptide
  MOD_RES (1), (1): Xaa is C or S

SEQ ID NO: 79134 - protein, 34 aa, Artificial Sequence
  GFR-binding peptide
  MOD_RES (1), (34): Xaa is C or S
  MOD_RES (15), (16), (17), (18), (19): Xaa is A or G
  MOD_RES (20), (21), (22), (23): Xaa is A or G or is absent
XAPVKTSAISMLYLXXXXXXXXXLKNYQMIVEEX

SEQ ID NO: 79135 - protein, 36 aa, Artificial Sequence
  GFR-binding peptide
  MOD_RES (3), (4), (36): Xaa is C or S
EPXXVPEKMSAISILYLDENKNVVLKNYQNMTVESX

SEQ ID NO: 79136 - protein, 41 aa, Artificial Sequence; identical to SEQ ID NO: 6248
  GFR-binding peptide
  MOD_RES (5), (39), (41): Xaa is C or S
  MOD_RES (19), (20), (21), (22), (23): Xaa is A or G
  MOD_RES (24), (25), (26), (27): Xaa is A or G or is absent

SEQ ID NO: 79137 - protein, 35 aa, Artificial Sequence
  GFR-binding peptide
  MOD_RES (3), (4): Xaa is C or S
EPXXVPEKMSAISILYLDENKNVVLKNYQNMTVES

SEQ ID NO: 79138 - protein, 34 aa, Artificial Sequence; identical to SEQ ID NO: 6249
  GFR-binding peptide
  MOD_RES (3), (4): Xaa is C or S

SEQ ID NO: 79139 - protein, 38 aa, Artificial Sequence; identical to SEQ ID NO: 29297
  GFR-binding peptide
  MOD_RES (6), (7): Xaa is C or S

SEQ ID NO: 79140 - protein, 41 aa, Artificial Sequence
  GFR-binding peptide
  MOD_RES (5), (6), (40): Xaa is C or S
  MOD_RES (20), (21), (22), (23), (24): Xaa is A or G
  MOD_RES (25), (26), (27), (28): Xaa is A or G or is absent
APASXXVPARLSAISILYLXXXXXXXXXLKNYQDMVVEAXG

SEQ ID NO: 79141 - protein, 39 aa, Artificial Sequence; identical to SEQ ID NO: 8025
  GFR-binding peptide
  MOD_RES (6), (7), (38): Xaa is C or S

SEQ ID NO: 79142 - protein, 38 aa, Artificial Sequence; identical to SEQ ID NO: 6254
  GFR-binding peptide
  MOD_RES (4), (5): Xaa is C or S
  MOD_RES (19), (20), (21), (22), (23): Xaa is A or G
  MOD_RES (24), (25), (26), (27): Xaa is A or G or is absent

SEQ ID NO: 79143 - protein, 34 aa, Artificial Sequence
  GFR-binding peptide
  MOD_RES (2), (3), (34): Xaa is C or S
TXXAPVKTSAISMLYLDNGRVLLLKNYQMIVEEX

SEQ ID NO: 79144 - protein, 34 aa, Artificial Sequence
  GFR-binding peptide
  MOD_RES (2), (3): Xaa is C or S
SXXVPARLSAISILYLDAANNVVLKNYQDMVVEA

SEQ ID NO: 79145 - protein, 42 aa, Artificial Sequence; identical to SEQ ID NO: 6256
  GFR-binding peptide
  MOD_RES (5), (6), (40), (42): Xaa is C or S
  MOD_RES (20), (21), (22), (23), (24): Xaa is A or G
  MOD_RES (25), (26), (27), (28): Xaa is A or G or is absent

SEQ ID NO: 79146 - protein, 37 aa, Artificial Sequence; identical to SEQ ID NO: 8028
  GFR-binding peptide
  MOD_RES (1), (35), (37): Xaa is C or S
  MOD_RES (15), (16), (17), (18), (19): Xaa is A or G
  MOD_RES (20), (21), (22), (23): Xaa is A or G or is absent

SEQ ID NO: 79147 - protein, 34 aa, Artificial Sequence; identical to SEQ ID NO: 6259
  GFR-binding peptide
  MOD_RES (1), (34): Xaa is C or S
  MOD_RES (15), (16), (17), (18), (19): Xaa is A or G
  MOD_RES (20), (21), (22), (23): Xaa is A or G or is absent

SEQ ID NO: 79148 - protein, 38 aa, Artificial Sequence
  GFR-binding peptide
  MOD_RES (5), (6): Xaa is C or S
  MOD_RES (20), (21), (22), (23), (24): Xaa is A or G
  MOD_RES (25), (26), (27), (28): Xaa is A or G or is absent
VPSTXXAPVKTSAISMLYLXXXXXXXXXLKNYQMIVEE

SEQ ID NO: 79149 - protein, 43 aa, Artificial Sequence; identical to SEQ ID NO: 6260
  GFR-binding peptide
  MOD_RES (5), (6), (40), (42): Xaa is C or S
  MOD_RES (20), (21), (22), (23), (24): Xaa is A or G
  MOD_RES (25), (26), (27), (28): Xaa is A or G or is absent

SEQ ID NO: 79150 - protein, 33 aa, Artificial Sequence; identical to SEQ ID NO: 6261
  GFR-binding peptide
  MOD_RES (1), (1): Xaa is C or S
  MOD_RES (15), (16), (17), (18), (19): Xaa is A or G
  MOD_RES (20), (21), (22), (23): Xaa is A or G or is absent

SEQ ID NO: 79151 - protein, 38 aa, Artificial Sequence; identical to SEQ ID NO: 6262
  GFR-binding peptide
  MOD_RES (4), (5), (38): Xaa is C or S
  MOD_RES (19), (20), (21), (22), (23): Xaa is A or G
  MOD_RES (24), (25), (26), (27): Xaa is A or G or is absent

SEQ ID NO: 79152 - protein, 42 aa, Artificial Sequence; identical to SEQ ID NO: 57318
  GFR-binding peptide
  MOD_RES (6), (7), (41): Xaa is C or S
  MOD_RES (21), (22), (23), (24), (25): Xaa is A or G
  MOD_RES (26), (27), (28), (29): Xaa is A or G or is absent

SEQ ID NO: 79153 - protein, 38 aa, Artificial Sequence
  GFR-binding peptide
  MOD_RES (1), (35), (37): Xaa is C or S
  MOD_RES (15), (16), (17), (18), (19): Xaa is A or G
  MOD_RES (20), (21), (22), (23): Xaa is A or G or is absent
XVPEKMSAISILYLXXXXXXXXXLKNYQNMTVESXAXR

SEQ ID NO: 79154 - protein, 37 aa, Artificial Sequence; identical to SEQ ID NO: 6263
  GFR-binding peptide
  MOD_RES (1), (35), (37): Xaa is C or S
  MOD_RES (15), (16), (17), (18), (19): Xaa is A or G
  MOD_RES (20), (21), (22), (23): Xaa is A or G or is absent

SEQ ID NO: 79155 - protein, 40 aa, Artificial Sequence; identical to SEQ ID NO: 8033
  GFR-binding peptide
  MOD_RES (4), (5), (37), (39): Xaa is C or S

SEQ ID NO: 79156 - protein, 35 aa, Artificial Sequence
  GFR-binding peptide
  MOD_RES (34), (34): Xaa is C or S
  MOD_RES (14), (15), (16), (17), (18): Xaa is A or G
  MOD_RES (19), (20), (21), (22): Xaa is A or G or is absent
VPARLSAISILYLXXXXXXXXXLKNYQDMVVEAXG

SEQ ID NO: 79157 - protein, 34 aa, Artificial Sequence; identical to SEQ ID NO: 57320
  GFR-binding peptide
  MOD_RES (31), (33): Xaa is C or S

SEQ ID NO: 79158 - protein, 34 aa, Artificial Sequence; identical to SEQ ID NO: 6265
  GFR-binding peptide
  MOD_RES (1), (2), (34): Xaa is C or S

SEQ ID NO: 79159 - protein, 39 aa, Artificial Sequence; identical to SEQ ID NO: 6266
  GFR-binding peptide
  MOD_RES (6), (7): Xaa is C or S
  MOD_RES (21), (22), (23), (24), (25): Xaa is A or G
  MOD_RES (26), (27), (28), (29): Xaa is A or G or is absent

SEQ ID NO: 79160 - protein, 38 aa, Artificial Sequence; identical to SEQ ID NO: 8036
  GFR-binding peptide
  MOD_RES (5), (6): Xaa is C or S
  MOD_RES (20), (21), (22), (23), (24): Xaa is A or G
  MOD_RES (25), (26), (27), (28): Xaa is A or G or is absent

SEQ ID NO: 79161 - protein, 33 aa, Artificial Sequence; identical to SEQ ID NO: 8037
  GFR-binding peptide
  MOD_RES (1), (32): Xaa is C or S

SEQ ID NO: 79162 - protein, 39 aa, Artificial Sequence; identical to SEQ ID NO: 57326
  GFR-binding peptide
  MOD_RES (3), (4), (38): Xaa is C or S
  MOD_RES (18), (19), (20), (21), (22): Xaa is A or G
  MOD_RES (23), (24), (25), (26): Xaa is A or G or is absent

SEQ ID NO: 79163 - protein, 36 aa, Artificial Sequence; identical to SEQ ID NO: 66956
  GFR-binding peptide
  MOD_RES (5), (6): Xaa is C or S

SEQ ID NO: 79164 - protein, 41 aa, Artificial Sequence; identical to SEQ ID NO: 6267
  GFR-binding peptide
  MOD_RES (4), (5), (38), (40): Xaa is C or S
  MOD_RES (19), (20), (21), (22), (23): Xaa is A or G
  MOD_RES (24), (25), (26), (27): Xaa is A or G or is absent

SEQ ID NO: 79165 - protein, 35 aa, Artificial Sequence; identical to SEQ ID NO: 6270
  GFR-binding peptide
  MOD_RES (1), (2): Xaa is C or S
  MOD_RES (16), (17), (18), (19), (20): Xaa is A or G
  MOD_RES (21), (22), (23), (24): Xaa is A or G or is absent

SEQ ID NO: 79166 - protein, 39 aa, Artificial Sequence; identical to SEQ ID NO: 8038
  GFR-binding peptide
  MOD_RES (1), (2), (36), (38): Xaa is C or S
  MOD_RES (16), (17), (18), (19), (20): Xaa is A or G
  MOD_RES (21), (22), (23), (24): Xaa is A or G or is absent

SEQ ID NO: 79167 - protein, 33 aa, Artificial Sequence; identical to SEQ ID NO: 8039
  GFR-binding peptide
  MOD_RES (1), (32): Xaa is C or S

SEQ ID NO: 79168 - protein, 37 aa, Artificial Sequence; identical to SEQ ID NO: 8040
  GFR-binding peptide
  MOD_RES (1), (2), (36): Xaa is C or S
  MOD_RES (16), (17), (18), (19), (20): Xaa is A or G
  MOD_RES (21), (22), (23), (24): Xaa is A or G or is absent

SEQ ID NO: 79169 - protein, 38 aa, Artificial Sequence
  GFR-binding peptide
  MOD_RES (5), (6), (38): Xaa is C or S
APASXXVPARLSAISILYLDAANNVVLKNYQDMVVEAX

SEQ ID NO: 79170 - protein, 41 aa, Artificial Sequence; identical to SEQ ID NO: 65296
  GFR-binding peptide
  MOD_RES (3), (4), (38), (40): Xaa is C or S
  MOD_RES (18), (19), (20), (21), (22): Xaa is A or G
  MOD_RES (23), (24), (25), (26): Xaa is A or G or is absent

SEQ ID NO: 79171 - protein, 38 aa, Artificial Sequence; identical to SEQ ID NO: 8044
  GFR-binding peptide
  MOD_RES (3), (4), (38): Xaa is C or S
  MOD_RES (18), (19), (20), (21), (22): Xaa is A or G
  MOD_RES (23), (24), (25), (26): Xaa is A or G or is absent

SEQ ID NO: 79172 - protein, 40 aa, Artificial Sequence; identical to SEQ ID NO: 8045
  GFR-binding peptide
  MOD_RES (4), (5), (37), (39): Xaa is C or S

SEQ ID NO: 79173 - protein, 36 aa, Artificial Sequence; identical to SEQ ID NO: 8046
  GFR-binding peptide
  MOD_RES (1), (2), (33), (35): Xaa is C or S

SEQ ID NO: 79174 - protein, 42 aa, Artificial Sequence; identical to SEQ ID NO: 6280
  GFR-binding peptide
  MOD_RES (4), (5), (39), (41): Xaa is C or S
  MOD_RES (19), (20), (21), (22), (23): Xaa is A or G
  MOD_RES (24), (25), (26), (27): Xaa is A or G or is absent

SEQ ID NO: 79175 - protein, 39 aa, Artificial Sequence; identical to SEQ ID NO: 6282
  GFR-binding peptide
  MOD_RES (3), (4), (38): Xaa is C or S
  MOD_RES (18), (19), (20), (21), (22): Xaa is A or G
  MOD_RES (23), (24), (25), (26): Xaa is A or G or is absent

SEQ ID NO: 79176 - protein, 32 aa, Artificial Sequence; identical to SEQ ID NO: 8048
  GFR-binding peptide
  MOD_RES (1), (2): Xaa is C or S

SEQ ID NO: 79177 - protein, 38 aa, Artificial Sequence; identical to SEQ ID NO: 6283
  GFR-binding peptide
  MOD_RES (1), (2), (36), (38): Xaa is C or S
  MOD_RES (16), (17), (18), (19), (20): Xaa is A or G
  MOD_RES (21), (22), (23), (24): Xaa is A or G or is absent

SEQ ID NO: 79178 - protein, 33 aa, Artificial Sequence; identical to SEQ ID NO: 8050
  GFR-binding peptide
  MOD_RES (1), (1): Xaa is C or S
  MOD_RES (15), (16), (17), (18), (19): Xaa is A or G
  MOD_RES (20), (21), (22), (23): Xaa is A or G or is absent

SEQ ID NO: 79179 - protein, 32 aa, Artificial Sequence; identical to SEQ ID NO: 8053
  GFR-binding peptide
  MOD_RES (32), (32): Xaa is C or S

SEQ ID NO: 79180 - protein, 40 aa, Artificial Sequence; identical to SEQ ID NO: 65301
  GFR-binding peptide
  MOD_RES (2), (3), (37), (39): Xaa is C or S
  MOD_RES (17), (18), (19), (20), (21): Xaa is A or G
  MOD_RES (22), (23), (24), (25): Xaa is A or G or is absent

SEQ ID NO: 79181 - protein, 40 aa, Artificial Sequence; identical to SEQ ID NO: 57338
  GFR-binding peptide
  MOD_RES (5), (6), (38), (40): Xaa is C or S

SEQ ID NO: 79182 - protein, 34 aa, Artificial Sequence; identical to SEQ ID NO: 6287
  GFR-binding peptide
  MOD_RES (1), (2): Xaa is C or S
  MOD_RES (16), (17), (18), (19), (20): Xaa is A or G
  MOD_RES (21), (22), (23), (24): Xaa is A or G or is absent

SEQ ID NO: 79183 - protein, 44 aa, Artificial Sequence; identical to SEQ ID NO: 6288
  GFR-binding peptide
  MOD_RES (6), (7), (42), (44): Xaa is C or S
  MOD_RES (21), (22), (23), (24), (25): Xaa is A or G
  MOD_RES (26), (27), (28), (29): Xaa is A or G or is absent

SEQ ID NO: 79184 - protein, 35 aa, Artificial Sequence; identical to SEQ ID NO: 6290
  GFR-binding peptide
  MOD_RES (3), (4), (35): Xaa is C or S

SEQ ID NO: 79185 - protein, 41 aa, Artificial Sequence; identical to SEQ ID NO: 6294
  GFR-binding peptide
  MOD_RES (5), (6), (40): Xaa is C or S
  MOD_RES (20), (21), (22), (23), (24): Xaa is A or G
  MOD_RES (25), (26), (27), (28): Xaa is A or G or is absent

SEQ ID NO: 79186 - protein, 36 aa, Artificial Sequence; identical to SEQ ID NO: 8059
  GFR-binding peptide
  MOD_RES (1), (35): Xaa is C or S
  MOD_RES (15), (16), (17), (18), (19): Xaa is A or G
  MOD_RES (20), (21), (22), (23): Xaa is A or G or is absent

SEQ ID NO: 79187 - protein, 36 aa, Artificial Sequence; identical to SEQ ID NO: 6298
  GFR-binding peptide
  MOD_RES (2), (3), (36): Xaa is C or S
  MOD_RES (17), (18), (19), (20), (21): Xaa is A or G
  MOD_RES (22), (23), (24), (25): Xaa is A or G or is absent

SEQ ID NO: 79188 - protein, 38 aa, Artificial Sequence; identical to SEQ ID NO: 8061
  GFR-binding peptide
  MOD_RES (5), (6): Xaa is C or S
  MOD_RES (20), (21), (22), (23), (24): Xaa is A or G
  MOD_RES (25), (26), (27), (28): Xaa is A or G or is absent

SEQ ID NO: 79189 - protein, 38 aa, Artificial Sequence; identical to SEQ ID NO: 8063
  GFR-binding peptide
  MOD_RES (4), (5), (37): Xaa is C or S

SEQ ID NO: 79190 - protein, 39 aa, Artificial Sequence; identical to SEQ ID NO: 68711
  GFR-binding peptide
  MOD_RES (3), (4), (38): Xaa is C or S
  MOD_RES (18), (19), (20), (21), (22): Xaa is A or G
  MOD_RES (23), (24), (25), (26): Xaa is A or G or is absent

SEQ ID NO: 79191 - protein, 38 aa, Artificial Sequence; identical to SEQ ID NO: 13680
  GFR-binding peptide
  MOD_RES (5), (6), (38): Xaa is C or S

SEQ ID NO: 79192 - protein, 42 aa, Artificial Sequence
  GFR-binding peptide
  MOD_RES (6), (7), (41): Xaa is C or S
  MOD_RES (21), (22), (23), (24), (25): Xaa is A or G
  MOD_RES (26), (27), (28), (29): Xaa is A or G or is absent
AAPASXXVPARLSAISILYLXXXXXXXXXLKNYQDMVVEAXG

SEQ ID NO: 79193 - protein, 34 aa, Artificial Sequence
  GFR-binding peptide
  MOD_RES (1), (2), (34): Xaa is C or S
XXVPTKLSAISILYLDKGVVTYLKNYQGMAVSEX

SEQ ID NO: 79194 - protein, 40 aa, Artificial Sequence
  GFR-binding peptide
  MOD_RES (6), (7): Xaa is C or S
  MOD_RES (21), (22), (23), (24), (25): Xaa is A or G
  MOD_RES (26), (27), (28), (29): Xaa is A or G or is absent
AAPASXXVPARLSAISILYLXXXXXXXXXLKNYQDMVVEA

SEQ ID NO: 79195 - protein, 36 aa, Artificial Sequence
  GFR-binding peptide
  MOD_RES (1), (2), (35): Xaa is C or S
  MOD_RES (16), (17), (18), (19), (20): Xaa is A or G
  MOD_RES (21), (22), (23), (24): Xaa is A or G or is absent
XXAPVKTSAISMLYLXXXXXXXXXLKNYQMIVEEXG

SEQ ID NO: 79196 - protein, 38 aa, Artificial Sequence; identical to SEQ ID NO: 6302
  GFR-binding peptide
  MOD_RES (2), (3), (35), (37): Xaa is C or S

SEQ ID NO: 79197 - protein, 35 aa, Artificial Sequence; identical to SEQ ID NO: 8069
  GFR-binding peptide
  MOD_RES (1), (2): Xaa is C or S
  MOD_RES (16), (17), (18), (19), (20): Xaa is A or G
  MOD_RES (21), (22), (23), (24): Xaa is A or G or is absent

SEQ ID NO: 79198 - protein, 36 aa, Artificial Sequence; identical to SEQ ID NO: 8070
  GFR-binding peptide
  MOD_RES (1), (35): Xaa is C or S
  MOD_RES (15), (16), (17), (18), (19): Xaa is A or G
  MOD_RES (20), (21), (22), (23): Xaa is A or G or is absent

SEQ ID NO: 79199 - protein, 35 aa, Artificial Sequence
  GFR-binding peptide
  MOD_RES (2), (3), (35): Xaa is C or S
PXXTPTKMSAISMLYLNDKQQIILKNYQGMVVDRX

SEQ ID NO: 79200 - protein, 33 aa, Artificial Sequence; identical to SEQ ID NO: 8073
  GFR-binding peptide
  MOD_RES (33), (33): Xaa is C or S
  MOD_RES (14), (15), (16), (17), (18): Xaa is A or G
  MOD_RES (19), (20), (21), (22): Xaa is A or G or is absent

SEQ ID NO: 79201 - protein, 34 aa, Artificial Sequence; identical to SEQ ID NO: 6303
  GFR-binding peptide
  MOD_RES (1), (2): Xaa is C or S
  MOD_RES (16), (17), (18), (19), (20): Xaa is A or G
  MOD_RES (21), (22), (23), (24): Xaa is A or G or is absent

SEQ ID NO: 79202 - protein, 39 aa, Artificial Sequence
  GFR-binding peptide
  MOD_RES (5), (6), (38): Xaa is C or S
ASKAXXVPTKLSAISILYLDKGVVTYLKNYQGMAVSEXG

SEQ ID NO: 79203 - protein, 35 aa, Artificial Sequence; identical to SEQ ID NO: 8075
  GFR-binding peptide
  MOD_RES (34), (34): Xaa is C or S
  MOD_RES (14), (15), (16), (17), (18): Xaa is A or G
  MOD_RES (19), (20), (21), (22): Xaa is A or G or is absent

SEQ ID NO: 79204 - protein, 39 aa, Artificial Sequence; identical to SEQ ID NO: 6306
  GFR-binding peptide
  MOD_RES (1), (2), (36), (38): Xaa is C or S
  MOD_RES (16), (17), (18), (19), (20): Xaa is A or G
  MOD_RES (21), (22), (23), (24): Xaa is A or G or is absent

SEQ ID NO: 79205 - protein, 34 aa, Artificial Sequence; identical to SEQ ID NO: 8076
  GFR-binding peptide
  MOD_RES (1), (34): Xaa is C or S
  MOD_RES (15), (16), (17), (18), (19): Xaa is A or G
  MOD_RES (20), (21), (22), (23): Xaa is A or G or is absent

SEQ ID NO: 79206 - protein, 38 aa, Artificial Sequence; identical to SEQ ID NO: 6307
  GFR-binding peptide
  MOD_RES (5), (6): Xaa is C or S
  MOD_RES (20), (21), (22), (23), (24): Xaa is A or G
  MOD_RES (25), (26), (27), (28): Xaa is A or G or is absent

SEQ ID NO: 79207 - protein, 34 aa, Artificial Sequence; identical to SEQ ID NO: 6308
  GFR-binding peptide
  MOD_RES (1), (2): Xaa is C or S
  MOD_RES (16), (17), (18), (19), (20): Xaa is A or G
  MOD_RES (21), (22), (23), (24): Xaa is A or G or is absent

SEQ ID NO: 79208 - protein, 38 aa, Artificial Sequence; identical to SEQ ID NO: 57363
  GFR-binding peptide
  MOD_RES (2), (3), (37): Xaa is C or S
  MOD_RES (17), (18), (19), (20), (21): Xaa is A or G
  MOD_RES (22), (23), (24), (25): Xaa is A or G or is absent

SEQ ID NO: 79209 - protein, 32 aa, Artificial Sequence; identical to SEQ ID NO: 6309
  GFR-binding peptide
  MOD_RES (2), (2): Xaa is C or S

SEQ ID NO: 79210 - protein, 37 aa, Artificial Sequence
  GFR-binding peptide
  MOD_RES (3), (4), (37): Xaa is C or S
  MOD_RES (18), (19), (20), (21), (22): Xaa is A or G
  MOD_RES (23), (24), (25), (26): Xaa is A or G or is absent
STXXAPVKTSAISMLYLXXXXXXXXXLKNYQMIVEEX

SEQ ID NO: 79211 - protein, 37 aa, Artificial Sequence
  GFR-binding peptide
  MOD_RES (1), (2), (36): Xaa is C or S
  MOD_RES (16), (17), (18), (19), (20): Xaa is A or G
  MOD_RES (21), (22), (23), (24): Xaa is A or G or is absent
XXTPTKMSAISMLYLXXXXXXXXXLKNYQGMVVDRXG

SEQ ID NO: 79212 - protein, 32 aa, Artificial Sequence; identical to SEQ ID NO: 8084
  GFR-binding peptide
  MOD_RES (14), (15), (16), (17), (18): Xaa is A or G
  MOD_RES (19), (20), (21), (22): Xaa is A or G or is absent

SEQ ID NO: 79213 - protein, 33 aa, Artificial Sequence
  GFR-binding peptide
  MOD_RES (1), (32): Xaa is C or S
XAPVKTSAISMLYLDNGRVLLLKNYQMIVEEXG

SEQ ID NO: 79214 - protein, 40 aa, Artificial Sequence; identical to SEQ ID NO: 13695
  GFR-binding peptide
  MOD_RES (6), (7), (39): Xaa is C or S

SEQ ID NO: 79215 - protein, 35 aa, Artificial Sequence; identical to SEQ ID NO: 70400
  GFR-binding peptide
  MOD_RES (1), (2), (34): Xaa is C or S

SEQ ID NO: 79216 - protein, 35 aa, Artificial Sequence
  GFR-binding peptide
  MOD_RES (3), (4): Xaa is C or S
GPXXTPTKMSAISMLYLNDKQQIILKNYQGMVVDR

SEQ ID NO: 79217 - protein, 38 aa, Artificial Sequence
  GFR-binding peptide
  MOD_RES (1), (2), (36), (38): Xaa is C or S
  MOD_RES (16), (17), (18), (19), (20): Xaa is A or G
  MOD_RES (21), (22), (23), (24): Xaa is A or G or is absent
XXVPTKLSAISILYLXXXXXXXXXLKNYQGMAVSEXGX

SEQ ID NO: 79218 - protein, 37 aa, Artificial Sequence; identical to SEQ ID NO: 27454
  GFR-binding peptide
  MOD_RES (3), (4), (36): Xaa is C or S

SEQ ID NO: 79219 - protein, 37 aa, Artificial Sequence
  GFR-binding peptide
  MOD_RES (1), (2), (36): Xaa is C or S
  MOD_RES (16), (17), (18), (19), (20): Xaa is A or G
  MOD_RES (21), (22), (23), (24): Xaa is A or G or is absent
XXVPARLSAISILYLXXXXXXXXXLKNYQDMVVEAXG

SEQ ID NO: 79220 - protein, 36 aa, Artificial Sequence; identical to SEQ ID NO: 6317
  GFR-binding peptide
  MOD_RES (4), (5), (36): Xaa is C or S

SEQ ID NO: 79221 - protein, 36 aa, Artificial Sequence
  GFR-binding peptide
  MOD_RES (3), (4): Xaa is C or S
  MOD_RES (18), (19), (20), (21), (22): Xaa is A or G
  MOD_RES (23), (24), (25), (26): Xaa is A or G or is absent
KAXXVPTKLSAISILYLXXXXXXXXXLKNYQGMAVS

SEQ ID NO: 79222 - protein, 39 aa, Artificial Sequence; identical to SEQ ID NO: 8087
  GFR-binding peptide
  MOD_RES (2), (3), (37), (39): Xaa is C or S
  MOD_RES (17), (18), (19), (20), (21): Xaa is A or G
  MOD_RES (22), (23), (24), (25): Xaa is A or G or is absent

SEQ ID NO: 79223 - protein, 38 aa, Artificial Sequence; identical to SEQ ID NO: 27459
  GFR-binding peptide
  MOD_RES (4), (5), (37): Xaa is C or S

SEQ ID NO: 79224 - protein, 33 aa, Artificial Sequence; identical to SEQ ID NO: 8088
  GFR-binding peptide
  MOD_RES (1), (1): Xaa is C or S
  MOD_RES (15), (16), (17), (18), (19): Xaa is A or G
  MOD_RES (20), (21), (22), (23): Xaa is A or G or is absent

SEQ ID NO: 79225 - protein, 34 aa, Artificial Sequence; identical to SEQ ID NO: 8089
  GFR-binding peptide
  MOD_RES (2), (3), (34): Xaa is C or S

SEQ ID NO: 79226 - protein, 37 aa, Artificial Sequence; identical to SEQ ID NO: 6322
  GFR-binding peptide
  MOD_RES (2), (3), (37): Xaa is C or S
  MOD_RES (17), (18), (19), (20), (21): Xaa is A or G
  MOD_RES (22), (23), (24), (25): Xaa is A or G or is absent

SEQ ID NO: 79227 - protein, 37 aa, Artificial Sequence; identical to SEQ ID NO: 57371
  GFR-binding peptide
  MOD_RES (3), (4), (37): Xaa is C or S
  MOD_RES (18), (19), (20), (21), (22): Xaa is A or G
  MOD_RES (23), (24), (25), (26): Xaa is A or G or is absent

SEQ ID NO: 79228 - protein, 35 aa, Artificial Sequence; identical to SEQ ID NO: 6323
  GFR-binding peptide
  MOD_RES (1), (34): Xaa is C or S
  MOD_RES (15), (16), (17), (18), (19): Xaa is A or G
  MOD_RES (20), (21), (22), (23): Xaa is A or G or is absent

SEQ ID NO: 79229 - protein, 33 aa, Artificial Sequence; identical to SEQ ID NO: 8092
  GFR-binding peptide
  MOD_RES (33), (33): Xaa is C or S

SEQ ID NO: 79230 - protein, 35 aa, Artificial Sequence; identical to SEQ ID NO: 6325
  GFR-binding peptide
  MOD_RES (34), (34): Xaa is C or S
  MOD_RES (14), (15), (16), (17), (18): Xaa is A or G
  MOD_RES (19), (20), (21), (22): Xaa is A or G or is absent

SEQ ID NO: 79231 - protein, 33 aa, Artificial Sequence; identical to SEQ ID NO: 68734
  GFR-binding peptide
  MOD_RES (14), (15), (16), (17), (18): Xaa is A or G
  MOD_RES (19), (20), (21), (22): Xaa is A or G or is absent

SEQ ID NO: 79232 - protein, 37 aa, Artificial Sequence; identical to SEQ ID NO: 8094
  GFR-binding peptide
  MOD_RES (34), (36): Xaa is C or S
  MOD_RES (14), (15), (16), (17), (18): Xaa is A or G
  MOD_RES (19), (20), (21), (22): Xaa is A or G or is absent

SEQ ID NO: 79233 - protein, 38 aa, Artificial Sequence; identical to SEQ ID NO: 57374
  GFR-binding peptide
  MOD_RES (4), (5), (37): Xaa is C or S

SEQ ID NO: 79234 - protein, 39 aa, Artificial Sequence
  GFR-binding peptide
  MOD_RES (5), (6), (38): Xaa is C or S
SAGPXXTPTKMSAISMLYLNDKQQIILKNYQGMVVDRXG

SEQ ID NO: 79235 - protein, 36 aa, Artificial Sequence; identical to SEQ ID NO: 8095
  GFR-binding peptide
  MOD_RES (1), (35): Xaa is C or S
  MOD_RES (15), (16), (17), (18), (19): Xaa is A or G
  MOD_RES (20), (21), (22), (23): Xaa is A or G or is absent

SEQ ID NO: 79236 - protein, 42 aa, Artificial Sequence; identical to SEQ ID NO: 8096
  GFR-binding peptide
  MOD_RES (4), (5), (39), (41): Xaa is C or S
  MOD_RES (19), (20), (21), (22), (23): Xaa is A or G
  MOD_RES (24), (25), (26), (27): Xaa is A or G or is absent

SEQ ID NO: 79237 - protein, 42 aa, Artificial Sequence; identical to SEQ ID NO: 8097
  GFR-binding peptide
  MOD_RES (6), (7), (41): Xaa is C or S
  MOD_RES (21), (22), (23), (24), (25): Xaa is A or G
  MOD_RES (26), (27), (28), (29): Xaa is A or G or is absent

SEQ ID NO: 79238 - protein, 36 aa, Artificial Sequence; identical to SEQ ID NO: 57379
  GFR-binding peptide
  MOD_RES (5), (6): Xaa is C or S

SEQ ID NO: 79239 - protein, 36 aa, Artificial Sequence; identical to SEQ ID NO: 29383
  GFR-binding peptide
  MOD_RES (2), (3), (35): Xaa is C or S

SEQ ID NO: 79240 - protein, 41 aa, Artificial Sequence; identical to SEQ ID NO: 57381
  GFR-binding peptide
  MOD_RES (5), (6), (39), (41): Xaa is C or S
  MOD_RES (20), (21), (22), (23), (24): Xaa is A or G
  MOD_RES (25), (26), (27), (28): Xaa is A or G or is absent

SEQ ID NO: 79241 - protein, 33 aa, Artificial Sequence; identical to SEQ ID NO: 27471
  GFR-binding peptide
  MOD_RES (2), (3): Xaa is C or S

SEQ ID NO: 79242 - protein, 38 aa, Artificial Sequence; identical to SEQ ID NO: 29387
  GFR-binding peptide
  MOD_RES (3), (4), (36), (38): Xaa is C or S

SEQ ID NO: 79243 - protein, 40 aa, Artificial Sequence; identical to SEQ ID NO: 65352
  GFR-binding peptide
  MOD_RES (6), (7), (39): Xaa is C or S

SEQ ID NO: 79244 - protein, 39 aa, Artificial Sequence; identical to SEQ ID NO: 8102
  GFR-binding peptide
  MOD_RES (4), (5), (39): Xaa is C or S
  MOD_RES (19), (20), (21), (22), (23): Xaa is A or G
  MOD_RES (24), (25), (26), (27): Xaa is A or G or is absent

SEQ ID NO: 79245 - protein, 43 aa, Artificial Sequence
  GFR-binding peptide
  MOD_RES (6), (7), (41), (43): Xaa is C or S
  MOD_RES (21), (22), (23), (24), (25): Xaa is A or G
  MOD_RES (26), (27), (28), (29): Xaa is A or G or is absent
HVPKPXXAPTKLSAISVLYLXXXXXXXXXLKNYQNMVVRSXGX

SEQ ID NO: 79246 - protein, 34 aa, Artificial Sequence; identical to SEQ ID NO: 6337
  GFR-binding peptide
  MOD_RES (1), (32), (34): Xaa is C or S

SEQ ID NO: 79247 - protein, 33 aa, Artificial Sequence; identical to SEQ ID NO: 6338
  GFR-binding peptide
  MOD_RES (2), (3): Xaa is C or S

SEQ ID NO: 79248 - protein, 39 aa, Artificial Sequence; identical to SEQ ID NO: 8105
  GFR-binding peptide
  MOD_RES (4), (5), (38): Xaa is C or S

SEQ ID NO: 79249 - protein, 42 aa, Artificial Sequence; identical to SEQ ID NO: 29392
  GFR-binding peptide
  MOD_RES (6), (7), (39), (41): Xaa is C or S

SEQ ID NO: 79250 - protein, 38 aa, Artificial Sequence; identical to SEQ ID NO: 13721
  GFR-binding peptide
  MOD_RES (5), (6): Xaa is C or S
  MOD_RES (20), (21), (22), (23), (24): Xaa is A or G
  MOD_RES (25), (26), (27), (28): Xaa is A or G or is absent

SEQ ID NO: 79251 - protein, 40 aa, Artificial Sequence; identical to SEQ ID NO: 15404
  GFR-binding peptide
  MOD_RES (2), (3), (37), (39): Xaa is C or S
  MOD_RES (17), (18), (19), (20), (21): Xaa is A or G
  MOD_RES (22), (23), (24), (25): Xaa is A or G or is absent

SEQ ID NO: 79252 - protein, 32 aa, Artificial Sequence
  GFR-binding peptide
  MOD_RES (14), (15), (16), (17), (18): Xaa is A or G
  MOD_RES (19), (20), (21), (22): Xaa is A or G or is absent
TPTKMSAISMLYLXXXXXXXXXLKNYQGMVVD

SEQ ID NO: 79253 - protein, 36 aa, Artificial Sequence; identical to SEQ ID NO: 70423
  GFR-binding peptide
  MOD_RES (34), (36): Xaa is C or S
  MOD_RES (14), (15), (16), (17), (18): Xaa is A or G
  MOD_RES (19), (20), (21), (22): Xaa is A or G or is absent

SEQ ID NO: 79254 - protein, 39 aa, Artificial Sequence; identical to SEQ ID NO: 8107
  GFR-binding peptide
  MOD_RES (4), (38): Xaa is C or S
  MOD_RES (18), (19), (20), (21), (22): Xaa is A or G
  MOD_RES (23), (24), (25), (26): Xaa is A or G or is absent

SEQ ID NO: 79255 - protein, 39 aa, Artificial Sequence; identical to SEQ ID NO: 8108
  GFR-binding peptide
  MOD_RES (5), (6): Xaa is C or S
  MOD_RES (20), (21), (22), (23), (24): Xaa is A or G
  MOD_RES (25), (26), (27), (28): Xaa is A or G or is absent

SEQ ID NO: 79256 - protein, 35 aa, Artificial Sequence; identical to SEQ ID NO: 15410
  GFR-binding peptide
  MOD_RES (32), (34): Xaa is C or S

SEQ ID NO: 79257 - protein, 35 aa, Artificial Sequence; identical to SEQ ID NO: 8109
  GFR-binding peptide
  MOD_RES (1), (1): Xaa is C or S
  MOD_RES (15), (16), (17), (18), (19): Xaa is A or G
  MOD_RES (20), (21), (22), (23): Xaa is A or G or is absent

SEQ ID NO: 79258 - protein, 36 aa, Artificial Sequence; identical to SEQ ID NO: 8110
  GFR-binding peptide
  MOD_RES (3), (35): Xaa is C or S

SEQ ID NO: 79259 - protein, 39 aa, Artificial Sequence; identical to SEQ ID NO: 8112
  GFR-binding peptide
  MOD_RES (6), (7), (39): Xaa is C or S

SEQ ID NO: 79260 - protein, 31 aa, Artificial Sequence; identical to SEQ ID NO: 6347
  GFR-binding peptide
  MOD_RES (1), (1): Xaa is C or S

SEQ ID NO: 79261 - protein, 34 aa, Artificial Sequence; identical to SEQ ID NO: 13732
  GFR-binding peptide
  MOD_RES (2), (3): Xaa is C or S

SEQ ID NO: 79262 - protein, 34 aa, Artificial Sequence
  GFR-binding peptide
  MOD_RES (1), (2), (34): Xaa is C or S
XXVPEKMSAISILYLDENKNVVLKNYQNMTVESX

SEQ ID NO: 79263 - protein, 38 aa, Artificial Sequence; identical to SEQ ID NO: 15413
  GFR-binding peptide
  MOD_RES (4), (5): Xaa is C or S
  MOD_RES (19), (20), (21), (22), (23): Xaa is A or G
  MOD_RES (24), (25), (26), (27): Xaa is A or G or is absent

SEQ ID NO: 79264 - protein, 35 aa, Artificial Sequence; identical to SEQ ID NO: 8116
  GFR-binding peptide
  MOD_RES (33), (35): Xaa is C or S
  MOD_RES (14), (15), (16), (17), (18): Xaa is A or G
  MOD_RES (19), (20), (21), (22): Xaa is A or G or is absent

SEQ ID NO: 79265 - protein, 44 aa, Artificial Sequence; identical to SEQ ID NO: 57413
  GFR-binding peptide
  MOD_RES (6), (7), (41), (43): Xaa is C or S
  MOD_RES (21), (22), (23), (24), (25): Xaa is A or G
  MOD_RES (26), (27), (28), (29): Xaa is A or G or is absent

SEQ ID NO: 79266 - protein, 40 aa, Artificial Sequence
  GFR-binding peptide
  MOD_RES (6), (7), (39): Xaa is C or S
GSAGPXXTPTKMSAISMLYLNDKQQIILKNYQGMVVDRXG

SEQ ID NO: 79267 - protein, 41 aa, Artificial Sequence
  GFR-binding peptide
  MOD_RES (3), (4), (38), (40): Xaa is C or S
  MOD_RES (18), (19), (20), (21), (22): Xaa is A or G
  MOD_RES (23), (24), (25), (26): Xaa is A or G or is absent
KAXXVPTKLSAISILYLXXXXXXXXXLKNYQGMAVSEXGXR

SEQ ID NO: 79268 - protein, 40 aa, Artificial Sequence; identical to SEQ ID NO: 8119
  GFR-binding peptide
  MOD_RES (2), (3), (37), (39): Xaa is C or S
  MOD_RES (17), (18), (19), (20), (21): Xaa is A or G
  MOD_RES (22), (23), (24), (25): Xaa is A or G or is absent

SEQ ID NO: 79269 - protein, 35 aa, Artificial Sequence
  GFR-binding peptide
  MOD_RES (1), (33), (35): Xaa is C or S
XVPEKMSAISILYLDENKNVVLKNYQNMTVESXAX

SEQ ID NO: 79270 - protein, 38 aa, Artificial Sequence; identical to SEQ ID NO: 6351
  GFR-binding peptide
  MOD_RES (5), (6): Xaa is C or S
  MOD_RES (20), (21), (22), (23), (24): Xaa is A or G
  MOD_RES (25), (26), (27), (28): Xaa is A or G or is absent

SEQ ID NO: 79271 - protein, 40 aa, Artificial Sequence
  GFR-binding peptide
  MOD_RES (6), (7): Xaa is C or S
  MOD_RES (21), (22), (23), (24), (25): Xaa is A or G
  MOD_RES (26), (27), (28), (29): Xaa is A or G or is absent
HVPKPXXAPTKLSAISVLYLXXXXXXXXXLKNYQNMVVRS

SEQ ID NO: 79272 - protein, 38 aa, Artificial Sequence; identical to SEQ ID NO: 67039
  GFR-binding peptide
  MOD_RES (5), (6), (38): Xaa is C or S

SEQ ID NO: 79273 - protein, 40 aa, Artificial Sequence; identical to SEQ ID NO: 6352
  GFR-binding peptide
  MOD_RES (4), (5), (37), (39): Xaa is C or S

SEQ ID NO: 79274 - protein, 34 aa, Artificial Sequence
  GFR-binding peptide
  MOD_RES (2), (3): Xaa is C or S
AXXVPTKLSAISILYLDKGVVTYLKNYQGMAVSE

SEQ ID NO: 79275 - protein, 30 aa, Artificial Sequence; identical to SEQ ID NO: 29405
  GFR-binding peptide

SEQ ID NO: 79276 - protein, 36 aa, Artificial Sequence; identical to SEQ ID NO: 8121
  GFR-binding peptide
  MOD_RES (33), (35): Xaa is C or S
  MOD_RES (14), (15), (16), (17), (18): Xaa is A or G
  MOD_RES (19), (20), (21), (22): Xaa is A or G or is absent

SEQ ID NO: 79277 - protein, 42 aa, Artificial Sequence; identical to SEQ ID NO: 8122
  GFR-binding peptide
  MOD_RES (5), (39), (41): Xaa is C or S
  MOD_RES (19), (20), (21), (22), (23): Xaa is A or G
  MOD_RES (24), (25), (26), (27): Xaa is A or G or is absent

SEQ ID NO: 79278 - protein, 32 aa, Artificial Sequence; identical to SEQ ID NO: 6354
  GFR-binding peptide
  MOD_RES (1), (2): Xaa is C or S

SEQ ID NO: 79279 - protein, 42 aa, Artificial Sequence; identical to SEQ ID NO: 8123
  GFR-binding peptide
  MOD_RES (4), (5), (39), (41): Xaa is C or S
  MOD_RES (19), (20), (21), (22), (23): Xaa is A or G
  MOD_RES (24), (25), (26), (27): Xaa is A or G or is absent

SEQ ID NO: 79280 - protein, 33 aa, Artificial Sequence; identical to SEQ ID NO: 8124
  GFR-binding peptide
  MOD_RES (1), (2): Xaa is C or S

SEQ ID NO: 79281 - protein, 36 aa, Artificial Sequence; identical to SEQ ID NO: 15425
  GFR-binding peptide
  MOD_RES (2), (3): Xaa is C or S
  MOD_RES (17), (18), (19), (20), (21): Xaa is A or G
  MOD_RES (22), (23), (24), (25): Xaa is A or G or is absent

SEQ ID NO: 79282 - protein, 33 aa, Artificial Sequence; identical to SEQ ID NO: 6355
  GFR-binding peptide
  MOD_RES (1), (1): Xaa is C or S
  MOD_RES (15), (16), (17), (18), (19): Xaa is A or G
  MOD_RES (20), (21), (22), (23): Xaa is A or G or is absent

SEQ ID NO: 79283 - protein, 33 aa, Artificial Sequence; identical to SEQ ID NO: 8125
  GFR-binding peptide
  MOD_RES (31), (33): Xaa is C or S

SEQ ID NO: 79284 - protein, 41 aa, Artificial Sequence; identical to SEQ ID NO: 27494
  GFR-binding peptide
  MOD_RES (4), (5), (39), (41): Xaa is C or S
  MOD_RES (19), (20), (21), (22), (23): Xaa is A or G
  MOD_RES (24), (25), (26), (27): Xaa is A or G or is absent

SEQ ID NO: 79285 - protein, 37 aa, Artificial Sequence; identical to SEQ ID NO: 15427
  GFR-binding peptide
  MOD_RES (4), (5): Xaa is C or S
  MOD_RES (19), (20), (21), (22), (23): Xaa is A or G
  MOD_RES (24), (25), (26), (27): Xaa is A or G or is absent

SEQ ID NO: 79286 - protein, 38 aa, Artificial Sequence; identical to SEQ ID NO: 6359
  GFR-binding peptide
  MOD_RES (6), (7), (38): Xaa is C or S

SEQ ID NO: 79287 - protein, 38 aa, Artificial Sequence; identical to SEQ ID NO: 8129
  GFR-binding peptide
  MOD_RES (5), (6): Xaa is C or S
  MOD_RES (20), (21), (22), (23), (24): Xaa is A or G
  MOD_RES (25), (26), (27), (28): Xaa is A or G or is absent

SEQ ID NO: 79288 - protein, 43 aa, Artificial Sequence; identical to SEQ ID NO: 68768
  GFR-binding peptide
  MOD_RES (6), (7), (41), (43): Xaa is C or S
  MOD_RES (21), (22), (23), (24), (25): Xaa is A or G
  MOD_RES (26), (27), (28), (29): Xaa is A or G or is absent

SEQ ID NO: 79289 - protein, 39 aa, Artificial Sequence; identical to SEQ ID NO: 8132
  GFR-binding peptide
  MOD_RES (6), (7): Xaa is C or S
  MOD_RES (21), (22), (23), (24), (25): Xaa is A or G
  MOD_RES (26), (27), (28), (29): Xaa is A or G or is absent

SEQ ID NO: 79290 - protein, 33 aa, Artificial Sequence; identical to SEQ ID NO: 6361
  GFR-binding peptide
  MOD_RES (1), (1): Xaa is C or S
  MOD_RES (15), (16), (17), (18), (19): Xaa is A or G
  MOD_RES (20), (21), (22), (23): Xaa is A or G or is absent

SEQ ID NO: 79291 - protein, 42 aa, Artificial Sequence; identical to SEQ ID NO: 27499
  GFR-binding peptide
  MOD_RES (5), (6), (40), (42): Xaa is C or S
  MOD_RES (20), (21), (22), (23), (24): Xaa is A or G
  MOD_RES (25), (26), (27), (28): Xaa is A or G or is absent

SEQ ID NO: 79292 - protein, 37 aa, Artificial Sequence; identical to SEQ ID NO: 27501
  GFR-binding peptide
  MOD_RES (1), (35), (37): Xaa is C or S
  MOD_RES (15), (16), (17), (18), (19): Xaa is A or G
  MOD_RES (20), (21), (22), (23): Xaa is A or G or is absent

SEQ ID NO: 79293 - protein, 35 aa, Artificial Sequence; identical to SEQ ID NO: 6362
  GFR-binding peptide
  MOD_RES (1), (1): Xaa is C or S
  MOD_RES (15), (16), (17), (18), (19): Xaa is A or G
  MOD_RES (20), (21), (22), (23): Xaa is A or G or is absent

SEQ ID NO: 79294 - protein, 34 aa, Artificial Sequence; identical to SEQ ID NO: 8137
  GFR-binding peptide
  MOD_RES (32), (34): Xaa is C or S

SEQ ID NO: 79295 - protein, 32 aa, Artificial Sequence; identical to SEQ ID NO: 6363
  GFR-binding peptide
  MOD_RES (1), (32): Xaa is C or S

SEQ ID NO: 79296 - protein, 40 aa, Artificial Sequence; identical to SEQ ID NO: 27502
  GFR-binding peptide
  MOD_RES (3), (4), (38), (40): Xaa is C or S
  MOD_RES (18), (19), (20), (21), (22): Xaa is A or G
  MOD_RES (23), (24), (25), (26): Xaa is A or G or is absent

SEQ ID NO: 79297 - protein, 40 aa, Artificial Sequence
  GFR-binding peptide
  MOD_RES (2), (3), (37), (39): Xaa is C or S
  MOD_RES (17), (18), (19), (20), (21): Xaa is A or G
  MOD_RES (22), (23), (24), (25): Xaa is A or G or is absent
PXXTPTKMSAISMLYLXXXXXXXXXLKNYQGMVVDRXGXS

SEQ ID NO: 79298 - protein, 32 aa, Artificial Sequence; identical to SEQ ID NO: 6367
  GFR-binding peptide
  MOD_RES (14), (15), (16), (17), (18): Xaa is A or G
  MOD_RES (19), (20), (21), (22): Xaa is A or G or is absent

SEQ ID NO: 79299 - protein, 35 aa, Artificial Sequence; identical to SEQ ID NO: 6368
  GFR-binding peptide
  MOD_RES (1), (2): Xaa is C or S
  MOD_RES (16), (17), (18), (19), (20): Xaa is A or G
  MOD_RES (21), (22), (23), (24): Xaa is A or G or is absent

SEQ ID NO: 79300 - protein, 43 aa, Artificial Sequence; identical to SEQ ID NO: 6370
  GFR-binding peptide
  MOD_RES (4), (5), (40), (42): Xaa is C or S
  MOD_RES (19), (20), (21), (22), (23): Xaa is A or G
  MOD_RES (24), (25), (26), (27): Xaa is A or G or is absent

SEQ ID NO: 79301 - protein, 31 aa, Artificial Sequence; identical to SEQ ID NO: 6371
  GFR-binding peptide
  MOD_RES (31), (31): Xaa is C or S

SEQ ID NO: 79302 - protein, 39 aa, Artificial Sequence; identical to SEQ ID NO: 6373
  GFR-binding peptide
  MOD_RES (3), (4), (38): Xaa is C or S
  MOD_RES (18), (19), (20), (21), (22): Xaa is A or G
  MOD_RES (23), (24), (25), (26): Xaa is A or G or is absent

SEQ ID NO: 79303 - protein, 38 aa, Artificial Sequence; identical to SEQ ID NO: 6374
  GFR-binding peptide
  MOD_RES (35), (37): Xaa is C or S
  MOD_RES (14), (15), (16), (17), (18): Xaa is A or G
  MOD_RES (19), (20), (21), (22): Xaa is A or G or is absent

SEQ ID NO: 79304 - protein, 43 aa, Artificial Sequence; identical to SEQ ID NO: 8140
  GFR-binding peptide
  MOD_RES (6), (7), (42): Xaa is C or S
  MOD_RES (21), (22), (23), (24), (25): Xaa is A or G
  MOD_RES (26), (27), (28), (29): Xaa is A or G or is absent

SEQ ID NO: 79305 - protein, 34 aa, Artificial Sequence; identical to SEQ ID NO: 8142
  GFR-binding peptide
  MOD_RES (1), (33): Xaa is C or S

SEQ ID NO: 79306 - protein, 38 aa, Artificial Sequence; identical to SEQ ID NO: 8143
  GFR-binding peptide
  MOD_RES (5), (6): Xaa is C or S
  MOD_RES (20), (21), (22), (23), (24): Xaa is A or G
  MOD_RES (25), (26), (27), (28): Xaa is A or G or is absent

SEQ ID NO: 79307 - protein, 35 aa, Artificial Sequence; identical to SEQ ID NO: 6378
  GFR-binding peptide
  MOD_RES (35), (35): Xaa is C or S
  MOD_RES (14), (15), (16), (17), (18): Xaa is A or G
  MOD_RES (19), (20), (21), (22): Xaa is A or G or is absent

SEQ ID NO: 79308 - protein, 36 aa, Artificial Sequence
  GFR-binding peptide
  MOD_RES (4), (5): Xaa is C or S
PASXXVPARLSAISILYLDAANNVVLKNYQDMVVEA

SEQ ID NO: 79309 - protein, 35 aa, Artificial Sequence; identical to SEQ ID NO: 8145
  GFR-binding peptide
  MOD_RES (2), (3), (34): Xaa is C or S

SEQ ID NO: 79310 - protein, 41 aa, Artificial Sequence; identical to SEQ ID NO: 29433
  GFR-binding peptide
  MOD_RES (5), (6), (38), (40): Xaa is C or S

SEQ ID NO: 79311 - protein, 35 aa, Artificial Sequence; identical to SEQ ID NO: 8147
  GFR-binding peptide
  MOD_RES (1), (2), (33), (35): Xaa is C or S

SEQ ID NO: 79312 - protein, 40 aa, Artificial Sequence; identical to SEQ ID NO: 6379
  GFR-binding peptide
  MOD_RES (3), (4), (37), (39): Xaa is C or S
  MOD_RES (18), (19), (20), (21), (22): Xaa is A or G
  MOD_RES (23), (24), (25), (26): Xaa is A or G or is absent

SEQ ID NO: 79313 - protein, 38 aa, Artificial Sequence; identical to SEQ ID NO: 6380
  GFR-binding peptide
  MOD_RES (6), (7): Xaa is C or S

SEQ ID NO: 79314 - protein, 35 aa, Artificial Sequence; identical to SEQ ID NO: 8148
  GFR-binding peptide
  MOD_RES (4), (5): Xaa is C or S

SEQ ID NO: 79315 - protein, 39 aa, Artificial Sequence; identical to SEQ ID NO: 6381
  GFR-binding peptide
  MOD_RES (4), (5), (36), (38): Xaa is C or S

SEQ ID NO: 79316 - protein, 34 aa, Artificial Sequence; identical to SEQ ID NO: 57452
  GFR-binding peptide
  MOD_RES (3), (4): Xaa is C or S

SEQ ID NO: 79317 - protein, 39 aa, Artificial Sequence; identical to SEQ ID NO: 6383
  GFR-binding peptide
  MOD_RES (5), (6): Xaa is C or S
  MOD_RES (20), (21), (22), (23), (24): Xaa is A or G
  MOD_RES (25), (26), (27), (28): Xaa is A or G or is absent

SEQ ID NO: 79318 - protein, 35 aa, Artificial Sequence; identical to SEQ ID NO: 6384
  GFR-binding peptide
  MOD_RES (33), (35): Xaa is C or S
  MOD_RES (14), (15), (16), (17), (18): Xaa is A or G
  MOD_RES (19), (20), (21), (22): Xaa is A or G or is absent

SEQ ID NO: 79319 - protein, 35 aa, Artificial Sequence; identical to SEQ ID NO: 57454
  GFR-binding peptide
  MOD_RES (1), (34): Xaa is C or S
  MOD_RES (15), (16), (17), (18), (19): Xaa is A or G
  MOD_RES (20), (21), (22), (23): Xaa is A or G or is absent

SEQ ID NO: 79320 - protein, 33 aa, Artificial Sequence; identical to SEQ ID NO: 8150
  GFR-binding peptide
  MOD_RES (2), (3): Xaa is C or S

SEQ ID NO: 79321 - protein, 36 aa, Artificial Sequence; identical to SEQ ID NO: 8151
  GFR-binding peptide
  MOD_RES (1), (2), (35): Xaa is C or S
  MOD_RES (16), (17), (18), (19), (20): Xaa is A or G
  MOD_RES (21), (22), (23), (24): Xaa is A or G or is absent

SEQ ID NO: 79322 - protein, 33 aa, Artificial Sequence; identical to SEQ ID NO: 8152
  GFR-binding peptide
  MOD_RES (2), (3): Xaa is C or S

SEQ ID NO: 79323 - protein, 40 aa, Artificial Sequence; identical to SEQ ID NO: 8153
  GFR-binding peptide
  MOD_RES (5), (6): Xaa is C or S
  MOD_RES (20), (21), (22), (23), (24): Xaa is A or G
  MOD_RES (25), (26), (27), (28): Xaa is A or G or is absent

SEQ ID NO: 79324 - protein, 32 aa, Artificial Sequence
  GFR-binding peptide
  MOD_RES (14), (15), (16), (17), (18): Xaa is A or G
  MOD_RES (19), (20), (21), (22): Xaa is A or G or is absent
VPTKLSAISILYLXXXXXXXXXLKNYQGMAVS

SEQ ID NO: 79325 - protein, 40 aa, Artificial Sequence; identical to SEQ ID NO: 8155
  GFR-binding peptide
  MOD_RES (5), (39): Xaa is C or S
  MOD_RES (19), (20), (21), (22), (23): Xaa is A or G
  MOD_RES (24), (25), (26), (27): Xaa is A or G or is absent

SEQ ID NO: 79326 - protein, 40 aa, Artificial Sequence; identical to SEQ ID NO: 15449
  GFR-binding peptide
  MOD_RES (4), (5), (37), (39): Xaa is C or S

SEQ ID NO: 79327 - protein, 40 aa, Artificial Sequence; identical to SEQ ID NO: 6387
  GFR-binding peptide
  MOD_RES (7), (39): Xaa is C or S

SEQ ID NO: 79328 - protein, 36 aa, Artificial Sequence; identical to SEQ ID NO: 8158
  GFR-binding peptide
  MOD_RES (33), (35): Xaa is C or S

SEQ ID NO: 79329 - protein, 33 aa, Artificial Sequence; identical to SEQ ID NO: 8159
  GFR-binding peptide
  MOD_RES (2), (3): Xaa is C or S

SEQ ID NO: 79330 - protein, 39 aa, Artificial Sequence; identical to SEQ ID NO: 13775
  GFR-binding peptide
  MOD_RES (6), (7): Xaa is C or S
  MOD_RES (21), (22), (23), (24), (25): Xaa is A or G
  MOD_RES (26), (27), (28), (29): Xaa is A or G or is absent

SEQ ID NO: 79331 - protein, 41 aa, Artificial Sequence; identical to SEQ ID NO: 8160
  GFR-binding peptide
  MOD_RES (5), (6), (40): Xaa is C or S
  MOD_RES (20), (21), (22), (23), (24): Xaa is A or G
  MOD_RES (25), (26), (27), (28): Xaa is A or G or is absent

SEQ ID NO: 79332 - protein, 38 aa, Artificial Sequence; identical to SEQ ID NO: 8161
  GFR-binding peptide
  MOD_RES (5), (6), (37): Xaa is C or S

SEQ ID NO: 79333 - protein, 39 aa, Artificial Sequence
  GFR-binding peptide
  MOD_RES (3), (4), (38): Xaa is C or S
  MOD_RES (18), (19), (20), (21), (22): Xaa is A or G
  MOD_RES (23), (24), (25), (26): Xaa is A or G or is absent
KAXXVPTKLSAISILYLXXXXXXXXXLKNYQGMAVSEXG

SEQ ID NO: 79334 - protein, 36 aa, Artificial Sequence; identical to SEQ ID NO: 8162
  GFR-binding peptide
  MOD_RES (2), (3), (36): Xaa is C or S
  MOD_RES (17), (18), (19), (20), (21): Xaa is A or G
  MOD_RES (22), (23), (24), (25): Xaa is A or G or is absent

SEQ ID NO: 79335 - protein, 34 aa, Artificial Sequence; identical to SEQ ID NO: 6392
  GFR-binding peptide
  MOD_RES (32), (34): Xaa is C or S

SEQ ID NO: 79336 - protein, 41 aa, Artificial Sequence; identical to SEQ ID NO: 13777
  GFR-binding peptide
  MOD_RES (5), (6), (38), (40): Xaa is C or S

SEQ ID NO: 79337 - protein, 38 aa, Artificial Sequence; identical to SEQ ID NO: 6394
  GFR-binding peptide
  MOD_RES (3), (4), (35), (37): Xaa is C or S

SEQ ID NO: 79338 - protein, 38 aa, Artificial Sequence
  GFR-binding peptide
  MOD_RES (6), (7), (38): Xaa is C or S
RVPSTXXAPVKTSAISMLYLDNGRVLLLKNYQMIVEEX

SEQ ID NO: 79339 - protein, 36 aa, Artificial Sequence
  GFR-binding peptide
  MOD_RES (1), (2), (34), (36): Xaa is C or S
XXVPARLSAISILYLDAANNVVLKNYQDMVVEAXGX

SEQ ID NO: 79340 - protein, 36 aa, Artificial Sequence; identical to SEQ ID NO: 8163
  GFR-binding peptide
  MOD_RES (3), (4): Xaa is C or S
  MOD_RES (18), (19), (20), (21), (22): Xaa is A or G
  MOD_RES (23), (24), (25), (26): Xaa is A or G or is absent

SEQ ID NO: 79341 - protein, 37 aa, Artificial Sequence; identical to SEQ ID NO: 27536
  GFR-binding peptide
  MOD_RES (1), (2), (36): Xaa is C or S
  MOD_RES (16), (17), (18), (19), (20): Xaa is A or G
  MOD_RES (21), (22), (23), (24): Xaa is A or G or is absent

SEQ ID NO: 79342 - protein, 39 aa, Artificial Sequence; identical to SEQ ID NO: 57465
  GFR-binding peptide
  MOD_RES (4), (5), (39): Xaa is C or S
  MOD_RES (19), (20), (21), (22), (23): Xaa is A or G
  MOD_RES (24), (25), (26), (27): Xaa is A or G or is absent

SEQ ID NO: 79343 - protein, 34 aa, Artificial Sequence; identical to SEQ ID NO: 8165
  GFR-binding peptide
  MOD_RES (33), (33): Xaa is C or S
  MOD_RES (14), (15), (16), (17), (18): Xaa is A or G
  MOD_RES (19), (20), (21), (22): Xaa is A or G or is absent

SEQ ID NO: 79344 - protein, 33 aa, Artificial Sequence; identical to SEQ ID NO: 13782
  GFR-binding peptide
  MOD_RES (2), (3): Xaa is C or S

SEQ ID NO: 79345 - protein, 33 aa, Artificial Sequence; identical to SEQ ID NO: 8168
  GFR-binding peptide
  MOD_RES (1), (2), (33): Xaa is C or S

SEQ ID NO: 79346 - protein, 36 aa, Artificial Sequence; identical to SEQ ID NO: 6404
  GFR-binding peptide
  MOD_RES (1), (35): Xaa is C or S
  MOD_RES (15), (16), (17), (18), (19): Xaa is A or G
  MOD_RES (20), (21), (22), (23): Xaa is A or G or is absent

SEQ ID NO: 79347 - protein, 41 aa, Artificial Sequence
  GFR-binding peptide
  MOD_RES (6), (7), (39), (41): Xaa is C or S
AAPASXXVPARLSAISILYLDAANNVVLKNYQDMVVEAXGX

SEQ ID NO: 79348 - protein, 38 aa, Artificial Sequence; identical to SEQ ID NO: 8170
  GFR-binding peptide
  MOD_RES (2), (3), (36), (38): Xaa is C or S

SEQ ID NO: 79349 - protein, 41 aa, Artificial Sequence; identical to SEQ ID NO: 8171
  GFR-binding peptide
  MOD_RES (5), (6), (40): Xaa is C or S
  MOD_RES (20), (21), (22), (23), (24): Xaa is A or G
  MOD_RES (25), (26), (27), (28): Xaa is A or G or is absent

SEQ ID NO: 79350 - protein, 38 aa, Artificial Sequence; identical to SEQ ID NO: 6405
  GFR-binding peptide
  MOD_RES (3), (4), (37): Xaa is C or S

SEQ ID NO: 79351 - protein, 34 aa, Artificial Sequence; identical to SEQ ID NO: 57471
  GFR-binding peptide
  MOD_RES (2), (3): Xaa is C or S

SEQ ID NO: 79352 - protein, 42 aa, Artificial Sequence; identical to SEQ ID NO: 29473
  GFR-binding peptide
  MOD_RES (6), (7), (41): Xaa is C or S
  MOD_RES (21), (22), (23), (24), (25): Xaa is A or G
  MOD_RES (26), (27), (28), (29): Xaa is A or G or is absent

SEQ ID NO: 79353 - protein, 38 aa, Artificial Sequence
  GFR-binding peptide
  MOD_RES (1), (2), (35), (37): Xaa is C or S
  MOD_RES (16), (17), (18), (19), (20): Xaa is A or G
  MOD_RES (21), (22), (23), (24): Xaa is A or G or is absent
XXAPVKTSAISMLYLXXXXXXXXXLKNYQMIVEEXGXL

SEQ ID NO: 79354 - protein, 35 aa, Artificial Sequence
  GFR-binding peptide
  MOD_RES (1), (35): Xaa is C or S
  MOD_RES (15), (16), (17), (18), (19): Xaa is A or G
  MOD_RES (20), (21), (22), (23): Xaa is A or G or is absent
XVPEKMSAISILYLXXXXXXXXXLKNYQNMTVESX

SEQ ID NO: 79355 - protein, 41 aa, Artificial Sequence; identical to SEQ ID NO: 29474
  GFR-binding peptide
  MOD_RES (3), (4), (38), (40): Xaa is C or S
  MOD_RES (18), (19), (20), (21), (22): Xaa is A or G
  MOD_RES (23), (24), (25), (26): Xaa is A or G or is absent

SEQ ID NO: 79356 - protein, 39 aa, Artificial Sequence; identical to SEQ ID NO: 6408
  GFR-binding peptide
  MOD_RES (4), (5): Xaa is C or S
  MOD_RES (19), (20), (21), (22), (23): Xaa is A or G
  MOD_RES (24), (25), (26), (27): Xaa is A or G or is absent

SEQ ID NO: 79357 - protein, 42 aa, Artificial Sequence; identical to SEQ ID NO: 13785
  GFR-binding peptide
  MOD_RES (5), (6), (40), (42): Xaa is C or S
  MOD_RES (20), (21), (22), (23), (24): Xaa is A or G
  MOD_RES (25), (26), (27), (28): Xaa is A or G or is absent

SEQ ID NO: 79358 - protein, 44 aa, Artificial Sequence; identical to SEQ ID NO: 29475
  GFR-binding peptide
  MOD_RES (6), (7), (41), (43): Xaa is C or S
  MOD_RES (21), (22), (23), (24), (25): Xaa is A or G
  MOD_RES (26), (27), (28), (29): Xaa is A or G or is absent

SEQ ID NO: 79359 - protein, 33 aa, Artificial Sequence; identical to SEQ ID NO: 6409
  GFR-binding peptide
  MOD_RES (2), (2): Xaa is C or S

SEQ ID NO: 79360 - protein, 32 aa, Artificial Sequence; identical to SEQ ID NO: 8175
  GFR-binding peptide
  MOD_RES (31), (31): Xaa is C or S

SEQ ID NO: 79361 - protein, 34 aa, Artificial Sequence; identical to SEQ ID NO: 8176
  GFR-binding peptide
  MOD_RES (1), (2): Xaa is C or S

SEQ ID NO: 79362 - protein, 34 aa, Artificial Sequence
  GFR-binding peptide
  MOD_RES (32), (34): Xaa is C or S
TPTKMSAISMLYLNDKQQIILKNYQGMVVDRXGX

SEQ ID NO: 79363 - protein, 38 aa, Artificial Sequence; identical to SEQ ID NO: 57479
  GFR-binding peptide
  MOD_RES (4), (5): Xaa is C or S
  MOD_RES (19), (20), (21), (22), (23): Xaa is A or G
  MOD_RES (24), (25), (26), (27): Xaa is A or G or is absent

SEQ ID NO: 79364 - protein, 37 aa, Artificial Sequence; identical to SEQ ID NO: 6411
  GFR-binding peptide
  MOD_RES (4), (5): Xaa is C or S
  MOD_RES (19), (20), (21), (22), (23): Xaa is A or G
  MOD_RES (24), (25), (26), (27): Xaa is A or G or is absent

SEQ ID NO: 79365 - protein, 38 aa, Artificial Sequence; identical to SEQ ID NO: 8180
  GFR-binding peptide
  MOD_RES (4), (5), (37): Xaa is C or S

SEQ ID NO: 79366 - protein, 38 aa, Artificial Sequence; identical to SEQ ID NO: 57482
  GFR-binding peptide
  MOD_RES (3), (4), (36), (38): Xaa is C or S

SEQ ID NO: 79367 - protein, 39 aa, Artificial Sequence; identical to SEQ ID NO: 8182
  GFR-binding peptide
  MOD_RES (4), (5), (36), (38): Xaa is C or S

SEQ ID NO: 79368 - protein, 35 aa, Artificial Sequence; identical to SEQ ID NO: 8183
  GFR-binding peptide
  MOD_RES (2), (3): Xaa is C or S
  MOD_RES (17), (18), (19), (20), (21): Xaa is A or G
  MOD_RES (22), (23), (24), (25): Xaa is A or G or is absent

SEQ ID NO: 79369 - protein, 36 aa, Artificial Sequence; identical to SEQ ID NO: 67098
  GFR-binding peptide
  MOD_RES (1), (2), (36): Xaa is C or S
  MOD_RES (16), (17), (18), (19), (20): Xaa is A or G
  MOD_RES (21), (22), (23), (24): Xaa is A or G or is absent

SEQ ID NO: 79370 - protein, 34 aa, Artificial Sequence; identical to SEQ ID NO: 6415
  GFR-binding peptide
  MOD_RES (1), (1): Xaa is C or S
  MOD_RES (15), (16), (17), (18), (19): Xaa is A or G
  MOD_RES (20), (21), (22), (23): Xaa is A or G or is absent

SEQ ID NO: 79371 - protein, 38 aa, Artificial Sequence
  GFR-binding peptide
  MOD_RES (4), (5), (37): Xaa is C or S
PEPXXVPEKMSAISILYLDENKNVVLKNYQNMTVESXA

SEQ ID NO: 79372 - protein, 34 aa, Artificial Sequence; identical to SEQ ID NO: 13795
  GFR-binding peptide
  MOD_RES (32), (34): Xaa is C or S

SEQ ID NO: 79373 - protein, 34 aa, Artificial Sequence
  GFR-binding peptide
  MOD_RES (1), (33): Xaa is C or S
XVPEKMSAISILYLDENKNVVLKNYQNMTVESXA

SEQ ID NO: 79374 - protein, 39 aa, Artificial Sequence; identical to SEQ ID NO: 6418
  GFR-binding peptide
  MOD_RES (5), (6), (37), (39): Xaa is C or S

SEQ ID NO: 79375 - protein, 32 aa, Artificial Sequence; identical to SEQ ID NO: 8185
  GFR-binding peptide
  MOD_RES (14), (15), (16), (17), (18): Xaa is A or G
  MOD_RES (19), (20), (21), (22): Xaa is A or G or is absent

SEQ ID NO: 79376 - protein, 42 aa, Artificial Sequence
  GFR-binding peptide
  MOD_RES (5), (6), (40), (42): Xaa is C or S
  MOD_RES (20), (21), (22), (23), (24): Xaa is A or G
  MOD_RES (25), (26), (27), (28): Xaa is A or G or is absent
IPEPXXVPEKMSAISILYLXXXXXXXXXLKNYQNMTVESXAX

SEQ ID NO: 79377 - protein, 37 aa, Artificial Sequence; identical to SEQ ID NO: 15484
  GFR-binding peptide
  MOD_RES (1), (2), (34), (36): Xaa is C or S

SEQ ID NO: 79378 - protein, 37 aa, Artificial Sequence; identical to SEQ ID NO: 6419
  GFR-binding peptide
  MOD_RES (2), (36): Xaa is C or S
  MOD_RES (16), (17), (18), (19), (20): Xaa is A or G
  MOD_RES (21), (22), (23), (24): Xaa is A or G or is absent

SEQ ID NO: 79379 - protein, 43 aa, Artificial Sequence; identical to SEQ ID NO: 8186
  GFR-binding peptide
  MOD_RES (6), (7), (40), (42): Xaa is C or S
  MOD_RES (21), (22), (23), (24), (25): Xaa is A or G
  MOD_RES (26), (27), (28), (29): Xaa is A or G or is absent

SEQ ID NO: 79380 - protein, 38 aa, Artificial Sequence; identical to SEQ ID NO: 8188
  GFR-binding peptide
  MOD_RES (4), (5), (38): Xaa is C or S

SEQ ID NO: 79381 - protein, 37 aa, Artificial Sequence
  GFR-binding peptide
  MOD_RES (4), (5), (36): Xaa is C or S
PSTXXAPVKTSAISMLYLDNGRVLLLKNYQMIVEEXG

SEQ ID NO: 79382 - protein, 39 aa, Artificial Sequence; identical to SEQ ID NO: 8189
  GFR-binding peptide
  MOD_RES (5), (6), (38): Xaa is C or S

SEQ ID NO: 79383 - protein, 41 aa, Artificial Sequence; identical to SEQ ID NO: 8190
  GFR-binding peptide
  MOD_RES (5), (6), (40): Xaa is C or S
  MOD_RES (20), (21), (22), (23), (24): Xaa is A or G
  MOD_RES (25), (26), (27), (28): Xaa is A or G or is absent

SEQ ID NO: 79384 - protein, 36 aa, Artificial Sequence; identical to SEQ ID NO: 8191
  GFR-binding peptide
  MOD_RES (33), (35): Xaa is C or S
  MOD_RES (14), (15), (16), (17), (18): Xaa is A or G
  MOD_RES (19), (20), (21), (22): Xaa is A or G or is absent

SEQ ID NO: 79385 - protein, 35 aa, Artificial Sequence; identical to SEQ ID NO: 13800
  GFR-binding peptide
  MOD_RES (2), (3), (35): Xaa is C or S

SEQ ID NO: 79386 - protein, 34 aa, Artificial Sequence
  GFR-binding peptide
  MOD_RES (34), (34): Xaa is C or S
  MOD_RES (14), (15), (16), (17), (18): Xaa is A or G
  MOD_RES (19), (20), (21), (22): Xaa is A or G or is absent
TPTKMSAISMLYLXXXXXXXXXLKNYQGMVVDRX

SEQ ID NO: 79387 - protein, 39 aa, Artificial Sequence; identical to SEQ ID NO: 6424
  GFR-binding peptide
  MOD_RES (2), (36), (38): Xaa is C or S
  MOD_RES (16), (17), (18), (19), (20): Xaa is A or G
  MOD_RES (21), (22), (23), (24): Xaa is A or G or is absent

SEQ ID NO: 79388 - protein, 34 aa, Artificial Sequence; identical to SEQ ID NO: 57499
  GFR-binding peptide
  MOD_RES (1), (2), (34): Xaa is C or S

SEQ ID NO: 79389 - protein, 30 aa, Artificial Sequence; identical to SEQ ID NO: 15493
  GFR-binding peptide

SEQ ID NO: 79390 - protein, 37 aa, Artificial Sequence
  GFR-binding peptide
  MOD_RES (1), (35), (37): Xaa is C or S
  MOD_RES (15), (16), (17), (18), (19): Xaa is A or G
  MOD_RES (20), (21), (22), (23): Xaa is A or G or is absent
XVPEKMSAISILYLXXXXXXXXXLKNYQNMTVESXAX

SEQ ID NO: 79391 - protein, 34 aa, Artificial Sequence; identical to SEQ ID NO: 8193
  GFR-binding peptide
  MOD_RES (1), (32), (34): Xaa is C or S

SEQ ID NO: 79392 - protein, 38 aa, Artificial Sequence; identical to SEQ ID NO: 6428
  GFR-binding peptide
  MOD_RES (4), (5), (38): Xaa is C or S
  MOD_RES (19), (20), (21), (22), (23): Xaa is A or G
  MOD_RES (24), (25), (26), (27): Xaa is A or G or is absent

SEQ ID NO: 79393 - protein, 34 aa, Artificial Sequence; identical to SEQ ID NO: 8194
  GFR-binding peptide
  MOD_RES (14), (15), (16), (17), (18): Xaa is A or G
  MOD_RES (19), (20), (21), (22): Xaa is A or G or is absent

SEQ ID NO: 79394 - protein, 38 aa, Artificial Sequence; identical to SEQ ID NO: 29504
  GFR-binding peptide
  MOD_RES (6), (7): Xaa is C or S

SEQ ID NO: 79395 - protein, 40 aa, Artificial Sequence; identical to SEQ ID NO: 8195
  GFR-binding peptide
  MOD_RES (3), (4), (37), (39): Xaa is C or S
  MOD_RES (18), (19), (20), (21), (22): Xaa is A or G
  MOD_RES (23), (24), (25), (26): Xaa is A or G or is absent

SEQ ID NO: 79396 - protein, 33 aa, Artificial Sequence; identical to SEQ ID NO: 6430
  GFR-binding peptide
  MOD_RES (32), (32): Xaa is C or S

SEQ ID NO: 79397 - protein, 36 aa, Artificial Sequence; identical to SEQ ID NO: 6431
  GFR-binding peptide
  MOD_RES (1), (2), (34), (36): Xaa is C or S

SEQ ID NO: 79398 - protein, 39 aa, Artificial Sequence
  GFR-binding peptide
  MOD_RES (3), (4), (38): Xaa is C or S
  MOD_RES (18), (19), (20), (21), (22): Xaa is A or G
  MOD_RES (23), (24), (25), (26): Xaa is A or G or is absent
EPXXVPEKMSAISILYLXXXXXXXXXLKNYQNMTVESXA

SEQ ID NO: 79399 - protein, 34 aa, Artificial Sequence; identical to SEQ ID NO: 57508
  GFR-binding peptide
  MOD_RES (34), (34): Xaa is C or S
  MOD_RES (14), (15), (16), (17), (18): Xaa is A or G
  MOD_RES (19), (20), (21), (22): Xaa is A or G or is absent

SEQ ID NO: 79400 - protein, 37 aa, Artificial Sequence; identical to SEQ ID NO: 6432
  GFR-binding peptide
  MOD_RES (4), (5), (36): Xaa is C or S

SEQ ID NO: 79401 - protein, 32 aa, Artificial Sequence; identical to SEQ ID NO: 13813
  GFR-binding peptide
  MOD_RES (1), (2): Xaa is C or S

SEQ ID NO: 79402 - protein, 43 aa, Artificial Sequence; identical to SEQ ID NO: 6433
  GFR-binding peptide
  MOD_RES (6), (7), (41), (43): Xaa is C or S
  MOD_RES (21), (22), (23), (24), (25): Xaa is A or G
  MOD_RES (26), (27), (28), (29): Xaa is A or G or is absent

SEQ ID NO: 79403 - protein, 44 aa, Artificial Sequence; identical to SEQ ID NO: 8197
  GFR-binding peptide
  MOD_RES (6), (7), (41), (43): Xaa is C or S
  MOD_RES (21), (22), (23), (24), (25): Xaa is A or G
  MOD_RES (26), (27), (28), (29): Xaa is A or G or is absent

SEQ ID NO: 79404 - protein, 39 aa, Artificial Sequence; identical to SEQ ID NO: 57510
  GFR-binding peptide
  MOD_RES (4), (5), (36), (38): Xaa is C or S

SEQ ID NO: 79405 - protein, 40 aa, Artificial Sequence; identical to SEQ ID NO: 6434
  GFR-binding peptide
  MOD_RES (6), (7): Xaa is C or S
  MOD_RES (21), (22), (23), (24), (25): Xaa is A or G
  MOD_RES (26), (27), (28), (29): Xaa is A or G or is absent

SEQ ID NO: 79406 - protein, 41 aa, Artificial Sequence; identical to SEQ ID NO: 6435
  GFR-binding peptide
  MOD_RES (4), (5), (39), (41): Xaa is C or S
  MOD_RES (19), (20), (21), (22), (23): Xaa is A or G
  MOD_RES (24), (25), (26), (27): Xaa is A or G or is absent

SEQ ID NO: 79407 - protein, 41 aa, Artificial Sequence; identical to SEQ ID NO: 6436
  GFR-binding peptide
  MOD_RES (5), (6), (38), (40): Xaa is C or S

SEQ ID NO: 79408 - protein, 41 aa, Artificial Sequence; identical to SEQ ID NO: 6437
  GFR-binding peptide
  MOD_RES (3), (4), (38), (40): Xaa is C or S
  MOD_RES (18), (19), (20), (21), (22): Xaa is A or G
  MOD_RES (23), (24), (25), (26): Xaa is A or G or is absent

SEQ ID NO: 79409 - protein, 38 aa, Artificial Sequence; identical to SEQ ID NO: 8199
  GFR-binding peptide
  MOD_RES (3), (4), (37): Xaa is C or S
  MOD_RES (18), (19), (20), (21), (22): Xaa is A or G
  MOD_RES (23), (24), (25), (26): Xaa is A or G or is absent

SEQ ID NO: 79410 - protein, 38 aa, Artificial Sequence; identical to SEQ ID NO: 6441
  GFR-binding peptide
  MOD_RES (3), (4), (37): Xaa is C or S
  MOD_RES (18), (19), (20), (21), (22): Xaa is A or G
  MOD_RES (23), (24), (25), (26): Xaa is A or G or is absent

SEQ ID NO: 79411 - protein, 37 aa, Artificial Sequence; identical to SEQ ID NO: 8201
  GFR-binding peptide
  MOD_RES (3), (4), (36): Xaa is C or S

SEQ ID NO: 79412 - protein, 40 aa, Artificial Sequence; identical to SEQ ID NO: 8203
  GFR-binding peptide
  MOD_RES (1), (2), (37), (39): Xaa is C or S
  MOD_RES (16), (17), (18), (19), (20): Xaa is A or G
  MOD_RES (21), (22), (23), (24): Xaa is A or G or is absent

SEQ ID NO: 79413 - protein, 34 aa, Artificial Sequence; identical to SEQ ID NO: 6442
  GFR-binding peptide
  MOD_RES (2), (34): Xaa is C or S

SEQ ID NO: 79414 - protein, 32 aa, Artificial Sequence; identical to SEQ ID NO: 29518
  GFR-binding peptide
  MOD_RES (1), (2): Xaa is C or S

SEQ ID NO: 79415 - protein, 34 aa, Artificial Sequence
  GFR-binding peptide
  MOD_RES (1), (2), (33): Xaa is C or S
XXAPVKTSAISMLYLDNGRVLLLKNYQMIVEEXG

SEQ ID NO: 79416 - protein, 41 aa, Artificial Sequence; identical to SEQ ID NO: 6443
  GFR-binding peptide
  MOD_RES (3), (4), (38), (40): Xaa is C or S
  MOD_RES (18), (19), (20), (21), (22): Xaa is A or G
  MOD_RES (23), (24), (25), (26): Xaa is A or G or is absent

SEQ ID NO: 79417 - protein, 33 aa, Artificial Sequence; identical to SEQ ID NO: 57523
  GFR-binding peptide
  MOD_RES (31), (33): Xaa is C or S

SEQ ID NO: 79418 - protein, 33 aa, Artificial Sequence; identical to SEQ ID NO: 57524
  GFR-binding peptide
  MOD_RES (2), (3): Xaa is C or S

SEQ ID NO: 79419 - protein, 36 aa, Artificial Sequence; identical to SEQ ID NO: 57526
  GFR-binding peptide
  MOD_RES (3), (4): Xaa is C or S
  MOD_RES (18), (19), (20), (21), (22): Xaa is A or G
  MOD_RES (23), (24), (25), (26): Xaa is A or G or is absent

SEQ ID NO: 79420 - protein, 34 aa, Artificial Sequence; identical to SEQ ID NO: 8208
  GFR-binding peptide
  MOD_RES (1), (2): Xaa is C or S
  MOD_RES (16), (17), (18), (19), (20): Xaa is A or G
  MOD_RES (21), (22), (23), (24): Xaa is A or G or is absent

SEQ ID NO: 79421 - protein, 36 aa, Artificial Sequence; identical to SEQ ID NO: 6445
  GFR-binding peptide
  MOD_RES (4), (5): Xaa is C or S

SEQ ID NO: 79422 - protein, 32 aa, Artificial Sequence
  GFR-binding peptide
  MOD_RES (32), (32): Xaa is C or S
VPARLSAISILYLDAANNVVLKNYQDMVVEAX

SEQ ID NO: 79423 - protein, 36 aa, Artificial Sequence
  GFR-binding peptide
  MOD_RES (1), (2), (36): Xaa is C or S
  MOD_RES (16), (17), (18), (19), (20): Xaa is A or G
  MOD_RES (21), (22), (23), (24): Xaa is A or G or is absent
XXVPARLSAISILYLXXXXXXXXXLKNYQDMVVEAX

SEQ ID NO: 79424 - protein, 34 aa, Artificial Sequence
  GFR-binding peptide
  MOD_RES (1), (2): Xaa is C or S
  MOD_RES (16), (17), (18), (19), (20): Xaa is A or G
  MOD_RES (21), (22), (23), (24): Xaa is A or G or is absent
XXTPTKMSAISMLYLXXXXXXXXXLKNYQGMVVD

SEQ ID NO: 79425 - protein, 37 aa, Artificial Sequence; identical to SEQ ID NO: 6448
  GFR-binding peptide
  MOD_RES (34), (36): Xaa is C or S
  MOD_RES (14), (15), (16), (17), (18): Xaa is A or G
  MOD_RES (19), (20), (21), (22): Xaa is A or G or is absent

SEQ ID NO: 79426 - protein, 38 aa, Artificial Sequence; identical to SEQ ID NO: 15515
  GFR-binding peptide
  MOD_RES (3), (4), (36), (38): Xaa is C or S

SEQ ID NO: 79427 - protein, 34 aa, Artificial Sequence; identical to SEQ ID NO: 6449
  GFR-binding peptide
  MOD_RES (31), (33): Xaa is C or S

SEQ ID NO: 79428 - protein, 39 aa, Artificial Sequence; identical to SEQ ID NO: 8212
  GFR-binding peptide
  MOD_RES (5), (6), (39): Xaa is C or S
  MOD_RES (20), (21), (22), (23), (24): Xaa is A or G
  MOD_RES (25), (26), (27), (28): Xaa is A or G or is absent

SEQ ID NO: 79429 - protein, 38 aa, Artificial Sequence; identical to SEQ ID NO: 6450
  GFR-binding peptide
  MOD_RES (5), (6): Xaa is C or S

SEQ ID NO: 79430 - protein, 36 aa, Artificial Sequence; identical to SEQ ID NO: 15518
  GFR-binding peptide
  MOD_RES (1), (33), (35): Xaa is C or S

SEQ ID NO: 79431 - protein, 34 aa, Artificial Sequence; identical to SEQ ID NO: 8215
  GFR-binding peptide
  MOD_RES (1), (2), (33): Xaa is C or S

SEQ ID NO: 79432 - protein, 41 aa, Artificial Sequence; identical to SEQ ID NO: 8217
  GFR-binding peptide
  MOD_RES (6), (7), (39), (41): Xaa is C or S

SEQ ID NO: 79433 - protein, 36 aa, Artificial Sequence; identical to SEQ ID NO: 57533
  GFR-binding peptide
  MOD_RES (3), (4), (36): Xaa is C or S

SEQ ID NO: 79434 - protein, 40 aa, Artificial Sequence; identical to SEQ ID NO: 29535
  GFR-binding peptide
  MOD_RES (4), (5), (39): Xaa is C or S
  MOD_RES (19), (20), (21), (22), (23): Xaa is A or G
  MOD_RES (24), (25), (26), (27): Xaa is A or G or is absent

SEQ ID NO: 79435 - protein, 38 aa, Artificial Sequence; identical to SEQ ID NO: 8218
  GFR-binding peptide
  MOD_RES (6), (7), (38): Xaa is C or S

SEQ ID NO: 79436 - protein, 42 aa, Artificial Sequence
  GFR-binding peptide
  MOD_RES (5), (6), (40), (42): Xaa is C or S
  MOD_RES (20), (21), (22), (23), (24): Xaa is A or G
  MOD_RES (25), (26), (27), (28): Xaa is A or G or is absent
APASXXVPARLSAISILYLXXXXXXXXXLKNYQDMVVEAXGX

SEQ ID NO: 79437 - protein, 39 aa, Artificial Sequence
  GFR-binding peptide
  MOD_RES (6), (7), (39): Xaa is C or S
HVPKPXXAPTKLSAISVLYLDDSSNVILKNYQNMVVRSX

SEQ ID NO: 79438 - protein, 42 aa, Artificial Sequence; identical to SEQ ID NO: 68851
  GFR-binding peptide
  MOD_RES (6), (7), (41): Xaa is C or S
  MOD_RES (21), (22), (23), (24), (25): Xaa is A or G
  MOD_RES (26), (27), (28), (29): Xaa is A or G or is absent

SEQ ID NO: 79439 - protein, 35 aa, Artificial Sequence; identical to SEQ ID NO: 6458
  GFR-binding peptide
  MOD_RES (2), (3), (35): Xaa is C or S

SEQ ID NO: 79440 - protein, 37 aa, Artificial Sequence; identical to SEQ ID NO: 27612
  GFR-binding peptide
  MOD_RES (1), (35), (37): Xaa is C or S
  MOD_RES (15), (16), (17), (18), (19): Xaa is A or G
  MOD_RES (20), (21), (22), (23): Xaa is A or G or is absent

SEQ ID NO: 79441 - protein, 39 aa, Artificial Sequence
  GFR-binding peptide
  MOD_RES (4), (5), (37), (39): Xaa is C or S
PASXXVPARLSAISILYLDAANNVVLKNYQDMVVEAXGX

SEQ ID NO: 79442 - protein, 38 aa, Artificial Sequence; identical to SEQ ID NO: 8220
  GFR-binding peptide
  MOD_RES (4), (5), (36), (38): Xaa is C or S

SEQ ID NO: 79443 - protein, 38 aa, Artificial Sequence; identical to SEQ ID NO: 29539
  GFR-binding peptide
  MOD_RES (2), (3), (37): Xaa is C or S
  MOD_RES (17), (18), (19), (20), (21): Xaa is A or G
  MOD_RES (22), (23), (24), (25): Xaa is A or G or is absent

SEQ ID NO: 79444 - protein, 39 aa, Artificial Sequence; identical to SEQ ID NO: 6461
  GFR-binding peptide
  MOD_RES (5), (6), (37), (39): Xaa is C or S

SEQ ID NO: 79445 - protein, 41 aa, Artificial Sequence; identical to SEQ ID NO: 70551
  GFR-binding peptide
  MOD_RES (5), (6), (38), (40): Xaa is C or S

SEQ ID NO: 79446 - protein, 35 aa, Artificial Sequence
  GFR-binding peptide
  MOD_RES (32), (34): Xaa is C or S
TPTKMSAISMLYLNDKQQIILKNYQGMVVDRXGXS

SEQ ID NO: 79447 - protein, 37 aa, Artificial Sequence
  GFR-binding peptide
  MOD_RES (3), (4), (36): Xaa is C or S
ASXXVPARLSAISILYLDAANNVVLKNYQDMVVEAXG

SEQ ID NO: 79448 - protein, 36 aa, Artificial Sequence; identical to SEQ ID NO: 8223
  GFR-binding peptide
  MOD_RES (2), (3), (36): Xaa is C or S
  MOD_RES (17), (18), (19), (20), (21): Xaa is A or G
  MOD_RES (22), (23), (24), (25): Xaa is A or G or is absent

SEQ ID NO: 79449 - protein, 40 aa, Artificial Sequence; identical to SEQ ID NO: 8226
  GFR-binding peptide
  MOD_RES (5), (6), (39): Xaa is C or S
  MOD_RES (20), (21), (22), (23), (24): Xaa is A or G
  MOD_RES (25), (26), (27), (28): Xaa is A or G or is absent

SEQ ID NO: 79450 - protein, 37 aa, Artificial Sequence; identical to SEQ ID NO: 57545
  GFR-binding peptide
  MOD_RES (2), (3), (35), (37): Xaa is C or S

SEQ ID NO: 79451 - protein, 36 aa, Artificial Sequence; identical to SEQ ID NO: 15536
  GFR-binding peptide
  MOD_RES (1), (35): Xaa is C or S
  MOD_RES (15), (16), (17), (18), (19): Xaa is A or G
  MOD_RES (20), (21), (22), (23): Xaa is A or G or is absent

SEQ ID NO: 79452 - protein, 30 aa, Artificial Sequence
  GFR-binding peptide
VPTKLSAISILYLDKGVVTYLKNYQGMAVS

SEQ ID NO: 79453 - protein, 41 aa, Artificial Sequence
  GFR-binding peptide
  MOD_RES (6), (7), (41): Xaa is C or S
  MOD_RES (21), (22), (23), (24), (25): Xaa is A or G
  MOD_RES (26), (27), (28), (29): Xaa is A or G or is absent
GSAGPXXTPTKMSAISMLYLXXXXXXXXXLKNYQGMVVDRX

SEQ ID NO: 79454 - protein, 37 aa, Artificial Sequence; identical to SEQ ID NO: 8227
  GFR-binding peptide
  MOD_RES (3), (4), (36): Xaa is C or S

SEQ ID NO: 79455 - protein, 33 aa, Artificial Sequence
  GFR-binding peptide
  MOD_RES (1), (1): Xaa is C or S
  MOD_RES (15), (16), (17), (18), (19): Xaa is A or G
  MOD_RES (20), (21), (22), (23): Xaa is A or G or is absent
XTPTKMSAISMLYLXXXXXXXXXLKNYQGMVVD

SEQ ID NO: 79456 - protein, 37 aa, Artificial Sequence; identical to SEQ ID NO: 27620
  GFR-binding peptide
  MOD_RES (3), (4): Xaa is C or S
  MOD_RES (18), (19), (20), (21), (22): Xaa is A or G
  MOD_RES (23), (24), (25), (26): Xaa is A or G or is absent

SEQ ID NO: 79457 - protein, 38 aa, Artificial Sequence; identical to SEQ ID NO: 70556
  GFR-binding peptide
  MOD_RES (1), (2), (36), (38): Xaa is C or S
  MOD_RES (16), (17), (18), (19), (20): Xaa is A or G
  MOD_RES (21), (22), (23), (24): Xaa is A or G or is absent

SEQ ID NO: 79458 - protein, 38 aa, Artificial Sequence; identical to SEQ ID NO: 6467
  GFR-binding peptide
  MOD_RES (2), (3), (36), (38): Xaa is C or S
  MOD_RES (17), (18), (19), (20), (21): Xaa is A or G
  MOD_RES (22), (23), (24), (25): Xaa is A or G or is absent

SEQ ID NO: 79459 - protein, 34 aa, Artificial Sequence; identical to SEQ ID NO: 8229
  GFR-binding peptide
  MOD_RES (33), (33): Xaa is C or S
  MOD_RES (14), (15), (16), (17), (18): Xaa is A or G
  MOD_RES (19), (20), (21), (22): Xaa is A or G or is absent

SEQ ID NO: 79460 - protein, 35 aa, Artificial Sequence; identical to SEQ ID NO: 27624
  GFR-binding peptide
  MOD_RES (1), (35): Xaa is C or S
  MOD_RES (15), (16), (17), (18), (19): Xaa is A or G
  MOD_RES (20), (21), (22), (23): Xaa is A or G or is absent

SEQ ID NO: 79461 - protein, 36 aa, Artificial Sequence; identical to SEQ ID NO: 6470
  GFR-binding peptide
  MOD_RES (34), (36): Xaa is C or S
  MOD_RES (14), (15), (16), (17), (18): Xaa is A or G
  MOD_RES (19), (20), (21), (22): Xaa is A or G or is absent

SEQ ID NO: 79462 - protein, 39 aa, Artificial Sequence; identical to SEQ ID NO: 27626
  GFR-binding peptide
  MOD_RES (2), (3), (37), (39): Xaa is C or S
  MOD_RES (17), (18), (19), (20), (21): Xaa is A or G
  MOD_RES (22), (23), (24), (25): Xaa is A or G or is absent

SEQ ID NO: 79463 - protein, 40 aa, Artificial Sequence; identical to SEQ ID NO: 8230
  GFR-binding peptide
  MOD_RES (4), (5), (39): Xaa is C or S
  MOD_RES (19), (20), (21), (22), (23): Xaa is A or G
  MOD_RES (24), (25), (26), (27): Xaa is A or G or is absent

SEQ ID NO: 79464 - protein, 36 aa, Artificial Sequence
  GFR-binding peptide
  MOD_RES (34), (36): Xaa is C or S
  MOD_RES (14), (15), (16), (17), (18): Xaa is A or G
  MOD_RES (19), (20), (21), (22): Xaa is A or G or is absent
VPTKLSAISILYLXXXXXXXXXLKNYQGMAVSEXGX

SEQ ID NO: 79465 - protein, 36 aa, Artificial Sequence; identical to SEQ ID NO: 6473
  GFR-binding peptide
  MOD_RES (4), (5), (36): Xaa is C or S

SEQ ID NO: 79466 - protein, 36 aa, Artificial Sequence; identical to SEQ ID NO: 57556
  GFR-binding peptide
  MOD_RES (4), (5), (36): Xaa is C or S

SEQ ID NO: 79467 - protein, 37 aa, Artificial Sequence
  GFR-binding peptide
  MOD_RES (5), (6): Xaa is C or S
ASKAXXVPTKLSAISILYLDKGVVTYLKNYQGMAVSE

SEQ ID NO: 79468 - protein, 37 aa, Artificial Sequence
  GFR-binding peptide
  MOD_RES (2), (3), (34), (36): Xaa is C or S
TXXAPVKTSAISMLYLDNGRVLLLKNYQMIVEEXGXL

SEQ ID NO: 79469 - protein, 37 aa, Artificial Sequence; identical to SEQ ID NO: 6477
  GFR-binding peptide
  MOD_RES (1), (2), (35), (37): Xaa is C or S
  MOD_RES (16), (17), (18), (19), (20): Xaa is A or G
  MOD_RES (21), (22), (23), (24): Xaa is A or G or is absent

SEQ ID NO: 79470 - protein, 33 aa, Artificial Sequence; identical to SEQ ID NO: 6478
  GFR-binding peptide
  MOD_RES (2), (3): Xaa is C or S

SEQ ID NO: 79471 - protein, 37 aa, Artificial Sequence; identical to SEQ ID NO: 8232
  GFR-binding peptide
  MOD_RES (2), (3), (34), (36): Xaa is C or S

SEQ ID NO: 79472 - protein, 43 aa, Artificial Sequence; identical to SEQ ID NO: 8233
  GFR-binding peptide
  MOD_RES (4), (5), (40), (42): Xaa is C or S
  MOD_RES (19), (20), (21), (22), (23): Xaa is A or G
  MOD_RES (24), (25), (26), (27): Xaa is A or G or is absent

SEQ ID NO: 79473 - protein, 36 aa, Artificial Sequence; identical to SEQ ID NO: 13852
  GFR-binding peptide
  MOD_RES (3), (4): Xaa is C or S
  MOD_RES (18), (19), (20), (21), (22): Xaa is A or G
  MOD_RES (23), (24), (25), (26): Xaa is A or G or is absent

SEQ ID NO: 79474 - protein, 42 aa, Artificial Sequence; identical to SEQ ID NO: 6480
  GFR-binding peptide
  MOD_RES (7), (39), (41): Xaa is C or S

SEQ ID NO: 79475 - protein, 37 aa, Artificial Sequence; identical to SEQ ID NO: 15547
  GFR-binding peptide
  MOD_RES (1), (2), (34), (36): Xaa is C or S

SEQ ID NO: 79476 - protein, 36 aa, Artificial Sequence; identical to SEQ ID NO: 8236
  GFR-binding peptide
  MOD_RES (2), (36): Xaa is C or S
  MOD_RES (16), (17), (18), (19), (20): Xaa is A or G
  MOD_RES (21), (22), (23), (24): Xaa is A or G or is absent

SEQ ID NO: 79477 - protein, 41 aa, Artificial Sequence; identical to SEQ ID NO: 6481
  GFR-binding peptide
  MOD_RES (6), (40): Xaa is C or S
  MOD_RES (20), (21), (22), (23), (24): Xaa is A or G
  MOD_RES (25), (26), (27), (28): Xaa is A or G or is absent

SEQ ID NO: 79478 - protein, 37 aa, Artificial Sequence
  GFR-binding peptide
  MOD_RES (34), (36): Xaa is C or S
  MOD_RES (14), (15), (16), (17), (18): Xaa is A or G
  MOD_RES (19), (20), (21), (22): Xaa is A or G or is absent
VPARLSAISILYLXXXXXXXXXLKNYQDMVVEAXGXR

SEQ ID NO: 79479 - protein, 34 aa, Artificial Sequence; identical to SEQ ID NO: 8239
  GFR-binding peptide
  MOD_RES (34), (34): Xaa is C or S
  MOD_RES (14), (15), (16), (17), (18): Xaa is A or G
  MOD_RES (19), (20), (21), (22): Xaa is A or G or is absent

SEQ ID NO: 79480 - protein, 35 aa, Artificial Sequence; identical to SEQ ID NO: 8240
  GFR-binding peptide
  MOD_RES (1), (2): Xaa is C or S
  MOD_RES (16), (17), (18), (19), (20): Xaa is A or G
  MOD_RES (21), (22), (23), (24): Xaa is A or G or is absent

SEQ ID NO: 79481 - protein, 34 aa, Artificial Sequence; identical to SEQ ID NO: 6487
  GFR-binding peptide
  MOD_RES (1), (2), (34): Xaa is C or S

SEQ ID NO: 79482 - protein, 39 aa, Artificial Sequence; identical to SEQ ID NO: 8241
  GFR-binding peptide
  MOD_RES (3), (4), (38): Xaa is C or S
  MOD_RES (18), (19), (20), (21), (22): Xaa is A or G
  MOD_RES (23), (24), (25), (26): Xaa is A or G or is absent

SEQ ID NO: 79483 - protein, 39 aa, Artificial Sequence
  GFR-binding peptide
  MOD_RES (4), (5), (36), (38): Xaa is C or S
PSTXXAPVKTSAISMLYLDNGRVLLLKNYQMIVEEXGXL

SEQ ID NO: 79484 - protein, 37 aa, Artificial Sequence; identical to SEQ ID NO: 57569
  GFR-binding peptide
  MOD_RES (6), (7): Xaa is C or S

SEQ ID NO: 79485 - protein, 35 aa, Artificial Sequence
  GFR-binding peptide
  MOD_RES (2), (3), (35): Xaa is C or S
AXXVPTKLSAISILYLDKGVVTYLKNYQGMAVSEX

SEQ ID NO: 79486 - protein, 32 aa, Artificial Sequence; identical to SEQ ID NO: 57572
  GFR-binding peptide
  MOD_RES (32), (32): Xaa is C or S

SEQ ID NO: 79487 - protein, 44 aa, Artificial Sequence; identical to SEQ ID NO: 6490
  GFR-binding peptide
  MOD_RES (6), (7), (41), (43): Xaa is C or S
  MOD_RES (21), (22), (23), (24), (25): Xaa is A or G
  MOD_RES (26), (27), (28), (29): Xaa is A or G or is absent

SEQ ID NO: 79488 - protein, 37 aa, Artificial Sequence; identical to SEQ ID NO: 65520
  GFR-binding peptide
  MOD_RES (3), (4): Xaa is C or S
  MOD_RES (18), (19), (20), (21), (22): Xaa is A or G
  MOD_RES (23), (24), (25), (26): Xaa is A or G or is absent

SEQ ID NO: 79489 - protein, 36 aa, Artificial Sequence; identical to SEQ ID NO: 15562
  GFR-binding peptide
  MOD_RES (5), (6): Xaa is C or S

SEQ ID NO: 79490 - protein, 39 aa, Artificial Sequence; identical to SEQ ID NO: 15563
  GFR-binding peptide
  MOD_RES (1), (2), (36), (38): Xaa is C or S
  MOD_RES (16), (17), (18), (19), (20): Xaa is A or G
  MOD_RES (21), (22), (23), (24): Xaa is A or G or is absent

SEQ ID NO: 79491 - protein, 36 aa, Artificial Sequence; identical to SEQ ID NO: 8248
  GFR-binding peptide
  MOD_RES (4), (36): Xaa is C or S

SEQ ID NO: 79492 - protein, 35 aa, Artificial Sequence; identical to SEQ ID NO: 8249
  GFR-binding peptide
  MOD_RES (2), (3): Xaa is C or S
  MOD_RES (17), (18), (19), (20), (21): Xaa is A or G
  MOD_RES (22), (23), (24), (25): Xaa is A or G or is absent

SEQ ID NO: 79493 - protein, 36 aa, Artificial Sequence
  GFR-binding peptide
  MOD_RES (4), (5), (36): Xaa is C or S
PSTXXAPVKTSAISMLYLDNGRVLLLKNYQMIVEEX

SEQ ID NO: 79494 - protein, 35 aa, Artificial Sequence
  GFR-binding peptide
  MOD_RES (1), (35): Xaa is C or S
  MOD_RES (15), (16), (17), (18), (19): Xaa is A or G
  MOD_RES (20), (21), (22), (23): Xaa is A or G or is absent
XVPARLSAISILYLXXXXXXXXXLKNYQDMVVEAX

SEQ ID NO: 79495 - protein, 31 aa, Artificial Sequence
  GFR-binding peptide
  MOD_RES (1), (1): Xaa is C or S
XTPTKMSAISMLYLNDKQQIILKNYQGMVVD

SEQ ID NO: 79496 - protein, 33 aa, Artificial Sequence; identical to SEQ ID NO: 27656
  GFR-binding peptide
  MOD_RES (1), (1): Xaa is C or S
  MOD_RES (15), (16), (17), (18), (19): Xaa is A or G
  MOD_RES (20), (21), (22), (23): Xaa is A or G or is absent

SEQ ID NO: 79497 - protein, 31 aa, Artificial Sequence; identical to SEQ ID NO: 15569
  GFR-binding peptide

SEQ ID NO: 79498 - protein, 41 aa, Artificial Sequence; identical to SEQ ID NO: 57579
  GFR-binding peptide
  MOD_RES (4), (5), (38), (40): Xaa is C or S
  MOD_RES (19), (20), (21), (22), (23): Xaa is A or G
  MOD_RES (24), (25), (26), (27): Xaa is A or G or is absent

SEQ ID NO: 79499 - protein, 36 aa, Artificial Sequence
  GFR-binding peptide
  MOD_RES (5), (6): Xaa is C or S
ASKAXXVPTKLSAISILYLDKGVVTYLKNYQGMAVS

SEQ ID NO: 79500 - protein, 32 aa, Artificial Sequence; identical to SEQ ID NO: 68893
  GFR-binding peptide
  MOD_RES (1), (1): Xaa is C or S

SEQ ID NO: 79501 - protein, 32 aa, Artificial Sequence; identical to SEQ ID NO: 6496
  GFR-binding peptide
  MOD_RES (14), (15), (16), (17), (18): Xaa is A or G
  MOD_RES (19), (20), (21), (22): Xaa is A or G or is absent

SEQ ID NO: 79502 - protein, 33 aa, Artificial Sequence; identical to SEQ ID NO: 6498
  GFR-binding peptide
  MOD_RES (33), (33): Xaa is C or S
  MOD_RES (14), (15), (16), (17), (18): Xaa is A or G
  MOD_RES (19), (20), (21), (22): Xaa is A or G or is absent

SEQ ID NO: 79503 - protein, 34 aa, Artificial Sequence; identical to SEQ ID NO: 8255
  GFR-binding peptide
  MOD_RES (31), (33): Xaa is C or S

SEQ ID NO: 79504 - protein, 42 aa, Artificial Sequence
  GFR-binding peptide
  MOD_RES (5), (6), (39), (41): Xaa is C or S
  MOD_RES (20), (21), (22), (23), (24): Xaa is A or G
  MOD_RES (25), (26), (27), (28): Xaa is A or G or is absent
VPSTXXAPVKTSAISMLYLXXXXXXXXXLKNYQMIVEEXGXL

SEQ ID NO: 79505 - protein, 35 aa, Artificial Sequence; identical to SEQ ID NO: 6500
  GFR-binding peptide
  MOD_RES (2), (3): Xaa is C or S
  MOD_RES (17), (18), (19), (20), (21): Xaa is A or G
  MOD_RES (22), (23), (24), (25): Xaa is A or G or is absent

SEQ ID NO: 79506 - protein, 37 aa, Artificial Sequence; identical to SEQ ID NO: 8256
  GFR-binding peptide
  MOD_RES (5), (5): Xaa is C or S
  MOD_RES (19), (20), (21), (22), (23): Xaa is A or G
  MOD_RES (24), (25), (26), (27): Xaa is A or G or is absent

SEQ ID NO: 79507 - protein, 41 aa, Artificial Sequence
  GFR-binding peptide
  MOD_RES (5), (6), (40): Xaa is C or S
  MOD_RES (20), (21), (22), (23), (24): Xaa is A or G
  MOD_RES (25), (26), (27), (28): Xaa is A or G or is absent
SAGPXXTPTKMSAISMLYLXXXXXXXXXLKNYQGMVVDRXG

SEQ ID NO: 79508 - protein, 40 aa, Artificial Sequence; identical to SEQ ID NO: 6504
  GFR-binding peptide
  MOD_RES (5), (6), (37), (39): Xaa is C or S

SEQ ID NO: 79509 - protein, 34 aa, Artificial Sequence; identical to SEQ ID NO: 8262
  GFR-binding peptide
  MOD_RES (1), (2), (33): Xaa is C or S

SEQ ID NO: 79510 - protein, 41 aa, Artificial Sequence; identical to SEQ ID NO: 57584
  GFR-binding peptide
  MOD_RES (6), (7), (38), (40): Xaa is C or S

SEQ ID NO: 79511 - protein, 34 aa, Artificial Sequence
  GFR-binding peptide
  MOD_RES (32), (34): Xaa is C or S
VPTKLSAISILYLDKGVVTYLKNYQGMAVSEXGX

SEQ ID NO: 79512 - protein, 34 aa, Artificial Sequence; identical to SEQ ID NO: 8264
  GFR-binding peptide
  MOD_RES (1), (33): Xaa is C or S

SEQ ID NO: 79513 - protein, 43 aa, Artificial Sequence
  GFR-binding peptide
  MOD_RES (6), (7), (40), (42): Xaa is C or S
  MOD_RES (21), (22), (23), (24), (25): Xaa is A or G
  MOD_RES (26), (27), (28), (29): Xaa is A or G or is absent
RVPSTXXAPVKTSAISMLYLXXXXXXXXXLKNYQMIVEEXGXL

SEQ ID NO: 79514 - protein, 36 aa, Artificial Sequence; identical to SEQ ID NO: 6506
  GFR-binding peptide
  MOD_RES (2), (3), (36): Xaa is C or S
  MOD_RES (17), (18), (19), (20), (21): Xaa is A or G
  MOD_RES (22), (23), (24), (25): Xaa is A or G or is absent

SEQ ID NO: 79515 - protein, 37 aa, Artificial Sequence; identical to SEQ ID NO: 29588
  GFR-binding peptide
  MOD_RES (1), (2), (34), (36): Xaa is C or S

SEQ ID NO: 79516 - protein, 38 aa, Artificial Sequence; identical to SEQ ID NO: 8266
  GFR-binding peptide
  MOD_RES (5), (37): Xaa is C or S

SEQ ID NO: 79517 - protein, 41 aa, Artificial Sequence; identical to SEQ ID NO: 6507
  GFR-binding peptide
  MOD_RES (6), (7), (39), (41): Xaa is C or S

SEQ ID NO: 79518 - protein, 39 aa, Artificial Sequence; identical to SEQ ID NO: 8268
  GFR-binding peptide
  MOD_RES (3), (4), (36), (38): Xaa is C or S

SEQ ID NO: 79519 - protein, 33 aa, Artificial Sequence; identical to SEQ ID NO: 6508
  GFR-binding peptide
  MOD_RES (1), (33): Xaa is C or S

SEQ ID NO: 79520 - protein, 37 aa, Artificial Sequence; identical to SEQ ID NO: 27670
  GFR-binding peptide
  MOD_RES (2), (3), (37): Xaa is C or S
  MOD_RES (17), (18), (19), (20), (21): Xaa is A or G
  MOD_RES (22), (23), (24), (25): Xaa is A or G or is absent

SEQ ID NO: 79521 - protein, 39 aa, Artificial Sequence; identical to SEQ ID NO: 29595
  GFR-binding peptide
  MOD_RES (4), (5), (37), (39): Xaa is C or S

SEQ ID NO: 79522 - protein, 31 aa, Artificial Sequence; identical to SEQ ID NO: 6513
  GFR-binding peptide
  MOD_RES (1), (1): Xaa is C or S

SEQ ID NO: 79523 - protein, 37 aa, Artificial Sequence; identical to SEQ ID NO: 6514
  GFR-binding peptide
  MOD_RES (6), (6): Xaa is C or S

SEQ ID NO: 79524 - protein, 41 aa, Artificial Sequence; identical to SEQ ID NO: 8271
  GFR-binding peptide
  MOD_RES (7), (41): Xaa is C or S
  MOD_RES (21), (22), (23), (24), (25): Xaa is A or G
  MOD_RES (26), (27), (28), (29): Xaa is A or G or is absent

SEQ ID NO: 79525 - protein, 35 aa, Artificial Sequence; identical to SEQ ID NO: 6515
  GFR-binding peptide
  MOD_RES (2), (2): Xaa is C or S
  MOD_RES (16), (17), (18), (19), (20): Xaa is A or G
  MOD_RES (21), (22), (23), (24): Xaa is A or G or is absent

SEQ ID NO: 79526 - protein, 34 aa, Artificial Sequence; identical to SEQ ID NO: 57594
  GFR-binding peptide
  MOD_RES (1), (32), (34): Xaa is C or S

SEQ ID NO: 79527 - protein, 40 aa, Artificial Sequence; identical to SEQ ID NO: 8275
  GFR-binding peptide
  MOD_RES (6), (7): Xaa is C or S
  MOD_RES (21), (22), (23), (24), (25): Xaa is A or G
  MOD_RES (26), (27), (28), (29): Xaa is A or G or is absent

SEQ ID NO: 79528 - protein, 33 aa, Artificial Sequence; identical to SEQ ID NO: 8276
  GFR-binding peptide
  MOD_RES (1), (1): Xaa is C or S
  MOD_RES (15), (16), (17), (18), (19): Xaa is A or G
  MOD_RES (20), (21), (22), (23): Xaa is A or G or is absent

SEQ ID NO: 79529 - protein, 41 aa, Artificial Sequence; identical to SEQ ID NO: 6518
  GFR-binding peptide
  MOD_RES (6), (7), (40): Xaa is C or S
  MOD_RES (21), (22), (23), (24), (25): Xaa is A or G
  MOD_RES (26), (27), (28), (29): Xaa is A or G or is absent

SEQ ID NO: 79530 - protein, 33 aa, Artificial Sequence; identical to SEQ ID NO: 8277
  GFR-binding peptide
  MOD_RES (1), (1): Xaa is C or S
  MOD_RES (15), (16), (17), (18), (19): Xaa is A or G
  MOD_RES (20), (21), (22), (23): Xaa is A or G or is absent

SEQ ID NO: 79531 - protein, 35 aa, Artificial Sequence; identical to SEQ ID NO: 8278
  GFR-binding peptide
  MOD_RES (34), (34): Xaa is C or S
  MOD_RES (14), (15), (16), (17), (18): Xaa is A or G
  MOD_RES (19), (20), (21), (22): Xaa is A or G or is absent

SEQ ID NO: 79532 - protein, 37 aa, Artificial Sequence; identical to SEQ ID NO: 27679
  GFR-binding peptide
  MOD_RES (3), (4): Xaa is C or S
  MOD_RES (18), (19), (20), (21), (22): Xaa is A or G
  MOD_RES (23), (24), (25), (26): Xaa is A or G or is absent

SEQ ID NO: 79533 - protein, 39 aa, Artificial Sequence; identical to SEQ ID NO: 6521
  GFR-binding peptide
  MOD_RES (2), (3), (36), (38): Xaa is C or S
  MOD_RES (17), (18), (19), (20), (21): Xaa is A or G
  MOD_RES (22), (23), (24), (25): Xaa is A or G or is absent

SEQ ID NO: 79534 - protein, 37 aa, Artificial Sequence; identical to SEQ ID NO: 6522
  GFR-binding peptide
  MOD_RES (4), (5), (37): Xaa is C or S

SEQ ID NO: 79535 - protein, 38 aa, Artificial Sequence; identical to SEQ ID NO: 6523
  GFR-binding peptide
  MOD_RES (5), (5): Xaa is C or S
  MOD_RES (19), (20), (21), (22), (23): Xaa is A or G
  MOD_RES (24), (25), (26), (27): Xaa is A or G or is absent

SEQ ID NO: 79536 - protein, 31 aa, Artificial Sequence; identical to SEQ ID NO: 27687
  GFR-binding peptide

SEQ ID NO: 79537 - protein, 37 aa, Artificial Sequence; identical to SEQ ID NO: 6526
  GFR-binding peptide
  MOD_RES (6), (7): Xaa is C or S

SEQ ID NO: 79538 - protein, 35 aa, Artificial Sequence; identical to SEQ ID NO: 57609
  GFR-binding peptide
  MOD_RES (1), (2), (33), (35): Xaa is C or S

SEQ ID NO: 79539 - protein, 38 aa, Artificial Sequence; identical to SEQ ID NO: 8286
  GFR-binding peptide
  MOD_RES (2), (3), (36), (38): Xaa is C or S
  MOD_RES (17), (18), (19), (20), (21): Xaa is A or G
  MOD_RES (22), (23), (24), (25): Xaa is A or G or is absent

SEQ ID NO: 79540 - protein, 41 aa, Artificial Sequence
  GFR-binding peptide
  MOD_RES (5), (6), (38), (40): Xaa is C or S
ASKAXXVPTKLSAISILYLDKGVVTYLKNYQGMAVSEXGXR

SEQ ID NO: 79541 - protein, 37 aa, Artificial Sequence; identical to SEQ ID NO: 6529
  GFR-binding peptide
  MOD_RES (5), (37): Xaa is C or S

SEQ ID NO: 79542 - protein, 32 aa, Artificial Sequence; identical to SEQ ID NO: 6530
  GFR-binding peptide
  MOD_RES (32), (32): Xaa is C or S

SEQ ID NO: 79543 - protein, 37 aa, Artificial Sequence; identical to SEQ ID NO: 67181
  GFR-binding peptide
  MOD_RES (1), (2), (36): Xaa is C or S
  MOD_RES (16), (17), (18), (19), (20): Xaa is A or G
  MOD_RES (21), (22), (23), (24): Xaa is A or G or is absent

SEQ ID NO: 79544 - protein, 38 aa, Artificial Sequence
  GFR-binding peptide
  MOD_RES (4), (5): Xaa is C or S
  MOD_RES (19), (20), (21), (22), (23): Xaa is A or G
  MOD_RES (24), (25), (26), (27): Xaa is A or G or is absent
PEPXXVPEKMSAISILYLXXXXXXXXXLKNYQNMTVES

SEQ ID NO: 79545 - protein, 39 aa, Artificial Sequence; identical to SEQ ID NO: 8290
  GFR-binding peptide
  MOD_RES (4), (5), (37), (39): Xaa is C or S

SEQ ID NO: 79546 - protein, 36 aa, Artificial Sequence
  GFR-binding peptide
  MOD_RES (33), (35): Xaa is C or S
  MOD_RES (14), (15), (16), (17), (18): Xaa is A or G
  MOD_RES (19), (20), (21), (22): Xaa is A or G or is absent
APVKTSAISMLYLXXXXXXXXXLKNYQMIVEEXGXL

SEQ ID NO: 79547 - protein, 43 aa, Artificial Sequence; identical to SEQ ID NO: 8291
  GFR-binding peptide
  MOD_RES (5), (6), (40), (42): Xaa is C or S
  MOD_RES (20), (21), (22), (23), (24): Xaa is A or G
  MOD_RES (25), (26), (27), (28): Xaa is A or G or is absent

SEQ ID NO: 79548 - protein, 39 aa, Artificial Sequence; identical to SEQ ID NO: 6535
  GFR-binding peptide
  MOD_RES (4), (5), (36), (38): Xaa is C or S

SEQ ID NO: 79549 - protein, 36 aa, Artificial Sequence; identical to SEQ ID NO: 57614
  GFR-binding peptide
  MOD_RES (1), (2), (33), (35): Xaa is C or S

SEQ ID NO: 79550 - protein, 35 aa, Artificial Sequence; identical to SEQ ID NO: 15600
  GFR-binding peptide
  MOD_RES (34), (34): Xaa is C or S
  MOD_RES (14), (15), (16), (17), (18): Xaa is A or G
  MOD_RES (19), (20), (21), (22): Xaa is A or G or is absent

SEQ ID NO: 79551 - protein, 36 aa, Artificial Sequence; identical to SEQ ID NO: 13902
  GFR-binding peptide
  MOD_RES (2), (3), (35): Xaa is C or S

SEQ ID NO: 79552 - protein, 36 aa, Artificial Sequence; identical to SEQ ID NO: 57619
  GFR-binding peptide
  MOD_RES (34), (36): Xaa is C or S
  MOD_RES (14), (15), (16), (17), (18): Xaa is A or G
  MOD_RES (19), (20), (21), (22): Xaa is A or G or is absent

SEQ ID NO: 79553 - protein, 40 aa, Artificial Sequence; identical to SEQ ID NO: 8298
  GFR-binding peptide
  MOD_RES (4), (5), (38), (40): Xaa is C or S
  MOD_RES (19), (20), (21), (22), (23): Xaa is A or G
  MOD_RES (24), (25), (26), (27): Xaa is A or G or is absent

SEQ ID NO: 79554 - protein, 36 aa, Artificial Sequence; identical to SEQ ID NO: 6540
  GFR-binding peptide
  MOD_RES (34), (36): Xaa is C or S
  MOD_RES (14), (15), (16), (17), (18): Xaa is A or G
  MOD_RES (19), (20), (21), (22): Xaa is A or G or is absent

SEQ ID NO: 79555 - protein, 38 aa, Artificial Sequence; identical to SEQ ID NO: 6541
  GFR-binding peptide
  MOD_RES (1), (2), (36), (38): Xaa is C or S
  MOD_RES (16), (17), (18), (19), (20): Xaa is A or G
  MOD_RES (21), (22), (23), (24): Xaa is A or G or is absent

SEQ ID NO: 79556 - protein, 36 aa, Artificial Sequence; identical to SEQ ID NO: 57623
  GFR-binding peptide
  MOD_RES (1), (2), (35): Xaa is C or S
  MOD_RES (16), (17), (18), (19), (20): Xaa is A or G
  MOD_RES (21), (22), (23), (24): Xaa is A or G or is absent

SEQ ID NO: 79557 - protein, 40 aa, Artificial Sequence; identical to SEQ ID NO: 70620
  GFR-binding peptide
  MOD_RES (4), (5), (37), (39): Xaa is C or S

SEQ ID NO: 79558 - protein, 35 aa, Artificial Sequence; identical to SEQ ID NO: 6542
  GFR-binding peptide
  MOD_RES (1), (32), (34): Xaa is C or S

SEQ ID NO: 79559 - protein, 37 aa, Artificial Sequence; identical to SEQ ID NO: 6543
  GFR-binding peptide
  MOD_RES (4), (5), (36): Xaa is C or S

SEQ ID NO: 79560 - protein, 35 aa, Artificial Sequence; identical to SEQ ID NO: 6544
  GFR-binding peptide
  MOD_RES (1), (2), (33), (35): Xaa is C or S

SEQ ID NO: 79561 - protein, 42 aa, Artificial Sequence; identical to SEQ ID NO: 29618
  GFR-binding peptide
  MOD_RES (4), (5), (39), (41): Xaa is C or S
  MOD_RES (19), (20), (21), (22), (23): Xaa is A or G
  MOD_RES (24), (25), (26), (27): Xaa is A or G or is absent

SEQ ID NO: 79562 - protein, 38 aa, Artificial Sequence; identical to SEQ ID NO: 6545
  GFR-binding peptide
  MOD_RES (1), (2), (36), (38): Xaa is C or S
  MOD_RES (16), (17), (18), (19), (20): Xaa is A or G
  MOD_RES (21), (22), (23), (24): Xaa is A or G or is absent

SEQ ID NO: 79563 - protein, 34 aa, Artificial Sequence; identical to SEQ ID NO: 29620
  GFR-binding peptide
  MOD_RES (1), (1): Xaa is C or S
  MOD_RES (15), (16), (17), (18), (19): Xaa is A or G
  MOD_RES (20), (21), (22), (23): Xaa is A or G or is absent

SEQ ID NO: 79564 - protein, 33 aa, Artificial Sequence
  GFR-binding peptide
  MOD_RES (1), (2): Xaa is C or S
XXVPEKMSAISILYLDENKNVVLKNYQNMTVES

SEQ ID NO: 79565 - protein, 37 aa, Artificial Sequence; identical to SEQ ID NO: 8303
  GFR-binding peptide
  MOD_RES (2), (3), (36): Xaa is C or S
  MOD_RES (17), (18), (19), (20), (21): Xaa is A or G
  MOD_RES (22), (23), (24), (25): Xaa is A or G or is absent

SEQ ID NO: 79566 - protein, 37 aa, Artificial Sequence; identical to SEQ ID NO: 6546
  GFR-binding peptide
  MOD_RES (4), (5): Xaa is C or S
  MOD_RES (19), (20), (21), (22), (23): Xaa is A or G
  MOD_RES (24), (25), (26), (27): Xaa is A or G or is absent

SEQ ID NO: 79567 - protein, 36 aa, Artificial Sequence; identical to SEQ ID NO: 6547
  GFR-binding peptide
  MOD_RES (1), (35): Xaa is C or S
  MOD_RES (15), (16), (17), (18), (19): Xaa is A or G
  MOD_RES (20), (21), (22), (23): Xaa is A or G or is absent

SEQ ID NO: 79568 - protein, 38 aa, Artificial Sequence; identical to SEQ ID NO: 57633
  GFR-binding peptide
  MOD_RES (5), (6), (38): Xaa is C or S

SEQ ID NO: 79569 - protein, 31 aa, Artificial Sequence; identical to SEQ ID NO: 8305
  GFR-binding peptide

SEQ ID NO: 79570 - protein, 35 aa, Artificial Sequence; identical to SEQ ID NO: 13917
  GFR-binding peptide
  MOD_RES (1), (35): Xaa is C or S
  MOD_RES (15), (16), (17), (18), (19): Xaa is A or G
  MOD_RES (20), (21), (22), (23): Xaa is A or G or is absent

SEQ ID NO: 79571 - protein, 35 aa, Artificial Sequence; identical to SEQ ID NO: 8308
  GFR-binding peptide
  MOD_RES (1), (34): Xaa is C or S
  MOD_RES (15), (16), (17), (18), (19): Xaa is A or G
  MOD_RES (20), (21), (22), (23): Xaa is A or G or is absent

SEQ ID NO: 79572 - protein, 33 aa, Artificial Sequence; identical to SEQ ID NO: 6550
  GFR-binding peptide
  MOD_RES (33), (33): Xaa is C or S
  MOD_RES (14), (15), (16), (17), (18): Xaa is A or G
  MOD_RES (19), (20), (21), (22): Xaa is A or G or is absent

SEQ ID NO: 79573 - protein, 39 aa, Artificial Sequence; identical to SEQ ID NO: 27710
  GFR-binding peptide
  MOD_RES (6), (7): Xaa is C or S
  MOD_RES (21), (22), (23), (24), (25): Xaa is A or G
  MOD_RES (26), (27), (28), (29): Xaa is A or G or is absent

SEQ ID NO: 79574 - protein, 34 aa, Artificial Sequence; identical to SEQ ID NO: 6551
  GFR-binding peptide
  MOD_RES (4), (4): Xaa is C or S

SEQ ID NO: 79575 - protein, 37 aa, Artificial Sequence; identical to SEQ ID NO: 8309
  GFR-binding peptide
  MOD_RES (2), (3), (37): Xaa is C or S
  MOD_RES (17), (18), (19), (20), (21): Xaa is A or G
  MOD_RES (22), (23), (24), (25): Xaa is A or G or is absent

SEQ ID NO: 79576 - protein, 38 aa, Artificial Sequence; identical to SEQ ID NO: 13925
  GFR-binding peptide
  MOD_RES (4), (5): Xaa is C or S
  MOD_RES (19), (20), (21), (22), (23): Xaa is A or G
  MOD_RES (24), (25), (26), (27): Xaa is A or G or is absent

SEQ ID NO: 79577 - protein, 38 aa, Artificial Sequence; identical to SEQ ID NO: 6556
  GFR-binding peptide
  MOD_RES (1), (35), (37): Xaa is C or S
  MOD_RES (15), (16), (17), (18), (19): Xaa is A or G
  MOD_RES (20), (21), (22), (23): Xaa is A or G or is absent

SEQ ID NO: 79578 - protein, 33 aa, Artificial Sequence; identical to SEQ ID NO: 8311
  GFR-binding peptide
  MOD_RES (3), (3): Xaa is C or S

SEQ ID NO: 79579 - protein, 33 aa, Artificial Sequence; identical to SEQ ID NO: 8312
  GFR-binding peptide
  MOD_RES (1), (2), (33): Xaa is C or S

SEQ ID NO: 79580 - protein, 37 aa, Artificial Sequence; identical to SEQ ID NO: 15617
  GFR-binding peptide
  MOD_RES (2), (3), (35), (37): Xaa is C or S

SEQ ID NO: 79581 - protein, 36 aa, Artificial Sequence; identical to SEQ ID NO: 6558
  GFR-binding peptide
  MOD_RES (1), (34), (36): Xaa is C or S
  MOD_RES (15), (16), (17), (18), (19): Xaa is A or G
  MOD_RES (20), (21), (22), (23): Xaa is A or G or is absent

SEQ ID NO: 79582 - protein, 41 aa, Artificial Sequence; identical to SEQ ID NO: 8315
  GFR-binding peptide
  MOD_RES (6), (7), (41): Xaa is C or S
  MOD_RES (21), (22), (23), (24), (25): Xaa is A or G
  MOD_RES (26), (27), (28), (29): Xaa is A or G or is absent

SEQ ID NO: 79583 - protein, 42 aa, Artificial Sequence; identical to SEQ ID NO: 57645
  GFR-binding peptide
  MOD_RES (4), (5), (39), (41): Xaa is C or S
  MOD_RES (19), (20), (21), (22), (23): Xaa is A or G
  MOD_RES (24), (25), (26), (27): Xaa is A or G or is absent

SEQ ID NO: 79584 - protein, 36 aa, Artificial Sequence; identical to SEQ ID NO: 8316
  GFR-binding peptide
  MOD_RES (3), (4), (36): Xaa is C or S

SEQ ID NO: 79585 - protein, 38 aa, Artificial Sequence; identical to SEQ ID NO: 15620
  GFR-binding peptide
  MOD_RES (1), (2), (36), (38): Xaa is C or S
  MOD_RES (16), (17), (18), (19), (20): Xaa is A or G
  MOD_RES (21), (22), (23), (24): Xaa is A or G or is absent

SEQ ID NO: 79586 - protein, 37 aa, Artificial Sequence; identical to SEQ ID NO: 57646
  GFR-binding peptide
  MOD_RES (1), (2), (36): Xaa is C or S
  MOD_RES (16), (17), (18), (19), (20): Xaa is A or G
  MOD_RES (21), (22), (23), (24): Xaa is A or G or is absent

SEQ ID NO: 79587 - protein, 36 aa, Artificial Sequence; identical to SEQ ID NO: 8317
  GFR-binding peptide
  MOD_RES (3), (4): Xaa is C or S
  MOD_RES (18), (19), (20), (21), (22): Xaa is A or G
  MOD_RES (23), (24), (25), (26): Xaa is A or G or is absent

SEQ ID NO: 79588 - protein, 34 aa, Artificial Sequence; identical to SEQ ID NO: 8320
  GFR-binding peptide
  MOD_RES (1), (32), (34): Xaa is C or S

SEQ ID NO: 79589 - protein, 36 aa, Artificial Sequence; identical to SEQ ID NO: 15624
  GFR-binding peptide
  MOD_RES (1), (33), (35): Xaa is C or S

SEQ ID NO: 79590 - protein, 35 aa, Artificial Sequence
  GFR-binding peptide
  MOD_RES (2), (3), (35): Xaa is C or S
SXXVPARLSAISILYLDAANNVVLKNYQDMVVEAX

SEQ ID NO: 79591 - protein, 34 aa, Artificial Sequence; identical to SEQ ID NO: 57651
  GFR-binding peptide
  MOD_RES (1), (1): Xaa is C or S
  MOD_RES (15), (16), (17), (18), (19): Xaa is A or G
  MOD_RES (20), (21), (22), (23): Xaa is A or G or is absent

SEQ ID NO: 79592 - protein, 32 aa, Artificial Sequence
  GFR-binding peptide
  MOD_RES (1), (2): Xaa is C or S
XXTPTKMSAISMLYLNDKQQIILKNYQGMVVD

SEQ ID NO: 79593 - protein, 40 aa, Artificial Sequence
  GFR-binding peptide
  MOD_RES (5), (6), (38), (40): Xaa is C or S
APASXXVPARLSAISILYLDAANNVVLKNYQDMVVEAXGX

SEQ ID NO: 79594 - protein, 33 aa, Artificial Sequence
  GFR-binding peptide
  MOD_RES (31), (33): Xaa is C or S
APVKTSAISMLYLDNGRVLLLKNYQMIVEEXGX

SEQ ID NO: 79595 - protein, 35 aa, Artificial Sequence; identical to SEQ ID NO: 6562
  GFR-binding peptide
  MOD_RES (4), (4): Xaa is C or S

SEQ ID NO: 79596 - protein, 38 aa, Artificial Sequence; identical to SEQ ID NO: 8326
  GFR-binding peptide
  MOD_RES (2), (3), (38): Xaa is C or S
  MOD_RES (17), (18), (19), (20), (21): Xaa is A or G
  MOD_RES (22), (23), (24), (25): Xaa is A or G or is absent

SEQ ID NO: 79597 - protein, 33 aa, Artificial Sequence
  GFR-binding peptide
  MOD_RES (2), (3): Xaa is C or S
TXXAPVKTSAISMLYLDNGRVLLLKNYQMIVEE

SEQ ID NO: 79598 - protein, 35 aa, Artificial Sequence
  GFR-binding peptide
  MOD_RES (34), (34): Xaa is C or S
  MOD_RES (14), (15), (16), (17), (18): Xaa is A or G
  MOD_RES (19), (20), (21), (22): Xaa is A or G or is absent
VPEKMSAISILYLXXXXXXXXXLKNYQNMTVESXA

SEQ ID NO: 79599 - protein, 43 aa, Artificial Sequence; identical to SEQ ID NO: 27735
  GFR-binding peptide
  MOD_RES (5), (6), (40), (42): Xaa is C or S
  MOD_RES (20), (21), (22), (23), (24): Xaa is A or G
  MOD_RES (25), (26), (27), (28): Xaa is A or G or is absent

SEQ ID NO: 79600 - protein, 36 aa, Artificial Sequence; identical to SEQ ID NO: 6572
  GFR-binding peptide
  MOD_RES (4), (5): Xaa is C or S

SEQ ID NO: 79601 - protein, 33 aa, Artificial Sequence; identical to SEQ ID NO: 15627
  GFR-binding peptide
  MOD_RES (1), (1): Xaa is C or S
  MOD_RES (15), (16), (17), (18), (19): Xaa is A or G
  MOD_RES (20), (21), (22), (23): Xaa is A or G or is absent

SEQ ID NO: 79602 - protein, 36 aa, Artificial Sequence; identical to SEQ ID NO: 8331
  GFR-binding peptide
  MOD_RES (1), (2), (34), (36): Xaa is C or S

SEQ ID NO: 79603 - protein, 37 aa, Artificial Sequence; identical to SEQ ID NO: 29652
  GFR-binding peptide
  MOD_RES (34), (36): Xaa is C or S
  MOD_RES (14), (15), (16), (17), (18): Xaa is A or G
  MOD_RES (19), (20), (21), (22): Xaa is A or G or is absent

SEQ ID NO: 79604 - protein, 37 aa, Artificial Sequence; identical to SEQ ID NO: 8333
  GFR-binding peptide
  MOD_RES (3), (4), (36): Xaa is C or S

SEQ ID NO: 79605 - protein, 43 aa, Artificial Sequence; identical to SEQ ID NO: 6573
  GFR-binding peptide
  MOD_RES (5), (6), (41), (43): Xaa is C or S
  MOD_RES (20), (21), (22), (23), (24): Xaa is A or G
  MOD_RES (25), (26), (27), (28): Xaa is A or G or is absent

SEQ ID NO: 79606 - protein, 41 aa, Artificial Sequence; identical to SEQ ID NO: 6574
  GFR-binding peptide
  MOD_RES (6), (7), (41): Xaa is C or S
  MOD_RES (21), (22), (23), (24), (25): Xaa is A or G
  MOD_RES (26), (27), (28), (29): Xaa is A or G or is absent

SEQ ID NO: 79607 - protein, 34 aa, Artificial Sequence; identical to SEQ ID NO: 6575
  GFR-binding peptide
  MOD_RES (31), (33): Xaa is C or S

SEQ ID NO: 79608 - protein, 38 aa, Artificial Sequence; identical to SEQ ID NO: 8337
  GFR-binding peptide
  MOD_RES (2), (3), (36), (38): Xaa is C or S

SEQ ID NO: 79609 - protein, 34 aa, Artificial Sequence
  GFR-binding peptide
  MOD_RES (1), (1): Xaa is C or S
  MOD_RES (15), (16), (17), (18), (19): Xaa is A or G
  MOD_RES (20), (21), (22), (23): Xaa is A or G or is absent
XVPARLSAISILYLXXXXXXXXXLKNYQDMVVEA

SEQ ID NO: 79610 - protein, 37 aa, Artificial Sequence; identical to SEQ ID NO: 8341
  GFR-binding peptide
  MOD_RES (3), (35), (37): Xaa is C or S

SEQ ID NO: 79611 - protein, 30 aa, Artificial Sequence; identical to SEQ ID NO: 6580
  GFR-binding peptide

SEQ ID NO: 79612 - protein, 36 aa, Artificial Sequence; identical to SEQ ID NO: 8342
  GFR-binding peptide
  MOD_RES (4), (5), (36): Xaa is C or S

SEQ ID NO: 79613 - protein, 34 aa, Artificial Sequence; identical to SEQ ID NO: 8343
  GFR-binding peptide
  MOD_RES (3), (4): Xaa is C or S

SEQ ID NO: 79614 - protein, 41 aa, Artificial Sequence
  GFR-binding peptide
  MOD_RES (4), (5), (39), (41): Xaa is C or S
  MOD_RES (19), (20), (21), (22), (23): Xaa is A or G
  MOD_RES (24), (25), (26), (27): Xaa is A or G or is absent
PEPXXVPEKMSAISILYLXXXXXXXXXLKNYQNMTVESXAX

SEQ ID NO: 79615 - protein, 38 aa, Artificial Sequence; identical to SEQ ID NO: 57669
  GFR-binding peptide
  MOD_RES (4), (5), (38): Xaa is C or S
  MOD_RES (19), (20), (21), (22), (23): Xaa is A or G
  MOD_RES (24), (25), (26), (27): Xaa is A or G or is absent

SEQ ID NO: 79616 - protein, 33 aa, Artificial Sequence; identical to SEQ ID NO: 8344
  GFR-binding peptide
  MOD_RES (31), (33): Xaa is C or S

SEQ ID NO: 79617 - protein, 33 aa, Artificial Sequence; identical to SEQ ID NO: 13953
  GFR-binding peptide
  MOD_RES (1), (2): Xaa is C or S

SEQ ID NO: 79618 - protein, 37 aa, Artificial Sequence; identical to SEQ ID NO: 8346
  GFR-binding peptide
  MOD_RES (3), (4), (36): Xaa is C or S

SEQ ID NO: 79619 - protein, 39 aa, Artificial Sequence; identical to SEQ ID NO: 8347
  GFR-binding peptide
  MOD_RES (5), (6), (39): Xaa is C or S
  MOD_RES (20), (21), (22), (23), (24): Xaa is A or G
  MOD_RES (25), (26), (27), (28): Xaa is A or G or is absent

SEQ ID NO: 79620 - protein, 37 aa, Artificial Sequence; identical to SEQ ID NO: 8348
  GFR-binding peptide
  MOD_RES (1), (35), (37): Xaa is C or S
  MOD_RES (15), (16), (17), (18), (19): Xaa is A or G
  MOD_RES (20), (21), (22), (23): Xaa is A or G or is absent

SEQ ID NO: 79621 - protein, 34 aa, Artificial Sequence; identical to SEQ ID NO: 57672
  GFR-binding peptide
  MOD_RES (1), (2): Xaa is C or S
  MOD_RES (16), (17), (18), (19), (20): Xaa is A or G
  MOD_RES (21), (22), (23), (24): Xaa is A or G or is absent

SEQ ID NO: 79622 - protein, 42 aa, Artificial Sequence; identical to SEQ ID NO: 8349
  GFR-binding peptide
  MOD_RES (5), (6), (40), (42): Xaa is C or S
  MOD_RES (20), (21), (22), (23), (24): Xaa is A or G
  MOD_RES (25), (26), (27), (28): Xaa is A or G or is absent

SEQ ID NO: 79623 - protein, 41 aa, Artificial Sequence; identical to SEQ ID NO: 29665
  GFR-binding peptide
  MOD_RES (5), (6), (40): Xaa is C or S
  MOD_RES (20), (21), (22), (23), (24): Xaa is A or G
  MOD_RES (25), (26), (27), (28): Xaa is A or G or is absent

SEQ ID NO: 79624 - protein, 34 aa, Artificial Sequence; identical to SEQ ID NO: 29666
  GFR-binding peptide
  MOD_RES (1), (2): Xaa is C or S
  MOD_RES (16), (17), (18), (19), (20): Xaa is A or G
  MOD_RES (21), (22), (23), (24): Xaa is A or G or is absent

SEQ ID NO: 79625 - protein, 34 aa, Artificial Sequence; identical to SEQ ID NO: 6585
  GFR-binding peptide
  MOD_RES (34), (34): Xaa is C or S
  MOD_RES (14), (15), (16), (17), (18): Xaa is A or G
  MOD_RES (19), (20), (21), (22): Xaa is A or G or is absent

SEQ ID NO: 79626 - protein, 38 aa, Artificial Sequence
  GFR-binding peptide
  MOD_RES (2), (3), (37): Xaa is C or S
  MOD_RES (17), (18), (19), (20), (21): Xaa is A or G
  MOD_RES (22), (23), (24), (25): Xaa is A or G or is absent
PXXTPTKMSAISMLYLXXXXXXXXXLKNYQGMVVDRXG

SEQ ID NO: 79627 - protein, 38 aa, Artificial Sequence; identical to SEQ ID NO: 8350
  GFR-binding peptide
  MOD_RES (2), (3), (35), (37): Xaa is C or S

SEQ ID NO: 79628 - protein, 36 aa, Artificial Sequence
  GFR-binding peptide
  MOD_RES (1), (2), (34), (36): Xaa is C or S
XXTPTKMSAISMLYLNDKQQIILKNYQGMVVDRXGX

SEQ ID NO: 79629 - protein, 34 aa, Artificial Sequence; identical to SEQ ID NO: 6589
  GFR-binding peptide
  MOD_RES (1), (1): Xaa is C or S
  MOD_RES (15), (16), (17), (18), (19): Xaa is A or G
  MOD_RES (20), (21), (22), (23): Xaa is A or G or is absent

SEQ ID NO: 79630 - protein, 34 aa, Artificial Sequence; identical to SEQ ID NO: 6590
  GFR-binding peptide
  MOD_RES (1), (34): Xaa is C or S

SEQ ID NO: 79631 - protein, 33 aa, Artificial Sequence
  GFR-binding peptide
  MOD_RES (14), (15), (16), (17), (18): Xaa is A or G
  MOD_RES (19), (20), (21), (22): Xaa is A or G or is absent
VPEKMSAISILYLXXXXXXXXXLKNYQNMTVES

SEQ ID NO: 79632 - protein, 39 aa, Artificial Sequence; identical to SEQ ID NO: 6593
  GFR-binding peptide
  MOD_RES (2), (3), (37), (39): Xaa is C or S
  MOD_RES (17), (18), (19), (20), (21): Xaa is A or G
  MOD_RES (22), (23), (24), (25): Xaa is A or G or is absent

SEQ ID NO: 79633 - protein, 36 aa, Artificial Sequence
  GFR-binding peptide
  MOD_RES (4), (5): Xaa is C or S
AGPXXTPTKMSAISMLYLNDKQQIILKNYQGMVVDR

SEQ ID NO: 79634 - protein, 34 aa, Artificial Sequence; identical to SEQ ID NO: 8354
  GFR-binding peptide
  MOD_RES (33), (33): Xaa is C or S

SEQ ID NO: 79635 - protein, 35 aa, Artificial Sequence
  GFR-binding peptide
  MOD_RES (34), (34): Xaa is C or S
  MOD_RES (14), (15), (16), (17), (18): Xaa is A or G
  MOD_RES (19), (20), (21), (22): Xaa is A or G or is absent
TPTKMSAISMLYLXXXXXXXXXLKNYQGMVVDRXG

SEQ ID NO: 79636 - protein, 35 aa, Artificial Sequence; identical to SEQ ID NO: 6594
  GFR-binding peptide
  MOD_RES (1), (2): Xaa is C or S
  MOD_RES (16), (17), (18), (19), (20): Xaa is A or G
  MOD_RES (21), (22), (23), (24): Xaa is A or G or is absent

SEQ ID NO: 79637 - protein, 32 aa, Artificial Sequence; identical to SEQ ID NO: 13962
  GFR-binding peptide
  MOD_RES (1), (1): Xaa is C or S

SEQ ID NO: 79638 - protein, 41 aa, Artificial Sequence; identical to SEQ ID NO: 8355
  GFR-binding peptide
  MOD_RES (5), (6), (38), (40): Xaa is C or S

SEQ ID NO: 79639 - protein, 38 aa, Artificial Sequence; identical to SEQ ID NO: 8357
  GFR-binding peptide
  MOD_RES (4), (5), (36), (38): Xaa is C or S

SEQ ID NO: 79640 - protein, 40 aa, Artificial Sequence
  GFR-binding peptide
  MOD_RES (4), (5), (37), (39): Xaa is C or S
PEPXXVPEKMSAISILYLDENKNVVLKNYQNMTVESXAXR

SEQ ID NO: 79641 - protein, 38 aa, Artificial Sequence; identical to SEQ ID NO: 57687
  GFR-binding peptide
  MOD_RES (5), (6), (37): Xaa is C or S

SEQ ID NO: 79642 - protein, 34 aa, Artificial Sequence; identical to SEQ ID NO: 57688
  GFR-binding peptide
  MOD_RES (1), (34): Xaa is C or S
  MOD_RES (15), (16), (17), (18), (19): Xaa is A or G
  MOD_RES (20), (21), (22), (23): Xaa is A or G or is absent

SEQ ID NO: 79643 - protein, 39 aa, Artificial Sequence; identical to SEQ ID NO: 8359
  GFR-binding peptide
  MOD_RES (4), (5), (38): Xaa is C or S
  MOD_RES (19), (20), (21), (22), (23): Xaa is A or G
  MOD_RES (24), (25), (26), (27): Xaa is A or G or is absent

SEQ ID NO: 79644 - protein, 38 aa, Artificial Sequence; identical to SEQ ID NO: 57689
  GFR-binding peptide
  MOD_RES (3), (4), (38): Xaa is C or S
  MOD_RES (18), (19), (20), (21), (22): Xaa is A or G
  MOD_RES (23), (24), (25), (26): Xaa is A or G or is absent

SEQ ID NO: 79645 - protein, 34 aa, Artificial Sequence; identical to SEQ ID NO: 29678
  GFR-binding peptide
  MOD_RES (3), (4): Xaa is C or S

SEQ ID NO: 79646 - protein, 38 aa, Artificial Sequence; identical to SEQ ID NO: 8361
  GFR-binding peptide
  MOD_RES (4), (5), (38): Xaa is C or S
  MOD_RES (19), (20), (21), (22), (23): Xaa is A or G
  MOD_RES (24), (25), (26), (27): Xaa is A or G or is absent

SEQ ID NO: 79647 - protein, 33 aa, Artificial Sequence; identical to SEQ ID NO: 29682
  GFR-binding peptide
  MOD_RES (1), (33): Xaa is C or S

SEQ ID NO: 79648 - protein, 36 aa, Artificial Sequence; identical to SEQ ID NO: 6602
  GFR-binding peptide
  MOD_RES (1), (2), (35): Xaa is C or S
  MOD_RES (16), (17), (18), (19), (20): Xaa is A or G
  MOD_RES (21), (22), (23), (24): Xaa is A or G or is absent

SEQ ID NO: 79649 - protein, 40 aa, Artificial Sequence; identical to SEQ ID NO: 15664
  GFR-binding peptide
  MOD_RES (3), (4), (38), (40): Xaa is C or S
  MOD_RES (18), (19), (20), (21), (22): Xaa is A or G
  MOD_RES (23), (24), (25), (26): Xaa is A or G or is absent

SEQ ID NO: 79650 - protein, 39 aa, Artificial Sequence; identical to SEQ ID NO: 57695
  GFR-binding peptide
  MOD_RES (6), (7), (39): Xaa is C or S

SEQ ID NO: 79651 - protein, 38 aa, Artificial Sequence; identical to SEQ ID NO: 8365
  GFR-binding peptide
  MOD_RES (4), (5), (36), (38): Xaa is C or S

SEQ ID NO: 79652 - protein, 35 aa, Artificial Sequence; identical to SEQ ID NO: 27762
  GFR-binding peptide
  MOD_RES (1), (33), (35): Xaa is C or S

SEQ ID NO: 79653 - protein, 35 aa, Artificial Sequence; identical to SEQ ID NO: 8368
  GFR-binding peptide
  MOD_RES (2), (3): Xaa is C or S
  MOD_RES (17), (18), (19), (20), (21): Xaa is A or G
  MOD_RES (22), (23), (24), (25): Xaa is A or G or is absent

SEQ ID NO: 79654 - protein, 31 aa, Artificial Sequence
  GFR-binding peptide
TPTKMSAISMLYLNDKQQIILKNYQGMVVDR

SEQ ID NO: 79655 - protein, 41 aa, Artificial Sequence; identical to SEQ ID NO: 13973
  GFR-binding peptide
  MOD_RES (6), (7), (41): Xaa is C or S
  MOD_RES (21), (22), (23), (24), (25): Xaa is A or G
  MOD_RES (26), (27), (28), (29): Xaa is A or G or is absent

SEQ ID NO: 79656 - protein, 36 aa, Artificial Sequence; identical to SEQ ID NO: 6608
  GFR-binding peptide
  MOD_RES (2), (3), (35): Xaa is C or S

SEQ ID NO: 79657 - protein, 36 aa, Artificial Sequence; identical to SEQ ID NO: 29693
  GFR-binding peptide
  MOD_RES (1), (2), (36): Xaa is C or S
  MOD_RES (16), (17), (18), (19), (20): Xaa is A or G
  MOD_RES (21), (22), (23), (24): Xaa is A or G or is absent

SEQ ID NO: 79658 - protein, 30 aa, Artificial Sequence; identical to SEQ ID NO: 6610
  GFR-binding peptide

SEQ ID NO: 79659 - protein, 33 aa, Artificial Sequence; identical to SEQ ID NO: 6611
  GFR-binding peptide
  MOD_RES (1), (2): Xaa is C or S

SEQ ID NO: 79660 - protein, 38 aa, Artificial Sequence; identical to SEQ ID NO: 67260
  GFR-binding peptide
  MOD_RES (4), (5), (37): Xaa is C or S

SEQ ID NO: 79661 - protein, 34 aa, Artificial Sequence; identical to SEQ ID NO: 8374
  GFR-binding peptide
  MOD_RES (1), (1): Xaa is C or S
  MOD_RES (15), (16), (17), (18), (19): Xaa is A or G
  MOD_RES (20), (21), (22), (23): Xaa is A or G or is absent

SEQ ID NO: 79662 - protein, 36 aa, Artificial Sequence
  GFR-binding peptide
  MOD_RES (1), (35): Xaa is C or S
  MOD_RES (15), (16), (17), (18), (19): Xaa is A or G
  MOD_RES (20), (21), (22), (23): Xaa is A or G or is absent
XVPTKLSAISILYLXXXXXXXXXLKNYQGMAVSEXG

SEQ ID NO: 79663 - protein, 39 aa, Artificial Sequence; identical to SEQ ID NO: 8375
  GFR-binding peptide
  MOD_RES (2), (3), (38): Xaa is C or S
  MOD_RES (17), (18), (19), (20), (21): Xaa is A or G
  MOD_RES (22), (23), (24), (25): Xaa is A or G or is absent

SEQ ID NO: 79664 - protein, 36 aa, Artificial Sequence
  GFR-binding peptide
  MOD_RES (4), (5): Xaa is C or S
SKAXXVPTKLSAISILYLDKGVVTYLKNYQGMAVSE

SEQ ID NO: 79665 - protein, 32 aa, Artificial Sequence; identical to SEQ ID NO: 13978
  GFR-binding peptide
  MOD_RES (14), (15), (16), (17), (18): Xaa is A or G
  MOD_RES (19), (20), (21), (22): Xaa is A or G or is absent

SEQ ID NO: 79666 - protein, 31 aa, Artificial Sequence; identical to SEQ ID NO: 8378
  GFR-binding peptide

SEQ ID NO: 79667 - protein, 35 aa, Artificial Sequence; identical to SEQ ID NO: 8379
  GFR-binding peptide
  MOD_RES (2), (3): Xaa is C or S
  MOD_RES (17), (18), (19), (20), (21): Xaa is A or G
  MOD_RES (22), (23), (24), (25): Xaa is A or G or is absent

SEQ ID NO: 79668 - protein, 31 aa, Artificial Sequence; identical to SEQ ID NO: 6613
  GFR-binding peptide
  MOD_RES (1), (1): Xaa is C or S

SEQ ID NO: 79669 - protein, 35 aa, Artificial Sequence; identical to SEQ ID NO: 6615
  GFR-binding peptide
  MOD_RES (2), (3), (35): Xaa is C or S

SEQ ID NO: 79670 - protein, 36 aa, Artificial Sequence
  GFR-binding peptide
  MOD_RES (3), (4), (36): Xaa is C or S
GPXXTPTKMSAISMLYLNDKQQIILKNYQGMVVDRX

SEQ ID NO: 79671 - protein, 40 aa, Artificial Sequence; identical to SEQ ID NO: 8382
  GFR-binding peptide
  MOD_RES (5), (6), (38), (40): Xaa is C or S

SEQ ID NO: 79672 - protein, 31 aa, Artificial Sequence; identical to SEQ ID NO: 6616
  GFR-binding peptide
  MOD_RES (31), (31): Xaa is C or S

SEQ ID NO: 79673 - protein, 38 aa, Artificial Sequence; identical to SEQ ID NO: 8383
  GFR-binding peptide
  MOD_RES (5), (6): Xaa is C or S
  MOD_RES (20), (21), (22), (23), (24): Xaa is A or G
  MOD_RES (25), (26), (27), (28): Xaa is A or G or is absent

SEQ ID NO: 79674 - protein, 36 aa, Artificial Sequence; identical to SEQ ID NO: 57717
  GFR-binding peptide
  MOD_RES (2), (3), (34), (36): Xaa is C or S

SEQ ID NO: 79675 - protein, 39 aa, Artificial Sequence; identical to SEQ ID NO: 6617
  GFR-binding peptide
  MOD_RES (5), (6), (39): Xaa is C or S
  MOD_RES (20), (21), (22), (23), (24): Xaa is A or G
  MOD_RES (25), (26), (27), (28): Xaa is A or G or is absent

SEQ ID NO: 79676 - protein, 38 aa, Artificial Sequence; identical to SEQ ID NO: 67273
  GFR-binding peptide
  MOD_RES (4), (5): Xaa is C or S
  MOD_RES (19), (20), (21), (22), (23): Xaa is A or G
  MOD_RES (24), (25), (26), (27): Xaa is A or G or is absent

SEQ ID NO: 79677 - protein, 38 aa, Artificial Sequence; identical to SEQ ID NO: 57720
  GFR-binding peptide
  MOD_RES (3), (4), (37): Xaa is C or S
  MOD_RES (18), (19), (20), (21), (22): Xaa is A or G
  MOD_RES (23), (24), (25), (26): Xaa is A or G or is absent

SEQ ID NO: 79678 - protein, 38 aa, Artificial Sequence
  GFR-binding peptide
  MOD_RES (1), (35), (37): Xaa is C or S
  MOD_RES (15), (16), (17), (18), (19): Xaa is A or G
  MOD_RES (20), (21), (22), (23): Xaa is A or G or is absent
XVPARLSAISILYLXXXXXXXXXLKNYQDMVVEAXGXR

SEQ ID NO: 79679 - protein, 39 aa, Artificial Sequence; identical to SEQ ID NO: 57721
  GFR-binding peptide
  MOD_RES (1), (2), (36), (38): Xaa is C or S
  MOD_RES (16), (17), (18), (19), (20): Xaa is A or G
  MOD_RES (21), (22), (23), (24): Xaa is A or G or is absent

SEQ ID NO: 79680 - protein, 40 aa, Artificial Sequence; identical to SEQ ID NO: 57722
  GFR-binding peptide
  MOD_RES (3), (4), (38), (40): Xaa is C or S
  MOD_RES (18), (19), (20), (21), (22): Xaa is A or G
  MOD_RES (23), (24), (25), (26): Xaa is A or G or is absent

SEQ ID NO: 79681 - protein, 38 aa, Artificial Sequence; identical to SEQ ID NO: 70711
  GFR-binding peptide
  MOD_RES (5), (6): Xaa is C or S
  MOD_RES (20), (21), (22), (23), (24): Xaa is A or G
  MOD_RES (25), (26), (27), (28): Xaa is A or G or is absent

SEQ ID NO: 79682 - protein, 38 aa, Artificial Sequence
  GFR-binding peptide
  MOD_RES (3), (4), (38): Xaa is C or S
  MOD_RES (18), (19), (20), (21), (22): Xaa is A or G
  MOD_RES (23), (24), (25), (26): Xaa is A or G or is absent
ASXXVPARLSAISILYLXXXXXXXXXLKNYQDMVVEAX

SEQ ID NO: 79683 - protein, 33 aa, Artificial Sequence; identical to SEQ ID NO: 8390
  GFR-binding peptide
  MOD_RES (33), (33): Xaa is C or S
  MOD_RES (14), (15), (16), (17), (18): Xaa is A or G
  MOD_RES (19), (20), (21), (22): Xaa is A or G or is absent

SEQ ID NO: 79684 - protein, 41 aa, Artificial Sequence; identical to SEQ ID NO: 6621
  GFR-binding peptide
  MOD_RES (4), (5), (38), (40): Xaa is C or S
  MOD_RES (19), (20), (21), (22), (23): Xaa is A or G
  MOD_RES (24), (25), (26), (27): Xaa is A or G or is absent

SEQ ID NO: 79685 - protein, 32 aa, Artificial Sequence
  GFR-binding peptide
  MOD_RES (32), (32): Xaa is C or S
TPTKMSAISMLYLNDKQQIILKNYQGMVVDRX

SEQ ID NO: 79686 - protein, 39 aa, Artificial Sequence; identical to SEQ ID NO: 6623
  GFR-binding peptide
  MOD_RES (6), (7): Xaa is C or S
  MOD_RES (21), (22), (23), (24), (25): Xaa is A or G
  MOD_RES (26), (27), (28), (29): Xaa is A or G or is absent

SEQ ID NO: 79687 - protein, 36 aa, Artificial Sequence; identical to SEQ ID NO: 6624
  GFR-binding peptide
  MOD_RES (33), (35): Xaa is C or S

SEQ ID NO: 79688 - protein, 36 aa, Artificial Sequence; identical to SEQ ID NO: 15689
  GFR-binding peptide
  MOD_RES (1), (2), (36): Xaa is C or S
  MOD_RES (16), (17), (18), (19), (20): Xaa is A or G
  MOD_RES (21), (22), (23), (24): Xaa is A or G or is absent

SEQ ID NO: 79689 - protein, 39 aa, Artificial Sequence
  GFR-binding peptide
  MOD_RES (3), (4), (38): Xaa is C or S
  MOD_RES (18), (19), (20), (21), (22): Xaa is A or G
  MOD_RES (23), (24), (25), (26): Xaa is A or G or is absent
GPXXTPTKMSAISMLYLXXXXXXXXXLKNYQGMVVDRXG

SEQ ID NO: 79690 - protein, 39 aa, Artificial Sequence
  GFR-binding peptide
  MOD_RES (6), (7): Xaa is C or S
  MOD_RES (21), (22), (23), (24), (25): Xaa is A or G
  MOD_RES (26), (27), (28), (29): Xaa is A or G or is absent
GIPEPXXVPEKMSAISILYLXXXXXXXXXLKNYQNMTVE

SEQ ID NO: 79691 - protein, 37 aa, Artificial Sequence; identical to SEQ ID NO: 6625
  GFR-binding peptide
  MOD_RES (2), (3), (36): Xaa is C or S

SEQ ID NO: 79692 - protein, 35 aa, Artificial Sequence; identical to SEQ ID NO: 15691
  GFR-binding peptide
  MOD_RES (1), (2), (34): Xaa is C or S

SEQ ID NO: 79693 - protein, 32 aa, Artificial Sequence
  GFR-binding peptide
  MOD_RES (1), (1): Xaa is C or S
XVPARLSAISILYLDAANNVVLKNYQDMVVEA

SEQ ID NO: 79694 - protein, 36 aa, Artificial Sequence; identical to SEQ ID NO: 8397
  GFR-binding peptide
  MOD_RES (3), (4), (35): Xaa is C or S

SEQ ID NO: 79695 - protein, 39 aa, Artificial Sequence
  GFR-binding peptide
  MOD_RES (3), (4), (36), (38): Xaa is C or S
EPXXVPEKMSAISILYLDENKNVVLKNYQNMTVESXAXR

SEQ ID NO: 79696 - protein, 32 aa, Artificial Sequence; identical to SEQ ID NO: 8400
  GFR-binding peptide
  MOD_RES (1), (32): Xaa is C or S

SEQ ID NO: 79697 - protein, 34 aa, Artificial Sequence
  GFR-binding peptide
  MOD_RES (1), (1): Xaa is C or S
  MOD_RES (15), (16), (17), (18), (19): Xaa is A or G
  MOD_RES (20), (21), (22), (23): Xaa is A or G or is absent
XTPTKMSAISMLYLXXXXXXXXXLKNYQGMVVDR

SEQ ID NO: 79698 - protein, 38 aa, Artificial Sequence; identical to SEQ ID NO: 57730
  GFR-binding peptide
  MOD_RES (6), (7), (38): Xaa is C or S

SEQ ID NO: 79699 - protein, 36 aa, Artificial Sequence; identical to SEQ ID NO: 8401
  GFR-binding peptide
  MOD_RES (1), (2), (35): Xaa is C or S
  MOD_RES (16), (17), (18), (19), (20): Xaa is A or G
  MOD_RES (21), (22), (23), (24): Xaa is A or G or is absent

SEQ ID NO: 79700 - protein, 38 aa, Artificial Sequence
  GFR-binding peptide
  MOD_RES (4), (5), (38): Xaa is C or S
  MOD_RES (19), (20), (21), (22), (23): Xaa is A or G
  MOD_RES (24), (25), (26), (27): Xaa is A or G or is absent
PSTXXAPVKTSAISMLYLXXXXXXXXXLKNYQMIVEEX

SEQ ID NO: 79701 - protein, 37 aa, Artificial Sequence
  GFR-binding peptide
  MOD_RES (3), (4): Xaa is C or S
  MOD_RES (18), (19), (20), (21), (22): Xaa is A or G
  MOD_RES (23), (24), (25), (26): Xaa is A or G or is absent
EPXXVPEKMSAISILYLXXXXXXXXXLKNYQNMTVES

SEQ ID NO: 79702 - protein, 36 aa, Artificial Sequence
  GFR-binding peptide
  MOD_RES (3), (4), (36): Xaa is C or S
ASXXVPARLSAISILYLDAANNVVLKNYQDMVVEAX

SEQ ID NO: 79703 - protein, 37 aa, Artificial Sequence; identical to SEQ ID NO: 15702
  GFR-binding peptide
  MOD_RES (1), (35), (37): Xaa is C or S
  MOD_RES (15), (16), (17), (18), (19): Xaa is A or G
  MOD_RES (20), (21), (22), (23): Xaa is A or G or is absent

SEQ ID NO: 79704 - protein, 35 aa, Artificial Sequence; identical to SEQ ID NO: 57738
  GFR-binding peptide
  MOD_RES (4), (5): Xaa is C or S

SEQ ID NO: 79705 - protein, 40 aa, Artificial Sequence; identical to SEQ ID NO: 14001
  GFR-binding peptide
  MOD_RES (4), (5), (39): Xaa is C or S
  MOD_RES (19), (20), (21), (22), (23): Xaa is A or G
  MOD_RES (24), (25), (26), (27): Xaa is A or G or is absent

SEQ ID NO: 79706 - protein, 39 aa, Artificial Sequence; identical to SEQ ID NO: 65656
  GFR-binding peptide
  MOD_RES (1), (2), (36), (38): Xaa is C or S
  MOD_RES (16), (17), (18), (19), (20): Xaa is A or G
  MOD_RES (21), (22), (23), (24): Xaa is A or G or is absent

SEQ ID NO: 79707 - protein, 37 aa, Artificial Sequence; identical to SEQ ID NO: 6632
  GFR-binding peptide
  MOD_RES (2), (3), (37): Xaa is C or S
  MOD_RES (17), (18), (19), (20), (21): Xaa is A or G
  MOD_RES (22), (23), (24), (25): Xaa is A or G or is absent

SEQ ID NO: 79708 - protein, 33 aa, Artificial Sequence; identical to SEQ ID NO: 57746
  GFR-binding peptide
  MOD_RES (1), (32): Xaa is C or S

SEQ ID NO: 79709 - protein, 36 aa, Artificial Sequence; identical to SEQ ID NO: 8408
  GFR-binding peptide
  MOD_RES (2), (3), (36): Xaa is C or S
  MOD_RES (17), (18), (19), (20), (21): Xaa is A or G
  MOD_RES (22), (23), (24), (25): Xaa is A or G or is absent

SEQ ID NO: 79710 - protein, 40 aa, Artificial Sequence; identical to SEQ ID NO: 6635
  GFR-binding peptide
  MOD_RES (6), (7), (40): Xaa is C or S
  MOD_RES (21), (22), (23), (24), (25): Xaa is A or G
  MOD_RES (26), (27), (28), (29): Xaa is A or G or is absent

SEQ ID NO: 79711 - protein, 32 aa, Artificial Sequence; identical to SEQ ID NO: 6637
  GFR-binding peptide
  MOD_RES (14), (15), (16), (17), (18): Xaa is A or G
  MOD_RES (19), (20), (21), (22): Xaa is A or G or is absent

SEQ ID NO: 79712 - protein, 39 aa, Artificial Sequence; identical to SEQ ID NO: 8410
  GFR-binding peptide
  MOD_RES (6), (7), (39): Xaa is C or S

SEQ ID NO: 79713 - protein, 33 aa, Artificial Sequence; identical to SEQ ID NO: 27803
  GFR-binding peptide
  MOD_RES (14), (15), (16), (17), (18): Xaa is A or G
  MOD_RES (19), (20), (21), (22): Xaa is A or G or is absent

SEQ ID NO: 79714 - protein, 34 aa, Artificial Sequence; identical to SEQ ID NO: 8411
  GFR-binding peptide
  MOD_RES (1), (2), (33): Xaa is C or S

SEQ ID NO: 79715 - protein, 37 aa, Artificial Sequence; identical to SEQ ID NO: 8412
  GFR-binding peptide
  MOD_RES (1), (2), (36): Xaa is C or S
  MOD_RES (16), (17), (18), (19), (20): Xaa is A or G
  MOD_RES (21), (22), (23), (24): Xaa is A or G or is absent

SEQ ID NO: 79716 - protein, 38 aa, Artificial Sequence; identical to SEQ ID NO: 8413
  GFR-binding peptide
  MOD_RES (5), (6), (38): Xaa is C or S

SEQ ID NO: 79717 - protein, 33 aa, Artificial Sequence
  GFR-binding peptide
  MOD_RES (14), (15), (16), (17), (18): Xaa is A or G
  MOD_RES (19), (20), (21), (22): Xaa is A or G or is absent
VPTKLSAISILYLXXXXXXXXXLKNYQGMAVSE

SEQ ID NO: 79718 - protein, 40 aa, Artificial Sequence; identical to SEQ ID NO: 57756
  GFR-binding peptide
  MOD_RES (4), (5), (38), (40): Xaa is C or S
  MOD_RES (19), (20), (21), (22), (23): Xaa is A or G
  MOD_RES (24), (25), (26), (27): Xaa is A or G or is absent

SEQ ID NO: 79719 - protein, 37 aa, Artificial Sequence; identical to SEQ ID NO: 6645
  GFR-binding peptide
  MOD_RES (3), (4), (37): Xaa is C or S
  MOD_RES (18), (19), (20), (21), (22): Xaa is A or G
  MOD_RES (23), (24), (25), (26): Xaa is A or G or is absent

SEQ ID NO: 79720 - protein, 36 aa, Artificial Sequence; identical to SEQ ID NO: 8417
  GFR-binding peptide
  MOD_RES (1), (2), (36): Xaa is C or S
  MOD_RES (16), (17), (18), (19), (20): Xaa is A or G
  MOD_RES (21), (22), (23), (24): Xaa is A or G or is absent

SEQ ID NO: 79721 - protein, 39 aa, Artificial Sequence; identical to SEQ ID NO: 8418
  GFR-binding peptide
  MOD_RES (3), (4), (36), (38): Xaa is C or S

SEQ ID NO: 79722 - protein, 35 aa, Artificial Sequence; identical to SEQ ID NO: 8419
  GFR-binding peptide
  MOD_RES (1), (2), (33), (35): Xaa is C or S

SEQ ID NO: 79723 - protein, 35 aa, Artificial Sequence
  GFR-binding peptide
  MOD_RES (1), (33), (35): Xaa is C or S
XVPTKLSAISILYLDKGVVTYLKNYQGMAVSEXGX

SEQ ID NO: 79724 - protein, 35 aa, Artificial Sequence
  GFR-binding peptide
  MOD_RES (4), (5): Xaa is C or S
PEPXXVPEKMSAISILYLDENKNVVLKNYQNMTVE

SEQ ID NO: 79725 - protein, 38 aa, Artificial Sequence; identical to SEQ ID NO: 8420
  GFR-binding peptide
  MOD_RES (3), (4), (35), (37): Xaa is C or S

SEQ ID NO: 79726 - protein, 34 aa, Artificial Sequence; identical to SEQ ID NO: 8421
  GFR-binding peptide
  MOD_RES (1), (2), (34): Xaa is C or S

SEQ ID NO: 79727 - protein, 31 aa, Artificial Sequence; identical to SEQ ID NO: 57770
  GFR-binding peptide
  MOD_RES (1), (1): Xaa is C or S

SEQ ID NO: 79728 - protein, 41 aa, Artificial Sequence; identical to SEQ ID NO: 6649
  GFR-binding peptide
  MOD_RES (4), (5), (39), (41): Xaa is C or S
  MOD_RES (19), (20), (21), (22), (23): Xaa is A or G
  MOD_RES (24), (25), (26), (27): Xaa is A or G or is absent

SEQ ID NO: 79729 - protein, 38 aa, Artificial Sequence; identical to SEQ ID NO: 8425
  GFR-binding peptide
  MOD_RES (1), (2), (37): Xaa is C or S
  MOD_RES (16), (17), (18), (19), (20): Xaa is A or G
  MOD_RES (21), (22), (23), (24): Xaa is A or G or is absent

SEQ ID NO: 79730 - protein, 35 aa, Artificial Sequence; identical to SEQ ID NO: 29739
  GFR-binding peptide
  MOD_RES (32), (34): Xaa is C or S

SEQ ID NO: 79731 - protein, 32 aa, Artificial Sequence; identical to SEQ ID NO: 29740
  GFR-binding peptide
  MOD_RES (1), (2): Xaa is C or S

SEQ ID NO: 79732 - protein, 44 aa, Artificial Sequence; identical to SEQ ID NO: 8426
  GFR-binding peptide
  MOD_RES (7), (41), (43): Xaa is C or S
  MOD_RES (21), (22), (23), (24), (25): Xaa is A or G
  MOD_RES (26), (27), (28), (29): Xaa is A or G or is absent

SEQ ID NO: 79733 - protein, 35 aa, Artificial Sequence; identical to SEQ ID NO: 6652
  GFR-binding peptide
  MOD_RES (2), (3): Xaa is C or S
  MOD_RES (17), (18), (19), (20), (21): Xaa is A or G
  MOD_RES (22), (23), (24), (25): Xaa is A or G or is absent

SEQ ID NO: 79734 - protein, 36 aa, Artificial Sequence; identical to SEQ ID NO: 8428
  GFR-binding peptide
  MOD_RES (1), (2), (34), (36): Xaa is C or S

SEQ ID NO: 79735 - protein, 37 aa, Artificial Sequence; identical to SEQ ID NO: 6654
  GFR-binding peptide
  MOD_RES (3), (4), (35), (37): Xaa is C or S

SEQ ID NO: 79736 - protein, 36 aa, Artificial Sequence; identical to SEQ ID NO: 6655
  GFR-binding peptide
  MOD_RES (4), (5): Xaa is C or S

SEQ ID NO: 79737 - protein, 41 aa, Artificial Sequence; identical to SEQ ID NO: 8429
  GFR-binding peptide
  MOD_RES (4), (5), (39), (41): Xaa is C or S
  MOD_RES (19), (20), (21), (22), (23): Xaa is A or G
  MOD_RES (24), (25), (26), (27): Xaa is A or G or is absent

SEQ ID NO: 79738 - protein, 32 aa, Artificial Sequence; identical to SEQ ID NO: 6657
  GFR-binding peptide
  MOD_RES (1), (2): Xaa is C or S

SEQ ID NO: 79739 - protein, 37 aa, Artificial Sequence; identical to SEQ ID NO: 29744
  GFR-binding peptide
  MOD_RES (6), (7): Xaa is C or S

SEQ ID NO: 79740 - protein, 37 aa, Artificial Sequence; identical to SEQ ID NO: 8432
  GFR-binding peptide
  MOD_RES (5), (6), (37): Xaa is C or S

SEQ ID NO: 79741 - protein, 43 aa, Artificial Sequence; identical to SEQ ID NO: 6658
  GFR-binding peptide
  MOD_RES (5), (6), (40), (42): Xaa is C or S
  MOD_RES (20), (21), (22), (23), (24): Xaa is A or G
  MOD_RES (25), (26), (27), (28): Xaa is A or G or is absent

SEQ ID NO: 79742 - protein, 33 aa, Artificial Sequence; identical to SEQ ID NO: 8433
  GFR-binding peptide
  MOD_RES (1), (1): Xaa is C or S
  MOD_RES (15), (16), (17), (18), (19): Xaa is A or G
  MOD_RES (20), (21), (22), (23): Xaa is A or G or is absent

SEQ ID NO: 79743 - protein, 37 aa, Artificial Sequence; identical to SEQ ID NO: 29748
  GFR-binding peptide
  MOD_RES (2), (3), (35), (37): Xaa is C or S

SEQ ID NO: 79744 - protein, 41 aa, Artificial Sequence; identical to SEQ ID NO: 8436
  GFR-binding peptide
  MOD_RES (3), (4), (38), (40): Xaa is C or S
  MOD_RES (18), (19), (20), (21), (22): Xaa is A or G
  MOD_RES (23), (24), (25), (26): Xaa is A or G or is absent

SEQ ID NO: 79745 - protein, 35 aa, Artificial Sequence
  GFR-binding peptide
  MOD_RES (2), (3): Xaa is C or S
  MOD_RES (17), (18), (19), (20), (21): Xaa is A or G
  MOD_RES (22), (23), (24), (25): Xaa is A or G or is absent
TXXAPVKTSAISMLYLXXXXXXXXXLKNYQMIVEE

SEQ ID NO: 79746 - protein, 36 aa, Artificial Sequence; identical to SEQ ID NO: 29751
  GFR-binding peptide
  MOD_RES (1), (35): Xaa is C or S
  MOD_RES (15), (16), (17), (18), (19): Xaa is A or G
  MOD_RES (20), (21), (22), (23): Xaa is A or G or is absent

SEQ ID NO: 79747 - protein, 37 aa, Artificial Sequence; identical to SEQ ID NO: 8440
  GFR-binding peptide
  MOD_RES (5), (6): Xaa is C or S

SEQ ID NO: 79748 - protein, 37 aa, Artificial Sequence; identical to SEQ ID NO: 6664
  GFR-binding peptide
  MOD_RES (4), (5): Xaa is C or S

SEQ ID NO: 79749 - protein, 38 aa, Artificial Sequence; identical to SEQ ID NO: 8442
  GFR-binding peptide
  MOD_RES (1), (2), (35), (37): Xaa is C or S
  MOD_RES (16), (17), (18), (19), (20): Xaa is A or G
  MOD_RES (21), (22), (23), (24): Xaa is A or G or is absent

SEQ ID NO: 79750 - protein, 33 aa, Artificial Sequence; identical to SEQ ID NO: 29755
  GFR-binding peptide
  MOD_RES (1), (2): Xaa is C or S

SEQ ID NO: 79751 - protein, 32 aa, Artificial Sequence; identical to SEQ ID NO: 8444
  GFR-binding peptide
  MOD_RES (1), (2): Xaa is C or S

SEQ ID NO: 79752 - protein, 37 aa, Artificial Sequence
  GFR-binding peptide
  MOD_RES (5), (6), (37): Xaa is C or S
VPSTXXAPVKTSAISMLYLDNGRVLLLKNYQMIVEEX

SEQ ID NO: 79753 - protein, 40 aa, Artificial Sequence; identical to SEQ ID NO: 6669
  GFR-binding peptide
  MOD_RES (5), (6), (40): Xaa is C or S
  MOD_RES (20), (21), (22), (23), (24): Xaa is A or G
  MOD_RES (25), (26), (27), (28): Xaa is A or G or is absent

SEQ ID NO: 79754 - protein, 34 aa, Artificial Sequence; identical to SEQ ID NO: 8446
  GFR-binding peptide
  MOD_RES (1), (1): Xaa is C or S
  MOD_RES (15), (16), (17), (18), (19): Xaa is A or G
  MOD_RES (20), (21), (22), (23): Xaa is A or G or is absent

SEQ ID NO: 79755 - protein, 35 aa, Artificial Sequence; identical to SEQ ID NO: 6670
  GFR-binding peptide
  MOD_RES (3), (4): Xaa is C or S

SEQ ID NO: 79756 - protein, 40 aa, Artificial Sequence
  GFR-binding peptide
  MOD_RES (5), (6), (38), (40): Xaa is C or S
SAGPXXTPTKMSAISMLYLNDKQQIILKNYQGMVVDRXGX

SEQ ID NO: 79757 - protein, 38 aa, Artificial Sequence; identical to SEQ ID NO: 14032
  GFR-binding peptide
  MOD_RES (6), (7): Xaa is C or S

SEQ ID NO: 79758 - protein, 40 aa, Artificial Sequence
  GFR-binding peptide
  MOD_RES (5), (6), (38), (40): Xaa is C or S
IPEPXXVPEKMSAISILYLDENKNVVLKNYQNMTVESXAX

SEQ ID NO: 79759 - protein, 38 aa, Artificial Sequence; identical to SEQ ID NO: 15745
  GFR-binding peptide
  MOD_RES (3), (4), (38): Xaa is C or S
  MOD_RES (18), (19), (20), (21), (22): Xaa is A or G
  MOD_RES (23), (24), (25), (26): Xaa is A or G or is absent

SEQ ID NO: 79760 - protein, 36 aa, Artificial Sequence; identical to SEQ ID NO: 6671
  GFR-binding peptide
  MOD_RES (1), (35): Xaa is C or S
  MOD_RES (15), (16), (17), (18), (19): Xaa is A or G
  MOD_RES (20), (21), (22), (23): Xaa is A or G or is absent

SEQ ID NO: 79761 - protein, 33 aa, Artificial Sequence; identical to SEQ ID NO: 6672
  GFR-binding peptide
  MOD_RES (33), (33): Xaa is C or S
  MOD_RES (14), (15), (16), (17), (18): Xaa is A or G
  MOD_RES (19), (20), (21), (22): Xaa is A or G or is absent

SEQ ID NO: 79762 - protein, 34 aa, Artificial Sequence; identical to SEQ ID NO: 6674
  GFR-binding peptide
  MOD_RES (1), (1): Xaa is C or S
  MOD_RES (15), (16), (17), (18), (19): Xaa is A or G
  MOD_RES (20), (21), (22), (23): Xaa is A or G or is absent

SEQ ID NO: 79763 - protein, 40 aa, Artificial Sequence
  GFR-binding peptide
  MOD_RES (4), (5), (37), (39): Xaa is C or S
AGPXXTPTKMSAISMLYLNDKQQIILKNYQGMVVDRXGXS

SEQ ID NO: 79764 - protein, 39 aa, Artificial Sequence; identical to SEQ ID NO: 27841
  GFR-binding peptide
  MOD_RES (4), (5), (39): Xaa is C or S
  MOD_RES (19), (20), (21), (22), (23): Xaa is A or G
  MOD_RES (24), (25), (26), (27): Xaa is A or G or is absent

SEQ ID NO: 79765 - protein, 40 aa, Artificial Sequence; identical to SEQ ID NO: 15753
  GFR-binding peptide
  MOD_RES (5), (6), (40): Xaa is C or S
  MOD_RES (20), (21), (22), (23), (24): Xaa is A or G
  MOD_RES (25), (26), (27), (28): Xaa is A or G or is absent

SEQ ID NO: 79766 - protein, 36 aa, Artificial Sequence; identical to SEQ ID NO: 57806
  GFR-binding peptide
  MOD_RES (2), (3): Xaa is C or S
  MOD_RES (17), (18), (19), (20), (21): Xaa is A or G
  MOD_RES (22), (23), (24), (25): Xaa is A or G or is absent

SEQ ID NO: 79767 - protein, 38 aa, Artificial Sequence; identical to SEQ ID NO: 6677
  GFR-binding peptide
  MOD_RES (2), (3), (37): Xaa is C or S
  MOD_RES (17), (18), (19), (20), (21): Xaa is A or G
  MOD_RES (22), (23), (24), (25): Xaa is A or G or is absent

SEQ ID NO: 79768 - protein, 33 aa, Artificial Sequence; identical to SEQ ID NO: 6679
  GFR-binding peptide
  MOD_RES (1), (2): Xaa is C or S

SEQ ID NO: 79769 - protein, 39 aa, Artificial Sequence; identical to SEQ ID NO: 29767
  GFR-binding peptide
  MOD_RES (1), (2), (36), (38): Xaa is C or S
  MOD_RES (16), (17), (18), (19), (20): Xaa is A or G
  MOD_RES (21), (22), (23), (24): Xaa is A or G or is absent

SEQ ID NO: 79770 - protein, 38 aa, Artificial Sequence
  GFR-binding peptide
  MOD_RES (3), (4), (36), (38): Xaa is C or S
GPXXTPTKMSAISMLYLNDKQQIILKNYQGMVVDRXGX

SEQ ID NO: 79771 - protein, 39 aa, Artificial Sequence; identical to SEQ ID NO: 6689
  GFR-binding peptide
  MOD_RES (2), (3), (36), (38): Xaa is C or S
  MOD_RES (17), (18), (19), (20), (21): Xaa is A or G
  MOD_RES (22), (23), (24), (25): Xaa is A or G or is absent

SEQ ID NO: 79772 - protein, 40 aa, Artificial Sequence; identical to SEQ ID NO: 6690
  GFR-binding peptide
  MOD_RES (3), (4), (38), (40): Xaa is C or S
  MOD_RES (18), (19), (20), (21), (22): Xaa is A or G
  MOD_RES (23), (24), (25), (26): Xaa is A or G or is absent

SEQ ID NO: 79773 - protein, 39 aa, Artificial Sequence; identical to SEQ ID NO: 8457
  GFR-binding peptide
  MOD_RES (2), (3), (37), (39): Xaa is C or S
  MOD_RES (17), (18), (19), (20), (21): Xaa is A or G
  MOD_RES (22), (23), (24), (25): Xaa is A or G or is absent

SEQ ID NO: 79774 - protein, 40 aa, Artificial Sequence
  GFR-binding peptide
  MOD_RES (5), (6), (40): Xaa is C or S
  MOD_RES (20), (21), (22), (23), (24): Xaa is A or G
  MOD_RES (25), (26), (27), (28): Xaa is A or G or is absent
SAGPXXTPTKMSAISMLYLXXXXXXXXXLKNYQGMVVDRX

SEQ ID NO: 79775 - protein, 37 aa, Artificial Sequence; identical to SEQ ID NO: 8458
  GFR-binding peptide
  MOD_RES (6), (7): Xaa is C or S

SEQ ID NO: 79776 - protein, 37 aa, Artificial Sequence; identical to SEQ ID NO: 6693
  GFR-binding peptide
  MOD_RES (1), (2), (37): Xaa is C or S
  MOD_RES (16), (17), (18), (19), (20): Xaa is A or G
  MOD_RES (21), (22), (23), (24): Xaa is A or G or is absent

SEQ ID NO: 79777 - protein, 36 aa, Artificial Sequence
  GFR-binding peptide
  MOD_RES (1), (35): Xaa is C or S
  MOD_RES (15), (16), (17), (18), (19): Xaa is A or G
  MOD_RES (20), (21), (22), (23): Xaa is A or G or is absent
XTPTKMSAISMLYLXXXXXXXXXLKNYQGMVVDRXG

SEQ ID NO: 79778 - protein, 36 aa, Artificial Sequence; identical to SEQ ID NO: 14053
  GFR-binding peptide
  MOD_RES (2), (3), (35): Xaa is C or S

SEQ ID NO: 79779 - protein, 33 aa, Artificial Sequence; identical to SEQ ID NO: 8460
  GFR-binding peptide
  MOD_RES (2), (3): Xaa is C or S

SEQ ID NO: 79780 - protein, 42 aa, Artificial Sequence
  GFR-binding peptide
  MOD_RES (6), (7), (41): Xaa is C or S
  MOD_RES (21), (22), (23), (24), (25): Xaa is A or G
  MOD_RES (26), (27), (28), (29): Xaa is A or G or is absent
GIPEPXXVPEKMSAISILYLXXXXXXXXXLKNYQNMTVESXA

SEQ ID NO: 79781 - protein, 37 aa, Artificial Sequence; identical to SEQ ID NO: 8462
  GFR-binding peptide
  MOD_RES (2), (3), (35), (37): Xaa is C or S

SEQ ID NO: 79782 - protein, 36 aa, Artificial Sequence; identical to SEQ ID NO: 69108
  GFR-binding peptide
  MOD_RES (3), (4), (36): Xaa is C or S

SEQ ID NO: 79783 - protein, 36 aa, Artificial Sequence; identical to SEQ ID NO: 29781
  GFR-binding peptide
  MOD_RES (1), (33), (35): Xaa is C or S

SEQ ID NO: 79784 - protein, 38 aa, Artificial Sequence; identical to SEQ ID NO: 29782
  GFR-binding peptide
  MOD_RES (5), (6): Xaa is C or S
  MOD_RES (20), (21), (22), (23), (24): Xaa is A or G
  MOD_RES (25), (26), (27), (28): Xaa is A or G or is absent

SEQ ID NO: 79785 - protein, 34 aa, Artificial Sequence; identical to SEQ ID NO: 8464
  GFR-binding peptide
  MOD_RES (3), (4): Xaa is C or S

SEQ ID NO: 79786 - protein, 33 aa, Artificial Sequence; identical to SEQ ID NO: 6706
  GFR-binding peptide
  MOD_RES (31), (33): Xaa is C or S

SEQ ID NO: 79787 - protein, 40 aa, Artificial Sequence; identical to SEQ ID NO: 6708
  GFR-binding peptide
  MOD_RES (3), (4), (38), (40): Xaa is C or S
  MOD_RES (18), (19), (20), (21), (22): Xaa is A or G
  MOD_RES (23), (24), (25), (26): Xaa is A or G or is absent

SEQ ID NO: 79788 - protein, 43 aa, Artificial Sequence; identical to SEQ ID NO: 6711
  GFR-binding peptide
  MOD_RES (6), (7), (41), (43): Xaa is C or S
  MOD_RES (21), (22), (23), (24), (25): Xaa is A or G
  MOD_RES (26), (27), (28), (29): Xaa is A or G or is absent

SEQ ID NO: 79789 - protein, 33 aa, Artificial Sequence; identical to SEQ ID NO: 8473
  GFR-binding peptide
  MOD_RES (31), (33): Xaa is C or S

SEQ ID NO: 79790 - protein, 40 aa, Artificial Sequence; identical to SEQ ID NO: 8474
  GFR-binding peptide
  MOD_RES (3), (4), (38), (40): Xaa is C or S
  MOD_RES (18), (19), (20), (21), (22): Xaa is A or G
  MOD_RES (23), (24), (25), (26): Xaa is A or G or is absent

SEQ ID NO: 79791 - protein, 38 aa, Artificial Sequence; identical to SEQ ID NO: 14066
  GFR-binding peptide
  MOD_RES (1), (35), (37): Xaa is C or S
  MOD_RES (15), (16), (17), (18), (19): Xaa is A or G
  MOD_RES (20), (21), (22), (23): Xaa is A or G or is absent

SEQ ID NO: 79792 - protein, 39 aa, Artificial Sequence; identical to SEQ ID NO: 8476
  GFR-binding peptide
  MOD_RES (5), (6), (37), (39): Xaa is C or S

SEQ ID NO: 79793 - protein, 36 aa, Artificial Sequence
  GFR-binding peptide
  MOD_RES (2), (3), (35): Xaa is C or S
SXXVPARLSAISILYLDAANNVVLKNYQDMVVEAXG

SEQ ID NO: 79794 - protein, 38 aa, Artificial Sequence; identical to SEQ ID NO: 6713
  GFR-binding peptide
  MOD_RES (2), (3), (35), (37): Xaa is C or S

SEQ ID NO: 79795 - protein, 37 aa, Artificial Sequence; identical to SEQ ID NO: 15783
  GFR-binding peptide
  MOD_RES (3), (4), (36): Xaa is C or S

SEQ ID NO: 79796 - protein, 37 aa, Artificial Sequence; identical to SEQ ID NO: 57834
  GFR-binding peptide
  MOD_RES (2), (3), (36): Xaa is C or S
  MOD_RES (17), (18), (19), (20), (21): Xaa is A or G
  MOD_RES (22), (23), (24), (25): Xaa is A or G or is absent

SEQ ID NO: 79797 - protein, 40 aa, Artificial Sequence; identical to SEQ ID NO: 8480
  GFR-binding peptide
  MOD_RES (5), (6), (37), (39): Xaa is C or S

SEQ ID NO: 79798 - protein, 35 aa, Artificial Sequence; identical to SEQ ID NO: 57835
  GFR-binding peptide
  MOD_RES (34), (34): Xaa is C or S
  MOD_RES (14), (15), (16), (17), (18): Xaa is A or G
  MOD_RES (19), (20), (21), (22): Xaa is A or G or is absent

SEQ ID NO: 79799 - protein, 34 aa, Artificial Sequence; identical to SEQ ID NO: 67370
  GFR-binding peptide
  MOD_RES (1), (2): Xaa is C or S
  MOD_RES (16), (17), (18), (19), (20): Xaa is A or G
  MOD_RES (21), (22), (23), (24): Xaa is A or G or is absent

SEQ ID NO: 79800 - protein, 33 aa, Artificial Sequence; identical to SEQ ID NO: 57838
  GFR-binding peptide
  MOD_RES (1), (1): Xaa is C or S
  MOD_RES (15), (16), (17), (18), (19): Xaa is A or G
  MOD_RES (20), (21), (22), (23): Xaa is A or G or is absent

SEQ ID NO: 79801 - protein, 38 aa, Artificial Sequence
  GFR-binding peptide
  MOD_RES (3), (4), (38): Xaa is C or S
  MOD_RES (18), (19), (20), (21), (22): Xaa is A or G
  MOD_RES (23), (24), (25), (26): Xaa is A or G or is absent
EPXXVPEKMSAISILYLXXXXXXXXXLKNYQNMTVESX

SEQ ID NO: 79802 - protein, 35 aa, Artificial Sequence; identical to SEQ ID NO: 6719
  GFR-binding peptide
  MOD_RES (1), (32), (34): Xaa is C or S

SEQ ID NO: 79803 - protein, 44 aa, Artificial Sequence; identical to SEQ ID NO: 6720
  GFR-binding peptide
  MOD_RES (7), (41), (43): Xaa is C or S
  MOD_RES (21), (22), (23), (24), (25): Xaa is A or G
  MOD_RES (26), (27), (28), (29): Xaa is A or G or is absent

SEQ ID NO: 79804 - protein, 39 aa, Artificial Sequence; identical to SEQ ID NO: 14073
  GFR-binding peptide
  MOD_RES (3), (4), (38): Xaa is C or S
  MOD_RES (18), (19), (20), (21), (22): Xaa is A or G
  MOD_RES (23), (24), (25), (26): Xaa is A or G or is absent

SEQ ID NO: 79805 - protein, 37 aa, Artificial Sequence; identical to SEQ ID NO: 6722
  GFR-binding peptide
  MOD_RES (35), (37): Xaa is C or S
  MOD_RES (14), (15), (16), (17), (18): Xaa is A or G
  MOD_RES (19), (20), (21), (22): Xaa is A or G or is absent

SEQ ID NO: 79806 - protein, 32 aa, Artificial Sequence
  GFR-binding peptide
  MOD_RES (14), (15), (16), (17), (18): Xaa is A or G
  MOD_RES (19), (20), (21), (22): Xaa is A or G or is absent
APVKTSAISMLYLXXXXXXXXXLKNYQMIVEE

SEQ ID NO: 79807 - protein, 38 aa, Artificial Sequence
  GFR-binding peptide
  MOD_RES (3), (4), (36), (38): Xaa is C or S
KAXXVPTKLSAISILYLDKGVVTYLKNYQGMAVSEXGX

SEQ ID NO: 79808 - protein, 35 aa, Artificial Sequence; identical to SEQ ID NO: 8490
  GFR-binding peptide
  MOD_RES (1), (35): Xaa is C or S
  MOD_RES (15), (16), (17), (18), (19): Xaa is A or G
  MOD_RES (20), (21), (22), (23): Xaa is A or G or is absent

SEQ ID NO: 79809 - protein, 34 aa, Artificial Sequence; identical to SEQ ID NO: 15792
  GFR-binding peptide
  MOD_RES (3), (4): Xaa is C or S

SEQ ID NO: 79810 - protein, 39 aa, Artificial Sequence; identical to SEQ ID NO: 6726
  GFR-binding peptide
  MOD_RES (5), (6), (39): Xaa is C or S
  MOD_RES (20), (21), (22), (23), (24): Xaa is A or G
  MOD_RES (25), (26), (27), (28): Xaa is A or G or is absent

SEQ ID NO: 79811 - protein, 35 aa, Artificial Sequence; identical to SEQ ID NO: 6727
  GFR-binding peptide
  MOD_RES (1), (2), (35): Xaa is C or S
  MOD_RES (16), (17), (18), (19), (20): Xaa is A or G
  MOD_RES (21), (22), (23), (24): Xaa is A or G or is absent

SEQ ID NO: 79812 - protein, 37 aa, Artificial Sequence
  GFR-binding peptide
  MOD_RES (2), (3), (37): Xaa is C or S
  MOD_RES (17), (18), (19), (20), (21): Xaa is A or G
  MOD_RES (22), (23), (24), (25): Xaa is A or G or is absent
PXXVPEKMSAISILYLXXXXXXXXXLKNYQNMTVESX

SEQ ID NO: 79813 - protein, 38 aa, Artificial Sequence; identical to SEQ ID NO: 8496
  GFR-binding peptide
  MOD_RES (1), (35), (37): Xaa is C or S
  MOD_RES (15), (16), (17), (18), (19): Xaa is A or G
  MOD_RES (20), (21), (22), (23): Xaa is A or G or is absent

SEQ ID NO: 79814 - protein, 38 aa, Artificial Sequence; identical to SEQ ID NO: 8497
  GFR-binding peptide
  MOD_RES (5), (6), (37): Xaa is C or S

SEQ ID NO: 79815 - protein, 39 aa, Artificial Sequence; identical to SEQ ID NO: 27895
  GFR-binding peptide
  MOD_RES (6), (7), (39): Xaa is C or S

SEQ ID NO: 79816 - protein, 36 aa, Artificial Sequence; identical to SEQ ID NO: 8500
  GFR-binding peptide
  MOD_RES (5), (6): Xaa is C or S

SEQ ID NO: 79817 - protein, 34 aa, Artificial Sequence; identical to SEQ ID NO: 6732
  GFR-binding peptide
  MOD_RES (2), (3): Xaa is C or S

SEQ ID NO: 79818 - protein, 42 aa, Artificial Sequence; identical to SEQ ID NO: 27897
  GFR-binding peptide
  MOD_RES (4), (5), (39), (41): Xaa is C or S
  MOD_RES (19), (20), (21), (22), (23): Xaa is A or G
  MOD_RES (24), (25), (26), (27): Xaa is A or G or is absent

SEQ ID NO: 79819 - protein, 33 aa, Artificial Sequence; identical to SEQ ID NO: 6733
  GFR-binding peptide
  MOD_RES (1), (2): Xaa is C or S

SEQ ID NO: 79820 - protein, 34 aa, Artificial Sequence; identical to SEQ ID NO: 8505
  GFR-binding peptide
  MOD_RES (3), (4): Xaa is C or S

SEQ ID NO: 79821 - protein, 36 aa, Artificial Sequence
  GFR-binding peptide
  MOD_RES (1), (2), (34), (36): Xaa is C or S
XXVPEKMSAISILYLDENKNVVLKNYQNMTVESXAX

SEQ ID NO: 79822 - protein, 37 aa, Artificial Sequence; identical to SEQ ID NO: 6735
  GFR-binding peptide
  MOD_RES (1), (2), (36): Xaa is C or S
  MOD_RES (16), (17), (18), (19), (20): Xaa is A or G
  MOD_RES (21), (22), (23), (24): Xaa is A or G or is absent

SEQ ID NO: 79823 - protein, 33 aa, Artificial Sequence; identical to SEQ ID NO: 6736
  GFR-binding peptide
  MOD_RES (1), (33): Xaa is C or S

SEQ ID NO: 79824 - protein, 40 aa, Artificial Sequence
  GFR-binding peptide
  MOD_RES (5), (6), (38), (40): Xaa is C or S
ASKAXXVPTKLSAISILYLDKGVVTYLKNYQGMAVSEXGX

SEQ ID NO: 79825 - protein, 39 aa, Artificial Sequence; identical to SEQ ID NO: 29828
  GFR-binding peptide
  MOD_RES (3), (4), (38): Xaa is C or S
  MOD_RES (18), (19), (20), (21), (22): Xaa is A or G
  MOD_RES (23), (24), (25), (26): Xaa is A or G or is absent

SEQ ID NO: 79826 - protein, 38 aa, Artificial Sequence
  GFR-binding peptide
  MOD_RES (3), (4), (38): Xaa is C or S
  MOD_RES (18), (19), (20), (21), (22): Xaa is A or G
  MOD_RES (23), (24), (25), (26): Xaa is A or G or is absent
KAXXVPTKLSAISILYLXXXXXXXXXLKNYQGMAVSEX

SEQ ID NO: 79827 - protein, 37 aa, Artificial Sequence; identical to SEQ ID NO: 8513
  GFR-binding peptide
  MOD_RES (2), (3), (35), (37): Xaa is C or S

SEQ ID NO: 79828 - protein, 36 aa, Artificial Sequence; identical to SEQ ID NO: 14088
  GFR-binding peptide
  MOD_RES (3), (4), (36): Xaa is C or S

SEQ ID NO: 79829 - protein, 38 aa, Artificial Sequence; identical to SEQ ID NO: 14090
  GFR-binding peptide
  MOD_RES (5), (6): Xaa is C or S
  MOD_RES (20), (21), (22), (23), (24): Xaa is A or G
  MOD_RES (25), (26), (27), (28): Xaa is A or G or is absent

SEQ ID NO: 79830 - protein, 37 aa, Artificial Sequence
  GFR-binding peptide
  MOD_RES (4), (5): Xaa is C or S
  MOD_RES (19), (20), (21), (22), (23): Xaa is A or G
  MOD_RES (24), (25), (26), (27): Xaa is A or G or is absent
PEPXXVPEKMSAISILYLXXXXXXXXXLKNYQNMTVE

SEQ ID NO: 79831 - protein, 39 aa, Artificial Sequence
  GFR-binding peptide
  MOD_RES (6), (7), (39): Xaa is C or S
GSAGPXXTPTKMSAISMLYLNDKQQIILKNYQGMVVDRX

SEQ ID NO: 79832 - protein, 36 aa, Artificial Sequence; identical to SEQ ID NO: 8517
  GFR-binding peptide
  MOD_RES (3), (4): Xaa is C or S
  MOD_RES (18), (19), (20), (21), (22): Xaa is A or G
  MOD_RES (23), (24), (25), (26): Xaa is A or G or is absent

SEQ ID NO: 79833 - protein, 32 aa, Artificial Sequence; identical to SEQ ID NO: 6745
  GFR-binding peptide
  MOD_RES (14), (15), (16), (17), (18): Xaa is A or G
  MOD_RES (19), (20), (21), (22): Xaa is A or G or is absent

SEQ ID NO: 79834 - protein, 36 aa, Artificial Sequence
  GFR-binding peptide
  MOD_RES (3), (4): Xaa is C or S
  MOD_RES (18), (19), (20), (21), (22): Xaa is A or G
  MOD_RES (23), (24), (25), (26): Xaa is A or G or is absent
GPXXTPTKMSAISMLYLXXXXXXXXXLKNYQGMVVD

SEQ ID NO: 79835 - protein, 39 aa, Artificial Sequence; identical to SEQ ID NO: 6746
  GFR-binding peptide
  MOD_RES (5), (6), (39): Xaa is C or S
  MOD_RES (20), (21), (22), (23), (24): Xaa is A or G
  MOD_RES (25), (26), (27), (28): Xaa is A or G or is absent

SEQ ID NO: 79836 - protein, 37 aa, Artificial Sequence
  GFR-binding peptide
  MOD_RES (5), (6): Xaa is C or S
SAGPXXTPTKMSAISMLYLNDKQQIILKNYQGMVVDR

SEQ ID NO: 79837 - protein, 36 aa, Artificial Sequence
  GFR-binding peptide
  MOD_RES (2), (3): Xaa is C or S
  MOD_RES (17), (18), (19), (20), (21): Xaa is A or G
  MOD_RES (22), (23), (24), (25): Xaa is A or G or is absent
SXXVPARLSAISILYLXXXXXXXXXLKNYQDMVVEA

SEQ ID NO: 79838 - protein, 37 aa, Artificial Sequence; identical to SEQ ID NO: 8518
  GFR-binding peptide
  MOD_RES (4), (5): Xaa is C or S
  MOD_RES (19), (20), (21), (22), (23): Xaa is A or G
  MOD_RES (24), (25), (26), (27): Xaa is A or G or is absent

SEQ ID NO: 79839 - protein, 40 aa, Artificial Sequence; identical to SEQ ID NO: 8523
  GFR-binding peptide
  MOD_RES (4), (5), (40): Xaa is C or S
  MOD_RES (19), (20), (21), (22), (23): Xaa is A or G
  MOD_RES (24), (25), (26), (27): Xaa is A or G or is absent

SEQ ID NO: 79840 - protein, 37 aa, Artificial Sequence; identical to SEQ ID NO: 8524
  GFR-binding peptide
  MOD_RES (5), (6): Xaa is C or S

SEQ ID NO: 79841 - protein, 39 aa, Artificial Sequence; identical to SEQ ID NO: 8525
  GFR-binding peptide
  MOD_RES (4), (5), (38): Xaa is C or S

SEQ ID NO: 79842 - protein, 33 aa, Artificial Sequence; identical to SEQ ID NO: 8526
  GFR-binding peptide
  MOD_RES (1), (2), (33): Xaa is C or S

SEQ ID NO: 79843 - protein, 33 aa, Artificial Sequence
  GFR-binding peptide
  MOD_RES (1), (2): Xaa is C or S
XXVPTKLSAISILYLDKGVVTYLKNYQGMAVSE

SEQ ID NO: 79844 - protein, 37 aa, Artificial Sequence; identical to SEQ ID NO: 6748
  GFR-binding peptide
  MOD_RES (2), (3), (36): Xaa is C or S
  MOD_RES (17), (18), (19), (20), (21): Xaa is A or G
  MOD_RES (22), (23), (24), (25): Xaa is A or G or is absent

SEQ ID NO: 79845 - protein, 42 aa, Artificial Sequence; identical to SEQ ID NO: 15824
  GFR-binding peptide
  MOD_RES (6), (7), (39), (41): Xaa is C or S

SEQ ID NO: 79846 - protein, 33 aa, Artificial Sequence; identical to SEQ ID NO: 8529
  GFR-binding peptide
  MOD_RES (1), (32): Xaa is C or S

SEQ ID NO: 79847 - protein, 35 aa, Artificial Sequence; identical to SEQ ID NO: 15826
  GFR-binding peptide
  MOD_RES (1), (35): Xaa is C or S
  MOD_RES (15), (16), (17), (18), (19): Xaa is A or G
  MOD_RES (20), (21), (22), (23): Xaa is A or G or is absent

SEQ ID NO: 79848 - protein, 38 aa, Artificial Sequence; identical to SEQ ID NO: 15828
  GFR-binding peptide
  MOD_RES (2), (3), (35), (37): Xaa is C or S

SEQ ID NO: 79849 - protein, 36 aa, Artificial Sequence
  GFR-binding peptide
  MOD_RES (2), (3), (34), (36): Xaa is C or S
TXXAPVKTSAISMLYLDNGRVLLLKNYQMIVEEXGX

SEQ ID NO: 79850 - protein, 37 aa, Artificial Sequence; identical to SEQ ID NO: 6750
  GFR-binding peptide
  MOD_RES (2), (3), (34), (36): Xaa is C or S

SEQ ID NO: 79851 - protein, 36 aa, Artificial Sequence; identical to SEQ ID NO: 6751
  GFR-binding peptide
  MOD_RES (1), (2), (36): Xaa is C or S
  MOD_RES (16), (17), (18), (19), (20): Xaa is A or G
  MOD_RES (21), (22), (23), (24): Xaa is A or G or is absent

SEQ ID NO: 79852 - protein, 41 aa, Artificial Sequence; identical to SEQ ID NO: 8533
  GFR-binding peptide
  MOD_RES (5), (6), (38), (40): Xaa is C or S

SEQ ID NO: 79853 - protein, 38 aa, Artificial Sequence; identical to SEQ ID NO: 8534
  GFR-binding peptide
  MOD_RES (1), (2), (35), (37): Xaa is C or S
  MOD_RES (16), (17), (18), (19), (20): Xaa is A or G
  MOD_RES (21), (22), (23), (24): Xaa is A or G or is absent

SEQ ID NO: 79854 - protein, 39 aa, Artificial Sequence; identical to SEQ ID NO: 8535
  GFR-binding peptide
  MOD_RES (6), (7), (39): Xaa is C or S

SEQ ID NO: 79855 - protein, 36 aa, Artificial Sequence; identical to SEQ ID NO: 8536
  GFR-binding peptide
  MOD_RES (5), (6): Xaa is C or S

SEQ ID NO: 79856 - protein, 40 aa, Artificial Sequence; identical to SEQ ID NO: 69165
  GFR-binding peptide
  MOD_RES (3), (4), (38), (40): Xaa is C or S
  MOD_RES (18), (19), (20), (21), (22): Xaa is A or G
  MOD_RES (23), (24), (25), (26): Xaa is A or G or is absent

SEQ ID NO: 79857 - protein, 38 aa, Artificial Sequence; identical to SEQ ID NO: 14102
  GFR-binding peptide
  MOD_RES (6), (7): Xaa is C or S

SEQ ID NO: 79858 - protein, 43 aa, Artificial Sequence
  GFR-binding peptide
  MOD_RES (5), (6), (40), (42): Xaa is C or S
  MOD_RES (20), (21), (22), (23), (24): Xaa is A or G
  MOD_RES (25), (26), (27), (28): Xaa is A or G or is absent
IPEPXXVPEKMSAISILYLXXXXXXXXXLKNYQNMTVESXAXR

SEQ ID NO: 79859 - protein, 37 aa, Artificial Sequence; identical to SEQ ID NO: 8538
  GFR-binding peptide
  MOD_RES (6), (7): Xaa is C or S

SEQ ID NO: 79860 - protein, 42 aa, Artificial Sequence; identical to SEQ ID NO: 6753
  GFR-binding peptide
  MOD_RES (6), (7), (41): Xaa is C or S
  MOD_RES (21), (22), (23), (24), (25): Xaa is A or G
  MOD_RES (26), (27), (28), (29): Xaa is A or G or is absent

SEQ ID NO: 79861 - protein, 37 aa, Artificial Sequence; identical to SEQ ID NO: 8541
  GFR-binding peptide
  MOD_RES (4), (5): Xaa is C or S
  MOD_RES (19), (20), (21), (22), (23): Xaa is A or G
  MOD_RES (24), (25), (26), (27): Xaa is A or G or is absent

SEQ ID NO: 79862 - protein, 38 aa, Artificial Sequence; identical to SEQ ID NO: 57874
  GFR-binding peptide
  MOD_RES (5), (6): Xaa is C or S
  MOD_RES (20), (21), (22), (23), (24): Xaa is A or G
  MOD_RES (25), (26), (27), (28): Xaa is A or G or is absent

SEQ ID NO: 79863 - protein, 33 aa, Artificial Sequence; identical to SEQ ID NO: 15839
  GFR-binding peptide
  MOD_RES (1), (1): Xaa is C or S
  MOD_RES (15), (16), (17), (18), (19): Xaa is A or G
  MOD_RES (20), (21), (22), (23): Xaa is A or G or is absent

SEQ ID NO: 79864 - protein, 34 aa, Artificial Sequence; identical to SEQ ID NO: 6756
  GFR-binding peptide
  MOD_RES (1), (2): Xaa is C or S
  MOD_RES (16), (17), (18), (19), (20): Xaa is A or G
  MOD_RES (21), (22), (23), (24): Xaa is A or G or is absent

SEQ ID NO: 79865 - protein, 37 aa, Artificial Sequence; identical to SEQ ID NO: 8545
  GFR-binding peptide
  MOD_RES (2), (3), (37): Xaa is C or S
  MOD_RES (17), (18), (19), (20), (21): Xaa is A or G
  MOD_RES (22), (23), (24), (25): Xaa is A or G or is absent

SEQ ID NO: 79866 - protein, 39 aa, Artificial Sequence; identical to SEQ ID NO: 67432
  GFR-binding peptide
  MOD_RES (3), (4), (36), (38): Xaa is C or S

SEQ ID NO: 79867 - protein, 32 aa, Artificial Sequence; identical to SEQ ID NO: 6757
  GFR-binding peptide
  MOD_RES (1), (1): Xaa is C or S

SEQ ID NO: 79868 - protein, 39 aa, Artificial Sequence; identical to SEQ ID NO: 8546
  GFR-binding peptide
  MOD_RES (4), (5), (36), (38): Xaa is C or S

SEQ ID NO: 79869 - protein, 36 aa, Artificial Sequence; identical to SEQ ID NO: 29861
  GFR-binding peptide
  MOD_RES (34), (36): Xaa is C or S
  MOD_RES (14), (15), (16), (17), (18): Xaa is A or G
  MOD_RES (19), (20), (21), (22): Xaa is A or G or is absent

SEQ ID NO: 79870 - protein, 39 aa, Artificial Sequence; identical to SEQ ID NO: 15845
  GFR-binding peptide
  MOD_RES (3), (4), (36), (38): Xaa is C or S

SEQ ID NO: 79871 - protein, 32 aa, Artificial Sequence; identical to SEQ ID NO: 8549
  GFR-binding peptide
  MOD_RES (1), (1): Xaa is C or S

SEQ ID NO: 79872 - protein, 39 aa, Artificial Sequence; identical to SEQ ID NO: 8550
  GFR-binding peptide
  MOD_RES (4), (5): Xaa is C or S
  MOD_RES (19), (20), (21), (22), (23): Xaa is A or G
  MOD_RES (24), (25), (26), (27): Xaa is A or G or is absent

SEQ ID NO: 79873 - protein, 35 aa, Artificial Sequence; identical to SEQ ID NO: 6763
  GFR-binding peptide
  MOD_RES (4), (5): Xaa is C or S

SEQ ID NO: 79874 - protein, 39 aa, Artificial Sequence; identical to SEQ ID NO: 6764
  GFR-binding peptide
  MOD_RES (6), (7): Xaa is C or S
  MOD_RES (21), (22), (23), (24), (25): Xaa is A or G
  MOD_RES (26), (27), (28), (29): Xaa is A or G or is absent

SEQ ID NO: 79875 - protein, 37 aa, Artificial Sequence; identical to SEQ ID NO: 8551
  GFR-binding peptide
  MOD_RES (2), (3), (35), (37): Xaa is C or S

SEQ ID NO: 79876 - protein, 38 aa, Artificial Sequence; identical to SEQ ID NO: 29864
  GFR-binding peptide
  MOD_RES (5), (6), (38): Xaa is C or S

SEQ ID NO: 79877 - protein, 36 aa, Artificial Sequence; identical to SEQ ID NO: 14116
  GFR-binding peptide
  MOD_RES (5), (6): Xaa is C or S

SEQ ID NO: 79878 - protein, 38 aa, Artificial Sequence; identical to SEQ ID NO: 8553
  GFR-binding peptide
  MOD_RES (4), (5), (37): Xaa is C or S

SEQ ID NO: 79879 - protein, 37 aa, Artificial Sequence; identical to SEQ ID NO: 8554
  GFR-binding peptide
  MOD_RES (4), (5): Xaa is C or S
  MOD_RES (19), (20), (21), (22), (23): Xaa is A or G
  MOD_RES (24), (25), (26), (27): Xaa is A or G or is absent

SEQ ID NO: 79880 - protein, 42 aa, Artificial Sequence; identical to SEQ ID NO: 6765
  GFR-binding peptide
  MOD_RES (5), (6), (39), (41): Xaa is C or S
  MOD_RES (20), (21), (22), (23), (24): Xaa is A or G
  MOD_RES (25), (26), (27), (28): Xaa is A or G or is absent

SEQ ID NO: 79881 - protein, 38 aa, Artificial Sequence; identical to SEQ ID NO: 6766
  GFR-binding peptide
  MOD_RES (1), (2), (36), (38): Xaa is C or S
  MOD_RES (16), (17), (18), (19), (20): Xaa is A or G
  MOD_RES (21), (22), (23), (24): Xaa is A or G or is absent

SEQ ID NO: 79882 - protein, 37 aa, Artificial Sequence; identical to SEQ ID NO: 57883
  GFR-binding peptide
  MOD_RES (3), (4), (35), (37): Xaa is C or S

SEQ ID NO: 79883 - protein, 41 aa, Artificial Sequence; identical to SEQ ID NO: 8556
  GFR-binding peptide
  MOD_RES (6), (7), (41): Xaa is C or S
  MOD_RES (21), (22), (23), (24), (25): Xaa is A or G
  MOD_RES (26), (27), (28), (29): Xaa is A or G or is absent

SEQ ID NO: 79884 - protein, 35 aa, Artificial Sequence; identical to SEQ ID NO: 14123
  GFR-binding peptide
  MOD_RES (34), (34): Xaa is C or S
  MOD_RES (14), (15), (16), (17), (18): Xaa is A or G
  MOD_RES (19), (20), (21), (22): Xaa is A or G or is absent

SEQ ID NO: 79885 - protein, 41 aa, Artificial Sequence; identical to SEQ ID NO: 8557
  GFR-binding peptide
  MOD_RES (3), (4), (38), (40): Xaa is C or S
  MOD_RES (18), (19), (20), (21), (22): Xaa is A or G
  MOD_RES (23), (24), (25), (26): Xaa is A or G or is absent

SEQ ID NO: 79886 - protein, 40 aa, Artificial Sequence; identical to SEQ ID NO: 6768
  GFR-binding peptide
  MOD_RES (4), (5), (38), (40): Xaa is C or S

SEQ ID NO: 79887 - protein, 33 aa, Artificial Sequence; identical to SEQ ID NO: 6769
  GFR-binding peptide
  MOD_RES (1), (1): Xaa is C or S

SEQ ID NO: 79888 - protein, 32 aa, Artificial Sequence; identical to SEQ ID NO: 8558
  GFR-binding peptide
  MOD_RES (1), (1): Xaa is C or S

SEQ ID NO: 79889 - protein, 35 aa, Artificial Sequence; identical to SEQ ID NO: 6770
  GFR-binding peptide
  MOD_RES (2), (3): Xaa is C or S
  MOD_RES (17), (18), (19), (20), (21): Xaa is A or G
  MOD_RES (22), (23), (24), (25): Xaa is A or G or is absent

SEQ ID NO: 79890 - protein, 40 aa, Artificial Sequence; identical to SEQ ID NO: 57889
  GFR-binding peptide
  MOD_RES (3), (4), (37), (39): Xaa is C or S
  MOD_RES (18), (19), (20), (21), (22): Xaa is A or G
  MOD_RES (23), (24), (25), (26): Xaa is A or G or is absent
